United States Patent Application Publication US 2025/0333767 A1 - sequence listing, part 3

SEQ ID NO: 24575 - RNA, 89 nt, synthetic construct
  misc_feature 1..89: note = engineered ribonucleic acid scaffold (ERS) sequence
  source 1..89: mol_type = other RNA
acaggtccttctatctgattactctgaggaccttcaccaggcactatgtgctattgggtaaagctccctcttcggagggagcatcagag

SEQ ID NO: 24576 - RNA, 89 nt, synthetic construct
  misc_feature 1..89: note = engineered ribonucleic acid scaffold (ERS) sequence
  source 1..89: mol_type = other RNA
accagcaattctatctgattactctgattgctgtcaccaggcactatgtgctattgggtaaagctccctcttcggagggagcatcagag

SEQ ID NO: 24577 - RNA, 89 nt, synthetic construct
  misc_feature 1..89: note = engineered ribonucleic acid scaffold (ERS) sequence
  source 1..89: mol_type = other RNA
accgagacttctatctgattactctgaggctcgtcaccaggcactatgtgctattgggtaaagctccctcttcggagggagcatcagag

SEQ ID NO: 24578 - RNA, 89 nt, synthetic construct
  misc_feature 1..89: note = engineered ribonucleic acid scaffold (ERS) sequence
  source 1..89: mol_type = other RNA
acctgtagttctatctgattactctgactacagtcaccaggcactatgtgctattgggtaaagctccctcttcggagggagcatcagag

SEQ ID NO: 24579 - RNA, 89 nt, synthetic construct
  misc_feature 1..89: note = engineered ribonucleic acid scaffold (ERS) sequence
  source 1..89: mol_type = other RNA
acgagcacttctatctgattactctgagggctctcaccaggcactatgtgctattgggtaaagctccctcttcggagggagcatcagag

SEQ ID NO: 24580 - RNA, 89 nt, synthetic construct
  misc_feature 1..89: note = engineered ribonucleic acid scaffold (ERS) sequence
  source 1..89: mol_type = other RNA
acgaggtgttctatctgattactctgacacctctcaccaggcactatgtgctattgggtaaagctccctcttcggagggagcatcagag

SEQ ID NO: 24581 - RNA, 89 nt, synthetic construct
  misc_feature 1..89: note = engineered ribonucleic acid scaffold (ERS) sequence
  source 1..89: mol_type = other RNA
acgggactttctatctgattactctgaagtccctcaccaggcactatgtgctattgggtaaagctccctcttcggagggagcatcagag

SEQ ID NO: 24582 - RNA, 89 nt, synthetic construct
  misc_feature 1..89: note = engineered ribonucleic acid scaffold (ERS) sequence
  source 1..89: mol_type = other RNA
acgggcaattctatctgattactctgattgccctcaccaggcactatgtgctattgggtaaagctccctcttcggagggagcatcagag

SEQ ID NO: 24583 - RNA, 89 nt, synthetic construct
  misc_feature 1..89: note = engineered ribonucleic acid scaffold (ERS) sequence
  source 1..89: mol_type = other RNA
actgtgcgttctatctgattactctgacgcacatcaccaggcactatgtgctattgggtaaagctccctcttcggagggagcatcagag

SEQ ID NO: 24584 - RNA, 88 nt, synthetic construct
  misc_feature 1..88: note = engineered ribonucleic acid scaffold (ERS) sequence
  source 1..88: mol_type = other RNA
acacacggttctatctgattactctgaccgtgttcaccagccactatgtggtatgggtaaagctccctcttcggagggagcatcagag

SEQ ID NO: 24585 - RNA, 88 nt, synthetic construct
  misc_feature 1..88: note = engineered ribonucleic acid scaffold (ERS) sequence
  source 1..88: mol_type = other RNA
acactggtttctatctgattactctgaaccagttcaccagccactatgtggtatgggtaaagctccctcttcggagggagcatcagag

SEQ ID NO: 24586 - RNA, 88 nt, synthetic construct
  misc_feature 1..88: note = engineered ribonucleic acid scaffold (ERS) sequence
  source 1..88: mol_type = other RNA
acaggccgttctatctgattactctgacggccttcaccagccactatgtggtatgggtaaagctccctcttcggagggagcatcagag

SEQ ID NO: 24587 - RNA, 88 nt, synthetic construct
  misc_feature 1..88: note = engineered ribonucleic acid scaffold (ERS) sequence
  source 1..88: mol_type = other RNA
acaggtccttctatctgattactctgaggaccttcaccagccactatgtggtatgggtaaagctccctcttcggagggagcatcagag

SEQ ID NO: 24588 - RNA, 88 nt, synthetic construct
  misc_feature 1..88: note = engineered ribonucleic acid scaffold (ERS) sequence
  source 1..88: mol_type = other RNA
accagcaattctatctgattactctgattgctgtcaccagccactatgtggtatgggtaaagctccctcttcggagggagcatcagag

SEQ ID NO: 24589 - RNA, 88 nt, synthetic construct
  misc_feature 1..88: note = engineered ribonucleic acid scaffold (ERS) sequence
  source 1..88: mol_type = other RNA
accgagacttctatctgattactctgaggctcgtcaccagccactatgtggtatgggtaaagctccctcttcggagggagcatcagag

SEQ ID NO: 24590 - RNA, 88 nt, synthetic construct
  misc_feature 1..88: note = engineered ribonucleic acid scaffold (ERS) sequence
  source 1..88: mol_type = other RNA
acctgtagttctatctgattactctgactacagtcaccagccactatgtggtatgggtaaagctccctcttcggagggagcatcagag

SEQ ID NO: 24591 - RNA, 88 nt, synthetic construct
  misc_feature 1..88: note = engineered ribonucleic acid scaffold (ERS) sequence
  source 1..88: mol_type = other RNA
acgagcacttctatctgattactctgagggctctcaccagccactatgtggtatgggtaaagctccctcttcggagggagcatcagag

SEQ ID NO: 24592 - RNA, 88 nt, synthetic construct
  misc_feature 1..88: note = engineered ribonucleic acid scaffold (ERS) sequence
  source 1..88: mol_type = other RNA
acgaggtgttctatctgattactctgacacctctcaccagccactatgtggtatgggtaaagctccctcttcggagggagcatcagag

SEQ ID NO: 24593 - RNA, 88 nt, synthetic construct
  misc_feature 1..88: note = engineered ribonucleic acid scaffold (ERS) sequence
  source 1..88: mol_type = other RNA
acgggactttctatctgattactctgaagtccctcaccagccactatgtggtatgggtaaagctccctcttcggagggagcatcagag

SEQ ID NO: 24594 - RNA, 88 nt, synthetic construct
  misc_feature 1..88: note = engineered ribonucleic acid scaffold (ERS) sequence
  source 1..88: mol_type = other RNA
acgggcaattctatctgattactctgattgccctcaccagccactatgtggtatgggtaaagctccctcttcggagggagcatcagag

SEQ ID NO: 24595 - RNA, 88 nt, synthetic construct
  misc_feature 1..88: note = engineered ribonucleic acid scaffold (ERS) sequence
  source 1..88: mol_type = other RNA
actgtgcgttctatctgattactctgacgcacatcaccagccactatgtggtatgggtaaagctccctcttcggagggagcatcagag

SEQ ID NO: 24596 - RNA, 88 nt, synthetic construct
  misc_feature 1..88: note = engineered ribonucleic acid scaffold (ERS) sequence
  source 1..88: mol_type = other RNA
acacacggttctatctgattactctgaccgtgttcaccagctactatgtagtatgggtaaagctccctcttcggagggagcatcagag

SEQ ID NO: 24597 - RNA, 88 nt, synthetic construct
  misc_feature 1..88: note = engineered ribonucleic acid scaffold (ERS) sequence
  source 1..88: mol_type = other RNA
acactggtttctatctgattactctgaaccagttcaccagctactatgtagtatgggtaaagctccctcttcggagggagcatcagag

SEQ ID NO: 24598 - RNA, 88 nt, synthetic construct
  misc_feature 1..88: note = engineered ribonucleic acid scaffold (ERS) sequence
  source 1..88: mol_type = other RNA
acaggccgttctatctgattactctgacggccttcaccagctactatgtagtatgggtaaagctccctcttcggagggagcatcagag

SEQ ID NO: 24599 - RNA, 88 nt, synthetic construct
  misc_feature 1..88: note = engineered ribonucleic acid scaffold (ERS) sequence
  source 1..88: mol_type = other RNA
acaggtccttctatctgattactctgaggaccttcaccagctactatgtagtatgggtaaagctccctcttcggagggagcatcagag

SEQ ID NO: 24600 - RNA, 88 nt, synthetic construct
  misc_feature 1..88: note = engineered ribonucleic acid scaffold (ERS) sequence
  source 1..88: mol_type = other RNA
accagcaattctatctgattactctgattgctgtcaccagctactatgtagtatgggtaaagctccctcttcggagggagcatcagag

SEQ ID NO: 24601 - RNA, 88 nt, synthetic construct
  misc_feature 1..88: note = engineered ribonucleic acid scaffold (ERS) sequence
  source 1..88: mol_type = other RNA
accgagacttctatctgattactctgaggctcgtcaccagctactatgtagtatgggtaaagctccctcttcggagggagcatcagag

SEQ ID NO: 24602 - RNA, 88 nt, synthetic construct
  misc_feature 1..88: note = engineered ribonucleic acid scaffold (ERS) sequence
  source 1..88: mol_type = other RNA
acctgtagttctatctgattactctgactacagtcaccagctactatgtagtatgggtaaagctccctcttcggagggagcatcagag

SEQ ID NO: 24603 - RNA, 88 nt, synthetic construct
  misc_feature 1..88: note = engineered ribonucleic acid scaffold (ERS) sequence
  source 1..88: mol_type = other RNA
acgagcacttctatctgattactctgagggctctcaccagctactatgtagtatgggtaaagctccctcttcggagggagcatcagag

SEQ ID NO: 24604 - RNA, 88 nt, synthetic construct
  misc_feature 1..88: note = engineered ribonucleic acid scaffold (ERS) sequence
  source 1..88: mol_type = other RNA
acgaggtgttctatctgattactctgacacctctcaccagctactatgtagtatgggtaaagctccctcttcggagggagcatcagag

SEQ ID NO: 24605 - RNA, 88 nt, synthetic construct
  misc_feature 1..88: note = engineered ribonucleic acid scaffold (ERS) sequence
  source 1..88: mol_type = other RNA
acgggactttctatctgattactctgaagtccctcaccagctactatgtagtatgggtaaagctccctcttcggagggagcatcagag

SEQ ID NO: 24606 - RNA, 88 nt, synthetic construct
  misc_feature 1..88: note = engineered ribonucleic acid scaffold (ERS) sequence
  source 1..88: mol_type = other RNA
acgggcaattctatctgattactctgattgccctcaccagctactatgtagtatgggtaaagctccctcttcggagggagcatcagag

SEQ ID NO: 24607 - RNA, 88 nt, synthetic construct
  misc_feature 1..88: note = engineered ribonucleic acid scaffold (ERS) sequence
  source 1..88: mol_type = other RNA
actgtgcgttctatctgattactctgacgcacatcaccagctactatgtagtatgggtaaagctccctcttcggagggagcatcagag

SEQ ID NO: 24608 - RNA, 88 nt, synthetic construct
  misc_feature 1..88: note = engineered ribonucleic acid scaffold (ERS) sequence
  source 1..88: mol_type = other RNA
acacacggttctatctgattactctgaccgtgttcaccagcgattatgtcgtatgggtaaagctccctcttcggagggagcatcagag

SEQ ID NO: 24609 - RNA, 88 nt, synthetic construct
  misc_feature 1..88: note = engineered ribonucleic acid scaffold (ERS) sequence
  source 1..88: mol_type = other RNA
acactggtttctatctgattactctgaaccagttcaccagcgattatgtcgtatgggtaaagctccctcttcggagggagcatcagag

SEQ ID NO: 24610 - RNA, 88 nt, synthetic construct
  misc_feature 1..88: note = engineered ribonucleic acid scaffold (ERS) sequence
  source 1..88: mol_type = other RNA
acaggccgttctatctgattactctgacggccttcaccagcgattatgtcgtatgggtaaagctccctcttcggagggagcatcagag

SEQ ID NO: 24611 - RNA, 88 nt, synthetic construct
  misc_feature 1..88: note = engineered ribonucleic acid scaffold (ERS) sequence
  source 1..88: mol_type = other RNA
acaggtccttctatctgattactctgaggaccttcaccagcgattatgtcgtatgggtaaagctccctcttcggagggagcatcagag

SEQ ID NO: 24612 - RNA, 88 nt, synthetic construct
  misc_feature 1..88: note = engineered ribonucleic acid scaffold (ERS) sequence
  source 1..88: mol_type = other RNA
accagcaattctatctgattactctgattgctgtcaccagcgattatgtcgtatgggtaaagctccctcttcggagggagcatcagag

SEQ ID NO: 24613 - RNA, 88 nt, synthetic construct
  misc_feature 1..88: note = engineered ribonucleic acid scaffold (ERS) sequence
  source 1..88: mol_type = other RNA
accgagacttctatctgattactctgaggctcgtcaccagcgattatgtcgtatgggtaaagctccctcttcggagggagcatcagag

SEQ ID NO: 24614 - RNA, 88 nt, synthetic construct
  misc_feature 1..88: note = engineered ribonucleic acid scaffold (ERS) sequence
  source 1..88: mol_type = other RNA
acctgtagttctatctgattactctgactacagtcaccagcgattatgtcgtatgggtaaagctccctcttcggagggagcatcagag

SEQ ID NO: 24615 - RNA, 88 nt, synthetic construct
  misc_feature 1..88: note = engineered ribonucleic acid scaffold (ERS) sequence
  source 1..88: mol_type = other RNA
acgagcacttctatctgattactctgagggctctcaccagcgattatgtcgtatgggtaaagctccctcttcggagggagcatcagag

SEQ ID NO: 24616 - RNA, 88 nt, synthetic construct
  misc_feature 1..88: note = engineered ribonucleic acid scaffold (ERS) sequence
  source 1..88: mol_type = other RNA
acgaggtgttctatctgattactctgacacctctcaccagcgattatgtcgtatgggtaaagctccctcttcggagggagcatcagag

SEQ ID NO: 24617 - RNA, 88 nt, synthetic construct
  misc_feature 1..88: note = engineered ribonucleic acid scaffold (ERS) sequence
  source 1..88: mol_type = other RNA
acgggactttctatctgattactctgaagtccctcaccagcgattatgtcgtatgggtaaagctccctcttcggagggagcatcagag

SEQ ID NO: 24618 - RNA, 88 nt, synthetic construct
  misc_feature 1..88: note = engineered ribonucleic acid scaffold (ERS) sequence
  source 1..88: mol_type = other RNA
acgggcaattctatctgattactctgattgccctcaccagcgattatgtcgtatgggtaaagctccctcttcggagggagcatcagag

SEQ ID NO: 24619 - RNA, 88 nt, synthetic construct
  misc_feature 1..88: note = engineered ribonucleic acid scaffold (ERS) sequence
  source 1..88: mol_type = other RNA
actgtgcgttctatctgattactctgacgcacatcaccagcgattatgtcgtatgggtaaagctccctcttcggagggagcatcagag

SEQ ID NO: 24620 - RNA, 88 nt, synthetic construct
  misc_feature 1..88: note = engineered ribonucleic acid scaffold (ERS) sequence
  source 1..88: mol_type = other RNA
acacacggttctatctgattactctgaccgtgttcaccagcgacgatgtcgtatgggtaaagctccctcttcggagggagcatcagag

SEQ ID NO: 24621 - RNA, 88 nt, synthetic construct
  misc_feature 1..88: note = engineered ribonucleic acid scaffold (ERS) sequence
  source 1..88: mol_type = other RNA
acactggtttctatctgattactctgaaccagttcaccagcgacgatgtcgtatgggtaaagctccctcttcggagggagcatcagag

SEQ ID NO: 24622 - RNA, 88 nt, synthetic construct
  misc_feature 1..88: note = engineered ribonucleic acid scaffold (ERS) sequence
  source 1..88: mol_type = other RNA
acaggccgttctatctgattactctgacggccttcaccagcgacgatgtcgtatgggtaaagctccctcttcggagggagcatcagag

SEQ ID NO: 24623 - RNA, 88 nt, synthetic construct
  misc_feature 1..88: note = engineered ribonucleic acid scaffold (ERS) sequence
  source 1..88: mol_type = other RNA
acaggtccttctatctgattactctgaggaccttcaccagcgacgatgtcgtatgggtaaagctccctcttcggagggagcatcagag

SEQ ID NO: 24624 - RNA, 88 nt, synthetic construct
  misc_feature 1..88: note = engineered ribonucleic acid scaffold (ERS) sequence
  source 1..88: mol_type = other RNA
accagcaattctatctgattactctgattgctgtcaccagcgacgatgtcgtatgggtaaagctccctcttcggagggagcatcagag

SEQ ID NO: 24625 - RNA, 88 nt, synthetic construct
  misc_feature 1..88: note = engineered ribonucleic acid scaffold (ERS) sequence
  source 1..88: mol_type = other RNA
accgagacttctatctgattactctgaggctcgtcaccagcgacgatgtcgtatgggtaaagctccctcttcggagggagcatcagag

SEQ ID NO: 24626 - RNA, 88 nt, synthetic construct
  misc_feature 1..88: note = engineered ribonucleic acid scaffold (ERS) sequence
  source 1..88: mol_type = other RNA
acctgtagttctatctgattactctgactacagtcaccagcgacgatgtcgtatgggtaaagctccctcttcggagggagcatcagag

SEQ ID NO: 24627 - RNA, 88 nt, synthetic construct
  misc_feature 1..88: note = engineered ribonucleic acid scaffold (ERS) sequence
  source 1..88: mol_type = other RNA
acgagcacttctatctgattactctgagggctctcaccagcgacgatgtcgtatgggtaaagctccctcttcggagggagcatcagag

SEQ ID NO: 24628 - RNA, 88 nt, synthetic construct
  misc_feature 1..88: note = engineered ribonucleic acid scaffold (ERS) sequence
  source 1..88: mol_type = other RNA
acgaggtgttctatctgattactctgacacctctcaccagcgacgatgtcgtatgggtaaagctccctcttcggagggagcatcagag

SEQ ID NO: 24629 - RNA, 88 nt, synthetic construct
  misc_feature 1..88: note = engineered ribonucleic acid scaffold (ERS) sequence
  source 1..88: mol_type = other RNA
acgggactttctatctgattactctgaagtccctcaccagcgacgatgtcgtatgggtaaagctccctcttcggagggagcatcagag

SEQ ID NO: 24630 - RNA, 88 nt, synthetic construct
  misc_feature 1..88: note = engineered ribonucleic acid scaffold (ERS) sequence
  source 1..88: mol_type = other RNA
acgggcaattctatctgattactctgattgccctcaccagcgacgatgtcgtatgggtaaagctccctcttcggagggagcatcagag

SEQ ID NO: 24631 - RNA, 88 nt, synthetic construct
  misc_feature 1..88: note = engineered ribonucleic acid scaffold (ERS) sequence
  source 1..88: mol_type = other RNA
actgtgcgttctatctgattactctgacgcacatcaccagcgacgatgtcgtatgggtaaagctccctcttcggagggagcatcagag

SEQ ID NO: 24632 - RNA, 88 nt, synthetic construct
  misc_feature 1..88: note = engineered ribonucleic acid scaffold (ERS) sequence
  source 1..88: mol_type = other RNA
acacacggttctatctgattactctgaccgtgttcaccagcgactctgtcgtatgggtaaagctccctcttcggagggagcatcagag

SEQ ID NO: 24633 - RNA, 88 nt, synthetic construct
  misc_feature 1..88: note = engineered ribonucleic acid scaffold (ERS) sequence
  source 1..88: mol_type = other RNA
acactggtttctatctgattactctgaaccagttcaccagcgactctgtcgtatgggtaaagctccctcttcggagggagcatcagag

SEQ ID NO: 24634 - RNA, 88 nt, synthetic construct
  misc_feature 1..88: note = engineered ribonucleic acid scaffold (ERS) sequence
  source 1..88: mol_type = other RNA
acaggccgttctatctgattactctgacggccttcaccagcgactctgtcgtatgggtaaagctccctcttcggagggagcatcagag

SEQ ID NO: 24635 - RNA, 88 nt, synthetic construct
  misc_feature 1..88: note = engineered ribonucleic acid scaffold (ERS) sequence
  source 1..88: mol_type = other RNA
acaggtccttctatctgattactctgaggaccttcaccagcgactctgtcgtatgggtaaagctccctcttcggagggagcatcagag

SEQ ID NO: 24636 - RNA, 88 nt, synthetic construct
  misc_feature 1..88: note = engineered ribonucleic acid scaffold (ERS) sequence
  source 1..88: mol_type = other RNA
accagcaattctatctgattactctgattgctgtcaccagcgactctgtcgtatgggtaaagctccctcttcggagggagcatcagag

SEQ ID NO: 24637 - RNA, 88 nt, synthetic construct
  misc_feature 1..88: note = engineered ribonucleic acid scaffold (ERS) sequence
  source 1..88: mol_type = other RNA
accgagacttctatctgattactctgaggctcgtcaccagcgactctgtcgtatgggtaaagctccctcttcggagggagcatcagag

SEQ ID NO: 24638 - RNA, 88 nt, synthetic construct
  misc_feature 1..88: note = engineered ribonucleic acid scaffold (ERS) sequence
  source 1..88: mol_type = other RNA
acctgtagttctatctgattactctgactacagtcaccagcgactctgtcgtatgggtaaagctccctcttcggagggagcatcagag

SEQ ID NO: 24639 - RNA, 88 nt, synthetic construct
  misc_feature 1..88: note = engineered ribonucleic acid scaffold (ERS) sequence
  source 1..88: mol_type = other RNA
acgagcacttctatctgattactctgagggctctcaccagcgactctgtcgtatgggtaaagctccctcttcggagggagcatcagag

SEQ ID NO: 24640 - RNA, 88 nt, synthetic construct
  misc_feature 1..88: note = engineered ribonucleic acid scaffold (ERS) sequence
  source 1..88: mol_type = other RNA
acgaggtgttctatctgattactctgacacctctcaccagcgactctgtcgtatgggtaaagctccctcttcggagggagcatcagag

SEQ ID NO: 24641 - RNA, 88 nt, synthetic construct
  misc_feature 1..88: note = engineered ribonucleic acid scaffold (ERS) sequence
  source 1..88: mol_type = other RNA
acgggactttctatctgattactctgaagtccctcaccagcgactctgtcgtatgggtaaagctccctcttcggagggagcatcagag

SEQ ID NO: 24642 - RNA, 88 nt, synthetic construct
  misc_feature 1..88: note = engineered ribonucleic acid scaffold (ERS) sequence
  source 1..88: mol_type = other RNA
acgggcaattctatctgattactctgattgccctcaccagcgactctgtcgtatgggtaaagctccctcttcggagggagcatcagag

SEQ ID NO: 24643 - RNA, 88 nt, synthetic construct
  misc_feature 1..88: note = engineered ribonucleic acid scaffold (ERS) sequence
  source 1..88: mol_type = other RNA
actgtgcgttctatctgattactctgacgcacatcaccagcgactctgtcgtatgggtaaagctccctcttcggagggagcatcagag

SEQ ID NO: 24644 - RNA, 88 nt, synthetic construct
  misc_feature 1..88: note = engineered ribonucleic acid scaffold (ERS) sequence
  source 1..88: mol_type = other RNA
acacacggttctatctgattactctgaccgtgttcaccagcgactatgtcgtgtgggtaaagctccctcttcggagggagcatcagag

SEQ ID NO: 24645 - RNA, 88 nt, synthetic construct
  misc_feature 1..88: note = engineered ribonucleic acid scaffold (ERS) sequence
  source 1..88: mol_type = other RNA
acactggtttctatctgattactctgaaccagttcaccagcgactatgtcgtgtgggtaaagctccctcttcggagggagcatcagag

SEQ ID NO: 24646 - RNA, 88 nt, synthetic construct
  misc_feature 1..88: note = engineered ribonucleic acid scaffold (ERS) sequence
  source 1..88: mol_type = other RNA
acaggccgttctatctgattactctgacggccttcaccagcgactatgtcgtgtgggtaaagctccctcttcggagggagcatcagag

SEQ ID NO: 24647 - RNA, 88 nt, synthetic construct
  misc_feature 1..88: note = engineered ribonucleic acid scaffold (ERS) sequence
  source 1..88: mol_type = other RNA
acaggtccttctatctgattactctgaggaccttcaccagcgactatgtcgtgtgggtaaagctccctcttcggagggagcatcagag

SEQ ID NO: 24648 - RNA, 88 nt, synthetic construct
  misc_feature 1..88: note = engineered ribonucleic acid scaffold (ERS) sequence
  source 1..88: mol_type = other RNA
accagcaattctatctgattactctgattgctgtcaccagcgactatgtcgtgtgggtaaagctccctcttcggagggagcatcagag

SEQ ID NO: 24649 - RNA, 88 nt, synthetic construct
  misc_feature 1..88: note = engineered ribonucleic acid scaffold (ERS) sequence
  source 1..88: mol_type = other RNA
accgagacttctatctgattactctgaggctcgtcaccagcgactatgtcgtgtgggtaaagctccctcttcggagggagcatcagag

SEQ ID NO: 24650 - RNA, 88 nt, synthetic construct
  misc_feature 1..88: note = engineered ribonucleic acid scaffold (ERS) sequence
  source 1..88: mol_type = other RNA
acctgtagttctatctgattactctgactacagtcaccagcgactatgtcgtgtgggtaaagctccctcttcggagggagcatcagag

SEQ ID NO: 24651 - RNA, 88 nt, synthetic construct
  misc_feature 1..88: note = engineered ribonucleic acid scaffold (ERS) sequence
  source 1..88: mol_type = other RNA
acgagcacttctatctgattactctgagggctctcaccagcgactatgtcgtgtgggtaaagctccctcttcggagggagcatcagag

SEQ ID NO: 24652 - RNA, 88 nt, synthetic construct
  misc_feature 1..88: note = engineered ribonucleic acid scaffold (ERS) sequence
  source 1..88: mol_type = other RNA
acgaggtgttctatctgattactctgacacctctcaccagcgactatgtcgtgtgggtaaagctccctcttcggagggagcatcagag

SEQ ID NO: 24653 - RNA, 88 nt, synthetic construct
  misc_feature 1..88: note = engineered ribonucleic acid scaffold (ERS) sequence
  source 1..88: mol_type = other RNA
acgggactttctatctgattactctgaagtccctcaccagcgactatgtcgtgtgggtaaagctccctcttcggagggagcatcagag

SEQ ID NO: 24654 - RNA, 88 nt, synthetic construct
  misc_feature 1..88: note = engineered ribonucleic acid scaffold (ERS) sequence
  source 1..88: mol_type = other RNA
acgggcaattctatctgattactctgattgccctcaccagcgactatgtcgtgtgggtaaagctccctcttcggagggagcatcagag

SEQ ID NO: 24655 - RNA, 88 nt, synthetic construct
  misc_feature 1..88: note = engineered ribonucleic acid scaffold (ERS) sequence
  source 1..88: mol_type = other RNA
actgtgcgttctatctgattactctgacgcacatcaccagcgactatgtcgtgtgggtaaagctccctcttcggagggagcatcagag

SEQ ID NO: 24656 - RNA, 89 nt, synthetic construct; identical to SEQ ID NO: 832
  misc_feature 1..89: note = engineered ribonucleic acid scaffold (ERS) sequence
  source 1..89: mol_type = other RNA

SEQ ID NO: 24657 - RNA, 89 nt, synthetic construct; identical to SEQ ID NO: 830
  misc_feature 1..89: note = engineered ribonucleic acid scaffold (ERS) sequence
  source 1..89: mol_type = other RNA

SEQ ID NO: 24658 - RNA, 89 nt, synthetic construct; identical to SEQ ID NO: 831
  misc_feature 1..89: note = engineered ribonucleic acid scaffold (ERS) sequence
  source 1..89: mol_type = other RNA

SEQ ID NO: 24659 - RNA, 89 nt, synthetic construct; identical to SEQ ID NO: 837
  misc_feature 1..89: note = engineered ribonucleic acid scaffold (ERS) sequence
  source 1..89: mol_type = other RNA

SEQ ID NO: 24660 - RNA, 89 nt, synthetic construct
  misc_feature 1..89: note = engineered ribonucleic acid scaffold (ERS) sequence
  source 1..89: mol_type = other RNA
accagcaattctatctgattactctgattgctgtcaccagcgactatgtcgtagtgggtaaagctccctcttcggagggagcatcagag

SEQ ID NO: 24661 - RNA, 89 nt, synthetic construct
  misc_feature 1..89: note = engineered ribonucleic acid scaffold (ERS) sequence
  source 1..89: mol_type = other RNA
accgagacttctatctgattactctgaggctcgtcaccagcgactatgtcgtagtgggtaaagctccctcttcggagggagcatcagag

SEQ ID NO: 24662 - RNA, 89 nt, synthetic construct
  misc_feature 1..89: note = engineered ribonucleic acid scaffold (ERS) sequence
  source 1..89: mol_type = other RNA
acctgtagttctatctgattactctgactacagtcaccagcgactatgtcgtagtgggtaaagctccctcttcggagggagcatcagag

SEQ ID NO: 24663 - RNA, 89 nt, synthetic construct; identical to SEQ ID NO: 835
  misc_feature 1..89: note = engineered ribonucleic acid scaffold (ERS) sequence
  source 1..89: mol_type = other RNA

SEQ ID NO: 24664 - RNA, 89 nt, synthetic construct; identical to SEQ ID NO: 838
  misc_feature 1..89: note = engineered ribonucleic acid scaffold (ERS) sequence
  source 1..89: mol_type = other RNA

SEQ ID NO: 24665 - RNA, 89 nt, synthetic construct; identical to SEQ ID NO: 833
  misc_feature 1..89: note = engineered ribonucleic acid scaffold (ERS) sequence
  source 1..89: mol_type = other RNA

SEQ ID NO: 24666 - RNA, 89 nt, synthetic construct; identical to SEQ ID NO: 834
  misc_feature 1..89: note = engineered ribonucleic acid scaffold (ERS) sequence
  source 1..89: mol_type = other RNA

SEQ ID NO: 24667 - RNA, 89 nt, synthetic construct; identical to SEQ ID NO: 836
  misc_feature 1..89: note = engineered ribonucleic acid scaffold (ERS) sequence
  source 1..89: mol_type = other RNA

SEQ ID NO: 24668 - RNA, 89 nt, synthetic construct
  misc_feature 1..89: note = engineered ribonucleic acid scaffold (ERS) sequence
  source 1..89: mol_type = other RNA
acacacggttctatctgattactctgaccgtgttcaccagcgactatgtcgtattgggtaaagctccctcttcggagggagcatcagag

SEQ ID NO: 24669 - RNA, 89 nt, synthetic construct
  misc_feature 1..89: note = engineered ribonucleic acid scaffold (ERS) sequence
  source 1..89: mol_type = other RNA
acactggtttctatctgattactctgaaccagttcaccagcgactatgtcgtattgggtaaagctccctcttcggagggagcatcagag

SEQ ID NO: 24670 - RNA, 89 nt, synthetic construct
  misc_feature 1..89: note = engineered ribonucleic acid scaffold (ERS) sequence
  source 1..89: mol_type = other RNA
acaggccgttctatctgattactctgacggccttcaccagcgactatgtcgtattgggtaaagctccctcttcggagggagcatcagag

SEQ ID NO: 24671 - RNA, 89 nt, synthetic construct
  misc_feature 1..89: note = engineered ribonucleic acid scaffold (ERS) sequence
  source 1..89: mol_type = other RNA
acaggtccttctatctgattactctgaggaccttcaccagcgactatgtcgtattgggtaaagctccctcttcggagggagcatcagag

SEQ ID NO: 24672 - RNA, 89 nt, synthetic construct
  misc_feature 1..89: note = engineered ribonucleic acid scaffold (ERS) sequence
  source 1..89: mol_type = other RNA
accagcaattctatctgattactctgattgctgtcaccagcgactatgtcgtattgggtaaagctccctcttcggagggagcatcagag

SEQ ID NO: 24673 - RNA, 89 nt, synthetic construct
  misc_feature 1..89: note = engineered ribonucleic acid scaffold (ERS) sequence
  source 1..89: mol_type = other RNA
accgagacttctatctgattactctgaggctcgtcaccagcgactatgtcgtattgggtaaagctccctcttcggagggagcatcagag

SEQ ID NO: 24674 - RNA, 89 nt, synthetic construct
  misc_feature 1..89: note = engineered ribonucleic acid scaffold (ERS) sequence
  source 1..89: mol_type = other RNA
acctgtagttctatctgattactctgactacagtcaccagcgactatgtcgtattgggtaaagctccctcttcggagggagcatcagag

SEQ ID NO: 24675 - RNA, 89 nt, synthetic construct
  misc_feature 1..89: note = engineered ribonucleic acid scaffold (ERS) sequence
  source 1..89: mol_type = other RNA
acgagcacttctatctgattactctgagggctctcaccagcgactatgtcgtattgggtaaagctccctcttcggagggagcatcagag

SEQ ID NO: 24676 - RNA, 89 nt, synthetic construct
  misc_feature 1..89: note = engineered ribonucleic acid scaffold (ERS) sequence
  source 1..89: mol_type = other RNA
acgaggtgttctatctgattactctgacacctctcaccagcgactatgtcgtattgggtaaagctccctcttcggagggagcatcagag

SEQ ID NO: 24677 - RNA, 89 nt, synthetic construct
  misc_feature 1..89: note = engineered ribonucleic acid scaffold (ERS) sequence
  source 1..89: mol_type = other RNA
acgggactttctatctgattactctgaagtccctcaccagcgactatgtcgtattgggtaaagctccctcttcggagggagcatcagag

SEQ ID NO: 24678 - RNA, 89 nt, synthetic construct
  misc_feature 1..89: note = engineered ribonucleic acid scaffold (ERS) sequence
  source 1..89: mol_type = other RNA
acgggcaattctatctgattactctgattgccctcaccagcgactatgtcgtattgggtaaagctccctcttcggagggagcatcagag

SEQ ID NO: 24679 - RNA, 89 nt, synthetic construct
  misc_feature 1..89: note = engineered ribonucleic acid scaffold (ERS) sequence
  source 1..89: mol_type = other RNA
actgtgcgttctatctgattactctgacgcacatcaccagcgactatgtcgtattgggtaaagctccctcttcggagggagcatcagag

SEQ ID NO: 24680 - RNA, 89 nt, synthetic construct
  misc_feature 1..89: note = engineered ribonucleic acid scaffold (ERS) sequence
  source 1..89: mol_type = other RNA
acacacggttctatctgattactctgaccgtgttcaccagcgactatgtcgtatggagtaaagctccctcttcggagggagcatcagag

SEQ ID NO: 24681 - RNA, 89 nt, synthetic construct
  misc_feature 1..89: note = engineered ribonucleic acid scaffold (ERS) sequence
  source 1..89: mol_type = other RNA
acactggtttctatctgattactctgaaccagttcaccagcgactatgtcgtatggagtaaagctccctcttcggagggagcatcagag

SEQ ID NO: 24682 - RNA, 89 nt, synthetic construct
  misc_feature 1..89: note = engineered ribonucleic acid scaffold (ERS) sequence
  source 1..89: mol_type = other RNA
acaggccgttctatctgattactctgacggccttcaccagcgactatgtcgtatggagtaaagctccctcttcggagggagcatcagag

SEQ ID NO: 24683 - RNA, 89 nt, synthetic construct
  misc_feature 1..89: note = engineered ribonucleic acid scaffold (ERS) sequence
  source 1..89: mol_type = other RNA
acaggtccttctatctgattactctgaggaccttcaccagcgactatgtcgtatggagtaaagctccctcttcggagggagcatcagag

SEQ ID NO: 24684 - RNA, 89 nt, synthetic construct
  misc_feature 1..89: note = engineered ribonucleic acid scaffold (ERS) sequence
  source 1..89: mol_type = other RNA
accagcaattctatctgattactctgattgctgtcaccagcgactatgtcgtatggagtaaagctccctcttcggagggagcatcagag

SEQ ID NO: 24685 - RNA, 89 nt, synthetic construct
  misc_feature 1..89: note = engineered ribonucleic acid scaffold (ERS) sequence
  source 1..89: mol_type = other RNA
accgagacttctatctgattactctgaggctcgtcaccagcgactatgtcgtatggagtaaagctccctcttcggagggagcatcagag

SEQ ID NO: 24686 - RNA, 89 nt, synthetic construct
  misc_feature 1..89: note = engineered ribonucleic acid scaffold (ERS) sequence
  source 1..89: mol_type = other RNA
acctgtagttctatctgattactctgactacagtcaccagcgactatgtcgtatggagtaaagctccctcttcggagggagcatcagag

SEQ ID NO: 24687 - RNA, 89 nt, synthetic construct
  misc_feature 1..89: note = engineered ribonucleic acid scaffold (ERS) sequence
  source 1..89: mol_type = other RNA
acgagcacttctatctgattactctgagggctctcaccagcgactatgtcgtatggagtaaagctccctcttcggagggagcatcagag

SEQ ID NO: 24688 - RNA, 89 nt, synthetic construct
  misc_feature 1..89: note = engineered ribonucleic acid scaffold (ERS) sequence
  source 1..89: mol_type = other RNA
acgaggtgttctatctgattactctgacacctctcaccagcgactatgtcgtatggagtaaagctccctcttcggagggagcatcagag

SEQ ID NO: 24689 - RNA, 89 nt, synthetic construct
  misc_feature 1..89: note = engineered ribonucleic acid scaffold (ERS) sequence
  source 1..89: mol_type = other RNA
acgggactttctatctgattactctgaagtccctcaccagcgactatgtcgtatggagtaaagctccctcttcggagggagcatcagag

SEQ ID NO: 24690 - RNA, 89 nt, synthetic construct
  misc_feature 1..89: note = engineered ribonucleic acid scaffold (ERS) sequence
  source 1..89: mol_type = other RNA
acgggcaattctatctgattactctgattgccctcaccagcgactatgtcgtatggagtaaagctccctcttcggagggagcatcagag

SEQ ID NO: 24691 - RNA, 89 nt, synthetic construct
  misc_feature 1..89: note = engineered ribonucleic acid scaffold (ERS) sequence
  source 1..89: mol_type = other RNA
actgtgcgttctatctgattactctgacgcacatcaccagcgactatgtcgtatggagtaaagctccctcttcggagggagcatcagag

SEQ ID NO: 24692 - RNA, 89 nt, synthetic construct
  misc_feature 1..89: note = engineered ribonucleic acid scaffold (ERS) sequence
  source 1..89: mol_type = other RNA
acacacggttctatctgattactctgaccgtgttcaccagcgactatgtcgtatggcgtaaagctccctcttcggagggagcatcagag

SEQ ID NO: 24693 - RNA, 89 nt, synthetic construct
  misc_feature 1..89: note = engineered ribonucleic acid scaffold (ERS) sequence
  source 1..89: mol_type = other RNA
acactggtttctatctgattactctgaaccagttcaccagcgactatgtcgtatggcgtaaagctccctcttcggagggagcatcagag

SEQ ID NO: 24694 - RNA, 89 nt, synthetic construct
  misc_feature 1..89: note = engineered ribonucleic acid scaffold (ERS) sequence
  source 1..89: mol_type = other RNA
acaggccgttctatctgattactctgacggccttcaccagcgactatgtcgtatggcgtaaagctccctcttcggagggagcatcagag

SEQ ID NO: 24695 - RNA, 89 nt, synthetic construct
  misc_feature 1..89: note = engineered ribonucleic acid scaffold (ERS) sequence
  source 1..89: mol_type = other RNA
acaggtccttctatctgattactctgaggaccttcaccagcgactatgtcgtatggcgtaaagctccctcttcggagggagcatcagag

SEQ ID NO: 24696 - RNA, 89 nt, synthetic construct
  misc_feature 1..89: note = engineered ribonucleic acid scaffold (ERS) sequence
  source 1..89: mol_type = other RNA
accagcaattctatctgattactctgattgctgtcaccagcgactatgtcgtatggcgtaaagctccctcttcggagggagcatcagag

SEQ ID NO: 24697 - RNA, 89 nt, synthetic construct
  misc_feature 1..89: note = engineered ribonucleic acid scaffold (ERS) sequence
  source 1..89: mol_type = other RNA
accgagacttctatctgattactctgaggctcgtcaccagcgactatgtcgtatggcgtaaagctccctcttcggagggagcatcagag

SEQ ID NO: 24698 - RNA, 89 nt, synthetic construct
  misc_feature 1..89: note = engineered ribonucleic acid scaffold (ERS) sequence
  source 1..89: mol_type = other RNA
acctgtagttctatctgattactctgactacagtcaccagcgactatgtcgtatggcgtaaagctccctcttcggagggagcatcagag

SEQ ID NO: 24699 - RNA, 89 nt, synthetic construct
  misc_feature 1..89: note = engineered ribonucleic acid scaffold (ERS) sequence
  source 1..89: mol_type = other RNA
acgagcacttctatctgattactctgagggctctcaccagcgactatgtcgtatggcgtaaagctccctcttcggagggagcatcagag

SEQ ID NO: 24700 - RNA, 89 nt, synthetic construct
  misc_feature 1..89: note = engineered ribonucleic acid scaffold (ERS) sequence
  source 1..89: mol_type = other RNA
acgaggtgttctatctgattactctgacacctctcaccagcgactatgtcgtatggcgtaaagctccctcttcggagggagcatcagag

SEQ ID NO: 24701 - RNA, 89 nt, synthetic construct
  misc_feature 1..89: note = engineered ribonucleic acid scaffold (ERS) sequence
  source 1..89: mol_type = other RNA
acgggactttctatctgattactctgaagtccctcaccagcgactatgtcgtatggcgtaaagctccctcttcggagggagcatcagag

SEQ ID NO: 24702 - RNA, 89 nt, synthetic construct
  misc_feature 1..89: note = engineered ribonucleic acid scaffold (ERS) sequence
  source 1..89: mol_type = other RNA
acgggcaattctatctgattactctgattgccctcaccagcgactatgtcgtatggcgtaaagctccctcttcggagggagcatcagag

SEQ ID NO: 24703 - RNA, 89 nt, synthetic construct
  misc_feature 1..89: note = engineered ribonucleic acid scaffold (ERS) sequence
  source 1..89: mol_type = other RNA
actgtgcgttctatctgattactctgacgcacatcaccagcgactatgtcgtatggcgtaaagctccctcttcggagggagcatcagag

SEQ ID NO: 24704 - RNA, 89 nt, synthetic construct
  misc_feature 1..89: note = engineered ribonucleic acid scaffold (ERS) sequence
  source 1..89: mol_type = other RNA
acacacggttctatctgattactctgaccgtgttcaccagcgactatgtcgtatggtgtaaagctccctcttcggagggagcatcagag

SEQ ID NO: 24705 - RNA, 89 nt, synthetic construct
  misc_feature 1..89: note = engineered ribonucleic acid scaffold (ERS) sequence
  source 1..89: mol_type = other RNA
acactggtttctatctgattactctgaaccagttcaccagcgactatgtcgtatggtgtaaagctccctcttcggagggagcatcagag

SEQ ID NO: 24706 - RNA, 89 nt, synthetic construct
  misc_feature 1..89: note = engineered ribonucleic acid scaffold (ERS) sequence
  source 1..89: mol_type = other RNA
acaggccgttctatctgattactctgacggccttcaccagcgactatgtcgtatggtgtaaagctccctcttcggagggagcatcagag

SEQ ID NO: 24707 - RNA, 89 nt, synthetic construct
  misc_feature 1..89: note = engineered ribonucleic acid scaffold (ERS) sequence
  source 1..89: mol_type = other RNA
acaggtccttctatctgattactctgaggaccttcaccagcgactatgtcgtatggtgtaaagctccctcttcggagggagcatcagag

SEQ ID NO: 24708 - RNA, 89 nt, synthetic construct
  misc_feature 1..89: note = engineered ribonucleic acid scaffold (ERS) sequence
  source 1..89: mol_type = other RNA
accagcaattctatctgattactctgattgctgtcaccagcgactatgtcgtatggtgtaaagctccctcttcggagggagcatcagag

SEQ ID NO: 24709 - RNA, 89 nt, synthetic construct
  misc_feature 1..89: note = engineered ribonucleic acid scaffold (ERS) sequence
  source 1..89: mol_type = other RNA
accgagacttctatctgattactctgaggctcgtcaccagcgactatgtcgtatggtgtaaagctccctcttcggagggagcatcagag

SEQ ID NO: 24710 - RNA, 89 nt, synthetic construct
  misc_feature 1..89: note = engineered ribonucleic acid scaffold (ERS) sequence
  source 1..89: mol_type = other RNA
acctgtagttctatctgattactctgactacagtcaccagcgactatgtcgtatggtgtaaagctccctcttcggagggagcatcagag

SEQ ID NO: 24711 - RNA, 89 nt, synthetic construct
  misc_feature 1..89: note = engineered ribonucleic acid scaffold (ERS) sequence
  source 1..89: mol_type = other RNA
acgagcacttctatctgattactctgagggctctcaccagcgactatgtcgtatggtgtaaagctccctcttcggagggagcatcagag

SEQ ID NO: 24712 - RNA, 89 nt, synthetic construct
  misc_feature 1..89: note = engineered ribonucleic acid scaffold (ERS) sequence
  source 1..89: mol_type = other RNA
acgaggtgttctatctgattactctgacacctctcaccagcgactatgtcgtatggtgtaaagctccctcttcggagggagcatcagag

SEQ ID NO: 24713 - RNA, 89 nt, synthetic construct
  misc_feature 1..89: note = engineered ribonucleic acid scaffold (ERS) sequence
  source 1..89: mol_type = other RNA
acgggactttctatctgattactctgaagtccctcaccagcgactatgtcgtatggtgtaaagctccctcttcggagggagcatcagag

SEQ ID NO: 24714 - RNA, 89 nt, synthetic construct
  misc_feature 1..89: note = engineered ribonucleic acid scaffold (ERS) sequence
  source 1..89: mol_type = other RNA
acgggcaattctatctgattactctgattgccctcaccagcgactatgtcgtatggtgtaaagctccctcttcggagggagcatcagag

SEQ ID NO: 24715 - RNA, 89 nt, synthetic construct
  misc_feature 1..89: note = engineered ribonucleic acid scaffold (ERS) sequence
  source 1..89: mol_type = other RNA
actgtgcgttctatctgattactctgacgcacatcaccagcgactatgtcgtatggtgtaaagctccctcttcggagggagcatcagag

SEQ ID NO: 24716 - RNA, 89 nt, synthetic construct
  misc_feature 1..89: note = engineered ribonucleic acid scaffold (ERS) sequence
  source 1..89: mol_type = other RNA
acacacggttctatctgattactctgaccgtgttcaccagcgactatgtcgtatgggctaaagctccctcttcggagggagcatcagag

SEQ ID NO: 24717 - RNA, 89 nt, synthetic construct
  misc_feature 1..89: note = engineered ribonucleic acid scaffold (ERS) sequence
  source 1..89: mol_type = other RNA
acactggtttctatctgattactctgaaccagttcaccagcgactatgtcgtatgggctaaagctccctcttcggagggagcatcagag

SEQ ID NO: 24718 - RNA, 89 nt, synthetic construct
  misc_feature 1..89: note = engineered ribonucleic acid scaffold (ERS) sequence
  source 1..89: mol_type = other RNA
acaggccgttctatctgattactctgacggccttcaccagcgactatgtcgtatgggctaaagctccctcttcggagggagcatcagag

SEQ ID NO: 24719 - RNA, 89 nt, synthetic construct
  misc_feature 1..89: note = engineered ribonucleic acid scaffold (ERS) sequence
  source 1..89: mol_type = other RNA
acaggtccttctatctgattactctgaggaccttcaccagcgactatgtcgtatgggctaaagctccctcttcggagggagcatcagag

SEQ ID NO: 24720 - RNA, 89 nt, synthetic construct
  misc_feature 1..89: note = engineered ribonucleic acid scaffold (ERS) sequence
  source 1..89: mol_type = other RNA
accagcaattctatctgattactctgattgctgtcaccagcgactatgtcgtatgggctaaagctccctcttcggagggagcatcagag

SEQ ID NO: 24721 - RNA, 89 nt, synthetic construct
  misc_feature 1..89: note = engineered ribonucleic acid scaffold (ERS) sequence
  source 1..89: mol_type = other RNA
accgagacttctatctgattactctgaggctcgtcaccagcgactatgtcgtatgggctaaagctccctcttcggagggagcatcagag

SEQ ID NO: 24722 - RNA, 89 nt, synthetic construct
  misc_feature 1..89: note = engineered ribonucleic acid scaffold (ERS) sequence
  source 1..89: mol_type = other RNA
acctgtagttctatctgattactctgactacagtcaccagcgactatgtcgtatgggctaaagctccctcttcggagggagcatcagag

SEQ ID NO: 24723 - RNA, 89 nt, synthetic construct
  misc_feature 1..89: note = engineered ribonucleic acid scaffold (ERS) sequence
  source 1..89: mol_type = other RNA
acgagcacttctatctgattactctgagggctctcaccagcgactatgtcgtatgggctaaagctccctcttcggagggagcatcagag

SEQ ID NO: 24724 - RNA, 89 nt, synthetic construct
  misc_feature 1..89: note = engineered ribonucleic acid scaffold (ERS) sequence
  source 1..89: mol_type = other RNA
acgaggtgttctatctgattactctgacacctctcaccagcgactatgtcgtatgggctaaagctccctcttcggagggagcatcagag

SEQ ID NO: 24725 - RNA, 89 nt, synthetic construct
  misc_feature 1..89: note = engineered ribonucleic acid scaffold (ERS) sequence
  source 1..89: mol_type = other RNA
acgggactttctatctgattactctgaagtccctcaccagcgactatgtcgtatgggctaaagctccctcttcggagggagcatcagag

SEQ ID NO: 24726 - RNA, 89 nt, synthetic construct
  misc_feature 1..89: note = engineered ribonucleic acid scaffold (ERS) sequence
  source 1..89: mol_type = other RNA
acgggcaattctatctgattactctgattgccctcaccagcgactatgtcgtatgggctaaagctccctcttcggagggagcatcagag

SEQ ID NO: 24727 - RNA, 89 nt, synthetic construct
  misc_feature 1..89: note = engineered ribonucleic acid scaffold (ERS) sequence
  source 1..89: mol_type = other RNA
actgtgcgttctatctgattactctgacgcacatcaccagcgactatgtcgtatgggctaaagctccctcttcggagggagcatcagag

SEQ ID NO: 24728 - RNA, 86 nt, synthetic construct
  misc_feature 1..86: note = engineered ribonucleic acid scaffold (ERS) sequence
  source 1..86: mol_type = other RNA
acacacggttctatctgattactctgaccgtgttcaccagcgactatgtcgtatgggtagctccctcttcggagggagcatcagag

SEQ ID NO: 24729 - RNA, 86 nt, synthetic construct
  misc_feature 1..86: note = engineered ribonucleic acid scaffold (ERS) sequence
  source 1..86: mol_type = other RNA
acactggtttctatctgattactctgaaccagttcaccagcgactatgtcgtatgggtagctccctcttcggagggagcatcagag

SEQ ID NO: 24730 - RNA, 86 nt, synthetic construct
  misc_feature 1..86: note = engineered ribonucleic acid scaffold (ERS) sequence
  source 1..86: mol_type = other RNA
acaggccgttctatctgattactctgacggccttcaccagcgactatgtcgtatgggtagctccctcttcggagggagcatcagag

SEQ ID NO: 24731 - RNA, 86 nt, synthetic construct
  misc_feature 1..86: note = engineered ribonucleic acid scaffold (ERS) sequence
  source 1..86: mol_type = other RNA
acaggtccttctatctgattactctgaggaccttcaccagcgactatgtcgtatgggtagctccctcttcggagggagcatcagag

SEQ ID NO: 24732 - RNA, 86 nt, synthetic construct
  misc_feature 1..86: note = engineered ribonucleic acid scaffold (ERS) sequence
  source 1..86: mol_type = other RNA
accagcaattctatctgattactctgattgctgtcaccagcgactatgtcgtatgggtagctccctcttcggagggagcatcagag

SEQ ID NO: 24733 - RNA, 86 nt, synthetic construct
  misc_feature 1..86: note = engineered ribonucleic acid scaffold (ERS) sequence
  source 1..86: mol_type = other RNA
accgagacttctatctgattactctgaggctcgtcaccagcgactatgtcgtatgggtagctccctcttcggagggagcatcagag

SEQ ID NO: 24734 - RNA, 86 nt, synthetic construct
  misc_feature 1..86: note = engineered ribonucleic acid scaffold (ERS) sequence
  source 1..86: mol_type = other RNA
acctgtagttctatctgattactctgactacagtcaccagcgactatgtcgtatgggtagctccctcttcggagggagcatcagag

SEQ ID NO: 24735 - RNA, 86 nt, synthetic construct
  misc_feature 1..86: note = engineered ribonucleic acid scaffold (ERS) sequence
  source 1..86: mol_type = other RNA
acgagcacttctatctgattactctgagggctctcaccagcgactatgtcgtatgggtagctccctcttcggagggagcatcagag

SEQ ID NO: 24736 - RNA, 86 nt, synthetic construct
  misc_feature 1..86: note = engineered ribonucleic acid scaffold (ERS) sequence
  source 1..86: mol_type = other RNA
acgaggtgttctatctgattactctgacacctctcaccagcgactatgtcgtatgggtagctccctcttcggagggagcatcagag

SEQ ID NO: 24737 - RNA, 86 nt, synthetic construct
  misc_feature 1..86: note = engineered ribonucleic acid scaffold (ERS) sequence
  source 1..86: mol_type = other RNA
acgggactttctatctgattactctgaagtccctcaccagcgactatgtcgtatgggtagctccctcttcggagggagcatcagag

SEQ ID NO: 24738 - RNA, 86 nt, synthetic construct
  misc_feature 1..86: note = engineered ribonucleic acid scaffold (ERS) sequence
  source 1..86: mol_type = other RNA
acgggcaattctatctgattactctgattgccctcaccagcgactatgtcgtatgggtagctccctcttcggagggagcatcagag

SEQ ID NO: 24739 - RNA, 86 nt, synthetic construct
  misc_feature 1..86: note = engineered ribonucleic acid scaffold (ERS) sequence
  source 1..86: mol_type = other RNA
actgtgcgttctatctgattactctgacgcacatcaccagcgactatgtcgtatgggtagctccctcttcggagggagcatcagag

SEQ ID NO: 24740 - RNA, 88 nt, synthetic construct
  misc_feature 1..88: note = engineered ribonucleic acid scaffold (ERS) sequence
  source 1..88: mol_type = other RNA
acacacggttctatctgattactctgaccgtgttcaccagcgactatgtcgtatgggtgaagctccctcttcggagggagcatcagag

SEQ ID NO: 24741 - RNA, 88 nt, synthetic construct
  misc_feature 1..88: note = engineered ribonucleic acid scaffold (ERS) sequence
  source 1..88: mol_type = other RNA
acactggtttctatctgattactctgaaccagttcaccagcgactatgtcgtatgggtgaagctccctcttcggagggagcatcagag

SEQ ID NO: 24742 - RNA, 88 nt, synthetic construct
  misc_feature 1..88: note = engineered ribonucleic acid scaffold (ERS) sequence
  source 1..88: mol_type = other RNA
acaggccgttctatctgattactctgacggccttcaccagcgactatgtcgtatgggtgaagctccctcttcggagggagcatcagag

SEQ ID NO: 24743 - RNA, 88 nt, synthetic construct
  misc_feature 1..88: note = engineered ribonucleic acid scaffold (ERS) sequence
  source 1..88: mol_type = other RNA
acaggtccttctatctgattactctgaggaccttcaccagcgactatgtcgtatgggtgaagctccctcttcggagggagcatcagag

SEQ ID NO: 24744 - RNA, 88 nt, synthetic construct
  misc_feature 1..88: note = engineered ribonucleic acid scaffold (ERS) sequence
  source 1..88: mol_type = other RNA
accagcaattctatctgattactctgattgctgtcaccagcgactatgtcgtatgggtgaagctccctcttcggagggagcatcagag

SEQ ID NO: 24745 - RNA, 88 nt, synthetic construct
  misc_feature 1..88: note = engineered ribonucleic acid scaffold (ERS) sequence
  source 1..88: mol_type = other RNA
accgagacttctatctgattactctgaggctcgtcaccagcgactatgtcgtatgggtgaagctccctcttcggagggagcatcagag

SEQ ID NO: 24746 - RNA, 88 nt, synthetic construct
  misc_feature 1..88: note = engineered ribonucleic acid scaffold (ERS) sequence
  source 1..88: mol_type = other RNA
acctgtagttctatctgattactctgactacagtcaccagcgactatgtcgtatgggtgaagctccctcttcggagggagcatcagag

SEQ ID NO: 24747 - RNA, 88 nt, synthetic construct
  misc_feature 1..88: note = engineered ribonucleic acid scaffold (ERS) sequence
  source 1..88: mol_type = other RNA
acgagcacttctatctgattactctgagggctctcaccagcgactatgtcgtatgggtgaagctccctcttcggagggagcatcagag

SEQ ID NO: 24748 - RNA, 88 nt, synthetic construct
  misc_feature 1..88: note = engineered ribonucleic acid scaffold (ERS) sequence
  source 1..88: mol_type = other RNA
acgaggtgttctatctgattactctgacacctctcaccagcgactatgtcgtatgggtgaagctccctcttcggagggagcatcagag

SEQ ID NO: 24749 - RNA, 88 nt, synthetic construct
  misc_feature 1..88: note = engineered ribonucleic acid scaffold (ERS) sequence
  source 1..88: mol_type = other RNA
acgggactttctatctgattactctgaagtccctcaccagcgactatgtcgtatgggtgaagctccctcttcggagggagcatcagag

SEQ ID NO: 24750 - RNA, 88 nt, synthetic construct
  misc_feature 1..88: note = engineered ribonucleic acid scaffold (ERS) sequence
  source 1..88: mol_type = other RNA
acgggcaattctatctgattactctgattgccctcaccagcgactatgtcgtatgggtgaagctccctcttcggagggagcatcagag

SEQ ID NO: 24751 - RNA, 88 nt, synthetic construct
  misc_feature 1..88: note = engineered ribonucleic acid scaffold (ERS) sequence
  source 1..88: mol_type = other RNA
actgtgcgttctatctgattactctgacgcacatcaccagcgactatgtcgtatgggtgaagctccctcttcggagggagcatcagag

SEQ ID NO: 24752 - RNA, 88 nt, synthetic construct
  misc_feature 1..88: note = engineered ribonucleic acid scaffold (ERS) sequence
  source 1..88: mol_type = other RNA
acacacggttctatctgattactctgaccgtgttcaccagcgactatgtcgtatgggtagagctccctcttcggagggagcatcagag

SEQ ID NO: 24753 - RNA, 88 nt, synthetic construct
  misc_feature 1..88: note = engineered ribonucleic acid scaffold (ERS) sequence
  source 1..88: mol_type = other RNA
acactggtttctatctgattactctgaaccagttcaccagcgactatgtcgtatgggtagagctccctcttcggagggagcatcagag

SEQ ID NO: 24754 - RNA, 88 nt, synthetic construct
  misc_feature 1..88: note = engineered ribonucleic acid scaffold (ERS) sequence
  source 1..88: mol_type = other RNA
acaggccgttctatctgattactctgacggccttcaccagcgactatgtcgtatgggtagagctccctcttcggagggagcatcagag

SEQ ID NO: 24755 - RNA, 88 nt, synthetic construct
  misc_feature 1..88: note = engineered ribonucleic acid scaffold (ERS) sequence
  source 1..88: mol_type = other RNA
acaggtccttctatctgattactctgaggaccttcaccagcgactatgtcgtatgggtagagctccctcttcggagggagcatcagag

SEQ ID NO: 24756 - RNA, 88 nt, synthetic construct
  misc_feature 1..88: note = engineered ribonucleic acid scaffold (ERS) sequence
  source 1..88: mol_type = other RNA
accagcaattctatctgattactctgattgctgtcaccagcgactatgtcgtatgggtagagctccctcttcggagggagcatcagag

SEQ ID NO: 24757 - RNA, 88 nt, synthetic construct
  misc_feature 1..88: note = engineered ribonucleic acid scaffold (ERS) sequence
  source 1..88: mol_type = other RNA
accgagacttctatctgattactctgaggctcgtcaccagcgactatgtcgtatgggtagagctccctcttcggagggagcatcagag

SEQ ID NO: 24758 - RNA, 88 nt, synthetic construct
  misc_feature 1..88: note = engineered ribonucleic acid scaffold (ERS) sequence
  source 1..88: mol_type = other RNA
acctgtagttctatctgattactctgactacagtcaccagcgactatgtcgtatgggtagagctccctcttcggagggagcatcagag

SEQ ID NO: 24759 - RNA, 88 nt, synthetic construct
  misc_feature 1..88: note = engineered ribonucleic acid scaffold (ERS) sequence
  source 1..88: mol_type = other RNA
acgagcacttctatctgattactctgagggctctcaccagcgactatgtcgtatgggtagagctccctcttcggagggagcatcagag

SEQ ID NO: 24760 - RNA, 88 nt, synthetic construct
  misc_feature 1..88: note = engineered ribonucleic acid scaffold (ERS) sequence
  source 1..88: mol_type = other RNA
acgaggtgttctatctgattactctgacacctctcaccagcgactatgtcgtatgggtagagctccctcttcggagggagcatcagag

SEQ ID NO: 24761 - RNA, 88 nt, synthetic construct
  misc_feature 1..88: note = engineered ribonucleic acid scaffold (ERS) sequence
  source 1..88: mol_type = other RNA
acgggactttctatctgattactctgaagtccctcaccagcgactatgtcgtatgggtagagctccctcttcggagggagcatcagag

SEQ ID NO: 24762 - RNA, 88 nt, synthetic construct
  misc_feature 1..88: note = engineered ribonucleic acid scaffold (ERS) sequence
  source 1..88: mol_type = other RNA
acgggcaattctatctgattactctgattgccctcaccagcgactatgtcgtatgggtagagctccctcttcggagggagcatcagag

SEQ ID NO: 24763 - RNA, 88 nt, synthetic construct
  misc_feature 1..88: note = engineered ribonucleic acid scaffold (ERS) sequence
  source 1..88: mol_type = other RNA
actgtgcgttctatctgattactctgacgcacatcaccagcgactatgtcgtatgggtagagctccctcttcggagggagcatcagag

SEQ ID NO: 24764 - RNA, 89 nt, synthetic construct
  misc_feature 1..89: note = engineered ribonucleic acid scaffold (ERS) sequence
  source 1..89: mol_type = other RNA
acacacggttctatctgattactctcaccgtgttcaccagcgactatgtcgtagtgggtaaagctccctcttcggagggagcatcagac

SEQ ID NO: 24765 - RNA, 89 nt, synthetic construct
  misc_feature 1..89: note = engineered ribonucleic acid scaffold (ERS) sequence
  source 1..89: mol_type = other RNA
acactggtttctatctgattactctcaaccagttcaccagcgactatgtcgtagtgggtaaagctccctcttcggagggagcatcagac

SEQ ID NO: 24766 - RNA, 89 nt, synthetic construct
  misc_feature 1..89: note = engineered ribonucleic acid scaffold (ERS) sequence
  source 1..89: mol_type = other RNA
acaggccgttctatctgattactctcacggccttcaccagcgactatgtcgtagtgggtaaagctccctcttcggagggagcatcagac

SEQ ID NO: 24767 - RNA, 89 nt, synthetic construct
  misc_feature 1..89: note = engineered ribonucleic acid scaffold (ERS) sequence
  source 1..89: mol_type = other RNA
acaggtccttctatctgattactctcaggaccttcaccagcgactatgtcgtagtgggtaaagctccctcttcggagggagcatcagac

SEQ ID NO: 24768 - RNA, 89 nt, synthetic construct
  misc_feature 1..89: note = engineered ribonucleic acid scaffold (ERS) sequence
  source 1..89: mol_type = other RNA
accagcaattctatctgattactctcattgctgtcaccagcgactatgtcgtagtgggtaaagctccctcttcggagggagcatcagac

SEQ ID NO: 24769 - RNA, 89 nt, synthetic construct
  misc_feature 1..89: note = engineered ribonucleic acid scaffold (ERS) sequence
  source 1..89: mol_type = other RNA
accgagacttctatctgattactctcaggctcgtcaccagcgactatgtcgtagtgggtaaagctccctcttcggagggagcatcagac

SEQ ID NO: 24770 - RNA, 89 nt, synthetic construct
  misc_feature 1..89: note = engineered ribonucleic acid scaffold (ERS) sequence
  source 1..89: mol_type = other RNA
acctgtagttctatctgattactctcactacagtcaccagcgactatgtcgtagtgggtaaagctccctcttcggagggagcatcagac

SEQ ID NO: 24771 - RNA, 89 nt, synthetic construct
  misc_feature 1..89: note = engineered ribonucleic acid scaffold (ERS) sequence
  source 1..89: mol_type = other RNA
acgagcacttctatctgattactctcagggctctcaccagcgactatgtcgtagtgggtaaagctccctcttcggagggagcatcagac

SEQ ID NO: 24772 - RNA, 89 nt, synthetic construct
  misc_feature 1..89: note = engineered ribonucleic acid scaffold (ERS) sequence
  source 1..89: mol_type = other RNA
acgaggtgttctatctgattactctcacacctctcaccagcgactatgtcgtagtgggtaaagctccctcttcggagggagcatcagac

SEQ ID NO: 24773 - RNA, 89 nt, synthetic construct
  misc_feature 1..89: note = engineered ribonucleic acid scaffold (ERS) sequence
  source 1..89: mol_type = other RNA
acacacggttctatctgattactttgaccgtgttcaccagcgactatgtcgtagtgggtaaagctccctcttcggagggagcatcagag

SEQ ID NO: 24774 - RNA, 89 nt, synthetic construct
  misc_feature 1..89: note = engineered ribonucleic acid scaffold (ERS) sequence
  source 1..89: mol_type = other RNA
acactggtttctatctgattactttgaaccagttcaccagcgactatgtcgtagtgggtaaagctccctcttcggagggagcatcagag

SEQ ID NO: 24775 - RNA, 89 nt, synthetic construct
  misc_feature 1..89: note = engineered ribonucleic acid scaffold (ERS) sequence
  source 1..89: mol_type = other RNA
acaggccgttctatctgattactttgacggccttcaccagcgactatgtcgtagtgggtaaagctccctcttcggagggagcatcagag

SEQ ID NO: 24776 - RNA, 89 nt, synthetic construct
  misc_feature 1..89: note = engineered ribonucleic acid scaffold (ERS) sequence
  source 1..89: mol_type = other RNA
acaggtccttctatctgattactttgaggaccttcaccagcgactatgtcgtagtgggtaaagctccctcttcggagggagcatcagag

SEQ ID NO: 24777 - RNA, 89 nt, synthetic construct
  misc_feature 1..89: note = engineered ribonucleic acid scaffold (ERS) sequence
  source 1..89: mol_type = other RNA
accagcaattctatctgattactttgattgctgtcaccagcgactatgtcgtagtgggtaaagctccctcttcggagggagcatcagag

SEQ ID NO: 24778 - RNA, 89 nt, synthetic construct
  misc_feature 1..89: note = engineered ribonucleic acid scaffold (ERS) sequence
  source 1..89: mol_type = other RNA
accgagacttctatctgattactttgaggctcgtcaccagcgactatgtcgtagtgggtaaagctccctcttcggagggagcatcagag

SEQ ID NO: 24779 - RNA, 89 nt, synthetic construct
  misc_feature 1..89: note = engineered ribonucleic acid scaffold (ERS) sequence
  source 1..89: mol_type = other RNA
acctgtagttctatctgattactttgactacagtcaccagcgactatgtcgtagtgggtaaagctccctcttcggagggagcatcagag

SEQ ID NO: 24780 - RNA, 89 nt, synthetic construct
  misc_feature 1..89: note = engineered ribonucleic acid scaffold (ERS) sequence
  source 1..89: mol_type = other RNA
acgagcacttctatctgattactttgagggctctcaccagcgactatgtcgtagtgggtaaagctccctcttcggagggagcatcagag

SEQ ID NO: 24781 - RNA, 89 nt, synthetic construct
  misc_feature 1..89: note = engineered ribonucleic acid scaffold (ERS) sequence
  source 1..89: mol_type = other RNA
acacacggttctatctgattactttgaccgtgttcaccagcgactatgtcgtagtgggtaaagctccctcttcggagggagcatcaaag

SEQ ID NO: 24782 - RNA, 89 nt, synthetic construct
  misc_feature 1..89: note = engineered ribonucleic acid scaffold (ERS) sequence
  source 1..89: mol_type = other RNA
acactggtttctatctgattactttgaaccagttcaccagcgactatgtcgtagtgggtaaagctccctcttcggagggagcatcaaag

SEQ ID NO: 24783 - RNA, 89 nt, synthetic construct
  misc_feature 1..89: note = engineered ribonucleic acid scaffold (ERS) sequence
  source 1..89: mol_type = other RNA
acaggccgttctatctgattactttgacggccttcaccagcgactatgtcgtagtgggtaaagctccctcttcggagggagcatcaaag

SEQ ID NO: 24784 - RNA, 89 nt, synthetic construct
  misc_feature 1..89: note = engineered ribonucleic acid scaffold (ERS) sequence
  source 1..89: mol_type = other RNA
acaggtccttctatctgattactttgaggaccttcaccagcgactatgtcgtagtgggtaaagctccctcttcggagggagcatcaaag

SEQ ID NO: 24785 - RNA, 89 nt, synthetic construct
  misc_feature 1..89: note = engineered ribonucleic acid scaffold (ERS) sequence
  source 1..89: mol_type = other RNA
accagcaattctatctgattactttgattgctgtcaccagcgactatgtcgtagtgggtaaagctccctcttcggagggagcatcaaag

SEQ ID NO: 24786 - RNA, 89 nt, synthetic construct
  misc_feature 1..89: note = engineered ribonucleic acid scaffold (ERS) sequence
  source 1..89: mol_type = other RNA
accgagacttctatctgattactttgaggctcgtcaccagcgactatgtcgtagtgggtaaagctccctcttcggagggagcatcaaag

SEQ ID NO: 24787 - RNA, 89 nt, synthetic construct
  misc_feature 1..89: note = engineered ribonucleic acid scaffold (ERS) sequence
  source 1..89: mol_type = other RNA
acctgtagttctatctgattactttgactacagtcaccagcgactatgtcgtagtgggtaaagctccctcttcggagggagcatcaaag

SEQ ID NO: 24788 - RNA, 89 nt, synthetic construct
  misc_feature 1..89: note = engineered ribonucleic acid scaffold (ERS) sequence
  source 1..89: mol_type = other RNA
acgagcacttctatctgattactttgagggctctcaccagcgactatgtcgtagtgggtaaagctccctcttcggagggagcatcaaag

SEQ ID NO: 24789 - RNA, 89 nt, synthetic construct
  misc_feature 1..89: note = engineered ribonucleic acid scaffold (ERS) sequence
  source 1..89: mol_type = other RNA
acacacggttctatctgattagtctcaccgtgttcaccagcgactatgtcgtagtgggtaaagctccctcttcggagggagcatgagac

SEQ ID NO: 24790 - RNA, 89 nt, synthetic construct
  misc_feature 1..89: note = engineered ribonucleic acid scaffold (ERS) sequence
  source 1..89: mol_type = other RNA
acactggtttctatctgattagtctcaaccagttcaccagcgactatgtcgtagtgggtaaagctccctcttcggagggagcatgagac

SEQ ID NO: 24791 - RNA, 89 nt, synthetic construct
  misc_feature 1..89: note = engineered ribonucleic acid scaffold (ERS) sequence
  source 1..89: mol_type = other RNA
acaggccgttctatctgattagtctcacggccttcaccagcgactatgtcgtagtgggtaaagctccctcttcggagggagcatgagac

SEQ ID NO: 24792 - RNA, 89 nt, synthetic construct
  misc_feature 1..89: note = engineered ribonucleic acid scaffold (ERS) sequence
  source 1..89: mol_type = other RNA
acaggtccttctatctgattagtctcaggaccttcaccagcgactatgtcgtagtgggtaaagctccctcttcggagggagcatgagac

SEQ ID NO: 24793 - RNA, 89 nt, synthetic construct
  misc_feature 1..89: note = engineered ribonucleic acid scaffold (ERS) sequence
  source 1..89: mol_type = other RNA
accagcaattctatctgattagtctcattgctgtcaccagcgactatgtcgtagtgggtaaagctccctcttcggagggagcatgagac

SEQ ID NO: 24794 - RNA, 89 nt, synthetic construct
  misc_feature 1..89: note = engineered ribonucleic acid scaffold (ERS) sequence
  source 1..89: mol_type = other RNA
accgagacttctatctgattagtctcaggctcgtcaccagcgactatgtcgtagtgggtaaagctccctcttcggagggagcatgagac

SEQ ID NO: 24795 - RNA, 89 nt, synthetic construct
  misc_feature 1..89: note = engineered ribonucleic acid scaffold (ERS) sequence
  source 1..89: mol_type = other RNA
acctgtagttctatctgattagtctcactacagtcaccagcgactatgtcgtagtgggtaaagctccctcttcggagggagcatgagac

SEQ ID NO: 24796 - RNA, 89 nt, synthetic construct
  misc_feature 1..89: note = engineered ribonucleic acid scaffold (ERS) sequence
  source 1..89: mol_type = other RNA
acgagcacttctatctgattagtctcagggctctcaccagcgactatgtcgtagtgggtaaagctccctcttcggagggagcatgagac

SEQ ID NO: 24797 - RNA, 89 nt, synthetic construct
  misc_feature 1..89: note = engineered ribonucleic acid scaffold (ERS) sequence
  source 1..89: mol_type = other RNA
acacacggttctatctgattagtctgaccgtgttcaccagcgactatgtcgtagtgggtaaagctccctcttcggagggagcatcagac

SEQ ID NO: 24798 - RNA, 89 nt, synthetic construct
  misc_feature 1..89: note = engineered ribonucleic acid scaffold (ERS) sequence
  source 1..89: mol_type = other RNA
acactggtttctatctgattagtctgaaccagttcaccagcgactatgtcgtagtgggtaaagctccctcttcggagggagcatcagac

SEQ ID NO: 24799 - RNA, 89 nt, synthetic construct
  misc_feature 1..89: note = engineered ribonucleic acid scaffold (ERS) sequence
  source 1..89: mol_type = other RNA
acaggccgttctatctgattagtctgacggccttcaccagcgactatgtcgtagtgggtaaagctccctcttcggagggagcatcagac

SEQ ID NO: 24800 - RNA, 89 nt, synthetic construct
  misc_feature 1..89: note = engineered ribonucleic acid scaffold (ERS) sequence
  source 1..89: mol_type = other RNA
acaggtccttctatctgattagtctgaggaccttcaccagcgactatgtcgtagtgggtaaagctccctcttcggagggagcatcagac

SEQ ID NO: 24801 - RNA, 89 nt, synthetic construct
  misc_feature 1..89: note = engineered ribonucleic acid scaffold (ERS) sequence
  source 1..89: mol_type = other RNA
accagcaattctatctgattagtctgattgctgtcaccagcgactatgtcgtagtgggtaaagctccctcttcggagggagcatcagac

SEQ ID NO: 24802 - RNA, 89 nt, synthetic construct
  misc_feature 1..89: note = engineered ribonucleic acid scaffold (ERS) sequence
  source 1..89: mol_type = other RNA
accgagacttctatctgattagtctgaggctcgtcaccagcgactatgtcgtagtgggtaaagctccctcttcggagggagcatcagac

SEQ ID NO: 24803 - RNA, 89 nt, synthetic construct
  misc_feature 1..89: note = engineered ribonucleic acid scaffold (ERS) sequence
  source 1..89: mol_type = other RNA
acctgtagttctatctgattagtctgactacagtcaccagcgactatgtcgtagtgggtaaagctccctcttcggagggagcatcagac

SEQ ID NO: 24804 - RNA, 89 nt, synthetic construct
  misc_feature 1..89: note = engineered ribonucleic acid scaffold (ERS) sequence
  source 1..89: mol_type = other RNA
acgagcacttctatctgattagtctgagggctctcaccagcgactatgtcgtagtgggtaaagctccctcttcggagggagcatcagac

SEQ ID NO: 24805 - RNA, 89 nt, synthetic construct
  misc_feature 1..89: note = engineered ribonucleic acid scaffold (ERS) sequence
  source 1..89: mol_type = other RNA
acacacggttctatctgattactctcaccgtgttcaccagcgactatgtcgtagtgggtaaagctccctcttcggagggagcatgagag

SEQ ID NO: 24806 - RNA, 89 nt, synthetic construct
  misc_feature 1..89: note = engineered ribonucleic acid scaffold (ERS) sequence
  source 1..89: mol_type = other RNA
acactggtttctatctgattactctcaaccagttcaccagcgactatgtcgtagtgggtaaagctccctcttcggagggagcatgagag

SEQ ID NO: 24807 - RNA, 89 nt, synthetic construct
  misc_feature 1..89: note = engineered ribonucleic acid scaffold (ERS) sequence
  source 1..89: mol_type = other RNA
acaggccgttctatctgattactctcacggccttcaccagcgactatgtcgtagtgggtaaagctccctcttcggagggagcatgagag

SEQ ID NO: 24808 - RNA, 89 nt, synthetic construct
  misc_feature 1..89: note = engineered ribonucleic acid scaffold (ERS) sequence
  source 1..89: mol_type = other RNA
acaggtccttctatctgattactctcaggaccttcaccagcgactatgtcgtagtgggtaaagctccctcttcggagggagcatgagag

SEQ ID NO: 24809 - RNA, 89 nt, synthetic construct
  misc_feature 1..89: note = engineered ribonucleic acid scaffold (ERS) sequence
  source 1..89: mol_type = other RNA
accagcaattctatctgattactctcattgctgtcaccagcgactatgtcgtagtgggtaaagctccctcttcggagggagcatgagag

SEQ ID NO: 24810 - RNA, 89 nt, synthetic construct
  misc_feature 1..89: note = engineered ribonucleic acid scaffold (ERS) sequence
  source 1..89: mol_type = other RNA
accgagacttctatctgattactctcaggctcgtcaccagcgactatgtcgtagtgggtaaagctccctcttcggagggagcatgagag

SEQ ID NO: 24811 - RNA, 89 nt, synthetic construct
  misc_feature 1..89: note = engineered ribonucleic acid scaffold (ERS) sequence
  source 1..89: mol_type = other RNA
acctgtagttctatctgattactctcactacagtcaccagcgactatgtcgtagtgggtaaagctccctcttcggagggagcatgagag

SEQ ID NO: 24812 - RNA, 89 nt, synthetic construct
  misc_feature 1..89: note = engineered ribonucleic acid scaffold (ERS) sequence
  source 1..89: mol_type = other RNA
acgagcacttctatctgattactctcagggctctcaccagcgactatgtcgtagtgggtaaagctccctcttcggagggagcatgagag

SEQ ID NO: 24813 - RNA, 89 nt, synthetic construct
  misc_feature 1..89: note = engineered ribonucleic acid scaffold (ERS) sequence
  source 1..89: mol_type = other RNA
acacacggtcccatctgattaccccgaccgtgttcaccagcgactatgtcgtagtgggtaaagctccctcttcggagggagcatcgggg

SEQ ID NO: 24814 - RNA, 89 nt, synthetic construct
  misc_feature 1..89: note = engineered ribonucleic acid scaffold (ERS) sequence
  source 1..89: mol_type = other RNA
acactggttcccatctgattaccccgaaccagttcaccagcgactatgtcgtagtgggtaaagctccctcttcggagggagcatcgggg

SEQ ID NO: 24815 - RNA, 89 nt, synthetic construct
  misc_feature 1..89: note = engineered ribonucleic acid scaffold (ERS) sequence
  source 1..89: mol_type = other RNA
acaggccgtcccatctgattaccccgacggccttcaccagcgactatgtcgtagtgggtaaagctccctcttcggagggagcatcgggg

SEQ ID NO: 24816 - RNA, 89 nt, synthetic construct
  misc_feature 1..89: note = engineered ribonucleic acid scaffold (ERS) sequence
  source 1..89: mol_type = other RNA
acaggtcctcccatctgattaccccgaggaccttcaccagcgactatgtcgtagtgggtaaagctccctcttcggagggagcatcgggg

SEQ ID NO: 24817 - RNA, 89 nt, synthetic construct
  misc_feature 1..89: note = engineered ribonucleic acid scaffold (ERS) sequence
  source 1..89: mol_type = other RNA
accagcaatcccatctgattaccccgattgctgtcaccagcgactatgtcgtagtgggtaaagctccctcttcggagggagcatcgggg

SEQ ID NO: 24818 - RNA, 89 nt, synthetic construct
  misc_feature 1..89: note = engineered ribonucleic acid scaffold (ERS) sequence
  source 1..89: mol_type = other RNA
accgagactcccatctgattaccccgaggctcgtcaccagcgactatgtcgtagtgggtaaagctccctcttcggagggagcatcgggg

SEQ ID NO: 24819 - RNA, 89 nt, synthetic construct
  misc_feature 1..89: note = engineered ribonucleic acid scaffold (ERS) sequence
  source 1..89: mol_type = other RNA
acctgtagtcccatctgattaccccgactacagtcaccagcgactatgtcgtagtgggtaaagctccctcttcggagggagcatcgggg

SEQ ID NO: 24820 - RNA, 89 nt, synthetic construct
  misc_feature 1..89: note = engineered ribonucleic acid scaffold (ERS) sequence
  source 1..89: mol_type = other RNA
acgagcactcccatctgattaccccgagggctctcaccagcgactatgtcgtagtgggtaaagctccctcttcggagggagcatcgggg

SEQ ID NO: 24821 - RNA, 89 nt, synthetic construct
  misc_feature 1..89: note = engineered ribonucleic acid scaffold (ERS) sequence
  source 1..89: mol_type = other RNA
acacacggtcctatctgattactccgaccgtgttcaccagcgactatgtcgtagtgggtaaagctccctcttcggagggagcatcggag

SEQ ID NO: 24822 - RNA, 89 nt, synthetic construct
  misc_feature 1..89: note = engineered ribonucleic acid scaffold (ERS) sequence
  source 1..89: mol_type = other RNA
acactggttcctatctgattactccgaaccagttcaccagcgactatgtcgtagtgggtaaagctccctcttcggagggagcatcggag

SEQ ID NO: 24823 - RNA, 89 nt, synthetic construct
  misc_feature 1..89: note = engineered ribonucleic acid scaffold (ERS) sequence
  source 1..89: mol_type = other RNA
acaggccgtcctatctgattactccgacggccttcaccagcgactatgtcgtagtgggtaaagctccctcttcggagggagcatcggag

SEQ ID NO: 24824 - RNA, 89 nt, synthetic construct
  misc_feature 1..89: note = engineered ribonucleic acid scaffold (ERS) sequence
  source 1..89: mol_type = other RNA
acaggtcctcctatctgattactccgaggaccttcaccagcgactatgtcgtagtgggtaaagctccctcttcggagggagcatcggag

SEQ ID NO: 24825 - RNA, 89 nt, synthetic construct
  misc_feature 1..89: note = engineered ribonucleic acid scaffold (ERS) sequence
  source 1..89: mol_type = other RNA
accagcaatcctatctgattactccgattgctgtcaccagcgactatgtcgtagtgggtaaagctccctcttcggagggagcatcggag

SEQ ID NO: 24826 - RNA, 89 nt, synthetic construct
  misc_feature 1..89: note = engineered ribonucleic acid scaffold (ERS) sequence
  source 1..89: mol_type = other RNA
accgagactcctatctgattactccgaggctcgtcaccagcgactatgtcgtagtgggtaaagctccctcttcggagggagcatcggag

SEQ ID NO: 24827 - RNA, 89 nt, synthetic construct
  misc_feature 1..89: note = engineered ribonucleic acid scaffold (ERS) sequence
  source 1..89: mol_type = other RNA
acctgtagtcctatctgattactccgactacagtcaccagcgactatgtcgtagtgggtaaagctccctcttcggagggagcatcggag

SEQ ID NO: 24828 - RNA, 89 nt, synthetic construct
  misc_feature 1..89: note = engineered ribonucleic acid scaffold (ERS) sequence
  source 1..89: mol_type = other RNA
acgagcactcctatctgattactccgagggctctcaccagcgactatgtcgtagtgggtaaagctccctcttcggagggagcatcggag

SEQ ID NO: 24829 - RNA, 89 nt, synthetic construct
  misc_feature 1..89: note = engineered ribonucleic acid scaffold (ERS) sequence
  source 1..89: mol_type = other RNA
acacacggtgggatctgattaccccgaccgtgttcaccagcgactatgtcgtagtgggtaaagctccctcttcggagggagcatcgggg

SEQ ID NO: 24830 - RNA, 89 nt, synthetic construct
  misc_feature 1..89: note = engineered ribonucleic acid scaffold (ERS) sequence
  source 1..89: mol_type = other RNA
acactggttgggatctgattaccccgaaccagttcaccagcgactatgtcgtagtgggtaaagctccctcttcggagggagcatcgggg

SEQ ID NO: 24831 - RNA, 89 nt, synthetic construct
  misc_feature 1..89: note = engineered ribonucleic acid scaffold (ERS) sequence
  source 1..89: mol_type = other RNA
acaggccgtgggatctgattaccccgacggccttcaccagcgactatgtcgtagtgggtaaagctccctcttcggagggagcatcgggg

SEQ ID NO: 24832 - RNA, 89 nt, synthetic construct
  misc_feature 1..89: note = engineered ribonucleic acid scaffold (ERS) sequence
  source 1..89: mol_type = other RNA
acaggtcctgggatctgattaccccgaggaccttcaccagcgactatgtcgtagtgggtaaagctccctcttcggagggagcatcgggg

SEQ ID NO: 24833 - RNA, 89 nt, synthetic construct
  misc_feature 1..89: note = engineered ribonucleic acid scaffold (ERS) sequence
  source 1..89: mol_type = other RNA
accagcaatgggatctgattaccccgattgctgtcaccagcgactatgtcgtagtgggtaaagctccctcttcggagggagcatcgggg

SEQ ID NO: 24834 - RNA, 89 nt, synthetic construct
  misc_feature 1..89: note = engineered ribonucleic acid scaffold (ERS) sequence
  source 1..89: mol_type = other RNA
accgagactgggatctgattaccccgaggctcgtcaccagcgactatgtcgtagtgggtaaagctccctcttcggagggagcatcgggg

SEQ ID NO: 24835 - RNA, 89 nt, synthetic construct
  misc_feature 1..89: note = engineered ribonucleic acid scaffold (ERS) sequence
  source 1..89: mol_type = other RNA
acctgtagtgggatctgattaccccgactacagtcaccagcgactatgtcgtagtgggtaaagctccctcttcggagggagcatcgggg

SEQ ID NO: 24836 - RNA, 89 nt, synthetic construct
  misc_feature 1..89: note = engineered ribonucleic acid scaffold (ERS) sequence
  source 1..89: mol_type = other RNA
acgagcactgggatctgattaccccgagggctctcaccagcgactatgtcgtagtgggtaaagctccctcttcggagggagcatcgggg

SEQ ID NO: 24837 - RNA, 89 nt, synthetic construct
  misc_feature 1..89: note = engineered ribonucleic acid scaffold (ERS) sequence
  source 1..89: mol_type = other RNA
acacacggtggtatctgattactccgaccgtgttcaccagcgactatgtcgtagtgggtaaagctccctcttcggagggagcatcggag

SEQ ID NO: 24838 - RNA, 89 nt, synthetic construct
  misc_feature 1..89: note = engineered ribonucleic acid scaffold (ERS) sequence
  source 1..89: mol_type = other RNA
acactggttggtatctgattactccgaaccagttcaccagcgactatgtcgtagtgggtaaagctccctcttcggagggagcatcggag

SEQ ID NO: 24839 - RNA, 89 nt, synthetic construct
  misc_feature 1..89: note = engineered ribonucleic acid scaffold (ERS) sequence
  source 1..89: mol_type = other RNA
acaggccgtggtatctgattactccgacggccttcaccagcgactatgtcgtagtgggtaaagctccctcttcggagggagcatcggag

SEQ ID NO: 24840 - RNA, 89 nt, synthetic construct
  misc_feature 1..89: note = engineered ribonucleic acid scaffold (ERS) sequence
  source 1..89: mol_type = other RNA
acaggtcctggtatctgattactccgaggaccttcaccagcgactatgtcgtagtgggtaaagctccctcttcggagggagcatcggag

SEQ ID NO: 24841 - RNA, 89 nt, synthetic construct
  misc_feature 1..89: note = engineered ribonucleic acid scaffold (ERS) sequence
  source 1..89: mol_type = other RNA
accagcaatggtatctgattactccgattgctgtcaccagcgactatgtcgtagtgggtaaagctccctcttcggagggagcatcggag

SEQ ID NO: 24842 - RNA, 89 nt, synthetic construct
  misc_feature 1..89: note = engineered ribonucleic acid scaffold (ERS) sequence
  source 1..89: mol_type = other RNA
accgagactggtatctgattactccgaggctcgtcaccagcgactatgtcgtagtgggtaaagctccctcttcggagggagcatcggag

SEQ ID NO: 24843 - RNA, 89 nt, synthetic construct
  misc_feature 1..89: note = engineered ribonucleic acid scaffold (ERS) sequence
  source 1..89: mol_type = other RNA
acctgtagtggtatctgattactccgactacagtcaccagcgactatgtcgtagtgggtaaagctccctcttcggagggagcatcggag

SEQ ID NO: 24844 - RNA, 89 nt, synthetic construct
  misc_feature 1..89: note = engineered ribonucleic acid scaffold (ERS) sequence
  source 1..89: mol_type = other RNA
acgagcactggtatctgattactccgagggctctcaccagcgactatgtcgtagtgggtaaagctccctcttcggagggagcatcggag

SEQ ID NO: 24845 - RNA, 89 nt, synthetic construct
  misc_feature 1..89: note = engineered ribonucleic acid scaffold (ERS) sequence
  source 1..89: mol_type = other RNA
acacacggttccatctgattaccctgaccgtgttcaccagcgactatgtcgtagtgggtaaagctccctcttcggagggagcatcaggg

SEQ ID NO: 24846 - RNA, 89 nt, synthetic construct
  misc_feature 1..89: note = engineered ribonucleic acid scaffold (ERS) sequence
  source 1..89: mol_type = other RNA
acactggtttccatctgattaccctgaaccagttcaccagcgactatgtcgtagtgggtaaagctccctcttcggagggagcatcaggg

SEQ ID NO: 24847 - RNA, 89 nt, synthetic construct
  misc_feature 1..89: note = engineered ribonucleic acid scaffold (ERS) sequence
  source 1..89: mol_type = other RNA
acaggccgttccatctgattaccctgacggccttcaccagcgactatgtcgtagtgggtaaagctccctcttcggagggagcatcaggg

SEQ ID NO: 24848 - RNA, 89 nt, synthetic construct
  misc_feature 1..89: note = engineered ribonucleic acid scaffold (ERS) sequence
  source 1..89: mol_type = other RNA
acaggtccttccatctgattaccctgaggaccttcaccagcgactatgtcgtagtgggtaaagctccctcttcggagggagcatcaggg

SEQ ID NO: 24849 - RNA, 89 nt, synthetic construct
  misc_feature 1..89: note = engineered ribonucleic acid scaffold (ERS) sequence
  source 1..89: mol_type = other RNA
accagcaattccatctgattaccctgattgctgtcaccagcgactatgtcgtagtgggtaaagctccctcttcggagggagcatcaggg

SEQ ID NO: 24850 - RNA, 89 nt, synthetic construct
  misc_feature 1..89: note = engineered ribonucleic acid scaffold (ERS) sequence
  source 1..89: mol_type = other RNA
accgagacttccatctgattaccctgaggctcgtcaccagcgactatgtcgtagtgggtaaagctccctcttcggagggagcatcaggg

SEQ ID NO: 24851 - RNA, 89 nt, synthetic construct
  misc_feature 1..89: note = engineered ribonucleic acid scaffold (ERS) sequence
  source 1..89: mol_type = other RNA
acctgtagttccatctgattaccctgactacagtcaccagcgactatgtcgtagtgggtaaagctccctcttcggagggagcatcaggg

SEQ ID NO: 24852 - RNA, 89 nt, synthetic construct
  misc_feature 1..89: note = engineered ribonucleic acid scaffold (ERS) sequence
  source 1..89: mol_type = other RNA
acgagcacttccatctgattaccctgagggctctcaccagcgactatgtcgtagtgggtaaagctccctcttcggagggagcatcaggg

SEQ ID NO: 24853 - RNA, 89 nt, synthetic construct
  misc_feature 1..89: note = engineered ribonucleic acid scaffold (ERS) sequence
  source 1..89: mol_type = other RNA
acacacggttggatctgattaccctgaccgtgttcaccagcgactatgtcgtagtgggtaaagctccctcttcggagggagcatcaggg

SEQ ID NO: 24854 - RNA, 89 nt, synthetic construct
  misc_feature 1..89: note = engineered ribonucleic acid scaffold (ERS) sequence
  source 1..89: mol_type = other RNA
acactggtttggatctgattaccctgaaccagttcaccagcgactatgtcgtagtgggtaaagctccctcttcggagggagcatcaggg

SEQ ID NO: 24855 - RNA, 89 nt, synthetic construct
  misc_feature 1..89: note = engineered ribonucleic acid scaffold (ERS) sequence
  source 1..89: mol_type = other RNA
acaggccgttggatctgattaccctgacggccttcaccagcgactatgtcgtagtgggtaaagctccctcttcggagggagcatcaggg

SEQ ID NO: 24856 - RNA, 89 nt, synthetic construct
  misc_feature 1..89: note = engineered ribonucleic acid scaffold (ERS) sequence
  source 1..89: mol_type = other RNA
acaggtccttggatctgattaccctgaggaccttcaccagcgactatgtcgtagtgggtaaagctccctcttcggagggagcatcaggg

SEQ ID NO: 24857 - RNA, 89 nt, synthetic construct
  misc_feature 1..89: note = engineered ribonucleic acid scaffold (ERS) sequence
  source 1..89: mol_type = other RNA
accagcaattggatctgattaccctgattgctgtcaccagcgactatgtcgtagtgggtaaagctccctcttcggagggagcatcaggg

SEQ ID NO: 24858 - RNA, 89 nt, synthetic construct
  misc_feature 1..89: note = engineered ribonucleic acid scaffold (ERS) sequence
  source 1..89: mol_type = other RNA
accgagacttggatctgattaccctgaggctcgtcaccagcgactatgtcgtagtgggtaaagctccctcttcggagggagcatcaggg

SEQ ID NO: 24859 - RNA, 89 nt, synthetic construct
  misc_feature 1..89: note = engineered ribonucleic acid scaffold (ERS) sequence
  source 1..89: mol_type = other RNA
acctgtagttggatctgattaccctgactacagtcaccagcgactatgtcgtagtgggtaaagctccctcttcggagggagcatcaggg

SEQ ID NO: 24860 - RNA, 89 nt, synthetic construct
  misc_feature 1..89: note = engineered ribonucleic acid scaffold (ERS) sequence
  source 1..89: mol_type = other RNA
acgagcacttggatctgattaccctgagggctctcaccagcgactatgtcgtagtgggtaaagctccctcttcggagggagcatcaggg

SEQ ID NO: 24861 - RNA, 89 nt, synthetic construct
  misc_feature 1..89: note = engineered ribonucleic acid scaffold (ERS) sequence
  source 1..89: mol_type = other RNA
acacacggttgtatctgattactctgaccgtgttcaccagcgactatgtcgtagtgggtaaagctccctcttcggagggagcatcagag

SEQ ID NO: 24862 - RNA, 89 nt, synthetic construct
  misc_feature 1..89: note = engineered ribonucleic acid scaffold (ERS) sequence
  source 1..89: mol_type = other RNA
acactggtttgtatctgattactctgaaccagttcaccagcgactatgtcgtagtgggtaaagctccctcttcggagggagcatcagag

SEQ ID NO: 24863 - RNA, 89 nt, synthetic construct
  misc_feature 1..89: note = engineered ribonucleic acid scaffold (ERS) sequence
  source 1..89: mol_type = other RNA
acaggccgttgtatctgattactctgacggccttcaccagcgactatgtcgtagtgggtaaagctccctcttcggagggagcatcagag

SEQ ID NO: 24864 - RNA, 89 nt, synthetic construct
  misc_feature 1..89: note = engineered ribonucleic acid scaffold (ERS) sequence
  source 1..89: mol_type = other RNA
acaggtccttgtatctgattactctgaggaccttcaccagcgactatgtcgtagtgggtaaagctccctcttcggagggagcatcagag

SEQ ID NO: 24865 - RNA, 89 nt, synthetic construct
  misc_feature 1..89: note = engineered ribonucleic acid scaffold (ERS) sequence
  source 1..89: mol_type = other RNA
accagcaattgtatctgattactctgattgctgtcaccagcgactatgtcgtagtgggtaaagctccctcttcggagggagcatcagag

SEQ ID NO: 24866 - RNA, 89 nt, synthetic construct
  misc_feature 1..89: note = engineered ribonucleic acid scaffold (ERS) sequence
  source 1..89: mol_type = other RNA
accgagacttgtatctgattactctgaggctcgtcaccagcgactatgtcgtagtgggtaaagctccctcttcggagggagcatcagag

SEQ ID NO: 24867 - RNA, 89 nt, synthetic construct
  misc_feature 1..89: note = engineered ribonucleic acid scaffold (ERS) sequence
  source 1..89: mol_type = other RNA
acctgtagttgtatctgattactctgactacagtcaccagcgactatgtcgtagtgggtaaagctccctcttcggagggagcatcagag

SEQ ID NO: 24868 - RNA, 89 nt, synthetic construct
  misc_feature 1..89: note = engineered ribonucleic acid scaffold (ERS) sequence
  source 1..89: mol_type = other RNA
acgagcacttgtatctgattactctgagggctctcaccagcgactatgtcgtagtgggtaaagctccctcttcggagggagcatcagag

SEQ ID NO: 24869 - RNA, 89 nt, synthetic construct
  misc_feature 1..89: note = engineered ribonucleic acid scaffold (ERS) sequence
  source 1..89: mol_type = other RNA
acacacggttttatctgattactctgaccgtgttcaccagcgactatgtcgtagtgggtaaagctccctcttcggagggagcatcagag

SEQ ID NO: 24870 - RNA, 89 nt, synthetic construct
  misc_feature 1..89: note = engineered ribonucleic acid scaffold (ERS) sequence
  source 1..89: mol_type = other RNA
acactggtttttatctgattactctgaaccagttcaccagcgactatgtcgtagtgggtaaagctccctcttcggagggagcatcagag

SEQ ID NO: 24871 - RNA, 89 nt, synthetic construct
  misc_feature 1..89: note = engineered ribonucleic acid scaffold (ERS) sequence
  source 1..89: mol_type = other RNA
acaggccgttttatctgattactctgacggccttcaccagcgactatgtcgtagtgggtaaagctccctcttcggagggagcatcagag

SEQ ID NO: 24872 - RNA, 89 nt, synthetic construct
  misc_feature 1..89: note = engineered ribonucleic acid scaffold (ERS) sequence
  source 1..89: mol_type = other RNA
acaggtccttttatctgattactctgaggaccttcaccagcgactatgtcgtagtgggtaaagctccctcttcggagggagcatcagag

SEQ ID NO: 24873 - RNA, 89 nt, synthetic construct
  misc_feature 1..89: note = engineered ribonucleic acid scaffold (ERS) sequence
  source 1..89: mol_type = other RNA
accagcaattttatctgattactctgattgctgtcaccagcgactatgtcgtagtgggtaaagctccctcttcggagggagcatcagag

SEQ ID NO: 24874 - RNA, 89 nt, synthetic construct
  misc_feature 1..89: note = engineered ribonucleic acid scaffold (ERS) sequence
  source 1..89: mol_type = other RNA
accgagacttttatctgattactctgaggctcgtcaccagcgactatgtcgtagtgggtaaagctccctcttcggagggagcatcagag

SEQ ID NO: 24875 - RNA, 89 nt, synthetic construct
  misc_feature 1..89: note = engineered ribonucleic acid scaffold (ERS) sequence
  source 1..89: mol_type = other RNA
acctgtagttttatctgattactctgactacagtcaccagcgactatgtcgtagtgggtaaagctccctcttcggagggagcatcagag

SEQ ID NO: 24876 - RNA, 89 nt, synthetic construct
  misc_feature 1..89: note = engineered ribonucleic acid scaffold (ERS) sequence
  source 1..89: mol_type = other RNA
acgagcacttttatctgattactctgagggctctcaccagcgactatgtcgtagtgggtaaagctccctcttcggagggagcatcagag

SEQ ID NO: 24877 - RNA, 89 nt, synthetic construct
  misc_feature 1..89: note = engineered ribonucleic acid scaffold (ERS) sequence
  source 1..89: mol_type = other RNA
acacacggttttatctgattactttgaccgtgttcaccagcgactatgtcgtagtgggtaaagctccctcttcggagggagcatcagag

SEQ ID NO: 24878 - RNA, 89 nt, synthetic construct
  misc_feature 1..89: note = engineered ribonucleic acid scaffold (ERS) sequence
  source 1..89: mol_type = other RNA
acactggtttttatctgattactttgaaccagttcaccagcgactatgtcgtagtgggtaaagctccctcttcggagggagcatcagag

SEQ ID NO: 24879 - RNA, 89 nt, synthetic construct
  misc_feature 1..89: note = engineered ribonucleic acid scaffold (ERS) sequence
  source 1..89: mol_type = other RNA
acaggccgttttatctgattactttgacggccttcaccagcgactatgtcgtagtgggtaaagctccctcttcggagggagcatcagag

SEQ ID NO: 24880 - RNA, 89 nt, synthetic construct
  misc_feature 1..89: note = engineered ribonucleic acid scaffold (ERS) sequence
  source 1..89: mol_type = other RNA
acaggtccttttatctgattactttgaggaccttcaccagcgactatgtcgtagtgggtaaagctccctcttcggagggagcatcagag

SEQ ID NO: 24881 - RNA, 89 nt, synthetic construct
  misc_feature 1..89: note = engineered ribonucleic acid scaffold (ERS) sequence
  source 1..89: mol_type = other RNA
accagcaattttatctgattactttgattgctgtcaccagcgactatgtcgtagtgggtaaagctccctcttcggagggagcatcagag

SEQ ID NO: 24882 - RNA, 89 nt, synthetic construct
  misc_feature 1..89: note = engineered ribonucleic acid scaffold (ERS) sequence
  source 1..89: mol_type = other RNA
accgagacttttatctgattactttgaggctcgtcaccagcgactatgtcgtagtgggtaaagctccctcttcggagggagcatcagag

SEQ ID NO: 24883 - RNA, 89 nt, synthetic construct
  misc_feature 1..89: note = engineered ribonucleic acid scaffold (ERS) sequence
  source 1..89: mol_type = other RNA
acctgtagttttatctgattactttgactacagtcaccagcgactatgtcgtagtgggtaaagctccctcttcggagggagcatcagag

SEQ ID NO: 24884 - RNA, 89 nt, synthetic construct
  misc_feature 1..89: note = engineered ribonucleic acid scaffold (ERS) sequence
  source 1..89: mol_type = other RNA
acgagcacttttatctgattactttgagggctctcaccagcgactatgtcgtagtgggtaaagctccctcttcggagggagcatcagag

SEQ ID NO: 24885 - RNA, 89 nt, synthetic construct
  misc_feature 1..89: note = engineered ribonucleic acid scaffold (ERS) sequence
  source 1..89: mol_type = other RNA
acacacggttttatctgattactctgaccgtgttcaccagcgactatgtcgtagtgggtaaagctccctcttcggagggagcatcaaag

SEQ ID NO: 24886 - RNA, 89 nt, synthetic construct
  misc_feature 1..89: note = engineered ribonucleic acid scaffold (ERS) sequence
  source 1..89: mol_type = other RNA
acactggtttttatctgattactctgaaccagttcaccagcgactatgtcgtagtgggtaaagctccctcttcggagggagcatcaaag

SEQ ID NO: 24887 - RNA, 89 nt, synthetic construct
  misc_feature 1..89: note = engineered ribonucleic acid scaffold (ERS) sequence
  source 1..89: mol_type = other RNA
acaggccgttttatctgattactctgacggccttcaccagcgactatgtcgtagtgggtaaagctccctcttcggagggagcatcaaag

SEQ ID NO: 24888 - RNA, 89 nt, synthetic construct
  misc_feature 1..89: note = engineered ribonucleic acid scaffold (ERS) sequence
  source 1..89: mol_type = other RNA
acaggtccttttatctgattactctgaggaccttcaccagcgactatgtcgtagtgggtaaagctccctcttcggagggagcatcaaag

SEQ ID NO: 24889 - RNA, 89 nt, synthetic construct
  misc_feature 1..89: note = engineered ribonucleic acid scaffold (ERS) sequence
  source 1..89: mol_type = other RNA
accagcaattttatctgattactctgattgctgtcaccagcgactatgtcgtagtgggtaaagctccctcttcggagggagcatcaaag

SEQ ID NO: 24890 - RNA, 89 nt, synthetic construct
  misc_feature 1..89: note = engineered ribonucleic acid scaffold (ERS) sequence
  source 1..89: mol_type = other RNA
accgagacttttatctgattactctgaggctcgtcaccagcgactatgtcgtagtgggtaaagctccctcttcggagggagcatcaaag

SEQ ID NO: 24891 - RNA, 89 nt, synthetic construct
  misc_feature 1..89: note = engineered ribonucleic acid scaffold (ERS) sequence
  source 1..89: mol_type = other RNA
acctgtagttttatctgattactctgactacagtcaccagcgactatgtcgtagtgggtaaagctccctcttcggagggagcatcaaag

SEQ ID NO: 24892 - RNA, 89 nt, synthetic construct
  misc_feature 1..89: note = engineered ribonucleic acid scaffold (ERS) sequence
  source 1..89: mol_type = other RNA
acgagcacttttatctgattactctgagggctctcaccagcgactatgtcgtagtgggtaaagctccctcttcggagggagcatcaaag

SEQ ID NO: 24893 - RNA, 89 nt, synthetic construct
  misc_feature 1..89: note = engineered ribonucleic acid scaffold (ERS) sequence
  source 1..89: mol_type = other RNA
acacacggttctatctgattactctgaccgtgttcaccagcgactatgtcgtagtgggtaaagctccctcttcggagggagcctcagag

SEQ ID NO: 24894 - RNA, 89 nt, synthetic construct
  misc_feature 1..89: note = engineered ribonucleic acid scaffold (ERS) sequence
  source 1..89: mol_type = other RNA
acactggtttctatctgattactctgaaccagttcaccagcgactatgtcgtagtgggtaaagctccctcttcggagggagcctcagag

SEQ ID NO: 24895 - RNA, 89 nt, synthetic construct
  misc_feature 1..89: note = engineered ribonucleic acid scaffold (ERS) sequence
  source 1..89: mol_type = other RNA
acaggccgttctatctgattactctgacggccttcaccagcgactatgtcgtagtgggtaaagctccctcttcggagggagcctcagag

SEQ ID NO: 24896 - RNA, 89 nt, synthetic construct
  misc_feature 1..89: note = engineered ribonucleic acid scaffold (ERS) sequence
  source 1..89: mol_type = other RNA
acaggtccttctatctgattactctgaggaccttcaccagcgactatgtcgtagtgggtaaagctccctcttcggagggagcctcagag

SEQ ID NO: 24897 - RNA, 89 nt, synthetic construct
  misc_feature 1..89: note = engineered ribonucleic acid scaffold (ERS) sequence
  source 1..89: mol_type = other RNA
accagcaattctatctgattactctgattgctgtcaccagcgactatgtcgtagtgggtaaagctccctcttcggagggagcctcagag

SEQ ID NO: 24898 - RNA, 89 nt, synthetic construct
  misc_feature 1..89: note = engineered ribonucleic acid scaffold (ERS) sequence
  source 1..89: mol_type = other RNA
accgagacttctatctgattactctgaggctcgtcaccagcgactatgtcgtagtgggtaaagctccctcttcggagggagcctcagag

SEQ ID NO: 24899 - RNA, 89 nt, synthetic construct
  misc_feature 1..89: note = engineered ribonucleic acid scaffold (ERS) sequence
  source 1..89: mol_type = other RNA
acctgtagttctatctgattactctgactacagtcaccagcgactatgtcgtagtgggtaaagctccctcttcggagggagcctcagag

SEQ ID NO: 24900 - RNA, 89 nt, synthetic construct
  misc_feature 1..89: note = engineered ribonucleic acid scaffold (ERS) sequence
  source 1..89: mol_type = other RNA
acgagcacttctatctgattactctgagggctctcaccagcgactatgtcgtagtgggtaaagctccctcttcggagggagcctcagag

SEQ ID NO: 24901 - RNA, 89 nt, synthetic construct
  misc_feature 1..89: note = engineered ribonucleic acid scaffold (ERS) sequence
  source 1..89: mol_type = other RNA
acacacggttctatctgattactctgaccgtgttcaccagcgactatgtcgtagtgggtaaagctccctcttcggagggagcgtcagag

SEQ ID NO: 24902 - RNA, 89 nt, synthetic construct
  misc_feature 1..89: note = engineered ribonucleic acid scaffold (ERS) sequence
  source 1..89: mol_type = other RNA
acactggtttctatctgattactctgaaccagttcaccagcgactatgtcgtagtgggtaaagctccctcttcggagggagcgtcagag

SEQ ID NO: 24903 - RNA, 89 nt, synthetic construct
  misc_feature 1..89: note = engineered ribonucleic acid scaffold (ERS) sequence
  source 1..89: mol_type = other RNA
acaggccgttctatctgattactctgacggccttcaccagcgactatgtcgtagtgggtaaagctccctcttcggagggagcgtcagag

SEQ ID NO: 24904 - RNA, 89 nt, synthetic construct
  misc_feature 1..89: note = engineered ribonucleic acid scaffold (ERS) sequence
  source 1..89: mol_type = other RNA
acaggtccttctatctgattactctgaggaccttcaccagcgactatgtcgtagtgggtaaagctccctcttcggagggagcgtcagag

SEQ ID NO: 24905 - RNA, 89 nt, synthetic construct
  misc_feature 1..89: note = engineered ribonucleic acid scaffold (ERS) sequence
  source 1..89: mol_type = other RNA
accagcaattctatctgattactctgattgctgtcaccagcgactatgtcgtagtgggtaaagctccctcttcggagggagcgtcagag

SEQ ID NO: 24906 - RNA, 89 nt, synthetic construct
  misc_feature 1..89: note = engineered ribonucleic acid scaffold (ERS) sequence
  source 1..89: mol_type = other RNA
accgagacttctatctgattactctgaggctcgtcaccagcgactatgtcgtagtgggtaaagctccctcttcggagggagcgtcagag

SEQ ID NO: 24907 - RNA, 89 nt, synthetic construct
  misc_feature 1..89: note = engineered ribonucleic acid scaffold (ERS) sequence
  source 1..89: mol_type = other RNA
acctgtagttctatctgattactctgactacagtcaccagcgactatgtcgtagtgggtaaagctccctcttcggagggagcgtcagag

SEQ ID NO: 24908 - RNA, 89 nt, synthetic construct
  misc_feature 1..89: note = engineered ribonucleic acid scaffold (ERS) sequence
  source 1..89: mol_type = other RNA
acgagcacttctatctgattactctgagggctctcaccagcgactatgtcgtagtgggtaaagctccctcttcggagggagcgtcagag

SEQ ID NO: 24909 - RNA, 89 nt, synthetic construct
  misc_feature 1..89: note = engineered ribonucleic acid scaffold (ERS) sequence
  source 1..89: mol_type = other RNA
acacacggttctatctgattactctgaccgtgttcaccagcgactatgtcgtagtgggtaaagctccctcttcggagggagcatcaaag

SEQ ID NO: 24910 - RNA, 89 nt, synthetic construct
  misc_feature 1..89: note = engineered ribonucleic acid scaffold (ERS) sequence
  source 1..89: mol_type = other RNA
acactggtttctatctgattactctgaaccagttcaccagcgactatgtcgtagtgggtaaagctccctcttcggagggagcatcaaag

SEQ ID NO: 24911 - RNA, 89 nt, synthetic construct
  misc_feature 1..89: note = engineered ribonucleic acid scaffold (ERS) sequence
  source 1..89: mol_type = other RNA
acaggccgttctatctgattactctgacggccttcaccagcgactatgtcgtagtgggtaaagctccctcttcggagggagcatcaaag

SEQ ID NO: 24912 - RNA, 89 nt, synthetic construct
  misc_feature 1..89: note = engineered ribonucleic acid scaffold (ERS) sequence
  source 1..89: mol_type = other RNA
acaggtccttctatctgattactctgaggaccttcaccagcgactatgtcgtagtgggtaaagctccctcttcggagggagcatcaaag

SEQ ID NO: 24913 - RNA, 89 nt, synthetic construct
  misc_feature 1..89: note = engineered ribonucleic acid scaffold (ERS) sequence
  source 1..89: mol_type = other RNA
accagcaattctatctgattactctgattgctgtcaccagcgactatgtcgtagtgggtaaagctccctcttcggagggagcatcaaag

SEQ ID NO: 24914 - RNA, 89 nt, synthetic construct
  misc_feature 1..89: note = engineered ribonucleic acid scaffold (ERS) sequence
  source 1..89: mol_type = other RNA
accgagacttctatctgattactctgaggctcgtcaccagcgactatgtcgtagtgggtaaagctccctcttcggagggagcatcaaag

SEQ ID NO: 24915 - RNA, 89 nt, synthetic construct
  misc_feature 1..89: note = engineered ribonucleic acid scaffold (ERS) sequence
  source 1..89: mol_type = other RNA
acctgtagttctatctgattactctgactacagtcaccagcgactatgtcgtagtgggtaaagctccctcttcggagggagcatcaaag

SEQ ID NO: 24916 - protein, 978 aa, synthetic construct
  REGION 1..978: note = engineered CasX variant
QEIKRINKIRRRLVKDSNTKKAGKTGPMKTLLVRVMTPDLRERLENLRKKPENIPQPISNTSRANLNKLLTDYTEMKKAILHVYWEEFQKDPVGLMSRVAQPASKKIDQNKLKPEMDEKGNLTTAGFACSQCGQPLFVYKLEQVSEKGKAYTNYFGRCNVAEHEKLILLAQLKPEKDSDEAVTYSLGKFGQRALDFYSIHVTKESTHPVKPLAQIAGNRYASGPVGKALSDACMGTIASFLSKYQDIIIEHQKVVKGNQKRLESLRELAGKENLEYPSVTLPPQPHTKEGVDAYNEVIARVRMWVNLNLWQKLKLSRDDAKPLLRLKGFPSFPLVERQANEVDWWDMVCNVKKLINEKKEDGKVFWQNLAGYKRQEALRPYLSSEEDRKKGKKFARYQLGDLLLHLEKKHGEDWGKVYDEAWERIDKKVEGLSKHIKLEEERRSEDAQSKAALTDWLRAKASFVIEGLKEADKDEFCRCELKLQKWYGDLRGKPFAIEAENSILDISGFSKQYNCAFIWQKDGVKKLNLYLIINYFKGGKLRFKKIKPEAFEANRFYTVINKKSGEIVPMEVNFNFDDPNLIILPLAFGKRQGREFIWNDLLSLETGSLKLANGRVIEKTLYNRRTRQDEPALFVALTFERREVLDSYNIKPMNLIGVDRGENIPAVIALTDPEGCPLSRFKDSLGNPTHILRIGESYKEKQRTIQAKKEVEQRRAGGYSRKYASKAKNLADDMVRNTARDLLYYAVTQDAMLIFENLSRGFGRQGKRTFMAERQYTRMEDWLTAKLAYEGLPSKTYLSKTLAQYTSKTCSNCGFTITSADYDRVLEKLKKTATGWMTTINGKELKVEGQITYYNRYKRQNVVKDLSVELDRLSEESVNNDISSWTKGRSGEALSLLKKRFSHRPVQEKFVCLNCGFETHADEQAALNIARSWLFLRSQEYKKYQTNKTTGNTDKRAFVETWQSFYRKKLKEVWKPAV

SEQ ID NO: 24917 - protein, 978 aa, synthetic construct
  REGION 1..978: note = engineered CasX variant
QEIKRINKIRRRLVKDSNTKKAGKTGPMKTLLVRVMTPDLRERLENLRKKPENIPQPISNTSRANLNKLLTDYTEMKKAILHVYWEEFQKDPVGLMSRVAQPASKKIDQNKLKPEMDEKGNLTTAGFACSQCGQPLFVYKLEQVSEKGKAYTNYFGRCNVAEHEKLILLAQLKPEKDSDEAVTYSLGKFGQRALDFYSIHVTKESTHPVKPLAQIAGNRYASGPVGKALSDACMGTIASFLSKYQDIIIEHQKVVKGNQKRLESLRELAGKENLEYPSVTLPPQPHTKEGVDAYNEVIARVRMWVNLNLWQKLKLSRDDAKPLLRLKGFPSFPLVERQANEVDWWDMVCNVKKLINEKKEDGKVFWQNLAGYKRQEALRPYLSSEEDRKKGKKFARYQLGDLLLHLEKKHGEDWGKVYDEAWERIDKKVEGLSKHIKLEEERRSEDAQSKAALTDWLRAKASFVIEGLKEADKDEFCRCELKLQKWYGDLRGKPFAIEAENSILDISGFSKQYNCAFIWQKDGVKKLNLYLIINYFKGGKLRFKKIKPEAFEANRFYTVINKKSGEIVPMEVNFNFDDPNLIILPLAFGKRQGREFIWNDLLSLETGSLKLANGRVIEKTLYNRRTRQDEPALFVALTFERREVLDSYNIKPMNLIGVDRGENIPAVIALTDPEGCPLSRFKDSLGNPTHILRIGESYKEKQRTIQAFKEVEQRRAGGYSRKYASKAKNLADDMVRNTARDLLYYAVTQDAMLIFENLSRGFGRQGKRTFMAERQYTRMEDWLTAKLAYEGLPSKTYLSKTLAQYTSKTCSNCGFTITSADYDRVLEKLKKTATGWMTTINGKELKVEGQITYYNRYKRQNVVKDLSVELDRLSEESVNNDISSWTKGRSGEALSLLKKRFSHRPVQEKFVCLNCGFETHADEQAALNIARSWLFLRSQEYKKYQTNKTTGNTDKRAFVETWQSFYRKKLKEVWKPAV

SEQ ID NO: 24918 - protein, 978 aa, synthetic construct
  REGION 1..978: note = engineered CasX variant
QEIKRINKIRRRLVKDSNTKKAGKTGPMKTLLVRVMTPDLRERLENLRKKPENIPQPISNTSRANLNKLLTDYTEMKKAILHVYWEEFQKDPVGLMSRVAQPASKKIDQNKLKPEMDEKGNLTTAGFACSQCGQPLFVYKLEQVSEKGKAYTNYFGRCNVAEHEKLILLAQLKPEKDSDEAVTYSLGKFGQRALDFYSIHVTKESTHPVKPLAQIAGNRYASGPVGKALSDACMGTIASFLSKYQDIIIEHQKVVKGNQKRLESLRELAGKENLEYPSVTLPPQPHTKEGVDAYNEVIARVRMWVNLNLWQKLKLSRDDAKPLLRLKGFPSFPLVERQANEVDWWDMVCNVKKLINEKKEDGKVFWQNLAGYKRQEALRPYLSSEEDRKKGKKFARYQLGDLLLHLEKKHGEDWGKVYDEAWERIDKKVEGLSKHIKLEEERRSEDAQSKAALTDWLRAKASFVIEGLKEADKDEFCRCELKLQKWYGDLRGKPFAIEAENSILDISGFSKQYNCAFIWQKDGVKKLNLYLIINYFKGGKLRFKKIKPEAFEANRFYTVINKKSGEIVPMEVNFNFDDPNLIILPLAFGKRQGREFIWNDLLSLETGSLKLANGRVIEKTLYNRRTRQDEPALFVALTFERREVLDSWNIKPMNLIGVDRGENIPAVIALTDPEGCPLSRFKDSVGNPTHILRIGESYKEKQRTIQAKKEVEQRRAGGYSRKYASKAKNLADDMVRNTARDLLYYAVTQDAMLIFENLSRGFGRQGKRTFMAERQYTRMEDWLTAKLAYEGLPSKTYLSKTLAQYTSKTCSNCGFTITSADYDRVLEKLKKTATGWMTTINGKELKVEGQITYYNRYKRQNVVKDLSVELDRLSEESVNNDISSWTKGRSGEALSLLKKRFSHRPVQEKFVCLNCGFETHADEQAALNIARSWLFLRSQEYKKYQTNKTTGNTDKRAFVETWQSFYRKKLKEVWKPAV

SEQ ID NO: 24919 - protein, 978 aa, synthetic construct
  REGION 1..978: note = engineered CasX variant
QEIKRINKIRRRLVKDSNTKKAGKTGPMKTLLVRVMTPDLRERLENLRKKPENIPQPISNTSRANLNKLLTDYTEMKKAILHVYWEEFQKDPVGLMSRVAQPASKKIDQNKLKPEMDEKGNLTTAGFACSQCGQPLFVYKLEQVSEKGKAYTNYFGRCNVAEHEKLILLAQLKPEKDSDEAVTYSLGKFGQRALDFYSIHVTKESTHPVKPLAQIAGNRYASGPVGKALSDACMGTIASFLSKYQDIIIEHQKVVKGNQKRLESLRELAGKENLEYPSVTLPPQPHTKEGVDAYNEVIARVRMWVNLNLWQKLKLSRDDAKPLLRLKGFPSFPLVERQANEVDWWDMVCNVKKLINEKKEDGKVFWQNLAGYKRQEALRPYLSSEEDRKKGKKFARYQLGDLLLHLEKKHGEDWGKVYDEAWERIDKKVEGLSKHIKLEEERRSEDAQSKAALTDWLRAKASFVIEGLKEADKDEFCRCELKLQKWYGDLRGKPFAIEAENSILDISGFSKQYNCAFIWQKDGVKKLNLYLIINYFKGGKLRFKKIKPEAFEANRFYTVINKKSGEIVPMEVNFNFDDPNLIILPLAFGKRQGREFIWNDLLSLETGSLKLANGRVIEKTLYNRRTRQDEPALFVALTFERREVLDSWNIKPMNLIGVDRGENIPAVIALTDPEGCPLSRFKDSLGNPTHILRIGESYKEKQRTIQAKKEVEQRRAGGYSRKYASKAKNLADDMVRNTARDLLYYAVTQDAMLIFENLSRGFGRQGKRTFMAERQYTRMEDWLTAKLAYEGLPSKTYLSKTLAQYTSKTCSNCGFTITSADYDRVLEKLKKTATGWMTTINGKELKVEGQITYYNRYKRQNVVKDLSVELDRLSEESVNNDISSWTKGRSGEALSLLKKRFSHRPVQEKFVCLNCGFETHADEQAALNIARSWLFLRSQEYKKYQTNKTTGNTDKRAFVETWQSFYRKKLKEVWKPAV

SEQ ID NO: 24920 - protein, 978 aa, synthetic construct
  REGION 1..978: note = engineered CasX variant
QEIKRINKIRRRLVKDSNTKKAGKTGPMKTLLVRVMTPDLRERLENLRKKPENIPQPISNTSRANLNKLLTDYTEMKKAILHVYWEEFQKDPVGLMSRVAQPASKKIDQNKLKPEMDEKGNLTTAGFACSQCGQPLFVYKLEQVSEKGKAYTNYFGRCNVAEHEKLILLAQLKPEKDSDEAVTYSLGKFGQRALDFYSIHVTKESTHPVKPLAQIAGNRYASGPVGKALSDACMGTIASFLSKYQDIIIEHQKVVKGNQKRLESLRELAGKENLEYPSVTLPPQPHTKEGVDAYNEVIARVRMWVNLNLWQKLKLSRDDAKPLLRLKGFPSFPLVERQANEVDWWDMVCNVKKLINEKKEDGKVFWQNLAGYKRQEALRPYLSSEEDRKKGKKFARYQLGDLLLHLEKKHGEDWGKVYDEAWERIDKKVEGLSKHIKLEEERRSEDAQSKAALTDWLRAKASFVIEGLKEADKDEFCRCELKLQKWYGDLRGKPFAIEAENSILDISGFSKQYNCAFIWQKDGVKKLNLYLIINYFKGGKLRFKKIKPEAFEANRFYTVINKKSGEIVPMEVNFNFDDPNLIILPLAFGKRQGREFIWNDLLSLETGSLKLANGRVIEKTLYNRRTRQDEPALFVALTFERREVLDSWNIKPMNLIGVDRGENIPAVIALTDPEGCPLSCFKDSVGNPTHILRIGESYKEKQRTIQAKKEVEQRRAGGYSRKYASKAKNLADDMVRNTARDLLYYAVTQDAMLIFENLSRGFGRQGKRTFMAERQYTRMEDWLTAKLAYEGLPSKTYLSKTLAQYTSKTCSNCGFTITSADYDRVLEKLKKTATGWMTTINGKELKVEGQITYYNRYKRQNVVKDLSVELDRLSEESVNNDISSWTKGRSGEALSLLKKRFSHRPVQEKFVCLNCGFETHADEQAALNIARSWLFLRSQEYKKYQTNKTTGNTDKRAFVETWQSFYRKKLKEVWKPAV

SEQ ID NO: 24921 - protein, 978 aa, synthetic construct
  REGION 1..978: note = engineered CasX variant
QEIKRINKIRRRLVKDSNTKKAGKTGPMKTLLVRVMTPDLRERLENLRKKPENIPQPISNTSRANLNKLLTDYTEMKKAILHVYWEEFQKDPVGLMSRVAQPASKKIDQNKLKPEMDEKGNLTTAGFACSQCGQPLFVYKLEQVSEKGKAYTNYFGRCNVAEHEKLILLAQLKPEKDSDEAVTYSLGKFGQRALDFYSIHVTKESTHPVKPLAQIAGNRYASGPVGKALSDACMGTIASFLSKYQDIIIEHQKVVKGNQKRLESLRELAGKENLEYPSVTLPPQPHTKEGVDAYNEVIARVRMWVNLNLWQKLKLSRDDAKPLLRLKGFPSFPLVERQANEVDWWDMVCNVKKLINEKKEDGKVFWQNLAGYKRQEALRPYLSSEEDRKKGKKFARYQLGDLLLHLEKKHGEDWGKVYDEAWERIDKKVEGLSKHIKLEEERRSEDAQSKAALTDWLRAKASFVIEGLKEADKDEFCRCELKLQKWYGDLRGKPFAIEAENSILDISGFSKQYNCAFIWQKDGVKKLNLYLIINYFKGGKLRFKKIKPEAFEANRFYTVINKKSGEIVPMEVNFNFDDPNLIILPLAFGKRQGREFIWNDLLSLETGSLKLANGRVIEKTLYNRRTRQDEPALFVALTFERREVLDSWNIKPMNLIGVDRGENIPAVIALTDPEGCPLSCFKDSLGNPTHILRIGESYKEKQRTIQAKKEVEQRRAGGYSRKYASKAKNLADDMVRNTARDLLYYAVTQDAMLIFENLSRGFGRQGKRTFMAERQYTRMEDWLTAKLAYEGLPSKTYLSKTLAQYTSKTCSNCGFTITSADYDRVLEKLKKTATGWMTTINGKELKVEGQITYYNRYKRQNVVKDLSVELDRLSEESVNNDISSWTKGRSGEALSLLKKRFSHRPVQEKFVCLNCGFETHADEQAALNIARSWLFLRSQEYKKYQTNKTTGNTDKRAFVETWQSFYRKKLKEVWKPAV

SEQ ID NO: 24922 - protein, 978 aa, synthetic construct
  REGION 1..978: note = engineered CasX variant
QEIKRINKIRRRLVKDSNTKKAGKTGPMKTLLVRVMTPDLRERLENLRKKPENIPQPISNTSRANLNKLLTDYTEMKKAILHVYWEEFQKDPVGLMSRVAQPASKKIDQNKLKPEMDEKGNLTTAGFACSQCGQPLFVYKLEQVSEKGKAYTNYFGRCNVAEHEKLILLAQLKPEKDSDEAVTYSLGKFGQRALDFYSIHVTKESTHPVKPLAQIAGNRYASGPVGKALSDACMGTIASFLSKYQDIIIEHQKVVKGNQKRLESLRELAGKENLEYPSVTLPPQPHTKEGVDAYNEVIARVRMWVNLNLWQKLKLSRDDAKPLLRLKGFPSFPLVERQANEVDWWDMVCNVKKLINEKKEDGKVFWQNLAGYKRQEALRPYLSSEEDRKKGKKFARYQLGDLLLHLEKKHGEDWGKVYDEAWERIDKKVEGLSKHIKLEEERRSEDAQSKAALTDWLRAKASFVIEGLKEADKDEFCRCELKLQKWYGDLRGKPFAIEAENSILDISGFSKQYNCAFIWQKDGVKKLNLYLIINYFKGGKLRFKKIKPEAFEANRFYTVINKKSGEIVPMEVNFNFDDPNLIILPLAFGKRQGREFIWNDLLSLETGSLKLANGRVIEKTLYNRRTRQDEPALFVALTFERREVLDSVNIKPMNLIGVDRGENVPAVIALTDPEGCPLSRFKDSLGNPTHILRIGESYKEKQRTIQAKKEVEQRRAGGYSRKYASKAKNLADDMVRNTARDLLYYAVTQDAMLIFENLSRGFGRQGKRTFMAERQYTRMEDWLTAKLAYEGLPSKTYLSKTLAQYTSKTCSNCGFTITSADYDRVLEKLKKTATGWMTTINGKELKVEGQITYYNRYKRQNVVKDLSVELDRLSEESVNNDISSWTKGRSGEALSLLKKRFSHRPVQEKFVCLNCGFETHADEQAALNIARSWLFLRSQEYKKYQTNKTTGNTDKRAFVETWQSFYRKKLKEVWKPAV

SEQ ID NO: 24923 - protein, 978 aa, synthetic construct
  REGION 1..978: note = engineered CasX variant
QEIKRINKIRRRLVKDSNTKKAGKTGPMKTLLVRVMTPDLRERLENLRKKPENIPQPISNTSRANLNKLLTDYTEMKKAILHVYWEEFQKDPVGLMSRVAQPASKKIDQNKLKPEMDEKGNLTTAGFACSQCGQPLFVYKLEQVSEKGKAYTNYFGRCNVAEHEKLILLAQLKPEKDSDEAVTYSLGKFGQRALDFYSIHVTKESTHPVKPLAQIAGNRYASGPVGKALSDACMGTIASFLSKYQDIIIEHQKVVKGNQKRLESLRELAGKENLEYPSVTLPPQPHTKEGVDAYNEVIARVRMWVNLNLWQKLKLSRDDAKPLLRLKGFPSFPLVERQANEVDWWDMVCNVKKLINEKKEDGKVFWQNLAGYKRQEALRPYLSSEEDRKKGKKFARYQLGDLLLHLEKKHGEDWGKVYDEAWERIDKKVEGLSKHIKLEEERRSEDAQSKAALTDWLRAKASFVIEGLKEADKDEFCRCELKLQKWYGDLRGKPFAIEAENSILDISGFSKQYNCAFIWQKDGVKKLNLYLIINYFKGGKLRFKKIKPEAFEANRFYTVINKKSGEIVPMEVNFNFDDPNLIILPLAFGKRQGREFIWNDLLSLETGSLKLANGRVIEKTLYNRRTRQDEPALFVALTFERREVLDSVNIKPMNLIGVDRGENIPAVIALTDPEGCPLSRFKDSLGNPTHILRIGESYKEKQRTIQAKKEVEQRRAGGYSRKYASKAKNLADDMVRNTARDLLYYAVTQDAMLIFENLSRGFGRQGKRTFMAERQYTRMEDWLTAKLAYEGLPSKTYLSKTLAQYTSKTCSNCGFTITSADYDRVLEKLKKTATGWMTTINGKELKVEGQITYYNRYKRQNVVKDLSVELDRLSEESVNNDISSWTKGRSGEALSLLKKRFSHRPVQEKFVCLNCGFETHADEQAALNIARSWLFLRSQEYKKYQTNKTTGNTDKRAFVETWQSFYRKKLKEVWKPAV

SEQ ID NO: 24924 - protein, 978 aa, synthetic construct
  REGION 1..978: note = engineered CasX variant
QEIKRINKIRRRLVKDSNTKKAGKTGPMKTLLVRVMTPDLRERLENLRKKPENIPQPISNTSRANLNKLLTDYTEMKKAILHVYWEEFQKDPVGLMSRVAQPASKKIDQNKLKPEMDEKGNLTTAGFACSQCGQPLFVYKLEQVSEKGKAYTNYFGRCNVAEHEKLILLAQLKPEKDSDEAVTYSLGKFGQRALDFYSIHVTKESTHPVKPLAQIAGNRYASGPVGKALSDACMGTIASFLSKYQDIIIEHQKVVKGNQKRLESLRELAGKENLEYPSVTLPPQPHTKEGVDAYNEVIARVRMWVNLNLWQKLKLSRDDAKPLLRLKGFPSFPLVERQANEVDWWDMVCNVKKLINEKKEDGKVFWQNLAGYKRQEALRPYLSSEEDRKKGKKFARYQLGDLLLHLEKKHGEDWGKVYDEAWERIDKKVEGLSKHIKLEEERRSEDAQSKAALTDWLRAKASFVIEGLKEADKDEFCRCELKLQKWYGDLRGKPFAIEAENSILDISGFSKQYNCAFIWQKDGVKKLNLYLIINYFKGGKLRFKKIKPEAFEANRFYTVINKKSGEIVPMEVNFNFDDPNLIILPLAFGKRQGREFIWNDLLSLETGSLKLANGRVIEKTLYNRRTRQDEPALFVALTFERREVLDSVNIKPMNLIGVDRGENIPAVIALTDPEGCPLSRFKDSLGNPTHIFRIGESYKEKQRTIQAKKEVEQRRAGGYSRKYASKAKNLADDMVRNTARDLLYYAVTQDAMLIFENLSRGFGRQGKRTFMAERQYTRMEDWLTAKLAYEGLPSKTYLSKTLAQYTSKTCSNCGFTITSADYDRVLEKLKKTATGWMTTINGKELKVEGQITYYNRYKRQNVVKDLSVELDRLSEESVNNDISSWTKGRSGEALSLLKKRFSHRPVQEKFVCLNCGFETHADEQAALNIARSWLFLRSQEYKKYQTNKTTGNTDKRAFVETWQSFYRKKLKEVWKPAV

SEQ ID NO: 24925 - protein, 978 aa, synthetic construct
  REGION 1..978: note = engineered CasX variant
QEIKRINKIRRRLVKDSNTKKAGKTGPMKTLLVRVMTPDLRERLENLRKKPENIPQPISNTSRANLNKLLTDYTEMKKAILHVYWEEFQKDPVGLMSRVAQPASKKIDQNKLKPEMDEKGNLTTAGFACSQCGQPLFVYKLEQVSEKGKAYTNYFGRCNVAEHEKLILLAQLKPEKDSDEAVTYSLGKFGQRALDFYSIHVTKESTHPVKPLAQIAGNRYASGPVGKALSDACMGTIASFLSKYQDIIIEHQKVVKGNQKRLESLRELAGKENLEYPSVTLPPQPHTKEGVDAYNEVIARVRMWVNLNLWQKLKLSRDDAKPLLRLKGFPSFPLVERQANEVDWWDMVCNVKKLINEKKEDGKVFWQNLAGYKRQEALRPYLSSEEDRKKGKKFARYQLGDLLLHLEKKHGEDWGKVYDEAWERIDKKVEGLSKHIKLEEERRSEDAQSKAALTDWLRAKASFVIEGLKEADKDEFCRCELKLQKWYGDLRGKPFAIEAENSILDISGFSKQYNCAFIWQKDGVKKLNLYLIINYFKGGKLRFKKIKPEAFEANRFYTVINKKSGEIVPMEVNFNFDDPNLIILPLAFGKRQGREFIWNDLLSLETGSLKLANGRVIEKTLYNRRTRQDEPALFVALTFERREVLDSTNYKPMNLIGVDRGENIPAVIALTDPEGMPLSRFKDSLGNPTHILRIGESYKEKQRTIQAKKEVEQRRAGGYSRKYASKAKNLADDMVRNTARDLLYYAVTQDAMLIFENLSRGFGRQGKRTFMAERQYTRMEDWLTAKLAYEGLPSKTYLSKTLAQYTSKTCSNCGFTITSADYDRVLEKLKKTATGWMTTINGKELKVEGQITYYNRYKRQNVVKDLSVELDRLSEESVNNDISSWTKGRSGEALSLLKKRFSHRPVQEKFVCLNCGFETHADEQAALNIARSWLFLRSQEYKKYQTNKTTGNTDKRAFVETWQSFYRKKLKEVWKPAV

SEQ ID NO: 24926 - protein, 978 aa, synthetic construct
  REGION 1..978: note = engineered CasX variant
QEIKRINKIRRRLVKDSNTKKAGKTGPMKTLLVRVMTPDLRERLENLRKKPENIPQPISNTSRANLNKLLTDYTEMKKAILHVYWEEFQKDPVGLMSRVAQPASKKIDQNKLKPEMDEKGNLTTAGFACSQCGQPLFVYKLEQVSEKGKAYTNYFGRCNVAEHEKLILLAQLKPEKDSDEAVTYSLGKFGQRALDFYSIHVTKESTHPVKPLAQIAGNRYASGPVGKALSDACMGTIASFLSKYQDIIIEHQKVVKGNQKRLESLRELAGKENLEYPSVTLPPQPHTKEGVDAYNEVIARVRMWVNLNLWQKLKLSRDDAKPLLRLKGFPSFPLVERQANEVDWWDMVCNVKKLINEKKEDGKVFWQNLAGYKRQEALRPYLSSEEDRKKGKKFARYQLGDLLLHLEKKHGEDWGKVYDEAWERIDKKVEGLSKHIKLEEERRSEDAQSKAALTDWLRAKASFVIEGLKEADKDEFCRCELKLQKWYGDLRGKPFAIEAENSILDISGFSKQYNCAFIWQKDGVKKLNLYLIINYFKGGKLRFKKIKPEAFEANRFYTVINKKSGEIVPMEVNFNFDDPNLIILPLAFGKRQGREFIWNDLLSLETGSLKLANGRVIEKTLYNRRTRQDEPALFVALTFERREVLDSTNYKPMNLIGVDRGENIPAVIALTDPEGCPLSRFKDSLGNPTHILRIGESYKEKQRTIQAKKEVEQRRAGGYSRKYASKAKNLADDMVRNTARDLLYYAVTQDAMLIFENLSRGFGRQGKRTFMAERQYTRMEDWLTAKLAYEGLPSKTYLSKTLAQYTSKTCSNCGFTITSADYDRVLEKLKKTATGWMTTINGKELKVEGQITYYNRYKRQNVVKDLSVELDRLSEESVNNDISSWTKGRSGEALSLLKKRFSHRPVQEKFVCLNCGFETHADEQAALNIARSWLFLRSQEYKKYQTNKTTGNTDKRAFVETWQSFYRKKLKEVWKPAV

SEQ ID NO: 24927 - protein, 978 aa, synthetic construct
  REGION 1..978: note = engineered CasX variant
QEIKRINKIRRRLVKDSNTKKAGKTGPMKTLLVRVMTPDLRERLENLRKKPENIPQPISNTSRANLNKLLTDYTEMKKAILHVYWEEFQKDPVGLMSRVAQPASKKIDQNKLKPEMDEKGNLTTAGFACSQCGQPLFVYKLEQVSEKGKAYTNYFGRCNVAEHEKLILLAQLKPEKDSDEAVTYSLGKFGQRALDFYSIHVTKESTHPVKPLAQIAGNRYASGPVGKALSDACMGTIASFLSKYQDIIIEHQKVVKGNQKRLESLRELAGKENLEYPSVTLPPQPHTKEGVDAYNEVIARVRMWVNLNLWQKLKLSRDDAKPLLRLKGFPSFPLVERQANEVDWWDMVCNVKKLINEKKEDGKVFWQNLAGYKRQEALRPYLSSEEDRKKGKKFARYQLGDLLLHLEKKHGEDWGKVYDEAWERIDKKVEGLSKHIKLEEERRSEDAQSKAALTDWLRAKASFVIEGLKEADKDEFCRCELKLQKWYGDLRGKPFAIEAENSILDISGFSKQYNCAFIWQKDGVKKLNLYLIINYFKGGKLRFKKIKPEAFEANRFYTVINKKSGEIVPMEVNFNFDDPNLIILPLAFGKRQGREFIWNDLLSLETGSLKLANGRVIEKTLYNRRTRQDEPALFVALTFERREVLDSTNIKPMNLIGVDRGENIPAVIALTDPEGMPLSRFKDSLGNPTHILRIGESYKEKQRTIQAKKEVEQRRAGGYSRKYASKAKNLADDMVRNTARDLLYYAVTQDAMLIFENLSRGFGRQGKRTFMAERQYTRMEDWLTAKLAYEGLPSKTYLSKTLAQYTSKTCSNCGFTITSADYDRVLEKLKKTATGWMTTINGKELKVEGQITYYNRYKRQNVVKDLSVELDRLSEESVNNDISSWTKGRSGEALSLLKKRFSHRPVQEKFVCLNCGFETHADEQAALNIARSWLFLRSQEYKKYQTNKTTGNTDKRAFVETWQSFYRKKLKEVWKPAV

SEQ ID NO: 24928 - protein, 978 aa, synthetic construct
  REGION 1..978: note = engineered CasX variant
QEIKRINKIRRRLVKDSNTKKAGKTGPMKTLLVRVMTPDLRERLENLRKKPENIPQPISNTSRANLNKLLTDYTEMKKAILHVYWEEFQKDPVGLMSRVAQPASKKIDQNKLKPEMDEKGNLTTAGFACSQCGQPLFVYKLEQVSEKGKAYTNYFGRCNVAEHEKLILLAQLKPEKDSDEAVTYSLGKFGQRALDFYSIHVTKESTHPVKPLAQIAGNRYASGPVGKALSDACMGTIASFLSKYQDIIIEHQKVVKGNQKRLESLRELAGKENLEYPSVTLPPQPHTKEGVDAYNEVIARVRMWVNLNLWQKLKLSRDDAKPLLRLKGFPSFPLVERQANEVDWWDMVCNVKKLINEKKEDGKVFWQNLAGYKRQEALRPYLSSEEDRKKGKKFARYQLGDLLLHLEKKHGEDWGKVYDEAWERIDKKVEGLSKHIKLEEERRSEDAQSKAALTDWLRAKASFVIEGLKEADKDEFCRCELKLQKWYGDLRGKPFAIEAENSILDISGFSKQYNCAFIWQKDGVKKLNLYLIINYFKGGKLRFKKIKPEAFEANRFYTVINKKSGEIVPMEVNFNFDDPNLIILPLAFGKRQGREFIWNDLLSLETGSLKLANGRVIEKTLYNRRTRQDEPALFVALTFERREVLDSTNIKPMNLIGVDRGENIPAVIALTDPEGCPLSRFKDSLGNPTHILRIGESYKEKQRTIQAKKEVEQRRAGGYSRKYASKAKNLADDMVRNTARDLLYYAVTQDAMLIFENLSRGFGRQGKRTFMAERQYTRMEDWLTAKLAYEGLPSKTYLSKTLAQYTSKTCSNCGFTITSADYDRVLEKLKKTATGWMTTINGKELKVEGQITYYNRYKRQNVVKDLSVELDRLSEESVNNDISSWTKGRSGEALSLLKKRFSHRPVQEKFVCLNCGFETHADEQAALNIARSWLFLRSQEYKKYQTNKTTGNTDKRAFVETWQSFYRKKLKEVWKPAV

SEQ ID NO: 24929 - protein, 978 aa, synthetic construct
  REGION 1..978: note = engineered CasX variant
QEIKRINKIRRRLVKDSNTKKAGKTGPMKTLLVRVMTPDLRERLENLRKKPENIPQPISNTSRANLNKLLTDYTEMKKAILHVYWEEFQKDPVGLMSRVAQPASKKIDQNKLKPEMDEKGNLTTAGFACSQCGQPLFVYKLEQVSEKGKAYTNYFGRCNVAEHEKLILLAQLKPEKDSDEAVTYSLGKFGQRALDFYSIHVTKESTHPVKPLAQIAGNRYASGPVGKALSDACMGTIASFLSKYQDIIIEHQKVVKGNQKRLESLRELAGKENLEYPSVTLPPQPHTKEGVDAYNEVIARVRMWVNLNLWQKLKLSRDDAKPLLRLKGFPSFPLVERQANEVDWWDMVCNVKKLINEKKEDGKVFWQNLAGYKRQEALRPYLSSEEDRKKGKKFARYQLGDLLLHLEKKHGEDWGKVYDEAWERIDKKVEGLSKHIKLEEERRSEDAQSKAALTDWLRAKASFVIEGLKEADKDEFCRCELKLQKWYGDLRGKPFAIEAENSILDISGFSKQYNCAFIWQKDGVKKLNLYLIINYFKGGKLRFKKIKPEAFEANRFYTVINKKSGEIVPMEVNFNFDDPNLIILPLAFGKRQGREFIWNDLLSLETGSLKLANGRVIEKTLYNRRTRQDEPALFVALTFERREVLDSTNIKPMNLIGVDRGENIPAVIALTDPEGCPLSCFKDSLGNPTHILRIGESYKEKQRTIQAKKEVEQRRAGGYSRKYASKAKNLADDMVRNTARDLLYYAVTQDAMLIFENLSRGFGRQGKRTFMAERQYTRMEDWLTAKLAYEGLPSKTYLSKTLAQYTSKTCSNCGFTITSADYDRVLEKLKKTATGWMTTINGKELKVEGQITYYNRYKRQNVVKDLSVELDRLSEESVNNDISSWTKGRSGEALSLLKKRFSHRPVQEKFVCLNCGFETHADEQAALNIARSWLFLRSQEYKKYQTNKTTGNTDKRAFVETWQSFYRKKLKEVWKPAV

SEQ ID NO: 24930 - protein, 978 aa, synthetic construct
  REGION 1..978: note = engineered CasX variant
QEIKRINKIRRRLVKDSNTKKAGKTGPMKTLLVRVMTPDLRERLENLRKKPENIPQPISNTSRANLNKLLTDYTEMKKAILHVYWEEFQKDPVGLMSRVAQPASKKIDQNKLKPEMDEKGNLTTAGFACSQCGQPLFVYKLEQVSEKGKAYTNYFGRCNVAEHEKLILLAQLKPEKDSDEAVTYSLGKFGQRALDFYSIHVTKESTHPVKPLAQIAGNRYASGPVGKALSDACMGTIASFLSKYQDIIIEHQKVVKGNQKRLESLRELAGKENLEYPSVTLPPQPHTKEGVDAYNEVIARVRMWVNLNLWQKLKLSRDDAKPLLRLKGFPSFPLVERQANEVDWWDMVCNVKKLINEKKEDGKVFWQNLAGYKRQEALRPYLSSEEDRKKGKKFARYQLGDLLLHLEKKHGEDWGKVYDEAWERIDKKVEGLSKHIKLEEERRSEDAQSKAALTDWLRAKASFVIEGLKEADKDEFCRCELKLQKWYGDLRGKPFAIEAENSILDISGFSKQYNCAFIWQKDGVKKLNLYLIINYFKGGKLRFKKIKPEAFEANRFYTVINKKSGEIVPMEVNFNFDDPNLIILPLAFGKRQGREFIWNDLLSLETGSLKLANGRVIEKTLYNRRTRQDEPALFVALTFERREVLDSSYIKPMNLIGVDRGENIPAVIALTDPEGCPLSRFKDSLGNPTHILRIGESYKEKQRTITAKKEVEQRRAGGYSRKYASKAKNLADDMVRNTARDLLYYAVTQDAMLIFENLSRGFGRQGKRTFMAERQYTRMEDWLTAKLAYEGLPSKTYLSKTLAQYTSKTCSNCGFTITSADYDRVLEKLKKTATGWMTTINGKELKVEGQITYYNRYKRQNVVKDLSVELDRLSEESVNNDISSWTKGRSGEALSLLKKRFSHRPVQEKFVCLNCGFETHADEQAALNIARSWLFLRSQEYKKYQTNKTTGNTDKRAFVETWQSFYRKKLKEVWKPAV

SEQ ID NO: 24931 - protein, 978 aa, synthetic construct
  REGION 1..978: note = engineered CasX variant
QEIKRINKIRRRLVKDSNTKKAGKTGPMKTLLVRVMTPDLRERLENLRKKPENIPQPISNTSRANLNKLLTDYTEMKKAILHVYWEEFQKDPVGLMSRVAQPASKKIDQNKLKPEMDEKGNLTTAGFACSQCGQPLFVYKLEQVSEKGKAYTNYFGRCNVAEHEKLILLAQLKPEKDSDEAVTYSLGKFGQRALDFYSIHVTKESTHPVKPLAQIAGNRYASGPVGKALSDACMGTIASFLSKYQDIIIEHQKVVKGNQKRLESLRELAGKENLEYPSVTLPPQPHTKEGVDAYNEVIARVRMWVNLNLWQKLKLSRDDAKPLLRLKGFPSFPLVERQANEVDWWDMVCNVKKLINEKKEDGKVFWQNLAGYKRQEALRPYLSSEEDRKKGKKFARYQLGDLLLHLEKKHGEDWGKVYDEAWERIDKKVEGLSKHIKLEEERRSEDAQSKAALTDWLRAKASFVIEGLKEADKDEFCRCELKLQKWYGDLRGKPFAIEAENSILDISGFSKQYNCAFIWQKDGVKKLNLYLIINYFKGGKLRFKKIKPEAFEANRFYTVINKKSGEIVPMEVNFNFDDPNLIILPLAFGKRQGREFIWNDLLSLETGSLKLANGRVIEKTLYNRRTRQDEPALFVALTFERREVLDSSYIKPMNLIGVDRGENIPAVIALTDPEGCPLSRFKDSLGNPTHILRIGESYKEKQRTIQAKKEVEQRRAGGYSRKYASKAKNLADDMVRNTARDLLYYAVTQDAMLIFENLSRGFGRQGKRTFMAERQYTRMEDWLTAKLAYEGLPSKTYLSKTLAQYTSKTCSNCGFTITSADYDRVLEKLKKTATGWMTTINGKELKVEGQITYYNRYKRQNVVKDLSVELDRLSEESVNNDISSWTKGRSGEALSLLKKRFSHRPVQEKFVCLNCGFETHADEQAALNIARSWLFLRSQEYKKYQTNKTTGNTDKRAFVETWQSFYRKKLKEVWKPAV

SEQ ID NO: 24932 - protein, 978 aa, synthetic construct
  REGION 1..978: note = engineered CasX variant
QEIKRINKIRRRLVKDSNTKKAGKTGPMKTLLVRVMTPDLRERLENLRKKPENIPQPISNTSRANLNKLLTDYTEMKKAILHVYWEEFQKDPVGLMSRVAQPASKKIDQNKLKPEMDEKGNLTTAGFACSQCGQPLFVYKLEQVSEKGKAYTNYFGRCNVAEHEKLILLAQLKPEKDSDEAVTYSLGKFGQRALDFYSIHVTKESTHPVKPLAQIAGNRYASGPVGKALSDACMGTIASFLSKYQDIIIEHQKVVKGNQKRLESLRELAGKENLEYPSVTLPPQPHTKEGVDAYNEVIARVRMWVNLNLWQKLKLSRDDAKPLLRLKGFPSFPLVERQANEVDWWDMVCNVKKLINEKKEDGKVFWQNLAGYKRQEALRPYLSSEEDRKKGKKFARYQLGDLLLHLEKKHGEDWGKVYDEAWERIDKKVEGLSKHIKLEEERRSEDAQSKAALTDWLRAKASFVIEGLKEADKDEFCRCELKLQKWYGDLRGKPFAIEAENSILDISGFSKQYNCAFIWQKDGVKKLNLYLIINYFKGGKLRFKKIKPEAFEANRFYTVINKKSGEIVPMEVNFNFDDPNLIILPLAFGKRQGREFIWNDLLSLETGSLKLANGRVIEKTLYNRRTRQDEPALFVALTFERREVLDSSYIKPMNLIGVDRGENIPAVIALTDPEGCPLSMFKDSLGNPTHILRIGESYKEKQRTITAKKEVEQRRAGGYSRKYASKAKNLADDMVRNTARDLLYYAVTQDAMLIFENLSRGFGRQGKRTFMAERQYTRMEDWLTAKLAYEGLPSKTYLSKTLAQYTSKTCSNCGFTITSADYDRVLEKLKKTATGWMTTINGKELKVEGQITYYNRYKRQNVVKDLSVELDRLSEESVNNDISSWTKGRSGEALSLLKKRFSHRPVQEKFVCLNCGFETHADEQAALNIARSWLFLRSQEYKKYQTNKTTGNTDKRAFVETWQSFYRKKLKEVWKPAV

SEQ ID NO: 24933 - protein, 978 aa, synthetic construct
  REGION 1..978: note = engineered CasX variant
QEIKRINKIRRRLVKDSNTKKAGKTGPMKTLLVRVMTPDLRERLENLRKKPENIPQPISNTSRANLNKLLTDYTEMKKAILHVYWEEFQKDPVGLMSRVAQPASKKIDQNKLKPEMDEKGNLTTAGFACSQCGQPLFVYKLEQVSEKGKAYTNYFGRCNVAEHEKLILLAQLKPEKDSDEAVTYSLGKFGQRALDFYSIHVTKESTHPVKPLAQIAGNRYASGPVGKALSDACMGTIASFLSKYQDIIIEHQKVVKGNQKRLESLRELAGKENLEYPSVTLPPQPHTKEGVDAYNEVIARVRMWVNLNLWQKLKLSRDDAKPLLRLKGFPSFPLVERQANEVDWWDMVCNVKKLINEKKEDGKVFWQNLAGYKRQEALRPYLSSEEDRKKGKKFARYQLGDLLLHLEKKHGEDWGKVYDEAWERIDKKVEGLSKHIKLEEERRSEDAQSKAALTDWLRAKASFVIEGLKEADKDEFCRCELKLQKWYGDLRGKPFAIEAENSILDISGFSKQYNCAFIWQKDGVKKLNLYLIINYFKGGKLRFKKIKPEAFEANRFYTVINKKSGEIVPMEVNFNFDDPNLIILPLAFGKRQGREFIWNDLLSLETGSLKLANGRVIEKTLYNRRTRQDEPALFVALTFERREVLDSSYIKPMNLIGVDRGENIPAVIALTDPEGCPLSMFKDSLGNPTHILRIGESYKEKQRTIQAKKEVEQRRAGGYSRKYASKAKNLADDMVRNTARDLLYYAVTQDAMLIFENLSRGFGRQGKRTFMAERQYTRMEDWLTAKLAYEGLPSKTYLSKTLAQYTSKTCSNCGFTITSADYDRVLEKLKKTATGWMTTINGKELKVEGQITYYNRYKRQNVVKDLSVELDRLSEESVNNDISSWTKGRSGEALSLLKKRFSHRPVQEKFVCLNCGFETHADEQAALNIARSWLFLRSQEYKKYQTNKTTGNTDKRAFVETWQSFYRKKLKEVWKPAV

SEQ ID NO: 24934 - protein, 978 aa, synthetic construct
  REGION 1..978: note = engineered CasX variant
QEIKRINKIRRRLVKDSNTKKAGKTGPMKTLLVRVMTPDLRERLENLRKKPENIPQPISNTSRANLNKLLTDYTEMKKAILHVYWEEFQKDPVGLMSRVAQPASKKIDQNKLKPEMDEKGNLTTAGFACSQCGQPLFVYKLEQVSEKGKAYTNYFGRCNVAEHEKLILLAQLKPEKDSDEAVTYSLGKFGQRALDFYSIHVTKESTHPVKPLAQIAGNRYASGPVGKALSDACMGTIASFLSKYQDIIIEHQKVVKGNQKRLESLRELAGKENLEYPSVTLPPQPHTKEGVDAYNEVIARVRMWVNLNLWQKLKLSRDDAKPLLRLKGFPSFPLVERQANEVDWWDMVCNVKKLINEKKEDGKVFWQNLAGYKRQEALRPYLSSEEDRKKGKKFARYQLGDLLLHLEKKHGEDWGKVYDEAWERIDKKVEGLSKHIKLEEERRSEDAQSKAALTDWLRAKASFVIEGLKEADKDEFCRCELKLQKWYGDLRGKPFAIEAENSILDISGFSKQYNCAFIWQKDGVKKLNLYLIINYFKGGKLRFKKIKPEAFEANRFYTVINKKSGEIVPMEVNFNFDDPNLIILPLAFGKRQGREFIWNDLLSLETGSLKLANGRVIEKTLYNRRTRQDEPALFVALTFERREVLDSSVIKPMNLIGVDRGENIPAVIALTDPEGCPLSRFKDSLGNTTHILRIGESYKEKQRTIQAKKEVEQRRAGGYSRKYASKAKNLADDMVRNTARDLLYYAVTQDAMLIFENLSRGFGRQGKRTFMAERQYTRMEDWLTAKLAYEGLPSKTYLSKTLAQYTSKTCSNCGFTITSADYDRVLEKLKKTATGWMTTINGKELKVEGQITYYNRYKRQNVVKDLSVELDRLSEESVNNDISSWTKGRSGEALSLLKKRFSHRPVQEKFVCLNCGFETHADEQAALNIARSWLFLRSQEYKKYQTNKTTGNTDKRAFVETWQSFYRKKLKEVWKPAV

SEQ ID NO: 24935 - protein, 978 aa, synthetic construct
  REGION 1..978: note = engineered CasX variant
QEIKRINKIRRRLVKDSNTKKAGKTGPMKTLLVRVMTPDLRERLENLRKKPENIPQPISNTSRANLNKLLTDYTEMKKAILHVYWEEFQKDPVGLMSRVAQPASKKIDQNKLKPEMDEKGNLTTAGFACSQCGQPLFVYKLEQVSEKGKAYTNYFGRCNVAEHEKLILLAQLKPEKDSDEAVTYSLGKFGQRALDFYSIHVTKESTHPVKPLAQIAGNRYASGPVGKALSDACMGTIASFLSKYQDIIIEHQKVVKGNQKRLESLRELAGKENLEYPSVTLPPQPHTKEGVDAYNEVIARVRMWVNLNLWQKLKLSRDDAKPLLRLKGFPSFPLVERQANEVDWWDMVCNVKKLINEKKEDGKVFWQNLAGYKRQEALRPYLSSEEDRKKGKKFARYQLGDLLLHLEKKHGEDWGKVYDEAWERIDKKVEGLSKHIKLEEERRSEDAQSKAALTDWLRAKASFVIEGLKEADKDEFCRCELKLQKWYGDLRGKPFAIEAENSILDISGFSKQYNCAFIWQKDGVKKLNLYLIINYFKGGKLRFKKIKPEAFEANRFYTVINKKSGEIVPMEVNFNFDDPNLIILPLAFGKRQGREFIWNDLLSLETGSLKLANGRVIEKTLYNRRTRQDEPALFVALTFERREVLDSSVIKPMNLIGVDRGENIPAVIALTDPEGCPLSRFKDSLGNPTHILRIHESYKEKQRTIQAKKEVEQRRAGGYSRKYASKAKNLADDMVRNTARDLLYYAVTQDAMLIFENLSRGFGRQGKRTFMAERQYTRMEDWLTAKLAYEGLPSKTYLSKTLAQYTSKTCSNCGFTITSADYDRVLEKLKKTATGWMTTINGKELKVEGQITYYNRYKRQNVVKDLSVELDRLSEESVNNDISSWTKGRSGEALSLLKKRFSHRPVQEKFVCLNCGFETHADEQAALNIARSWLFLRSQEYKKYQTNKTTGNTDKRAFVETWQSFYRKKLKEVWKPAV

SEQ ID NO: 24936 - protein, 978 aa, synthetic construct
  REGION 1..978: note = engineered CasX variant
QEIKRINKIRRRLVKDSNTKKAGKTGPMKTLLVRVMTPDLRERLENLRKKPENIPQPISNTSRANLNKLLTDYTEMKKAILHVYWEEFQKDPVGLMSRVAQPASKKIDQNKLKPEMDEKGNLTTAGFACSQCGQPLFVYKLEQVSEKGKAYTNYFGRCNVAEHEKLILLAQLKPEKDSDEAVTYSLGKFGQRALDFYSIHVTKESTHPVKPLAQIAGNRYASGPVGKALSDACMGTIASFLSKYQDIIIEHQKVVKGNQKRLESLRELAGKENLEYPSVTLPPQPHTKEGVDAYNEVIARVRMWVNLNLWQKLKLSRDDAKPLLRLKGFPSFPLVERQANEVDWWDMVCNVKKLINEKKEDGKVFWQNLAGYKRQEALRPYLSSEEDRKKGKKFARYQLGDLLLHLEKKHGEDWGKVYDEAWERIDKKVEGLSKHIKLEEERRSEDAQSKAALTDWLRAKASFVIEGLKEADKDEFCRCELKLQKWYGDLRGKPFAIEAENSILDISGFSKQYNCAFIWQKDGVKKLNLYLIINYFKGGKLRFKKIKPEAFEANRFYTVINKKSGEIVPMEVNFNFDDPNLIILPLAFGKRQGREFIWNDLLSLETGSLKLANGRVIEKTLYNRRTRQDEPALFVALTFERREVLDSSVIKPMNLIGVDRGENIPAVIALTDPEGCPLSRFKDSLGNPTHILRIGETYKNKQRTIQAKKEVEQRRAGGYSRKYASKAKNLADDMVRNTARDLLYYAVTQDAMLIFENLSRGFGRQGKRTFMAERQYTRMEDWLTAKLAYEGLPSKTYLSKTLAQYTSKTCSNCGFTITSADYDRVLEKLKKTATGWMTTINGKELKVEGQITYYNRYKRQNVVKDLSVELDRLSEESVNNDISSWTKGRSGEALSLLKKRFSHRPVQEKFVCLNCGFETHADEQAALNIARSWLFLRSQEYKKYQTNKTTGNTDKRAFVETWQSFYRKKLKEVWKPAV

SEQ ID NO: 24937 - protein, 978 aa, synthetic construct
  REGION 1..978: note = engineered CasX variant
QEIKRINKIRRRLVKDSNTKKAGKTGPMKTLLVRVMTPDLRERLENLRKKPENIPQPISNTSRANLNKLLTDYTEMKKAILHVYWEEFQKDPVGLMSRVAQPASKKIDQNKLKPEMDEKGNLTTAGFACSQCGQPLFVYKLEQVSEKGKAYTNYFGRCNVAEHEKLILLAQLKPEKDSDEAVTYSLGKFGQRALDFYSIHVTKESTHPVKPLAQIAGNRYASGPVGKALSDACMGTIASFLSKYQDIIIEHQKVVKGNQKRLESLRELAGKENLEYPSVTLPPQPHTKEGVDAYNEVIARVRMWVNLNLWQKLKLSRDDAKPLLRLKGFPSFPLVERQANEVDWWDMVCNVKKLINEKKEDGKVFWQNLAGYKRQEALRPYLSSEEDRKKGKKFARYQLGDLLLHLEKKHGEDWGKVYDEAWERIDKKVEGLSKHIKLEEERRSEDAQSKAALTDWLRAKASFVIEGLKEADKDEFCRCELKLQKWYGDLRGKPFAIEAENSILDISGFSKQYNCAFIWQKDGVKKLNLYLIINYFKGGKLRFKKIKPEAFEANRFYTVINKKSGEIVPMEVNFNFDDPNLIILPLAFGKRQGREFIWNDLLSLETGSLKLANGRVIEKTLYNRRTRQDEPALFVALTFERREVLDSSVIKPMNLIGVDRGENIPAVIALTDPEGCPLSRFKDSLGNPTHILRIGETYKEKQRTIQAKKEVEQRRAGGYSRKYASKAKNLADDMVRNTARDLLYYAVTQDAMLIFENLSRGFGRQGKRTFMAERQYTRMEDWLTAKLAYEGLPSKTYLSKTLAQYTSKTCSNCGFTITSADYDRVLEKLKKTATGWMTTINGKELKVEGQITYYNRYKRQNVVKDLSVELDRLSEESVNNDISSWTKGRSGEALSLLKKRFSHRPVQEKFVCLNCGFETHADEQAALNIARSWLFLRSQEYKKYQTNKTTGNTDKRAFVETWQSFYRKKLKEVWKPAV

SEQ ID NO: 24938 - protein, 978 aa, synthetic construct
  REGION 1..978: note = engineered CasX variant
QEIKRINKIRRRLVKDSNTKKAGKTGPMKTLLVRVMTPDLRERLENLRKKPENIPQPISNTSRANLNKLLTDYTEMKKAILHVYWEEFQKDPVGLMSRVAQPASKKIDQNKLKPEMDEKGNLTTAGFACSQCGQPLFVYKLEQVSEKGKAYTNYFGRCNVAEHEKLILLAQLKPEKDSDEAVTYSLGKFGQRALDFYSIHVTKESTHPVKPLAQIAGNRYASGPVGKALSDACMGTIASFLSKYQDIIIEHQKVVKGNQKRLESLRELAGKENLEYPSVTLPPQPHTKEGVDAYNEVIARVRMWVNLNLWQKLKLSRDDAKPLLRLKGFPSFPLVERQANEVDWWDMVCNVKKLINEKKEDGKVFWQNLAGYKRQEALRPYLSSEEDRKKGKKFARYQLGDLLLHLEKKHGEDWGKVYDEAWERIDKKVEGLSKHIKLEEERRSEDAQSKAALTDWLRAKASFVIEGLKEADKDEFCRCELKLQKWYGDLRGKPFAIEAENSILDISGFSKQYNCAFIWQKDGVKKLNLYLIINYFKGGKLRFKKIKPEAFEANRFYTVINKKSGEIVPMEVNFNFDDPNLIILPLAFGKRQGREFIWNDLLSLETGSLKLANGRVIEKTLYNRRTRQDEPALFVALTFERREVLDSSVIKPMNLIGVDRGENIPAVIALTDPEGCPLSRFKDSLGNPTHILRIGESYKNKQRTIQAKKEVEQRRAGGYSRKYASKAKNLADDMVRNTARDLLYYAVTQDAMLIFENLSRGFGRQGKRTFMAERQYTRMEDWLTAKLAYEGLPSKTYLSKTLAQYTSKTCSNCGFTITSADYDRVLEKLKKTATGWMTTINGKELKVEGQITYYNRYKRQNVVKDLSVELDRLSEESVNNDISSWTKGRSGEALSLLKKRFSHRPVQEKFVCLNCGFETHADEQAALNIARSWLFLRSQEYKKYQTNKTTGNTDKRAFVETWQSFYRKKLKEVWKPAV

SEQ ID NO: 24939 - protein, 978 aa, synthetic construct
  REGION 1..978: note = engineered CasX variant
QEIKRINKIRRRLVKDSNTKKAGKTGPMKTLLVRVMTPDLRERLENLRKKPENIPQPISNTSRANLNKLLTDYTEMKKAILHVYWEEFQKDPVGLMSRVAQPASKKIDQNKLKPEMDEKGNLTTAGFACSQCGQPLFVYKLEQVSEKGKAYTNYFGRCNVAEHEKLILLAQLKPEKDSDEAVTYSLGKFGQRALDFYSIHVTKESTHPVKPLAQIAGNRYASGPVGKALSDACMGTIASFLSKYQDIIIEHQKVVKGNQKRLESLRELAGKENLEYPSVTLPPQPHTKEGVDAYNEVIARVRMWVNLNLWQKLKLSRDDAKPLLRLKGFPSFPLVERQANEVDWWDMVCNVKKLINEKKEDGKVFWQNLAGYKRQEALRPYLSSEEDRKKGKKFARYQLGDLLLHLEKKHGEDWGKVYDEAWERIDKKVEGLSKHIKLEEERRSEDAQSKAALTDWLRAKASFVIEGLKEADKDEFCRCELKLQKWYGDLRGKPFAIEAENSILDISGFSKQYNCAFIWQKDGVKKLNLYLIINYFKGGKLRFKKIKPEAFEANRFYTVINKKSGEIVPMEVNFNFDDPNLIILPLAFGKRQGREFIWNDLLSLETGSLKLANGRVIEKTLYNRRTRQDEPALFVALTFERREVLDSSVIKPMNLIGVDRGENIPAVIALTDPEGCPLSRFKDSLGNPTHILRIGESYKEKQRTIQAKKEVEQRRAGGYSRKYASKAKNLADDMVRNTARDLLYYAVTQDAMLIFENLSRGFGRQGKRTFMAERQYTRMEDWLTAKLAYEGLPSKTYLSKTLAQYTSKTCSNCGFTITSADYDRVLEKLKKTATGWMTTINGKELKVEGQITYYNRYKRQNVVKDLSVELDRLSEESVNNDISSWTKGRSGEALSLLKKRFSHRPVQEKFVCLNCGFETHADEQAALNIARSWLFLRSQEYKKYQTNKTTGNTDKRAFVETWQSFYRKKLKEVWKPAV

SEQ ID NO: 24940 - protein, 978 aa, synthetic construct
  REGION 1..978: note = engineered CasX variant
QEIKRINKIRRRLVKDSNTKKAGKTGPMKTLLVRVMTPDLRERLENLRKKPENIPQPISNTSRANLNKLLTDYTEMKKAILHVYWEEFQKDPVGLMSRVAQPASKKIDQNKLKPEMDEKGNLTTAGFACSQCGQPLFVYKLEQVSEKGKAYTNYFGRCNVAEHEKLILLAQLKPEKDSDEAVTYSLGKFGQRALDFYSIHVTKESTHPVKPLAQIAGNRYASGPVGKALSDACMGTIASFLSKYQDIIIEHQKVVKGNQKRLESLRELAGKENLEYPSVTLPPQPHTKEGVDAYNEVIARVRMWVNLNLWQKLKLSRDDAKPLLRLKGFPSFPLVERQANEVDWWDMVCNVKKLINEKKEDGKVFWQNLAGYKRQEALRPYLSSEEDRKKGKKFARYQLGDLLLHLEKKHGEDWGKVYDEAWERIDKKVEGLSKHIKLEEERRSEDAQSKAALTDWLRAKASFVIEGLKEADKDEFCRCELKLQKWYGDLRGKPFAIEAENSILDISGFSKQYNCAFIWQKDGVKKLNLYLIINYFKGGKLRFKKIKPEAFEANRFYTVINKKSGEIVPMEVNFNFDDPNLIILPLAFGKRQGREFIWNDLLSLETGSLKLANGRVIEKTLYNRRTRQDEPALFVALTFERREVLDSSVIKPMNLIGVDRGENIPAVIALTDPEGCPLNRFKDSLGNPTHILRIHESYKEKQRTIQAKKEVEQRRAGGYSRKYASKAKNLADDMVRNTARDLLYYAVTQDAMLIFENLSRGFGRQGKRTFMAERQYTRMEDWLTAKLAYEGLPSKTYLSKTLAQYTSKTCSNCGFTITSADYDRVLEKLKKTATGWMTTINGKELKVEGQITYYNRYKRQNVVKDLSVELDRLSEESVNNDISSWTKGRSGEALSLLKKRFSHRPVQEKFVCLNCGFETHADEQAALNIARSWLFLRSQEYKKYQTNKTTGNTDKRAFVETWQSFYRKKLKEVWKPAV

SEQ ID NO: 24941 - protein, 978 aa, synthetic construct
  REGION 1..978: note = engineered CasX variant
QEIKRINKIRRRLVKDSNTKKAGKTGPMKTLLVRVMTPDLRERLENLRKKPENIPQPISNTSRANLNKLLTDYTEMKKAILHVYWEEFQKDPVGLMSRVAQPASKKIDQNKLKPEMDEKGNLTTAGFACSQCGQPLFVYKLEQVSEKGKAYTNYFGRCNVAEHEKLILLAQLKPEKDSDEAVTYSLGKFGQRALDFYSIHVTKESTHPVKPLAQIAGNRYASGPVGKALSDACMGTIASFLSKYQDIIIEHQKVVKGNQKRLESLRELAGKENLEYPSVTLPPQPHTKEGVDAYNEVIARVRMWVNLNLWQKLKLSRDDAKPLLRLKGFPSFPLVERQANEVDWWDMVCNVKKLINEKKEDGKVFWQNLAGYKRQEALRPYLSSEEDRKKGKKFARYQLGDLLLHLEKKHGEDWGKVYDEAWERIDKKVEGLSKHIKLEEERRSEDAQSKAALTDWLRAKASFVIEGLKEADKDEFCRCELKLQKWYGDLRGKPFAIEAENSILDISGFSKQYNCAFIWQKDGVKKLNLYLIINYFKGGKLRFKKIKPEAFEANRFYTVINKKSGEIVPMEVNFNFDDPNLIILPLAFGKRQGREFIWNDLLSLETGSLKLANGRVIEKTLYNRRTRQDEPALFVALTFERREVLDSSVIKPMNLIGVDRGENIPAVIALTDPEGCPLNRFKDSLGNPTHILRIGESYKEKQRTIQAKKEVEQRRAGGYSRKYASKAKNLADDMVRNTARDLLYYAVTQDAMLIFENLSRGFGRQGKRTFMAERQYTRMEDWLTAKLAYEGLPSKTYLSKTLAQYTSKTCSNCGFTITSADYDRVLEKLKKTATGWMTTINGKELKVEGQITYYNRYKRQNVVKDLSVELDRLSEESVNNDISSWTKGRSGEALSLLKKRFSHRPVQEKFVCLNCGFETHADEQAALNIARSWLFLRSQEYKKYQTNKTTGNTDKRAFVETWQSFYRKKLKEVWKPAV

SEQ ID NO: 24942 - protein, 978 aa, synthetic construct
  REGION 1..978: note = engineered CasX variant
QEIKRINKIRRRLVKDSNTKKAGKTGPMKTLLVRVMTPDLRERLENLRKKPENIPQPISNTSRANLNKLLTDYTEMKKAILHVYWEEFQKDPVGLMSRVAQPASKKIDQNKLKPEMDEKGNLTTAGFACSQCGQPLFVYKLEQVSEKGKAYTNYFGRCNVAEHEKLILLAQLKPEKDSDEAVTYSLGKFGQRALDFYSIHVTKESTHPVKPLAQIAGNRYASGPVGKALSDACMGTIASFLSKYQDIIIEHQKVVKGNQKRLESLRELAGKENLEYPSVTLPPQPHTKEGVDAYNEVIARVRMWVNLNLWQKLKLSRDDAKPLLRLKGFPSFPLVERQANEVDWWDMVCNVKKLINEKKEDGKVFWQNLAGYKRQEALRPYLSSEEDRKKGKKFARYQLGDLLLHLEKKHGEDWGKVYDEAWERIDKKVEGLSKHIKLEEERRSEDAQSKAALTDWLRAKASFVIEGLKEADKDEFCRCELKLQKWYGDLRGKPFAIEAENSILDISGFSKQYNCAFIWQKDGVKKLNLYLIINYFKGGKLRFKKIKPEAFEANRFYTVINKKSGEIVPMEVNFNFDDPNLIILPLAFGKRQGREFIWNDLLSLETGSLKLANGRVIEKTLYNRRTRQDEPALFVALTFERREVLDSSVIKPMNLIGVDRGENIPAVIALTDPEGCCLSRFKDSLGNPTHILRIGESYKEKQRTIQAKKEVEQRRAGGYSRKYASKAKNLADDMVRNTARDLLYYAVTQDAMLIFENLSRGFGRQGKRTFMAERQYTRMEDWLTAKLAYEGLPSKTYLSKTLAQYTSKTCSNCGFTITSADYDRVLEKLKKTATGWMTTINGKELKVEGQITYYNRYKRQNVVKDLSVELDRLSEESVNNDISSWTKGRSGEALSLLKKRFSHRPVQEKFVCLNCGFETHADEQAALNIARSWLFLRSQEYKKYQTNKTTGNTDKRAFVETWQSFYRKKLKEVWKPAV

SEQ ID NO: 24943 - protein, 978 aa, synthetic construct
  REGION 1..978: note = engineered CasX variant
QEIKRINKIRRRLVKDSNTKKAGKTGPMKTLLVRVMTPDLRERLENLRKKPENIPQPISNTSRANLNKLLTDYTEMKKAILHVYWEEFQKDPVGLMSRVAQPASKKIDQNKLKPEMDEKGNLTTAGFACSQCGQPLFVYKLEQVSEKGKAYTNYFGRCNVAEHEKLILLAQLKPEKDSDEAVTYSLGKFGQRALDFYSIHVTKESTHPVKPLAQIAGNRYASGPVGKALSDACMGTIASFLSKYQDIIIEHQKVVKGNQKRLESLRELAGKENLEYPSVTLPPQPHTKEGVDAYNEVIARVRMWVNLNLWQKLKLSRDDAKPLLRLKGFPSFPLVERQANEVDWWDMVCNVKKLINEKKEDGKVFWQNLAGYKRQEALRPYLSSEEDRKKGKKFARYQLGDLLLHLEKKHGEDWGKVYDEAWERIDKKVEGLSKHIKLEEERRSEDAQSKAALTDWLRAKASFVIEGLKEADKDEFCRCELKLQKWYGDLRGKPFAIEAENSILDISGFSKQYNCAFIWQKDGVKKLNLYLIINYFKGGKLRFKKIKPEAFEANRFYTVINKKSGEIVPMEVNFNFDDPNLIILPLAFGKRQGREFIWNDLLSLETGSLKLANGRVIEKTLYNRRTRQDEPALFVALTFERREVLDSSVIKPMNLIGVDRGENIPAVIALMDPEGCPLSRFKDSLGNPTHILRIGESYKEKQRTIQAKKEVEQRRAGGYSRKYASKAKNLADDMVRNTARDLLYYAVTQDAMLIFENLSRGFGRQGKRTFMAERQYTRMEDWLTAKLAYEGLPSKTYLSKTLAQYTSKTCSNCGFTITSADYDRVLEKLKKTATGWMTTINGKELKVEGQITYYNRYKRQNVVKDLSVELDRLSEESVNNDISSWTKGRSGEALSLLKKRFSHRPVQEKFVCLNCGFETHADEQAALNIARSWLFLRSQEYKKYQTNKTTGNTDKRAFVETWQSFYRKKLKEVWKPAV

SEQ ID NO: 24944 - protein, 978 aa, synthetic construct
  REGION 1..978: note = engineered CasX variant
QEIKRINKIRRRLVKDSNTKKAGKTGPMKTLLVRVMTPDLRERLENLRKKPENIPQPISNTSRANLNKLLTDYTEMKKAILHVYWEEFQKDPVGLMSRVAQPASKKIDQNKLKPEMDEKGNLTTAGFACSQCGQPLFVYKLEQVSEKGKAYTNYFGRCNVAEHEKLILLAQLKPEKDSDEAVTYSLGKFGQRALDFYSIHVTKESTHPVKPLAQIAGNRYASGPVGKALSDACMGTIASFLSKYQDIIIEHQKVVKGNQKRLESLRELAGKENLEYPSVTLPPQPHTKEGVDAYNEVIARVRMWVNLNLWQKLKLSRDDAKPLLRLKGFPSFPLVERQANEVDWWDMVCNVKKLINEKKEDGKVFWQNLAGYKRQEALRPYLSSEEDRKKGKKFARYQLGDLLLHLEKKHGEDWGKVYDEAWERIDKKVEGLSKHIKLEEERRSEDAQSKAALTDWLRAKASFVIEGLKEADKDEFCRCELKLQKWYGDLRGKPFAIEAENSILDISGFSKQYNCAFIWQKDGVKKLNLYLIINYFKGGKLRFKKIKPEAFEANRFYTVINKKSGEIVPMEVNFNFDDPNLIILPLAFGKRQGREFIWNDLLSLETGSLKLANGRVIEKTLYNRRTRQDEPALFVALTFERREVLDSSTIKPMNLIGVDRGENIPAVIALTDPEGCPLSRFKDSLGNPTHILRIGESYKEKQRTIQAKKEVEQRRAGGYSRKYASKAKNLADDMVRNTARDLLYYAVTQDAMLIFENLSRGFGRQGKRTFMAERQYTRMEDWLTAKLAYEGLPSKTYLSKTLAQYTSKTCSNCGFTITSADYDRVLEKLKKTATGWMTTINGKELKVEGQITYYNRYKRQNVVKDLSVELDRLSEESVNNDISSWTKGRSGEALSLLKKRFSHRPVQEKFVCLNCGFETHADEQAALNIARSWLFLRSQEYKKYQTNKTTGNTDKRAFVETWQSFYRKKLKEVWKPAV

SEQ ID NO: 24945 - protein, 978 aa, synthetic construct
  REGION 1..978: note = engineered CasX variant
QEIKRINKIRRRLVKDSNTKKAGKTGPMKTLLVRVMTPDLRERLENLRKKPENIPQPISNTSRANLNKLLTDYTEMKKAILHVYWEEFQKDPVGLMSRVAQPASKKIDQNKLKPEMDEKGNLTTAGFACSQCGQPLFVYKLEQVSEKGKAYTNYFGRCNVAEHEKLILLAQLKPEKDSDEAVTYSLGKFGQRALDFYSIHVTKESTHPVKPLAQIAGNRYASGPVGKALSDACMGTIASFLSKYQDIIIEHQKVVKGNQKRLESLRELAGKENLEYPSVTLPPQPHTKEGVDAYNEVIARVRMWVNLNLWQKLKLSRDDAKPLLRLKGFPSFPLVERQANEVDWWDMVCNVKKLINEKKEDGKVFWQNLAGYKRQEALRPYLSSEEDRKKGKKFARYQLGDLLLHLEKKHGEDWGKVYDEAWERIDKKVEGLSKHIKLEEERRSEDAQSKAALTDWLRAKASFVIEGLKEADKDEFCRCELKLQKWYGDLRGKPFAIEAENSILDISGFSKQYNCAFIWQKDGVKKLNLYLIINYFKGGKLRFKKIKPEAFEANRFYTVINKKSGEIVPMEVNFNFDDPNLIILPLAFGKRQGREFIWNDLLSLETGSLKLANGRVIEKTLYNRRTRQDEPALFVALTFERREVLDSSTIKPMNLIGVDRGENIPAVIALTDPEGCPLSRFKDSLGNPTHILRIGESYKEKQRTIQAFKEVEQRRAGGYSRKYASKAKNLADDMVRNTARDLLYYAVTQDAMLIFENLSRGFGRQGKRTFMAERQYTRMEDWLTAKLAYEGLPSKTYLSKTLAQYTSKTCSNCGFTITSADYDRVLEKLKKTATGWMTTINGKELKVEGQITYYNRYKRQNVVKDLSVELDRLSEESVNNDISSWTKGRSGEALSLLKKRFSHRPVQEKFVCLNCGFETHADEQAALNIARSWLFLRSQEYKKYQTNKTTGNTDKRAFVETWQSFYRKKLKEVWKPAV

SEQ ID NO: 24946 - protein, 978 aa, synthetic construct
  REGION 1..978: note = engineered CasX variant
QEIKRINKIRRRLVKDSNTKKAGKTGPMKTLLVRVMTPDLRERLENLRKKPENIPQPISNTSRANLNKLLTDYTEMKKAILHVYWEEFQKDPVGLMSRVAQPASKKIDQNKLKPEMDEKGNLTTAGFACSQCGQPLFVYKLEQVSEKGKAYTNYFGRCNVAEHEKLILLAQLKPEKDSDEAVTYSLGKFGQRALDFYSIHVTKESTHPVKPLAQIAGNRYASGPVGKALSDACMGTIASFLSKYQDIIIEHQKVVKGNQKRLESLRELAGKENLEYPSVTLPPQPHTKEGVDAYNEVIARVRMWVNLNLWQKLKLSRDDAKPLLRLKGFPSFPLVERQANEVDWWDMVCNVKKLINEKKEDGKVFWQNLAGYKRQEALRPYLSSEEDRKKGKKFARYQLGDLLLHLEKKHGEDWGKVYDEAWERIDKKVEGLSKHIKLEEERRSEDAQSKAALTDWLRAKASFVIEGLKEADKDEFCRCELKLQKWYGDLRGKPFAIEAENSILDISGFSKQYNCAFIWQKDGVKKLNLYLIINYFKGGKLRFKKIKPEAFEANRFYTVINKKSGEIVPMEVNFNFDDPNLIILPLAFGKRQGREFIWNDLLSLETGSLKLANGRVIEKTLYNRRTRQDEPALFVALTFERREVLDSSSMKPMNLIGVDRGENIPAVIALTDPEGSPLSRFKDSLGNPTHILRIGESYKEKQRTIQAKKEVEQRRAGGYSRKYASKAKNLADDMVRNTARDLLYYAVTQDAMLIFENLSRGFGRQGKRTFMAERQYTRMEDWLTAKLAYEGLPSKTYLSKTLAQYTSKTCSNCGFTITSADYDRVLEKLKKTATGWMTTINGKELKVEGQITYYNRYKRQNVVKDLSVELDRLSEESVNNDISSWTKGRSGEALSLLKKRFSHRPVQEKFVCLNCGFETHADEQAALNIARSWLFLRSQEYKKYQTNKTTGNTDKRAFVETWQSFYRKKLKEVWKPAV

SEQ ID NO: 24947 - protein, 978 aa, synthetic construct
  REGION 1..978: note = engineered CasX variant
QEIKRINKIRRRLVKDSNTKKAGKTGPMKTLLVRVMTPDLRERLENLRKKPENIPQPISNTSRANLNKLLTDYTEMKKAILHVYWEEFQKDPVGLMSRVAQPASKKIDQNKLKPEMDEKGNLTTAGFACSQCGQPLFVYKLEQVSEKGKAYTNYFGRCNVAEHEKLILLAQLKPEKDSDEAVTYSLGKFGQRALDFYSIHVTKESTHPVKPLAQIAGNRYASGPVGKALSDACMGTIASFLSKYQDIIIEHQKVVKGNQKRLESLRELAGKENLEYPSVTLPPQPHTKEGVDAYNEVIARVRMWVNLNLWQKLKLSRDDAKPLLRLKGFPSFPLVERQANEVDWWDMVCNVKKLINEKKEDGKVFWQNLAGYKRQEALRPYLSSEEDRKKGKKFARYQLGDLLLHLEKKHGEDWGKVYDEAWERIDKKVEGLSKHIKLEEERRSEDAQSKAALTDWLRAKASFVIEGLKEADKDEFCRCELKLQKWYGDLRGKPFAIEAENSILDISGFSKQYNCAFIWQKDGVKKLNLYLIINYFKGGKLRFKKIKPEAFEANRFYTVINKKSGEIVPMEVNFNFDDPNLIILPLAFGKRQGREFIWNDLLSLETGSLKLANGRVIEKTLYNRRTRQDEPALFVALTFERREVLDSSSMKPMNLIGVDRGENIPAVIALTDPEGCPLSRFKDSLGNPTHILRIGESYKEKQRTIQAKKEVEQRRAGGYSRKYASKAKNLADDMVRNTARDLLYYAVTQDAMLIFENLSRGFGRQGKRTFMAERQYTRMEDWLTAKLAYEGLPSKTYLSKTLAQYTSKTCSNCGFTITSADYDRVLEKLKKTATGWMTTINGKELKVEGQITYYNRYKRQNVVKDLSVELDRLSEESVNNDISSWTKGRSGEALSLLKKRFSHRPVQEKFVCLNCGFETHADEQAALNIARSWLFLRSQEYKKYQTNKTTGNTDKRAFVETWQSFYRKKLKEVWKPAV

SEQ ID NO: 24948 - protein, 978 aa, synthetic construct
  REGION 1..978: note = engineered CasX variant
QEIKRINKIRRRLVKDSNTKKAGKTGPMKTLLVRVMTPDLRERLENLRKKPENIPQPISNTSRANLNKLLTDYTEMKKAILHVYWEEFQKDPVGLMSRVAQPASKKIDQNKLKPEMDEKGNLTTAGFACSQCGQPLFVYKLEQVSEKGKAYTNYFGRCNVAEHEKLILLAQLKPEKDSDEAVTYSLGKFGQRALDFYSIHVTKESTHPVKPLAQIAGNRYASGPVGKALSDACMGTIASFLSKYQDIIIEHQKVVKGNQKRLESLRELAGKENLEYPSVTLPPQPHTKEGVDAYNEVIARVRMWVNLNLWQKLKLSRDDAKPLLRLKGFPSFPLVERQANEVDWWDMVCNVKKLINEKKEDGKVFWQNLAGYKRQEALRPYLSSEEDRKKGKKFARYQLGDLLLHLEKKHGEDWGKVYDEAWERIDKKVEGLSKHIKLEEERRSEDAQSKAALTDWLRAKASFVIEGLKEADKDEFCRCELKLQKWYGDLRGKPFAIEAENSILDISGFSKQYNCAFIWQKDGVKKLNLYLIINYFKGGKLRFKKIKPEAFEANRFYTVINKKSGEIVPMEVNFNFDDPNLIILPLAFGKRQGREFIWNDLLSLETGSLKLANGRVIEKTLYNRRTRQDEPALFVALTFERREVLDSSSIKPVNLIGVDRGENIPAVIALTDPEGCPLSRFKDSLGNPTHILRIGESYKEKQRTIQAKKEVEQRRAGGYSRKYASKAKNLADDMVRNTARDLLYYAVTQDAMLIFENLSRGFGRQGKRTFMAERQYTRMEDWLTAKLAYEGLPSKTYLSKTLAQYTSKTCSNCGFTITSADYDRVLEKLKKTATGWMTTINGKELKVEGQITYYNRYKRQNVVKDLSVELDRLSEESVNNDISSWTKGRSGEALSLLKKRFSHRPVQEKFVCLNCGFETHADEQAALNIARSWLFLRSQEYKKYQTNKTTGNTDKRAFVETWQSFYRKKLKEVWKPAV

SEQ ID NO: 24949 - protein, 978 aa, synthetic construct
  REGION 1..978: note = engineered CasX variant
QEIKRINKIRRRLVKDSNTKKAGKTGPMKTLLVRVMTPDLRERLENLRKKPENIPQPISNTSRANLNKLLTDYTEMKKAILHVYWEEFQKDPVGLMSRVAQPASKKIDQNKLKPEMDEKGNLTTAGFACSQCGQPLFVYKLEQVSEKGKAYTNYFGRCNVAEHEKLILLAQLKPEKDSDEAVTYSLGKFGQRALDFYSIHVTKESTHPVKPLAQIAGNRYASGPVGKALSDACMGTIASFLSKYQDIIIEHQKVVKGNQKRLESLRELAGKENLEYPSVTLPPQPHTKEGVDAYNEVIARVRMWVNLNLWQKLKLSRDDAKPLLRLKGFPSFPLVERQANEVDWWDMVCNVKKLINEKKEDGKVFWQNLAGYKRQEALRPYLSSEEDRKKGKKFARYQLGDLLLHLEKKHGEDWGKVYDEAWERIDKKVEGLSKHIKLEEERRSEDAQSKAALTDWLRAKASFVIEGLKEADKDEFCRCELKLQKWYGDLRGKPFAIEAENSILDISGFSKQYNCAFIWQKDGVKKLNLYLIINYFKGGKLRFKKIKPEAFEANRFYTVINKKSGEIVPMEVNFNFDDPNLIILPLAFGKRQGREFIWNDLLSLETGSLKLANGRVIEKTLYNRRTRQDEPALFVALTFERREVLDSSSIKPVNLIGVDRGENIPAVIALTDPEGCPLSRFKDSLGNPTHILRIDESYKEKQRTIQAKKEVEQRRAGGYSRKYASKAKNLADDMVRNTARDLLYYAVTQDAMLIFENLSRGFGRQGKRTFMAERQYTRMEDWLTAKLAYEGLPSKTYLSKTLAQYTSKTCSNCGFTITSADYDRVLEKLKKTATGWMTTINGKELKVEGQITYYNRYKRQNVVKDLSVELDRLSEESVNNDISSWTKGRSGEALSLLKKRFSHRPVQEKFVCLNCGFETHADEQAALNIARSWLFLRSQEYKKYQTNKTTGNTDKRAFVETWQSFYRKKLKEVWKPAV

SEQ ID NO: 24950 - protein, 978 aa, synthetic construct
  REGION 1..978: note = engineered CasX variant
QEIKRINKIRRRLVKDSNTKKAGKTGPMKTLLVRVMTPDLRERLENLRKKPENIPQPISNTSRANLNKLLTDYTEMKKAILHVYWEEFQKDPVGLMSRVAQPASKKIDQNKLKPEMDEKGNLTTAGFACSQCGQPLFVYKLEQVSEKGKAYTNYFGRCNVAEHEKLILLAQLKPEKDSDEAVTYSLGKFGQRALDFYSIHVTKESTHPVKPLAQIAGNRYASGPVGKALSDACMGTIASFLSKYQDIIIEHQKVVKGNQKRLESLRELAGKENLEYPSVTLPPQPHTKEGVDAYNEVIARVRMWVNLNLWQKLKLSRDDAKPLLRLKGFPSFPLVERQANEVDWWDMVCNVKKLINEKKEDGKVFWQNLAGYKRQEALRPYLSSEEDRKKGKKFARYQLGDLLLHLEKKHGEDWGKVYDEAWERIDKKVEGLSKHIKLEEERRSEDAQSKAALTDWLRAKASFVIEGLKEADKDEFCRCELKLQKWYGDLRGKPFAIEAENSILDISGFSKQYNCAFIWQKDGVKKLNLYLIINYFKGGKLRFKKIKPEAFEANRFYTVINKKSGEIVPMEVNFNFDDPNLIILPLAFGKRQGREFIWNDLLSLETGSLKLANGRVIEKTLYNRRTRQDEPALFVALTFERREVLDSSSIKPMQLIGVDRGENIPAVIALTDPEGRPLSRFKDSLGNPTHILRIGESYKEKQRTIQAKKEVEQRRAGGYSRKYASKAKNLADDMVRNTARDLLYYAVTQDAMLIFENLSRGFGRQGKRTFMAERQYTRMEDWLTAKLAYEGLPSKTYLSKTLAQYTSKTCSNCGFTITSADYDRVLEKLKKTATGWMTTINGKELKVEGQITYYNRYKRQNVVKDLSVELDRLSEESVNNDISSWTKGRSGEALSLLKKRFSHRPVQEKFVCLNCGFETHADEQAALNIARSWLFLRSQEYKKYQTNKTTGNTDKRAFVETWQSFYRKKLKEVWKPAV

SEQ ID NO: 24951 - protein, 978 aa, synthetic construct
  REGION 1..978: note = engineered CasX variant
QEIKRINKIRRRLVKDSNTKKAGKTGPMKTLLVRVMTPDLRERLENLRKKPENIPQPISNTSRANLNKLLTDYTEMKKAILHVYWEEFQKDPVGLMSRVAQPASKKIDQNKLKPEMDEKGNLTTAGFACSQCGQPLFVYKLEQVSEKGKAYTNYFGRCNVAEHEKLILLAQLKPEKDSDEAVTYSLGKFGQRALDFYSIHVTKESTHPVKPLAQIAGNRYASGPVGKALSDACMGTIASFLSKYQDIIIEHQKVVKGNQKRLESLRELAGKENLEYPSVTLPPQPHTKEGVDAYNEVIARVRMWVNLNLWQKLKLSRDDAKPLLRLKGFPSFPLVERQANEVDWWDMVCNVKKLINEKKEDGKVFWQNLAGYKRQEALRPYLSSEEDRKKGKKFARYQLGDLLLHLEKKHGEDWGKVYDEAWERIDKKVEGLSKHIKLEEERRSEDAQSKAALTDWLRAKASFVIEGLKEADKDEFCRCELKLQKWYGDLRGKPFAIEAENSILDISGFSKQYNCAFIWQKDGVKKLNLYLIINYFKGGKLRFKKIKPEAFEANRFYTVINKKSGEIVPMEVNFNFDDPNLIILPLAFGKRQGREFIWNDLLSLETGSLKLANGRVIEKTLYNRRTRQDEPALFVALTFERREVLDSSSIKPMQLIGVDRGENIPAVIALTDPEGCPLSRFKDSLGNPTHILRIGESYKEKQRTIQAKKEVEQRRMGGYSRKYASKAKNLADDMVRNTARDLLYYAVTQDAMLIFENLSRGFGRQGKRTFMAERQYTRMEDWLTAKLAYEGLPSKTYLSKTLAQYTSKTCSNCGFTITSADYDRVLEKLKKTATGWMTTINGKELKVEGQITYYNRYKRQNVVKDLSVELDRLSEESVNNDISSWTKGRSGEALSLLKKRFSHRPVQEKFVCLNCGFETHADEQAALNIARSWLFLRSQEYKKYQTNKTTGNTDKRAFVETWQSFYRKKLKEVWKPAV

SEQ ID NO: 24952 - protein, 978 aa, synthetic construct
  REGION 1..978: note = engineered CasX variant
QEIKRINKIRRRLVKDSNTKKAGKTGPMKTLLVRVMTPDLRERLENLRKKPENIPQPISNTSRANLNKLLTDYTEMKKAILHVYWEEFQKDPVGLMSRVAQPASKKIDQNKLKPEMDEKGNLTTAGFACSQCGQPLFVYKLEQVSEKGKAYTNYFGRCNVAEHEKLILLAQLKPEKDSDEAVTYSLGKFGQRALDFYSIHVTKESTHPVKPLAQIAGNRYASGPVGKALSDACMGTIASFLSKYQDIIIEHQKVVKGNQKRLESLRELAGKENLEYPSVTLPPQPHTKEGVDAYNEVIARVRMWVNLNLWQKLKLSRDDAKPLLRLKGFPSFPLVERQANEVDWWDMVCNVKKLINEKKEDGKVFWQNLAGYKRQEALRPYLSSEEDRKKGKKFARYQLGDLLLHLEKKHGEDWGKVYDEAWERIDKKVEGLSKHIKLEEERRSEDAQSKAALTDWLRAKASFVIEGLKEADKDEFCRCELKLQKWYGDLRGKPFAIEAENSILDISGFSKQYNCAFIWQKDGVKKLNLYLIINYFKGGKLRFKKIKPEAFEANRFYTVINKKSGEIVPMEVNFNFDDPNLIILPLAFGKRQGREFIWNDLLSLETGSLKLANGRVIEKTLYNRRTRQDEPALFVALTFERREVLDSSSIKPMQLIGVDRGENIPAVIALTDPEGCPLSRFKDSLGNPTHILRIGESYKEKQRTIQAKKEVEQRRAGGYSRKYASKAKNLADDMVRNTARDLLYYAVTQDAMLIFENLSRGFGRQGKRTFMAERQYTRMEDWLTAKLAYEGLPSKTYLSKTLAQYTSKTCSNCGFTITSADYDRVLEKLKKTATGWMTTINGKELKVEGQITYYNRYKRQNVVKDLSVELDRLSEESVNNDISSWTKGRSGEALSLLKKRFSHRPVQEKFVCLNCGFETHADEQAALNIARSWLFLRSQEYKKYQTNKTTGNTDKRAFVETWQSFYRKKLKEVWKPAV

SEQ ID NO: 24953 - protein, 978 aa, synthetic construct
  REGION 1..978: note = engineered CasX variant
QEIKRINKIRRRLVKDSNTKKAGKTGPMKTLLVRVMTPDLRERLENLRKKPENIPQPISNTSRANLNKLLTDYTEMKKAILHVYWEEFQKDPVGLMSRVAQPASKKIDQNKLKPEMDEKGNLTTAGFACSQCGQPLFVYKLEQVSEKGKAYTNYFGRCNVAEHEKLILLAQLKPEKDSDEAVTYSLGKFGQRALDFYSIHVTKESTHPVKPLAQIAGNRYASGPVGKALSDACMGTIASFLSKYQDIIIEHQKVVKGNQKRLESLRELAGKENLEYPSVTLPPQPHTKEGVDAYNEVIARVRMWVNLNLWQKLKLSRDDAKPLLRLKGFPSFPLVERQANEVDWWDMVCNVKKLINEKKEDGKVFWQNLAGYKRQEALRPYLSSEEDRKKGKKFARYQLGDLLLHLEKKHGEDWGKVYDEAWERIDKKVEGLSKHIKLEEERRSEDAQSKAALTDWLRAKASFVIEGLKEADKDEFCRCELKLQKWYGDLRGKPFAIEAENSILDISGFSKQYNCAFIWQKDGVKKLNLYLIINYFKGGKLRFKKIKPEAFEANRFYTVINKKSGEIVPMEVNFNFDDPNLIILPLAFGKRQGREFIWNDLLSLETGSLKLANGRVIEKTLYNRRTRQDEPALFVALTFERREVLDSSSIKPMNLIGVDRGENIPAVYALTDPEGRPLSRFKDSLGNPTHILRIGESYKEKQRTIQAKKEVEQRRAGGYSRKYASKAKNLADDMVRNTARDLLYYAVTQDAMLIFENLSRGFGRQGKRTFMAERQYTRMEDWLTAKLAYEGLPSKTYLSKTLAQYTSKTCSNCGFTITSADYDRVLEKLKKTATGWMTTINGKELKVEGQITYYNRYKRQNVVKDLSVELDRLSEESVNNDISSWTKGRSGEALSLLKKRFSHRPVQEKFVCLNCGFETHADEQAALNIARSWLFLRSQEYKKYQTNKTTGNTDKRAFVETWQSFYRKKLKEVWKPAV

SEQ ID NO: 24954 - protein, 978 aa, synthetic construct
  REGION 1..978: note = engineered CasX variant
QEIKRINKIRRRLVKDSNTKKAGKTGPMKTLLVRVMTPDLRERLENLRKKPENIPQPISNTSRANLNKLLTDYTEMKKAILHVYWEEFQKDPVGLMSRVAQPASKKIDQNKLKPEMDEKGNLTTAGFACSQCGQPLFVYKLEQVSEKGKAYTNYFGRCNVAEHEKLILLAQLKPEKDSDEAVTYSLGKFGQRALDFYSIHVTKESTHPVKPLAQIAGNRYASGPVGKALSDACMGTIASFLSKYQDIIIEHQKVVKGNQKRLESLRELAGKENLEYPSVTLPPQPHTKEGVDAYNEVIARVRMWVNLNLWQKLKLSRDDAKPLLRLKGFPSFPLVERQANEVDWWDMVCNVKKLINEKKEDGKVFWQNLAGYKRQEALRPYLSSEEDRKKGKKFARYQLGDLLLHLEKKHGEDWGKVYDEAWERIDKKVEGLSKHIKLEEERRSEDAQSKAALTDWLRAKASFVIEGLKEADKDEFCRCELKLQKWYGDLRGKPFAIEAENSILDISGFSKQYNCAFIWQKDGVKKLNLYLIINYFKGGKLRFKKIKPEAFEANRFYTVINKKSGEIVPMEVNFNFDDPNLIILPLAFGKRQGREFIWNDLLSLETGSLKLANGRVIEKTLYNRRTRQDEPALFVALTFERREVLDSSSIKPMNLIGVDRGENIPAVIALTDQEGCPLSRFKDSLGNPTHILRIGESYKEKQRTIQAKKEVEQRRAGGYSRKYASKAKNLADDMVRNTARDLLYYAVTQDAMLIFENLSRGFGRQGKRTFMAERQYTRMEDWLTAKLAYEGLPSKTYLSKTLAQYTSKTCSNCGFTITSADYDRVLEKLKKTATGWMTTINGKELKVEGQITYYNRYKRQNVVKDLSVELDRLSEESVNNDISSWTKGRSGEALSLLKKRFSHRPVQEKFVCLNCGFETHADEQAALNIARSWLFLRSQEYKKYQTNKTTGNTDKRAFVETWQSFYRKKLKEVWKPAV

SEQ ID NO: 24955 - protein, 978 aa, synthetic construct
  REGION 1..978: note = engineered CasX variant
QEIKRINKIRRRLVKDSNTKKAGKTGPMKTLLVRVMTPDLRERLENLRKKPENIPQPISNTSRANLNKLLTDYTEMKKAILHVYWEEFQKDPVGLMSRVAQPASKKIDQNKLKPEMDEKGNLTTAGFACSQCGQPLFVYKLEQVSEKGKAYTNYFGRCNVAEHEKLILLAQLKPEKDSDEAVTYSLGKFGQRALDFYSIHVTKESTHPVKPLAQIAGNRYASGPVGKALSDACMGTIASFLSKYQDIIIEHQKVVKGNQKRLESLRELAGKENLEYPSVTLPPQPHTKEGVDAYNEVIARVRMWVNLNLWQKLKLSRDDAKPLLRLKGFPSFPLVERQANEVDWWDMVCNVKKLINEKKEDGKVFWQNLAGYKRQEALRPYLSSEEDRKKGKKFARYQLGDLLLHLEKKHGEDWGKVYDEAWERIDKKVEGLSKHIKLEEERRSEDAQSKAALTDWLRAKASFVIEGLKEADKDEFCRCELKLQKWYGDLRGKPFAIEAENSILDISGFSKQYNCAFIWQKDGVKKLNLYLIINYFKGGKLRFKKIKPEAFEANRFYTVINKKSGEIVPMEVNFNFDDPNLIILPLAFGKRQGREFIWNDLLSLETGSLKLANGRVIEKTLYNRRTRQDEPALFVALTFERREVLDSSSIKPMNLIGVDRGENIPAVIALTDPEGSPLSRFKDSLGNPTHILRIGESYKEKQRTIQAKKEVEQRRAGGYSRKYASKAKNLADDMVRNTARDLLYYAVTQDAMLIFENLSRGFGRQGKRTFMAERQYTRMEDWLTAKLAYEGLPSKTYLSKTLAQYTSKTCSNCGFTITSADYDRVLEKLKKTATGWMTTINGKELKVEGQITYYNRYKRQNVVKDLSVELDRLSEESVNNDISSWTKGRSGEALSLLKKRFSHRPVQEKFVCLNCGFETHADEQAALNIARSWLFLRSQEYKKYQTNKTTGNTDKRAFVETWQSFYRKKLKEVWKPAV

SEQ ID NO: 24956 - protein, 978 aa, synthetic construct
  REGION 1..978: note = engineered CasX variant
QEIKRINKIRRRLVKDSNTKKAGKTGPMKTLLVRVMTPDLRERLENLRKKPENIPQPISNTSRANLNKLLTDYTEMKKAILHVYWEEFQKDPVGLMSRVAQPASKKIDQNKLKPEMDEKGNLTTAGFACSQCGQPLFVYKLEQVSEKGKAYTNYFGRCNVAEHEKLILLAQLKPEKDSDEAVTYSLGKFGQRALDFYSIHVTKESTHPVKPLAQIAGNRYASGPVGKALSDACMGTIASFLSKYQDIIIEHQKVVKGNQKRLESLRELAGKENLEYPSVTLPPQPHTKEGVDAYNEVIARVRMWVNLNLWQKLKLSRDDAKPLLRLKGFPSFPLVERQANEVDWWDMVCNVKKLINEKKEDGKVFWQNLAGYKRQEALRPYLSSEEDRKKGKKFARYQLGDLLLHLEKKHGEDWGKVYDEAWERIDKKVEGLSKHIKLEEERRSEDAQSKAALTDWLRAKASFVIEGLKEADKDEFCRCELKLQKWYGDLRGKPFAIEAENSILDISGFSKQYNCAFIWQKDGVKKLNLYLIINYFKGGKLRFKKIKPEAFEANRFYTVINKKSGEIVPMEVNFNFDDPNLIILPLAFGKRQGREFIWNDLLSLETGSLKLANGRVIEKTLYNRRTRQDEPALFVALTFERREVLDSSSIKPMNLIGVDRGENIPAVIALTDPEGRPLSRYKDSLGNPTHILRIGESYKEKQRTIQAKKEVEQRRAGGYSRKYASKAKNLADDMVRNTARDLLYYAVTQDAMLIFENLSRGFGRQGKRTFMAERQYTRMEDWLTAKLAYEGLPSKTYLSKTLAQYTSKTCSNCGFTITSADYDRVLEKLKKTATGWMTTINGKELKVEGQITYYNRYKRQNVVKDLSVELDRLSEESVNNDISSWTKGRSGEALSLLKKRFSHRPVQEKFVCLNCGFETHADEQAALNIARSWLFLRSQEYKKYQTNKTTGNTDKRAFVETWQSFYRKKLKEVWKPAV

SEQ ID NO: 24957 - protein, 978 aa, synthetic construct
  REGION 1..978: note = engineered CasX variant
QEIKRINKIRRRLVKDSNTKKAGKTGPMKTLLVRVMTPDLRERLENLRKKPENIPQPISNTSRANLNKLLTDYTEMKKAILHVYWEEFQKDPVGLMSRVAQPASKKIDQNKLKPEMDEKGNLTTAGFACSQCGQPLFVYKLEQVSEKGKAYTNYFGRCNVAEHEKLILLAQLKPEKDSDEAVTYSLGKFGQRALDFYSIHVTKESTHPVKPLAQIAGNRYASGPVGKALSDACMGTIASFLSKYQDIIIEHQKVVKGNQKRLESLRELAGKENLEYPSVTLPPQPHTKEGVDAYNEVIARVRMWVNLNLWQKLKLSRDDAKPLLRLKGFPSFPLVERQANEVDWWDMVCNVKKLINEKKEDGKVFWQNLAGYKRQEALRPYLSSEEDRKKGKKFARYQLGDLLLHLEKKHGEDWGKVYDEAWERIDKKVEGLSKHIKLEEERRSEDAQSKAALTDWLRAKASFVIEGLKEADKDEFCRCELKLQKWYGDLRGKPFAIEAENSILDISGFSKQYNCAFIWQKDGVKKLNLYLIINYFKGGKLRFKKIKPEAFEANRFYTVINKKSGEIVPMEVNFNFDDPNLIILPLAFGKRQGREFIWNDLLSLETGSLKLANGRVIEKTLYNRRTRQDEPALFVALTFERREVLDSSSIKPMNLIGVDRGENIPAVIALTDPEGRPLSRFKDSLGNPTHILRIGESYKHKQRTIQAKKEVEQRRAGGYSRKYASKAKNLADDMVRNTARDLLYYAVTQDAMLIFENLSRGFGRQGKRTFMAERQYTRMEDWLTAKLAYEGLPSKTYLSKTLAQYTSKTCSNCGFTITSADYDRVLEKLKKTATGWMTTINGKELKVEGQITYYNRYKRQNVVKDLSVELDRLSEESVNNDISSWTKGRSGEALSLLKKRFSHRPVQEKFVCLNCGFETHADEQAALNIARSWLFLRSQEYKKYQTNKTTGNTDKRAFVETWQSFYRKKLKEVWKPAV

SEQ ID NO: 24958 - protein, 978 aa, synthetic construct
  REGION 1..978: note = engineered CasX variant
QEIKRINKIRRRLVKDSNTKKAGKTGPMKTLLVRVMTPDLRERLENLRKKPENIPQPISNTSRANLNKLLTDYTEMKKAILHVYWEEFQKDPVGLMSRVAQPASKKIDQNKLKPEMDEKGNLTTAGFACSQCGQPLFVYKLEQVSEKGKAYTNYFGRCNVAEHEKLILLAQLKPEKDSDEAVTYSLGKFGQRALDFYSIHVTKESTHPVKPLAQIAGNRYASGPVGKALSDACMGTIASFLSKYQDIIIEHQKVVKGNQKRLESLRELAGKENLEYPSVTLPPQPHTKEGVDAYNEVIARVRMWVNLNLWQKLKLSRDDAKPLLRLKGFPSFPLVERQANEVDWWDMVCNVKKLINEKKEDGKVFWQNLAGYKRQEALRPYLSSEEDRKKGKKFARYQLGDLLLHLEKKHGEDWGKVYDEAWERIDKKVEGLSKHIKLEEERRSEDAQSKAALTDWLRAKASFVIEGLKEADKDEFCRCELKLQKWYGDLRGKPFAIEAENSILDISGFSKQYNCAFIWQKDGVKKLNLYLIINYFKGGKLRFKKIKPEAFEANRFYTVINKKSGEIVPMEVNFNFDDPNLIILPLAFGKRQGREFIWNDLLSLETGSLKLANGRVIEKTLYNRRTRQDEPALFVALTFERREVLDSSSIKPMNLIGVDRGENIPAVIALTDPEGRPLSRFKDSLGNPTHILRIGESYKEKTRTIQAKKEVEQRRAGGYSRKYASKAKNLADDMVRNTARDLLYYAVTQDAMLIFENLSRGFGRQGKRTFMAERQYTRMEDWLTAKLAYEGLPSKTYLSKTLAQYTSKTCSNCGFTITSADYDRVLEKLKKTATGWMTTINGKELKVEGQITYYNRYKRQNVVKDLSVELDRLSEESVNNDISSWTKGRSGEALSLLKKRFSHRPVQEKFVCLNCGFETHADEQAALNIARSWLFLRSQEYKKYQTNKTTGNTDKRAFVETWQSFYRKKLKEVWKPAV

SEQ ID NO: 24959 - protein, 978 aa, synthetic construct
  REGION 1..978: note = engineered CasX variant
QEIKRINKIRRRLVKDSNTKKAGKTGPMKTLLVRVMTPDLRERLENLRKKPENIPQPISNTSRANLNKLLTDYTEMKKAILHVYWEEFQKDPVGLMSRVAQPASKKIDQNKLKPEMDEKGNLTTAGFACSQCGQPLFVYKLEQVSEKGKAYTNYFGRCNVAEHEKLILLAQLKPEKDSDEAVTYSLGKFGQRALDFYSIHVTKESTHPVKPLAQIAGNRYASGPVGKALSDACMGTIASFLSKYQDIIIEHQKVVKGNQKRLESLRELAGKENLEYPSVTLPPQPHTKEGVDAYNEVIARVRMWVNLNLWQKLKLSRDDAKPLLRLKGFPSFPLVERQANEVDWWDMVCNVKKLINEKKEDGKVFWQNLAGYKRQEALRPYLSSEEDRKKGKKFARYQLGDLLLHLEKKHGEDWGKVYDEAWERIDKKVEGLSKHIKLEEERRSEDAQSKAALTDWLRAKASFVIEGLKEADKDEFCRCELKLQKWYGDLRGKPFAIEAENSILDISGFSKQYNCAFIWQKDGVKKLNLYLIINYFKGGKLRFKKIKPEAFEANRFYTVINKKSGEIVPMEVNFNFDDPNLIILPLAFGKRQGREFIWNDLLSLETGSLKLANGRVIEKTLYNRRTRQDEPALFVALTFERREVLDSSSIKPMNLIGVDRGENIPAVIALTDPEGRPLSRFKDSLGNPTHILRIGESYKEKQRTIQAKKEVEQRRMGGYSRKYASKAKNLADDMVRNTARDLLYYAVTQDAMLIFENLSRGFGRQGKRTFMAERQYTRMEDWLTAKLAYEGLPSKTYLSKTLAQYTSKTCSNCGFTITSADYDRVLEKLKKTATGWMTTINGKELKVEGQITYYNRYKRQNVVKDLSVELDRLSEESVNNDISSWTKGRSGEALSLLKKRFSHRPVQEKFVCLNCGFETHADEQAALNIARSWLFLRSQEYKKYQTNKTTGNTDKRAFVETWQSFYRKKLKEVWKPAV

SEQ ID NO: 24960 - protein, 978 aa, synthetic construct
  REGION 1..978: note = engineered CasX variant
QEIKRINKIRRRLVKDSNTKKAGKTGPMKTLLVRVMTPDLRERLENLRKKPENIPQPISNTSRANLNKLLTDYTEMKKAILHVYWEEFQKDPVGLMSRVAQPASKKIDQNKLKPEMDEKGNLTTAGFACSQCGQPLFVYKLEQVSEKGKAYTNYFGRCNVAEHEKLILLAQLKPEKDSDEAVTYSLGKFGQRALDFYSIHVTKESTHPVKPLAQIAGNRYASGPVGKALSDACMGTIASFLSKYQDIIIEHQKVVKGNQKRLESLRELAGKENLEYPSVTLPPQPHTKEGVDAYNEVIARVRMWVNLNLWQKLKLSRDDAKPLLRLKGFPSFPLVERQANEVDWWDMVCNVKKLINEKKEDGKVFWQNLAGYKRQEALRPYLSSEEDRKKGKKFARYQLGDLLLHLEKKHGEDWGKVYDEAWERIDKKVEGLSKHIKLEEERRSEDAQSKAALTDWLRAKASFVIEGLKEADKDEFCRCELKLQKWYGDLRGKPFAIEAENSILDISGFSKQYNCAFIWQKDGVKKLNLYLIINYFKGGKLRFKKIKPEAFEANRFYTVINKKSGEIVPMEVNFNFDDPNLIILPLAFGKRQGREFIWNDLLSLETGSLKLANGRVIEKTLYNRRTRQDEPALFVALTFERREVLDSSSIKPMNLIGVDRGENIPAVIALTDPEGRPLSRFKDSLGNPTHILRIGESYKEKQRTIQAKKEVEQRRAGGYSRKYASKAKNLADDMVRNTARDLLYYAVTQDAMLIFENLSRGFGRQGKRTFMAERQYTRMEDWLTAKLAYEGLPSKTYLSKTLAQYTSKTCSNCGFTITSADYDRVLEKLKKTATGWMTTINGKELKVEGQITYYNRYKRQNVVKDLSVELDRLSEESVNNDISSWTKGRSGEALSLLKKRFSHRPVQEKFVCLNCGFETHADEQAALNIARSWLFLRSQEYKKYQTNKTTGNTDKRAFVETWQSFYRKKLKEVWKPAV

SEQ ID NO: 24961 - protein, 978 aa, synthetic construct
  REGION 1..978: note = engineered CasX variant
QEIKRINKIRRRLVKDSNTKKAGKTGPMKTLLVRVMTPDLRERLENLRKKPENIPQPISNTSRANLNKLLTDYTEMKKAILHVYWEEFQKDPVGLMSRVAQPASKKIDQNKLKPEMDEKGNLTTAGFACSQCGQPLFVYKLEQVSEKGKAYTNYFGRCNVAEHEKLILLAQLKPEKDSDEAVTYSLGKFGQRALDFYSIHVTKESTHPVKPLAQIAGNRYASGPVGKALSDACMGTIASFLSKYQDIIIEHQKVVKGNQKRLESLRELAGKENLEYPSVTLPPQPHTKEGVDAYNEVIARVRMWVNLNLWQKLKLSRDDAKPLLRLKGFPSFPLVERQANEVDWWDMVCNVKKLINEKKEDGKVFWQNLAGYKRQEALRPYLSSEEDRKKGKKFARYQLGDLLLHLEKKHGEDWGKVYDEAWERIDKKVEGLSKHIKLEEERRSEDAQSKAALTDWLRAKASFVIEGLKEADKDEFCRCELKLQKWYGDLRGKPFAIEAENSILDISGFSKQYNCAFIWQKDGVKKLNLYLIINYFKGGKLRFKKIKPEAFEANRFYTVINKKSGEIVPMEVNFNFDDPNLIILPLAFGKRQGREFIWNDLLSLETGSLKLANGRVIEKTLYNRRTRQDEPALFVALTFERREVLDSSSIKPMNLIGVDRGENIPAVIALTDPEGRPLSRFKDSLGNPTHILRIGESYKEKQRTIQAKKCVEQRRAGGYSRKYASKAKNLADDMVRNTARDLLYYAVTQDAMLIFENLSRGFGRQGKRTFMAERQYTRMEDWLTAKLAYEGLPSKTYLSKTLAQYTSKTCSNCGFTITSADYDRVLEKLKKTATGWMTTINGKELKVEGQITYYNRYKRQNVVKDLSVELDRLSEESVNNDISSWTKGRSGEALSLLKKRFSHRPVQEKFVCLNCGFETHADEQAALNIARSWLFLRSQEYKKYQTNKTTGNTDKRAFVETWQSFYRKKLKEVWKPAV

SEQ ID NO: 24962 - protein, 978 aa, synthetic construct
  REGION 1..978: note = engineered CasX variant
QEIKRINKIRRRLVKDSNTKKAGKTGPMKTLLVRVMTPDLRERLENLRKKPENIPQPISNTSRANLNKLLTDYTEMKKAILHVYWEEFQKDPVGLMSRVAQPASKKIDQNKLKPEMDEKGNLTTAGFACSQCGQPLFVYKLEQVSEKGKAYTNYFGRCNVAEHEKLILLAQLKPEKDSDEAVTYSLGKFGQRALDFYSIHVTKESTHPVKPLAQIAGNRYASGPVGKALSDACMGTIASFLSKYQDIIIEHQKVVKGNQKRLESLRELAGKENLEYPSVTLPPQPHTKEGVDAYNEVIARVRMWVNLNLWQKLKLSRDDAKPLLRLKGFPSFPLVERQANEVDWWDMVCNVKKLINEKKEDGKVFWQNLAGYKRQEALRPYLSSEEDRKKGKKFARYQLGDLLLHLEKKHGEDWGKVYDEAWERIDKKVEGLSKHIKLEEERRSEDAQSKAALTDWLRAKASFVIEGLKEADKDEFCRCELKLQKWYGDLRGKPFAIEAENSILDISGFSKQYNCAFIWQKDGVKKLNLYLIINYFKGGKLRFKKIKPEAFEANRFYTVINKKSGEIVPMEVNFNFDDPNLIILPLAFGKRQGREFIWNDLLSLETGSLKLANGRVIEKTLYNRRTRQDEPALFVALTFERREVLDSSSIKPMNLIGVDRGENIPAVIALTDPEGRPLSRFKDSLGNPTHILRIDESYKEKQRTIQAKKEVEQRRAGGYSRKYASKAKNLADDMVRNTARDLLYYAVTQDAMLIFENLSRGFGRQGKRTFMAERQYTRMEDWLTAKLAYEGLPSKTYLSKTLAQYTSKTCSNCGFTITSADYDRVLEKLKKTATGWMTTINGKELKVEGQITYYNRYKRQNVVKDLSVELDRLSEESVNNDISSWTKGRSGEALSLLKKRFSHRPVQEKFVCLNCGFETHADEQAALNIARSWLFLRSQEYKKYQTNKTTGNTDKRAFVETWQSFYRKKLKEVWKPAV

SEQ ID NO: 24963 - protein, 978 aa, synthetic construct
  REGION 1..978: note = engineered CasX variant
QEIKRINKIRRRLVKDSNTKKAGKTGPMKTLLVRVMTPDLRERLENLRKKPENIPQPISNTSRANLNKLLTDYTEMKKAILHVYWEEFQKDPVGLMSRVAQPASKKIDQNKLKPEMDEKGNLTTAGFACSQCGQPLFVYKLEQVSEKGKAYTNYFGRCNVAEHEKLILLAQLKPEKDSDEAVTYSLGKFGQRALDFYSIHVTKESTHPVKPLAQIAGNRYASGPVGKALSDACMGTIASFLSKYQDIIIEHQKVVKGNQKRLESLRELAGKENLEYPSVTLPPQPHTKEGVDAYNEVIARVRMWVNLNLWQKLKLSRDDAKPLLRLKGFPSFPLVERQANEVDWWDMVCNVKKLINEKKEDGKVFWQNLAGYKRQEALRPYLSSEEDRKKGKKFARYQLGDLLLHLEKKHGEDWGKVYDEAWERIDKKVEGLSKHIKLEEERRSEDAQSKAALTDWLRAKASFVIEGLKEADKDEFCRCELKLQKWYGDLRGKPFAIEAENSILDISGFSKQYNCAFIWQKDGVKKLNLYLIINYFKGGKLRFKKIKPEAFEANRFYTVINKKSGEIVPMEVNFNFDDPNLIILPLAFGKRQGREFIWNDLLSLETGSLKLANGRVIEKTLYNRRTRQDEPALFVALTFERREVLDSSSIKPMNLIGVDRGENIPAVIALTDPEGRPISRFKDSLGNPTHILRIGESYKEKQRTIQAKKEVEQRRAGGYSRKYASKAKNLADDMVRNTARDLLYYAVTQDAMLIFENLSRGFGRQGKRTFMAERQYTRMEDWLTAKLAYEGLPSKTYLSKTLAQYTSKTCSNCGFTITSADYDRVLEKLKKTATGWMTTINGKELKVEGQITYYNRYKRQNVVKDLSVELDRLSEESVNNDISSWTKGRSGEALSLLKKRFSHRPVQEKFVCLNCGFETHADEQAALNIARSWLFLRSQEYKKYQTNKTTGNTDKRAFVETWQSFYRKKLKEVWKPAV

SEQ ID NO: 24964 - protein, 978 aa, synthetic construct
  REGION 1..978: note = engineered CasX variant
QEIKRINKIRRRLVKDSNTKKAGKTGPMKTLLVRVMTPDLRERLENLRKKPENIPQPISNTSRANLNKLLTDYTEMKKAILHVYWEEFQKDPVGLMSRVAQPASKKIDQNKLKPEMDEKGNLTTAGFACSQCGQPLFVYKLEQVSEKGKAYTNYFGRCNVAEHEKLILLAQLKPEKDSDEAVTYSLGKFGQRALDFYSIHVTKESTHPVKPLAQIAGNRYASGPVGKALSDACMGTIASFLSKYQDIIIEHQKVVKGNQKRLESLRELAGKENLEYPSVTLPPQPHTKEGVDAYNEVIARVRMWVNLNLWQKLKLSRDDAKPLLRLKGFPSFPLVERQANEVDWWDMVCNVKKLINEKKEDGKVFWQNLAGYKRQEALRPYLSSEEDRKKGKKFARYQLGDLLLHLEKKHGEDWGKVYDEAWERIDKKVEGLSKHIKLEEERRSEDAQSKAALTDWLRAKASFVIEGLKEADKDEFCRCELKLQKWYGDLRGKPFAIEAENSILDISGFSKQYNCAFIWQKDGVKKLNLYLIINYFKGGKLRFKKIKPEAFEANRFYTVINKKSGEIVPMEVNFNFDDPNLIILPLAFGKRQGREFIWNDLLSLETGSLKLANGRVIEKTLYNRRTRQDEPALFVALTFERREVLDSSSIKPMNLIGVDRGENIPAVIALTDPEGNPLSRFKDSLGNPTHILRIGESYKEKQRTIQAKKEVEQRRAGGYSRKYASKAKNLADDMVRNTARDLLYYAVTQDAMLIFENLSRGFGRQGKRTFMAERQYTRMEDWLTAKLAYEGLPSKTYLSKTLAQYTSKTCSNCGFTITSADYDRVLEKLKKTATGWMTTINGKELKVEGQITYYNRYKRQNVVKDLSVELDRLSEESVNNDISSWTKGRSGEALSLLKKRFSHRPVQEKFVCLNCGFETHADEQAALNIARSWLFLRSQEYKKYQTNKTTGNTDKRAFVETWQSFYRKKLKEVWKPAV

SEQ ID NO: 24965 - protein, 978 aa, synthetic construct
  REGION 1..978: note = engineered CasX variant
QEIKRINKIRRRLVKDSNTKKAGKTGPMKTLLVRVMTPDLRERLENLRKKPENIPQPISNTSRANLNKLLTDYTEMKKAILHVYWEEFQKDPVGLMSRVAQPASKKIDQNKLKPEMDEKGNLTTAGFACSQCGQPLFVYKLEQVSEKGKAYTNYFGRCNVAEHEKLILLAQLKPEKDSDEAVTYSLGKFGQRALDFYSIHVTKESTHPVKPLAQIAGNRYASGPVGKALSDACMGTIASFLSKYQDIIIEHQKVVKGNQKRLESLRELAGKENLEYPSVTLPPQPHTKEGVDAYNEVIARVRMWVNLNLWQKLKLSRDDAKPLLRLKGFPSFPLVERQANEVDWWDMVCNVKKLINEKKEDGKVFWQNLAGYKRQEALRPYLSSEEDRKKGKKFARYQLGDLLLHLEKKHGEDWGKVYDEAWERIDKKVEGLSKHIKLEEERRSEDAQSKAALTDWLRAKASFVIEGLKEADKDEFCRCELKLQKWYGDLRGKPFAIEAENSILDISGFSKQYNCAFIWQKDGVKKLNLYLIINYFKGGKLRFKKIKPEAFEANRFYTVINKKSGEIVPMEVNFNFDDPNLIILPLAFGKRQGREFIWNDLLSLETGSLKLANGRVIEKTLYNRRTRQDEPALFVALTFERREVLDSSSIKPMNLIGVDRGENIPAVIALTDPEGNPLSRFKDSLGNKTHILRIGESYKEKQRTIQAKKEVEQRRAGGYSRKYASKAKNLADDMVRNTARDLLYYAVTQDAMLIFENLSRGFGRQGKRTFMAERQYTRMEDWLTAKLAYEGLPSKTYLSKTLAQYTSKTCSNCGFTITSADYDRVLEKLKKTATGWMTTINGKELKVEGQITYYNRYKRQNVVKDLSVELDRLSEESVNNDISSWTKGRSGEALSLLKKRFSHRPVQEKFVCLNCGFETHADEQAALNIARSWLFLRSQEYKKYQTNKTTGNTDKRAFVETWQSFYRKKLKEVWKPAV

SEQ ID NO: 24966 - protein, 978 aa, synthetic construct
  REGION 1..978: note = engineered CasX variant
QEIKRINKIRRRLVKDSNTKKAGKTGPMKTLLVRVMTPDLRERLENLRKKPENIPQPISNTSRANLNKLLTDYTEMKKAILHVYWEEFQKDPVGLMSRVAQPASKKIDQNKLKPEMDEKGNLTTAGFACSQCGQPLFVYKLEQVSEKGKAYTNYFGRCNVAEHEKLILLAQLKPEKDSDEAVTYSLGKFGQRALDFYSIHVTKESTHPVKPLAQIAGNRYASGPVGKALSDACMGTIASFLSKYQDIIIEHQKVVKGNQKRLESLRELAGKENLEYPSVTLPPQPHTKEGVDAYNEVIARVRMWVNLNLWQKLKLSRDDAKPLLRLKGFPSFPLVERQANEVDWWDMVCNVKKLINEKKEDGKVFWQNLAGYKRQEALRPYLSSEEDRKKGKKFARYQLGDLLLHLEKKHGEDWGKVYDEAWERIDKKVEGLSKHIKLEEERRSEDAQSKAALTDWLRAKASFVIEGLKEADKDEFCRCELKLQKWYGDLRGKPFAIEAENSILDISGFSKQYNCAFIWQKDGVKKLNLYLIINYFKGGKLRFKKIKPEAFEANRFYTVINKKSGEIVPMEVNFNFDDPNLIILPLAFGKRQGREFIWNDLLSLETGSLKLANGRVIEKTLYNRRTRQDEPALFVALTFERREVLDSSSIKPMNLIGVDRGENIPAVIALTDPEGCPLSRYKDSLGNPTHILRIGESYKEKQRTIQAKKEVEQRRAGGYSRKYASKAKNLADDMVRNTARDLLYYAVTQDAMLIFENLSRGFGRQGKRTFMAERQYTRMEDWLTAKLAYEGLPSKTYLSKTLAQYTSKTCSNCGFTITSADYDRVLEKLKKTATGWMTTINGKELKVEGQITYYNRYKRQNVVKDLSVELDRLSEESVNNDISSWTKGRSGEALSLLKKRFSHRPVQEKFVCLNCGFETHADEQAALNIARSWLFLRSQEYKKYQTNKTTGNTDKRAFVETWQSFYRKKLKEVWKPAV

SEQ ID NO: 24967 - protein, 978 aa, synthetic construct
  REGION 1..978: note = engineered CasX variant
QEIKRINKIRRRLVKDSNTKKAGKTGPMKTLLVRVMTPDLRERLENLRKKPENIPQPISNTSRANLNKLLTDYTEMKKAILHVYWEEFQKDPVGLMSRVAQPASKKIDQNKLKPEMDEKGNLTTAGFACSQCGQPLFVYKLEQVSEKGKAYTNYFGRCNVAEHEKLILLAQLKPEKDSDEAVTYSLGKFGQRALDFYSIHVTKESTHPVKPLAQIAGNRYASGPVGKALSDACMGTIASFLSKYQDIIIEHQKVVKGNQKRLESLRELAGKENLEYPSVTLPPQPHTKEGVDAYNEVIARVRMWVNLNLWQKLKLSRDDAKPLLRLKGFPSFPLVERQANEVDWWDMVCNVKKLINEKKEDGKVFWQNLAGYKRQEALRPYLSSEEDRKKGKKFARYQLGDLLLHLEKKHGEDWGKVYDEAWERIDKKVEGLSKHIKLEEERRSEDAQSKAALTDWLRAKASFVIEGLKEADKDEFCRCELKLQKWYGDLRGKPFAIEAENSILDISGFSKQYNCAFIWQKDGVKKLNLYLIINYFKGGKLRFKKIKPEAFEANRFYTVINKKSGEIVPMEVNFNFDDPNLIILPLAFGKRQGREFIWNDLLSLETGSLKLANGRVIEKTLYNRRTRQDEPALFVALTFERREVLDSSSIKPMNLIGVDRGENIPAVIALTDPEGCPLSRFKDSNGNPTHILRIGESYKEKQRTIQAKKEVEQRRAGGYSRKYASKAKNLADDMVRNTARDLLYYAVTQDAMLIFENLSRGFGRQGKRTFMAERQYTRMEDWLTAKLAYEGLPSKTYLSKTLAQYTSKTCSNCGFTITSADYDRVLEKLKKTATGWMTTINGKELKVEGQITYYNRYKRQNVVKDLSVELDRLSEESVNNDISSWTKGRSGEALSLLKKRFSHRPVQEKFVCLNCGFETHADEQAALNIARSWLFLRSQEYKKYQTNKTTGNTDKRAFVETWQSFYRKKLKEVWKPAV

SEQ ID NO: 24968 - protein, 978 aa, synthetic construct
  REGION 1..978: note = engineered CasX variant
QEIKRINKIRRRLVKDSNTKKAGKTGPMKTLLVRVMTPDLRERLENLRKKPENIPQPISNTSRANLNKLLTDYTEMKKAILHVYWEEFQKDPVGLMSRVAQPASKKIDQNKLKPEMDEKGNLTTAGFACSQCGQPLFVYKLEQVSEKGKAYTNYFGRCNVAEHEKLILLAQLKPEKDSDEAVTYSLGKFGQRALDFYSIHVTKESTHPVKPLAQIAGNRYASGPVGKALSDACMGTIASFLSKYQDIIIEHQKVVKGNQKRLESLRELAGKENLEYPSVTLPPQPHTKEGVDAYNEVIARVRMWVNLNLWQKLKLSRDDAKPLLRLKGFPSFPLVERQANEVDWWDMVCNVKKLINEKKEDGKVFWQNLAGYKRQEALRPYLSSEEDRKKGKKFARYQLGDLLLHLEKKHGEDWGKVYDEAWERIDKKVEGLSKHIKLEEERRSEDAQSKAALTDWLRAKASFVIEGLKEADKDEFCRCELKLQKWYGDLRGKPFAIEAENSILDISGFSKQYNCAFIWQKDGVKKLNLYLIINYFKGGKLRFKKIKPEAFEANRFYTVINKKSGEIVPMEVNFNFDDPNLIILPLAFGKRQGREFIWNDLLSLETGSLKLANGRVIEKTLYNRRTRQDEPALFVALTFERREVLDSSSIKPMNLIGVDRGENIPAVIALTDPEGCPLSRFKDSLGNPTHILRLGESYKEKQRTIQAKKEVEQRRAGGYSRKYASKAKNLADDMVRNTARDLLYYAVTQDAMLIFENLSRGFGRQGKRTFMAERQYTRMEDWLTAKLAYEGLPSKTYLSKTLAQYTSKTCSNCGFTITSADYDRVLEKLKKTATGWMTTINGKELKVEGQITYYNRYKRQNVVKDLSVELDRLSEESVNNDISSWTKGRSGEALSLLKKRFSHRPVQEKFVCLNCGFETHADEQAALNIARSWLFLRSQEYKKYQTNKTTGNTDKRAFVETWQSFYRKKLKEVWKPAV

SEQ ID NO: 24969 - protein, 978 aa, synthetic construct
  REGION 1..978: note = engineered CasX variant
QEIKRINKIRRRLVKDSNTKKAGKTGPMKTLLVRVMTPDLRERLENLRKKPENIPQPISNTSRANLNKLLTDYTEMKKAILHVYWEEFQKDPVGLMSRVAQPASKKIDQNKLKPEMDEKGNLTTAGFACSQCGQPLFVYKLEQVSEKGKAYTNYFGRCNVAEHEKLILLAQLKPEKDSDEAVTYSLGKFGQRALDFYSIHVTKESTHPVKPLAQIAGNRYASGPVGKALSDACMGTIASFLSKYQDIIIEHQKVVKGNQKRLESLRELAGKENLEYPSVTLPPQPHTKEGVDAYNEVIARVRMWVNLNLWQKLKLSRDDAKPLLRLKGFPSFPLVERQANEVDWWDMVCNVKKLINEKKEDGKVFWQNLAGYKRQEALRPYLSSEEDRKKGKKFARYQLGDLLLHLEKKHGEDWGKVYDEAWERIDKKVEGLSKHIKLEEERRSEDAQSKAALTDWLRAKASFVIEGLKEADKDEFCRCELKLQKWYGDLRGKPFAIEAENSILDISGFSKQYNCAFIWQKDGVKKLNLYLIINYFKGGKLRFKKIKPEAFEANRFYTVINKKSGEIVPMEVNFNFDDPNLIILPLAFGKRQGREFIWNDLLSLETGSLKLANGRVIEKTLYNRRTRQDEPALFVALTFERREVLDSSSIKPMNLIGVDRGENIPAVIALTDPEGCPLSRFKDSLGNPTHILRIGESYKHKTRTIQAKKEVEQRRAGGYSRKYASKAKNLADDMVRNTARDLLYYAVTQDAMLIFENLSRGFGRQGKRTFMAERQYTRMEDWLTAKLAYEGLPSKTYLSKTLAQYTSKTCSNCGFTITSADYDRVLEKLKKTATGWMTTINGKELKVEGQITYYNRYKRQNVVKDLSVELDRLSEESVNNDISSWTKGRSGEALSLLKKRFSHRPVQEKFVCLNCGFETHADEQAALNIARSWLFLRSQEYKKYQTNKTTGNTDKRAFVETWQSFYRKKLKEVWKPAV

SEQ ID NO: 24970 - protein, 978 aa, synthetic construct
  REGION 1..978: note = engineered CasX variant
QEIKRINKIRRRLVKDSNTKKAGKTGPMKTLLVRVMTPDLRERLENLRKKPENIPQPISNTSRANLNKLLTDYTEMKKAILHVYWEEFQKDPVGLMSRVAQPASKKIDQNKLKPEMDEKGNLTTAGFACSQCGQPLFVYKLEQVSEKGKAYTNYFGRCNVAEHEKLILLAQLKPEKDSDEAVTYSLGKFGQRALDFYSIHVTKESTHPVKPLAQIAGNRYASGPVGKALSDACMGTIASFLSKYQDIIIEHQKVVKGNQKRLESLRELAGKENLEYPSVTLPPQPHTKEGVDAYNEVIARVRMWVNLNLWQKLKLSRDDAKPLLRLKGFPSFPLVERQANEVDWWDMVCNVKKLINEKKEDGKVFWQNLAGYKRQEALRPYLSSEEDRKKGKKFARYQLGDLLLHLEKKHGEDWGKVYDEAWERIDKKVEGLSKHIKLEEERRSEDAQSKAALTDWLRAKASFVIEGLKEADKDEFCRCELKLQKWYGDLRGKPFAIEAENSILDISGFSKQYNCAFIWQKDGVKKLNLYLIINYFKGGKLRFKKIKPEAFEANRFYTVINKKSGEIVPMEVNFNFDDPNLIILPLAFGKRQGREFIWNDLLSLETGSLKLANGRVIEKTLYNRRTRQDEPALFVALTFERREVLDSSSIKPMNLIGVDRGENIPAVIALTDPEGCPLSRFKDSLGNPTHILRIGESYKHKQRTIQAKKEVEQRRAGGYSRKYASKAKNLADDMVRNTARDLLYYAVTQDAMLIFENLSRGFGRQGKRTFMAERQYTRMEDWLTAKLAYEGLPSKTYLSKTLAQYTSKTCSNCGFTITSADYDRVLEKLKKTATGWMTTINGKELKVEGQITYYNRYKRQNVVKDLSVELDRLSEESVNNDISSWTKGRSGEALSLLKKRFSHRPVQEKFVCLNCGFETHADEQAALNIARSWLFLRSQEYKKYQTNKTTGNTDKRAFVETWQSFYRKKLKEVWKPAV

SEQ ID NO: 24971 - protein, 978 aa, synthetic construct
  REGION 1..978: note = engineered CasX variant
QEIKRINKIRRRLVKDSNTKKAGKTGPMKTLLVRVMTPDLRERLENLRKKPENIPQPISNTSRANLNKLLTDYTEMKKAILHVYWEEFQKDPVGLMSRVAQPASKKIDQNKLKPEMDEKGNLTTAGFACSQCGQPLFVYKLEQVSEKGKAYTNYFGRCNVAEHEKLILLAQLKPEKDSDEAVTYSLGKFGQRALDFYSIHVTKESTHPVKPLAQIAGNRYASGPVGKALSDACMGTIASFLSKYQDIIIEHQKVVKGNQKRLESLRELAGKENLEYPSVTLPPQPHTKEGVDAYNEVIARVRMWVNLNLWQKLKLSRDDAKPLLRLKGFPSFPLVERQANEVDWWDMVCNVKKLINEKKEDGKVFWQNLAGYKRQEALRPYLSSEEDRKKGKKFARYQLGDLLLHLEKKHGEDWGKVYDEAWERIDKKVEGLSKHIKLEEERRSEDAQSKAALTDWLRAKASFVIEGLKEADKDEFCRCELKLQKWYGDLRGKPFAIEAENSILDISGFSKQYNCAFIWQKDGVKKLNLYLIINYFKGGKLRFKKIKPEAFEANRFYTVINKKSGEIVPMEVNFNFDDPNLIILPLAFGKRQGREFIWNDLLSLETGSLKLANGRVIEKTLYNRRTRQDEPALFVALTFERREVLDSSSIKPMNLIGVDRGENIPAVIALTDPEGCPLSRFKDSLGNPTHILRIGESYKEKTRTIQAKKEVEQRRMGGYSRKYASKAKNLADDMVRNTARDLLYYAVTQDAMLIFENLSRGFGRQGKRTFMAERQYTRMEDWLTAKLAYEGLPSKTYLSKTLAQYTSKTCSNCGFTITSADYDRVLEKLKKTATGWMTTINGKELKVEGQITYYNRYKRQNVVKDLSVELDRLSEESVNNDISSWTKGRSGEALSLLKKRFSHRPVQEKFVCLNCGFETHADEQAALNIARSWLFLRSQEYKKYQTNKTTGNTDKRAFVETWQSFYRKKLKEVWKPAV

SEQ ID NO: 24972 - protein, 978 aa, synthetic construct
  REGION 1..978: note = engineered CasX variant
QEIKRINKIRRRLVKDSNTKKAGKTGPMKTLLVRVMTPDLRERLENLRKKPENIPQPISNTSRANLNKLLTDYTEMKKAILHVYWEEFQKDPVGLMSRVAQPASKKIDQNKLKPEMDEKGNLTTAGFACSQCGQPLFVYKLEQVSEKGKAYTNYFGRCNVAEHEKLILLAQLKPEKDSDEAVTYSLGKFGQRALDFYSIHVTKESTHPVKPLAQIAGNRYASGPVGKALSDACMGTIASFLSKYQDIIIEHQKVVKGNQKRLESLRELAGKENLEYPSVTLPPQPHTKEGVDAYNEVIARVRMWVNLNLWQKLKLSRDDAKPLLRLKGFPSFPLVERQANEVDWWDMVCNVKKLINEKKEDGKVFWQNLAGYKRQEALRPYLSSEEDRKKGKKFARYQLGDLLLHLEKKHGEDWGKVYDEAWERIDKKVEGLSKHIKLEEERRSEDAQSKAALTDWLRAKASFVIEGLKEADKDEFCRCELKLQKWYGDLRGKPFAIEAENSILDISGFSKQYNCAFIWQKDGVKKLNLYLIINYFKGGKLRFKKIKPEAFEANRFYTVINKKSGEIVPMEVNFNFDDPNLIILPLAFGKRQGREFIWNDLLSLETGSLKLANGRVIEKTLYNRRTRQDEPALFVALTFERREVLDSSSIKPMNLIGVDRGENIPAVIALTDPEGCPLSRFKDSLGNPTHILRIGESYKEKTRTIQAKKEVEQRRAGGYSRKYASKAKNLADDMVRNTARDLLYYAVTQDAMLIFENLSRGFGRQGKRTFMAERQYTRMEDWLTAKLAYEGLPSKTYLSKTLAQYTSKTCSNCGFTITSADYDRVLEKLKKTATGWMTTINGKELKVEGQITYYNRYKRQNVVKDLSVELDRLSEESVNNDISSWTKGRSGEALSLLKKRFSHRPVQEKFVCLNCGFETHADEQAALNIARSWLFLRSQEYKKYQTNKTTGNTDKRAFVETWQSFYRKKLKEVWKPAV

SEQ ID NO: 24973 - protein, 978 aa, synthetic construct
  REGION 1..978: note = engineered CasX variant
QEIKRINKIRRRLVKDSNTKKAGKTGPMKTLLVRVMTPDLRERLENLRKKPENIPQPISNTSRANLNKLLTDYTEMKKAILHVYWEEFQKDPVGLMSRVAQPASKKIDQNKLKPEMDEKGNLTTAGFACSQCGQPLFVYKLEQVSEKGKAYTNYFGRCNVAEHEKLILLAQLKPEKDSDEAVTYSLGKFGQRALDFYSIHVTKESTHPVKPLAQIAGNRYASGPVGKALSDACMGTIASFLSKYQDIIIEHQKVVKGNQKRLESLRELAGKENLEYPSVTLPPQPHTKEGVDAYNEVIARVRMWVNLNLWQKLKLSRDDAKPLLRLKGFPSFPLVERQANEVDWWDMVCNVKKLINEKKEDGKVFWQNLAGYKRQEALRPYLSSEEDRKKGKKFARYQLGDLLLHLEKKHGEDWGKVYDEAWERIDKKVEGLSKHIKLEEERRSEDAQSKAALTDWLRAKASFVIEGLKEADKDEFCRCELKLQKWYGDLRGKPFAIEAENSILDISGFSKQYNCAFIWQKDGVKKLNLYLIINYFKGGKLRFKKIKPEAFEANRFYTVINKKSGEIVPMEVNFNFDDPNLIILPLAFGKRQGREFIWNDLLSLETGSLKLANGRVIEKTLYNRRTRQDEPALFVALTFERREVLDSSSIKPMNLIGVDRGENIPAVIALTDPEGCPLSRFKDSLGNPTHILRIGESYKEKTRTIQAKKCVEQRRAGGYSRKYASKAKNLADDMVRNTARDLLYYAVTQDAMLIFENLSRGFGRQGKRTFMAERQYTRMEDWLTAKLAYEGLPSKTYLSKTLAQYTSKTCSNCGFTITSADYDRVLEKLKKTATGWMTTINGKELKVEGQITYYNRYKRQNVVKDLSVELDRLSEESVNNDISSWTKGRSGEALSLLKKRFSHRPVQEKFVCLNCGFETHADEQAALNIARSWLFLRSQEYKKYQTNKTTGNTDKRAFVETWQSFYRKKLKEVWKPAV

SEQ ID NO: 24974 - protein, 978 aa, synthetic construct
  REGION 1..978: note = engineered CasX variant
QEIKRINKIRRRLVKDSNTKKAGKTGPMKTLLVRVMTPDLRERLENLRKKPENIPQPISNTSRANLNKLLTDYTEMKKAILHVYWEEFQKDPVGLMSRVAQPASKKIDQNKLKPEMDEKGNLTTAGFACSQCGQPLFVYKLEQVSEKGKAYTNYFGRCNVAEHEKLILLAQLKPEKDSDEAVTYSLGKFGQRALDFYSIHVTKESTHPVKPLAQIAGNRYASGPVGKALSDACMGTIASFLSKYQDIIIEHQKVVKGNQKRLESLRELAGKENLEYPSVTLPPQPHTKEGVDAYNEVIARVRMWVNLNLWQKLKLSRDDAKPLLRLKGFPSFPLVERQANEVDWWDMVCNVKKLINEKKEDGKVFWQNLAGYKRQEALRPYLSSEEDRKKGKKFARYQLGDLLLHLEKKHGEDWGKVYDEAWERIDKKVEGLSKHIKLEEERRSEDAQSKAALTDWLRAKASFVIEGLKEADKDEFCRCELKLQKWYGDLRGKPFAIEAENSILDISGFSKQYNCAFIWQKDGVKKLNLYLIINYFKGGKLRFKKIKPEAFEANRFYTVINKKSGEIVPMEVNFNFDDPNLIILPLAFGKRQGREFIWNDLLSLETGSLKLANGRVIEKTLYNRRTRQDEPALFVALTFERREVLDSSSIKPMNLIGVDRGENIPAVIALTDPEGCPLSRFKDSLGNPTHILRIGESYKEKQRTIQAKKEVEQRRMGGYSRKYASKAKNLADDMVRNTARDLLYYAVTQDAMLIFENLSRGFGRQGKRTFMAERQYTRMEDWLTAKLAYEGLPSKTYLSKTLAQYTSKTCSNCGFTITSADYDRVLEKLKKTATGWMTTINGKELKVEGQITYYNRYKRQNVVKDLSVELDRLSEESVNNDISSWTKGRSGEALSLLKKRFSHRPVQEKFVCLNCGFETHADEQAALNIARSWLFLRSQEYKKYQTNKTTGNTDKRAFVETWQSFYRKKLKEVWKPAV

SEQ ID NO: 24975 - protein, 978 aa, synthetic construct
  REGION 1..978: note = engineered CasX variant
QEIKRINKIRRRLVKDSNTKKAGKTGPMKTLLVRVMTPDLRERLENLRKKPENIPQPISNTSRANLNKLLTDYTEMKKAILHVYWEEFQKDPVGLMSRVAQPASKKIDQNKLKPEMDEKGNLTTAGFACSQCGQPLFVYKLEQVSEKGKAYTNYFGRCNVAEHEKLILLAQLKPEKDSDEAVTYSLGKFGQRALDFYSIHVTKESTHPVKPLAQIAGNRYASGPVGKALSDACMGTIASFLSKYQDIIIEHQKVVKGNQKRLESLRELAGKENLEYPSVTLPPQPHTKEGVDAYNEVIARVRMWVNLNLWQKLKLSRDDAKPLLRLKGFPSFPLVERQANEVDWWDMVCNVKKLINEKKEDGKVFWQNLAGYKRQEALRPYLSSEEDRKKGKKFARYQLGDLLLHLEKKHGEDWGKVYDEAWERIDKKVEGLSKHIKLEEERRSEDAQSKAALTDWLRAKASFVIEGLKEADKDEFCRCELKLQKWYGDLRGKPFAIEAENSILDISGFSKQYNCAFIWQKDGVKKLNLYLIINYFKGGKLRFKKIKPEAFEANRFYTVINKKSGEIVPMEVNFNFDDPNLIILPLAFGKRQGREFIWNDLLSLETGSLKLANGRVIEKTLYNRRTRQDEPALFVALTFERREVLDSSSIKPMNLIGVDRGENIPAVIALTDPEGCPLSRFKDSLGNPTHILRIGESYKEKQRTIQAKKEVEQRRAGGYSRKYASKAKNLADDMVRNTARDLLYYAVTQDAMLIFENLSRGFGRQGKRTFMAERQYTRMEDWLTAKLAYEGLPSKTYLSKTLAQYTSKTCSNCGFTITSADYDRVLEKLKKTATGWMTTINGKELKVEGQITYYNRYKRQNVVKDLSVELDRLSEESVNNDISSWTKGRSGEALSLLKKRFSHRPVQEKFVCLNCGFETHADEQAALNIARSWLFLRSQEYKKYQTNKTTGNTDKRAFVETWQSFYRKKLKEVWKPAV

SEQ ID NO: 24976 - protein, 978 aa, synthetic construct
  REGION 1..978: note = engineered CasX variant
QEIKRINKIRRRLVKDSNTKKAGKTGPMKTLLVRVMTPDLRERLENLRKKPENIPQPISNTSRANLNKLLTDYTEMKKAILHVYWEEFQKDPVGLMSRVAQPASKKIDQNKLKPEMDEKGNLTTAGFACSQCGQPLFVYKLEQVSEKGKAYTNYFGRCNVAEHEKLILLAQLKPEKDSDEAVTYSLGKFGQRALDFYSIHVTKESTHPVKPLAQIAGNRYASGPVGKALSDACMGTIASFLSKYQDIIIEHQKVVKGNQKRLESLRELAGKENLEYPSVTLPPQPHTKEGVDAYNEVIARVRMWVNLNLWQKLKLSRDDAKPLLRLKGFPSFPLVERQANEVDWWDMVCNVKKLINEKKEDGKVFWQNLAGYKRQEALRPYLSSEEDRKKGKKFARYQLGDLLLHLEKKHGEDWGKVYDEAWERIDKKVEGLSKHIKLEEERRSEDAQSKAALTDWLRAKASFVIEGLKEADKDEFCRCELKLQKWYGDLRGKPFAIEAENSILDISGFSKQYNCAFIWQKDGVKKLNLYLIINYFKGGKLRFKKIKPEAFEANRFYTVINKKSGEIVPMEVNFNFDDPNLIILPLAFGKRQGREFIWNDLLSLETGSLKLANGRVIEKTLYNRRTRQDEPALFVALTFERREVLDSSSIKPMNLIGVDRGENIPAVIALTDPEGCPLSRFKDSLGNPTHILRIGESYKEKQRTIQAKKCVEQRRAGGYSRKYASKAKNLADDMVRNTARDLLYYAVTQDAMLIFENLSRGFGRQGKRTFMAERQYTRMEDWLTAKLAYEGLPSKTYLSKTLAQYTSKTCSNCGFTITSADYDRVLEKLKKTATGWMTTINGKELKVEGQITYYNRYKRQNVVKDLSVELDRLSEESVNNDISSWTKGRSGEALSLLKKRFSHRPVQEKFVCLNCGFETHADEQAALNIARSWLFLRSQEYKKYQTNKTTGNTDKRAFVETWQSFYRKKLKEVWKPAV

SEQ ID NO: 24977 - protein, 978 aa, synthetic construct
  REGION 1..978: note = engineered CasX variant
QEIKRINKIRRRLVKDSNTKKAGKTGPMKTLLVRVMTPDLRERLENLRKKPENIPQPISNTSRANLNKLLTDYTEMKKAILHVYWEEFQKDPVGLMSRVAQPASKKIDQNKLKPEMDEKGNLTTAGFACSQCGQPLFVYKLEQVSEKGKAYTNYFGRCNVAEHEKLILLAQLKPEKDSDEAVTYSLGKFGQRALDFYSIHVTKESTHPVKPLAQIAGNRYASGPVGKALSDACMGTIASFLSKYQDIIIEHQKVVKGNQKRLESLRELAGKENLEYPSVTLPPQPHTKEGVDAYNEVIARVRMWVNLNLWQKLKLSRDDAKPLLRLKGFPSFPLVERQANEVDWWDMVCNVKKLINEKKEDGKVFWQNLAGYKRQEALRPYLSSEEDRKKGKKFARYQLGDLLLHLEKKHGEDWGKVYDEAWERIDKKVEGLSKHIKLEEERRSEDAQSKAALTDWLRAKASFVIEGLKEADKDEFCRCELKLQKWYGDLRGKPFAIEAENSILDISGFSKQYNCAFIWQKDGVKKLNLYLIINYFKGGKLRFKKIKPEAFEANRFYTVINKKSGEIVPMEVNFNFDDPNLIILPLAFGKRQGREFIWNDLLSLETGSLKLANGRVIEKTLYNRRTRQDEPALFVALTFERREVLDSSSIKPMNLIGVDRGENIPAVIALTDPEGCPLSRFKDSLGNPTHILRIDESYKHKQRTIQAKKEVEQRRAGGYSRKYASKAKNLADDMVRNTARDLLYYAVTQDAMLIFENLSRGFGRQGKRTFMAERQYTRMEDWLTAKLAYEGLPSKTYLSKTLAQYTSKTCSNCGFTITSADYDRVLEKLKKTATGWMTTINGKELKVEGQITYYNRYKRQNVVKDLSVELDRLSEESVNNDISSWTKGRSGEALSLLKKRFSHRPVQEKFVCLNCGFETHADEQAALNIARSWLFLRSQEYKKYQTNKTTGNTDKRAFVETWQSFYRKKLKEVWKPAV

SEQ ID NO: 24978 - protein, 978 aa, synthetic construct
  REGION 1..978: note = engineered CasX variant
QEIKRINKIRRRLVKDSNTKKAGKTGPMKTLLVRVMTPDLRERLENLRKKPENIPQPISNTSRANLNKLLTDYTEMKKAILHVYWEEFQKDPVGLMSRVAQPASKKIDQNKLKPEMDEKGNLTTAGFACSQCGQPLFVYKLEQVSEKGKAYTNYFGRCNVAEHEKLILLAQLKPEKDSDEAVTYSLGKFGQRALDFYSIHVTKESTHPVKPLAQIAGNRYASGPVGKALSDACMGTIASFLSKYQDIIIEHQKVVKGNQKRLESLRELAGKENLEYPSVTLPPQPHTKEGVDAYNEVIARVRMWVNLNLWQKLKLSRDDAKPLLRLKGFPSFPLVERQANEVDWWDMVCNVKKLINEKKEDGKVFWQNLAGYKRQEALRPYLSSEEDRKKGKKFARYQLGDLLLHLEKKHGEDWGKVYDEAWERIDKKVEGLSKHIKLEEERRSEDAQSKAALTDWLRAKASFVIEGLKEADKDEFCRCELKLQKWYGDLRGKPFAIEAENSILDISGFSKQYNCAFIWQKDGVKKLNLYLIINYFKGGKLRFKKIKPEAFEANRFYTVINKKSGEIVPMEVNFNFDDPNLIILPLAFGKRQGREFIWNDLLSLETGSLKLANGRVIEKTLYNRRTRQDEPALFVALTFERREVLDSSSIKPMNLIGVDRGENIPAVIALTDPEGCPLSRFKDSLGNPTHILRIDESYKEKTRTIQAKKEVEQRRAGGYSRKYASKAKNLADDMVRNTARDLLYYAVTQDAMLIFENLSRGFGRQGKRTFMAERQYTRMEDWLTAKLAYEGLPSKTYLSKTLAQYTSKTCSNCGFTITSADYDRVLEKLKKTATGWMTTINGKELKVEGQITYYNRYKRQNVVKDLSVELDRLSEESVNNDISSWTKGRSGEALSLLKKRFSHRPVQEKFVCLNCGFETHADEQAALNIARSWLFLRSQEYKKYQTNKTTGNTDKRAFVETWQSFYRKKLKEVWKPAV

SEQ ID NO: 24979 - protein, 978 aa, synthetic construct
  REGION 1..978: note = engineered CasX variant
QEIKRINKIRRRLVKDSNTKKAGKTGPMKTLLVRVMTPDLRERLENLRKKPENIPQPISNTSRANLNKLLTDYTEMKKAILHVYWEEFQKDPVGLMSRVAQPASKKIDQNKLKPEMDEKGNLTTAGFACSQCGQPLFVYKLEQVSEKGKAYTNYFGRCNVAEHEKLILLAQLKPEKDSDEAVTYSLGKFGQRALDFYSIHVTKESTHPVKPLAQIAGNRYASGPVGKALSDACMGTIASFLSKYQDIIIEHQKVVKGNQKRLESLRELAGKENLEYPSVTLPPQPHTKEGVDAYNEVIARVRMWVNLNLWQKLKLSRDDAKPLLRLKGFPSFPLVERQANEVDWWDMVCNVKKLINEKKEDGKVFWQNLAGYKRQEALRPYLSSEEDRKKGKKFARYQLGDLLLHLEKKHGEDWGKVYDEAWERIDKKVEGLSKHIKLEEERRSEDAQSKAALTDWLRAKASFVIEGLKEADKDEFCRCELKLQKWYGDLRGKPFAIEAENSILDISGFSKQYNCAFIWQKDGVKKLNLYLIINYFKGGKLRFKKIKPEAFEANRFYTVINKKSGEIVPMEVNFNFDDPNLIILPLAFGKRQGREFIWNDLLSLETGSLKLANGRVIEKTLYNRRTRQDEPALFVALTFERREVLDSSSIKPMNLIGVDRGENIPAVIALTDPEGCPLSRFKDSLGNPTHILRIDESYKEKQRTIQAKKEVEQRRAGGYSRKYASKAKNLADDMVRNTARDLLYYAVTQDAMLIFENLSRGFGRQGKRTFMAERQYTRMEDWLTAKLAYEGLPSKTYLSKTLAQYTSKTCSNCGFTITSADYDRVLEKLKKTATGWMTTINGKELKVEGQITYYNRYKRQNVVKDLSVELDRLSEESVNNDISSWTKGRSGEALSLLKKRFSHRPVQEKFVCLNCGFETHADEQAALNIARSWLFLRSQEYKKYQTNKTTGNTDKRAFVETWQSFYRKKLKEVWKPAV

SEQ ID NO: 24980 - protein, 978 aa, synthetic construct
  REGION 1..978: note = engineered CasX variant
QEIKRINKIRRRLVKDSNTKKAGKTGPMKTLLVRVMTPDLRERLENLRKKPENIPQPISNTSRANLNKLLTDYTEMKKAILHVYWEEFQKDPVGLMSRVAQPASKKIDQNKLKPEMDEKGNLTTAGFACSQCGQPLFVYKLEQVSEKGKAYTNYFGRCNVAEHEKLILLAQLKPEKDSDEAVTYSLGKFGQRALDFYSIHVTKESTHPVKPLAQIAGNRYASGPVGKALSDACMGTIASFLSKYQDIIIEHQKVVKGNQKRLESLRELAGKENLEYPSVTLPPQPHTKEGVDAYNEVIARVRMWVNLNLWQKLKLSRDDAKPLLRLKGFPSFPLVERQANEVDWWDMVCNVKKLINEKKEDGKVFWQNLAGYKRQEALRPYLSSEEDRKKGKKFARYQLGDLLLHLEKKHGEDWGKVYDEAWERIDKKVEGLSKHIKLEEERRSEDAQSKAALTDWLRAKASFVIEGLKEADKDEFCRCELKLQKWYGDLRGKPFAIEAENSILDISGFSKQYNCAFIWQKDGVKKLNLYLIINYFKGGKLRFKKIKPEAFEANRFYTVINKKSGEIVPMEVNFNFDDPNLIILPLAFGKRQGREFIWNDLLSLETGSLKLANGRVIEKTLYNRRTRQDEPALFVALTFERREVLDSSSIKPMNLIGVDRGENIPAVIALTDPEGCPLSRFKDSLGNPTHILRIDESYKEKQRTIQAKKCVEQRRAGGYSRKYASKAKNLADDMVRNTARDLLYYAVTQDAMLIFENLSRGFGRQGKRTFMAERQYTRMEDWLTAKLAYEGLPSKTYLSKTLAQYTSKTCSNCGFTITSADYDRVLEKLKKTATGWMTTINGKELKVEGQITYYNRYKRQNVVKDLSVELDRLSEESVNNDISSWTKGRSGEALSLLKKRFSHRPVQEKFVCLNCGFETHADEQAALNIARSWLFLRSQEYKKYQTNKTTGNTDKRAFVETWQSFYRKKLKEVWKPAV

SEQ ID NO: 24981 - protein, 978 aa, synthetic construct
  REGION 1..978: note = engineered CasX variant
QEIKRINKIRRRLVKDSNTKKAGKTGPMKTLLVRVMTPDLRERLENLRKKPENIPQPISNTSRANLNKLLTDYTEMKKAILHVYWEEFQKDPVGLMSRVAQPASKKIDQNKLKPEMDEKGNLTTAGFACSQCGQPLFVYKLEQVSEKGKAYTNYFGRCNVAEHEKLILLAQLKPEKDSDEAVTYSLGKFGQRALDFYSIHVTKESTHPVKPLAQIAGNRYASGPVGKALSDACMGTIASFLSKYQDIIIEHQKVVKGNQKRLESLRELAGKENLEYPSVTLPPQPHTKEGVDAYNEVIARVRMWVNLNLWQKLKLSRDDAKPLLRLKGFPSFPLVERQANEVDWWDMVCNVKKLINEKKEDGKVFWQNLAGYKRQEALRPYLSSEEDRKKGKKFARYQLGDLLLHLEKKHGEDWGKVYDEAWERIDKKVEGLSKHIKLEEERRSEDAQSKAALTDWLRAKASFVIEGLKEADKDEFCRCELKLQKWYGDLRGKPFAIEAENSILDISGFSKQYNCAFIWQKDGVKKLNLYLIINYFKGGKLRFKKIKPEAFEANRFYTVINKKSGEIVPMEVNFNFDDPNLIILPLAFGKRQGREFIWNDLLSLETGSLKLANGRVIEKTLYNRRTRQDEPALFVALTFERREVLDSSSIKPMNLIGVDRGENIPAVIALTDPEGCPLSRFKDSLGNKTHILRLGESYKEKQRTIQAKKEVEQRRAGGYSRKYASKAKNLADDMVRNTARDLLYYAVTQDAMLIFENLSRGFGRQGKRTFMAERQYTRMEDWLTAKLAYEGLPSKTYLSKTLAQYTSKTCSNCGFTITSADYDRVLEKLKKTATGWMTTINGKELKVEGQITYYNRYKRQNVVKDLSVELDRLSEESVNNDISSWTKGRSGEALSLLKKRFSHRPVQEKFVCLNCGFETHADEQAALNIARSWLFLRSQEYKKYQTNKTTGNTDKRAFVETWQSFYRKKLKEVWKPAV

SEQ ID NO: 24982 - protein, 978 aa, synthetic construct
  REGION 1..978: note = engineered CasX variant
QEIKRINKIRRRLVKDSNTKKAGKTGPMKTLLVRVMTPDLRERLENLRKKPENIPQPISNTSRANLNKLLTDYTEMKKAILHVYWEEFQKDPVGLMSRVAQPASKKIDQNKLKPEMDEKGNLTTAGFACSQCGQPLFVYKLEQVSEKGKAYTNYFGRCNVAEHEKLILLAQLKPEKDSDEAVTYSLGKFGQRALDFYSIHVTKESTHPVKPLAQIAGNRYASGPVGKALSDACMGTIASFLSKYQDIIIEHQKVVKGNQKRLESLRELAGKENLEYPSVTLPPQPHTKEGVDAYNEVIARVRMWVNLNLWQKLKLSRDDAKPLLRLKGFPSFPLVERQANEVDWWDMVCNVKKLINEKKEDGKVFWQNLAGYKRQEALRPYLSSEEDRKKGKKFARYQLGDLLLHLEKKHGEDWGKVYDEAWERIDKKVEGLSKHIKLEEERRSEDAQSKAALTDWLRAKASFVIEGLKEADKDEFCRCELKLQKWYGDLRGKPFAIEAENSILDISGFSKQYNCAFIWQKDGVKKLNLYLIINYFKGGKLRFKKIKPEAFEANRFYTVINKKSGEIVPMEVNFNFDDPNLIILPLAFGKRQGREFIWNDLLSLETGSLKLANGRVIEKTLYNRRTRQDEPALFVALTFERREVLDSSSIKPMNLIGVDRGENIPAVIALTDPEGCPLSRFKDSLGNKTHILRIGESYKEKQRTIQAKKEVEQRRAGGYSRKYASKAKNLADDMVRNTARDLLYYAVTQDAMLIFENLSRGFGRQGKRTFMAERQYTRMEDWLTAKLAYEGLPSKTYLSKTLAQYTSKTCSNCGFTITSADYDRVLEKLKKTATGWMTTINGKELKVEGQITYYNRYKRQNVVKDLSVELDRLSEESVNNDISSWTKGRSGEALSLLKKRFSHRPVQEKFVCLNCGFETHADEQAALNIARSWLFLRSQEYKKYQTNKTTGNTDKRAFVETWQSFYRKKLKEVWKPAV

SEQ ID NO: 24983 - protein, 978 aa, synthetic construct
  REGION 1..978: note = engineered CasX variant
QEIKRINKIRRRLVKDSNTKKAGKTGPMKTLLVRVMTPDLRERLENLRKKPENIPQPISNTSRANLNKLLTDYTEMKKAILHVYWEEFQKDPVGLMSRVAQPASKKIDQNKLKPEMDEKGNLTTAGFACSQCGQPLFVYKLEQVSEKGKAYTNYFGRCNVAEHEKLILLAQLKPEKDSDEAVTYSLGKFGQRALDFYSIHVTKESTHPVKPLAQIAGNRYASGPVGKALSDACMGTIASFLSKYQDIIIEHQKVVKGNQKRLESLRELAGKENLEYPSVTLPPQPHTKEGVDAYNEVIARVRMWVNLNLWQKLKLSRDDAKPLLRLKGFPSFPLVERQANEVDWWDMVCNVKKLINEKKEDGKVFWQNLAGYKRQEALRPYLSSEEDRKKGKKFARYQLGDLLLHLEKKHGEDWGKVYDEAWERIDKKVEGLSKHIKLEEERRSEDAQSKAALTDWLRAKASFVIEGLKEADKDEFCRCELKLQKWYGDLRGKPFAIEAENSILDISGFSKQYNCAFIWQKDGVKKLNLYLIINYFKGGKLRFKKIKPEAFEANRFYTVINKKSGEIVPMEVNFNFDDPNLIILPLAFGKRQGREFIWNDLLSLETGSLKLANGRVIEKTLYNRRTRQDEPALFVALTFERREVLDSSSIKPMNLIGVDRGENIPAVIALTDPEGCPISRFKDSLGNPTHILRIGESYKEKQRTIQAKKEVEQRRMGGYSRKYASKAKNLADDMVRNTARDLLYYAVTQDAMLIFENLSRGFGRQGKRTFMAERQYTRMEDWLTAKLAYEGLPSKTYLSKTLAQYTSKTCSNCGFTITSADYDRVLEKLKKTATGWMTTINGKELKVEGQITYYNRYKRQNVVKDLSVELDRLSEESVNNDISSWTKGRSGEALSLLKKRFSHRPVQEKFVCLNCGFETHADEQAALNIARSWLFLRSQEYKKYQTNKTTGNTDKRAFVETWQSFYRKKLKEVWKPAV

SEQ ID NO: 24984 - protein, 978 aa, synthetic construct
  REGION 1..978: note = engineered CasX variant
QEIKRINKIRRRLVKDSNTKKAGKTGPMKTLLVRVMTPDLRERLENLRKKPENIPQPISNTSRANLNKLLTDYTEMKKAILHVYWEEFQKDPVGLMSRVAQPASKKIDQNKLKPEMDEKGNLTTAGFACSQCGQPLFVYKLEQVSEKGKAYTNYFGRCNVAEHEKLILLAQLKPEKDSDEAVTYSLGKFGQRALDFYSIHVTKESTHPVKPLAQIAGNRYASGPVGKALSDACMGTIASFLSKYQDIIIEHQKVVKGNQKRLESLRELAGKENLEYPSVTLPPQPHTKEGVDAYNEVIARVRMWVNLNLWQKLKLSRDDAKPLLRLKGFPSFPLVERQANEVDWWDMVCNVKKLINEKKEDGKVFWQNLAGYKRQEALRPYLSSEEDRKKGKKFARYQLGDLLLHLEKKHGEDWGKVYDEAWERIDKKVEGLSKHIKLEEERRSEDAQSKAALTDWLRAKASFVIEGLKEADKDEFCRCELKLQKWYGDLRGKPFAIEAENSILDISGFSKQYNCAFIWQKDGVKKLNLYLIINYFKGGKLRFKKIKPEAFEANRFYTVINKKSGEIVPMEVNFNFDDPNLIILPLAFGKRQGREFIWNDLLSLETGSLKLANGRVIEKTLYNRRTRQDEPALFVALTFERREVLDSSSIKPMNLIGVDRGENIPAVIALTDPEGCPISRFKDSLGNPTHILRIGESYKEKQRTIQAKKEVEQRRAGGYSRKYASKAKNLADDMVRNTARDLLYYAVTQDAMLIFENLSRGFGRQGKRTFMAERQYTRMEDWLTAKLAYEGLPSKTYLSKTLAQYTSKTCSNCGFTITSADYDRVLEKLKKTATGWMTTINGKELKVEGQITYYNRYKRQNVVKDLSVELDRLSEESVNNDISSWTKGRSGEALSLLKKRFSHRPVQEKFVCLNCGFETHADEQAALNIARSWLFLRSQEYKKYQTNKTTGNTDKRAFVETWQSFYRKKLKEVWKPAV

SEQ ID NO: 24985 - protein, 978 aa, synthetic construct
  REGION 1..978: note = engineered CasX variant
QEIKRINKIRRRLVKDSNTKKAGKTGPMKTLLVRVMTPDLRERLENLRKKPENIPQPISNTSRANLNKLLTDYTEMKKAILHVYWEEFQKDPVGLMSRVAQPASKKIDQNKLKPEMDEKGNLTTAGFACSQCGQPLFVYKLEQVSEKGKAYTNYFGRCNVAEHEKLILLAQLKPEKDSDEAVTYSLGKFGQRALDFYSIHVTKESTHPVKPLAQIAGNRYASGPVGKALSDACMGTIASFLSKYQDIIIEHQKVVKGNQKRLESLRELAGKENLEYPSVTLPPQPHTKEGVDAYNEVIARVRMWVNLNLWQKLKLSRDDAKPLLRLKGFPSFPLVERQANEVDWWDMVCNVKKLINEKKEDGKVFWQNLAGYKRQEALRPYLSSEEDRKKGKKFARYQLGDLLLHLEKKHGEDWGKVYDEAWERIDKKVEGLSKHIKLEEERRSEDAQSKAALTDWLRAKASFVIEGLKEADKDEFCRCELKLQKWYGDLRGKPFAIEAENSILDISGFSKQYNCAFIWQKDGVKKLNLYLIINYFKGGKLRFKKIKPEAFEANRFYTVINKKSGEIVPMEVNFNFDDPNLIILPLAFGKRQGREFIWNDLLSLETGSLKLANGRVIEKTLYNRRTRQDEPALFVALTFERREVLDSSSIKPMNLIGVDRGENIPAVIALTDPAGCPLSRFKDSNGNPTHILRIGESYKEKQRTIQAKKEVEQRRAGGYSRKYASKAKNLADDMVRNTARDLLYYAVTQDAMLIFENLSRGFGRQGKRTFMAERQYTRMEDWLTAKLAYEGLPSKTYLSKTLAQYTSKTCSNCGFTITSADYDRVLEKLKKTATGWMTTINGKELKVEGQITYYNRYKRQNVVKDLSVELDRLSEESVNNDISSWTKGRSGEALSLLKKRFSHRPVQEKFVCLNCGFETHADEQAALNIARSWLFLRSQEYKKYQTNKTTGNTDKRAFVETWQSFYRKKLKEVWKPAV

SEQ ID NO: 24986 - protein, 978 aa, synthetic construct
  REGION 1..978: note = engineered CasX variant
QEIKRINKIRRRLVKDSNTKKAGKTGPMKTLLVRVMTPDLRERLENLRKKPENIPQPISNTSRANLNKLLTDYTEMKKAILHVYWEEFQKDPVGLMSRVAQPASKKIDQNKLKPEMDEKGNLTTAGFACSQCGQPLFVYKLEQVSEKGKAYTNYFGRCNVAEHEKLILLAQLKPEKDSDEAVTYSLGKFGQRALDFYSIHVTKESTHPVKPLAQIAGNRYASGPVGKALSDACMGTIASFLSKYQDIIIEHQKVVKGNQKRLESLRELAGKENLEYPSVTLPPQPHTKEGVDAYNEVIARVRMWVNLNLWQKLKLSRDDAKPLLRLKGFPSFPLVERQANEVDWWDMVCNVKKLINEKKEDGKVFWQNLAGYKRQEALRPYLSSEEDRKKGKKFARYQLGDLLLHLEKKHGEDWGKVYDEAWERIDKKVEGLSKHIKLEEERRSEDAQSKAALTDWLRAKASFVIEGLKEADKDEFCRCELKLQKWYGDLRGKPFAIEAENSILDISGFSKQYNCAFIWQKDGVKKLNLYLIINYFKGGKLRFKKIKPEAFEANRFYTVINKKSGEIVPMEVNFNFDDPNLIILPLAFGKRQGREFIWNDLLSLETGSLKLANGRVIEKTLYNRRTRQDEPALFVALTFERREVLDSSSIKPMNLIGVDRGENIPAVIALTDPAGCPLSRFKDSLGNPTHILRIGESYKEKQRTIQAKKEVEQRRAGGYSRKYASKAKNLADDMVRNTARDLLYYAVTQDAMLIFENLSRGFGRQGKRTFMAERQYTRMEDWLTAKLAYEGLPSKTYLSKTLAQYTSKTCSNCGFTITSADYDRVLEKLKKTATGWMTTINGKELKVEGQITYYNRYKRQNVVKDLSVELDRLSEESVNNDISSWTKGRSGEALSLLKKRFSHRPVQEKFVCLNCGFETHADEQAALNIARSWLFLRSQEYKKYQTNKTTGNTDKRAFVETWQSFYRKKLKEVWKPAV

SEQ ID NO: 24987 - protein, 978 aa, synthetic construct
  REGION 1..978: note = engineered CasX variant
QEIKRINKIRRRLVKDSNTKKAGKTGPMKTLLVRVMTPDLRERLENLRKKPENIPQPISNTSRANLNKLLTDYTEMKKAILHVYWEEFQKDPVGLMSRVAQPASKKIDQNKLKPEMDEKGNLTTAGFACSQCGQPLFVYKLEQVSEKGKAYTNYFGRCNVAEHEKLILLAQLKPEKDSDEAVTYSLGKFGQRALDFYSIHVTKESTHPVKPLAQIAGNRYASGPVGKALSDACMGTIASFLSKYQDIIIEHQKVVKGNQKRLESLRELAGKENLEYPSVTLPPQPHTKEGVDAYNEVIARVRMWVNLNLWQKLKLSRDDAKPLLRLKGFPSFPLVERQANEVDWWDMVCNVKKLINEKKEDGKVFWQNLAGYKRQEALRPYLSSEEDRKKGKKFARYQLGDLLLHLEKKHGEDWGKVYDEAWERIDKKVEGLSKHIKLEEERRSEDAQSKAALTDWLRAKASFVIEGLKEADKDEFCRCELKLQKWYGDLRGKPFAIEAENSILDISGFSKQYNCAFIWQKDGVKKLNLYLIINYFKGGKLRFKKIKPEAFEANRFYTVINKKSGEIVPMEVNFNFDDPNLIILPLAFGKRQGREFIWNDLLSLETGSLKLANGRVIEKTLYNRRTRQDEPALFVALTFERREVLDSSSIKPINLIGVDRGENIPAVIALTDQEGCPLSRFKDSLGNPTHILRIGESYKEKQRTIQAKKEVEQRRAGGYSRKYASKAKNLADDMVRNTARDLLYYAVTQDAMLIFENLSRGFGRQGKRTFMAERQYTRMEDWLTAKLAYEGLPSKTYLSKTLAQYTSKTCSNCGFTITSADYDRVLEKLKKTATGWMTTINGKELKVEGQITYYNRYKRQNVVKDLSVELDRLSEESVNNDISSWTKGRSGEALSLLKKRFSHRPVQEKFVCLNCGFETHADEQAALNIARSWLFLRSQEYKKYQTNKTTGNTDKRAFVETWQSFYRKKLKEVWKPAV

SEQ ID NO: 24988 - protein, 978 aa, synthetic construct
  REGION 1..978: note = engineered CasX variant
QEIKRINKIRRRLVKDSNTKKAGKTGPMKTLLVRVMTPDLRERLENLRKKPENIPQPISNTSRANLNKLLTDYTEMKKAILHVYWEEFQKDPVGLMSRVAQPASKKIDQNKLKPEMDEKGNLTTAGFACSQCGQPLFVYKLEQVSEKGKAYTNYFGRCNVAEHEKLILLAQLKPEKDSDEAVTYSLGKFGQRALDFYSIHVTKESTHPVKPLAQIAGNRYASGPVGKALSDACMGTIASFLSKYQDIIIEHQKVVKGNQKRLESLRELAGKENLEYPSVTLPPQPHTKEGVDAYNEVIARVRMWVNLNLWQKLKLSRDDAKPLLRLKGFPSFPLVERQANEVDWWDMVCNVKKLINEKKEDGKVFWQNLAGYKRQEALRPYLSSEEDRKKGKKFARYQLGDLLLHLEKKHGEDWGKVYDEAWERIDKKVEGLSKHIKLEEERRSEDAQSKAALTDWLRAKASFVIEGLKEADKDEFCRCELKLQKWYGDLRGKPFAIEAENSILDISGFSKQYNCAFIWQKDGVKKLNLYLIINYFKGGKLRFKKIKPEAFEANRFYTVINKKSGEIVPMEVNFNFDDPNLIILPLAFGKRQGREFIWNDLLSLETGSLKLANGRVIEKTLYNRRTRQDEPALFVALTFERREVLDSSSIKPINLIGVDRGENIPAVIALTDPEGCPLSRFKDSLGNPTHILRIGESYKEKQRTIQAKKEVEQRRAGGYSRKYASKAKNLADDMVRNTARDLLYYAVTQDAMLIFENLSRGFGRQGKRTFMAERQYTRMEDWLTAKLAYEGLPSKTYLSKTLAQYTSKTCSNCGFTITSADYDRVLEKLKKTATGWMTTINGKELKVEGQITYYNRYKRQNVVKDLSVELDRLSEESVNNDISSWTKGRSGEALSLLKKRFSHRPVQEKFVCLNCGFETHADEQAALNIARSWLFLRSQEYKKYQTNKTTGNTDKRAFVETWQSFYRKKLKEVWKPAV

SEQ ID NO: 24989 - protein, 978 aa, synthetic construct
  REGION 1..978: note = engineered CasX variant
QEIKRINKIRRRLVKDSNTKKAGKTGPMKTLLVRVMTPDLRERLENLRKKPENIPQPISNTSRANLNKLLTDYTEMKKAILHVYWEEFQKDPVGLMSRVAQPASKKIDQNKLKPEMDEKGNLTTAGFACSQCGQPLFVYKLEQVSEKGKAYTNYFGRCNVAEHEKLILLAQLKPEKDSDEAVTYSLGKFGQRALDFYSIHVTKESTHPVKPLAQIAGNRYASGPVGKALSDACMGTIASFLSKYQDIIIEHQKVVKGNQKRLESLRELAGKENLEYPSVTLPPQPHTKEGVDAYNEVIARVRMWVNLNLWQKLKLSRDDAKPLLRLKGFPSFPLVERQANEVDWWDMVCNVKKLINEKKEDGKVFWQNLAGYKRQEALRPYLSSEEDRKKGKKFARYQLGDLLLHLEKKHGEDWGKVYDEAWERIDKKVEGLSKHIKLEEERRSEDAQSKAALTDWLRAKASFVIEGLKEADKDEFCRCELKLQKWYGDLRGKPFAIEAENSILDISGFSKQYNCAFIWQKDGVKKLNLYLIINYFKGGKLRFKKIKPEAFEANRFYTVINKKSGEIVPMEVNFNFDDPNLIILPLAFGKRQGREFIWNDLLSLETGSLKLANGRVIEKTLYNRRTRQDEPALFVALTFERREVLDSSSIAPMNLIGVDRGENIPAVIALTDPEGCPLSRFKDSLGNPTHILRIGESYKEKQRTIQAKKEVEQRRAGGYSRKYASKAKNLADDMVRNTARDLLYYAVTQDAMLIFENLSRGFGRQGKRTFMAERQYTRMEDWLTAKLAYEGLPSKTYLSKTLAQYTSKTCSNCGFTITSADYDRVLEKLKKTATGWMTTINGKELKVEGQITYYNRYKRQNVVKDLSVELDRLSEESVNNDISSWTKGRSGEALSLLKKRFSHRPVQEKFVCLNCGFETHADEQAALNIARSWLFLRSQEYKKYQTNKTTGNTDKRAFVETWQSFYRKKLKEVWKPAV

SEQ ID NO: 24990 - protein, 978 aa, synthetic construct
  REGION 1..978: note = engineered CasX variant
QEIKRINKIRRRLVKDSNTKKAGKTGPMKTLLVRVMTPDLRERLENLRKKPENIPQPISNTSRANLNKLLTDYTEMKKAILHVYWEEFQKDPVGLMSRVAQPASKKIDQNKLKPEMDEKGNLTTAGFACSQCGQPLFVYKLEQVSEKGKAYTNYFGRCNVAEHEKLILLAQLKPEKDSDEAVTYSLGKFGQRALDFYSIHVTKESTHPVKPLAQIAGNRYASGPVGKALSDACMGTIASFLSKYQDIIIEHQKVVKGNQKRLESLRELAGKENLEYPSVTLPPQPHTKEGVDAYNEVIARVRMWVNLNLWQKLKLSRDDAKPLLRLKGFPSFPLVERQANEVDWWDMVCNVKKLINEKKEDGKVFWQNLAGYKRQEALRPYLSSEEDRKKGKKFARYQLGDLLLHLEKKHGEDWGKVYDEAWERIDKKVEGLSKHIKLEEERRSEDAQSKAALTDWLRAKASFVIEGLKEADKDEFCRCELKLQKWYGDLRGKPFAIEAENSILDISGFSKQYNCAFIWQKDGVKKLNLYLIINYFKGGKLRFKKIKPEAFEANRFYTVINKKSGEIVPMEVNFNFDDPNLIILPLAFGKRQGREFIWNDLLSLETGSLKLANGRVIEKTLYNRRTRQDEPALFVALTFERREVLDSSSIAPMNLIGVDRGENIPAVIALTDPEGCPLSRFKDSLGNPTHILRIDESYKEKQRTIQAKKEVEQRRAGGYSRKYASKAKNLADDMVRNTARDLLYYAVTQDAMLIFENLSRGFGRQGKRTFMAERQYTRMEDWLTAKLAYEGLPSKTYLSKTLAQYTSKTCSNCGFTITSADYDRVLEKLKKTATGWMTTINGKELKVEGQITYYNRYKRQNVVKDLSVELDRLSEESVNNDISSWTKGRSGEALSLLKKRFSHRPVQEKFVCLNCGFETHADEQAALNIARSWLFLRSQEYKKYQTNKTTGNTDKRAFVETWQSFYRKKLKEVWKPAV

SEQ ID NO: 24991 - protein, 978 aa, synthetic construct
  REGION 1..978: note = engineered CasX variant
QEIKRINKIRRRLVKDSNTKKAGKTGPMKTLLVRVMTPDLRERLENLRKKPENIPQPISNTSRANLNKLLTDYTEMKKAILHVYWEEFQKDPVGLMSRVAQPASKKIDQNKLKPEMDEKGNLTTAGFACSQCGQPLFVYKLEQVSEKGKAYTNYFGRCNVAEHEKLILLAQLKPEKDSDEAVTYSLGKFGQRALDFYSIHVTKESTHPVKPLAQIAGNRYASGPVGKALSDACMGTIASFLSKYQDIIIEHQKVVKGNQKRLESLRELAGKENLEYPSVTLPPQPHTKEGVDAYNEVIARVRMWVNLNLWQKLKLSRDDAKPLLRLKGFPSFPLVERQANEVDWWDMVCNVKKLINEKKEDGKVFWQNLAGYKRQEALRPYLSSEEDRKKGKKFARYQLGDLLLHLEKKHGEDWGKVYDEAWERIDKKVEGLSKHIKLEEERRSEDAQSKAALTDWLRAKASFVIEGLKEADKDEFCRCELKLQKWYGDLRGKPFAIEAENSILDISGFSKQYNCAFIWQKDGVKKLNLYLIINYFKGGKLRFKKIKPEAFEANRFYTVINKKSGEIVPMEVNFNFDDPNLIILPLAFGKRQGREFIWNDLLSLETGSLKLANGRVIEKTLYNRRTRQDEPALFVALTFERREVLDSSRIKPMNLIGVDRGENIPAVIALTDPTGCPLSRFKDSLGNPTHILRIGESYKEKQRTIQAKKEVEQRRAGGYSRKYASKAKNLADDMVRNTARDLLYYAVTQDAMLIFENLSRGFGRQGKRTFMAERQYTRMEDWLTAKLAYEGLPSKTYLSKTLAQYTSKTCSNCGFTITSADYDRVLEKLKKTATGWMTTINGKELKVEGQITYYNRYKRQNVVKDLSVELDRLSEESVNNDISSWTKGRSGEALSLLKKRFSHRPVQEKFVCLNCGFETHADEQAALNIARSWLFLRSQEYKKYQTNKTTGNTDKRAFVETWQSFYRKKLKEVWKPAV

SEQ ID NO: 24992 - protein, 978 aa, synthetic construct
  REGION 1..978: note = engineered CasX variant
QEIKRINKIRRRLVKDSNTKKAGKTGPMKTLLVRVMTPDLRERLENLRKKPENIPQPISNTSRANLNKLLTDYTEMKKAILHVYWEEFQKDPVGLMSRVAQPASKKIDQNKLKPEMDEKGNLTTAGFACSQCGQPLFVYKLEQVSEKGKAYTNYFGRCNVAEHEKLILLAQLKPEKDSDEAVTYSLGKFGQRALDFYSIHVTKESTHPVKPLAQIAGNRYASGPVGKALSDACMGTIASFLSKYQDIIIEHQKVVKGNQKRLESLRELAGKENLEYPSVTLPPQPHTKEGVDAYNEVIARVRMWVNLNLWQKLKLSRDDAKPLLRLKGFPSFPLVERQANEVDWWDMVCNVKKLINEKKEDGKVFWQNLAGYKRQEALRPYLSSEEDRKKGKKFARYQLGDLLLHLEKKHGEDWGKVYDEAWERIDKKVEGLSKHIKLEEERRSEDAQSKAALTDWLRAKASFVIEGLKEADKDEFCRCELKLQKWYGDLRGKPFAIEAENSILDISGFSKQYNCAFIWQKDGVKKLNLYLIINYFKGGKLRFKKIKPEAFEANRFYTVINKKSGEIVPMEVNFNFDDPNLIILPLAFGKRQGREFIWNDLLSLETGSLKLANGRVIEKTLYNRRTRQDEPALFVALTFERREVLDSSRIKPMNLIGVDRGENIPAVIALTDPTGCPLSRFKDSLGNPTHILRIGESYKEKQRTIQAKKCVEQRRAGGYSRKYASKAKNLADDMVRNTARDLLYYAVTQDAMLIFENLSRGFGRQGKRTFMAERQYTRMEDWLTAKLAYEGLPSKTYLSKTLAQYTSKTCSNCGFTITSADYDRVLEKLKKTATGWMTTINGKELKVEGQITYYNRYKRQNVVKDLSVELDRLSEESVNNDISSWTKGRSGEALSLLKKRFSHRPVQEKFVCLNCGFETHADEQAALNIARSWLFLRSQEYKKYQTNKTTGNTDKRAFVETWQSFYRKKLKEVWKPAV

SEQ ID NO: 24993 - protein, 978 aa, synthetic construct
  REGION 1..978: note = engineered CasX variant
QEIKRINKIRRRLVKDSNTKKAGKTGPMKTLLVRVMTPDLRERLENLRKKPENIPQPISNTSRANLNKLLTDYTEMKKAILHVYWEEFQKDPVGLMSRVAQPASKKIDQNKLKPEMDEKGNLTTAGFACSQCGQPLFVYKLEQVSEKGKAYTNYFGRCNVAEHEKLILLAQLKPEKDSDEAVTYSLGKFGQRALDFYSIHVTKESTHPVKPLAQIAGNRYASGPVGKALSDACMGTIASFLSKYQDIIIEHQKVVKGNQKRLESLRELAGKENLEYPSVTLPPQPHTKEGVDAYNEVIARVRMWVNLNLWQKLKLSRDDAKPLLRLKGFPSFPLVERQANEVDWWDMVCNVKKLINEKKEDGKVFWQNLAGYKRQEALRPYLSSEEDRKKGKKFARYQLGDLLLHLEKKHGEDWGKVYDEAWERIDKKVEGLSKHIKLEEERRSEDAQSKAALTDWLRAKASFVIEGLKEADKDEFCRCELKLQKWYGDLRGKPFAIEAENSILDISGFSKQYNCAFIWQKDGVKKLNLYLIINYFKGGKLRFKKIKPEAFEANRFYTVINKKSGEIVPMEVNFNFDDPNLIILPLAFGKRQGREFIWNDLLSLETGSLKLANGRVIEKTLYNRRTRQDEPALFVALTFERREVLDSSRIKPMNLIGVDRGENIPAVIALTDPEGKPLSRFKDSLGNSTHILRIGESYKEKQRTIQAKKEVEQRRAGGYSRKYASKAKNLADDMVRNTARDLLYYAVTQDAMLIFENLSRGFGRQGKRTFMAERQYTRMEDWLTAKLAYEGLPSKTYLSKTLAQYTSKTCSNCGFTITSADYDRVLEKLKKTATGWMTTINGKELKVEGQITYYNRYKRQNVVKDLSVELDRLSEESVNNDISSWTKGRSGEALSLLKKRFSHRPVQEKFVCLNCGFETHADEQAALNIARSWLFLRSQEYKKYQTNKTTGNTDKRAFVETWQSFYRKKLKEVWKPAV

SEQ ID NO: 24994 - protein, 978 aa, synthetic construct
  REGION 1..978: note = engineered CasX variant
QEIKRINKIRRRLVKDSNTKKAGKTGPMKTLLVRVMTPDLRERLENLRKKPENIPQPISNTSRANLNKLLTDYTEMKKAILHVYWEEFQKDPVGLMSRVAQPASKKIDQNKLKPEMDEKGNLTTAGFACSQCGQPLFVYKLEQVSEKGKAYTNYFGRCNVAEHEKLILLAQLKPEKDSDEAVTYSLGKFGQRALDFYSIHVTKESTHPVKPLAQIAGNRYASGPVGKALSDACMGTIASFLSKYQDIIIEHQKVVKGNQKRLESLRELAGKENLEYPSVTLPPQPHTKEGVDAYNEVIARVRMWVNLNLWQKLKLSRDDAKPLLRLKGFPSFPLVERQANEVDWWDMVCNVKKLINEKKEDGKVFWQNLAGYKRQEALRPYLSSEEDRKKGKKFARYQLGDLLLHLEKKHGEDWGKVYDEAWERIDKKVEGLSKHIKLEEERRSEDAQSKAALTDWLRAKASFVIEGLKEADKDEFCRCELKLQKWYGDLRGKPFAIEAENSILDISGFSKQYNCAFIWQKDGVKKLNLYLIINYFKGGKLRFKKIKPEAFEANRFYTVINKKSGEIVPMEVNFNFDDPNLIILPLAFGKRQGREFIWNDLLSLETGSLKLANGRVIEKTLYNRRTRQDEPALFVALTFERREVLDSSRIKPMNLIGVDRGENIPAVIALTDPEGKPLSRFKDSLGNPTHILRIGESYKEKQRTIQAKKEVEQRRAGGYSRKYASKAKNLADDMVRNTARDLLYYAVTQDAMLIFENLSRGFGRQGKRTFMAERQYTRMEDWLTAKLAYEGLPSKTYLSKTLAQYTSKTCSNCGFTITSADYDRVLEKLKKTATGWMTTINGKELKVEGQITYYNRYKRQNVVKDLSVELDRLSEESVNNDISSWTKGRSGEALSLLKKRFSHRPVQEKFVCLNCGFETHADEQAALNIARSWLFLRSQEYKKYQTNKTTGNTDKRAFVETWQSFYRKKLKEVWKPAV

SEQ ID NO: 24995 - protein, 978 aa, synthetic construct
  REGION 1..978: note = engineered CasX variant
QEIKRINKIRRRLVKDSNTKKAGKTGPMKTLLVRVMTPDLRERLENLRKKPENIPQPISNTSRANLNKLLTDYTEMKKAILHVYWEEFQKDPVGLMSRVAQPASKKIDQNKLKPEMDEKGNLTTAGFACSQCGQPLFVYKLEQVSEKGKAYTNYFGRCNVAEHEKLILLAQLKPEKDSDEAVTYSLGKFGQRALDFYSIHVTKESTHPVKPLAQIAGNRYASGPVGKALSDACMGTIASFLSKYQDIIIEHQKVVKGNQKRLESLRELAGKENLEYPSVTLPPQPHTKEGVDAYNEVIARVRMWVNLNLWQKLKLSRDDAKPLLRLKGFPSFPLVERQANEVDWWDMVCNVKKLINEKKEDGKVFWQNLAGYKRQEALRPYLSSEEDRKKGKKFARYQLGDLLLHLEKKHGEDWGKVYDEAWERIDKKVEGLSKHIKLEEERRSEDAQSKAALTDWLRAKASFVIEGLKEADKDEFCRCELKLQKWYGDLRGKPFAIEAENSILDISGFSKQYNCAFIWQKDGVKKLNLYLIINYFKGGKLRFKKIKPEAFEANRFYTVINKKSGEIVPMEVNFNFDDPNLIILPLAFGKRQGREFIWNDLLSLETGSLKLANGRVIEKTLYNRRTRQDEPALFVALTFERREVLDSSRIKPMNLIGVDRGENIPAVIALTDPEGCPLSRFKDSLGNSTHILRIGESYKEKQRTIQAKKEVEQRRAGGYSRKYASKAKNLADDMVRNTARDLLYYAVTQDAMLIFENLSRGFGRQGKRTFMAERQYTRMEDWLTAKLAYEGLPSKTYLSKTLAQYTSKTCSNCGFTITSADYDRVLEKLKKTATGWMTTINGKELKVEGQITYYNRYKRQNVVKDLSVELDRLSEESVNNDISSWTKGRSGEALSLLKKRFSHRPVQEKFVCLNCGFETHADEQAALNIARSWLFLRSQEYKKYQTNKTTGNTDKRAFVETWQSFYRKKLKEVWKPAV

SEQ ID NO: 24996 - protein, 978 aa, synthetic construct
  REGION 1..978: note = engineered CasX variant
QEIKRINKIRRRLVKDSNTKKAGKTGPMKTLLVRVMTPDLRERLENLRKKPENIPQPISNTSRANLNKLLTDYTEMKKAILHVYWEEFQKDPVGLMSRVAQPASKKIDQNKLKPEMDEKGNLTTAGFACSQCGQPLFVYKLEQVSEKGKAYTNYFGRCNVAEHEKLILLAQLKPEKDSDEAVTYSLGKFGQRALDFYSIHVTKESTHPVKPLAQIAGNRYASGPVGKALSDACMGTIASFLSKYQDIIIEHQKVVKGNQKRLESLRELAGKENLEYPSVTLPPQPHTKEGVDAYNEVIARVRMWVNLNLWQKLKLSRDDAKPLLRLKGFPSFPLVERQANEVDWWDMVCNVKKLINEKKEDGKVFWQNLAGYKRQEALRPYLSSEEDRKKGKKFARYQLGDLLLHLEKKHGEDWGKVYDEAWERIDKKVEGLSKHIKLEEERRSEDAQSKAALTDWLRAKASFVIEGLKEADKDEFCRCELKLQKWYGDLRGKPFAIEAENSILDISGFSKQYNCAFIWQKDGVKKLNLYLIINYFKGGKLRFKKIKPEAFEANRFYTVINKKSGEIVPMEVNFNFDDPNLIILPLAFGKRQGREFIWNDLLSLETGSLKLANGRVIEKTLYNRRTRQDEPALFVALTFERREVLDSSRIKPMNLIGVDRGENIPAVIALTDPEGCPLSRFKDSLGNPTWILRIGESYKEKQRTIQAKKEVEQRRAGGYSRKYASKAKNLADDMVRNTARDLLYYAVTQDAMLIFENLSRGFGRQGKRTFMAERQYTRMEDWLTAKLAYEGLPSKTYLSKTLAQYTSKTCSNCGFTITSADYDRVLEKLKKTATGWMTTINGKELKVEGQITYYNRYKRQNVVKDLSVELDRLSEESVNNDISSWTKGRSGEALSLLKKRFSHRPVQEKFVCLNCGFETHADEQAALNIARSWLFLRSQEYKKYQTNKTTGNTDKRAFVETWQSFYRKKLKEVWKPAV

SEQ ID NO: 24997 - protein, 978 aa, synthetic construct
  REGION 1..978: note = engineered CasX variant
QEIKRINKIRRRLVKDSNTKKAGKTGPMKTLLVRVMTPDLRERLENLRKKPENIPQPISNTSRANLNKLLTDYTEMKKAILHVYWEEFQKDPVGLMSRVAQPASKKIDQNKLKPEMDEKGNLTTAGFACSQCGQPLFVYKLEQVSEKGKAYTNYFGRCNVAEHEKLILLAQLKPEKDSDEAVTYSLGKFGQRALDFYSIHVTKESTHPVKPLAQIAGNRYASGPVGKALSDACMGTIASFLSKYQDIIIEHQKVVKGNQKRLESLRELAGKENLEYPSVTLPPQPHTKEGVDAYNEVIARVRMWVNLNLWQKLKLSRDDAKPLLRLKGFPSFPLVERQANEVDWWDMVCNVKKLINEKKEDGKVFWQNLAGYKRQEALRPYLSSEEDRKKGKKFARYQLGDLLLHLEKKHGEDWGKVYDEAWERIDKKVEGLSKHIKLEEERRSEDAQSKAALTDWLRAKASFVIEGLKEADKDEFCRCELKLQKWYGDLRGKPFAIEAENSILDISGFSKQYNCAFIWQKDGVKKLNLYLIINYFKGGKLRFKKIKPEAFEANRFYTVINKKSGEIVPMEVNFNFDDPNLIILPLAFGKRQGREFIWNDLLSLETGSLKLANGRVIEKTLYNRRTRQDEPALFVALTFERREVLDSSRIKPMNLIGVDRGENIPAVIALTDPEGCPLSRFKDSLGNPTHILRIGESYKEKQRTIQAKKEVEQRRAGGYSRKYASKAKNLADDMVRNTARDLLYYAVTQDAMLIFENLSRGFGRQGKRTFMAERQYTRMEDWLTAKLAYEGLPSKTYLSKTLAQYTSKTCSNCGFTITSADYDRVLEKLKKTATGWMTTINGKELKVEGQITYYNRYKRQNVVKDLSVELDRLSEESVNNDISSWTKGRSGEALSLLKKRFSHRPVQEKFVCLNCGFETHADEQAALNIARSWLFLRSQEYKKYQTNKTTGNTDKRAFVETWQSFYRKKLKEVWKPAV

SEQ ID NO: 24998 - protein, 978 aa, synthetic construct
  REGION 1..978: note = engineered CasX variant
QEIKRINKIRRRLVKDSNTKKAGKTGPMKTLLVRVMTPDLRERLENLRKKPENIPQPISNTSRANLNKLLTDYTEMKKAILHVYWEEFQKDPVGLMSRVAQPASKKIDQNKLKPEMDEKGNLTTAGFACSQCGQPLFVYKLEQVSEKGKAYTNYFGRCNVAEHEKLILLAQLKPEKDSDEAVTYSLGKFGQRALDFYSIHVTKESTHPVKPLAQIAGNRYASGPVGKALSDACMGTIASFLSKYQDIIIEHQKVVKGNQKRLESLRELAGKENLEYPSVTLPPQPHTKEGVDAYNEVIARVRMWVNLNLWQKLKLSRDDAKPLLRLKGFPSFPLVERQANEVDWWDMVCNVKKLINEKKEDGKVFWQNLAGYKRQEALRPYLSSEEDRKKGKKFARYQLGDLLLHLEKKHGEDWGKVYDEAWERIDKKVEGLSKHIKLEEERRSEDAQSKAALTDWLRAKASFVIEGLKEADKDEFCRCELKLQKWYGDLRGKPFAIEAENSILDISGFSKQYNCAFIWQKDGVKKLNLYLIINYFKGGKLRFKKIKPEAFEANRFYTVINKKSGEIVPMEVNFNFDDPNLIILPLAFGKRQGREFIWNDLLSLETGSLKLANGRVIEKTLYNRRTRQDEPALFVALTFERREVLDSSRIKPMNLIGVDRGENIPAVIALTDPEGCPLSRFKDSLGNPTHILRIGESYKEKQRTIQAKKCVEQRRAGGYSRKYASKAKNLADDMVRNTARDLLYYAVTQDAMLIFENLSRGFGRQGKRTFMAERQYTRMEDWLTAKLAYEGLPSKTYLSKTLAQYTSKTCSNCGFTITSADYDRVLEKLKKTATGWMTTINGKELKVEGQITYYNRYKRQNVVKDLSVELDRLSEESVNNDISSWTKGRSGEALSLLKKRFSHRPVQEKFVCLNCGFETHADEQAALNIARSWLFLRSQEYKKYQTNKTTGNTDKRAFVETWQSFYRKKLKEVWKPAV

SEQ ID NO: 24999 - protein, 978 aa, synthetic construct
  REGION 1..978: note = engineered CasX variant
QEIKRINKIRRRLVKDSNTKKAGKTGPMKTLLVRVMTPDLRERLENLRKKPENIPQPISNTSRANLNKLLTDYTEMKKAILHVYWEEFQKDPVGLMSRVAQPASKKIDQNKLKPEMDEKGNLTTAGFACSQCGQPLFVYKLEQVSEKGKAYTNYFGRCNVAEHEKLILLAQLKPEKDSDEAVTYSLGKFGQRALDFYSIHVTKESTHPVKPLAQIAGNRYASGPVGKALSDACMGTIASFLSKYQDIIIEHQKVVKGNQKRLESLRELAGKENLEYPSVTLPPQPHTKEGVDAYNEVIARVRMWVNLNLWQKLKLSRDDAKPLLRLKGFPSFPLVERQANEVDWWDMVCNVKKLINEKKEDGKVFWQNLAGYKRQEALRPYLSSEEDRKKGKKFARYQLGDLLLHLEKKHGEDWGKVYDEAWERIDKKVEGLSKHIKLEEERRSEDAQSKAALTDWLRAKASFVIEGLKEADKDEFCRCELKLQKWYGDLRGKPFAIEAENSILDISGFSKQYNCAFIWQKDGVKKLNLYLIINYFKGGKLRFKKIKPEAFEANRFYTVINKKSGEIVPMEVNFNFDDPNLIILPLAFGKRQGREFIWNDLLSLETGSLKLANGRVIEKTLYNRRTRQDEPALFVALTFERREVLDSSRIKPMNLIGVDRGENIPAVFALTDPEGCPLSRFKDSLGNPTHILRIGESYKEKQRTIQAKKEVEQRRAGGYSRKYASKAKNLADDMVRNTARDLLYYAVTQDAMLIFENLSRGFGRQGKRTFMAERQYTRMEDWLTAKLAYEGLPSKTYLSKTLAQYTSKTCSNCGFTITSADYDRVLEKLKKTATGWMTTINGKELKVEGQITYYNRYKRQNVVKDLSVELDRLSEESVNNDISSWTKGRSGEALSLLKKRFSHRPVQEKFVCLNCGFETHADEQAALNIARSWLFLRSQEYKKYQTNKTTGNTDKRAFVETWQSFYRKKLKEVWKPAV

SEQ ID NO: 25000 - protein, 978 aa, synthetic construct
  REGION 1..978: note = engineered CasX variant
QEIKRINKIRRRLVKDSNTKKAGKTGPMKTLLVRVMTPDLRERLENLRKKPENIPQPISNTSRANLNKLLTDYTEMKKAILHVYWEEFQKDPVGLMSRVAQPASKKIDQNKLKPEMDEKGNLTTAGFACSQCGQPLFVYKLEQVSEKGKAYTNYFGRCNVAEHEKLILLAQLKPEKDSDEAVTYSLGKFGQRALDFYSIHVTKESTHPVKPLAQIAGNRYASGPVGKALSDACMGTIASFLSKYQDIIIEHQKVVKGNQKRLESLRELAGKENLEYPSVTLPPQPHTKEGVDAYNEVIARVRMWVNLNLWQKLKLSRDDAKPLLRLKGFPSFPLVERQANEVDWWDMVCNVKKLINEKKEDGKVFWQNLAGYKRQEALRPYLSSEEDRKKGKKFARYQLGDLLLHLEKKHGEDWGKVYDEAWERIDKKVEGLSKHIKLEEERRSEDAQSKAALTDWLRAKASFVIEGLKEADKDEFCRCELKLQKWYGDLRGKPFAIEAENSILDISGFSKQYNCAFIWQKDGVKKLNLYLIINYFKGGKLRFKKIKPEAFEANRFYTVINKKSGEIVPMEVNFNFDDPNLIILPLAFGKRQGREFIWNDLLSLETGSLKLANGRVIEKTLYNRRTRQDEPALFVALTFERREVLDSSQIKPMNLIGVDRGENIPAVIALTDPEGQPLSRFKDSLGNPTHILRIGESYKEKQRTIQTKKEVEQRRAGGYSRKYASKAKNLADDMVRNTARDLLYYAVTQDAMLIFENLSRGFGRQGKRTFMAERQYTRMEDWLTAKLAYEGLPSKTYLSKTLAQYTSKTCSNCGFTITSADYDRVLEKLKKTATGWMTTINGKELKVEGQITYYNRYKRQNVVKDLSVELDRLSEESVNNDISSWTKGRSGEALSLLKKRFSHRPVQEKFVCLNCGFETHADEQAALNIARSWLFLRSQEYKKYQTNKTTGNTDKRAFVETWQSFYRKKLKEVWKPAV

SEQ ID NO: 25001 - protein, 978 aa, synthetic construct
  REGION 1..978: note = engineered CasX variant
QEIKRINKIRRRLVKDSNTKKAGKTGPMKTLLVRVMTPDLRERLENLRKKPENIPQPISNTSRANLNKLLTDYTEMKKAILHVYWEEFQKDPVGLMSRVAQPASKKIDQNKLKPEMDEKGNLTTAGFACSQCGQPLFVYKLEQVSEKGKAYTNYFGRCNVAEHEKLILLAQLKPEKDSDEAVTYSLGKFGQRALDFYSIHVTKESTHPVKPLAQIAGNRYASGPVGKALSDACMGTIASFLSKYQDIIIEHQKVVKGNQKRLESLRELAGKENLEYPSVTLPPQPHTKEGVDAYNEVIARVRMWVNLNLWQKLKLSRDDAKPLLRLKGFPSFPLVERQANEVDWWDMVCNVKKLINEKKEDGKVFWQNLAGYKRQEALRPYLSSEEDRKKGKKFARYQLGDLLLHLEKKHGEDWGKVYDEAWERIDKKVEGLSKHIKLEEERRSEDAQSKAALTDWLRAKASFVIEGLKEADKDEFCRCELKLQKWYGDLRGKPFAIEAENSILDISGFSKQYNCAFIWQKDGVKKLNLYLIINYFKGGKLRFKKIKPEAFEANRFYTVINKKSGEIVPMEVNFNFDDPNLIILPLAFGKRQGREFIWNDLLSLETGSLKLANGRVIEKTLYNRRTRQDEPALFVALTFERREVLDSSQIKPMNLIGVDRGENIPAVIALTDPEGQPLSRFKDSLGNPTHILRIGESYKEKQRTIQAKKEVEQRRAGGYSRKYASKAKNLADDMVRNTARDLLYYAVTQDAMLIFENLSRGFGRQGKRTFMAERQYTRMEDWLTAKLAYEGLPSKTYLSKTLAQYTSKTCSNCGFTITSADYDRVLEKLKKTATGWMTTINGKELKVEGQITYYNRYKRQNVVKDLSVELDRLSEESVNNDISSWTKGRSGEALSLLKKRFSHRPVQEKFVCLNCGFETHADEQAALNIARSWLFLRSQEYKKYQTNKTTGNTDKRAFVETWQSFYRKKLKEVWKPAV

SEQ ID NO: 25002 - protein, 978 aa, synthetic construct
  REGION 1..978: note = engineered CasX variant
QEIKRINKIRRRLVKDSNTKKAGKTGPMKTLLVRVMTPDLRERLENLRKKPENIPQPISNTSRANLNKLLTDYTEMKKAILHVYWEEFQKDPVGLMSRVAQPASKKIDQNKLKPEMDEKGNLTTAGFACSQCGQPLFVYKLEQVSEKGKAYTNYFGRCNVAEHEKLILLAQLKPEKDSDEAVTYSLGKFGQRALDFYSIHVTKESTHPVKPLAQIAGNRYASGPVGKALSDACMGTIASFLSKYQDIIIEHQKVVKGNQKRLESLRELAGKENLEYPSVTLPPQPHTKEGVDAYNEVIARVRMWVNLNLWQKLKLSRDDAKPLLRLKGFPSFPLVERQANEVDWWDMVCNVKKLINEKKEDGKVFWQNLAGYKRQEALRPYLSSEEDRKKGKKFARYQLGDLLLHLEKKHGEDWGKVYDEAWERIDKKVEGLSKHIKLEEERRSEDAQSKAALTDWLRAKASFVIEGLKEADKDEFCRCELKLQKWYGDLRGKPFAIEAENSILDISGFSKQYNCAFIWQKDGVKKLNLYLIINYFKGGKLRFKKIKPEAFEANRFYTVINKKSGEIVPMEVNFNFDDPNLIILPLAFGKRQGREFIWNDLLSLETGSLKLANGRVIEKTLYNRRTRQDEPALFVALTFERREVLDSSQIKPMNLIGVDRGENIPAVIALTDPEGCPLSRFKDSLGNPTHILRIGESYKEKQRTIQTKKEVEQRRAGGYSRKYASKAKNLADDMVRNTARDLLYYAVTQDAMLIFENLSRGFGRQGKRTFMAERQYTRMEDWLTAKLAYEGLPSKTYLSKTLAQYTSKTCSNCGFTITSADYDRVLEKLKKTATGWMTTINGKELKVEGQITYYNRYKRQNVVKDLSVELDRLSEESVNNDISSWTKGRSGEALSLLKKRFSHRPVQEKFVCLNCGFETHADEQAALNIARSWLFLRSQEYKKYQTNKTTGNTDKRAFVETWQSFYRKKLKEVWKPAV

SEQ ID NO: 25003 - protein, 978 aa, synthetic construct
  REGION 1..978: note = engineered CasX variant
QEIKRINKIRRRLVKDSNTKKAGKTGPMKTLLVRVMTPDLRERLENLRKKPENIPQPISNTSRANLNKLLTDYTEMKKAILHVYWEEFQKDPVGLMSRVAQPASKKIDQNKLKPEMDEKGNLTTAGFACSQCGQPLFVYKLEQVSEKGKAYTNYFGRCNVAEHEKLILLAQLKPEKDSDEAVTYSLGKFGQRALDFYSIHVTKESTHPVKPLAQIAGNRYASGPVGKALSDACMGTIASFLSKYQDIIIEHQKVVKGNQKRLESLRELAGKENLEYPSVTLPPQPHTKEGVDAYNEVIARVRMWVNLNLWQKLKLSRDDAKPLLRLKGFPSFPLVERQANEVDWWDMVCNVKKLINEKKEDGKVFWQNLAGYKRQEALRPYLSSEEDRKKGKKFARYQLGDLLLHLEKKHGEDWGKVYDEAWERIDKKVEGLSKHIKLEEERRSEDAQSKAALTDWLRAKASFVIEGLKEADKDEFCRCELKLQKWYGDLRGKPFAIEAENSILDISGFSKQYNCAFIWQKDGVKKLNLYLIINYFKGGKLRFKKIKPEAFEANRFYTVINKKSGEIVPMEVNFNFDDPNLIILPLAFGKRQGREFIWNDLLSLETGSLKLANGRVIEKTLYNRRTRQDEPALFVALTFERREVLDSSQIKPMNLIGVDRGENIPAVIALTDPEGCPLSRFKDSLGNPTHILRIGESYKEKQRTIQAKKEVEQRRAGGYSRKYASKAKNLADDMVRNTARDLLYYAVTQDAMLIFENLSRGFGRQGKRTFMAERQYTRMEDWLTAKLAYEGLPSKTYLSKTLAQYTSKTCSNCGFTITSADYDRVLEKLKKTATGWMTTINGKELKVEGQITYYNRYKRQNVVKDLSVELDRLSEESVNNDISSWTKGRSGEALSLLKKRFSHRPVQEKFVCLNCGFETHADEQAALNIARSWLFLRSQEYKKYQTNKTTGNTDKRAFVETWQSFYRKKLKEVWKPAV

SEQ ID NO: 25004 - protein, 978 aa, synthetic construct
  REGION 1..978: note = engineered CasX variant
QEIKRINKIRRRLVKDSNTKKAGKTGPMKTLLVRVMTPDLRERLENLRKKPENIPQPISNTSRANLNKLLTDYTEMKKAILHVYWEEFQKDPVGLMSRVAQPASKKIDQNKLKPEMDEKGNLTTAGFACSQCGQPLFVYKLEQVSEKGKAYTNYFGRCNVAEHEKLILLAQLKPEKDSDEAVTYSLGKFGQRALDFYSIHVTKESTHPVKPLAQIAGNRYASGPVGKALSDACMGTIASFLSKYQDIIIEHQKVVKGNQKRLESLRELAGKENLEYPSVTLPPQPHTKEGVDAYNEVIARVRMWVNLNLWQKLKLSRDDAKPLLRLKGFPSFPLVERQANEVDWWDMVCNVKKLINEKKEDGKVFWQNLAGYKRQEALRPYLSSEEDRKKGKKFARYQLGDLLLHLEKKHGEDWGKVYDEAWERIDKKVEGLSKHIKLEEERRSEDAQSKAALTDWLRAKASFVIEGLKEADKDEFCRCELKLQKWYGDLRGKPFAIEAENSILDISGFSKQYNCAFIWQKDGVKKLNLYLIINYFKGGKLRFKKIKPEAFEANRFYTVINKKSGEIVPMEVNFNFDDPNLIILPLAFGKRQGREFIWNDLLSLETGSLKLANGRVIEKTLYNRRTRQDEPALFVALTFERREVLDSSPIKPMNLIGVDRGENIPAVIALTDPEGCPLSRFKDSLGNPTHILRIGESYKEKQRTIQAKKEVEQRRAGGYSRKYASKAKNLADDMVRNTARDLLYYAVTQDAMLIFENLSRGFGRQGKRTFMAERQYTRMEDWLTAKLAYEGLPSKTYLSKTLAQYTSKTCSNCGFTITSADYDRVLEKLKKTATGWMTTINGKELKVEGQITYYNRYKRQNVVKDLSVELDRLSEESVNNDISSWTKGRSGEALSLLKKRFSHRPVQEKFVCLNCGFETHADEQAALNIARSWLFLRSQEYKKYQTNKTTGNTDKRAFVETWQSFYRKKLKEVWKPAV

SEQ ID NO: 25005 - protein, 978 aa, synthetic construct
  REGION 1..978: note = engineered CasX variant
QEIKRINKIRRRLVKDSNTKKAGKTGPMKTLLVRVMTPDLRERLENLRKKPENIPQPISNTSRANLNKLLTDYTEMKKAILHVYWEEFQKDPVGLMSRVAQPASKKIDQNKLKPEMDEKGNLTTAGFACSQCGQPLFVYKLEQVSEKGKAYTNYFGRCNVAEHEKLILLAQLKPEKDSDEAVTYSLGKFGQRALDFYSIHVTKESTHPVKPLAQIAGNRYASGPVGKALSDACMGTIASFLSKYQDIIIEHQKVVKGNQKRLESLRELAGKENLEYPSVTLPPQPHTKEGVDAYNEVIARVRMWVNLNLWQKLKLSRDDAKPLLRLKGFPSFPLVERQANEVDWWDMVCNVKKLINEKKEDGKVFWQNLAGYKRQEALRPYLSSEEDRKKGKKFARYQLGDLLLHLEKKHGEDWGKVYDEAWERIDKKVEGLSKHIKLEEERRSEDAQSKAALTDWLRAKASFVIEGLKEADKDEFCRCELKLQKWYGDLRGKPFAIEAENSILDISGFSKQYNCAFIWQKDGVKKLNLYLIINYFKGGKLRFKKIKPEAFEANRFYTVINKKSGEIVPMEVNFNFDDPNLIILPLAFGKRQGREFIWNDLLSLETGSLKLANGRVIEKTLYNRRTRQDEPALFVALTFERREVLDSSPIKPMNLIGVDRGENIPAVIALTDPEGCPLSRFKDSLGNPTHILRIGESYKEKQRTIQAKKEVEARRAGGYSRKYASKAKNLADDMVRNTARDLLYYAVTQDAMLIFENLSRGFGRQGKRTFMAERQYTRMEDWLTAKLAYEGLPSKTYLSKTLAQYTSKTCSNCGFTITSADYDRVLEKLKKTATGWMTTINGKELKVEGQITYYNRYKRQNVVKDLSVELDRLSEESVNNDISSWTKGRSGEALSLLKKRFSHRPVQEKFVCLNCGFETHADEQAALNIARSWLFLRSQEYKKYQTNKTTGNTDKRAFVETWQSFYRKKLKEVWKPAV

SEQ ID NO: 25006 - protein, 978 aa, synthetic construct
  REGION 1..978: note = engineered CasX variant
QEIKRINKIRRRLVKDSNTKKAGKTGPMKTLLVRVMTPDLRERLENLRKKPENIPQPISNTSRANLNKLLTDYTEMKKAILHVYWEEFQKDPVGLMSRVAQPASKKIDQNKLKPEMDEKGNLTTAGFACSQCGQPLFVYKLEQVSEKGKAYTNYFGRCNVAEHEKLILLAQLKPEKDSDEAVTYSLGKFGQRALDFYSIHVTKESTHPVKPLAQIAGNRYASGPVGKALSDACMGTIASFLSKYQDIIIEHQKVVKGNQKRLESLRELAGKENLEYPSVTLPPQPHTKEGVDAYNEVIARVRMWVNLNLWQKLKLSRDDAKPLLRLKGFPSFPLVERQANEVDWWDMVCNVKKLINEKKEDGKVFWQNLAGYKRQEALRPYLSSEEDRKKGKKFARYQLGDLLLHLEKKHGEDWGKVYDEAWERIDKKVEGLSKHIKLEEERRSEDAQSKAALTDWLRAKASFVIEGLKEADKDEFCRCELKLQKWYGDLRGKPFAIEAENSILDISGFSKQYNCAFIWQKDGVKKLNLYLIINYFKGGKLRFKKIKPEAFEANRFYTVINKKSGEIVPMEVNFNFDDPNLIILPLAFGKRQGREFIWNDLLSLETGSLKLANGRVIEKTLYNRRTRQDEPALFVALTFERREVLDSSPIKPMNLIGVDRGENIPAVIALTDPEGCPLSRFKDSLGNPTHILRIGENYKEKQRTIQAKKEVEQRRAGGYSRKYASKAKNLADDMVRNTARDLLYYAVTQDAMLIFENLSRGFGRQGKRTFMAERQYTRMEDWLTAKLAYEGLPSKTYLSKTLAQYTSKTCSNCGFTITSADYDRVLEKLKKTATGWMTTINGKELKVEGQITYYNRYKRQNVVKDLSVELDRLSEESVNNDISSWTKGRSGEALSLLKKRFSHRPVQEKFVCLNCGFETHADEQAALNIARSWLFLRSQEYKKYQTNKTTGNTDKRAFVETWQSFYRKKLKEVWKPAV

SEQ ID NO: 25007 - protein, 978 aa, synthetic construct
  REGION 1..978: note = engineered CasX variant
QEIKRINKIRRRLVKDSNTKKAGKTGPMKTLLVRVMTPDLRERLENLRKKPENIPQPISNTSRANLNKLLTDYTEMKKAILHVYWEEFQKDPVGLMSRVAQPASKKIDQNKLKPEMDEKGNLTTAGFACSQCGQPLFVYKLEQVSEKGKAYTNYFGRCNVAEHEKLILLAQLKPEKDSDEAVTYSLGKFGQRALDFYSIHVTKESTHPVKPLAQIAGNRYASGPVGKALSDACMGTIASFLSKYQDIIIEHQKVVKGNQKRLESLRELAGKENLEYPSVTLPPQPHTKEGVDAYNEVIARVRMWVNLNLWQKLKLSRDDAKPLLRLKGFPSFPLVERQANEVDWWDMVCNVKKLINEKKEDGKVFWQNLAGYKRQEALRPYLSSEEDRKKGKKFARYQLGDLLLHLEKKHGEDWGKVYDEAWERIDKKVEGLSKHIKLEEERRSEDAQSKAALTDWLRAKASFVIEGLKEADKDEFCRCELKLQKWYGDLRGKPFAIEAENSILDISGFSKQYNCAFIWQKDGVKKLNLYLIINYFKGGKLRFKKIKPEAFEANRFYTVINKKSGEIVPMEVNFNFDDPNLIILPLAFGKRQGREFIWNDLLSLETGSLKLANGRVIEKTLYNRRTRQDEPALFVALTFERREVLDSSPIKPMNLIGVDRGENIPAVIALTDPEGCPLSRFKDSLGNPTHILRIGENYKEKQRTIQAKKEVEARRAGGYSRKYASKAKNLADDMVRNTARDLLYYAVTQDAMLIFENLSRGFGRQGKRTFMAERQYTRMEDWLTAKLAYEGLPSKTYLSKTLAQYTSKTCSNCGFTITSADYDRVLEKLKKTATGWMTTINGKELKVEGQITYYNRYKRQNVVKDLSVELDRLSEESVNNDISSWTKGRSGEALSLLKKRFSHRPVQEKFVCLNCGFETHADEQAALNIARSWLFLRSQEYKKYQTNKTTGNTDKRAFVETWQSFYRKKLKEVWKPAV

SEQ ID NO: 25008 - protein, 978 aa, synthetic construct
  REGION 1..978: note = engineered CasX variant
QEIKRINKIRRRLVKDSNTKKAGKTGPMKTLLVRVMTPDLRERLENLRKKPENIPQPISNTSRANLNKLLTDYTEMKKAILHVYWEEFQKDPVGLMSRVAQPASKKIDQNKLKPEMDEKGNLTTAGFACSQCGQPLFVYKLEQVSEKGKAYTNYFGRCNVAEHEKLILLAQLKPEKDSDEAVTYSLGKFGQRALDFYSIHVTKESTHPVKPLAQIAGNRYASGPVGKALSDACMGTIASFLSKYQDIIIEHQKVVKGNQKRLESLRELAGKENLEYPSVTLPPQPHTKEGVDAYNEVIARVRMWVNLNLWQKLKLSRDDAKPLLRLKGFPSFPLVERQANEVDWWDMVCNVKKLINEKKEDGKVFWQNLAGYKRQEALRPYLSSEEDRKKGKKFARYQLGDLLLHLEKKHGEDWGKVYDEAWERIDKKVEGLSKHIKLEEERRSEDAQSKAALTDWLRAKASFVIEGLKEADKDEFCRCELKLQKWYGDLRGKPFAIEAENSILDISGFSKQYNCAFIWQKDGVKKLNLYLIINYFKGGKLRFKKIKPEAFEANRFYTVINKKSGEIVPMEVNFNFDDPNLIILPLAFGKRQGREFIWNDLLSLETGSLKLANGRVIEKTLYNRRTRQDEPALFVALTFERREVLDSSNYKPMNLIGVDRGENIPAVIALTDPEGMPLSRFKDSLGNPTHILRIGESYKEKQRTIQAKKEVEQRRAGGYSRKYASKAKNLADDMVRNTARDLLYYAVTQDAMLIFENLSRGFGRQGKRTFMAERQYTRMEDWLTAKLAYEGLPSKTYLSKTLAQYTSKTCSNCGFTITSADYDRVLEKLKKTATGWMTTINGKELKVEGQITYYNRYKRQNVVKDLSVELDRLSEESVNNDISSWTKGRSGEALSLLKKRFSHRPVQEKFVCLNCGFETHADEQAALNIARSWLFLRSQEYKKYQTNKTTGNTDKRAFVETWQSFYRKKLKEVWKPAV

SEQ ID NO: 25009 - protein, 978 aa, synthetic construct
  REGION 1..978: note = engineered CasX variant
QEIKRINKIRRRLVKDSNTKKAGKTGPMKTLLVRVMTPDLRERLENLRKKPENIPQPISNTSRANLNKLLTDYTEMKKAILHVYWEEFQKDPVGLMSRVAQPASKKIDQNKLKPEMDEKGNLTTAGFACSQCGQPLFVYKLEQVSEKGKAYTNYFGRCNVAEHEKLILLAQLKPEKDSDEAVTYSLGKFGQRALDFYSIHVTKESTHPVKPLAQIAGNRYASGPVGKALSDACMGTIASFLSKYQDIIIEHQKVVKGNQKRLESLRELAGKENLEYPSVTLPPQPHTKEGVDAYNEVIARVRMWVNLNLWQKLKLSRDDAKPLLRLKGFPSFPLVERQANEVDWWDMVCNVKKLINEKKEDGKVFWQNLAGYKRQEALRPYLSSEEDRKKGKKFARYQLGDLLLHLEKKHGEDWGKVYDEAWERIDKKVEGLSKHIKLEEERRSEDAQSKAALTDWLRAKASFVIEGLKEADKDEFCRCELKLQKWYGDLRGKPFAIEAENSILDISGFSKQYNCAFIWQKDGVKKLNLYLIINYFKGGKLRFKKIKPEAFEANRFYTVINKKSGEIVPMEVNFNFDDPNLIILPLAFGKRQGREFIWNDLLSLETGSLKLANGRVIEKTLYNRRTRQDEPALFVALTFERREVLDSSNYKPMNLIGVDRGENIPAVIALTDPEGCPLSWFKDSLGNPTHILRIGESYKEKQRTIQAKKEVEQRRAGGYSRKYASKAKNLADDMVRNTARDLLYYAVTQDAMLIFENLSRGFGRQGKRTFMAERQYTRMEDWLTAKLAYEGLPSKTYLSKTLAQYTSKTCSNCGFTITSADYDRVLEKLKKTATGWMTTINGKELKVEGQITYYNRYKRQNVVKDLSVELDRLSEESVNNDISSWTKGRSGEALSLLKKRFSHRPVQEKFVCLNCGFETHADEQAALNIARSWLFLRSQEYKKYQTNKTTGNTDKRAFVETWQSFYRKKLKEVWKPAV

SEQ ID NO: 25010 - protein, 978 aa, synthetic construct
  REGION 1..978: note = engineered CasX variant
QEIKRINKIRRRLVKDSNTKKAGKTGPMKTLLVRVMTPDLRERLENLRKKPENIPQPISNTSRANLNKLLTDYTEMKKAILHVYWEEFQKDPVGLMSRVAQPASKKIDQNKLKPEMDEKGNLTTAGFACSQCGQPLFVYKLEQVSEKGKAYTNYFGRCNVAEHEKLILLAQLKPEKDSDEAVTYSLGKFGQRALDFYSIHVTKESTHPVKPLAQIAGNRYASGPVGKALSDACMGTIASFLSKYQDIIIEHQKVVKGNQKRLESLRELAGKENLEYPSVTLPPQPHTKEGVDAYNEVIARVRMWVNLNLWQKLKLSRDDAKPLLRLKGFPSFPLVERQANEVDWWDMVCNVKKLINEKKEDGKVFWQNLAGYKRQEALRPYLSSEEDRKKGKKFARYQLGDLLLHLEKKHGEDWGKVYDEAWERIDKKVEGLSKHIKLEEERRSEDAQSKAALTDWLRAKASFVIEGLKEADKDEFCRCELKLQKWYGDLRGKPFAIEAENSILDISGFSKQYNCAFIWQKDGVKKLNLYLIINYFKGGKLRFKKIKPEAFEANRFYTVINKKSGEIVPMEVNFNFDDPNLIILPLAFGKRQGREFIWNDLLSLETGSLKLANGRVIEKTLYNRRTRQDEPALFVALTFERREVLDSSNYKPMNLIGVDRGENIPAVIALTDPEGCPLSRFKDSLGNPTHVLRIGESYKHKQRTIQAKKEVEQRRAGGYSRKYASKAKNLADDMVRNTARDLLYYAVTQDAMLIFENLSRGFGRQGKRTFMAERQYTRMEDWLTAKLAYEGLPSKTYLSKTLAQYTSKTCSNCGFTITSADYDRVLEKLKKTATGWMTTINGKELKVEGQITYYNRYKRQNVVKDLSVELDRLSEESVNNDISSWTKGRSGEALSLLKKRFSHRPVQEKFVCLNCGFETHADEQAALNIARSWLFLRSQEYKKYQTNKTTGNTDKRAFVETWQSFYRKKLKEVWKPAV

SEQ ID NO: 25011 - protein, 978 aa, synthetic construct
  REGION 1..978: note = engineered CasX variant
QEIKRINKIRRRLVKDSNTKKAGKTGPMKTLLVRVMTPDLRERLENLRKKPENIPQPISNTSRANLNKLLTDYTEMKKAILHVYWEEFQKDPVGLMSRVAQPASKKIDQNKLKPEMDEKGNLTTAGFACSQCGQPLFVYKLEQVSEKGKAYTNYFGRCNVAEHEKLILLAQLKPEKDSDEAVTYSLGKFGQRALDFYSIHVTKESTHPVKPLAQIAGNRYASGPVGKALSDACMGTIASFLSKYQDIIIEHQKVVKGNQKRLESLRELAGKENLEYPSVTLPPQPHTKEGVDAYNEVIARVRMWVNLNLWQKLKLSRDDAKPLLRLKGFPSFPLVERQANEVDWWDMVCNVKKLINEKKEDGKVFWQNLAGYKRQEALRPYLSSEEDRKKGKKFARYQLGDLLLHLEKKHGEDWGKVYDEAWERIDKKVEGLSKHIKLEEERRSEDAQSKAALTDWLRAKASFVIEGLKEADKDEFCRCELKLQKWYGDLRGKPFAIEAENSILDISGFSKQYNCAFIWQKDGVKKLNLYLIINYFKGGKLRFKKIKPEAFEANRFYTVINKKSGEIVPMEVNFNFDDPNLIILPLAFGKRQGREFIWNDLLSLETGSLKLANGRVIEKTLYNRRTRQDEPALFVALTFERREVLDSSNYKPMNLIGVDRGENIPAVIALTDPEGCPLSRFKDSLGNPTHVLRIGESYKEKQRTIQAKKEVEQRRAGGYSRKYASKAKNLADDMVRNTARDLLYYAVTQDAMLIFENLSRGFGRQGKRTFMAERQYTRMEDWLTAKLAYEGLPSKTYLSKTLAQYTSKTCSNCGFTITSADYDRVLEKLKKTATGWMTTINGKELKVEGQITYYNRYKRQNVVKDLSVELDRLSEESVNNDISSWTKGRSGEALSLLKKRFSHRPVQEKFVCLNCGFETHADEQAALNIARSWLFLRSQEYKKYQTNKTTGNTDKRAFVETWQSFYRKKLKEVWKPAV

SEQ ID NO: 25012 - protein, 978 aa, synthetic construct
  REGION 1..978: note = engineered CasX variant
QEIKRINKIRRRLVKDSNTKKAGKTGPMKTLLVRVMTPDLRERLENLRKKPENIPQPISNTSRANLNKLLTDYTEMKKAILHVYWEEFQKDPVGLMSRVAQPASKKIDQNKLKPEMDEKGNLTTAGFACSQCGQPLFVYKLEQVSEKGKAYTNYFGRCNVAEHEKLILLAQLKPEKDSDEAVTYSLGKFGQRALDFYSIHVTKESTHPVKPLAQIAGNRYASGPVGKALSDACMGTIASFLSKYQDIIIEHQKVVKGNQKRLESLRELAGKENLEYPSVTLPPQPHTKEGVDAYNEVIARVRMWVNLNLWQKLKLSRDDAKPLLRLKGFPSFPLVERQANEVDWWDMVCNVKKLINEKKEDGKVFWQNLAGYKRQEALRPYLSSEEDRKKGKKFARYQLGDLLLHLEKKHGEDWGKVYDEAWERIDKKVEGLSKHIKLEEERRSEDAQSKAALTDWLRAKASFVIEGLKEADKDEFCRCELKLQKWYGDLRGKPFAIEAENSILDISGFSKQYNCAFIWQKDGVKKLNLYLIINYFKGGKLRFKKIKPEAFEANRFYTVINKKSGEIVPMEVNFNFDDPNLIILPLAFGKRQGREFIWNDLLSLETGSLKLANGRVIEKTLYNRRTRQDEPALFVALTFERREVLDSSNYKPMNLIGVDRGENIPAVIALTDPEGCPLSRFKDSLGNPTHILRIGESYKHKQRTIQAKKEVEQRRAGGYSRKYASKAKNLADDMVRNTARDLLYYAVTQDAMLIFENLSRGFGRQGKRTFMAERQYTRMEDWLTAKLAYEGLPSKTYLSKTLAQYTSKTCSNCGFTITSADYDRVLEKLKKTATGWMTTINGKELKVEGQITYYNRYKRQNVVKDLSVELDRLSEESVNNDISSWTKGRSGEALSLLKKRFSHRPVQEKFVCLNCGFETHADEQAALNIARSWLFLRSQEYKKYQTNKTTGNTDKRAFVETWQSFYRKKLKEVWKPAV

SEQ ID NO: 25013 - protein, 978 aa, synthetic construct
  REGION 1..978: note = engineered CasX variant
QEIKRINKIRRRLVKDSNTKKAGKTGPMKTLLVRVMTPDLRERLENLRKKPENIPQPISNTSRANLNKLLTDYTEMKKAILHVYWEEFQKDPVGLMSRVAQPASKKIDQNKLKPEMDEKGNLTTAGFACSQCGQPLFVYKLEQVSEKGKAYTNYFGRCNVAEHEKLILLAQLKPEKDSDEAVTYSLGKFGQRALDFYSIHVTKESTHPVKPLAQIAGNRYASGPVGKALSDACMGTIASFLSKYQDIIIEHQKVVKGNQKRLESLRELAGKENLEYPSVTLPPQPHTKEGVDAYNEVIARVRMWVNLNLWQKLKLSRDDAKPLLRLKGFPSFPLVERQANEVDWWDMVCNVKKLINEKKEDGKVFWQNLAGYKRQEALRPYLSSEEDRKKGKKFARYQLGDLLLHLEKKHGEDWGKVYDEAWERIDKKVEGLSKHIKLEEERRSEDAQSKAALTDWLRAKASFVIEGLKEADKDEFCRCELKLQKWYGDLRGKPFAIEAENSILDISGFSKQYNCAFIWQKDGVKKLNLYLIINYFKGGKLRFKKIKPEAFEANRFYTVINKKSGEIVPMEVNFNFDDPNLIILPLAFGKRQGREFIWNDLLSLETGSLKLANGRVIEKTLYNRRTRQDEPALFVALTFERREVLDSSNYKPMNLIGVDRGENIPAVIALTDPEGCPLSRFKDSLGNPTHILRIGESYKEKQRTIQAKKQVEQRRAGGYSRKYASKAKNLADDMVRNTARDLLYYAVTQDAMLIFENLSRGFGRQGKRTFMAERQYTRMEDWLTAKLAYEGLPSKTYLSKTLAQYTSKTCSNCGFTITSADYDRVLEKLKKTATGWMTTINGKELKVEGQITYYNRYKRQNVVKDLSVELDRLSEESVNNDISSWTKGRSGEALSLLKKRFSHRPVQEKFVCLNCGFETHADEQAALNIARSWLFLRSQEYKKYQTNKTTGNTDKRAFVETWQSFYRKKLKEVWKPAV

SEQ ID NO: 25014 - protein, 978 aa, synthetic construct
  REGION 1..978: note = engineered CasX variant
QEIKRINKIRRRLVKDSNTKKAGKTGPMKTLLVRVMTPDLRERLENLRKKPENIPQPISNTSRANLNKLLTDYTEMKKAILHVYWEEFQKDPVGLMSRVAQPASKKIDQNKLKPEMDEKGNLTTAGFACSQCGQPLFVYKLEQVSEKGKAYTNYFGRCNVAEHEKLILLAQLKPEKDSDEAVTYSLGKFGQRALDFYSIHVTKESTHPVKPLAQIAGNRYASGPVGKALSDACMGTIASFLSKYQDIIIEHQKVVKGNQKRLESLRELAGKENLEYPSVTLPPQPHTKEGVDAYNEVIARVRMWVNLNLWQKLKLSRDDAKPLLRLKGFPSFPLVERQANEVDWWDMVCNVKKLINEKKEDGKVFWQNLAGYKRQEALRPYLSSEEDRKKGKKFARYQLGDLLLHLEKKHGEDWGKVYDEAWERIDKKVEGLSKHIKLEEERRSEDAQSKAALTDWLRAKASFVIEGLKEADKDEFCRCELKLQKWYGDLRGKPFAIEAENSILDISGFSKQYNCAFIWQKDGVKKLNLYLIINYFKGGKLRFKKIKPEAFEANRFYTVINKKSGEIVPMEVNFNFDDPNLIILPLAFGKRQGREFIWNDLLSLETGSLKLANGRVIEKTLYNRRTRQDEPALFVALTFERREVLDSSNYKPMNLIGVDRGENIPAVIALTDPEGCPLSRFKDSLGNPTHILRIGESYKEKQRTIQAKKEVEQRTAGGYSRKYASKAKNLADDMVRNTARDLLYYAVTQDAMLIFENLSRGFGRQGKRTFMAERQYTRMEDWLTAKLAYEGLPSKTYLSKTLAQYTSKTCSNCGFTITSADYDRVLEKLKKTATGWMTTINGKELKVEGQITYYNRYKRQNVVKDLSVELDRLSEESVNNDISSWTKGRSGEALSLLKKRFSHRPVQEKFVCLNCGFETHADEQAALNIARSWLFLRSQEYKKYQTNKTTGNTDKRAFVETWQSFYRKKLKEVWKPAV

SEQ ID NO: 25015 - protein, 978 aa, synthetic construct
  REGION 1..978: note = engineered CasX variant
QEIKRINKIRRRLVKDSNTKKAGKTGPMKTLLVRVMTPDLRERLENLRKKPENIPQPISNTSRANLNKLLTDYTEMKKAILHVYWEEFQKDPVGLMSRVAQPASKKIDQNKLKPEMDEKGNLTTAGFACSQCGQPLFVYKLEQVSEKGKAYTNYFGRCNVAEHEKLILLAQLKPEKDSDEAVTYSLGKFGQRALDFYSIHVTKESTHPVKPLAQIAGNRYASGPVGKALSDACMGTIASFLSKYQDIIIEHQKVVKGNQKRLESLRELAGKENLEYPSVTLPPQPHTKEGVDAYNEVIARVRMWVNLNLWQKLKLSRDDAKPLLRLKGFPSFPLVERQANEVDWWDMVCNVKKLINEKKEDGKVFWQNLAGYKRQEALRPYLSSEEDRKKGKKFARYQLGDLLLHLEKKHGEDWGKVYDEAWERIDKKVEGLSKHIKLEEERRSEDAQSKAALTDWLRAKASFVIEGLKEADKDEFCRCELKLQKWYGDLRGKPFAIEAENSILDISGFSKQYNCAFIWQKDGVKKLNLYLIINYFKGGKLRFKKIKPEAFEANRFYTVINKKSGEIVPMEVNFNFDDPNLIILPLAFGKRQGREFIWNDLLSLETGSLKLANGRVIEKTLYNRRTRQDEPALFVALTFERREVLDSSNYKPMNLIGVDRGENIPAVIALTDPEGCPLSRFKDSLGNPTHILRIGESYKEKQRTIQAKKEVEQRRAGGYSRKYASKAKNLADDMVRNTARDLLYYAVTQDAMLIFENLSRGFGRQGKRTFMAERQYTRMEDWLTAKLAYEGLPSKTYLSKTLAQYTSKTCSNCGFTITSADYDRVLEKLKKTATGWMTTINGKELKVEGQITYYNRYKRQNVVKDLSVELDRLSEESVNNDISSWTKGRSGEALSLLKKRFSHRPVQEKFVCLNCGFETHADEQAALNIARSWLFLRSQEYKKYQTNKTTGNTDKRAFVETWQSFYRKKLKEVWKPAV

SEQ ID NO: 25016 - protein, 978 aa, synthetic construct
  REGION 1..978: note = engineered CasX variant
QEIKRINKIRRRLVKDSNTKKAGKTGPMKTLLVRVMTPDLRERLENLRKKPENIPQPISNTSRANLNKLLTDYTEMKKAILHVYWEEFQKDPVGLMSRVAQPASKKIDQNKLKPEMDEKGNLTTAGFACSQCGQPLFVYKLEQVSEKGKAYTNYFGRCNVAEHEKLILLAQLKPEKDSDEAVTYSLGKFGQRALDFYSIHVTKESTHPVKPLAQIAGNRYASGPVGKALSDACMGTIASFLSKYQDIIIEHQKVVKGNQKRLESLRELAGKENLEYPSVTLPPQPHTKEGVDAYNEVIARVRMWVNLNLWQKLKLSRDDAKPLLRLKGFPSFPLVERQANEVDWWDMVCNVKKLINEKKEDGKVFWQNLAGYKRQEALRPYLSSEEDRKKGKKFARYQLGDLLLHLEKKHGEDWGKVYDEAWERIDKKVEGLSKHIKLEEERRSEDAQSKAALTDWLRAKASFVIEGLKEADKDEFCRCELKLQKWYGDLRGKPFAIEAENSILDISGFSKQYNCAFIWQKDGVKKLNLYLIINYFKGGKLRFKKIKPEAFEANRFYTVINKKSGEIVPMEVNFNFDDPNLIILPLAFGKRQGREFIWNDLLSLETGSLKLANGRVIEKTLYNRRTRQDEPALFVALTFERREVLDSSNYKPMNLIGVDRGENIPAVIALTDPEGCPLSRFKDSLGNPTHILRIGESYKEKQRTIQAKKEVEQKRAGGYSRKYASKAKNLADDMVRNTARDLLYYAVTQDAMLIFENLSRGFGRQGKRTFMAERQYTRMEDWLTAKLAYEGLPSKTYLSKTLAQYTSKTCSNCGFTITSADYDRVLEKLKKTATGWMTTINGKELKVEGQITYYNRYKRQNVVKDLSVELDRLSEESVNNDISSWTKGRSGEALSLLKKRFSHRPVQEKFVCLNCGFETHADEQAALNIARSWLFLRSQEYKKYQTNKTTGNTDKRAFVETWQSFYRKKLKEVWKPAV

SEQ ID NO: 25017 - protein, 978 aa, synthetic construct
  REGION 1..978: note = engineered CasX variant
QEIKRINKIRRRLVKDSNTKKAGKTGPMKTLLVRVMTPDLRERLENLRKKPENIPQPISNTSRANLNKLLTDYTEMKKAILHVYWEEFQKDPVGLMSRVAQPASKKIDQNKLKPEMDEKGNLTTAGFACSQCGQPLFVYKLEQVSEKGKAYTNYFGRCNVAEHEKLILLAQLKPEKDSDEAVTYSLGKFGQRALDFYSIHVTKESTHPVKPLAQIAGNRYASGPVGKALSDACMGTIASFLSKYQDIIIEHQKVVKGNQKRLESLRELAGKENLEYPSVTLPPQPHTKEGVDAYNEVIARVRMWVNLNLWQKLKLSRDDAKPLLRLKGFPSFPLVERQANEVDWWDMVCNVKKLINEKKEDGKVFWQNLAGYKRQEALRPYLSSEEDRKKGKKFARYQLGDLLLHLEKKHGEDWGKVYDEAWERIDKKVEGLSKHIKLEEERRSEDAQSKAALTDWLRAKASFVIEGLKEADKDEFCRCELKLQKWYGDLRGKPFAIEAENSILDISGFSKQYNCAFIWQKDGVKKLNLYLIINYFKGGKLRFKKIKPEAFEANRFYTVINKKSGEIVPMEVNFNFDDPNLIILPLAFGKRQGREFIWNDLLSLETGSLKLANGRVIEKTLYNRRTRQDEPALFVALTFERREVLDSSNYKPMNLIGVDRGENIPAVIALTDPEGCPLSRFKDSLGNPTHILRIGESYKEKQRTIQAKKEVCQRTAGGYSRKYASKAKNLADDMVRNTARDLLYYAVTQDAMLIFENLSRGFGRQGKRTFMAERQYTRMEDWLTAKLAYEGLPSKTYLSKTLAQYTSKTCSNCGFTITSADYDRVLEKLKKTATGWMTTINGKELKVEGQITYYNRYKRQNVVKDLSVELDRLSEESVNNDISSWTKGRSGEALSLLKKRFSHRPVQEKFVCLNCGFETHADEQAALNIARSWLFLRSQEYKKYQTNKTTGNTDKRAFVETWQSFYRKKLKEVWKPAV

SEQ ID NO: 25018 - protein, 978 aa, synthetic construct
  REGION 1..978: note = engineered CasX variant
QEIKRINKIRRRLVKDSNTKKAGKTGPMKTLLVRVMTPDLRERLENLRKKPENIPQPISNTSRANLNKLLTDYTEMKKAILHVYWEEFQKDPVGLMSRVAQPASKKIDQNKLKPEMDEKGNLTTAGFACSQCGQPLFVYKLEQVSEKGKAYTNYFGRCNVAEHEKLILLAQLKPEKDSDEAVTYSLGKFGQRALDFYSIHVTKESTHPVKPLAQIAGNRYASGPVGKALSDACMGTIASFLSKYQDIIIEHQKVVKGNQKRLESLRELAGKENLEYPSVTLPPQPHTKEGVDAYNEVIARVRMWVNLNLWQKLKLSRDDAKPLLRLKGFPSFPLVERQANEVDWWDMVCNVKKLINEKKEDGKVFWQNLAGYKRQEALRPYLSSEEDRKKGKKFARYQLGDLLLHLEKKHGEDWGKVYDEAWERIDKKVEGLSKHIKLEEERRSEDAQSKAALTDWLRAKASFVIEGLKEADKDEFCRCELKLQKWYGDLRGKPFAIEAENSILDISGFSKQYNCAFIWQKDGVKKLNLYLIINYFKGGKLRFKKIKPEAFEANRFYTVINKKSGEIVPMEVNFNFDDPNLIILPLAFGKRQGREFIWNDLLSLETGSLKLANGRVIEKTLYNRRTRQDEPALFVALTFERREVLDSSNYKPMNLIGVDRGENIPAVIALTDPEGCPLSRFKDSLGNPTHILRIGESYKEKQRTIQAKKEVCQRRAGGYSRKYASKAKNLADDMVRNTARDLLYYAVTQDAMLIFENLSRGFGRQGKRTFMAERQYTRMEDWLTAKLAYEGLPSKTYLSKTLAQYTSKTCSNCGFTITSADYDRVLEKLKKTATGWMTTINGKELKVEGQITYYNRYKRQNVVKDLSVELDRLSEESVNNDISSWTKGRSGEALSLLKKRFSHRPVQEKFVCLNCGFETHADEQAALNIARSWLFLRSQEYKKYQTNKTTGNTDKRAFVETWQSFYRKKLKEVWKPAV

SEQ ID NO: 25019 - protein, 978 aa, synthetic construct
  REGION 1..978: note = engineered CasX variant
QEIKRINKIRRRLVKDSNTKKAGKTGPMKTLLVRVMTPDLRERLENLRKKPENIPQPISNTSRANLNKLLTDYTEMKKAILHVYWEEFQKDPVGLMSRVAQPASKKIDQNKLKPEMDEKGNLTTAGFACSQCGQPLFVYKLEQVSEKGKAYTNYFGRCNVAEHEKLILLAQLKPEKDSDEAVTYSLGKFGQRALDFYSIHVTKESTHPVKPLAQIAGNRYASGPVGKALSDACMGTIASFLSKYQDIIIEHQKVVKGNQKRLESLRELAGKENLEYPSVTLPPQPHTKEGVDAYNEVIARVRMWVNLNLWQKLKLSRDDAKPLLRLKGFPSFPLVERQANEVDWWDMVCNVKKLINEKKEDGKVFWQNLAGYKRQEALRPYLSSEEDRKKGKKFARYQLGDLLLHLEKKHGEDWGKVYDEAWERIDKKVEGLSKHIKLEEERRSEDAQSKAALTDWLRAKASFVIEGLKEADKDEFCRCELKLQKWYGDLRGKPFAIEAENSILDISGFSKQYNCAFIWQKDGVKKLNLYLIINYFKGGKLRFKKIKPEAFEANRFYTVINKKSGEIVPMEVNFNFDDPNLIILPLAFGKRQGREFIWNDLLSLETGSLKLANGRVIEKTLYNRRTRQDEPALFVALTFERREVLDSSNYKPMNLIGVDRGENIPAVIALTDPEGCPLSRFKDSLGNPTHILRIGESYKEKQRTICAKKQVEQRRAGGYSRKYASKAKNLADDMVRNTARDLLYYAVTQDAMLIFENLSRGFGRQGKRTFMAERQYTRMEDWLTAKLAYEGLPSKTYLSKTLAQYTSKTCSNCGFTITSADYDRVLEKLKKTATGWMTTINGKELKVEGQITYYNRYKRQNVVKDLSVELDRLSEESVNNDISSWTKGRSGEALSLLKKRFSHRPVQEKFVCLNCGFETHADEQAALNIARSWLFLRSQEYKKYQTNKTTGNTDKRAFVETWQSFYRKKLKEVWKPAV

SEQ ID NO: 25020 - protein, 978 aa, synthetic construct
  REGION 1..978: note = engineered CasX variant
QEIKRINKIRRRLVKDSNTKKAGKTGPMKTLLVRVMTPDLRERLENLRKKPENIPQPISNTSRANLNKLLTDYTEMKKAILHVYWEEFQKDPVGLMSRVAQPASKKIDQNKLKPEMDEKGNLTTAGFACSQCGQPLFVYKLEQVSEKGKAYTNYFGRCNVAEHEKLILLAQLKPEKDSDEAVTYSLGKFGQRALDFYSIHVTKESTHPVKPLAQIAGNRYASGPVGKALSDACMGTIASFLSKYQDIIIEHQKVVKGNQKRLESLRELAGKENLEYPSVTLPPQPHTKEGVDAYNEVIARVRMWVNLNLWQKLKLSRDDAKPLLRLKGFPSFPLVERQANEVDWWDMVCNVKKLINEKKEDGKVFWQNLAGYKRQEALRPYLSSEEDRKKGKKFARYQLGDLLLHLEKKHGEDWGKVYDEAWERIDKKVEGLSKHIKLEEERRSEDAQSKAALTDWLRAKASFVIEGLKEADKDEFCRCELKLQKWYGDLRGKPFAIEAENSILDISGFSKQYNCAFIWQKDGVKKLNLYLIINYFKGGKLRFKKIKPEAFEANRFYTVINKKSGEIVPMEVNFNFDDPNLIILPLAFGKRQGREFIWNDLLSLETGSLKLANGRVIEKTLYNRRTRQDEPALFVALTFERREVLDSSNYKPMNLIGVDRGENIPAVIALTDPEGCPLSRFKDSLGNPTHILRIGESYKEKQRTICAKKEVEQRRAGGYSRKYASKAKNLADDMVRNTARDLLYYAVTQDAMLIFENLSRGFGRQGKRTFMAERQYTRMEDWLTAKLAYEGLPSKTYLSKTLAQYTSKTCSNCGFTITSADYDRVLEKLKKTATGWMTTINGKELKVEGQITYYNRYKRQNVVKDLSVELDRLSEESVNNDISSWTKGRSGEALSLLKKRFSHRPVQEKFVCLNCGFETHADEQAALNIARSWLFLRSQEYKKYQTNKTTGNTDKRAFVETWQSFYRKKLKEVWKPAV

SEQ ID NO: 25021 - protein, 978 aa, synthetic construct
  REGION 1..978: note = engineered CasX variant
QEIKRINKIRRRLVKDSNTKKAGKTGPMKTLLVRVMTPDLRERLENLRKKPENIPQPISNTSRANLNKLLTDYTEMKKAILHVYWEEFQKDPVGLMSRVAQPASKKIDQNKLKPEMDEKGNLTTAGFACSQCGQPLFVYKLEQVSEKGKAYTNYFGRCNVAEHEKLILLAQLKPEKDSDEAVTYSLGKFGQRALDFYSIHVTKESTHPVKPLAQIAGNRYASGPVGKALSDACMGTIASFLSKYQDIIIEHQKVVKGNQKRLESLRELAGKENLEYPSVTLPPQPHTKEGVDAYNEVIARVRMWVNLNLWQKLKLSRDDAKPLLRLKGFPSFPLVERQANEVDWWDMVCNVKKLINEKKEDGKVFWQNLAGYKRQEALRPYLSSEEDRKKGKKFARYQLGDLLLHLEKKHGEDWGKVYDEAWERIDKKVEGLSKHIKLEEERRSEDAQSKAALTDWLRAKASFVIEGLKEADKDEFCRCELKLQKWYGDLRGKPFAIEAENSILDISGFSKQYNCAFIWQKDGVKKLNLYLIINYFKGGKLRFKKIKPEAFEANRFYTVINKKSGEIVPMEVNFNFDDPNLIILPLAFGKRQGREFIWNDLLSLETGSLKLANGRVIEKTLYNRRTRQDEPALFVALTFERREVLDSSNWKRMNLIGVDRGENIPAVIALTDPEGCPLSRFKDSLGNPTHILRIGESYKEKQRTIQAKKEVEQRRLGGYSRKYASKAKNLADDMVRNTARDLLYYAVTQDAMLIFENLSRGFGRQGKRTFMAERQYTRMEDWLTAKLAYEGLPSKTYLSKTLAQYTSKTCSNCGFTITSADYDRVLEKLKKTATGWMTTINGKELKVEGQITYYNRYKRQNVVKDLSVELDRLSEESVNNDISSWTKGRSGEALSLLKKRFSHRPVQEKFVCLNCGFETHADEQAALNIARSWLFLRSQEYKKYQTNKTTGNTDKRAFVETWQSFYRKKLKEVWKPAV

SEQ ID NO: 25022 - protein, 978 aa, synthetic construct
  REGION 1..978: note = engineered CasX variant
QEIKRINKIRRRLVKDSNTKKAGKTGPMKTLLVRVMTPDLRERLENLRKKPENIPQPISNTSRANLNKLLTDYTEMKKAILHVYWEEFQKDPVGLMSRVAQPASKKIDQNKLKPEMDEKGNLTTAGFACSQCGQPLFVYKLEQVSEKGKAYTNYFGRCNVAEHEKLILLAQLKPEKDSDEAVTYSLGKFGQRALDFYSIHVTKESTHPVKPLAQIAGNRYASGPVGKALSDACMGTIASFLSKYQDIIIEHQKVVKGNQKRLESLRELAGKENLEYPSVTLPPQPHTKEGVDAYNEVIARVRMWVNLNLWQKLKLSRDDAKPLLRLKGFPSFPLVERQANEVDWWDMVCNVKKLINEKKEDGKVFWQNLAGYKRQEALRPYLSSEEDRKKGKKFARYQLGDLLLHLEKKHGEDWGKVYDEAWERIDKKVEGLSKHIKLEEERRSEDAQSKAALTDWLRAKASFVIEGLKEADKDEFCRCELKLQKWYGDLRGKPFAIEAENSILDISGFSKQYNCAFIWQKDGVKKLNLYLIINYFKGGKLRFKKIKPEAFEANRFYTVINKKSGEIVPMEVNFNFDDPNLIILPLAFGKRQGREFIWNDLLSLETGSLKLANGRVIEKTLYNRRTRQDEPALFVALTFERREVLDSSNWKRMNLIGVDRGENIPAVIALTDPEGCPLSRFKDSLGNPTHILRIGESYKEKQRTIQAKKEVEQRRAGGYSRKYASKAKNLADDMVRNTARDLLYYAVTQDAMLIFENLSRGFGRQGKRTFMAERQYTRMEDWLTAKLAYEGLPSKTYLSKTLAQYTSKTCSNCGFTITSADYDRVLEKLKKTATGWMTTINGKELKVEGQITYYNRYKRQNVVKDLSVELDRLSEESVNNDISSWTKGRSGEALSLLKKRFSHRPVQEKFVCLNCGFETHADEQAALNIARSWLFLRSQEYKKYQTNKTTGNTDKRAFVETWQSFYRKKLKEVWKPAV

SEQ ID NO: 25023 - protein, 978 aa, synthetic construct
  REGION 1..978: note = engineered CasX variant
QEIKRINKIRRRLVKDSNTKKAGKTGPMKTLLVRVMTPDLRERLENLRKKPENIPQPISNTSRANLNKLLTDYTEMKKAILHVYWEEFQKDPVGLMSRVAQPASKKIDQNKLKPEMDEKGNLTTAGFACSQCGQPLFVYKLEQVSEKGKAYTNYFGRCNVAEHEKLILLAQLKPEKDSDEAVTYSLGKFGQRALDFYSIHVTKESTHPVKPLAQIAGNRYASGPVGKALSDACMGTIASFLSKYQDIIIEHQKVVKGNQKRLESLRELAGKENLEYPSVTLPPQPHTKEGVDAYNEVIARVRMWVNLNLWQKLKLSRDDAKPLLRLKGFPSFPLVERQANEVDWWDMVCNVKKLINEKKEDGKVFWQNLAGYKRQEALRPYLSSEEDRKKGKKFARYQLGDLLLHLEKKHGEDWGKVYDEAWERIDKKVEGLSKHIKLEEERRSEDAQSKAALTDWLRAKASFVIEGLKEADKDEFCRCELKLQKWYGDLRGKPFAIEAENSILDISGFSKQYNCAFIWQKDGVKKLNLYLIINYFKGGKLRFKKIKPEAFEANRFYTVINKKSGEIVPMEVNFNFDDPNLIILPLAFGKRQGREFIWNDLLSLETGSLKLANGRVIEKTLYNRRTRQDEPALFVALTFERREVLDSSNWKRMNLIGVDRGENIPAVIALTDPEGCPLSRFKDSAGNPTHILRIGESYKEKQRTIQAKKEVEQRRAGGYSRKYASKAKNLADDMVRNTARDLLYYAVTQDAMLIFENLSRGFGRQGKRTFMAERQYTRMEDWLTAKLAYEGLPSKTYLSKTLAQYTSKTCSNCGFTITSADYDRVLEKLKKTATGWMTTINGKELKVEGQITYYNRYKRQNVVKDLSVELDRLSEESVNNDISSWTKGRSGEALSLLKKRFSHRPVQEKFVCLNCGFETHADEQAALNIARSWLFLRSQEYKKYQTNKTTGNTDKRAFVETWQSFYRKKLKEVWKPAV

SEQ ID NO: 25024 - protein, 978 aa, synthetic construct
  REGION 1..978: note = engineered CasX variant
QEIKRINKIRRRLVKDSNTKKAGKTGPMKTLLVRVMTPDLRERLENLRKKPENIPQPISNTSRANLNKLLTDYTEMKKAILHVYWEEFQKDPVGLMSRVAQPASKKIDQNKLKPEMDEKGNLTTAGFACSQCGQPLFVYKLEQVSEKGKAYTNYFGRCNVAEHEKLILLAQLKPEKDSDEAVTYSLGKFGQRALDFYSIHVTKESTHPVKPLAQIAGNRYASGPVGKALSDACMGTIASFLSKYQDIIIEHQKVVKGNQKRLESLRELAGKENLEYPSVTLPPQPHTKEGVDAYNEVIARVRMWVNLNLWQKLKLSRDDAKPLLRLKGFPSFPLVERQANEVDWWDMVCNVKKLINEKKEDGKVFWQNLAGYKRQEALRPYLSSEEDRKKGKKFARYQLGDLLLHLEKKHGEDWGKVYDEAWERIDKKVEGLSKHIKLEEERRSEDAQSKAALTDWLRAKASFVIEGLKEADKDEFCRCELKLQKWYGDLRGKPFAIEAENSILDISGFSKQYNCAFIWQKDGVKKLNLYLIINYFKGGKLRFKKIKPEAFEANRFYTVINKKSGEIVPMEVNFNFDDPNLIILPLAFGKRQGREFIWNDLLSLETGSLKLANGRVIEKTLYNRRTRQDEPALFVALTFERREVLDSSNWKRMNLIGVDRGENIPAVIALTDPEGCPLSRFKDHLGNPTHILRIGESYKEKQRTIQAKKEVEQRRAGGYSRKYASKAKNLADDMVRNTARDLLYYAVTQDAMLIFENLSRGFGRQGKRTFMAERQYTRMEDWLTAKLAYEGLPSKTYLSKTLAQYTSKTCSNCGFTITSADYDRVLEKLKKTATGWMTTINGKELKVEGQITYYNRYKRQNVVKDLSVELDRLSEESVNNDISSWTKGRSGEALSLLKKRFSHRPVQEKFVCLNCGFETHADEQAALNIARSWLFLRSQEYKKYQTNKTTGNTDKRAFVETWQSFYRKKLKEVWKPAV

SEQ ID NO: 25025 - protein, 978 aa, synthetic construct
  REGION 1..978: note = engineered CasX variant
QEIKRINKIRRRLVKDSNTKKAGKTGPMKTLLVRVMTPDLRERLENLRKKPENIPQPISNTSRANLNKLLTDYTEMKKAILHVYWEEFQKDPVGLMSRVAQPASKKIDQNKLKPEMDEKGNLTTAGFACSQCGQPLFVYKLEQVSEKGKAYTNYFGRCNVAEHEKLILLAQLKPEKDSDEAVTYSLGKFGQRALDFYSIHVTKESTHPVKPLAQIAGNRYASGPVGKALSDACMGTIASFLSKYQDIIIEHQKVVKGNQKRLESLRELAGKENLEYPSVTLPPQPHTKEGVDAYNEVIARVRMWVNLNLWQKLKLSRDDAKPLLRLKGFPSFPLVERQANEVDWWDMVCNVKKLINEKKEDGKVFWQNLAGYKRQEALRPYLSSEEDRKKGKKFARYQLGDLLLHLEKKHGEDWGKVYDEAWERIDKKVEGLSKHIKLEEERRSEDAQSKAALTDWLRAKASFVIEGLKEADKDEFCRCELKLQKWYGDLRGKPFAIEAENSILDISGFSKQYNCAFIWQKDGVKKLNLYLIINYFKGGKLRFKKIKPEAFEANRFYTVINKKSGEIVPMEVNFNFDDPNLIILPLAFGKRQGREFIWNDLLSLETGSLKLANGRVIEKTLYNRRTRQDEPALFVALTFERREVLDSSNWKRMNLIGVDRGENIPAVIALTDPEGCPLSCFKDSLGNPTHILRIGESYKEKQRTIQAKKEVEQRRAGGYSRKYASKAKNLADDMVRNTARDLLYYAVTQDAMLIFENLSRGFGRQGKRTFMAERQYTRMEDWLTAKLAYEGLPSKTYLSKTLAQYTSKTCSNCGFTITSADYDRVLEKLKKTATGWMTTINGKELKVEGQITYYNRYKRQNVVKDLSVELDRLSEESVNNDISSWTKGRSGEALSLLKKRFSHRPVQEKFVCLNCGFETHADEQAALNIARSWLFLRSQEYKKYQTNKTTGNTDKRAFVETWQSFYRKKLKEVWKPAV

SEQ ID NO: 25026 - protein, 978 aa, synthetic construct
  REGION 1..978: note = engineered CasX variant
QEIKRINKIRRRLVKDSNTKKAGKTGPMKTLLVRVMTPDLRERLENLRKKPENIPQPISNTSRANLNKLLTDYTEMKKAILHVYWEEFQKDPVGLMSRVAQPASKKIDQNKLKPEMDEKGNLTTAGFACSQCGQPLFVYKLEQVSEKGKAYTNYFGRCNVAEHEKLILLAQLKPEKDSDEAVTYSLGKFGQRALDFYSIHVTKESTHPVKPLAQIAGNRYASGPVGKALSDACMGTIASFLSKYQDIIIEHQKVVKGNQKRLESLRELAGKENLEYPSVTLPPQPHTKEGVDAYNEVIARVRMWVNLNLWQKLKLSRDDAKPLLRLKGFPSFPLVERQANEVDWWDMVCNVKKLINEKKEDGKVFWQNLAGYKRQEALRPYLSSEEDRKKGKKFARYQLGDLLLHLEKKHGEDWGKVYDEAWERIDKKVEGLSKHIKLEEERRSEDAQSKAALTDWLRAKASFVIEGLKEADKDEFCRCELKLQKWYGDLRGKPFAIEAENSILDISGFSKQYNCAFIWQKDGVKKLNLYLIINYFKGGKLRFKKIKPEAFEANRFYTVINKKSGEIVPMEVNFNFDDPNLIILPLAFGKRQGREFIWNDLLSLETGSLKLANGRVIEKTLYNRRTRQDEPALFVALTFERREVLDSSNWKPMNLIGVDRGENIPAVIALTDPEGCPLSRFTDSLGNPTHILRIGESYKEKQRTIQAKKEVEQRRAGGYSRKYASKAKNLADDMVRNTARDLLYYAVTQDAMLIFENLSRGFGRQGKRTFMAERQYTRMEDWLTAKLAYEGLPSKTYLSKTLAQYTSKTCSNCGFTITSADYDRVLEKLKKTATGWMTTINGKELKVEGQITYYNRYKRQNVVKDLSVELDRLSEESVNNDISSWTKGRSGEALSLLKKRFSHRPVQEKFVCLNCGFETHADEQAALNIARSWLFLRSQEYKKYQTNKTTGNTDKRAFVETWQSFYRKKLKEVWKPAV

SEQ ID NO: 25027 - protein, 978 aa, synthetic construct
  REGION 1..978: note = engineered CasX variant
QEIKRINKIRRRLVKDSNTKKAGKTGPMKTLLVRVMTPDLRERLENLRKKPENIPQPISNTSRANLNKLLTDYTEMKKAILHVYWEEFQKDPVGLMSRVAQPASKKIDQNKLKPEMDEKGNLTTAGFACSQCGQPLFVYKLEQVSEKGKAYTNYFGRCNVAEHEKLILLAQLKPEKDSDEAVTYSLGKFGQRALDFYSIHVTKESTHPVKPLAQIAGNRYASGPVGKALSDACMGTIASFLSKYQDIIIEHQKVVKGNQKRLESLRELAGKENLEYPSVTLPPQPHTKEGVDAYNEVIARVRMWVNLNLWQKLKLSRDDAKPLLRLKGFPSFPLVERQANEVDWWDMVCNVKKLINEKKEDGKVFWQNLAGYKRQEALRPYLSSEEDRKKGKKFARYQLGDLLLHLEKKHGEDWGKVYDEAWERIDKKVEGLSKHIKLEEERRSEDAQSKAALTDWLRAKASFVIEGLKEADKDEFCRCELKLQKWYGDLRGKPFAIEAENSILDISGFSKQYNCAFIWQKDGVKKLNLYLIINYFKGGKLRFKKIKPEAFEANRFYTVINKKSGEIVPMEVNFNFDDPNLIILPLAFGKRQGREFIWNDLLSLETGSLKLANGRVIEKTLYNRRTRQDEPALFVALTFERREVLDSSNWKPMNLIGVDRGENIPAVIALTDPEGCPLSRFTDSLGNPTHILRIGESFKEKQRTIQAKKEVEQRRAGGYSRKYASKAKNLADDMVRNTARDLLYYAVTQDAMLIFENLSRGFGRQGKRTFMAERQYTRMEDWLTAKLAYEGLPSKTYLSKTLAQYTSKTCSNCGFTITSADYDRVLEKLKKTATGWMTTINGKELKVEGQITYYNRYKRQNVVKDLSVELDRLSEESVNNDISSWTKGRSGEALSLLKKRFSHRPVQEKFVCLNCGFETHADEQAALNIARSWLFLRSQEYKKYQTNKTTGNTDKRAFVETWQSFYRKKLKEVWKPAV

SEQ ID NO: 25028 - protein, 978 aa, synthetic construct
  REGION 1..978: note = engineered CasX variant
QEIKRINKIRRRLVKDSNTKKAGKTGPMKTLLVRVMTPDLRERLENLRKKPENIPQPISNTSRANLNKLLTDYTEMKKAILHVYWEEFQKDPVGLMSRVAQPASKKIDQNKLKPEMDEKGNLTTAGFACSQCGQPLFVYKLEQVSEKGKAYTNYFGRCNVAEHEKLILLAQLKPEKDSDEAVTYSLGKFGQRALDFYSIHVTKESTHPVKPLAQIAGNRYASGPVGKALSDACMGTIASFLSKYQDIIIEHQKVVKGNQKRLESLRELAGKENLEYPSVTLPPQPHTKEGVDAYNEVIARVRMWVNLNLWQKLKLSRDDAKPLLRLKGFPSFPLVERQANEVDWWDMVCNVKKLINEKKEDGKVFWQNLAGYKRQEALRPYLSSEEDRKKGKKFARYQLGDLLLHLEKKHGEDWGKVYDEAWERIDKKVEGLSKHIKLEEERRSEDAQSKAALTDWLRAKASFVIEGLKEADKDEFCRCELKLQKWYGDLRGKPFAIEAENSILDISGFSKQYNCAFIWQKDGVKKLNLYLIINYFKGGKLRFKKIKPEAFEANRFYTVINKKSGEIVPMEVNFNFDDPNLIILPLAFGKRQGREFIWNDLLSLETGSLKLANGRVIEKTLYNRRTRQDEPALFVALTFERREVLDSSNWKPMNLIGVDRGENIPAVIALTDPEGCPLSRFKDSLGNPTHILRIGESYKEKQRTIQAKKEVEQRRLGGYSRKYASKAKNLADDMVRNTARDLLYYAVTQDAMLIFENLSRGFGRQGKRTFMAERQYTRMEDWLTAKLAYEGLPSKTYLSKTLAQYTSKTCSNCGFTITSADYDRVLEKLKKTATGWMTTINGKELKVEGQITYYNRYKRQNVVKDLSVELDRLSEESVNNDISSWTKGRSGEALSLLKKRFSHRPVQEKFVCLNCGFETHADEQAALNIARSWLFLRSQEYKKYQTNKTTGNTDKRAFVETWQSFYRKKLKEVWKPAV

SEQ ID NO: 25029 - protein, 978 aa, synthetic construct
  REGION 1..978: note = engineered CasX variant
QEIKRINKIRRRLVKDSNTKKAGKTGPMKTLLVRVMTPDLRERLENLRKKPENIPQPISNTSRANLNKLLTDYTEMKKAILHVYWEEFQKDPVGLMSRVAQPASKKIDQNKLKPEMDEKGNLTTAGFACSQCGQPLFVYKLEQVSEKGKAYTNYFGRCNVAEHEKLILLAQLKPEKDSDEAVTYSLGKFGQRALDFYSIHVTKESTHPVKPLAQIAGNRYASGPVGKALSDACMGTIASFLSKYQDIIIEHQKVVKGNQKRLESLRELAGKENLEYPSVTLPPQPHTKEGVDAYNEVIARVRMWVNLNLWQKLKLSRDDAKPLLRLKGFPSFPLVERQANEVDWWDMVCNVKKLINEKKEDGKVFWQNLAGYKRQEALRPYLSSEEDRKKGKKFARYQLGDLLLHLEKKHGEDWGKVYDEAWERIDKKVEGLSKHIKLEEERRSEDAQSKAALTDWLRAKASFVIEGLKEADKDEFCRCELKLQKWYGDLRGKPFAIEAENSILDISGFSKQYNCAFIWQKDGVKKLNLYLIINYFKGGKLRFKKIKPEAFEANRFYTVINKKSGEIVPMEVNFNFDDPNLIILPLAFGKRQGREFIWNDLLSLETGSLKLANGRVIEKTLYNRRTRQDEPALFVALTFERREVLDSSNWKPMNLIGVDRGENIPAVIALTDPEGCPLSRFKDSLGNPTHILRIGESYKEKQRTIQAKKEVEQRRAGGYSRKYASKAKNLADDMVRNTARDLLYYAVTQDAMLIFENLSRGFGRQGKRTFMAERQYTRMEDWLTAKLAYEGLPSKTYLSKTLAQYTSKTCSNCGFTITSADYDRVLEKLKKTATGWMTTINGKELKVEGQITYYNRYKRQNVVKDLSVELDRLSEESVNNDISSWTKGRSGEALSLLKKRFSHRPVQEKFVCLNCGFETHADEQAALNIARSWLFLRSQEYKKYQTNKTTGNTDKRAFVETWQSFYRKKLKEVWKPAV

SEQ ID NO: 25030 - protein, 978 aa, synthetic construct
  REGION 1..978: note = engineered CasX variant
QEIKRINKIRRRLVKDSNTKKAGKTGPMKTLLVRVMTPDLRERLENLRKKPENIPQPISNTSRANLNKLLTDYTEMKKAILHVYWEEFQKDPVGLMSRVAQPASKKIDQNKLKPEMDEKGNLTTAGFACSQCGQPLFVYKLEQVSEKGKAYTNYFGRCNVAEHEKLILLAQLKPEKDSDEAVTYSLGKFGQRALDFYSIHVTKESTHPVKPLAQIAGNRYASGPVGKALSDACMGTIASFLSKYQDIIIEHQKVVKGNQKRLESLRELAGKENLEYPSVTLPPQPHTKEGVDAYNEVIARVRMWVNLNLWQKLKLSRDDAKPLLRLKGFPSFPLVERQANEVDWWDMVCNVKKLINEKKEDGKVFWQNLAGYKRQEALRPYLSSEEDRKKGKKFARYQLGDLLLHLEKKHGEDWGKVYDEAWERIDKKVEGLSKHIKLEEERRSEDAQSKAALTDWLRAKASFVIEGLKEADKDEFCRCELKLQKWYGDLRGKPFAIEAENSILDISGFSKQYNCAFIWQKDGVKKLNLYLIINYFKGGKLRFKKIKPEAFEANRFYTVINKKSGEIVPMEVNFNFDDPNLIILPLAFGKRQGREFIWNDLLSLETGSLKLANGRVIEKTLYNRRTRQDEPALFVALTFERREVLDSSNWKPMNLIGVDRGENIPAVIALTDPEGCPLSRFKDSLGNPTHILRIGESYKEKQRTIQAKKEVEQRRAFGYSRKYASKAKNLADDMVRNTARDLLYYAVTQDAMLIFENLSRGFGRQGKRTFMAERQYTRMEDWLTAKLAYEGLPSKTYLSKTLAQYTSKTCSNCGFTITSADYDRVLEKLKKTATGWMTTINGKELKVEGQITYYNRYKRQNVVKDLSVELDRLSEESVNNDISSWTKGRSGEALSLLKKRFSHRPVQEKFVCLNCGFETHADEQAALNIARSWLFLRSQEYKKYQTNKTTGNTDKRAFVETWQSFYRKKLKEVWKPAV

SEQ ID NO: 25031 - protein, 978 aa, synthetic construct
  REGION 1..978: note = engineered CasX variant
QEIKRINKIRRRLVKDSNTKKAGKTGPMKTLLVRVMTPDLRERLENLRKKPENIPQPISNTSRANLNKLLTDYTEMKKAILHVYWEEFQKDPVGLMSRVAQPASKKIDQNKLKPEMDEKGNLTTAGFACSQCGQPLFVYKLEQVSEKGKAYTNYFGRCNVAEHEKLILLAQLKPEKDSDEAVTYSLGKFGQRALDFYSIHVTKESTHPVKPLAQIAGNRYASGPVGKALSDACMGTIASFLSKYQDIIIEHQKVVKGNQKRLESLRELAGKENLEYPSVTLPPQPHTKEGVDAYNEVIARVRMWVNLNLWQKLKLSRDDAKPLLRLKGFPSFPLVERQANEVDWWDMVCNVKKLINEKKEDGKVFWQNLAGYKRQEALRPYLSSEEDRKKGKKFARYQLGDLLLHLEKKHGEDWGKVYDEAWERIDKKVEGLSKHIKLEEERRSEDAQSKAALTDWLRAKASFVIEGLKEADKDEFCRCELKLQKWYGDLRGKPFAIEAENSILDISGFSKQYNCAFIWQKDGVKKLNLYLIINYFKGGKLRFKKIKPEAFEANRFYTVINKKSGEIVPMEVNFNFDDPNLIILPLAFGKRQGREFIWNDLLSLETGSLKLANGRVIEKTLYNRRTRQDEPALFVALTFERREVLDSSNWKPMNLIGVDRGENIPAVIALTDPEGCPLSRFKDSLGNPTHILRIGESFKEKQRTIQAKKEVEQRRAGGYSRKYASKAKNLADDMVRNTARDLLYYAVTQDAMLIFENLSRGFGRQGKRTFMAERQYTRMEDWLTAKLAYEGLPSKTYLSKTLAQYTSKTCSNCGFTITSADYDRVLEKLKKTATGWMTTINGKELKVEGQITYYNRYKRQNVVKDLSVELDRLSEESVNNDISSWTKGRSGEALSLLKKRFSHRPVQEKFVCLNCGFETHADEQAALNIARSWLFLRSQEYKKYQTNKTTGNTDKRAFVETWQSFYRKKLKEVWKPAV

SEQ ID NO: 25032 - protein, 978 aa, synthetic construct
  REGION 1..978: note = engineered CasX variant
QEIKRINKIRRRLVKDSNTKKAGKTGPMKTLLVRVMTPDLRERLENLRKKPENIPQPISNTSRANLNKLLTDYTEMKKAILHVYWEEFQKDPVGLMSRVAQPASKKIDQNKLKPEMDEKGNLTTAGFACSQCGQPLFVYKLEQVSEKGKAYTNYFGRCNVAEHEKLILLAQLKPEKDSDEAVTYSLGKFGQRALDFYSIHVTKESTHPVKPLAQIAGNRYASGPVGKALSDACMGTIASFLSKYQDIIIEHQKVVKGNQKRLESLRELAGKENLEYPSVTLPPQPHTKEGVDAYNEVIARVRMWVNLNLWQKLKLSRDDAKPLLRLKGFPSFPLVERQANEVDWWDMVCNVKKLINEKKEDGKVFWQNLAGYKRQEALRPYLSSEEDRKKGKKFARYQLGDLLLHLEKKHGEDWGKVYDEAWERIDKKVEGLSKHIKLEEERRSEDAQSKAALTDWLRAKASFVIEGLKEADKDEFCRCELKLQKWYGDLRGKPFAIEAENSILDISGFSKQYNCAFIWQKDGVKKLNLYLIINYFKGGKLRFKKIKPEAFEANRFYTVINKKSGEIVPMEVNFNFDDPNLIILPLAFGKRQGREFIWNDLLSLETGSLKLANGRVIEKTLYNRRTRQDEPALFVALTFERREVLDSSNWKPMNLIGVDRGENIPAVIALTDPEGCPLSRFKDSLGNPTHILRIGECYKEKQRTIQAKKEVEQRRAGGYSRKYASKAKNLADDMVRNTARDLLYYAVTQDAMLIFENLSRGFGRQGKRTFMAERQYTRMEDWLTAKLAYEGLPSKTYLSKTLAQYTSKTCSNCGFTITSADYDRVLEKLKKTATGWMTTINGKELKVEGQITYYNRYKRQNVVKDLSVELDRLSEESVNNDISSWTKGRSGEALSLLKKRFSHRPVQEKFVCLNCGFETHADEQAALNIARSWLFLRSQEYKKYQTNKTTGNTDKRAFVETWQSFYRKKLKEVWKPAV

SEQ ID NO: 25033 - protein, 978 aa, synthetic construct
  REGION 1..978: note = engineered CasX variant
QEIKRINKIRRRLVKDSNTKKAGKTGPMKTLLVRVMTPDLRERLENLRKKPENIPQPISNTSRANLNKLLTDYTEMKKAILHVYWEEFQKDPVGLMSRVAQPASKKIDQNKLKPEMDEKGNLTTAGFACSQCGQPLFVYKLEQVSEKGKAYTNYFGRCNVAEHEKLILLAQLKPEKDSDEAVTYSLGKFGQRALDFYSIHVTKESTHPVKPLAQIAGNRYASGPVGKALSDACMGTIASFLSKYQDIIIEHQKVVKGNQKRLESLRELAGKENLEYPSVTLPPQPHTKEGVDAYNEVIARVRMWVNLNLWQKLKLSRDDAKPLLRLKGFPSFPLVERQANEVDWWDMVCNVKKLINEKKEDGKVFWQNLAGYKRQEALRPYLSSEEDRKKGKKFARYQLGDLLLHLEKKHGEDWGKVYDEAWERIDKKVEGLSKHIKLEEERRSEDAQSKAALTDWLRAKASFVIEGLKEADKDEFCRCELKLQKWYGDLRGKPFAIEAENSILDISGFSKQYNCAFIWQKDGVKKLNLYLIINYFKGGKLRFKKIKPEAFEANRFYTVINKKSGEIVPMEVNFNFDDPNLIILPLAFGKRQGREFIWNDLLSLETGSLKLANGRVIEKTLYNRRTRQDEPALFVALTFERREVLDSSNWKPMNLIGVDRGENIPAVIALTDPEGCPLSRFKDSLGNPTHILRFGESYKEKQRTIQAKKEVEQRRAGGYSRKYASKAKNLADDMVRNTARDLLYYAVTQDAMLIFENLSRGFGRQGKRTFMAERQYTRMEDWLTAKLAYEGLPSKTYLSKTLAQYTSKTCSNCGFTITSADYDRVLEKLKKTATGWMTTINGKELKVEGQITYYNRYKRQNVVKDLSVELDRLSEESVNNDISSWTKGRSGEALSLLKKRFSHRPVQEKFVCLNCGFETHADEQAALNIARSWLFLRSQEYKKYQTNKTTGNTDKRAFVETWQSFYRKKLKEVWKPAV

SEQ ID NO: 25034 - protein, 978 aa, synthetic construct
  REGION 1..978: note = engineered CasX variant
QEIKRINKIRRRLVKDSNTKKAGKTGPMKTLLVRVMTPDLRERLENLRKKPENIPQPISNTSRANLNKLLTDYTEMKKAILHVYWEEFQKDPVGLMSRVAQPASKKIDQNKLKPEMDEKGNLTTAGFACSQCGQPLFVYKLEQVSEKGKAYTNYFGRCNVAEHEKLILLAQLKPEKDSDEAVTYSLGKFGQRALDFYSIHVTKESTHPVKPLAQIAGNRYASGPVGKALSDACMGTIASFLSKYQDIIIEHQKVVKGNQKRLESLRELAGKENLEYPSVTLPPQPHTKEGVDAYNEVIARVRMWVNLNLWQKLKLSRDDAKPLLRLKGFPSFPLVERQANEVDWWDMVCNVKKLINEKKEDGKVFWQNLAGYKRQEALRPYLSSEEDRKKGKKFARYQLGDLLLHLEKKHGEDWGKVYDEAWERIDKKVEGLSKHIKLEEERRSEDAQSKAALTDWLRAKASFVIEGLKEADKDEFCRCELKLQKWYGDLRGKPFAIEAENSILDISGFSKQYNCAFIWQKDGVKKLNLYLIINYFKGGKLRFKKIKPEAFEANRFYTVINKKSGEIVPMEVNFNFDDPNLIILPLAFGKRQGREFIWNDLLSLETGSLKLANGRVIEKTLYNRRTRQDEPALFVALTFERREVLDSSNWKPMNLIGVDRGENIPAVIALTDPEGCPLSRFKDSLGNPTHILRFGESYKEKQRTIQAKKEVEQRRAFGYSRKYASKAKNLADDMVRNTARDLLYYAVTQDAMLIFENLSRGFGRQGKRTFMAERQYTRMEDWLTAKLAYEGLPSKTYLSKTLAQYTSKTCSNCGFTITSADYDRVLEKLKKTATGWMTTINGKELKVEGQITYYNRYKRQNVVKDLSVELDRLSEESVNNDISSWTKGRSGEALSLLKKRFSHRPVQEKFVCLNCGFETHADEQAALNIARSWLFLRSQEYKKYQTNKTTGNTDKRAFVETWQSFYRKKLKEVWKPAV

SEQ ID NO: 25035 - protein, 978 aa, synthetic construct
  REGION 1..978: note = engineered CasX variant
QEIKRINKIRRRLVKDSNTKKAGKTGPMKTLLVRVMTPDLRERLENLRKKPENIPQPISNTSRANLNKLLTDYTEMKKAILHVYWEEFQKDPVGLMSRVAQPASKKIDQNKLKPEMDEKGNLTTAGFACSQCGQPLFVYKLEQVSEKGKAYTNYFGRCNVAEHEKLILLAQLKPEKDSDEAVTYSLGKFGQRALDFYSIHVTKESTHPVKPLAQIAGNRYASGPVGKALSDACMGTIASFLSKYQDIIIEHQKVVKGNQKRLESLRELAGKENLEYPSVTLPPQPHTKEGVDAYNEVIARVRMWVNLNLWQKLKLSRDDAKPLLRLKGFPSFPLVERQANEVDWWDMVCNVKKLINEKKEDGKVFWQNLAGYKRQEALRPYLSSEEDRKKGKKFARYQLGDLLLHLEKKHGEDWGKVYDEAWERIDKKVEGLSKHIKLEEERRSEDAQSKAALTDWLRAKASFVIEGLKEADKDEFCRCELKLQKWYGDLRGKPFAIEAENSILDISGFSKQYNCAFIWQKDGVKKLNLYLIINYFKGGKLRFKKIKPEAFEANRFYTVINKKSGEIVPMEVNFNFDDPNLIILPLAFGKRQGREFIWNDLLSLETGSLKLANGRVIEKTLYNRRTRQDEPALFVALTFERREVLDSSNWKPMNLIGVDRGENIPAVIALTDPEGCPLSRFKDSAGNPTHILRIGESYKEKQRTIQAKKEVEQRRLGGYSRKYASKAKNLADDMVRNTARDLLYYAVTQDAMLIFENLSRGFGRQGKRTFMAERQYTRMEDWLTAKLAYEGLPSKTYLSKTLAQYTSKTCSNCGFTITSADYDRVLEKLKKTATGWMTTINGKELKVEGQITYYNRYKRQNVVKDLSVELDRLSEESVNNDISSWTKGRSGEALSLLKKRFSHRPVQEKFVCLNCGFETHADEQAALNIARSWLFLRSQEYKKYQTNKTTGNTDKRAFVETWQSFYRKKLKEVWKPAV

SEQ ID NO: 25036 - protein, 978 aa, synthetic construct
  REGION 1..978: note = engineered CasX variant
QEIKRINKIRRRLVKDSNTKKAGKTGPMKTLLVRVMTPDLRERLENLRKKPENIPQPISNTSRANLNKLLTDYTEMKKAILHVYWEEFQKDPVGLMSRVAQPASKKIDQNKLKPEMDEKGNLTTAGFACSQCGQPLFVYKLEQVSEKGKAYTNYFGRCNVAEHEKLILLAQLKPEKDSDEAVTYSLGKFGQRALDFYSIHVTKESTHPVKPLAQIAGNRYASGPVGKALSDACMGTIASFLSKYQDIIIEHQKVVKGNQKRLESLRELAGKENLEYPSVTLPPQPHTKEGVDAYNEVIARVRMWVNLNLWQKLKLSRDDAKPLLRLKGFPSFPLVERQANEVDWWDMVCNVKKLINEKKEDGKVFWQNLAGYKRQEALRPYLSSEEDRKKGKKFARYQLGDLLLHLEKKHGEDWGKVYDEAWERIDKKVEGLSKHIKLEEERRSEDAQSKAALTDWLRAKASFVIEGLKEADKDEFCRCELKLQKWYGDLRGKPFAIEAENSILDISGFSKQYNCAFIWQKDGVKKLNLYLIINYFKGGKLRFKKIKPEAFEANRFYTVINKKSGEIVPMEVNFNFDDPNLIILPLAFGKRQGREFIWNDLLSLETGSLKLANGRVIEKTLYNRRTRQDEPALFVALTFERREVLDSSNWKPMNLIGVDRGENIPAVIALTDPEGCPLSRFKDSAGNPTHILRIGESYKEKQRTIQAKKEVEQRRAGGYSRKYASKAKNLADDMVRNTARDLLYYAVTQDAMLIFENLSRGFGRQGKRTFMAERQYTRMEDWLTAKLAYEGLPSKTYLSKTLAQYTSKTCSNCGFTITSADYDRVLEKLKKTATGWMTTINGKELKVEGQITYYNRYKRQNVVKDLSVELDRLSEESVNNDISSWTKGRSGEALSLLKKRFSHRPVQEKFVCLNCGFETHADEQAALNIARSWLFLRSQEYKKYQTNKTTGNTDKRAFVETWQSFYRKKLKEVWKPAV

SEQ ID NO: 25037 - protein, 978 aa, synthetic construct
  REGION 1..978: note = engineered CasX variant
QEIKRINKIRRRLVKDSNTKKAGKTGPMKTLLVRVMTPDLRERLENLRKKPENIPQPISNTSRANLNKLLTDYTEMKKAILHVYWEEFQKDPVGLMSRVAQPASKKIDQNKLKPEMDEKGNLTTAGFACSQCGQPLFVYKLEQVSEKGKAYTNYFGRCNVAEHEKLILLAQLKPEKDSDEAVTYSLGKFGQRALDFYSIHVTKESTHPVKPLAQIAGNRYASGPVGKALSDACMGTIASFLSKYQDIIIEHQKVVKGNQKRLESLRELAGKENLEYPSVTLPPQPHTKEGVDAYNEVIARVRMWVNLNLWQKLKLSRDDAKPLLRLKGFPSFPLVERQANEVDWWDMVCNVKKLINEKKEDGKVFWQNLAGYKRQEALRPYLSSEEDRKKGKKFARYQLGDLLLHLEKKHGEDWGKVYDEAWERIDKKVEGLSKHIKLEEERRSEDAQSKAALTDWLRAKASFVIEGLKEADKDEFCRCELKLQKWYGDLRGKPFAIEAENSILDISGFSKQYNCAFIWQKDGVKKLNLYLIINYFKGGKLRFKKIKPEAFEANRFYTVINKKSGEIVPMEVNFNFDDPNLIILPLAFGKRQGREFIWNDLLSLETGSLKLANGRVIEKTLYNRRTRQDEPALFVALTFERREVLDSSNWKPMNLIGVDRGENIPAVIALTDPEGCPLSRFKDHLGNPTHILRIGESYKEKQRTIQAKKEVEQRRLGGYSRKYASKAKNLADDMVRNTARDLLYYAVTQDAMLIFENLSRGFGRQGKRTFMAERQYTRMEDWLTAKLAYEGLPSKTYLSKTLAQYTSKTCSNCGFTITSADYDRVLEKLKKTATGWMTTINGKELKVEGQITYYNRYKRQNVVKDLSVELDRLSEESVNNDISSWTKGRSGEALSLLKKRFSHRPVQEKFVCLNCGFETHADEQAALNIARSWLFLRSQEYKKYQTNKTTGNTDKRAFVETWQSFYRKKLKEVWKPAV

SEQ ID NO: 25038 - protein, 978 aa, synthetic construct
  REGION 1..978: note = engineered CasX variant
QEIKRINKIRRRLVKDSNTKKAGKTGPMKTLLVRVMTPDLRERLENLRKKPENIPQPISNTSRANLNKLLTDYTEMKKAILHVYWEEFQKDPVGLMSRVAQPASKKIDQNKLKPEMDEKGNLTTAGFACSQCGQPLFVYKLEQVSEKGKAYTNYFGRCNVAEHEKLILLAQLKPEKDSDEAVTYSLGKFGQRALDFYSIHVTKESTHPVKPLAQIAGNRYASGPVGKALSDACMGTIASFLSKYQDIIIEHQKVVKGNQKRLESLRELAGKENLEYPSVTLPPQPHTKEGVDAYNEVIARVRMWVNLNLWQKLKLSRDDAKPLLRLKGFPSFPLVERQANEVDWWDMVCNVKKLINEKKEDGKVFWQNLAGYKRQEALRPYLSSEEDRKKGKKFARYQLGDLLLHLEKKHGEDWGKVYDEAWERIDKKVEGLSKHIKLEEERRSEDAQSKAALTDWLRAKASFVIEGLKEADKDEFCRCELKLQKWYGDLRGKPFAIEAENSILDISGFSKQYNCAFIWQKDGVKKLNLYLIINYFKGGKLRFKKIKPEAFEANRFYTVINKKSGEIVPMEVNFNFDDPNLIILPLAFGKRQGREFIWNDLLSLETGSLKLANGRVIEKTLYNRRTRQDEPALFVALTFERREVLDSSNWKPMNLIGVDRGENIPAVIALTDPEGCPLSRFKDHLGNPTHILRIGESYKEKQRTIQAKKEVEQRRAGGYSRKYASKAKNLADDMVRNTARDLLYYAVTQDAMLIFENLSRGFGRQGKRTFMAERQYTRMEDWLTAKLAYEGLPSKTYLSKTLAQYTSKTCSNCGFTITSADYDRVLEKLKKTATGWMTTINGKELKVEGQITYYNRYKRQNVVKDLSVELDRLSEESVNNDISSWTKGRSGEALSLLKKRFSHRPVQEKFVCLNCGFETHADEQAALNIARSWLFLRSQEYKKYQTNKTTGNTDKRAFVETWQSFYRKKLKEVWKPAV

SEQ ID NO: 25039 - protein, 978 aa, synthetic construct
  REGION 1..978: note = engineered CasX variant
QEIKRINKIRRRLVKDSNTKKAGKTGPMKTLLVRVMTPDLRERLENLRKKPENIPQPISNTSRANLNKLLTDYTEMKKAILHVYWEEFQKDPVGLMSRVAQPASKKIDQNKLKPEMDEKGNLTTAGFACSQCGQPLFVYKLEQVSEKGKAYTNYFGRCNVAEHEKLILLAQLKPEKDSDEAVTYSLGKFGQRALDFYSIHVTKESTHPVKPLAQIAGNRYASGPVGKALSDACMGTIASFLSKYQDIIIEHQKVVKGNQKRLESLRELAGKENLEYPSVTLPPQPHTKEGVDAYNEVIARVRMWVNLNLWQKLKLSRDDAKPLLRLKGFPSFPLVERQANEVDWWDMVCNVKKLINEKKEDGKVFWQNLAGYKRQEALRPYLSSEEDRKKGKKFARYQLGDLLLHLEKKHGEDWGKVYDEAWERIDKKVEGLSKHIKLEEERRSEDAQSKAALTDWLRAKASFVIEGLKEADKDEFCRCELKLQKWYGDLRGKPFAIEAENSILDISGFSKQYNCAFIWQKDGVKKLNLYLIINYFKGGKLRFKKIKPEAFEANRFYTVINKKSGEIVPMEVNFNFDDPNLIILPLAFGKRQGREFIWNDLLSLETGSLKLANGRVIEKTLYNRRTRQDEPALFVALTFERREVLDSSNWKPMNLIGVDRGENIPAVIALTDPEGCPLSRFKDHAGNPTHILRIGESYKEKQRTIQAKKEVEQRRAGGYSRKYASKAKNLADDMVRNTARDLLYYAVTQDAMLIFENLSRGFGRQGKRTFMAERQYTRMEDWLTAKLAYEGLPSKTYLSKTLAQYTSKTCSNCGFTITSADYDRVLEKLKKTATGWMTTINGKELKVEGQITYYNRYKRQNVVKDLSVELDRLSEESVNNDISSWTKGRSGEALSLLKKRFSHRPVQEKFVCLNCGFETHADEQAALNIARSWLFLRSQEYKKYQTNKTTGNTDKRAFVETWQSFYRKKLKEVWKPAV

SEQ ID NO: 25040 - protein, 978 aa, synthetic construct
  REGION 1..978: note = engineered CasX variant
QEIKRINKIRRRLVKDSNTKKAGKTGPMKTLLVRVMTPDLRERLENLRKKPENIPQPISNTSRANLNKLLTDYTEMKKAILHVYWEEFQKDPVGLMSRVAQPASKKIDQNKLKPEMDEKGNLTTAGFACSQCGQPLFVYKLEQVSEKGKAYTNYFGRCNVAEHEKLILLAQLKPEKDSDEAVTYSLGKFGQRALDFYSIHVTKESTHPVKPLAQIAGNRYASGPVGKALSDACMGTIASFLSKYQDIIIEHQKVVKGNQKRLESLRELAGKENLEYPSVTLPPQPHTKEGVDAYNEVIARVRMWVNLNLWQKLKLSRDDAKPLLRLKGFPSFPLVERQANEVDWWDMVCNVKKLINEKKEDGKVFWQNLAGYKRQEALRPYLSSEEDRKKGKKFARYQLGDLLLHLEKKHGEDWGKVYDEAWERIDKKVEGLSKHIKLEEERRSEDAQSKAALTDWLRAKASFVIEGLKEADKDEFCRCELKLQKWYGDLRGKPFAIEAENSILDISGFSKQYNCAFIWQKDGVKKLNLYLIINYFKGGKLRFKKIKPEAFEANRFYTVINKKSGEIVPMEVNFNFDDPNLIILPLAFGKRQGREFIWNDLLSLETGSLKLANGRVIEKTLYNRRTRQDEPALFVALTFERREVLDSSNWKPMNLIGVDRGENIPAVIALTDPEGCPLSCFKDSLGNPTHILRIGESYKEKQRTIQAKKEVEQRRAGGYSRKYASKAKNLADDMVRNTARDLLYYAVTQDAMLIFENLSRGFGRQGKRTFMAERQYTRMEDWLTAKLAYEGLPSKTYLSKTLAQYTSKTCSNCGFTITSADYDRVLEKLKKTATGWMTTINGKELKVEGQITYYNRYKRQNVVKDLSVELDRLSEESVNNDISSWTKGRSGEALSLLKKRFSHRPVQEKFVCLNCGFETHADEQAALNIARSWLFLRSQEYKKYQTNKTTGNTDKRAFVETWQSFYRKKLKEVWKPAV

SEQ ID NO: 25041 - protein, 978 aa, synthetic construct
  REGION 1..978: note = engineered CasX variant
QEIKRINKIRRRLVKDSNTKKAGKTGPMKTLLVRVMTPDLRERLENLRKKPENIPQPISNTSRANLNKLLTDYTEMKKAILHVYWEEFQKDPVGLMSRVAQPASKKIDQNKLKPEMDEKGNLTTAGFACSQCGQPLFVYKLEQVSEKGKAYTNYFGRCNVAEHEKLILLAQLKPEKDSDEAVTYSLGKFGQRALDFYSIHVTKESTHPVKPLAQIAGNRYASGPVGKALSDACMGTIASFLSKYQDIIIEHQKVVKGNQKRLESLRELAGKENLEYPSVTLPPQPHTKEGVDAYNEVIARVRMWVNLNLWQKLKLSRDDAKPLLRLKGFPSFPLVERQANEVDWWDMVCNVKKLINEKKEDGKVFWQNLAGYKRQEALRPYLSSEEDRKKGKKFARYQLGDLLLHLEKKHGEDWGKVYDEAWERIDKKVEGLSKHIKLEEERRSEDAQSKAALTDWLRAKASFVIEGLKEADKDEFCRCELKLQKWYGDLRGKPFAIEAENSILDISGFSKQYNCAFIWQKDGVKKLNLYLIINYFKGGKLRFKKIKPEAFEANRFYTVINKKSGEIVPMEVNFNFDDPNLIILPLAFGKRQGREFIWNDLLSLETGSLKLANGRVIEKTLYNRRTRQDEPALFVALTFERREVLDSSNWKPMNLIGVDRGENIPAVIALTDPEGCPLSCFKDHLGNPTHILRIGESYKEKQRTIQAKKEVEQRRAGGYSRKYASKAKNLADDMVRNTARDLLYYAVTQDAMLIFENLSRGFGRQGKRTFMAERQYTRMEDWLTAKLAYEGLPSKTYLSKTLAQYTSKTCSNCGFTITSADYDRVLEKLKKTATGWMTTINGKELKVEGQITYYNRYKRQNVVKDLSVELDRLSEESVNNDISSWTKGRSGEALSLLKKRFSHRPVQEKFVCLNCGFETHADEQAALNIARSWLFLRSQEYKKYQTNKTTGNTDKRAFVETWQSFYRKKLKEVWKPAV

SEQ ID NO: 25042 - protein, 978 aa, synthetic construct
  REGION 1..978: note = engineered CasX variant
QEIKRINKIRRRLVKDSNTKKAGKTGPMKTLLVRVMTPDLRERLENLRKKPENIPQPISNTSRANLNKLLTDYTEMKKAILHVYWEEFQKDPVGLMSRVAQPASKKIDQNKLKPEMDEKGNLTTAGFACSQCGQPLFVYKLEQVSEKGKAYTNYFGRCNVAEHEKLILLAQLKPEKDSDEAVTYSLGKFGQRALDFYSIHVTKESTHPVKPLAQIAGNRYASGPVGKALSDACMGTIASFLSKYQDIIIEHQKVVKGNQKRLESLRELAGKENLEYPSVTLPPQPHTKEGVDAYNEVIARVRMWVNLNLWQKLKLSRDDAKPLLRLKGFPSFPLVERQANEVDWWDMVCNVKKLINEKKEDGKVFWQNLAGYKRQEALRPYLSSEEDRKKGKKFARYQLGDLLLHLEKKHGEDWGKVYDEAWERIDKKVEGLSKHIKLEEERRSEDAQSKAALTDWLRAKASFVIEGLKEADKDEFCRCELKLQKWYGDLRGKPFAIEAENSILDISGFSKQYNCAFIWQKDGVKKLNLYLIINYFKGGKLRFKKIKPEAFEANRFYTVINKKSGEIVPMEVNFNFDDPNLIILPLAFGKRQGREFIWNDLLSLETGSLKLANGRVIEKTLYNRRTRQDEPALFVALTFERREVLDSSNWKPMNLIGVDRGENIPAVIALTDPEGCPLERFKDSLGNPTHILRIGESYKEKQRTIQAKKEVEQRRLGGYSRKYASKAKNLADDMVRNTARDLLYYAVTQDAMLIFENLSRGFGRQGKRTFMAERQYTRMEDWLTAKLAYEGLPSKTYLSKTLAQYTSKTCSNCGFTITSADYDRVLEKLKKTATGWMTTINGKELKVEGQITYYNRYKRQNVVKDLSVELDRLSEESVNNDISSWTKGRSGEALSLLKKRFSHRPVQEKFVCLNCGFETHADEQAALNIARSWLFLRSQEYKKYQTNKTTGNTDKRAFVETWQSFYRKKLKEVWKPAV

SEQ ID NO: 25043 - protein, 978 aa, synthetic construct
  REGION 1..978: note = engineered CasX variant
QEIKRINKIRRRLVKDSNTKKAGKTGPMKTLLVRVMTPDLRERLENLRKKPENIPQPISNTSRANLNKLLTDYTEMKKAILHVYWEEFQKDPVGLMSRVAQPASKKIDQNKLKPEMDEKGNLTTAGFACSQCGQPLFVYKLEQVSEKGKAYTNYFGRCNVAEHEKLILLAQLKPEKDSDEAVTYSLGKFGQRALDFYSIHVTKESTHPVKPLAQIAGNRYASGPVGKALSDACMGTIASFLSKYQDIIIEHQKVVKGNQKRLESLRELAGKENLEYPSVTLPPQPHTKEGVDAYNEVIARVRMWVNLNLWQKLKLSRDDAKPLLRLKGFPSFPLVERQANEVDWWDMVCNVKKLINEKKEDGKVFWQNLAGYKRQEALRPYLSSEEDRKKGKKFARYQLGDLLLHLEKKHGEDWGKVYDEAWERIDKKVEGLSKHIKLEEERRSEDAQSKAALTDWLRAKASFVIEGLKEADKDEFCRCELKLQKWYGDLRGKPFAIEAENSILDISGFSKQYNCAFIWQKDGVKKLNLYLIINYFKGGKLRFKKIKPEAFEANRFYTVINKKSGEIVPMEVNFNFDDPNLIILPLAFGKRQGREFIWNDLLSLETGSLKLANGRVIEKTLYNRRTRQDEPALFVALTFERREVLDSSNWKPMNLIGVDRGENIPAVIALTDPEGCPLERFKDSLGNPTHILRIGESYKEKQRTIQAKKEVEQRRAGGYSRKYASKAKNLADDMVRNTARDLLYYAVTQDAMLIFENLSRGFGRQGKRTFMAERQYTRMEDWLTAKLAYEGLPSKTYLSKTLAQYTSKTCSNCGFTITSADYDRVLEKLKKTATGWMTTINGKELKVEGQITYYNRYKRQNVVKDLSVELDRLSEESVNNDISSWTKGRSGEALSLLKKRFSHRPVQEKFVCLNCGFETHADEQAALNIARSWLFLRSQEYKKYQTNKTTGNTDKRAFVETWQSFYRKKLKEVWKPAV

SEQ ID NO: 25044 - protein, 978 aa, synthetic construct
  REGION 1..978: note = engineered CasX variant
QEIKRINKIRRRLVKDSNTKKAGKTGPMKTLLVRVMTPDLRERLENLRKKPENIPQPISNTSRANLNKLLTDYTEMKKAILHVYWEEFQKDPVGLMSRVAQPASKKIDQNKLKPEMDEKGNLTTAGFACSQCGQPLFVYKLEQVSEKGKAYTNYFGRCNVAEHEKLILLAQLKPEKDSDEAVTYSLGKFGQRALDFYSIHVTKESTHPVKPLAQIAGNRYASGPVGKALSDACMGTIASFLSKYQDIIIEHQKVVKGNQKRLESLRELAGKENLEYPSVTLPPQPHTKEGVDAYNEVIARVRMWVNLNLWQKLKLSRDDAKPLLRLKGFPSFPLVERQANEVDWWDMVCNVKKLINEKKEDGKVFWQNLAGYKRQEALRPYLSSEEDRKKGKKFARYQLGDLLLHLEKKHGEDWGKVYDEAWERIDKKVEGLSKHIKLEEERRSEDAQSKAALTDWLRAKASFVIEGLKEADKDEFCRCELKLQKWYGDLRGKPFAIEAENSILDISGFSKQYNCAFIWQKDGVKKLNLYLIINYFKGGKLRFKKIKPEAFEANRFYTVINKKSGEIVPMEVNFNFDDPNLIILPLAFGKRQGREFIWNDLLSLETGSLKLANGRVIEKTLYNRRTRQDEPALFVALTFERREVLDSSNWKPMNLIGVDRGENIPAVIALTDPEGCPLERFKDSLGNPTHILRIGESYKEKQRTIQAKKEVEQRRAFGYSRKYASKAKNLADDMVRNTARDLLYYAVTQDAMLIFENLSRGFGRQGKRTFMAERQYTRMEDWLTAKLAYEGLPSKTYLSKTLAQYTSKTCSNCGFTITSADYDRVLEKLKKTATGWMTTINGKELKVEGQITYYNRYKRQNVVKDLSVELDRLSEESVNNDISSWTKGRSGEALSLLKKRFSHRPVQEKFVCLNCGFETHADEQAALNIARSWLFLRSQEYKKYQTNKTTGNTDKRAFVETWQSFYRKKLKEVWKPAV

SEQ ID NO: 25045 - protein, 978 aa, synthetic construct
  REGION 1..978: note = engineered CasX variant
QEIKRINKIRRRLVKDSNTKKAGKTGPMKTLLVRVMTPDLRERLENLRKKPENIPQPISNTSRANLNKLLTDYTEMKKAILHVYWEEFQKDPVGLMSRVAQPASKKIDQNKLKPEMDEKGNLTTAGFACSQCGQPLFVYKLEQVSEKGKAYTNYFGRCNVAEHEKLILLAQLKPEKDSDEAVTYSLGKFGQRALDFYSIHVTKESTHPVKPLAQIAGNRYASGPVGKALSDACMGTIASFLSKYQDIIIEHQKVVKGNQKRLESLRELAGKENLEYPSVTLPPQPHTKEGVDAYNEVIARVRMWVNLNLWQKLKLSRDDAKPLLRLKGFPSFPLVERQANEVDWWDMVCNVKKLINEKKEDGKVFWQNLAGYKRQEALRPYLSSEEDRKKGKKFARYQLGDLLLHLEKKHGEDWGKVYDEAWERIDKKVEGLSKHIKLEEERRSEDAQSKAALTDWLRAKASFVIEGLKEADKDEFCRCELKLQKWYGDLRGKPFAIEAENSILDISGFSKQYNCAFIWQKDGVKKLNLYLIINYFKGGKLRFKKIKPEAFEANRFYTVINKKSGEIVPMEVNFNFDDPNLIILPLAFGKRQGREFIWNDLLSLETGSLKLANGRVIEKTLYNRRTRQDEPALFVALTFERREVLDSSNWKPMNLIGVDRGENIPAVIALTDPEGCPLERFKDSLGNPTHILRIGECYKEKQRTIQAKKEVEQRRAGGYSRKYASKAKNLADDMVRNTARDLLYYAVTQDAMLIFENLSRGFGRQGKRTFMAERQYTRMEDWLTAKLAYEGLPSKTYLSKTLAQYTSKTCSNCGFTITSADYDRVLEKLKKTATGWMTTINGKELKVEGQITYYNRYKRQNVVKDLSVELDRLSEESVNNDISSWTKGRSGEALSLLKKRFSHRPVQEKFVCLNCGFETHADEQAALNIARSWLFLRSQEYKKYQTNKTTGNTDKRAFVETWQSFYRKKLKEVWKPAV

SEQ ID NO: 25046 - protein, 978 aa, synthetic construct
  REGION 1..978: note = engineered CasX variant
QEIKRINKIRRRLVKDSNTKKAGKTGPMKTLLVRVMTPDLRERLENLRKKPENIPQPISNTSRANLNKLLTDYTEMKKAILHVYWEEFQKDPVGLMSRVAQPASKKIDQNKLKPEMDEKGNLTTAGFACSQCGQPLFVYKLEQVSEKGKAYTNYFGRCNVAEHEKLILLAQLKPEKDSDEAVTYSLGKFGQRALDFYSIHVTKESTHPVKPLAQIAGNRYASGPVGKALSDACMGTIASFLSKYQDIIIEHQKVVKGNQKRLESLRELAGKENLEYPSVTLPPQPHTKEGVDAYNEVIARVRMWVNLNLWQKLKLSRDDAKPLLRLKGFPSFPLVERQANEVDWWDMVCNVKKLINEKKEDGKVFWQNLAGYKRQEALRPYLSSEEDRKKGKKFARYQLGDLLLHLEKKHGEDWGKVYDEAWERIDKKVEGLSKHIKLEEERRSEDAQSKAALTDWLRAKASFVIEGLKEADKDEFCRCELKLQKWYGDLRGKPFAIEAENSILDISGFSKQYNCAFIWQKDGVKKLNLYLIINYFKGGKLRFKKIKPEAFEANRFYTVINKKSGEIVPMEVNFNFDDPNLIILPLAFGKRQGREFIWNDLLSLETGSLKLANGRVIEKTLYNRRTRQDEPALFVALTFERREVLDSSNWKPMNLIGVDRGENIPAVIALTDPEGCPLERFKDSAGNPTHILRIGESYKEKQRTIQAKKEVEQRRAGGYSRKYASKAKNLADDMVRNTARDLLYYAVTQDAMLIFENLSRGFGRQGKRTFMAERQYTRMEDWLTAKLAYEGLPSKTYLSKTLAQYTSKTCSNCGFTITSADYDRVLEKLKKTATGWMTTINGKELKVEGQITYYNRYKRQNVVKDLSVELDRLSEESVNNDISSWTKGRSGEALSLLKKRFSHRPVQEKFVCLNCGFETHADEQAALNIARSWLFLRSQEYKKYQTNKTTGNTDKRAFVETWQSFYRKKLKEVWKPAV

SEQ ID NO: 25047 - protein, 978 aa, synthetic construct
  REGION 1..978: note = engineered CasX variant
QEIKRINKIRRRLVKDSNTKKAGKTGPMKTLLVRVMTPDLRERLENLRKKPENIPQPISNTSRANLNKLLTDYTEMKKAILHVYWEEFQKDPVGLMSRVAQPASKKIDQNKLKPEMDEKGNLTTAGFACSQCGQPLFVYKLEQVSEKGKAYTNYFGRCNVAEHEKLILLAQLKPEKDSDEAVTYSLGKFGQRALDFYSIHVTKESTHPVKPLAQIAGNRYASGPVGKALSDACMGTIASFLSKYQDIIIEHQKVVKGNQKRLESLRELAGKENLEYPSVTLPPQPHTKEGVDAYNEVIARVRMWVNLNLWQKLKLSRDDAKPLLRLKGFPSFPLVERQANEVDWWDMVCNVKKLINEKKEDGKVFWQNLAGYKRQEALRPYLSSEEDRKKGKKFARYQLGDLLLHLEKKHGEDWGKVYDEAWERIDKKVEGLSKHIKLEEERRSEDAQSKAALTDWLRAKASFVIEGLKEADKDEFCRCELKLQKWYGDLRGKPFAIEAENSILDISGFSKQYNCAFIWQKDGVKKLNLYLIINYFKGGKLRFKKIKPEAFEANRFYTVINKKSGEIVPMEVNFNFDDPNLIILPLAFGKRQGREFIWNDLLSLETGSLKLANGRVIEKTLYNRRTRQDEPALFVALTFERREVLDSSNVKPMNLIGVDRGENIPAVIALTDPEGLPLSRFKDSLGNPTHILRIGESYKEKQRTIQAKKEVEQRRAGGYSRKYASKAKNLADDMVRNTARDLLYYAVTQDAMLIFENLSRGFGRQGKRTFMAERQYTRMEDWLTAKLAYEGLPSKTYLSKTLAQYTSKTCSNCGFTITSADYDRVLEKLKKTATGWMTTINGKELKVEGQITYYNRYKRQNVVKDLSVELDRLSEESVNNDISSWTKGRSGEALSLLKKRFSHRPVQEKFVCLNCGFETHADEQAALNIARSWLFLRSQEYKKYQTNKTTGNTDKRAFVETWQSFYRKKLKEVWKPAV

SEQ ID NO: 25048 - protein, 978 aa, synthetic construct
  REGION 1..978: note = engineered CasX variant
QEIKRINKIRRRLVKDSNTKKAGKTGPMKTLLVRVMTPDLRERLENLRKKPENIPQPISNTSRANLNKLLTDYTEMKKAILHVYWEEFQKDPVGLMSRVAQPASKKIDQNKLKPEMDEKGNLTTAGFACSQCGQPLFVYKLEQVSEKGKAYTNYFGRCNVAEHEKLILLAQLKPEKDSDEAVTYSLGKFGQRALDFYSIHVTKESTHPVKPLAQIAGNRYASGPVGKALSDACMGTIASFLSKYQDIIIEHQKVVKGNQKRLESLRELAGKENLEYPSVTLPPQPHTKEGVDAYNEVIARVRMWVNLNLWQKLKLSRDDAKPLLRLKGFPSFPLVERQANEVDWWDMVCNVKKLINEKKEDGKVFWQNLAGYKRQEALRPYLSSEEDRKKGKKFARYQLGDLLLHLEKKHGEDWGKVYDEAWERIDKKVEGLSKHIKLEEERRSEDAQSKAALTDWLRAKASFVIEGLKEADKDEFCRCELKLQKWYGDLRGKPFAIEAENSILDISGFSKQYNCAFIWQKDGVKKLNLYLIINYFKGGKLRFKKIKPEAFEANRFYTVINKKSGEIVPMEVNFNFDDPNLIILPLAFGKRQGREFIWNDLLSLETGSLKLANGRVIEKTLYNRRTRQDEPALFVALTFERREVLDSSNVKPMNLIGVDRGENIPAVIALTDPEGCPLSRFKDSLGNPTHILRIGESYKEKQRTIQASKEVEQRRAGGYSRKYASKAKNLADDMVRNTARDLLYYAVTQDAMLIFENLSRGFGRQGKRTFMAERQYTRMEDWLTAKLAYEGLPSKTYLSKTLAQYTSKTCSNCGFTITSADYDRVLEKLKKTATGWMTTINGKELKVEGQITYYNRYKRQNVVKDLSVELDRLSEESVNNDISSWTKGRSGEALSLLKKRFSHRPVQEKFVCLNCGFETHADEQAALNIARSWLFLRSQEYKKYQTNKTTGNTDKRAFVETWQSFYRKKLKEVWKPAV

SEQ ID NO: 25049 - protein, 978 aa, synthetic construct
  REGION 1..978: note = engineered CasX variant
QEIKRINKIRRRLVKDSNTKKAGKTGPMKTLLVRVMTPDLRERLENLRKKPENIPQPISNTSRANLNKLLTDYTEMKKAILHVYWEEFQKDPVGLMSRVAQPASKKIDQNKLKPEMDEKGNLTTAGFACSQCGQPLFVYKLEQVSEKGKAYTNYFGRCNVAEHEKLILLAQLKPEKDSDEAVTYSLGKFGQRALDFYSIHVTKESTHPVKPLAQIAGNRYASGPVGKALSDACMGTIASFLSKYQDIIIEHQKVVKGNQKRLESLRELAGKENLEYPSVTLPPQPHTKEGVDAYNEVIARVRMWVNLNLWQKLKLSRDDAKPLLRLKGFPSFPLVERQANEVDWWDMVCNVKKLINEKKEDGKVFWQNLAGYKRQEALRPYLSSEEDRKKGKKFARYQLGDLLLHLEKKHGEDWGKVYDEAWERIDKKVEGLSKHIKLEEERRSEDAQSKAALTDWLRAKASFVIEGLKEADKDEFCRCELKLQKWYGDLRGKPFAIEAENSILDISGFSKQYNCAFIWQKDGVKKLNLYLIINYFKGGKLRFKKIKPEAFEANRFYTVINKKSGEIVPMEVNFNFDDPNLIILPLAFGKRQGREFIWNDLLSLETGSLKLANGRVIEKTLYNRRTRQDEPALFVALTFERREVLDSSNVKPMNLIGVDRGENIPAVIALTDPEGCPLSRFKDSLGNPTHILRIGESYKEKQRTIQAKKEVEQRRAGGYSRKYASKAKNLADDMVRNTARDLLYYAVTQDAMLIFENLSRGFGRQGKRTFMAERQYTRMEDWLTAKLAYEGLPSKTYLSKTLAQYTSKTCSNCGFTITSADYDRVLEKLKKTATGWMTTINGKELKVEGQITYYNRYKRQNVVKDLSVELDRLSEESVNNDISSWTKGRSGEALSLLKKRFSHRPVQEKFVCLNCGFETHADEQAALNIARSWLFLRSQEYKKYQTNKTTGNTDKRAFVETWQSFYRKKLKEVWKPAV

SEQ ID NO: 25050 - protein, 978 aa, synthetic construct
  REGION 1..978: note = engineered CasX variant
QEIKRINKIRRRLVKDSNTKKAGKTGPMKTLLVRVMTPDLRERLENLRKKPENIPQPISNTSRANLNKLLTDYTEMKKAILHVYWEEFQKDPVGLMSRVAQPASKKIDQNKLKPEMDEKGNLTTAGFACSQCGQPLFVYKLEQVSEKGKAYTNYFGRCNVAEHEKLILLAQLKPEKDSDEAVTYSLGKFGQRALDFYSIHVTKESTHPVKPLAQIAGNRYASGPVGKALSDACMGTIASFLSKYQDIIIEHQKVVKGNQKRLESLRELAGKENLEYPSVTLPPQPHTKEGVDAYNEVIARVRMWVNLNLWQKLKLSRDDAKPLLRLKGFPSFPLVERQANEVDWWDMVCNVKKLINEKKEDGKVFWQNLAGYKRQEALRPYLSSEEDRKKGKKFARYQLGDLLLHLEKKHGEDWGKVYDEAWERIDKKVEGLSKHIKLEEERRSEDAQSKAALTDWLRAKASFVIEGLKEADKDEFCRCELKLQKWYGDLRGKPFAIEAENSILDISGFSKQYNCAFIWQKDGVKKLNLYLIINYFKGGKLRFKKIKPEAFEANRFYTVINKKSGEIVPMEVNFNFDDPNLIILPLAFGKRQGREFIWNDLLSLETGSLKLANGRVIEKTLYNRRTRQDEPALFVALTFERREVLDSSNVKPMNLIGVDRGENIPAVIALTDPEGCPLSRFKDSLGNPTHILRIGESYKEKQRTFQASKEVEQRRAGGYSRKYASKAKNLADDMVRNTARDLLYYAVTQDAMLIFENLSRGFGRQGKRTFMAERQYTRMEDWLTAKLAYEGLPSKTYLSKTLAQYTSKTCSNCGFTITSADYDRVLEKLKKTATGWMTTINGKELKVEGQITYYNRYKRQNVVKDLSVELDRLSEESVNNDISSWTKGRSGEALSLLKKRFSHRPVQEKFVCLNCGFETHADEQAALNIARSWLFLRSQEYKKYQTNKTTGNTDKRAFVETWQSFYRKKLKEVWKPAV

SEQ ID NO: 25051 - protein, 978 aa, synthetic construct
  REGION 1..978: note = engineered CasX variant
QEIKRINKIRRRLVKDSNTKKAGKTGPMKTLLVRVMTPDLRERLENLRKKPENIPQPISNTSRANLNKLLTDYTEMKKAILHVYWEEFQKDPVGLMSRVAQPASKKIDQNKLKPEMDEKGNLTTAGFACSQCGQPLFVYKLEQVSEKGKAYTNYFGRCNVAEHEKLILLAQLKPEKDSDEAVTYSLGKFGQRALDFYSIHVTKESTHPVKPLAQIAGNRYASGPVGKALSDACMGTIASFLSKYQDIIIEHQKVVKGNQKRLESLRELAGKENLEYPSVTLPPQPHTKEGVDAYNEVIARVRMWVNLNLWQKLKLSRDDAKPLLRLKGFPSFPLVERQANEVDWWDMVCNVKKLINEKKEDGKVFWQNLAGYKRQEALRPYLSSEEDRKKGKKFARYQLGDLLLHLEKKHGEDWGKVYDEAWERIDKKVEGLSKHIKLEEERRSEDAQSKAALTDWLRAKASFVIEGLKEADKDEFCRCELKLQKWYGDLRGKPFAIEAENSILDISGFSKQYNCAFIWQKDGVKKLNLYLIINYFKGGKLRFKKIKPEAFEANRFYTVINKKSGEIVPMEVNFNFDDPNLIILPLAFGKRQGREFIWNDLLSLETGSLKLANGRVIEKTLYNRRTRQDEPALFVALTFERREVLDSSNVKPMNLIGVDRGENIPAVIALTDPEGCPLSRFKDSLGNPTHILRIGESYKEKQRTFQAKKEVEQRRAGGYSRKYASKAKNLADDMVRNTARDLLYYAVTQDAMLIFENLSRGFGRQGKRTFMAERQYTRMEDWLTAKLAYEGLPSKTYLSKTLAQYTSKTCSNCGFTITSADYDRVLEKLKKTATGWMTTINGKELKVEGQITYYNRYKRQNVVKDLSVELDRLSEESVNNDISSWTKGRSGEALSLLKKRFSHRPVQEKFVCLNCGFETHADEQAALNIARSWLFLRSQEYKKYQTNKTTGNTDKRAFVETWQSFYRKKLKEVWKPAV

SEQ ID NO: 25052 - protein, 978 aa, synthetic construct
  REGION 1..978: note = engineered CasX variant
QEIKRINKIRRRLVKDSNTKKAGKTGPMKTLLVRVMTPDLRERLENLRKKPENIPQPISNTSRANLNKLLTDYTEMKKAILHVYWEEFQKDPVGLMSRVAQPASKKIDQNKLKPEMDEKGNLTTAGFACSQCGQPLFVYKLEQVSEKGKAYTNYFGRCNVAEHEKLILLAQLKPEKDSDEAVTYSLGKFGQRALDFYSIHVTKESTHPVKPLAQIAGNRYASGPVGKALSDACMGTIASFLSKYQDIIIEHQKVVKGNQKRLESLRELAGKENLEYPSVTLPPQPHTKEGVDAYNEVIARVRMWVNLNLWQKLKLSRDDAKPLLRLKGFPSFPLVERQANEVDWWDMVCNVKKLINEKKEDGKVFWQNLAGYKRQEALRPYLSSEEDRKKGKKFARYQLGDLLLHLEKKHGEDWGKVYDEAWERIDKKVEGLSKHIKLEEERRSEDAQSKAALTDWLRAKASFVIEGLKEADKDEFCRCELKLQKWYGDLRGKPFAIEAENSILDISGFSKQYNCAFIWQKDGVKKLNLYLIINYFKGGKLRFKKIKPEAFEANRFYTVINKKSGEIVPMEVNFNFDDPNLIILPLAFGKRQGREFIWNDLLSLETGSLKLANGRVIEKTLYNRRTRQDEPALFVALTFERREVLDSSNVKPMNLIGVDRGENIPAVIALTDPEGCPLSRFKDSLGNPTHILRIGESYKEKQNTIQAKKEVEQRRAGGYSRKYASKAKNLADDMVRNTARDLLYYAVTQDAMLIFENLSRGFGRQGKRTFMAERQYTRMEDWLTAKLAYEGLPSKTYLSKTLAQYTSKTCSNCGFTITSADYDRVLEKLKKTATGWMTTINGKELKVEGQITYYNRYKRQNVVKDLSVELDRLSEESVNNDISSWTKGRSGEALSLLKKRFSHRPVQEKFVCLNCGFETHADEQAALNIARSWLFLRSQEYKKYQTNKTTGNTDKRAFVETWQSFYRKKLKEVWKPAV

SEQ ID NO: 25053 - protein, 978 aa, synthetic construct
  REGION 1..978: note = engineered CasX variant
QEIKRINKIRRRLVKDSNTKKAGKTGPMKTLLVRVMTPDLRERLENLRKKPENIPQPISNTSRANLNKLLTDYTEMKKAILHVYWEEFQKDPVGLMSRVAQPASKKIDQNKLKPEMDEKGNLTTAGFACSQCGQPLFVYKLEQVSEKGKAYTNYFGRCNVAEHEKLILLAQLKPEKDSDEAVTYSLGKFGQRALDFYSIHVTKESTHPVKPLAQIAGNRYASGPVGKALSDACMGTIASFLSKYQDIIIEHQKVVKGNQKRLESLRELAGKENLEYPSVTLPPQPHTKEGVDAYNEVIARVRMWVNLNLWQKLKLSRDDAKPLLRLKGFPSFPLVERQANEVDWWDMVCNVKKLINEKKEDGKVFWQNLAGYKRQEALRPYLSSEEDRKKGKKFARYQLGDLLLHLEKKHGEDWGKVYDEAWERIDKKVEGLSKHIKLEEERRSEDAQSKAALTDWLRAKASFVIEGLKEADKDEFCRCELKLQKWYGDLRGKPFAIEAENSILDISGFSKQYNCAFIWQKDGVKKLNLYLIINYFKGGKLRFKKIKPEAFEANRFYTVINKKSGEIVPMEVNFNFDDPNLIILPLAFGKRQGREFIWNDLLSLETGSLKLANGRVIEKTLYNRRTRQDEPALFVALTFERREVLDSSNVKPMNLIGVDRGENIPAVIALTDPEGCPLSRFKDSLGNPTHILRIGESCKEKQRTIQAKKEVEQRRAGGYSRKYASKAKNLADDMVRNTARDLLYYAVTQDAMLIFENLSRGFGRQGKRTFMAERQYTRMEDWLTAKLAYEGLPSKTYLSKTLAQYTSKTCSNCGFTITSADYDRVLEKLKKTATGWMTTINGKELKVEGQITYYNRYKRQNVVKDLSVELDRLSEESVNNDISSWTKGRSGEALSLLKKRFSHRPVQEKFVCLNCGFETHADEQAALNIARSWLFLRSQEYKKYQTNKTTGNTDKRAFVETWQSFYRKKLKEVWKPAV

SEQ ID NO: 25054 - protein, 978 aa, synthetic construct
  REGION 1..978: note = engineered CasX variant
QEIKRINKIRRRLVKDSNTKKAGKTGPMKTLLVRVMTPDLRERLENLRKKPENIPQPISNTSRANLNKLLTDYTEMKKAILHVYWEEFQKDPVGLMSRVAQPASKKIDQNKLKPEMDEKGNLTTAGFACSQCGQPLFVYKLEQVSEKGKAYTNYFGRCNVAEHEKLILLAQLKPEKDSDEAVTYSLGKFGQRALDFYSIHVTKESTHPVKPLAQIAGNRYASGPVGKALSDACMGTIASFLSKYQDIIIEHQKVVKGNQKRLESLRELAGKENLEYPSVTLPPQPHTKEGVDAYNEVIARVRMWVNLNLWQKLKLSRDDAKPLLRLKGFPSFPLVERQANEVDWWDMVCNVKKLINEKKEDGKVFWQNLAGYKRQEALRPYLSSEEDRKKGKKFARYQLGDLLLHLEKKHGEDWGKVYDEAWERIDKKVEGLSKHIKLEEERRSEDAQSKAALTDWLRAKASFVIEGLKEADKDEFCRCELKLQKWYGDLRGKPFAIEAENSILDISGFSKQYNCAFIWQKDGVKKLNLYLIINYFKGGKLRFKKIKPEAFEANRFYTVINKKSGEIVPMEVNFNFDDPNLIILPLAFGKRQGREFIWNDLLSLETGSLKLANGRVIEKTLYNRRTRQDEPALFVALTFERREVLDSSNVKPMNLIGVDRGENIPAVIALTDPEGCPLSRFKDSAGNPTHILRIGESYKEKQRTIQAKKEVEQRRAGGYSRKYASKAKNLADDMVRNTARDLLYYAVTQDAMLIFENLSRGFGRQGKRTFMAERQYTRMEDWLTAKLAYEGLPSKTYLSKTLAQYTSKTCSNCGFTITSADYDRVLEKLKKTATGWMTTINGKELKVEGQITYYNRYKRQNVVKDLSVELDRLSEESVNNDISSWTKGRSGEALSLLKKRFSHRPVQEKFVCLNCGFETHADEQAALNIARSWLFLRSQEYKKYQTNKTTGNTDKRAFVETWQSFYRKKLKEVWKPAV

SEQ ID NO: 25055 - protein, 978 aa, synthetic construct
  REGION 1..978: note = engineered CasX variant
QEIKRINKIRRRLVKDSNTKKAGKTGPMKTLLVRVMTPDLRERLENLRKKPENIPQPISNTSRANLNKLLTDYTEMKKAILHVYWEEFQKDPVGLMSRVAQPASKKIDQNKLKPEMDEKGNLTTAGFACSQCGQPLFVYKLEQVSEKGKAYTNYFGRCNVAEHEKLILLAQLKPEKDSDEAVTYSLGKFGQRALDFYSIHVTKESTHPVKPLAQIAGNRYASGPVGKALSDACMGTIASFLSKYQDIIIEHQKVVKGNQKRLESLRELAGKENLEYPSVTLPPQPHTKEGVDAYNEVIARVRMWVNLNLWQKLKLSRDDAKPLLRLKGFPSFPLVERQANEVDWWDMVCNVKKLINEKKEDGKVFWQNLAGYKRQEALRPYLSSEEDRKKGKKFARYQLGDLLLHLEKKHGEDWGKVYDEAWERIDKKVEGLSKHIKLEEERRSEDAQSKAALTDWLRAKASFVIEGLKEADKDEFCRCELKLQKWYGDLRGKPFAIEAENSILDISGFSKQYNCAFIWQKDGVKKLNLYLIINYFKGGKLRFKKIKPEAFEANRFYTVINKKSGEIVPMEVNFNFDDPNLIILPLAFGKRQGREFIWNDLLSLETGSLKLANGRVIEKTLYNRRTRQDEPALFVALTFERREVLDSSNTKPMNLIGVDRGENIPAVIALTDPEGCPLSYFKDSLGNPTHILRIGESYKEKQRTIQAKKEVEQRRAGGYSRKYASKAKNLADDMVRNTARDLLYYAVTQDAMLIFENLSRGFGRQGKRTFMAERQYTRMEDWLTAKLAYEGLPSKTYLSKTLAQYTSKTCSNCGFTITSADYDRVLEKLKKTATGWMTTINGKELKVEGQITYYNRYKRQNVVKDLSVELDRLSEESVNNDISSWTKGRSGEALSLLKKRFSHRPVQEKFVCLNCGFETHADEQAALNIARSWLFLRSQEYKKYQTNKTTGNTDKRAFVETWQSFYRKKLKEVWKPAV

SEQ ID NO: 25056 - protein, 978 aa, synthetic construct
  REGION 1..978: note = engineered CasX variant
QEIKRINKIRRRLVKDSNTKKAGKTGPMKTLLVRVMTPDLRERLENLRKKPENIPQPISNTSRANLNKLLTDYTEMKKAILHVYWEEFQKDPVGLMSRVAQPASKKIDQNKLKPEMDEKGNLTTAGFACSQCGQPLFVYKLEQVSEKGKAYTNYFGRCNVAEHEKLILLAQLKPEKDSDEAVTYSLGKFGQRALDFYSIHVTKESTHPVKPLAQIAGNRYASGPVGKALSDACMGTIASFLSKYQDIIIEHQKVVKGNQKRLESLRELAGKENLEYPSVTLPPQPHTKEGVDAYNEVIARVRMWVNLNLWQKLKLSRDDAKPLLRLKGFPSFPLVERQANEVDWWDMVCNVKKLINEKKEDGKVFWQNLAGYKRQEALRPYLSSEEDRKKGKKFARYQLGDLLLHLEKKHGEDWGKVYDEAWERIDKKVEGLSKHIKLEEERRSEDAQSKAALTDWLRAKASFVIEGLKEADKDEFCRCELKLQKWYGDLRGKPFAIEAENSILDISGFSKQYNCAFIWQKDGVKKLNLYLIINYFKGGKLRFKKIKPEAFEANRFYTVINKKSGEIVPMEVNFNFDDPNLIILPLAFGKRQGREFIWNDLLSLETGSLKLANGRVIEKTLYNRRTRQDEPALFVALTFERREVLDSSNTKPMNLIGVDRGENIPAVIALTDPEGCPLSYFKDSLGNPTHILRIDESYKEKQRTIQAKKEVEQRRAGGYSRKYASKAKNLADDMVRNTARDLLYYAVTQDAMLIFENLSRGFGRQGKRTFMAERQYTRMEDWLTAKLAYEGLPSKTYLSKTLAQYTSKTCSNCGFTITSADYDRVLEKLKKTATGWMTTINGKELKVEGQITYYNRYKRQNVVKDLSVELDRLSEESVNNDISSWTKGRSGEALSLLKKRFSHRPVQEKFVCLNCGFETHADEQAALNIARSWLFLRSQEYKKYQTNKTTGNTDKRAFVETWQSFYRKKLKEVWKPAV

SEQ ID NO: 25057 - protein, 978 aa, synthetic construct
  REGION 1..978: note = engineered CasX variant
QEIKRINKIRRRLVKDSNTKKAGKTGPMKTLLVRVMTPDLRERLENLRKKPENIPQPISNTSRANLNKLLTDYTEMKKAILHVYWEEFQKDPVGLMSRVAQPASKKIDQNKLKPEMDEKGNLTTAGFACSQCGQPLFVYKLEQVSEKGKAYTNYFGRCNVAEHEKLILLAQLKPEKDSDEAVTYSLGKFGQRALDFYSIHVTKESTHPVKPLAQIAGNRYASGPVGKALSDACMGTIASFLSKYQDIIIEHQKVVKGNQKRLESLRELAGKENLEYPSVTLPPQPHTKEGVDAYNEVIARVRMWVNLNLWQKLKLSRDDAKPLLRLKGFPSFPLVERQANEVDWWDMVCNVKKLINEKKEDGKVFWQNLAGYKRQEALRPYLSSEEDRKKGKKFARYQLGDLLLHLEKKHGEDWGKVYDEAWERIDKKVEGLSKHIKLEEERRSEDAQSKAALTDWLRAKASFVIEGLKEADKDEFCRCELKLQKWYGDLRGKPFAIEAENSILDISGFSKQYNCAFIWQKDGVKKLNLYLIINYFKGGKLRFKKIKPEAFEANRFYTVINKKSGEIVPMEVNFNFDDPNLIILPLAFGKRQGREFIWNDLLSLETGSLKLANGRVIEKTLYNRRTRQDEPALFVALTFERREVLDSSNTKPMNLIGVDRGENIPAVIALTDPEGCPLSRFYDSLGNPTHILRIGESYKVKQRTIQAKKEVEQRRAGGYSRKYASKAKNLADDMVRNTARDLLYYAVTQDAMLIFENLSRGFGRQGKRTFMAERQYTRMEDWLTAKLAYEGLPSKTYLSKTLAQYTSKTCSNCGFTITSADYDRVLEKLKKTATGWMTTINGKELKVEGQITYYNRYKRQNVVKDLSVELDRLSEESVNNDISSWTKGRSGEALSLLKKRFSHRPVQEKFVCLNCGFETHADEQAALNIARSWLFLRSQEYKKYQTNKTTGNTDKRAFVETWQSFYRKKLKEVWKPAV

SEQ ID NO: 25058 - protein, 978 aa, synthetic construct
  REGION 1..978: note = engineered CasX variant
QEIKRINKIRRRLVKDSNTKKAGKTGPMKTLLVRVMTPDLRERLENLRKKPENIPQPISNTSRANLNKLLTDYTEMKKAILHVYWEEFQKDPVGLMSRVAQPASKKIDQNKLKPEMDEKGNLTTAGFACSQCGQPLFVYKLEQVSEKGKAYTNYFGRCNVAEHEKLILLAQLKPEKDSDEAVTYSLGKFGQRALDFYSIHVTKESTHPVKPLAQIAGNRYASGPVGKALSDACMGTIASFLSKYQDIIIEHQKVVKGNQKRLESLRELAGKENLEYPSVTLPPQPHTKEGVDAYNEVIARVRMWVNLNLWQKLKLSRDDAKPLLRLKGFPSFPLVERQANEVDWWDMVCNVKKLINEKKEDGKVFWQNLAGYKRQEALRPYLSSEEDRKKGKKFARYQLGDLLLHLEKKHGEDWGKVYDEAWERIDKKVEGLSKHIKLEEERRSEDAQSKAALTDWLRAKASFVIEGLKEADKDEFCRCELKLQKWYGDLRGKPFAIEAENSILDISGFSKQYNCAFIWQKDGVKKLNLYLIINYFKGGKLRFKKIKPEAFEANRFYTVINKKSGEIVPMEVNFNFDDPNLIILPLAFGKRQGREFIWNDLLSLETGSLKLANGRVIEKTLYNRRTRQDEPALFVALTFERREVLDSSNTKPMNLIGVDRGENIPAVIALTDPEGCPLSRFYDSLGNPTHILRIGESYKEKQRTIQAKKEVEQRRAGGYSRKYASKAKNLADDMVRNTARDLLYYAVTQDAMLIFENLSRGFGRQGKRTFMAERQYTRMEDWLTAKLAYEGLPSKTYLSKTLAQYTSKTCSNCGFTITSADYDRVLEKLKKTATGWMTTINGKELKVEGQITYYNRYKRQNVVKDLSVELDRLSEESVNNDISSWTKGRSGEALSLLKKRFSHRPVQEKFVCLNCGFETHADEQAALNIARSWLFLRSQEYKKYQTNKTTGNTDKRAFVETWQSFYRKKLKEVWKPAV

SEQ ID NO: 25059 - protein, 978 aa, synthetic construct
  REGION 1..978: note = engineered CasX variant
QEIKRINKIRRRLVKDSNTKKAGKTGPMKTLLVRVMTPDLRERLENLRKKPENIPQPISNTSRANLNKLLTDYTEMKKAILHVYWEEFQKDPVGLMSRVAQPASKKIDQNKLKPEMDEKGNLTTAGFACSQCGQPLFVYKLEQVSEKGKAYTNYFGRCNVAEHEKLILLAQLKPEKDSDEAVTYSLGKFGQRALDFYSIHVTKESTHPVKPLAQIAGNRYASGPVGKALSDACMGTIASFLSKYQDIIIEHQKVVKGNQKRLESLRELAGKENLEYPSVTLPPQPHTKEGVDAYNEVIARVRMWVNLNLWQKLKLSRDDAKPLLRLKGFPSFPLVERQANEVDWWDMVCNVKKLINEKKEDGKVFWQNLAGYKRQEALRPYLSSEEDRKKGKKFARYQLGDLLLHLEKKHGEDWGKVYDEAWERIDKKVEGLSKHIKLEEERRSEDAQSKAALTDWLRAKASFVIEGLKEADKDEFCRCELKLQKWYGDLRGKPFAIEAENSILDISGFSKQYNCAFIWQKDGVKKLNLYLIINYFKGGKLRFKKIKPEAFEANRFYTVINKKSGEIVPMEVNFNFDDPNLIILPLAFGKRQGREFIWNDLLSLETGSLKLANGRVIEKTLYNRRTRQDEPALFVALTFERREVLDSSNTKPMNLIGVDRGENIPAVIALTDPEGCPLSRFTDSLGNPTHILRIGESYKEKQRTIQAKKEVEQRRAGGYSRKYASKAKNLADDMVRNTARDLLYYAVTQDAMLIFENLSRGFGRQGKRTFMAERQYTRMEDWLTAKLAYEGLPSKTYLSKTLAQYTSKTCSNCGFTITSADYDRVLEKLKKTATGWMTTINGKELKVEGQITYYNRYKRQNVVKDLSVELDRLSEESVNNDISSWTKGRSGEALSLLKKRFSHRPVQEKFVCLNCGFETHADEQAALNIARSWLFLRSQEYKKYQTNKTTGNTDKRAFVETWQSFYRKKLKEVWKPAV

SEQ ID NO: 25060 - protein, 978 aa, synthetic construct
  REGION 1..978: note = engineered CasX variant
QEIKRINKIRRRLVKDSNTKKAGKTGPMKTLLVRVMTPDLRERLENLRKKPENIPQPISNTSRANLNKLLTDYTEMKKAILHVYWEEFQKDPVGLMSRVAQPASKKIDQNKLKPEMDEKGNLTTAGFACSQCGQPLFVYKLEQVSEKGKAYTNYFGRCNVAEHEKLILLAQLKPEKDSDEAVTYSLGKFGQRALDFYSIHVTKESTHPVKPLAQIAGNRYASGPVGKALSDACMGTIASFLSKYQDIIIEHQKVVKGNQKRLESLRELAGKENLEYPSVTLPPQPHTKEGVDAYNEVIARVRMWVNLNLWQKLKLSRDDAKPLLRLKGFPSFPLVERQANEVDWWDMVCNVKKLINEKKEDGKVFWQNLAGYKRQEALRPYLSSEEDRKKGKKFARYQLGDLLLHLEKKHGEDWGKVYDEAWERIDKKVEGLSKHIKLEEERRSEDAQSKAALTDWLRAKASFVIEGLKEADKDEFCRCELKLQKWYGDLRGKPFAIEAENSILDISGFSKQYNCAFIWQKDGVKKLNLYLIINYFKGGKLRFKKIKPEAFEANRFYTVINKKSGEIVPMEVNFNFDDPNLIILPLAFGKRQGREFIWNDLLSLETGSLKLANGRVIEKTLYNRRTRQDEPALFVALTFERREVLDSSNTKPMNLIGVDRGENIPAVIALTDPEGCPLSRFKDSWGNPTHILRIGESYKMKQRTIQAKKEVEQRRAGGYSRKYASKAKNLADDMVRNTARDLLYYAVTQDAMLIFENLSRGFGRQGKRTFMAERQYTRMEDWLTAKLAYEGLPSKTYLSKTLAQYTSKTCSNCGFTITSADYDRVLEKLKKTATGWMTTINGKELKVEGQITYYNRYKRQNVVKDLSVELDRLSEESVNNDISSWTKGRSGEALSLLKKRFSHRPVQEKFVCLNCGFETHADEQAALNIARSWLFLRSQEYKKYQTNKTTGNTDKRAFVETWQSFYRKKLKEVWKPAV

SEQ ID NO: 25061 - protein, 978 aa, synthetic construct
  REGION 1..978: note = engineered CasX variant
QEIKRINKIRRRLVKDSNTKKAGKTGPMKTLLVRVMTPDLRERLENLRKKPENIPQPISNTSRANLNKLLTDYTEMKKAILHVYWEEFQKDPVGLMSRVAQPASKKIDQNKLKPEMDEKGNLTTAGFACSQCGQPLFVYKLEQVSEKGKAYTNYFGRCNVAEHEKLILLAQLKPEKDSDEAVTYSLGKFGQRALDFYSIHVTKESTHPVKPLAQIAGNRYASGPVGKALSDACMGTIASFLSKYQDIIIEHQKVVKGNQKRLESLRELAGKENLEYPSVTLPPQPHTKEGVDAYNEVIARVRMWVNLNLWQKLKLSRDDAKPLLRLKGFPSFPLVERQANEVDWWDMVCNVKKLINEKKEDGKVFWQNLAGYKRQEALRPYLSSEEDRKKGKKFARYQLGDLLLHLEKKHGEDWGKVYDEAWERIDKKVEGLSKHIKLEEERRSEDAQSKAALTDWLRAKASFVIEGLKEADKDEFCRCELKLQKWYGDLRGKPFAIEAENSILDISGFSKQYNCAFIWQKDGVKKLNLYLIINYFKGGKLRFKKIKPEAFEANRFYTVINKKSGEIVPMEVNFNFDDPNLIILPLAFGKRQGREFIWNDLLSLETGSLKLANGRVIEKTLYNRRTRQDEPALFVALTFERREVLDSSNTKPMNLIGVDRGENIPAVIALTDPEGCPLSRFKDSWGNPTHILRIGESYKEKQRTIQAKKEVEQRRAGGYSRKYASKAKNLADDMVRNTARDLLYYAVTQDAMLIFENLSRGFGRQGKRTFMAERQYTRMEDWLTAKLAYEGLPSKTYLSKTLAQYTSKTCSNCGFTITSADYDRVLEKLKKTATGWMTTINGKELKVEGQITYYNRYKRQNVVKDLSVELDRLSEESVNNDISSWTKGRSGEALSLLKKRFSHRPVQEKFVCLNCGFETHADEQAALNIARSWLFLRSQEYKKYQTNKTTGNTDKRAFVETWQSFYRKKLKEVWKPAV

SEQ ID NO: 25062 - protein, 978 aa, synthetic construct
  REGION 1..978: note = engineered CasX variant
QEIKRINKIRRRLVKDSNTKKAGKTGPMKTLLVRVMTPDLRERLENLRKKPENIPQPISNTSRANLNKLLTDYTEMKKAILHVYWEEFQKDPVGLMSRVAQPASKKIDQNKLKPEMDEKGNLTTAGFACSQCGQPLFVYKLEQVSEKGKAYTNYFGRCNVAEHEKLILLAQLKPEKDSDEAVTYSLGKFGQRALDFYSIHVTKESTHPVKPLAQIAGNRYASGPVGKALSDACMGTIASFLSKYQDIIIEHQKVVKGNQKRLESLRELAGKENLEYPSVTLPPQPHTKEGVDAYNEVIARVRMWVNLNLWQKLKLSRDDAKPLLRLKGFPSFPLVERQANEVDWWDMVCNVKKLINEKKEDGKVFWQNLAGYKRQEALRPYLSSEEDRKKGKKFARYQLGDLLLHLEKKHGEDWGKVYDEAWERIDKKVEGLSKHIKLEEERRSEDAQSKAALTDWLRAKASFVIEGLKEADKDEFCRCELKLQKWYGDLRGKPFAIEAENSILDISGFSKQYNCAFIWQKDGVKKLNLYLIINYFKGGKLRFKKIKPEAFEANRFYTVINKKSGEIVPMEVNFNFDDPNLIILPLAFGKRQGREFIWNDLLSLETGSLKLANGRVIEKTLYNRRTRQDEPALFVALTFERREVLDSSNTKPMNLIGVDRGENIPAVIALTDPEGCPLSRFKDSLGNPTHILRIGESYKYKQRTIQAKKEVEQRRAGGYSRKYASKAKNLADDMVRNTARDLLYYAVTQDAMLIFENLSRGFGRQGKRTFMAERQYTRMEDWLTAKLAYEGLPSKTYLSKTLAQYTSKTCSNCGFTITSADYDRVLEKLKKTATGWMTTINGKELKVEGQITYYNRYKRQNVVKDLSVELDRLSEESVNNDISSWTKGRSGEALSLLKKRFSHRPVQEKFVCLNCGFETHADEQAALNIARSWLFLRSQEYKKYQTNKTTGNTDKRAFVETWQSFYRKKLKEVWKPAV

SEQ ID NO: 25063 - protein, 978 aa, synthetic construct
  REGION 1..978: note = engineered CasX variant
QEIKRINKIRRRLVKDSNTKKAGKTGPMKTLLVRVMTPDLRERLENLRKKPENIPQPISNTSRANLNKLLTDYTEMKKAILHVYWEEFQKDPVGLMSRVAQPASKKIDQNKLKPEMDEKGNLTTAGFACSQCGQPLFVYKLEQVSEKGKAYTNYFGRCNVAEHEKLILLAQLKPEKDSDEAVTYSLGKFGQRALDFYSIHVTKESTHPVKPLAQIAGNRYASGPVGKALSDACMGTIASFLSKYQDIIIEHQKVVKGNQKRLESLRELAGKENLEYPSVTLPPQPHTKEGVDAYNEVIARVRMWVNLNLWQKLKLSRDDAKPLLRLKGFPSFPLVERQANEVDWWDMVCNVKKLINEKKEDGKVFWQNLAGYKRQEALRPYLSSEEDRKKGKKFARYQLGDLLLHLEKKHGEDWGKVYDEAWERIDKKVEGLSKHIKLEEERRSEDAQSKAALTDWLRAKASFVIEGLKEADKDEFCRCELKLQKWYGDLRGKPFAIEAENSILDISGFSKQYNCAFIWQKDGVKKLNLYLIINYFKGGKLRFKKIKPEAFEANRFYTVINKKSGEIVPMEVNFNFDDPNLIILPLAFGKRQGREFIWNDLLSLETGSLKLANGRVIEKTLYNRRTRQDEPALFVALTFERREVLDSSNTKPMNLIGVDRGENIPAVIALTDPEGCPLSRFKDSLGNPTHILRIGESYKVKQRTIQAKKEVEQRRAGGYSRKYASKAKNLADDMVRNTARDLLYYAVTQDAMLIFENLSRGFGRQGKRTFMAERQYTRMEDWLTAKLAYEGLPSKTYLSKTLAQYTSKTCSNCGFTITSADYDRVLEKLKKTATGWMTTINGKELKVEGQITYYNRYKRQNVVKDLSVELDRLSEESVNNDISSWTKGRSGEALSLLKKRFSHRPVQEKFVCLNCGFETHADEQAALNIARSWLFLRSQEYKKYQTNKTTGNTDKRAFVETWQSFYRKKLKEVWKPAV

SEQ ID NO: 25064 - protein, 978 aa, synthetic construct
  REGION 1..978: note = engineered CasX variant
QEIKRINKIRRRLVKDSNTKKAGKTGPMKTLLVRVMTPDLRERLENLRKKPENIPQPISNTSRANLNKLLTDYTEMKKAILHVYWEEFQKDPVGLMSRVAQPASKKIDQNKLKPEMDEKGNLTTAGFACSQCGQPLFVYKLEQVSEKGKAYTNYFGRCNVAEHEKLILLAQLKPEKDSDEAVTYSLGKFGQRALDFYSIHVTKESTHPVKPLAQIAGNRYASGPVGKALSDACMGTIASFLSKYQDIIIEHQKVVKGNQKRLESLRELAGKENLEYPSVTLPPQPHTKEGVDAYNEVIARVRMWVNLNLWQKLKLSRDDAKPLLRLKGFPSFPLVERQANEVDWWDMVCNVKKLINEKKEDGKVFWQNLAGYKRQEALRPYLSSEEDRKKGKKFARYQLGDLLLHLEKKHGEDWGKVYDEAWERIDKKVEGLSKHIKLEEERRSEDAQSKAALTDWLRAKASFVIEGLKEADKDEFCRCELKLQKWYGDLRGKPFAIEAENSILDISGFSKQYNCAFIWQKDGVKKLNLYLIINYFKGGKLRFKKIKPEAFEANRFYTVINKKSGEIVPMEVNFNFDDPNLIILPLAFGKRQGREFIWNDLLSLETGSLKLANGRVIEKTLYNRRTRQDEPALFVALTFERREVLDSSNTKPMNLIGVDRGENIPAVIALTDPEGCPLSRFKDSLGNPTHILRIGESYKNKQRTIQAKKEVEQRRAGGYSRKYASKAKNLADDMVRNTARDLLYYAVTQDAMLIFENLSRGFGRQGKRTFMAERQYTRMEDWLTAKLAYEGLPSKTYLSKTLAQYTSKTCSNCGFTITSADYDRVLEKLKKTATGWMTTINGKELKVEGQITYYNRYKRQNVVKDLSVELDRLSEESVNNDISSWTKGRSGEALSLLKKRFSHRPVQEKFVCLNCGFETHADEQAALNIARSWLFLRSQEYKKYQTNKTTGNTDKRAFVETWQSFYRKKLKEVWKPAV

SEQ ID NO: 25065 - protein, 978 aa, synthetic construct
  REGION 1..978: note = engineered CasX variant
QEIKRINKIRRRLVKDSNTKKAGKTGPMKTLLVRVMTPDLRERLENLRKKPENIPQPISNTSRANLNKLLTDYTEMKKAILHVYWEEFQKDPVGLMSRVAQPASKKIDQNKLKPEMDEKGNLTTAGFACSQCGQPLFVYKLEQVSEKGKAYTNYFGRCNVAEHEKLILLAQLKPEKDSDEAVTYSLGKFGQRALDFYSIHVTKESTHPVKPLAQIAGNRYASGPVGKALSDACMGTIASFLSKYQDIIIEHQKVVKGNQKRLESLRELAGKENLEYPSVTLPPQPHTKEGVDAYNEVIARVRMWVNLNLWQKLKLSRDDAKPLLRLKGFPSFPLVERQANEVDWWDMVCNVKKLINEKKEDGKVFWQNLAGYKRQEALRPYLSSEEDRKKGKKFARYQLGDLLLHLEKKHGEDWGKVYDEAWERIDKKVEGLSKHIKLEEERRSEDAQSKAALTDWLRAKASFVIEGLKEADKDEFCRCELKLQKWYGDLRGKPFAIEAENSILDISGFSKQYNCAFIWQKDGVKKLNLYLIINYFKGGKLRFKKIKPEAFEANRFYTVINKKSGEIVPMEVNFNFDDPNLIILPLAFGKRQGREFIWNDLLSLETGSLKLANGRVIEKTLYNRRTRQDEPALFVALTFERREVLDSSNTKPMNLIGVDRGENIPAVIALTDPEGCPLSRFKDSLGNPTHILRIGESYKMKQRTIQAKKEVEQRRAGGYSRKYASKAKNLADDMVRNTARDLLYYAVTQDAMLIFENLSRGFGRQGKRTFMAERQYTRMEDWLTAKLAYEGLPSKTYLSKTLAQYTSKTCSNCGFTITSADYDRVLEKLKKTATGWMTTINGKELKVEGQITYYNRYKRQNVVKDLSVELDRLSEESVNNDISSWTKGRSGEALSLLKKRFSHRPVQEKFVCLNCGFETHADEQAALNIARSWLFLRSQEYKKYQTNKTTGNTDKRAFVETWQSFYRKKLKEVWKPAV

SEQ ID NO: 25066 - protein, 978 aa, synthetic construct
  REGION 1..978: note = engineered CasX variant
QEIKRINKIRRRLVKDSNTKKAGKTGPMKTLLVRVMTPDLRERLENLRKKPENIPQPISNTSRANLNKLLTDYTEMKKAILHVYWEEFQKDPVGLMSRVAQPASKKIDQNKLKPEMDEKGNLTTAGFACSQCGQPLFVYKLEQVSEKGKAYTNYFGRCNVAEHEKLILLAQLKPEKDSDEAVTYSLGKFGQRALDFYSIHVTKESTHPVKPLAQIAGNRYASGPVGKALSDACMGTIASFLSKYQDIIIEHQKVVKGNQKRLESLRELAGKENLEYPSVTLPPQPHTKEGVDAYNEVIARVRMWVNLNLWQKLKLSRDDAKPLLRLKGFPSFPLVERQANEVDWWDMVCNVKKLINEKKEDGKVFWQNLAGYKRQEALRPYLSSEEDRKKGKKFARYQLGDLLLHLEKKHGEDWGKVYDEAWERIDKKVEGLSKHIKLEEERRSEDAQSKAALTDWLRAKASFVIEGLKEADKDEFCRCELKLQKWYGDLRGKPFAIEAENSILDISGFSKQYNCAFIWQKDGVKKLNLYLIINYFKGGKLRFKKIKPEAFEANRFYTVINKKSGEIVPMEVNFNFDDPNLIILPLAFGKRQGREFIWNDLLSLETGSLKLANGRVIEKTLYNRRTRQDEPALFVALTFERREVLDSSNTKPMNLIGVDRGENIPAVIALTDPEGCPLSRFKDSLGNPTHILRIGESYKEKQRTIQAKKEVEQRRAGGYSRKYASKAKNLADDMVRNTARDLLYYAVTQDAMLIFENLSRGFGRQGKRTFMAERQYTRMEDWLTAKLAYEGLPSKTYLSKTLAQYTSKTCSNCGFTITSADYDRVLEKLKKTATGWMTTINGKELKVEGQITYYNRYKRQNVVKDLSVELDRLSEESVNNDISSWTKGRSGEALSLLKKRFSHRPVQEKFVCLNCGFETHADEQAALNIARSWLFLRSQEYKKYQTNKTTGNTDKRAFVETWQSFYRKKLKEVWKPAV

SEQ ID NO: 25067 - protein, 978 aa, synthetic construct
  REGION 1..978: note = engineered CasX variant
QEIKRINKIRRRLVKDSNTKKAGKTGPMKTLLVRVMTPDLRERLENLRKKPENIPQPISNTSRANLNKLLTDYTEMKKAILHVYWEEFQKDPVGLMSRVAQPASKKIDQNKLKPEMDEKGNLTTAGFACSQCGQPLFVYKLEQVSEKGKAYTNYFGRCNVAEHEKLILLAQLKPEKDSDEAVTYSLGKFGQRALDFYSIHVTKESTHPVKPLAQIAGNRYASGPVGKALSDACMGTIASFLSKYQDIIIEHQKVVKGNQKRLESLRELAGKENLEYPSVTLPPQPHTKEGVDAYNEVIARVRMWVNLNLWQKLKLSRDDAKPLLRLKGFPSFPLVERQANEVDWWDMVCNVKKLINEKKEDGKVFWQNLAGYKRQEALRPYLSSEEDRKKGKKFARYQLGDLLLHLEKKHGEDWGKVYDEAWERIDKKVEGLSKHIKLEEERRSEDAQSKAALTDWLRAKASFVIEGLKEADKDEFCRCELKLQKWYGDLRGKPFAIEAENSILDISGFSKQYNCAFIWQKDGVKKLNLYLIINYFKGGKLRFKKIKPEAFEANRFYTVINKKSGEIVPMEVNFNFDDPNLIILPLAFGKRQGREFIWNDLLSLETGSLKLANGRVIEKTLYNRRTRQDEPALFVALTFERREVLDSSNTKPMNLIGVDRGENIPAVIALTDPEGCPLSRFKDSLGNPTHILRIGESYKEKQRTIGAKKEVEQRRAGGYSRKYASKAKNLADDMVRNTARDLLYYAVTQDAMLIFENLSRGFGRQGKRTFMAERQYTRMEDWLTAKLAYEGLPSKTYLSKTLAQYTSKTCSNCGFTITSADYDRVLEKLKKTATGWMTTINGKELKVEGQITYYNRYKRQNVVKDLSVELDRLSEESVNNDISSWTKGRSGEALSLLKKRFSHRPVQEKFVCLNCGFETHADEQAALNIARSWLFLRSQEYKKYQTNKTTGNTDKRAFVETWQSFYRKKLKEVWKPAV

SEQ ID NO: 25068 - protein, 978 aa, synthetic construct
  REGION 1..978: note = engineered CasX variant
QEIKRINKIRRRLVKDSNTKKAGKTGPMKTLLVRVMTPDLRERLENLRKKPENIPQPISNTSRANLNKLLTDYTEMKKAILHVYWEEFQKDPVGLMSRVAQPASKKIDQNKLKPEMDEKGNLTTAGFACSQCGQPLFVYKLEQVSEKGKAYTNYFGRCNVAEHEKLILLAQLKPEKDSDEAVTYSLGKFGQRALDFYSIHVTKESTHPVKPLAQIAGNRYASGPVGKALSDACMGTIASFLSKYQDIIIEHQKVVKGNQKRLESLRELAGKENLEYPSVTLPPQPHTKEGVDAYNEVIARVRMWVNLNLWQKLKLSRDDAKPLLRLKGFPSFPLVERQANEVDWWDMVCNVKKLINEKKEDGKVFWQNLAGYKRQEALRPYLSSEEDRKKGKKFARYQLGDLLLHLEKKHGEDWGKVYDEAWERIDKKVEGLSKHIKLEEERRSEDAQSKAALTDWLRAKASFVIEGLKEADKDEFCRCELKLQKWYGDLRGKPFAIEAENSILDISGFSKQYNCAFIWQKDGVKKLNLYLIINYFKGGKLRFKKIKPEAFEANRFYTVINKKSGEIVPMEVNFNFDDPNLIILPLAFGKRQGREFIWNDLLSLETGSLKLANGRVIEKTLYNRRTRQDEPALFVALTFERREVLDSSNTKPMNLIGVDRGENIPAVIALTDPEGCPLSRFKDSLGNPTHILRIDESYKEKQRTIQAKKEVEQRRAGGYSRKYASKAKNLADDMVRNTARDLLYYAVTQDAMLIFENLSRGFGRQGKRTFMAERQYTRMEDWLTAKLAYEGLPSKTYLSKTLAQYTSKTCSNCGFTITSADYDRVLEKLKKTATGWMTTINGKELKVEGQITYYNRYKRQNVVKDLSVELDRLSEESVNNDISSWTKGRSGEALSLLKKRFSHRPVQEKFVCLNCGFETHADEQAALNIARSWLFLRSQEYKKYQTNKTTGNTDKRAFVETWQSFYRKKLKEVWKPAV

SEQ ID NO: 25069 - protein, 978 aa, synthetic construct
  REGION 1..978: note = engineered CasX variant
QEIKRINKIRRRLVKDSNTKKAGKTGPMKTLLVRVMTPDLRERLENLRKKPENIPQPISNTSRANLNKLLTDYTEMKKAILHVYWEEFQKDPVGLMSRVAQPASKKIDQNKLKPEMDEKGNLTTAGFACSQCGQPLFVYKLEQVSEKGKAYTNYFGRCNVAEHEKLILLAQLKPEKDSDEAVTYSLGKFGQRALDFYSIHVTKESTHPVKPLAQIAGNRYASGPVGKALSDACMGTIASFLSKYQDIIIEHQKVVKGNQKRLESLRELAGKENLEYPSVTLPPQPHTKEGVDAYNEVIARVRMWVNLNLWQKLKLSRDDAKPLLRLKGFPSFPLVERQANEVDWWDMVCNVKKLINEKKEDGKVFWQNLAGYKRQEALRPYLSSEEDRKKGKKFARYQLGDLLLHLEKKHGEDWGKVYDEAWERIDKKVEGLSKHIKLEEERRSEDAQSKAALTDWLRAKASFVIEGLKEADKDEFCRCELKLQKWYGDLRGKPFAIEAENSILDISGFSKQYNCAFIWQKDGVKKLNLYLIINYFKGGKLRFKKIKPEAFEANRFYTVINKKSGEIVPMEVNFNFDDPNLIILPLAFGKRQGREFIWNDLLSLETGSLKLANGRVIEKTLYNRRTRQDEPALFVALTFERREVLDSSNTKPMNLIGVDRGENIPAVIALTDPEGCPLSCFKDSLGNPTHILRIGESYKYKQRTIQAKKEVEQRRAGGYSRKYASKAKNLADDMVRNTARDLLYYAVTQDAMLIFENLSRGFGRQGKRTFMAERQYTRMEDWLTAKLAYEGLPSKTYLSKTLAQYTSKTCSNCGFTITSADYDRVLEKLKKTATGWMTTINGKELKVEGQITYYNRYKRQNVVKDLSVELDRLSEESVNNDISSWTKGRSGEALSLLKKRFSHRPVQEKFVCLNCGFETHADEQAALNIARSWLFLRSQEYKKYQTNKTTGNTDKRAFVETWQSFYRKKLKEVWKPAV

SEQ ID NO: 25070 - protein, 978 aa, synthetic construct
  REGION 1..978: note = engineered CasX variant
QEIKRINKIRRRLVKDSNTKKAGKTGPMKTLLVRVMTPDLRERLENLRKKPENIPQPISNTSRANLNKLLTDYTEMKKAILHVYWEEFQKDPVGLMSRVAQPASKKIDQNKLKPEMDEKGNLTTAGFACSQCGQPLFVYKLEQVSEKGKAYTNYFGRCNVAEHEKLILLAQLKPEKDSDEAVTYSLGKFGQRALDFYSIHVTKESTHPVKPLAQIAGNRYASGPVGKALSDACMGTIASFLSKYQDIIIEHQKVVKGNQKRLESLRELAGKENLEYPSVTLPPQPHTKEGVDAYNEVIARVRMWVNLNLWQKLKLSRDDAKPLLRLKGFPSFPLVERQANEVDWWDMVCNVKKLINEKKEDGKVFWQNLAGYKRQEALRPYLSSEEDRKKGKKFARYQLGDLLLHLEKKHGEDWGKVYDEAWERIDKKVEGLSKHIKLEEERRSEDAQSKAALTDWLRAKASFVIEGLKEADKDEFCRCELKLQKWYGDLRGKPFAIEAENSILDISGFSKQYNCAFIWQKDGVKKLNLYLIINYFKGGKLRFKKIKPEAFEANRFYTVINKKSGEIVPMEVNFNFDDPNLIILPLAFGKRQGREFIWNDLLSLETGSLKLANGRVIEKTLYNRRTRQDEPALFVALTFERREVLDSSNTKPMNLIGVDRGENIPAVIALTDPEGCPLSCFKDSLGNPTHILRIGESYKNKQRTIQAKKEVEQRRAGGYSRKYASKAKNLADDMVRNTARDLLYYAVTQDAMLIFENLSRGFGRQGKRTFMAERQYTRMEDWLTAKLAYEGLPSKTYLSKTLAQYTSKTCSNCGFTITSADYDRVLEKLKKTATGWMTTINGKELKVEGQITYYNRYKRQNVVKDLSVELDRLSEESVNNDISSWTKGRSGEALSLLKKRFSHRPVQEKFVCLNCGFETHADEQAALNIARSWLFLRSQEYKKYQTNKTTGNTDKRAFVETWQSFYRKKLKEVWKPAV

SEQ ID NO: 25071 - protein, 978 aa, synthetic construct
  REGION 1..978: note = engineered CasX variant
QEIKRINKIRRRLVKDSNTKKAGKTGPMKTLLVRVMTPDLRERLENLRKKPENIPQPISNTSRANLNKLLTDYTEMKKAILHVYWEEFQKDPVGLMSRVAQPASKKIDQNKLKPEMDEKGNLTTAGFACSQCGQPLFVYKLEQVSEKGKAYTNYFGRCNVAEHEKLILLAQLKPEKDSDEAVTYSLGKFGQRALDFYSIHVTKESTHPVKPLAQIAGNRYASGPVGKALSDACMGTIASFLSKYQDIIIEHQKVVKGNQKRLESLRELAGKENLEYPSVTLPPQPHTKEGVDAYNEVIARVRMWVNLNLWQKLKLSRDDAKPLLRLKGFPSFPLVERQANEVDWWDMVCNVKKLINEKKEDGKVFWQNLAGYKRQEALRPYLSSEEDRKKGKKFARYQLGDLLLHLEKKHGEDWGKVYDEAWERIDKKVEGLSKHIKLEEERRSEDAQSKAALTDWLRAKASFVIEGLKEADKDEFCRCELKLQKWYGDLRGKPFAIEAENSILDISGFSKQYNCAFIWQKDGVKKLNLYLIINYFKGGKLRFKKIKPEAFEANRFYTVINKKSGEIVPMEVNFNFDDPNLIILPLAFGKRQGREFIWNDLLSLETGSLKLANGRVIEKTLYNRRTRQDEPALFVALTFERREVLDSSNTKPMNLIGVDRGENIPAVIALTDPEGCPLSCFKDSLGNPTHILRIGESYKEKQRTIQAKKEVEQRRAGGYSRKYASKAKNLADDMVRNTARDLLYYAVTQDAMLIFENLSRGFGRQGKRTFMAERQYTRMEDWLTAKLAYEGLPSKTYLSKTLAQYTSKTCSNCGFTITSADYDRVLEKLKKTATGWMTTINGKELKVEGQITYYNRYKRQNVVKDLSVELDRLSEESVNNDISSWTKGRSGEALSLLKKRFSHRPVQEKFVCLNCGFETHADEQAALNIARSWLFLRSQEYKKYQTNKTTGNTDKRAFVETWQSFYRKKLKEVWKPAV

SEQ ID NO: 25072 - protein, 978 aa, synthetic construct
  REGION 1..978: note = engineered CasX variant
QEIKRINKIRRRLVKDSNTKKAGKTGPMKTLLVRVMTPDLRERLENLRKKPENIPQPISNTSRANLNKLLTDYTEMKKAILHVYWEEFQKDPVGLMSRVAQPASKKIDQNKLKPEMDEKGNLTTAGFACSQCGQPLFVYKLEQVSEKGKAYTNYFGRCNVAEHEKLILLAQLKPEKDSDEAVTYSLGKFGQRALDFYSIHVTKESTHPVKPLAQIAGNRYASGPVGKALSDACMGTIASFLSKYQDIIIEHQKVVKGNQKRLESLRELAGKENLEYPSVTLPPQPHTKEGVDAYNEVIARVRMWVNLNLWQKLKLSRDDAKPLLRLKGFPSFPLVERQANEVDWWDMVCNVKKLINEKKEDGKVFWQNLAGYKRQEALRPYLSSEEDRKKGKKFARYQLGDLLLHLEKKHGEDWGKVYDEAWERIDKKVEGLSKHIKLEEERRSEDAQSKAALTDWLRAKASFVIEGLKEADKDEFCRCELKLQKWYGDLRGKPFAIEAENSILDISGFSKQYNCAFIWQKDGVKKLNLYLIINYFKGGKLRFKKIKPEAFEANRFYTVINKKSGEIVPMEVNFNFDDPNLIILPLAFGKRQGREFIWNDLLSLETGSLKLANGRVIEKTLYNRRTRQDEPALFVALTFERREVLDSSNTKPMNLIGVDRGENIPAVIALTDPEGCPESRFKDSLGNPTHILRIGESYKEKQRTIQAKKEVEQRRAGGYSRKYASKAKNLADDMVRNTARDLLYYAVTQDAMLIFENLSRGFGRQGKRTFMAERQYTRMEDWLTAKLAYEGLPSKTYLSKTLAQYTSKTCSNCGFTITSADYDRVLEKLKKTATGWMTTINGKELKVEGQITYYNRYKRQNVVKDLSVELDRLSEESVNNDISSWTKGRSGEALSLLKKRFSHRPVQEKFVCLNCGFETHADEQAALNIARSWLFLRSQEYKKYQTNKTTGNTDKRAFVETWQSFYRKKLKEVWKPAV

SEQ ID NO: 25073 - protein, 978 aa, synthetic construct
  REGION 1..978: note = engineered CasX variant
QEIKRINKIRRRLVKDSNTKKAGKTGPMKTLLVRVMTPDLRERLENLRKKPENIPQPISNTSRANLNKLLTDYTEMKKAILHVYWEEFQKDPVGLMSRVAQPASKKIDQNKLKPEMDEKGNLTTAGFACSQCGQPLFVYKLEQVSEKGKAYTNYFGRCNVAEHEKLILLAQLKPEKDSDEAVTYSLGKFGQRALDFYSIHVTKESTHPVKPLAQIAGNRYASGPVGKALSDACMGTIASFLSKYQDIIIEHQKVVKGNQKRLESLRELAGKENLEYPSVTLPPQPHTKEGVDAYNEVIARVRMWVNLNLWQKLKLSRDDAKPLLRLKGFPSFPLVERQANEVDWWDMVCNVKKLINEKKEDGKVFWQNLAGYKRQEALRPYLSSEEDRKKGKKFARYQLGDLLLHLEKKHGEDWGKVYDEAWERIDKKVEGLSKHIKLEEERRSEDAQSKAALTDWLRAKASFVIEGLKEADKDEFCRCELKLQKWYGDLRGKPFAIEAENSILDISGFSKQYNCAFIWQKDGVKKLNLYLIINYFKGGKLRFKKIKPEAFEANRFYTVINKKSGEIVPMEVNFNFDDPNLIILPLAFGKRQGREFIWNDLLSLETGSLKLANGRVIEKTLYNRRTRQDEPALFVALTFERREVLDSSNSKPMNLIGVDRGENIPAVIALTNPEGCPLSRFKDSLGNPTHILRIGESYKEKQRTIQAKKEVEQRRAGGYSRKYASKAKNLADDMVRNTARDLLYYAVTQDAMLIFENLSRGFGRQGKRTFMAERQYTRMEDWLTAKLAYEGLPSKTYLSKTLAQYTSKTCSNCGFTITSADYDRVLEKLKKTATGWMTTINGKELKVEGQITYYNRYKRQNVVKDLSVELDRLSEESVNNDISSWTKGRSGEALSLLKKRFSHRPVQEKFVCLNCGFETHADEQAALNIARSWLFLRSQEYKKYQTNKTTGNTDKRAFVETWQSFYRKKLKEVWKPAV

SEQ ID NO: 25074 - protein, 978 aa, synthetic construct
  REGION 1..978: note = engineered CasX variant
QEIKRINKIRRRLVKDSNTKKAGKTGPMKTLLVRVMTPDLRERLENLRKKPENIPQPISNTSRANLNKLLTDYTEMKKAILHVYWEEFQKDPVGLMSRVAQPASKKIDQNKLKPEMDEKGNLTTAGFACSQCGQPLFVYKLEQVSEKGKAYTNYFGRCNVAEHEKLILLAQLKPEKDSDEAVTYSLGKFGQRALDFYSIHVTKESTHPVKPLAQIAGNRYASGPVGKALSDACMGTIASFLSKYQDIIIEHQKVVKGNQKRLESLRELAGKENLEYPSVTLPPQPHTKEGVDAYNEVIARVRMWVNLNLWQKLKLSRDDAKPLLRLKGFPSFPLVERQANEVDWWDMVCNVKKLINEKKEDGKVFWQNLAGYKRQEALRPYLSSEEDRKKGKKFARYQLGDLLLHLEKKHGEDWGKVYDEAWERIDKKVEGLSKHIKLEEERRSEDAQSKAALTDWLRAKASFVIEGLKEADKDEFCRCELKLQKWYGDLRGKPFAIEAENSILDISGFSKQYNCAFIWQKDGVKKLNLYLIINYFKGGKLRFKKIKPEAFEANRFYTVINKKSGEIVPMEVNFNFDDPNLIILPLAFGKRQGREFIWNDLLSLETGSLKLANGRVIEKTLYNRRTRQDEPALFVALTFERREVLDSSNSKPMNLIGVDRGENIPAVIALTNPEGCPLSRFKDSLGNPTHILRIGESYKEKQRFIQAKKEVEQRRAGGYSRKYASKAKNLADDMVRNTARDLLYYAVTQDAMLIFENLSRGFGRQGKRTFMAERQYTRMEDWLTAKLAYEGLPSKTYLSKTLAQYTSKTCSNCGFTITSADYDRVLEKLKKTATGWMTTINGKELKVEGQITYYNRYKRQNVVKDLSVELDRLSEESVNNDISSWTKGRSGEALSLLKKRFSHRPVQEKFVCLNCGFETHADEQAALNIARSWLFLRSQEYKKYQTNKTTGNTDKRAFVETWQSFYRKKLKEVWKPAV

SEQ ID NO: 25075 - protein, 978 aa, synthetic construct
  REGION 1..978: note = engineered CasX variant
QEIKRINKIRRRLVKDSNTKKAGKTGPMKTLLVRVMTPDLRERLENLRKKPENIPQPISNTSRANLNKLLTDYTEMKKAILHVYWEEFQKDPVGLMSRVAQPASKKIDQNKLKPEMDEKGNLTTAGFACSQCGQPLFVYKLEQVSEKGKAYTNYFGRCNVAEHEKLILLAQLKPEKDSDEAVTYSLGKFGQRALDFYSIHVTKESTHPVKPLAQIAGNRYASGPVGKALSDACMGTIASFLSKYQDIIIEHQKVVKGNQKRLESLRELAGKENLEYPSVTLPPQPHTKEGVDAYNEVIARVRMWVNLNLWQKLKLSRDDAKPLLRLKGFPSFPLVERQANEVDWWDMVCNVKKLINEKKEDGKVFWQNLAGYKRQEALRPYLSSEEDRKKGKKFARYQLGDLLLHLEKKHGEDWGKVYDEAWERIDKKVEGLSKHIKLEEERRSEDAQSKAALTDWLRAKASFVIEGLKEADKDEFCRCELKLQKWYGDLRGKPFAIEAENSILDISGFSKQYNCAFIWQKDGVKKLNLYLIINYFKGGKLRFKKIKPEAFEANRFYTVINKKSGEIVPMEVNFNFDDPNLIILPLAFGKRQGREFIWNDLLSLETGSLKLANGRVIEKTLYNRRTRQDEPALFVALTFERREVLDSSNSKPMNLIGVDRGENIPAVIALTDPEGCPLSRFKDSLGNPTHILRIGESYKEKQRTIQAKKEVEQRRAGGYSRKYASKAKNLADDMVRNTARDLLYYAVTQDAMLIFENLSRGFGRQGKRTFMAERQYTRMEDWLTAKLAYEGLPSKTYLSKTLAQYTSKTCSNCGFTITSADYDRVLEKLKKTATGWMTTINGKELKVEGQITYYNRYKRQNVVKDLSVELDRLSEESVNNDISSWTKGRSGEALSLLKKRFSHRPVQEKFVCLNCGFETHADEQAALNIARSWLFLRSQEYKKYQTNKTTGNTDKRAFVETWQSFYRKKLKEVWKPAV

SEQ ID NO: 25076 - protein, 978 aa, synthetic construct
  REGION 1..978: note = engineered CasX variant
QEIKRINKIRRRLVKDSNTKKAGKTGPMKTLLVRVMTPDLRERLENLRKKPENIPQPISNTSRANLNKLLTDYTEMKKAILHVYWEEFQKDPVGLMSRVAQPASKKIDQNKLKPEMDEKGNLTTAGFACSQCGQPLFVYKLEQVSEKGKAYTNYFGRCNVAEHEKLILLAQLKPEKDSDEAVTYSLGKFGQRALDFYSIHVTKESTHPVKPLAQIAGNRYASGPVGKALSDACMGTIASFLSKYQDIIIEHQKVVKGNQKRLESLRELAGKENLEYPSVTLPPQPHTKEGVDAYNEVIARVRMWVNLNLWQKLKLSRDDAKPLLRLKGFPSFPLVERQANEVDWWDMVCNVKKLINEKKEDGKVFWQNLAGYKRQEALRPYLSSEEDRKKGKKFARYQLGDLLLHLEKKHGEDWGKVYDEAWERIDKKVEGLSKHIKLEEERRSEDAQSKAALTDWLRAKASFVIEGLKEADKDEFCRCELKLQKWYGDLRGKPFAIEAENSILDISGFSKQYNCAFIWQKDGVKKLNLYLIINYFKGGKLRFKKIKPEAFEANRFYTVINKKSGEIVPMEVNFNFDDPNLIILPLAFGKRQGREFIWNDLLSLETGSLKLANGRVIEKTLYNRRTRQDEPALFVALTFERREVLDSSNSKPMNLIGVDRGENIPAVIALTDPEGCPLSRFKDSLGNPTHILRIGESYKEKQRFIQAKKEVEQRRAGGYSRKYASKAKNLADDMVRNTARDLLYYAVTQDAMLIFENLSRGFGRQGKRTFMAERQYTRMEDWLTAKLAYEGLPSKTYLSKTLAQYTSKTCSNCGFTITSADYDRVLEKLKKTATGWMTTINGKELKVEGQITYYNRYKRQNVVKDLSVELDRLSEESVNNDISSWTKGRSGEALSLLKKRFSHRPVQEKFVCLNCGFETHADEQAALNIARSWLFLRSQEYKKYQTNKTTGNTDKRAFVETWQSFYRKKLKEVWKPAV

SEQ ID NO: 25077 - protein, 978 aa, synthetic construct
  REGION 1..978: note = engineered CasX variant
QEIKRINKIRRRLVKDSNTKKAGKTGPMKTLLVRVMTPDLRERLENLRKKPENIPQPISNTSRANLNKLLTDYTEMKKAILHVYWEEFQKDPVGLMSRVAQPASKKIDQNKLKPEMDEKGNLTTAGFACSQCGQPLFVYKLEQVSEKGKAYTNYFGRCNVAEHEKLILLAQLKPEKDSDEAVTYSLGKFGQRALDFYSIHVTKESTHPVKPLAQIAGNRYASGPVGKALSDACMGTIASFLSKYQDIIIEHQKVVKGNQKRLESLRELAGKENLEYPSVTLPPQPHTKEGVDAYNEVIARVRMWVNLNLWQKLKLSRDDAKPLLRLKGFPSFPLVERQANEVDWWDMVCNVKKLINEKKEDGKVFWQNLAGYKRQEALRPYLSSEEDRKKGKKFARYQLGDLLLHLEKKHGEDWGKVYDEAWERIDKKVEGLSKHIKLEEERRSEDAQSKAALTDWLRAKASFVIEGLKEADKDEFCRCELKLQKWYGDLRGKPFAIEAENSILDISGFSKQYNCAFIWQKDGVKKLNLYLIINYFKGGKLRFKKIKPEAFEANRFYTVINKKSGEIVPMEVNFNFDDPNLIILPLAFGKRQGREFIWNDLLSLETGSLKLANGRVIEKTLYNRRTRQDEPALFVALTFERREVLDSSNQKPMNLIGVDRGENIPAVIALTDPEGCPLSRFKDSLGNPTHILRIGESYKEKQRTIQAKKEVEQRRAGGYSRKYASKAKNLADDMVRNTARDLLYYAVTQDAMLIFENLSRGFGRQGKRTFMAERQYTRMEDWLTAKLAYEGLPSKTYLSKTLAQYTSKTCSNCGFTITSADYDRVLEKLKKTATGWMTTINGKELKVEGQITYYNRYKRQNVVKDLSVELDRLSEESVNNDISSWTKGRSGEALSLLKKRFSHRPVQEKFVCLNCGFETHADEQAALNIARSWLFLRSQEYKKYQTNKTTGNTDKRAFVETWQSFYRKKLKEVWKPAV

SEQ ID NO: 25078 - protein, 978 aa, synthetic construct
  REGION 1..978: note = engineered CasX variant
QEIKRINKIRRRLVKDSNTKKAGKTGPMKTLLVRVMTPDLRERLENLRKKPENIPQPISNTSRANLNKLLTDYTEMKKAILHVYWEEFQKDPVGLMSRVAQPASKKIDQNKLKPEMDEKGNLTTAGFACSQCGQPLFVYKLEQVSEKGKAYTNYFGRCNVAEHEKLILLAQLKPEKDSDEAVTYSLGKFGQRALDFYSIHVTKESTHPVKPLAQIAGNRYASGPVGKALSDACMGTIASFLSKYQDIIIEHQKVVKGNQKRLESLRELAGKENLEYPSVTLPPQPHTKEGVDAYNEVIARVRMWVNLNLWQKLKLSRDDAKPLLRLKGFPSFPLVERQANEVDWWDMVCNVKKLINEKKEDGKVFWQNLAGYKRQEALRPYLSSEEDRKKGKKFARYQLGDLLLHLEKKHGEDWGKVYDEAWERIDKKVEGLSKHIKLEEERRSEDAQSKAALTDWLRAKASFVIEGLKEADKDEFCRCELKLQKWYGDLRGKPFAIEAENSILDISGFSKQYNCAFIWQKDGVKKLNLYLIINYFKGGKLRFKKIKPEAFEANRFYTVINKKSGEIVPMEVNFNFDDPNLIILPLAFGKRQGREFIWNDLLSLETGSLKLANGRVIEKTLYNRRTRQDEPALFVALTFERREVLDSSNQKPMNLIGVDRGENIPAVIALTDPEGCPLSRFKDSLGNPTHILRIGESYKEKQRTIQAKKEDEQRRAGGYSRKYASKAKNLADDMVRNTARDLLYYAVTQDAMLIFENLSRGFGRQGKRTFMAERQYTRMEDWLTAKLAYEGLPSKTYLSKTLAQYTSKTCSNCGFTITSADYDRVLEKLKKTATGWMTTINGKELKVEGQITYYNRYKRQNVVKDLSVELDRLSEESVNNDISSWTKGRSGEALSLLKKRFSHRPVQEKFVCLNCGFETHADEQAALNIARSWLFLRSQEYKKYQTNKTTGNTDKRAFVETWQSFYRKKLKEVWKPAV

SEQ ID NO: 25079 - protein, 978 aa, synthetic construct
  REGION 1..978: note = engineered CasX variant
QEIKRINKIRRRLVKDSNTKKAGKTGPMKTLLVRVMTPDLRERLENLRKKPENIPQPISNTSRANLNKLLTDYTEMKKAILHVYWEEFQKDPVGLMSRVAQPASKKIDQNKLKPEMDEKGNLTTAGFACSQCGQPLFVYKLEQVSEKGKAYTNYFGRCNVAEHEKLILLAQLKPEKDSDEAVTYSLGKFGQRALDFYSIHVTKESTHPVKPLAQIAGNRYASGPVGKALSDACMGTIASFLSKYQDIIIEHQKVVKGNQKRLESLRELAGKENLEYPSVTLPPQPHTKEGVDAYNEVIARVRMWVNLNLWQKLKLSRDDAKPLLRLKGFPSFPLVERQANEVDWWDMVCNVKKLINEKKEDGKVFWQNLAGYKRQEALRPYLSSEEDRKKGKKFARYQLGDLLLHLEKKHGEDWGKVYDEAWERIDKKVEGLSKHIKLEEERRSEDAQSKAALTDWLRAKASFVIEGLKEADKDEFCRCELKLQKWYGDLRGKPFAIEAENSILDISGFSKQYNCAFIWQKDGVKKLNLYLIINYFKGGKLRFKKIKPEAFEANRFYTVINKKSGEIVPMEVNFNFDDPNLIILPLAFGKRQGREFIWNDLLSLETGSLKLANGRVIEKTLYNRRTRQDEPALFVALTFERREVLDSSNPKRMNLIGVDRGENIPAVIALTDPEGCPLSRFKDSQGNPTHILRIGESYKEKQRTIQAKKEVEQRRAGGYSRKYASKAKNLADDMVRNTARDLLYYAVTQDAMLIFENLSRGFGRQGKRTFMAERQYTRMEDWLTAKLAYEGLPSKTYLSKTLAQYTSKTCSNCGFTITSADYDRVLEKLKKTATGWMTTINGKELKVEGQITYYNRYKRQNVVKDLSVELDRLSEESVNNDISSWTKGRSGEALSLLKKRFSHRPVQEKFVCLNCGFETHADEQAALNIARSWLFLRSQEYKKYQTNKTTGNTDKRAFVETWQSFYRKKLKEVWKPAV

SEQ ID NO: 25080 - protein, 978 aa, synthetic construct
  REGION 1..978: note = engineered CasX variant
QEIKRINKIRRRLVKDSNTKKAGKTGPMKTLLVRVMTPDLRERLENLRKKPENIPQPISNTSRANLNKLLTDYTEMKKAILHVYWEEFQKDPVGLMSRVAQPASKKIDQNKLKPEMDEKGNLTTAGFACSQCGQPLFVYKLEQVSEKGKAYTNYFGRCNVAEHEKLILLAQLKPEKDSDEAVTYSLGKFGQRALDFYSIHVTKESTHPVKPLAQIAGNRYASGPVGKALSDACMGTIASFLSKYQDIIIEHQKVVKGNQKRLESLRELAGKENLEYPSVTLPPQPHTKEGVDAYNEVIARVRMWVNLNLWQKLKLSRDDAKPLLRLKGFPSFPLVERQANEVDWWDMVCNVKKLINEKKEDGKVFWQNLAGYKRQEALRPYLSSEEDRKKGKKFARYQLGDLLLHLEKKHGEDWGKVYDEAWERIDKKVEGLSKHIKLEEERRSEDAQSKAALTDWLRAKASFVIEGLKEADKDEFCRCELKLQKWYGDLRGKPFAIEAENSILDISGFSKQYNCAFIWQKDGVKKLNLYLIINYFKGGKLRFKKIKPEAFEANRFYTVINKKSGEIVPMEVNFNFDDPNLIILPLAFGKRQGREFIWNDLLSLETGSLKLANGRVIEKTLYNRRTRQDEPALFVALTFERREVLDSSNPKRMNLIGVDRGENIPAVIALTDPEGCPLSRFKDSLGNPTHILRIGESYKEKQRTIQAKKEVEQRRAGGYSRKYASKAKNLADDMVRNTARDLLYYAVTQDAMLIFENLSRGFGRQGKRTFMAERQYTRMEDWLTAKLAYEGLPSKTYLSKTLAQYTSKTCSNCGFTITSADYDRVLEKLKKTATGWMTTINGKELKVEGQITYYNRYKRQNVVKDLSVELDRLSEESVNNDISSWTKGRSGEALSLLKKRFSHRPVQEKFVCLNCGFETHADEQAALNIARSWLFLRSQEYKKYQTNKTTGNTDKRAFVETWQSFYRKKLKEVWKPAV

SEQ ID NO: 25081 - protein, 978 aa, synthetic construct
  REGION 1..978: note = engineered CasX variant
QEIKRINKIRRRLVKDSNTKKAGKTGPMKTLLVRVMTPDLRERLENLRKKPENIPQPISNTSRANLNKLLTDYTEMKKAILHVYWEEFQKDPVGLMSRVAQPASKKIDQNKLKPEMDEKGNLTTAGFACSQCGQPLFVYKLEQVSEKGKAYTNYFGRCNVAEHEKLILLAQLKPEKDSDEAVTYSLGKFGQRALDFYSIHVTKESTHPVKPLAQIAGNRYASGPVGKALSDACMGTIASFLSKYQDIIIEHQKVVKGNQKRLESLRELAGKENLEYPSVTLPPQPHTKEGVDAYNEVIARVRMWVNLNLWQKLKLSRDDAKPLLRLKGFPSFPLVERQANEVDWWDMVCNVKKLINEKKEDGKVFWQNLAGYKRQEALRPYLSSEEDRKKGKKFARYQLGDLLLHLEKKHGEDWGKVYDEAWERIDKKVEGLSKHIKLEEERRSEDAQSKAALTDWLRAKASFVIEGLKEADKDEFCRCELKLQKWYGDLRGKPFAIEAENSILDISGFSKQYNCAFIWQKDGVKKLNLYLIINYFKGGKLRFKKIKPEAFEANRFYTVINKKSGEIVPMEVNFNFDDPNLIILPLAFGKRQGREFIWNDLLSLETGSLKLANGRVIEKTLYNRRTRQDEPALFVALTFERREVLDSSNPKRMNLIGVDRGENIPAVIALTDPEGCPLSRFKDHLGNPTHILRIGESYKEKQRTIQAKKEVEQRRAGGYSRKYASKAKNLADDMVRNTARDLLYYAVTQDAMLIFENLSRGFGRQGKRTFMAERQYTRMEDWLTAKLAYEGLPSKTYLSKTLAQYTSKTCSNCGFTITSADYDRVLEKLKKTATGWMTTINGKELKVEGQITYYNRYKRQNVVKDLSVELDRLSEESVNNDISSWTKGRSGEALSLLKKRFSHRPVQEKFVCLNCGFETHADEQAALNIARSWLFLRSQEYKKYQTNKTTGNTDKRAFVETWQSFYRKKLKEVWKPAV

SEQ ID NO: 25082 - protein, 978 aa, synthetic construct
  REGION 1..978: note = engineered CasX variant
QEIKRINKIRRRLVKDSNTKKAGKTGPMKTLLVRVMTPDLRERLENLRKKPENIPQPISNTSRANLNKLLTDYTEMKKAILHVYWEEFQKDPVGLMSRVAQPASKKIDQNKLKPEMDEKGNLTTAGFACSQCGQPLFVYKLEQVSEKGKAYTNYFGRCNVAEHEKLILLAQLKPEKDSDEAVTYSLGKFGQRALDFYSIHVTKESTHPVKPLAQIAGNRYASGPVGKALSDACMGTIASFLSKYQDIIIEHQKVVKGNQKRLESLRELAGKENLEYPSVTLPPQPHTKEGVDAYNEVIARVRMWVNLNLWQKLKLSRDDAKPLLRLKGFPSFPLVERQANEVDWWDMVCNVKKLINEKKEDGKVFWQNLAGYKRQEALRPYLSSEEDRKKGKKFARYQLGDLLLHLEKKHGEDWGKVYDEAWERIDKKVEGLSKHIKLEEERRSEDAQSKAALTDWLRAKASFVIEGLKEADKDEFCRCELKLQKWYGDLRGKPFAIEAENSILDISGFSKQYNCAFIWQKDGVKKLNLYLIINYFKGGKLRFKKIKPEAFEANRFYTVINKKSGEIVPMEVNFNFDDPNLIILPLAFGKRQGREFIWNDLLSLETGSLKLANGRVIEKTLYNRRTRQDEPALFVALTFERREVLDSSNPKRMNLIGVDRGENIPAVIALTDPEGCPLSKFKDSLGNPTHILRIGESYKEKQRTIQAKKEVEQRRAGGYSRKYASKAKNLADDMVRNTARDLLYYAVTQDAMLIFENLSRGFGRQGKRTFMAERQYTRMEDWLTAKLAYEGLPSKTYLSKTLAQYTSKTCSNCGFTITSADYDRVLEKLKKTATGWMTTINGKELKVEGQITYYNRYKRQNVVKDLSVELDRLSEESVNNDISSWTKGRSGEALSLLKKRFSHRPVQEKFVCLNCGFETHADEQAALNIARSWLFLRSQEYKKYQTNKTTGNTDKRAFVETWQSFYRKKLKEVWKPAV

SEQ ID NO: 25083 - protein, 978 aa, synthetic construct
  REGION 1..978: note = engineered CasX variant
QEIKRINKIRRRLVKDSNTKKAGKTGPMKTLLVRVMTPDLRERLENLRKKPENIPQPISNTSRANLNKLLTDYTEMKKAILHVYWEEFQKDPVGLMSRVAQPASKKIDQNKLKPEMDEKGNLTTAGFACSQCGQPLFVYKLEQVSEKGKAYTNYFGRCNVAEHEKLILLAQLKPEKDSDEAVTYSLGKFGQRALDFYSIHVTKESTHPVKPLAQIAGNRYASGPVGKALSDACMGTIASFLSKYQDIIIEHQKVVKGNQKRLESLRELAGKENLEYPSVTLPPQPHTKEGVDAYNEVIARVRMWVNLNLWQKLKLSRDDAKPLLRLKGFPSFPLVERQANEVDWWDMVCNVKKLINEKKEDGKVFWQNLAGYKRQEALRPYLSSEEDRKKGKKFARYQLGDLLLHLEKKHGEDWGKVYDEAWERIDKKVEGLSKHIKLEEERRSEDAQSKAALTDWLRAKASFVIEGLKEADKDEFCRCELKLQKWYGDLRGKPFAIEAENSILDISGFSKQYNCAFIWQKDGVKKLNLYLIINYFKGGKLRFKKIKPEAFEANRFYTVINKKSGEIVPMEVNFNFDDPNLIILPLAFGKRQGREFIWNDLLSLETGSLKLANGRVIEKTLYNRRTRQDEPALFVALTFERREVLDSSNPKRMNLIGVDRGENIPAVIALTDPEGCPLSCFKDSLGNPTHILRIGESYKEKQRTIQAKKEVEQRRAGGYSRKYASKAKNLADDMVRNTARDLLYYAVTQDAMLIFENLSRGFGRQGKRTFMAERQYTRMEDWLTAKLAYEGLPSKTYLSKTLAQYTSKTCSNCGFTITSADYDRVLEKLKKTATGWMTTINGKELKVEGQITYYNRYKRQNVVKDLSVELDRLSEESVNNDISSWTKGRSGEALSLLKKRFSHRPVQEKFVCLNCGFETHADEQAALNIARSWLFLRSQEYKKYQTNKTTGNTDKRAFVETWQSFYRKKLKEVWKPAV

SEQ ID NO: 25084 - protein, 978 aa, synthetic construct
  REGION 1..978: note = engineered CasX variant
QEIKRINKIRRRLVKDSNTKKAGKTGPMKTLLVRVMTPDLRERLENLRKKPENIPQPISNTSRANLNKLLTDYTEMKKAILHVYWEEFQKDPVGLMSRVAQPASKKIDQNKLKPEMDEKGNLTTAGFACSQCGQPLFVYKLEQVSEKGKAYTNYFGRCNVAEHEKLILLAQLKPEKDSDEAVTYSLGKFGQRALDFYSIHVTKESTHPVKPLAQIAGNRYASGPVGKALSDACMGTIASFLSKYQDIIIEHQKVVKGNQKRLESLRELAGKENLEYPSVTLPPQPHTKEGVDAYNEVIARVRMWVNLNLWQKLKLSRDDAKPLLRLKGFPSFPLVERQANEVDWWDMVCNVKKLINEKKEDGKVFWQNLAGYKRQEALRPYLSSEEDRKKGKKFARYQLGDLLLHLEKKHGEDWGKVYDEAWERIDKKVEGLSKHIKLEEERRSEDAQSKAALTDWLRAKASFVIEGLKEADKDEFCRCELKLQKWYGDLRGKPFAIEAENSILDISGFSKQYNCAFIWQKDGVKKLNLYLIINYFKGGKLRFKKIKPEAFEANRFYTVINKKSGEIVPMEVNFNFDDPNLIILPLAFGKRQGREFIWNDLLSLETGSLKLANGRVIEKTLYNRRTRQDEPALFVALTFERREVLDSSNPKPMNLIGVDRGENIPAVIALTDPEGCPLSRFTDSLGNPTHILRIGESYKEKQRTIQAKKEVEQRRAGGYSRKYASKAKNLADDMVRNTARDLLYYAVTQDAMLIFENLSRGFGRQGKRTFMAERQYTRMEDWLTAKLAYEGLPSKTYLSKTLAQYTSKTCSNCGFTITSADYDRVLEKLKKTATGWMTTINGKELKVEGQITYYNRYKRQNVVKDLSVELDRLSEESVNNDISSWTKGRSGEALSLLKKRFSHRPVQEKFVCLNCGFETHADEQAALNIARSWLFLRSQEYKKYQTNKTTGNTDKRAFVETWQSFYRKKLKEVWKPAV

SEQ ID NO: 25085 - protein, 978 aa, synthetic construct
  REGION 1..978: note = engineered CasX variant
QEIKRINKIRRRLVKDSNTKKAGKTGPMKTLLVRVMTPDLRERLENLRKKPENIPQPISNTSRANLNKLLTDYTEMKKAILHVYWEEFQKDPVGLMSRVAQPASKKIDQNKLKPEMDEKGNLTTAGFACSQCGQPLFVYKLEQVSEKGKAYTNYFGRCNVAEHEKLILLAQLKPEKDSDEAVTYSLGKFGQRALDFYSIHVTKESTHPVKPLAQIAGNRYASGPVGKALSDACMGTIASFLSKYQDIIIEHQKVVKGNQKRLESLRELAGKENLEYPSVTLPPQPHTKEGVDAYNEVIARVRMWVNLNLWQKLKLSRDDAKPLLRLKGFPSFPLVERQANEVDWWDMVCNVKKLINEKKEDGKVFWQNLAGYKRQEALRPYLSSEEDRKKGKKFARYQLGDLLLHLEKKHGEDWGKVYDEAWERIDKKVEGLSKHIKLEEERRSEDAQSKAALTDWLRAKASFVIEGLKEADKDEFCRCELKLQKWYGDLRGKPFAIEAENSILDISGFSKQYNCAFIWQKDGVKKLNLYLIINYFKGGKLRFKKIKPEAFEANRFYTVINKKSGEIVPMEVNFNFDDPNLIILPLAFGKRQGREFIWNDLLSLETGSLKLANGRVIEKTLYNRRTRQDEPALFVALTFERREVLDSSNPKPMNLIGVDRGENIPAVIALTDPEGCPLSRFKDSQGNPTHILRIGESYKEKQRTIQAKKEVEQRRAGGYSRKYASKAKNLADDMVRNTARDLLYYAVTQDAMLIFENLSRGFGRQGKRTFMAERQYTRMEDWLTAKLAYEGLPSKTYLSKTLAQYTSKTCSNCGFTITSADYDRVLEKLKKTATGWMTTINGKELKVEGQITYYNRYKRQNVVKDLSVELDRLSEESVNNDISSWTKGRSGEALSLLKKRFSHRPVQEKFVCLNCGFETHADEQAALNIARSWLFLRSQEYKKYQTNKTTGNTDKRAFVETWQSFYRKKLKEVWKPAV

SEQ ID NO: 25086 - protein, 978 aa, synthetic construct
  REGION 1..978: note = engineered CasX variant
QEIKRINKIRRRLVKDSNTKKAGKTGPMKTLLVRVMTPDLRERLENLRKKPENIPQPISNTSRANLNKLLTDYTEMKKAILHVYWEEFQKDPVGLMSRVAQPASKKIDQNKLKPEMDEKGNLTTAGFACSQCGQPLFVYKLEQVSEKGKAYTNYFGRCNVAEHEKLILLAQLKPEKDSDEAVTYSLGKFGQRALDFYSIHVTKESTHPVKPLAQIAGNRYASGPVGKALSDACMGTIASFLSKYQDIIIEHQKVVKGNQKRLESLRELAGKENLEYPSVTLPPQPHTKEGVDAYNEVIARVRMWVNLNLWQKLKLSRDDAKPLLRLKGFPSFPLVERQANEVDWWDMVCNVKKLINEKKEDGKVFWQNLAGYKRQEALRPYLSSEEDRKKGKKFARYQLGDLLLHLEKKHGEDWGKVYDEAWERIDKKVEGLSKHIKLEEERRSEDAQSKAALTDWLRAKASFVIEGLKEADKDEFCRCELKLQKWYGDLRGKPFAIEAENSILDISGFSKQYNCAFIWQKDGVKKLNLYLIINYFKGGKLRFKKIKPEAFEANRFYTVINKKSGEIVPMEVNFNFDDPNLIILPLAFGKRQGREFIWNDLLSLETGSLKLANGRVIEKTLYNRRTRQDEPALFVALTFERREVLDSSNPKPMNLIGVDRGENIPAVIALTDPEGCPLSRFKDSLGNPTHILRIGESYKEKQRTIQAKKEVEQRRLGGYSRKYASKAKNLADDMVRNTARDLLYYAVTQDAMLIFENLSRGFGRQGKRTFMAERQYTRMEDWLTAKLAYEGLPSKTYLSKTLAQYTSKTCSNCGFTITSADYDRVLEKLKKTATGWMTTINGKELKVEGQITYYNRYKRQNVVKDLSVELDRLSEESVNNDISSWTKGRSGEALSLLKKRFSHRPVQEKFVCLNCGFETHADEQAALNIARSWLFLRSQEYKKYQTNKTTGNTDKRAFVETWQSFYRKKLKEVWKPAV

SEQ ID NO: 25087 - protein, 978 aa, synthetic construct
  REGION 1..978: note = engineered CasX variant
QEIKRINKIRRRLVKDSNTKKAGKTGPMKTLLVRVMTPDLRERLENLRKKPENIPQPISNTSRANLNKLLTDYTEMKKAILHVYWEEFQKDPVGLMSRVAQPASKKIDQNKLKPEMDEKGNLTTAGFACSQCGQPLFVYKLEQVSEKGKAYTNYFGRCNVAEHEKLILLAQLKPEKDSDEAVTYSLGKFGQRALDFYSIHVTKESTHPVKPLAQIAGNRYASGPVGKALSDACMGTIASFLSKYQDIIIEHQKVVKGNQKRLESLRELAGKENLEYPSVTLPPQPHTKEGVDAYNEVIARVRMWVNLNLWQKLKLSRDDAKPLLRLKGFPSFPLVERQANEVDWWDMVCNVKKLINEKKEDGKVFWQNLAGYKRQEALRPYLSSEEDRKKGKKFARYQLGDLLLHLEKKHGEDWGKVYDEAWERIDKKVEGLSKHIKLEEERRSEDAQSKAALTDWLRAKASFVIEGLKEADKDEFCRCELKLQKWYGDLRGKPFAIEAENSILDISGFSKQYNCAFIWQKDGVKKLNLYLIINYFKGGKLRFKKIKPEAFEANRFYTVINKKSGEIVPMEVNFNFDDPNLIILPLAFGKRQGREFIWNDLLSLETGSLKLANGRVIEKTLYNRRTRQDEPALFVALTFERREVLDSSNPKPMNLIGVDRGENIPAVIALTDPEGCPLSRFKDSLGNPTHILRIGESYKEKQRTIQAKKEVEQRRAGGYSRKYASKAKNLADDMVRNTARDLLYYAVTQDAMLIFENLSRGFGRQGKRTFMAERQYTRMEDWLTAKLAYEGLPSKTYLSKTLAQYTSKTCSNCGFTITSADYDRVLEKLKKTATGWMTTINGKELKVEGQITYYNRYKRQNVVKDLSVELDRLSEESVNNDISSWTKGRSGEALSLLKKRFSHRPVQEKFVCLNCGFETHADEQAALNIARSWLFLRSQEYKKYQTNKTTGNTDKRAFVETWQSFYRKKLKEVWKPAV

SEQ ID NO: 25088 - protein, 978 aa, synthetic construct
  REGION 1..978: note = engineered CasX variant
QEIKRINKIRRRLVKDSNTKKAGKTGPMKTLLVRVMTPDLRERLENLRKKPENIPQPISNTSRANLNKLLTDYTEMKKAILHVYWEEFQKDPVGLMSRVAQPASKKIDQNKLKPEMDEKGNLTTAGFACSQCGQPLFVYKLEQVSEKGKAYTNYFGRCNVAEHEKLILLAQLKPEKDSDEAVTYSLGKFGQRALDFYSIHVTKESTHPVKPLAQIAGNRYASGPVGKALSDACMGTIASFLSKYQDIIIEHQKVVKGNQKRLESLRELAGKENLEYPSVTLPPQPHTKEGVDAYNEVIARVRMWVNLNLWQKLKLSRDDAKPLLRLKGFPSFPLVERQANEVDWWDMVCNVKKLINEKKEDGKVFWQNLAGYKRQEALRPYLSSEEDRKKGKKFARYQLGDLLLHLEKKHGEDWGKVYDEAWERIDKKVEGLSKHIKLEEERRSEDAQSKAALTDWLRAKASFVIEGLKEADKDEFCRCELKLQKWYGDLRGKPFAIEAENSILDISGFSKQYNCAFIWQKDGVKKLNLYLIINYFKGGKLRFKKIKPEAFEANRFYTVINKKSGEIVPMEVNFNFDDPNLIILPLAFGKRQGREFIWNDLLSLETGSLKLANGRVIEKTLYNRRTRQDEPALFVALTFERREVLDSSNPKPMNLIGVDRGENIPAVIALTDPEGCPLSRFKDSLGNPTHILRIGESYKEKQRTIQAKKEVEQRRAFGYSRKYASKAKNLADDMVRNTARDLLYYAVTQDAMLIFENLSRGFGRQGKRTFMAERQYTRMEDWLTAKLAYEGLPSKTYLSKTLAQYTSKTCSNCGFTITSADYDRVLEKLKKTATGWMTTINGKELKVEGQITYYNRYKRQNVVKDLSVELDRLSEESVNNDISSWTKGRSGEALSLLKKRFSHRPVQEKFVCLNCGFETHADEQAALNIARSWLFLRSQEYKKYQTNKTTGNTDKRAFVETWQSFYRKKLKEVWKPAV

SEQ ID NO: 25089 - protein, 978 aa, synthetic construct
  REGION 1..978: note = engineered CasX variant
QEIKRINKIRRRLVKDSNTKKAGKTGPMKTLLVRVMTPDLRERLENLRKKPENIPQPISNTSRANLNKLLTDYTEMKKAILHVYWEEFQKDPVGLMSRVAQPASKKIDQNKLKPEMDEKGNLTTAGFACSQCGQPLFVYKLEQVSEKGKAYTNYFGRCNVAEHEKLILLAQLKPEKDSDEAVTYSLGKFGQRALDFYSIHVTKESTHPVKPLAQIAGNRYASGPVGKALSDACMGTIASFLSKYQDIIIEHQKVVKGNQKRLESLRELAGKENLEYPSVTLPPQPHTKEGVDAYNEVIARVRMWVNLNLWQKLKLSRDDAKPLLRLKGFPSFPLVERQANEVDWWDMVCNVKKLINEKKEDGKVFWQNLAGYKRQEALRPYLSSEEDRKKGKKFARYQLGDLLLHLEKKHGEDWGKVYDEAWERIDKKVEGLSKHIKLEEERRSEDAQSKAALTDWLRAKASFVIEGLKEADKDEFCRCELKLQKWYGDLRGKPFAIEAENSILDISGFSKQYNCAFIWQKDGVKKLNLYLIINYFKGGKLRFKKIKPEAFEANRFYTVINKKSGEIVPMEVNFNFDDPNLIILPLAFGKRQGREFIWNDLLSLETGSLKLANGRVIEKTLYNRRTRQDEPALFVALTFERREVLDSSNPKPMNLIGVDRGENIPAVIALTDPEGCPLSRFKDSLGNPTHILRIGESYKEKQRTIQAFKEVEQRRAGGYSRKYASKAKNLADDMVRNTARDLLYYAVTQDAMLIFENLSRGFGRQGKRTFMAERQYTRMEDWLTAKLAYEGLPSKTYLSKTLAQYTSKTCSNCGFTITSADYDRVLEKLKKTATGWMTTINGKELKVEGQITYYNRYKRQNVVKDLSVELDRLSEESVNNDISSWTKGRSGEALSLLKKRFSHRPVQEKFVCLNCGFETHADEQAALNIARSWLFLRSQEYKKYQTNKTTGNTDKRAFVETWQSFYRKKLKEVWKPAV

SEQ ID NO: 25090 - protein, 978 aa, synthetic construct
  REGION 1..978: note = engineered CasX variant
QEIKRINKIRRRLVKDSNTKKAGKTGPMKTLLVRVMTPDLRERLENLRKKPENIPQPISNTSRANLNKLLTDYTEMKKAILHVYWEEFQKDPVGLMSRVAQPASKKIDQNKLKPEMDEKGNLTTAGFACSQCGQPLFVYKLEQVSEKGKAYTNYFGRCNVAEHEKLILLAQLKPEKDSDEAVTYSLGKFGQRALDFYSIHVTKESTHPVKPLAQIAGNRYASGPVGKALSDACMGTIASFLSKYQDIIIEHQKVVKGNQKRLESLRELAGKENLEYPSVTLPPQPHTKEGVDAYNEVIARVRMWVNLNLWQKLKLSRDDAKPLLRLKGFPSFPLVERQANEVDWWDMVCNVKKLINEKKEDGKVFWQNLAGYKRQEALRPYLSSEEDRKKGKKFARYQLGDLLLHLEKKHGEDWGKVYDEAWERIDKKVEGLSKHIKLEEERRSEDAQSKAALTDWLRAKASFVIEGLKEADKDEFCRCELKLQKWYGDLRGKPFAIEAENSILDISGFSKQYNCAFIWQKDGVKKLNLYLIINYFKGGKLRFKKIKPEAFEANRFYTVINKKSGEIVPMEVNFNFDDPNLIILPLAFGKRQGREFIWNDLLSLETGSLKLANGRVIEKTLYNRRTRQDEPALFVALTFERREVLDSSNPKPMNLIGVDRGENIPAVIALTDPEGCPLSRFKDSLGNPTHILRIGECYKEKQRTIQAKKEVEQRRAGGYSRKYASKAKNLADDMVRNTARDLLYYAVTQDAMLIFENLSRGFGRQGKRTFMAERQYTRMEDWLTAKLAYEGLPSKTYLSKTLAQYTSKTCSNCGFTITSADYDRVLEKLKKTATGWMTTINGKELKVEGQITYYNRYKRQNVVKDLSVELDRLSEESVNNDISSWTKGRSGEALSLLKKRFSHRPVQEKFVCLNCGFETHADEQAALNIARSWLFLRSQEYKKYQTNKTTGNTDKRAFVETWQSFYRKKLKEVWKPAV

SEQ ID NO: 25091 - protein, 978 aa, synthetic construct
  REGION 1..978: note = engineered CasX variant
QEIKRINKIRRRLVKDSNTKKAGKTGPMKTLLVRVMTPDLRERLENLRKKPENIPQPISNTSRANLNKLLTDYTEMKKAILHVYWEEFQKDPVGLMSRVAQPASKKIDQNKLKPEMDEKGNLTTAGFACSQCGQPLFVYKLEQVSEKGKAYTNYFGRCNVAEHEKLILLAQLKPEKDSDEAVTYSLGKFGQRALDFYSIHVTKESTHPVKPLAQIAGNRYASGPVGKALSDACMGTIASFLSKYQDIIIEHQKVVKGNQKRLESLRELAGKENLEYPSVTLPPQPHTKEGVDAYNEVIARVRMWVNLNLWQKLKLSRDDAKPLLRLKGFPSFPLVERQANEVDWWDMVCNVKKLINEKKEDGKVFWQNLAGYKRQEALRPYLSSEEDRKKGKKFARYQLGDLLLHLEKKHGEDWGKVYDEAWERIDKKVEGLSKHIKLEEERRSEDAQSKAALTDWLRAKASFVIEGLKEADKDEFCRCELKLQKWYGDLRGKPFAIEAENSILDISGFSKQYNCAFIWQKDGVKKLNLYLIINYFKGGKLRFKKIKPEAFEANRFYTVINKKSGEIVPMEVNFNFDDPNLIILPLAFGKRQGREFIWNDLLSLETGSLKLANGRVIEKTLYNRRTRQDEPALFVALTFERREVLDSSNPKPMNLIGVDRGENIPAVIALTDPEGCPLSRFKDSLGNPTHILRFGESYKEKQRTIQAKKEVEQRRAGGYSRKYASKAKNLADDMVRNTARDLLYYAVTQDAMLIFENLSRGFGRQGKRTFMAERQYTRMEDWLTAKLAYEGLPSKTYLSKTLAQYTSKTCSNCGFTITSADYDRVLEKLKKTATGWMTTINGKELKVEGQITYYNRYKRQNVVKDLSVELDRLSEESVNNDISSWTKGRSGEALSLLKKRFSHRPVQEKFVCLNCGFETHADEQAALNIARSWLFLRSQEYKKYQTNKTTGNTDKRAFVETWQSFYRKKLKEVWKPAV

SEQ ID NO: 25092 - protein, 978 aa, synthetic construct
  REGION 1..978: note = engineered CasX variant
QEIKRINKIRRRLVKDSNTKKAGKTGPMKTLLVRVMTPDLRERLENLRKKPENIPQPISNTSRANLNKLLTDYTEMKKAILHVYWEEFQKDPVGLMSRVAQPASKKIDQNKLKPEMDEKGNLTTAGFACSQCGQPLFVYKLEQVSEKGKAYTNYFGRCNVAEHEKLILLAQLKPEKDSDEAVTYSLGKFGQRALDFYSIHVTKESTHPVKPLAQIAGNRYASGPVGKALSDACMGTIASFLSKYQDIIIEHQKVVKGNQKRLESLRELAGKENLEYPSVTLPPQPHTKEGVDAYNEVIARVRMWVNLNLWQKLKLSRDDAKPLLRLKGFPSFPLVERQANEVDWWDMVCNVKKLINEKKEDGKVFWQNLAGYKRQEALRPYLSSEEDRKKGKKFARYQLGDLLLHLEKKHGEDWGKVYDEAWERIDKKVEGLSKHIKLEEERRSEDAQSKAALTDWLRAKASFVIEGLKEADKDEFCRCELKLQKWYGDLRGKPFAIEAENSILDISGFSKQYNCAFIWQKDGVKKLNLYLIINYFKGGKLRFKKIKPEAFEANRFYTVINKKSGEIVPMEVNFNFDDPNLIILPLAFGKRQGREFIWNDLLSLETGSLKLANGRVIEKTLYNRRTRQDEPALFVALTFERREVLDSSNPKPMNLIGVDRGENIPAVIALTDPEGCPLSRFKDSLGNPTHILRFGESYKEKQRTIQAKKEVEQRRAFGYSRKYASKAKNLADDMVRNTARDLLYYAVTQDAMLIFENLSRGFGRQGKRTFMAERQYTRMEDWLTAKLAYEGLPSKTYLSKTLAQYTSKTCSNCGFTITSADYDRVLEKLKKTATGWMTTINGKELKVEGQITYYNRYKRQNVVKDLSVELDRLSEESVNNDISSWTKGRSGEALSLLKKRFSHRPVQEKFVCLNCGFETHADEQAALNIARSWLFLRSQEYKKYQTNKTTGNTDKRAFVETWQSFYRKKLKEVWKPAV

SEQ ID NO: 25093 - protein, 978 aa, synthetic construct
  REGION 1..978: note = engineered CasX variant
QEIKRINKIRRRLVKDSNTKKAGKTGPMKTLLVRVMTPDLRERLENLRKKPENIPQPISNTSRANLNKLLTDYTEMKKAILHVYWEEFQKDPVGLMSRVAQPASKKIDQNKLKPEMDEKGNLTTAGFACSQCGQPLFVYKLEQVSEKGKAYTNYFGRCNVAEHEKLILLAQLKPEKDSDEAVTYSLGKFGQRALDFYSIHVTKESTHPVKPLAQIAGNRYASGPVGKALSDACMGTIASFLSKYQDIIIEHQKVVKGNQKRLESLRELAGKENLEYPSVTLPPQPHTKEGVDAYNEVIARVRMWVNLNLWQKLKLSRDDAKPLLRLKGFPSFPLVERQANEVDWWDMVCNVKKLINEKKEDGKVFWQNLAGYKRQEALRPYLSSEEDRKKGKKFARYQLGDLLLHLEKKHGEDWGKVYDEAWERIDKKVEGLSKHIKLEEERRSEDAQSKAALTDWLRAKASFVIEGLKEADKDEFCRCELKLQKWYGDLRGKPFAIEAENSILDISGFSKQYNCAFIWQKDGVKKLNLYLIINYFKGGKLRFKKIKPEAFEANRFYTVINKKSGEIVPMEVNFNFDDPNLIILPLAFGKRQGREFIWNDLLSLETGSLKLANGRVIEKTLYNRRTRQDEPALFVALTFERREVLDSSNPKPMNLIGVDRGENIPAVIALTDPEGCPLSRFKDHLGNPTHILRIGESYKEKQRTIQAKKEVEQRRLGGYSRKYASKAKNLADDMVRNTARDLLYYAVTQDAMLIFENLSRGFGRQGKRTFMAERQYTRMEDWLTAKLAYEGLPSKTYLSKTLAQYTSKTCSNCGFTITSADYDRVLEKLKKTATGWMTTINGKELKVEGQITYYNRYKRQNVVKDLSVELDRLSEESVNNDISSWTKGRSGEALSLLKKRFSHRPVQEKFVCLNCGFETHADEQAALNIARSWLFLRSQEYKKYQTNKTTGNTDKRAFVETWQSFYRKKLKEVWKPAV

SEQ ID NO: 25094 - protein, 978 aa, synthetic construct
  REGION 1..978: note = engineered CasX variant
QEIKRINKIRRRLVKDSNTKKAGKTGPMKTLLVRVMTPDLRERLENLRKKPENIPQPISNTSRANLNKLLTDYTEMKKAILHVYWEEFQKDPVGLMSRVAQPASKKIDQNKLKPEMDEKGNLTTAGFACSQCGQPLFVYKLEQVSEKGKAYTNYFGRCNVAEHEKLILLAQLKPEKDSDEAVTYSLGKFGQRALDFYSIHVTKESTHPVKPLAQIAGNRYASGPVGKALSDACMGTIASFLSKYQDIIIEHQKVVKGNQKRLESLRELAGKENLEYPSVTLPPQPHTKEGVDAYNEVIARVRMWVNLNLWQKLKLSRDDAKPLLRLKGFPSFPLVERQANEVDWWDMVCNVKKLINEKKEDGKVFWQNLAGYKRQEALRPYLSSEEDRKKGKKFARYQLGDLLLHLEKKHGEDWGKVYDEAWERIDKKVEGLSKHIKLEEERRSEDAQSKAALTDWLRAKASFVIEGLKEADKDEFCRCELKLQKWYGDLRGKPFAIEAENSILDISGFSKQYNCAFIWQKDGVKKLNLYLIINYFKGGKLRFKKIKPEAFEANRFYTVINKKSGEIVPMEVNFNFDDPNLIILPLAFGKRQGREFIWNDLLSLETGSLKLANGRVIEKTLYNRRTRQDEPALFVALTFERREVLDSSNPKPMNLIGVDRGENIPAVIALTDPEGCPLSRFKDHLGNPTHILRIGESYKEKQRTIQAKKEVEQRRAGGYSRKYASKAKNLADDMVRNTARDLLYYAVTQDAMLIFENLSRGFGRQGKRTFMAERQYTRMEDWLTAKLAYEGLPSKTYLSKTLAQYTSKTCSNCGFTITSADYDRVLEKLKKTATGWMTTINGKELKVEGQITYYNRYKRQNVVKDLSVELDRLSEESVNNDISSWTKGRSGEALSLLKKRFSHRPVQEKFVCLNCGFETHADEQAALNIARSWLFLRSQEYKKYQTNKTTGNTDKRAFVETWQSFYRKKLKEVWKPAV

SEQ ID NO: 25095 - protein, 978 aa, synthetic construct
  REGION 1..978: note = engineered CasX variant
QEIKRINKIRRRLVKDSNTKKAGKTGPMKTLLVRVMTPDLRERLENLRKKPENIPQPISNTSRANLNKLLTDYTEMKKAILHVYWEEFQKDPVGLMSRVAQPASKKIDQNKLKPEMDEKGNLTTAGFACSQCGQPLFVYKLEQVSEKGKAYTNYFGRCNVAEHEKLILLAQLKPEKDSDEAVTYSLGKFGQRALDFYSIHVTKESTHPVKPLAQIAGNRYASGPVGKALSDACMGTIASFLSKYQDIIIEHQKVVKGNQKRLESLRELAGKENLEYPSVTLPPQPHTKEGVDAYNEVIARVRMWVNLNLWQKLKLSRDDAKPLLRLKGFPSFPLVERQANEVDWWDMVCNVKKLINEKKEDGKVFWQNLAGYKRQEALRPYLSSEEDRKKGKKFARYQLGDLLLHLEKKHGEDWGKVYDEAWERIDKKVEGLSKHIKLEEERRSEDAQSKAALTDWLRAKASFVIEGLKEADKDEFCRCELKLQKWYGDLRGKPFAIEAENSILDISGFSKQYNCAFIWQKDGVKKLNLYLIINYFKGGKLRFKKIKPEAFEANRFYTVINKKSGEIVPMEVNFNFDDPNLIILPLAFGKRQGREFIWNDLLSLETGSLKLANGRVIEKTLYNRRTRQDEPALFVALTFERREVLDSSNPKPMNLIGVDRGENIPAVIALTDPEGCPLSKFKDSQGNPTHILRIGESYKEKQRTIQAKKEVEQRRAGGYSRKYASKAKNLADDMVRNTARDLLYYAVTQDAMLIFENLSRGFGRQGKRTFMAERQYTRMEDWLTAKLAYEGLPSKTYLSKTLAQYTSKTCSNCGFTITSADYDRVLEKLKKTATGWMTTINGKELKVEGQITYYNRYKRQNVVKDLSVELDRLSEESVNNDISSWTKGRSGEALSLLKKRFSHRPVQEKFVCLNCGFETHADEQAALNIARSWLFLRSQEYKKYQTNKTTGNTDKRAFVETWQSFYRKKLKEVWKPAV

SEQ ID NO: 25096 - protein, 978 aa, synthetic construct
  REGION 1..978: note = engineered CasX variant
QEIKRINKIRRRLVKDSNTKKAGKTGPMKTLLVRVMTPDLRERLENLRKKPENIPQPISNTSRANLNKLLTDYTEMKKAILHVYWEEFQKDPVGLMSRVAQPASKKIDQNKLKPEMDEKGNLTTAGFACSQCGQPLFVYKLEQVSEKGKAYTNYFGRCNVAEHEKLILLAQLKPEKDSDEAVTYSLGKFGQRALDFYSIHVTKESTHPVKPLAQIAGNRYASGPVGKALSDACMGTIASFLSKYQDIIIEHQKVVKGNQKRLESLRELAGKENLEYPSVTLPPQPHTKEGVDAYNEVIARVRMWVNLNLWQKLKLSRDDAKPLLRLKGFPSFPLVERQANEVDWWDMVCNVKKLINEKKEDGKVFWQNLAGYKRQEALRPYLSSEEDRKKGKKFARYQLGDLLLHLEKKHGEDWGKVYDEAWERIDKKVEGLSKHIKLEEERRSEDAQSKAALTDWLRAKASFVIEGLKEADKDEFCRCELKLQKWYGDLRGKPFAIEAENSILDISGFSKQYNCAFIWQKDGVKKLNLYLIINYFKGGKLRFKKIKPEAFEANRFYTVINKKSGEIVPMEVNFNFDDPNLIILPLAFGKRQGREFIWNDLLSLETGSLKLANGRVIEKTLYNRRTRQDEPALFVALTFERREVLDSSNPKPMNLIGVDRGENIPAVIALTDPEGCPLSKFKDSLGNPTHILRIGESYKEKQRTIQAKKEVEQRRAGGYSRKYASKAKNLADDMVRNTARDLLYYAVTQDAMLIFENLSRGFGRQGKRTFMAERQYTRMEDWLTAKLAYEGLPSKTYLSKTLAQYTSKTCSNCGFTITSADYDRVLEKLKKTATGWMTTINGKELKVEGQITYYNRYKRQNVVKDLSVELDRLSEESVNNDISSWTKGRSGEALSLLKKRFSHRPVQEKFVCLNCGFETHADEQAALNIARSWLFLRSQEYKKYQTNKTTGNTDKRAFVETWQSFYRKKLKEVWKPAV

SEQ ID NO: 25097 - protein, 978 aa, synthetic construct
  REGION 1..978: note = engineered CasX variant
QEIKRINKIRRRLVKDSNTKKAGKTGPMKTLLVRVMTPDLRERLENLRKKPENIPQPISNTSRANLNKLLTDYTEMKKAILHVYWEEFQKDPVGLMSRVAQPASKKIDQNKLKPEMDEKGNLTTAGFACSQCGQPLFVYKLEQVSEKGKAYTNYFGRCNVAEHEKLILLAQLKPEKDSDEAVTYSLGKFGQRALDFYSIHVTKESTHPVKPLAQIAGNRYASGPVGKALSDACMGTIASFLSKYQDIIIEHQKVVKGNQKRLESLRELAGKENLEYPSVTLPPQPHTKEGVDAYNEVIARVRMWVNLNLWQKLKLSRDDAKPLLRLKGFPSFPLVERQANEVDWWDMVCNVKKLINEKKEDGKVFWQNLAGYKRQEALRPYLSSEEDRKKGKKFARYQLGDLLLHLEKKHGEDWGKVYDEAWERIDKKVEGLSKHIKLEEERRSEDAQSKAALTDWLRAKASFVIEGLKEADKDEFCRCELKLQKWYGDLRGKPFAIEAENSILDISGFSKQYNCAFIWQKDGVKKLNLYLIINYFKGGKLRFKKIKPEAFEANRFYTVINKKSGEIVPMEVNFNFDDPNLIILPLAFGKRQGREFIWNDLLSLETGSLKLANGRVIEKTLYNRRTRQDEPALFVALTFERREVLDSSNPKPMNLIGVDRGENIPAVIALTDPEGCPLSCFKDSQGNPTHILRIGESYKEKQRTIQAKKEVEQRRAGGYSRKYASKAKNLADDMVRNTARDLLYYAVTQDAMLIFENLSRGFGRQGKRTFMAERQYTRMEDWLTAKLAYEGLPSKTYLSKTLAQYTSKTCSNCGFTITSADYDRVLEKLKKTATGWMTTINGKELKVEGQITYYNRYKRQNVVKDLSVELDRLSEESVNNDISSWTKGRSGEALSLLKKRFSHRPVQEKFVCLNCGFETHADEQAALNIARSWLFLRSQEYKKYQTNKTTGNTDKRAFVETWQSFYRKKLKEVWKPAV

SEQ ID NO: 25098 - protein, 978 aa, synthetic construct
  REGION 1..978: note = engineered CasX variant
QEIKRINKIRRRLVKDSNTKKAGKTGPMKTLLVRVMTPDLRERLENLRKKPENIPQPISNTSRANLNKLLTDYTEMKKAILHVYWEEFQKDPVGLMSRVAQPASKKIDQNKLKPEMDEKGNLTTAGFACSQCGQPLFVYKLEQVSEKGKAYTNYFGRCNVAEHEKLILLAQLKPEKDSDEAVTYSLGKFGQRALDFYSIHVTKESTHPVKPLAQIAGNRYASGPVGKALSDACMGTIASFLSKYQDIIIEHQKVVKGNQKRLESLRELAGKENLEYPSVTLPPQPHTKEGVDAYNEVIARVRMWVNLNLWQKLKLSRDDAKPLLRLKGFPSFPLVERQANEVDWWDMVCNVKKLINEKKEDGKVFWQNLAGYKRQEALRPYLSSEEDRKKGKKFARYQLGDLLLHLEKKHGEDWGKVYDEAWERIDKKVEGLSKHIKLEEERRSEDAQSKAALTDWLRAKASFVIEGLKEADKDEFCRCELKLQKWYGDLRGKPFAIEAENSILDISGFSKQYNCAFIWQKDGVKKLNLYLIINYFKGGKLRFKKIKPEAFEANRFYTVINKKSGEIVPMEVNFNFDDPNLIILPLAFGKRQGREFIWNDLLSLETGSLKLANGRVIEKTLYNRRTRQDEPALFVALTFERREVLDSSNPKPMNLIGVDRGENIPAVIALTDPEGCPLSCFKDSLGNPTHILRIGESYKEKQRTIQAKKEVEQRRAGGYSRKYASKAKNLADDMVRNTARDLLYYAVTQDAMLIFENLSRGFGRQGKRTFMAERQYTRMEDWLTAKLAYEGLPSKTYLSKTLAQYTSKTCSNCGFTITSADYDRVLEKLKKTATGWMTTINGKELKVEGQITYYNRYKRQNVVKDLSVELDRLSEESVNNDISSWTKGRSGEALSLLKKRFSHRPVQEKFVCLNCGFETHADEQAALNIARSWLFLRSQEYKKYQTNKTTGNTDKRAFVETWQSFYRKKLKEVWKPAV

SEQ ID NO: 25099 - protein, 978 aa, synthetic construct
  REGION 1..978: note = engineered CasX variant
QEIKRINKIRRRLVKDSNTKKAGKTGPMKTLLVRVMTPDLRERLENLRKKPENIPQPISNTSRANLNKLLTDYTEMKKAILHVYWEEFQKDPVGLMSRVAQPASKKIDQNKLKPEMDEKGNLTTAGFACSQCGQPLFVYKLEQVSEKGKAYTNYFGRCNVAEHEKLILLAQLKPEKDSDEAVTYSLGKFGQRALDFYSIHVTKESTHPVKPLAQIAGNRYASGPVGKALSDACMGTIASFLSKYQDIIIEHQKVVKGNQKRLESLRELAGKENLEYPSVTLPPQPHTKEGVDAYNEVIARVRMWVNLNLWQKLKLSRDDAKPLLRLKGFPSFPLVERQANEVDWWDMVCNVKKLINEKKEDGKVFWQNLAGYKRQEALRPYLSSEEDRKKGKKFARYQLGDLLLHLEKKHGEDWGKVYDEAWERIDKKVEGLSKHIKLEEERRSEDAQSKAALTDWLRAKASFVIEGLKEADKDEFCRCELKLQKWYGDLRGKPFAIEAENSILDISGFSKQYNCAFIWQKDGVKKLNLYLIINYFKGGKLRFKKIKPEAFEANRFYTVINKKSGEIVPMEVNFNFDDPNLIILPLAFGKRQGREFIWNDLLSLETGSLKLANGRVIEKTLYNRRTRQDEPALFVALTFERREVLDSSNPKPMNLIGVDRGENIPAVIALTDPEGCPLSCFKDSLGNPTHILRIGESYKEKQRTIQAFKEVEQRRAGGYSRKYASKAKNLADDMVRNTARDLLYYAVTQDAMLIFENLSRGFGRQGKRTFMAERQYTRMEDWLTAKLAYEGLPSKTYLSKTLAQYTSKTCSNCGFTITSADYDRVLEKLKKTATGWMTTINGKELKVEGQITYYNRYKRQNVVKDLSVELDRLSEESVNNDISSWTKGRSGEALSLLKKRFSHRPVQEKFVCLNCGFETHADEQAALNIARSWLFLRSQEYKKYQTNKTTGNTDKRAFVETWQSFYRKKLKEVWKPAV

SEQ ID NO: 25100 - protein, 978 aa, synthetic construct
  REGION 1..978: note = engineered CasX variant
QEIKRINKIRRRLVKDSNTKKAGKTGPMKTLLVRVMTPDLRERLENLRKKPENIPQPISNTSRANLNKLLTDYTEMKKAILHVYWEEFQKDPVGLMSRVAQPASKKIDQNKLKPEMDEKGNLTTAGFACSQCGQPLFVYKLEQVSEKGKAYTNYFGRCNVAEHEKLILLAQLKPEKDSDEAVTYSLGKFGQRALDFYSIHVTKESTHPVKPLAQIAGNRYASGPVGKALSDACMGTIASFLSKYQDIIIEHQKVVKGNQKRLESLRELAGKENLEYPSVTLPPQPHTKEGVDAYNEVIARVRMWVNLNLWQKLKLSRDDAKPLLRLKGFPSFPLVERQANEVDWWDMVCNVKKLINEKKEDGKVFWQNLAGYKRQEALRPYLSSEEDRKKGKKFARYQLGDLLLHLEKKHGEDWGKVYDEAWERIDKKVEGLSKHIKLEEERRSEDAQSKAALTDWLRAKASFVIEGLKEADKDEFCRCELKLQKWYGDLRGKPFAIEAENSILDISGFSKQYNCAFIWQKDGVKKLNLYLIINYFKGGKLRFKKIKPEAFEANRFYTVINKKSGEIVPMEVNFNFDDPNLIILPLAFGKRQGREFIWNDLLSLETGSLKLANGRVIEKTLYNRRTRQDEPALFVALTFERREVLDSSNPKPMNLIGVDRGENIPAVIALTDPEGCPLSCFKDHLGNPTHILRIGESYKEKQRTIQAKKEVEQRRAGGYSRKYASKAKNLADDMVRNTARDLLYYAVTQDAMLIFENLSRGFGRQGKRTFMAERQYTRMEDWLTAKLAYEGLPSKTYLSKTLAQYTSKTCSNCGFTITSADYDRVLEKLKKTATGWMTTINGKELKVEGQITYYNRYKRQNVVKDLSVELDRLSEESVNNDISSWTKGRSGEALSLLKKRFSHRPVQEKFVCLNCGFETHADEQAALNIARSWLFLRSQEYKKYQTNKTTGNTDKRAFVETWQSFYRKKLKEVWKPAV

SEQ ID NO: 25101 - protein, 978 aa, synthetic construct
  REGION 1..978: note = engineered CasX variant
QEIKRINKIRRRLVKDSNTKKAGKTGPMKTLLVRVMTPDLRERLENLRKKPENIPQPISNTSRANLNKLLTDYTEMKKAILHVYWEEFQKDPVGLMSRVAQPASKKIDQNKLKPEMDEKGNLTTAGFACSQCGQPLFVYKLEQVSEKGKAYTNYFGRCNVAEHEKLILLAQLKPEKDSDEAVTYSLGKFGQRALDFYSIHVTKESTHPVKPLAQIAGNRYASGPVGKALSDACMGTIASFLSKYQDIIIEHQKVVKGNQKRLESLRELAGKENLEYPSVTLPPQPHTKEGVDAYNEVIARVRMWVNLNLWQKLKLSRDDAKPLLRLKGFPSFPLVERQANEVDWWDMVCNVKKLINEKKEDGKVFWQNLAGYKRQEALRPYLSSEEDRKKGKKFARYQLGDLLLHLEKKHGEDWGKVYDEAWERIDKKVEGLSKHIKLEEERRSEDAQSKAALTDWLRAKASFVIEGLKEADKDEFCRCELKLQKWYGDLRGKPFAIEAENSILDISGFSKQYNCAFIWQKDGVKKLNLYLIINYFKGGKLRFKKIKPEAFEANRFYTVINKKSGEIVPMEVNFNFDDPNLIILPLAFGKRQGREFIWNDLLSLETGSLKLANGRVIEKTLYNRRTRQDEPALFVALTFERREVLDSSNPKPMNLIGVDRGENIPAVIALTDPEGCPLERFKDSLGNPTHILRIGESYKEKQRTIQAKKEVEQRRLGGYSRKYASKAKNLADDMVRNTARDLLYYAVTQDAMLIFENLSRGFGRQGKRTFMAERQYTRMEDWLTAKLAYEGLPSKTYLSKTLAQYTSKTCSNCGFTITSADYDRVLEKLKKTATGWMTTINGKELKVEGQITYYNRYKRQNVVKDLSVELDRLSEESVNNDISSWTKGRSGEALSLLKKRFSHRPVQEKFVCLNCGFETHADEQAALNIARSWLFLRSQEYKKYQTNKTTGNTDKRAFVETWQSFYRKKLKEVWKPAV

SEQ ID NO: 25102 - protein, 978 aa, synthetic construct
  REGION 1..978: note = engineered CasX variant
QEIKRINKIRRRLVKDSNTKKAGKTGPMKTLLVRVMTPDLRERLENLRKKPENIPQPISNTSRANLNKLLTDYTEMKKAILHVYWEEFQKDPVGLMSRVAQPASKKIDQNKLKPEMDEKGNLTTAGFACSQCGQPLFVYKLEQVSEKGKAYTNYFGRCNVAEHEKLILLAQLKPEKDSDEAVTYSLGKFGQRALDFYSIHVTKESTHPVKPLAQIAGNRYASGPVGKALSDACMGTIASFLSKYQDIIIEHQKVVKGNQKRLESLRELAGKENLEYPSVTLPPQPHTKEGVDAYNEVIARVRMWVNLNLWQKLKLSRDDAKPLLRLKGFPSFPLVERQANEVDWWDMVCNVKKLINEKKEDGKVFWQNLAGYKRQEALRPYLSSEEDRKKGKKFARYQLGDLLLHLEKKHGEDWGKVYDEAWERIDKKVEGLSKHIKLEEERRSEDAQSKAALTDWLRAKASFVIEGLKEADKDEFCRCELKLQKWYGDLRGKPFAIEAENSILDISGFSKQYNCAFIWQKDGVKKLNLYLIINYFKGGKLRFKKIKPEAFEANRFYTVINKKSGEIVPMEVNFNFDDPNLIILPLAFGKRQGREFIWNDLLSLETGSLKLANGRVIEKTLYNRRTRQDEPALFVALTFERREVLDSSNPKPMNLIGVDRGENIPAVIALTDPEGCPLERFKDSLGNPTHILRIGESYKEKQRTIQAKKEVEQRRAGGYSRKYASKAKNLADDMVRNTARDLLYYAVTQDAMLIFENLSRGFGRQGKRTFMAERQYTRMEDWLTAKLAYEGLPSKTYLSKTLAQYTSKTCSNCGFTITSADYDRVLEKLKKTATGWMTTINGKELKVEGQITYYNRYKRQNVVKDLSVELDRLSEESVNNDISSWTKGRSGEALSLLKKRFSHRPVQEKFVCLNCGFETHADEQAALNIARSWLFLRSQEYKKYQTNKTTGNTDKRAFVETWQSFYRKKLKEVWKPAV

SEQ ID NO: 25103 - protein, 978 aa, synthetic construct
  REGION 1..978: note = engineered CasX variant
QEIKRINKIRRRLVKDSNTKKAGKTGPMKTLLVRVMTPDLRERLENLRKKPENIPQPISNTSRANLNKLLTDYTEMKKAILHVYWEEFQKDPVGLMSRVAQPASKKIDQNKLKPEMDEKGNLTTAGFACSQCGQPLFVYKLEQVSEKGKAYTNYFGRCNVAEHEKLILLAQLKPEKDSDEAVTYSLGKFGQRALDFYSIHVTKESTHPVKPLAQIAGNRYASGPVGKALSDACMGTIASFLSKYQDIIIEHQKVVKGNQKRLESLRELAGKENLEYPSVTLPPQPHTKEGVDAYNEVIARVRMWVNLNLWQKLKLSRDDAKPLLRLKGFPSFPLVERQANEVDWWDMVCNVKKLINEKKEDGKVFWQNLAGYKRQEALRPYLSSEEDRKKGKKFARYQLGDLLLHLEKKHGEDWGKVYDEAWERIDKKVEGLSKHIKLEEERRSEDAQSKAALTDWLRAKASFVIEGLKEADKDEFCRCELKLQKWYGDLRGKPFAIEAENSILDISGFSKQYNCAFIWQKDGVKKLNLYLIINYFKGGKLRFKKIKPEAFEANRFYTVINKKSGEIVPMEVNFNFDDPNLIILPLAFGKRQGREFIWNDLLSLETGSLKLANGRVIEKTLYNRRTRQDEPALFVALTFERREVLDSSNPKPMNLIGVDRGENIPAVIALTDPEGCPLERFKDSLGNPTHILRIGESYKEKQRTIQAKKEVEQRRAFGYSRKYASKAKNLADDMVRNTARDLLYYAVTQDAMLIFENLSRGFGRQGKRTFMAERQYTRMEDWLTAKLAYEGLPSKTYLSKTLAQYTSKTCSNCGFTITSADYDRVLEKLKKTATGWMTTINGKELKVEGQITYYNRYKRQNVVKDLSVELDRLSEESVNNDISSWTKGRSGEALSLLKKRFSHRPVQEKFVCLNCGFETHADEQAALNIARSWLFLRSQEYKKYQTNKTTGNTDKRAFVETWQSFYRKKLKEVWKPAV

SEQ ID NO: 25104 - protein, 978 aa, synthetic construct
  REGION 1..978: note = engineered CasX variant
QEIKRINKIRRRLVKDSNTKKAGKTGPMKTLLVRVMTPDLRERLENLRKKPENIPQPISNTSRANLNKLLTDYTEMKKAILHVYWEEFQKDPVGLMSRVAQPASKKIDQNKLKPEMDEKGNLTTAGFACSQCGQPLFVYKLEQVSEKGKAYTNYFGRCNVAEHEKLILLAQLKPEKDSDEAVTYSLGKFGQRALDFYSIHVTKESTHPVKPLAQIAGNRYASGPVGKALSDACMGTIASFLSKYQDIIIEHQKVVKGNQKRLESLRELAGKENLEYPSVTLPPQPHTKEGVDAYNEVIARVRMWVNLNLWQKLKLSRDDAKPLLRLKGFPSFPLVERQANEVDWWDMVCNVKKLINEKKEDGKVFWQNLAGYKRQEALRPYLSSEEDRKKGKKFARYQLGDLLLHLEKKHGEDWGKVYDEAWERIDKKVEGLSKHIKLEEERRSEDAQSKAALTDWLRAKASFVIEGLKEADKDEFCRCELKLQKWYGDLRGKPFAIEAENSILDISGFSKQYNCAFIWQKDGVKKLNLYLIINYFKGGKLRFKKIKPEAFEANRFYTVINKKSGEIVPMEVNFNFDDPNLIILPLAFGKRQGREFIWNDLLSLETGSLKLANGRVIEKTLYNRRTRQDEPALFVALTFERREVLDSSNPKPMNLIGVDRGENIPAVIALTDPEGCPLERFKDSLGNPTHILRIGECYKEKQRTIQAKKEVEQRRAGGYSRKYASKAKNLADDMVRNTARDLLYYAVTQDAMLIFENLSRGFGRQGKRTFMAERQYTRMEDWLTAKLAYEGLPSKTYLSKTLAQYTSKTCSNCGFTITSADYDRVLEKLKKTATGWMTTINGKELKVEGQITYYNRYKRQNVVKDLSVELDRLSEESVNNDISSWTKGRSGEALSLLKKRFSHRPVQEKFVCLNCGFETHADEQAALNIARSWLFLRSQEYKKYQTNKTTGNTDKRAFVETWQSFYRKKLKEVWKPAV

SEQ ID NO: 25105 - protein, 978 aa, synthetic construct
  REGION 1..978: note = engineered CasX variant
QEIKRINKIRRRLVKDSNTKKAGKTGPMKTLLVRVMTPDLRERLENLRKKPENIPQPISNTSRANLNKLLTDYTEMKKAILHVYWEEFQKDPVGLMSRVAQPASKKIDQNKLKPEMDEKGNLTTAGFACSQCGQPLFVYKLEQVSEKGKAYTNYFGRCNVAEHEKLILLAQLKPEKDSDEAVTYSLGKFGQRALDFYSIHVTKESTHPVKPLAQIAGNRYASGPVGKALSDACMGTIASFLSKYQDIIIEHQKVVKGNQKRLESLRELAGKENLEYPSVTLPPQPHTKEGVDAYNEVIARVRMWVNLNLWQKLKLSRDDAKPLLRLKGFPSFPLVERQANEVDWWDMVCNVKKLINEKKEDGKVFWQNLAGYKRQEALRPYLSSEEDRKKGKKFARYQLGDLLLHLEKKHGEDWGKVYDEAWERIDKKVEGLSKHIKLEEERRSEDAQSKAALTDWLRAKASFVIEGLKEADKDEFCRCELKLQKWYGDLRGKPFAIEAENSILDISGFSKQYNCAFIWQKDGVKKLNLYLIINYFKGGKLRFKKIKPEAFEANRFYTVINKKSGEIVPMEVNFNFDDPNLIILPLAFGKRQGREFIWNDLLSLETGSLKLANGRVIEKTLYNRRTRQDEPALFVALTFERREVLDSSNNKPMNLISVDRGENIPAVIALTDPEGCPLSRFKDSLGNPTHILRIGESYKEKQRTIVAKKEVEQRRAGGYSRKYASKAKNLADDMVRNTARDLLYYAVTQDAMLIFENLSRGFGRQGKRTFMAERQYTRMEDWLTAKLAYEGLPSKTYLSKTLAQYTSKTCSNCGFTITSADYDRVLEKLKKTATGWMTTINGKELKVEGQITYYNRYKRQNVVKDLSVELDRLSEESVNNDISSWTKGRSGEALSLLKKRFSHRPVQEKFVCLNCGFETHADEQAALNIARSWLFLRSQEYKKYQTNKTTGNTDKRAFVETWQSFYRKKLKEVWKPAV

SEQ ID NO: 25106 - protein, 978 aa, synthetic construct
  REGION 1..978: note = engineered CasX variant
QEIKRINKIRRRLVKDSNTKKAGKTGPMKTLLVRVMTPDLRERLENLRKKPENIPQPISNTSRANLNKLLTDYTEMKKAILHVYWEEFQKDPVGLMSRVAQPASKKIDQNKLKPEMDEKGNLTTAGFACSQCGQPLFVYKLEQVSEKGKAYTNYFGRCNVAEHEKLILLAQLKPEKDSDEAVTYSLGKFGQRALDFYSIHVTKESTHPVKPLAQIAGNRYASGPVGKALSDACMGTIASFLSKYQDIIIEHQKVVKGNQKRLESLRELAGKENLEYPSVTLPPQPHTKEGVDAYNEVIARVRMWVNLNLWQKLKLSRDDAKPLLRLKGFPSFPLVERQANEVDWWDMVCNVKKLINEKKEDGKVFWQNLAGYKRQEALRPYLSSEEDRKKGKKFARYQLGDLLLHLEKKHGEDWGKVYDEAWERIDKKVEGLSKHIKLEEERRSEDAQSKAALTDWLRAKASFVIEGLKEADKDEFCRCELKLQKWYGDLRGKPFAIEAENSILDISGFSKQYNCAFIWQKDGVKKLNLYLIINYFKGGKLRFKKIKPEAFEANRFYTVINKKSGEIVPMEVNFNFDDPNLIILPLAFGKRQGREFIWNDLLSLETGSLKLANGRVIEKTLYNRRTRQDEPALFVALTFERREVLDSSNNKPMNLISVDRGENIPAVIALTDPEGCPLSRFKDSLGNPTHILRIGESYKEKQRTIQAKKEVEQRRAGGYSRKYASKAKNLADDMVRNTARDLLYYAVTQDAMLIFENLSRGFGRQGKRTFMAERQYTRMEDWLTAKLAYEGLPSKTYLSKTLAQYTSKTCSNCGFTITSADYDRVLEKLKKTATGWMTTINGKELKVEGQITYYNRYKRQNVVKDLSVELDRLSEESVNNDISSWTKGRSGEALSLLKKRFSHRPVQEKFVCLNCGFETHADEQAALNIARSWLFLRSQEYKKYQTNKTTGNTDKRAFVETWQSFYRKKLKEVWKPAV

SEQ ID NO: 25107 - protein, 978 aa, synthetic construct
  REGION 1..978: note = engineered CasX variant
QEIKRINKIRRRLVKDSNTKKAGKTGPMKTLLVRVMTPDLRERLENLRKKPENIPQPISNTSRANLNKLLTDYTEMKKAILHVYWEEFQKDPVGLMSRVAQPASKKIDQNKLKPEMDEKGNLTTAGFACSQCGQPLFVYKLEQVSEKGKAYTNYFGRCNVAEHEKLILLAQLKPEKDSDEAVTYSLGKFGQRALDFYSIHVTKESTHPVKPLAQIAGNRYASGPVGKALSDACMGTIASFLSKYQDIIIEHQKVVKGNQKRLESLRELAGKENLEYPSVTLPPQPHTKEGVDAYNEVIARVRMWVNLNLWQKLKLSRDDAKPLLRLKGFPSFPLVERQANEVDWWDMVCNVKKLINEKKEDGKVFWQNLAGYKRQEALRPYLSSEEDRKKGKKFARYQLGDLLLHLEKKHGEDWGKVYDEAWERIDKKVEGLSKHIKLEEERRSEDAQSKAALTDWLRAKASFVIEGLKEADKDEFCRCELKLQKWYGDLRGKPFAIEAENSILDISGFSKQYNCAFIWQKDGVKKLNLYLIINYFKGGKLRFKKIKPEAFEANRFYTVINKKSGEIVPMEVNFNFDDPNLIILPLAFGKRQGREFIWNDLLSLETGSLKLANGRVIEKTLYNRRTRQDEPALFVALTFERREVLDSSNNKPMNLIGVDRGENIPAVIALTDPEGCPLSRFKDSLGRPTHILRIGESYKEKQRTIQAKKEVEQRRAGGYSRKYASKAKNLADDMVRNTARDLLYYAVTQDAMLIFENLSRGFGRQGKRTFMAERQYTRMEDWLTAKLAYEGLPSKTYLSKTLAQYTSKTCSNCGFTITSADYDRVLEKLKKTATGWMTTINGKELKVEGQITYYNRYKRQNVVKDLSVELDRLSEESVNNDISSWTKGRSGEALSLLKKRFSHRPVQEKFVCLNCGFETHADEQAALNIARSWLFLRSQEYKKYQTNKTTGNTDKRAFVETWQSFYRKKLKEVWKPAV

SEQ ID NO: 25108 - protein, 978 aa, synthetic construct
  REGION 1..978: note = engineered CasX variant
QEIKRINKIRRRLVKDSNTKKAGKTGPMKTLLVRVMTPDLRERLENLRKKPENIPQPISNTSRANLNKLLTDYTEMKKAILHVYWEEFQKDPVGLMSRVAQPASKKIDQNKLKPEMDEKGNLTTAGFACSQCGQPLFVYKLEQVSEKGKAYTNYFGRCNVAEHEKLILLAQLKPEKDSDEAVTYSLGKFGQRALDFYSIHVTKESTHPVKPLAQIAGNRYASGPVGKALSDACMGTIASFLSKYQDIIIEHQKVVKGNQKRLESLRELAGKENLEYPSVTLPPQPHTKEGVDAYNEVIARVRMWVNLNLWQKLKLSRDDAKPLLRLKGFPSFPLVERQANEVDWWDMVCNVKKLINEKKEDGKVFWQNLAGYKRQEALRPYLSSEEDRKKGKKFARYQLGDLLLHLEKKHGEDWGKVYDEAWERIDKKVEGLSKHIKLEEERRSEDAQSKAALTDWLRAKASFVIEGLKEADKDEFCRCELKLQKWYGDLRGKPFAIEAENSILDISGFSKQYNCAFIWQKDGVKKLNLYLIINYFKGGKLRFKKIKPEAFEANRFYTVINKKSGEIVPMEVNFNFDDPNLIILPLAFGKRQGREFIWNDLLSLETGSLKLANGRVIEKTLYNRRTRQDEPALFVALTFERREVLDSSNNKPMNLIGVDRGENIPAVIALTDPEGCPLSRFKDSLGNPTHILRIGESYKEKQRTIVAKKEVEQRRAGGYSRKYASKAKNLADDMVRNTARDLLYYAVTQDAMLIFENLSRGFGRQGKRTFMAERQYTRMEDWLTAKLAYEGLPSKTYLSKTLAQYTSKTCSNCGFTITSADYDRVLEKLKKTATGWMTTINGKELKVEGQITYYNRYKRQNVVKDLSVELDRLSEESVNNDISSWTKGRSGEALSLLKKRFSHRPVQEKFVCLNCGFETHADEQAALNIARSWLFLRSQEYKKYQTNKTTGNTDKRAFVETWQSFYRKKLKEVWKPAV

SEQ ID NO: 25109 - protein, 978 aa, synthetic construct
  REGION 1..978: note = engineered CasX variant
QEIKRINKIRRRLVKDSNTKKAGKTGPMKTLLVRVMTPDLRERLENLRKKPENIPQPISNTSRANLNKLLTDYTEMKKAILHVYWEEFQKDPVGLMSRVAQPASKKIDQNKLKPEMDEKGNLTTAGFACSQCGQPLFVYKLEQVSEKGKAYTNYFGRCNVAEHEKLILLAQLKPEKDSDEAVTYSLGKFGQRALDFYSIHVTKESTHPVKPLAQIAGNRYASGPVGKALSDACMGTIASFLSKYQDIIIEHQKVVKGNQKRLESLRELAGKENLEYPSVTLPPQPHTKEGVDAYNEVIARVRMWVNLNLWQKLKLSRDDAKPLLRLKGFPSFPLVERQANEVDWWDMVCNVKKLINEKKEDGKVFWQNLAGYKRQEALRPYLSSEEDRKKGKKFARYQLGDLLLHLEKKHGEDWGKVYDEAWERIDKKVEGLSKHIKLEEERRSEDAQSKAALTDWLRAKASFVIEGLKEADKDEFCRCELKLQKWYGDLRGKPFAIEAENSILDISGFSKQYNCAFIWQKDGVKKLNLYLIINYFKGGKLRFKKIKPEAFEANRFYTVINKKSGEIVPMEVNFNFDDPNLIILPLAFGKRQGREFIWNDLLSLETGSLKLANGRVIEKTLYNRRTRQDEPALFVALTFERREVLDSSNNKPMNLIGVDRGENIPAVIALTDPEGCPLSRFKDSLGNPTHILRIGESYKEKQRTIQAKKEVEQRRAGGYSRKYASKAKNLADDMVRNTARDLLYYAVTQDAMLIFENLSRGFGRQGKRTFMAERQYTRMEDWLTAKLAYEGLPSKTYLSKTLAQYTSKTCSNCGFTITSADYDRVLEKLKKTATGWMTTINGKELKVEGQITYYNRYKRQNVVKDLSVELDRLSEESVNNDISSWTKGRSGEALSLLKKRFSHRPVQEKFVCLNCGFETHADEQAALNIARSWLFLRSQEYKKYQTNKTTGNTDKRAFVETWQSFYRKKLKEVWKPAV

SEQ ID NO: 25110 - protein, 978 aa, synthetic construct
  REGION 1..978: note = engineered CasX variant
QEIKRINKIRRRLVKDSNTKKAGKTGPMKTLLVRVMTPDLRERLENLRKKPENIPQPISNTSRANLNKLLTDYTEMKKAILHVYWEEFQKDPVGLMSRVAQPASKKIDQNKLKPEMDEKGNLTTAGFACSQCGQPLFVYKLEQVSEKGKAYTNYFGRCNVAEHEKLILLAQLKPEKDSDEAVTYSLGKFGQRALDFYSIHVTKESTHPVKPLAQIAGNRYASGPVGKALSDACMGTIASFLSKYQDIIIEHQKVVKGNQKRLESLRELAGKENLEYPSVTLPPQPHTKEGVDAYNEVIARVRMWVNLNLWQKLKLSRDDAKPLLRLKGFPSFPLVERQANEVDWWDMVCNVKKLINEKKEDGKVFWQNLAGYKRQEALRPYLSSEEDRKKGKKFARYQLGDLLLHLEKKHGEDWGKVYDEAWERIDKKVEGLSKHIKLEEERRSEDAQSKAALTDWLRAKASFVIEGLKEADKDEFCRCELKLQKWYGDLRGKPFAIEAENSILDISGFSKQYNCAFIWQKDGVKKLNLYLIINYFKGGKLRFKKIKPEAFEANRFYTVINKKSGEIVPMEVNFNFDDPNLIILPLAFGKRQGREFIWNDLLSLETGSLKLANGRVIEKTLYNRRTRQDEPALFVALTFERREVLDSSNMKPMNLIGVDRGENIPAVIALTDSEGCPLSRFKDSLGNPTHILRIGESYKEKQRTIQAKKEVEQRRAGGYSRKYASKAKNLADDMVRNTARDLLYYAVTQDAMLIFENLSRGFGRQGKRTFMAERQYTRMEDWLTAKLAYEGLPSKTYLSKTLAQYTSKTCSNCGFTITSADYDRVLEKLKKTATGWMTTINGKELKVEGQITYYNRYKRQNVVKDLSVELDRLSEESVNNDISSWTKGRSGEALSLLKKRFSHRPVQEKFVCLNCGFETHADEQAALNIARSWLFLRSQEYKKYQTNKTTGNTDKRAFVETWQSFYRKKLKEVWKPAV

SEQ ID NO: 25111 - protein, 978 aa, synthetic construct
  REGION 1..978: note = engineered CasX variant
QEIKRINKIRRRLVKDSNTKKAGKTGPMKTLLVRVMTPDLRERLENLRKKPENIPQPISNTSRANLNKLLTDYTEMKKAILHVYWEEFQKDPVGLMSRVAQPASKKIDQNKLKPEMDEKGNLTTAGFACSQCGQPLFVYKLEQVSEKGKAYTNYFGRCNVAEHEKLILLAQLKPEKDSDEAVTYSLGKFGQRALDFYSIHVTKESTHPVKPLAQIAGNRYASGPVGKALSDACMGTIASFLSKYQDIIIEHQKVVKGNQKRLESLRELAGKENLEYPSVTLPPQPHTKEGVDAYNEVIARVRMWVNLNLWQKLKLSRDDAKPLLRLKGFPSFPLVERQANEVDWWDMVCNVKKLINEKKEDGKVFWQNLAGYKRQEALRPYLSSEEDRKKGKKFARYQLGDLLLHLEKKHGEDWGKVYDEAWERIDKKVEGLSKHIKLEEERRSEDAQSKAALTDWLRAKASFVIEGLKEADKDEFCRCELKLQKWYGDLRGKPFAIEAENSILDISGFSKQYNCAFIWQKDGVKKLNLYLIINYFKGGKLRFKKIKPEAFEANRFYTVINKKSGEIVPMEVNFNFDDPNLIILPLAFGKRQGREFIWNDLLSLETGSLKLANGRVIEKTLYNRRTRQDEPALFVALTFERREVLDSSNMKPMNLIGVDRGENIPAVIALTDPEGSPLSRFKDSLGNPTHILRIGESYKEKQRTIQAKKEVEQRRAGGYSRKYASKAKNLADDMVRNTARDLLYYAVTQDAMLIFENLSRGFGRQGKRTFMAERQYTRMEDWLTAKLAYEGLPSKTYLSKTLAQYTSKTCSNCGFTITSADYDRVLEKLKKTATGWMTTINGKELKVEGQITYYNRYKRQNVVKDLSVELDRLSEESVNNDISSWTKGRSGEALSLLKKRFSHRPVQEKFVCLNCGFETHADEQAALNIARSWLFLRSQEYKKYQTNKTTGNTDKRAFVETWQSFYRKKLKEVWKPAV

SEQ ID NO: 25112 - protein, 978 aa, synthetic construct
  REGION 1..978: note = engineered CasX variant
QEIKRINKIRRRLVKDSNTKKAGKTGPMKTLLVRVMTPDLRERLENLRKKPENIPQPISNTSRANLNKLLTDYTEMKKAILHVYWEEFQKDPVGLMSRVAQPASKKIDQNKLKPEMDEKGNLTTAGFACSQCGQPLFVYKLEQVSEKGKAYTNYFGRCNVAEHEKLILLAQLKPEKDSDEAVTYSLGKFGQRALDFYSIHVTKESTHPVKPLAQIAGNRYASGPVGKALSDACMGTIASFLSKYQDIIIEHQKVVKGNQKRLESLRELAGKENLEYPSVTLPPQPHTKEGVDAYNEVIARVRMWVNLNLWQKLKLSRDDAKPLLRLKGFPSFPLVERQANEVDWWDMVCNVKKLINEKKEDGKVFWQNLAGYKRQEALRPYLSSEEDRKKGKKFARYQLGDLLLHLEKKHGEDWGKVYDEAWERIDKKVEGLSKHIKLEEERRSEDAQSKAALTDWLRAKASFVIEGLKEADKDEFCRCELKLQKWYGDLRGKPFAIEAENSILDISGFSKQYNCAFIWQKDGVKKLNLYLIINYFKGGKLRFKKIKPEAFEANRFYTVINKKSGEIVPMEVNFNFDDPNLIILPLAFGKRQGREFIWNDLLSLETGSLKLANGRVIEKTLYNRRTRQDEPALFVALTFERREVLDSSNMKPMNLIGVDRGENIPAVIALTDPEGCPLSVFKDSLGNPTHILRIGESYKEKQRTIQASKEVEQRRAGGYSRKYASKAKNLADDMVRNTARDLLYYAVTQDAMLIFENLSRGFGRQGKRTFMAERQYTRMEDWLTAKLAYEGLPSKTYLSKTLAQYTSKTCSNCGFTITSADYDRVLEKLKKTATGWMTTINGKELKVEGQITYYNRYKRQNVVKDLSVELDRLSEESVNNDISSWTKGRSGEALSLLKKRFSHRPVQEKFVCLNCGFETHADEQAALNIARSWLFLRSQEYKKYQTNKTTGNTDKRAFVETWQSFYRKKLKEVWKPAV

SEQ ID NO: 25113 - protein, 978 aa, synthetic construct
  REGION 1..978: note = engineered CasX variant
QEIKRINKIRRRLVKDSNTKKAGKTGPMKTLLVRVMTPDLRERLENLRKKPENIPQPISNTSRANLNKLLTDYTEMKKAILHVYWEEFQKDPVGLMSRVAQPASKKIDQNKLKPEMDEKGNLTTAGFACSQCGQPLFVYKLEQVSEKGKAYTNYFGRCNVAEHEKLILLAQLKPEKDSDEAVTYSLGKFGQRALDFYSIHVTKESTHPVKPLAQIAGNRYASGPVGKALSDACMGTIASFLSKYQDIIIEHQKVVKGNQKRLESLRELAGKENLEYPSVTLPPQPHTKEGVDAYNEVIARVRMWVNLNLWQKLKLSRDDAKPLLRLKGFPSFPLVERQANEVDWWDMVCNVKKLINEKKEDGKVFWQNLAGYKRQEALRPYLSSEEDRKKGKKFARYQLGDLLLHLEKKHGEDWGKVYDEAWERIDKKVEGLSKHIKLEEERRSEDAQSKAALTDWLRAKASFVIEGLKEADKDEFCRCELKLQKWYGDLRGKPFAIEAENSILDISGFSKQYNCAFIWQKDGVKKLNLYLIINYFKGGKLRFKKIKPEAFEANRFYTVINKKSGEIVPMEVNFNFDDPNLIILPLAFGKRQGREFIWNDLLSLETGSLKLANGRVIEKTLYNRRTRQDEPALFVALTFERREVLDSSNMKPMNLIGVDRGENIPAVIALTDPEGCPLSVFKDSLGNPTHILRIGESYKEKQRTIQAKKEVEQRRAGGYSRKYASKAKNLADDMVRNTARDLLYYAVTQDAMLIFENLSRGFGRQGKRTFMAERQYTRMEDWLTAKLAYEGLPSKTYLSKTLAQYTSKTCSNCGFTITSADYDRVLEKLKKTATGWMTTINGKELKVEGQITYYNRYKRQNVVKDLSVELDRLSEESVNNDISSWTKGRSGEALSLLKKRFSHRPVQEKFVCLNCGFETHADEQAALNIARSWLFLRSQEYKKYQTNKTTGNTDKRAFVETWQSFYRKKLKEVWKPAV

SEQ ID NO: 25114 - protein, 978 aa, synthetic construct
  REGION 1..978: note = engineered CasX variant
QEIKRINKIRRRLVKDSNTKKAGKTGPMKTLLVRVMTPDLRERLENLRKKPENIPQPISNTSRANLNKLLTDYTEMKKAILHVYWEEFQKDPVGLMSRVAQPASKKIDQNKLKPEMDEKGNLTTAGFACSQCGQPLFVYKLEQVSEKGKAYTNYFGRCNVAEHEKLILLAQLKPEKDSDEAVTYSLGKFGQRALDFYSIHVTKESTHPVKPLAQIAGNRYASGPVGKALSDACMGTIASFLSKYQDIIIEHQKVVKGNQKRLESLRELAGKENLEYPSVTLPPQPHTKEGVDAYNEVIARVRMWVNLNLWQKLKLSRDDAKPLLRLKGFPSFPLVERQANEVDWWDMVCNVKKLINEKKEDGKVFWQNLAGYKRQEALRPYLSSEEDRKKGKKFARYQLGDLLLHLEKKHGEDWGKVYDEAWERIDKKVEGLSKHIKLEEERRSEDAQSKAALTDWLRAKASFVIEGLKEADKDEFCRCELKLQKWYGDLRGKPFAIEAENSILDISGFSKQYNCAFIWQKDGVKKLNLYLIINYFKGGKLRFKKIKPEAFEANRFYTVINKKSGEIVPMEVNFNFDDPNLIILPLAFGKRQGREFIWNDLLSLETGSLKLANGRVIEKTLYNRRTRQDEPALFVALTFERREVLDSSNMKPMNLIGVDRGENIPAVIALTDPEGCPLSRFKDSLGNPTHILRIGESYKEKQRTIQASKEVEQRRAGGYSRKYASKAKNLADDMVRNTARDLLYYAVTQDAMLIFENLSRGFGRQGKRTFMAERQYTRMEDWLTAKLAYEGLPSKTYLSKTLAQYTSKTCSNCGFTITSADYDRVLEKLKKTATGWMTTINGKELKVEGQITYYNRYKRQNVVKDLSVELDRLSEESVNNDISSWTKGRSGEALSLLKKRFSHRPVQEKFVCLNCGFETHADEQAALNIARSWLFLRSQEYKKYQTNKTTGNTDKRAFVETWQSFYRKKLKEVWKPAV

SEQ ID NO: 25115 - protein, 978 aa, synthetic construct
  REGION 1..978: note = engineered CasX variant
QEIKRINKIRRRLVKDSNTKKAGKTGPMKTLLVRVMTPDLRERLENLRKKPENIPQPISNTSRANLNKLLTDYTEMKKAILHVYWEEFQKDPVGLMSRVAQPASKKIDQNKLKPEMDEKGNLTTAGFACSQCGQPLFVYKLEQVSEKGKAYTNYFGRCNVAEHEKLILLAQLKPEKDSDEAVTYSLGKFGQRALDFYSIHVTKESTHPVKPLAQIAGNRYASGPVGKALSDACMGTIASFLSKYQDIIIEHQKVVKGNQKRLESLRELAGKENLEYPSVTLPPQPHTKEGVDAYNEVIARVRMWVNLNLWQKLKLSRDDAKPLLRLKGFPSFPLVERQANEVDWWDMVCNVKKLINEKKEDGKVFWQNLAGYKRQEALRPYLSSEEDRKKGKKFARYQLGDLLLHLEKKHGEDWGKVYDEAWERIDKKVEGLSKHIKLEEERRSEDAQSKAALTDWLRAKASFVIEGLKEADKDEFCRCELKLQKWYGDLRGKPFAIEAENSILDISGFSKQYNCAFIWQKDGVKKLNLYLIINYFKGGKLRFKKIKPEAFEANRFYTVINKKSGEIVPMEVNFNFDDPNLIILPLAFGKRQGREFIWNDLLSLETGSLKLANGRVIEKTLYNRRTRQDEPALFVALTFERREVLDSSNMKPMNLIGVDRGENIPAVIALTDPEGCPLSRFKDSLGNPTHILRIGESYKEKQRTIQAKKEVEQRRAGGYSRKYASKAKNLADDMVRNTARDLLYYAVTQDAMLIFENLSRGFGRQGKRTFMAERQYTRMEDWLTAKLAYEGLPSKTYLSKTLAQYTSKTCSNCGFTITSADYDRVLEKLKKTATGWMTTINGKELKVEGQITYYNRYKRQNVVKDLSVELDRLSEESVNNDISSWTKGRSGEALSLLKKRFSHRPVQEKFVCLNCGFETHADEQAALNIARSWLFLRSQEYKKYQTNKTTGNTDKRAFVETWQSFYRKKLKEVWKPAV

SEQ ID NO: 25116 - protein, 978 aa, synthetic construct
  REGION 1..978: note = engineered CasX variant
QEIKRINKIRRRLVKDSNTKKAGKTGPMKTLLVRVMTPDLRERLENLRKKPENIPQPISNTSRANLNKLLTDYTEMKKAILHVYWEEFQKDPVGLMSRVAQPASKKIDQNKLKPEMDEKGNLTTAGFACSQCGQPLFVYKLEQVSEKGKAYTNYFGRCNVAEHEKLILLAQLKPEKDSDEAVTYSLGKFGQRALDFYSIHVTKESTHPVKPLAQIAGNRYASGPVGKALSDACMGTIASFLSKYQDIIIEHQKVVKGNQKRLESLRELAGKENLEYPSVTLPPQPHTKEGVDAYNEVIARVRMWVNLNLWQKLKLSRDDAKPLLRLKGFPSFPLVERQANEVDWWDMVCNVKKLINEKKEDGKVFWQNLAGYKRQEALRPYLSSEEDRKKGKKFARYQLGDLLLHLEKKHGEDWGKVYDEAWERIDKKVEGLSKHIKLEEERRSEDAQSKAALTDWLRAKASFVIEGLKEADKDEFCRCELKLQKWYGDLRGKPFAIEAENSILDISGFSKQYNCAFIWQKDGVKKLNLYLIINYFKGGKLRFKKIKPEAFEANRFYTVINKKSGEIVPMEVNFNFDDPNLIILPLAFGKRQGREFIWNDLLSLETGSLKLANGRVIEKTLYNRRTRQDEPALFVALTFERREVLDSSNMCPMNLIGVDRGENIPAVIALTDSEGCPLSRFKDSLGNPTHILRIGESYKEKQRTIQAKKEVEQRRAGGYSRKYASKAKNLADDMVRNTARDLLYYAVTQDAMLIFENLSRGFGRQGKRTFMAERQYTRMEDWLTAKLAYEGLPSKTYLSKTLAQYTSKTCSNCGFTITSADYDRVLEKLKKTATGWMTTINGKELKVEGQITYYNRYKRQNVVKDLSVELDRLSEESVNNDISSWTKGRSGEALSLLKKRFSHRPVQEKFVCLNCGFETHADEQAALNIARSWLFLRSQEYKKYQTNKTTGNTDKRAFVETWQSFYRKKLKEVWKPAV

SEQ ID NO: 25117 - protein, 978 aa, synthetic construct
  REGION 1..978: note = engineered CasX variant
QEIKRINKIRRRLVKDSNTKKAGKTGPMKTLLVRVMTPDLRERLENLRKKPENIPQPISNTSRANLNKLLTDYTEMKKAILHVYWEEFQKDPVGLMSRVAQPASKKIDQNKLKPEMDEKGNLTTAGFACSQCGQPLFVYKLEQVSEKGKAYTNYFGRCNVAEHEKLILLAQLKPEKDSDEAVTYSLGKFGQRALDFYSIHVTKESTHPVKPLAQIAGNRYASGPVGKALSDACMGTIASFLSKYQDIIIEHQKVVKGNQKRLESLRELAGKENLEYPSVTLPPQPHTKEGVDAYNEVIARVRMWVNLNLWQKLKLSRDDAKPLLRLKGFPSFPLVERQANEVDWWDMVCNVKKLINEKKEDGKVFWQNLAGYKRQEALRPYLSSEEDRKKGKKFARYQLGDLLLHLEKKHGEDWGKVYDEAWERIDKKVEGLSKHIKLEEERRSEDAQSKAALTDWLRAKASFVIEGLKEADKDEFCRCELKLQKWYGDLRGKPFAIEAENSILDISGFSKQYNCAFIWQKDGVKKLNLYLIINYFKGGKLRFKKIKPEAFEANRFYTVINKKSGEIVPMEVNFNFDDPNLIILPLAFGKRQGREFIWNDLLSLETGSLKLANGRVIEKTLYNRRTRQDEPALFVALTFERREVLDSSNMCPMNLIGVDRGENIPAVIALTDPEGCPLSRFKDSLGNPTHILRIGESYKEKQRTIQAKKEVEQRRAGGYSRKYASKAKNLADDMVRNTARDLLYYAVTQDAMLIFENLSRGFGRQGKRTFMAERQYTRMEDWLTAKLAYEGLPSKTYLSKTLAQYTSKTCSNCGFTITSADYDRVLEKLKKTATGWMTTINGKELKVEGQITYYNRYKRQNVVKDLSVELDRLSEESVNNDISSWTKGRSGEALSLLKKRFSHRPVQEKFVCLNCGFETHADEQAALNIARSWLFLRSQEYKKYQTNKTTGNTDKRAFVETWQSFYRKKLKEVWKPAV

SEQ ID NO: 25118 - protein, 978 aa, synthetic construct
  REGION 1..978: note = engineered CasX variant
QEIKRINKIRRRLVKDSNTKKAGKTGPMKTLLVRVMTPDLRERLENLRKKPENIPQPISNTSRANLNKLLTDYTEMKKAILHVYWEEFQKDPVGLMSRVAQPASKKIDQNKLKPEMDEKGNLTTAGFACSQCGQPLFVYKLEQVSEKGKAYTNYFGRCNVAEHEKLILLAQLKPEKDSDEAVTYSLGKFGQRALDFYSIHVTKESTHPVKPLAQIAGNRYASGPVGKALSDACMGTIASFLSKYQDIIIEHQKVVKGNQKRLESLRELAGKENLEYPSVTLPPQPHTKEGVDAYNEVIARVRMWVNLNLWQKLKLSRDDAKPLLRLKGFPSFPLVERQANEVDWWDMVCNVKKLINEKKEDGKVFWQNLAGYKRQEALRPYLSSEEDRKKGKKFARYQLGDLLLHLEKKHGEDWGKVYDEAWERIDKKVEGLSKHIKLEEERRSEDAQSKAALTDWLRAKASFVIEGLKEADKDEFCRCELKLQKWYGDLRGKPFAIEAENSILDISGFSKQYNCAFIWQKDGVKKLNLYLIINYFKGGKLRFKKIKPEAFEANRFYTVINKKSGEIVPMEVNFNFDDPNLIILPLAFGKRQGREFIWNDLLSLETGSLKLANGRVIEKTLYNRRTRQDEPALFVALTFERREVLDSSNLKPMNLIGVDRGENIPAVIALTDPEGCPLSRFKDSNGNPTHILRIGESYKEKQRTIQAKKEVEQRRAGGYSRKYASKAKNLADDMVRNTARDLLYYAVTQDAMLIFENLSRGFGRQGKRTFMAERQYTRMEDWLTAKLAYEGLPSKTYLSKTLAQYTSKTCSNCGFTITSADYDRVLEKLKKTATGWMTTINGKELKVEGQITYYNRYKRQNVVKDLSVELDRLSEESVNNDISSWTKGRSGEALSLLKKRFSHRPVQEKFVCLNCGFETHADEQAALNIARSWLFLRSQEYKKYQTNKTTGNTDKRAFVETWQSFYRKKLKEVWKPAV

SEQ ID NO: 25119 - protein, 978 aa, synthetic construct
  REGION 1..978: note = engineered CasX variant
QEIKRINKIRRRLVKDSNTKKAGKTGPMKTLLVRVMTPDLRERLENLRKKPENIPQPISNTSRANLNKLLTDYTEMKKAILHVYWEEFQKDPVGLMSRVAQPASKKIDQNKLKPEMDEKGNLTTAGFACSQCGQPLFVYKLEQVSEKGKAYTNYFGRCNVAEHEKLILLAQLKPEKDSDEAVTYSLGKFGQRALDFYSIHVTKESTHPVKPLAQIAGNRYASGPVGKALSDACMGTIASFLSKYQDIIIEHQKVVKGNQKRLESLRELAGKENLEYPSVTLPPQPHTKEGVDAYNEVIARVRMWVNLNLWQKLKLSRDDAKPLLRLKGFPSFPLVERQANEVDWWDMVCNVKKLINEKKEDGKVFWQNLAGYKRQEALRPYLSSEEDRKKGKKFARYQLGDLLLHLEKKHGEDWGKVYDEAWERIDKKVEGLSKHIKLEEERRSEDAQSKAALTDWLRAKASFVIEGLKEADKDEFCRCELKLQKWYGDLRGKPFAIEAENSILDISGFSKQYNCAFIWQKDGVKKLNLYLIINYFKGGKLRFKKIKPEAFEANRFYTVINKKSGEIVPMEVNFNFDDPNLIILPLAFGKRQGREFIWNDLLSLETGSLKLANGRVIEKTLYNRRTRQDEPALFVALTFERREVLDSSNLKPMNLIGVDRGENIPAVIALTDPEGCPLSRFKDSLGNPTHILRIGESYKEKQRTIQAKKEVEQRRAGGYSRKYASKAKNLADDMVRNTARDLLYYAVTQDAMLIFENLSRGFGRQGKRTFMAERQYTRMEDWLTAKLAYEGLPSKTYLSKTLAQYTSKTCSNCGFTITSADYDRVLEKLKKTATGWMTTINGKELKVEGQITYYNRYKRQNVVKDLSVELDRLSEESVNNDISSWTKGRSGEALSLLKKRFSHRPVQEKFVCLNCGFETHADEQAALNIARSWLFLRSQEYKKYQTNKTTGNTDKRAFVETWQSFYRKKLKEVWKPAV

SEQ ID NO: 25120 - protein, 978 aa, synthetic construct
  REGION 1..978: note = engineered CasX variant
QEIKRINKIRRRLVKDSNTKKAGKTGPMKTLLVRVMTPDLRERLENLRKKPENIPQPISNTSRANLNKLLTDYTEMKKAILHVYWEEFQKDPVGLMSRVAQPASKKIDQNKLKPEMDEKGNLTTAGFACSQCGQPLFVYKLEQVSEKGKAYTNYFGRCNVAEHEKLILLAQLKPEKDSDEAVTYSLGKFGQRALDFYSIHVTKESTHPVKPLAQIAGNRYASGPVGKALSDACMGTIASFLSKYQDIIIEHQKVVKGNQKRLESLRELAGKENLEYPSVTLPPQPHTKEGVDAYNEVIARVRMWVNLNLWQKLKLSRDDAKPLLRLKGFPSFPLVERQANEVDWWDMVCNVKKLINEKKEDGKVFWQNLAGYKRQEALRPYLSSEEDRKKGKKFARYQLGDLLLHLEKKHGEDWGKVYDEAWERIDKKVEGLSKHIKLEEERRSEDAQSKAALTDWLRAKASFVIEGLKEADKDEFCRCELKLQKWYGDLRGKPFAIEAENSILDISGFSKQYNCAFIWQKDGVKKLNLYLIINYFKGGKLRFKKIKPEAFEANRFYTVINKKSGEIVPMEVNFNFDDPNLIILPLAFGKRQGREFIWNDLLSLETGSLKLANGRVIEKTLYNRRTRQDEPALFVALTFERREVLDSSNLKPMNLIGVDRGENIPAVIALTDPEGCNLSRFKDSNGNPTHILRIGESYKEKQRTIQAKKEVEQRRAGGYSRKYASKAKNLADDMVRNTARDLLYYAVTQDAMLIFENLSRGFGRQGKRTFMAERQYTRMEDWLTAKLAYEGLPSKTYLSKTLAQYTSKTCSNCGFTITSADYDRVLEKLKKTATGWMTTINGKELKVEGQITYYNRYKRQNVVKDLSVELDRLSEESVNNDISSWTKGRSGEALSLLKKRFSHRPVQEKFVCLNCGFETHADEQAALNIARSWLFLRSQEYKKYQTNKTTGNTDKRAFVETWQSFYRKKLKEVWKPAV

SEQ ID NO: 25121 - protein, 978 aa, synthetic construct
  REGION 1..978: note = engineered CasX variant
QEIKRINKIRRRLVKDSNTKKAGKTGPMKTLLVRVMTPDLRERLENLRKKPENIPQPISNTSRANLNKLLTDYTEMKKAILHVYWEEFQKDPVGLMSRVAQPASKKIDQNKLKPEMDEKGNLTTAGFACSQCGQPLFVYKLEQVSEKGKAYTNYFGRCNVAEHEKLILLAQLKPEKDSDEAVTYSLGKFGQRALDFYSIHVTKESTHPVKPLAQIAGNRYASGPVGKALSDACMGTIASFLSKYQDIIIEHQKVVKGNQKRLESLRELAGKENLEYPSVTLPPQPHTKEGVDAYNEVIARVRMWVNLNLWQKLKLSRDDAKPLLRLKGFPSFPLVERQANEVDWWDMVCNVKKLINEKKEDGKVFWQNLAGYKRQEALRPYLSSEEDRKKGKKFARYQLGDLLLHLEKKHGEDWGKVYDEAWERIDKKVEGLSKHIKLEEERRSEDAQSKAALTDWLRAKASFVIEGLKEADKDEFCRCELKLQKWYGDLRGKPFAIEAENSILDISGFSKQYNCAFIWQKDGVKKLNLYLIINYFKGGKLRFKKIKPEAFEANRFYTVINKKSGEIVPMEVNFNFDDPNLIILPLAFGKRQGREFIWNDLLSLETGSLKLANGRVIEKTLYNRRTRQDEPALFVALTFERREVLDSSNLKPMNLIAVDRGENIPAVIALTDPEGCPLSRFKDSLGNPTHILRIGESYKEKQRTIQAKKEVEQRRAGGYSRKYASKAKNLADDMVRNTARDLLYYAVTQDAMLIFENLSRGFGRQGKRTFMAERQYTRMEDWLTAKLAYEGLPSKTYLSKTLAQYTSKTCSNCGFTITSADYDRVLEKLKKTATGWMTTINGKELKVEGQITYYNRYKRQNVVKDLSVELDRLSEESVNNDISSWTKGRSGEALSLLKKRFSHRPVQEKFVCLNCGFETHADEQAALNIARSWLFLRSQEYKKYQTNKTTGNTDKRAFVETWQSFYRKKLKEVWKPAV

SEQ ID NO: 25122 - protein, 978 aa, synthetic construct
  REGION 1..978: note = engineered CasX variant
QEIKRINKIRRRLVKDSNTKKAGKTGPMKTLLVRVMTPDLRERLENLRKKPENIPQPISNTSRANLNKLLTDYTEMKKAILHVYWEEFQKDPVGLMSRVAQPASKKIDQNKLKPEMDEKGNLTTAGFACSQCGQPLFVYKLEQVSEKGKAYTNYFGRCNVAEHEKLILLAQLKPEKDSDEAVTYSLGKFGQRALDFYSIHVTKESTHPVKPLAQIAGNRYASGPVGKALSDACMGTIASFLSKYQDIIIEHQKVVKGNQKRLESLRELAGKENLEYPSVTLPPQPHTKEGVDAYNEVIARVRMWVNLNLWQKLKLSRDDAKPLLRLKGFPSFPLVERQANEVDWWDMVCNVKKLINEKKEDGKVFWQNLAGYKRQEALRPYLSSEEDRKKGKKFARYQLGDLLLHLEKKHGEDWGKVYDEAWERIDKKVEGLSKHIKLEEERRSEDAQSKAALTDWLRAKASFVIEGLKEADKDEFCRCELKLQKWYGDLRGKPFAIEAENSILDISGFSKQYNCAFIWQKDGVKKLNLYLIINYFKGGKLRFKKIKPEAFEANRFYTVINKKSGEIVPMEVNFNFDDPNLIILPLAFGKRQGREFIWNDLLSLETGSLKLANGRVIEKTLYNRRTRQDEPALFVALTFERREVLDSSNLKPMNLCGVDRGENIPAVIALTDPEGCPLSRFKDSLGNPTHILRIGESYKEKQRTIQAKKEVEQRRAGGYSRKYASKAKNLADDMVRNTARDLLYYAVTQDAMLIFENLSRGFGRQGKRTFMAERQYTRMEDWLTAKLAYEGLPSKTYLSKTLAQYTSKTCSNCGFTITSADYDRVLEKLKKTATGWMTTINGKELKVEGQITYYNRYKRQNVVKDLSVELDRLSEESVNNDISSWTKGRSGEALSLLKKRFSHRPVQEKFVCLNCGFETHADEQAALNIARSWLFLRSQEYKKYQTNKTTGNTDKRAFVETWQSFYRKKLKEVWKPAV

SEQ ID NO: 25123 - protein, 978 aa, synthetic construct
  REGION 1..978: note = engineered CasX variant
QEIKRINKIRRRLVKDSNTKKAGKTGPMKTLLVRVMTPDLRERLENLRKKPENIPQPISNTSRANLNKLLTDYTEMKKAILHVYWEEFQKDPVGLMSRVAQPASKKIDQNKLKPEMDEKGNLTTAGFACSQCGQPLFVYKLEQVSEKGKAYTNYFGRCNVAEHEKLILLAQLKPEKDSDEAVTYSLGKFGQRALDFYSIHVTKESTHPVKPLAQIAGNRYASGPVGKALSDACMGTIASFLSKYQDIIIEHQKVVKGNQKRLESLRELAGKENLEYPSVTLPPQPHTKEGVDAYNEVIARVRMWVNLNLWQKLKLSRDDAKPLLRLKGFPSFPLVERQANEVDWWDMVCNVKKLINEKKEDGKVFWQNLAGYKRQEALRPYLSSEEDRKKGKKFARYQLGDLLLHLEKKHGEDWGKVYDEAWERIDKKVEGLSKHIKLEEERRSEDAQSKAALTDWLRAKASFVIEGLKEADKDEFCRCELKLQKWYGDLRGKPFAIEAENSILDISGFSKQYNCAFIWQKDGVKKLNLYLIINYFKGGKLRFKKIKPEAFEANRFYTVINKKSGEIVPMEVNFNFDDPNLIILPLAFGKRQGREFIWNDLLSLETGSLKLANGRVIEKTLYNRRTRQDEPALFVALTFERREVLDSSNKKPMNLIGVDRGENIPAVIALTDPEGCPLSRFKDSLGNPTHILRIGESYKEKQRTIQAKKEVEQRRAGGYSRKYASKAKNLADDMVRNTARDLLYYAVTQDAMLIFENLSRGFGRQGKRTFMAERQYTRMEDWLTAKLAYEGLPSKTYLSKTLAQYTSKTCSNCGFTITSADYDRVLEKLKKTATGWMTTINGKELKVEGQITYYNRYKRQNVVKDLSVELDRLSEESVNNDISSWTKGRSGEALSLLKKRFSHRPVQEKFVCLNCGFETHADEQAALNIARSWLFLRSQEYKKYQTNKTTGNTDKRAFVETWQSFYRKKLKEVWKPAV

SEQ ID NO: 25124 - protein, 978 aa, synthetic construct
  REGION 1..978: note = engineered CasX variant
QEIKRINKIRRRLVKDSNTKKAGKTGPMKTLLVRVMTPDLRERLENLRKKPENIPQPISNTSRANLNKLLTDYTEMKKAILHVYWEEFQKDPVGLMSRVAQPASKKIDQNKLKPEMDEKGNLTTAGFACSQCGQPLFVYKLEQVSEKGKAYTNYFGRCNVAEHEKLILLAQLKPEKDSDEAVTYSLGKFGQRALDFYSIHVTKESTHPVKPLAQIAGNRYASGPVGKALSDACMGTIASFLSKYQDIIIEHQKVVKGNQKRLESLRELAGKENLEYPSVTLPPQPHTKEGVDAYNEVIARVRMWVNLNLWQKLKLSRDDAKPLLRLKGFPSFPLVERQANEVDWWDMVCNVKKLINEKKEDGKVFWQNLAGYKRQEALRPYLSSEEDRKKGKKFARYQLGDLLLHLEKKHGEDWGKVYDEAWERIDKKVEGLSKHIKLEEERRSEDAQSKAALTDWLRAKASFVIEGLKEADKDEFCRCELKLQKWYGDLRGKPFAIEAENSILDISGFSKQYNCAFIWQKDGVKKLNLYLIINYFKGGKLRFKKIKPEAFEANRFYTVINKKSGEIVPMEVNFNFDDPNLIILPLAFGKRQGREFIWNDLLSLETGSLKLANGRVIEKTLYNRRTRQDEPALFVALTFERREVLDSSNKKPMNLIGVDRGENIPAVIALTDPEGCPLSRFKDSLGNPTHILRIGESYKEHQRTIQAKKEVEQRRAGGYSRKYASKAKNLADDMVRNTARDLLYYAVTQDAMLIFENLSRGFGRQGKRTFMAERQYTRMEDWLTAKLAYEGLPSKTYLSKTLAQYTSKTCSNCGFTITSADYDRVLEKLKKTATGWMTTINGKELKVEGQITYYNRYKRQNVVKDLSVELDRLSEESVNNDISSWTKGRSGEALSLLKKRFSHRPVQEKFVCLNCGFETHADEQAALNIARSWLFLRSQEYKKYQTNKTTGNTDKRAFVETWQSFYRKKLKEVWKPAV

SEQ ID NO: 25125 - protein, 978 aa, synthetic construct
  REGION 1..978: note = engineered CasX variant
QEIKRINKIRRRLVKDSNTKKAGKTGPMKTLLVRVMTPDLRERLENLRKKPENIPQPISNTSRANLNKLLTDYTEMKKAILHVYWEEFQKDPVGLMSRVAQPASKKIDQNKLKPEMDEKGNLTTAGFACSQCGQPLFVYKLEQVSEKGKAYTNYFGRCNVAEHEKLILLAQLKPEKDSDEAVTYSLGKFGQRALDFYSIHVTKESTHPVKPLAQIAGNRYASGPVGKALSDACMGTIASFLSKYQDIIIEHQKVVKGNQKRLESLRELAGKENLEYPSVTLPPQPHTKEGVDAYNEVIARVRMWVNLNLWQKLKLSRDDAKPLLRLKGFPSFPLVERQANEVDWWDMVCNVKKLINEKKEDGKVFWQNLAGYKRQEALRPYLSSEEDRKKGKKFARYQLGDLLLHLEKKHGEDWGKVYDEAWERIDKKVEGLSKHIKLEEERRSEDAQSKAALTDWLRAKASFVIEGLKEADKDEFCRCELKLQKWYGDLRGKPFAIEAENSILDISGFSKQYNCAFIWQKDGVKKLNLYLIINYFKGGKLRFKKIKPEAFEANRFYTVINKKSGEIVPMEVNFNFDDPNLIILPLAFGKRQGREFIWNDLLSLETGSLKLANGRVIEKTLYNRRTRQDEPALFVALTFERREVLDSSNKKPMNLIGVDRGENIPAVIALTDPEGCPLSRFKDSLGNPTFILRIGESYKEKQRTIQAKKEVEQRRAGGYSRKYASKAKNLADDMVRNTARDLLYYAVTQDAMLIFENLSRGFGRQGKRTFMAERQYTRMEDWLTAKLAYEGLPSKTYLSKTLAQYTSKTCSNCGFTITSADYDRVLEKLKKTATGWMTTINGKELKVEGQITYYNRYKRQNVVKDLSVELDRLSEESVNNDISSWTKGRSGEALSLLKKRFSHRPVQEKFVCLNCGFETHADEQAALNIARSWLFLRSQEYKKYQTNKTTGNTDKRAFVETWQSFYRKKLKEVWKPAV

SEQ ID NO: 25126 - protein, 978 aa, synthetic construct
  REGION 1..978: note = engineered CasX variant
QEIKRINKIRRRLVKDSNTKKAGKTGPMKTLLVRVMTPDLRERLENLRKKPENIPQPISNTSRANLNKLLTDYTEMKKAILHVYWEEFQKDPVGLMSRVAQPASKKIDQNKLKPEMDEKGNLTTAGFACSQCGQPLFVYKLEQVSEKGKAYTNYFGRCNVAEHEKLILLAQLKPEKDSDEAVTYSLGKFGQRALDFYSIHVTKESTHPVKPLAQIAGNRYASGPVGKALSDACMGTIASFLSKYQDIIIEHQKVVKGNQKRLESLRELAGKENLEYPSVTLPPQPHTKEGVDAYNEVIARVRMWVNLNLWQKLKLSRDDAKPLLRLKGFPSFPLVERQANEVDWWDMVCNVKKLINEKKEDGKVFWQNLAGYKRQEALRPYLSSEEDRKKGKKFARYQLGDLLLHLEKKHGEDWGKVYDEAWERIDKKVEGLSKHIKLEEERRSEDAQSKAALTDWLRAKASFVIEGLKEADKDEFCRCELKLQKWYGDLRGKPFAIEAENSILDISGFSKQYNCAFIWQKDGVKKLNLYLIINYFKGGKLRFKKIKPEAFEANRFYTVINKKSGEIVPMEVNFNFDDPNLIILPLAFGKRQGREFIWNDLLSLETGSLKLANGRVIEKTLYNRRTRQDEPALFVALTFERREVLDSSNKKPMNLIGVDRGENIPAVIALTDPEGCPLSRFKDSLGNPTFILRIGESYKEHQRTIQAKKEVEQRRAGGYSRKYASKAKNLADDMVRNTARDLLYYAVTQDAMLIFENLSRGFGRQGKRTFMAERQYTRMEDWLTAKLAYEGLPSKTYLSKTLAQYTSKTCSNCGFTITSADYDRVLEKLKKTATGWMTTINGKELKVEGQITYYNRYKRQNVVKDLSVELDRLSEESVNNDISSWTKGRSGEALSLLKKRFSHRPVQEKFVCLNCGFETHADEQAALNIARSWLFLRSQEYKKYQTNKTTGNTDKRAFVETWQSFYRKKLKEVWKPAV

SEQ ID NO: 25127 - protein, 978 aa, synthetic construct
  REGION 1..978: note = engineered CasX variant
QEIKRINKIRRRLVKDSNTKKAGKTGPMKTLLVRVMTPDLRERLENLRKKPENIPQPISNTSRANLNKLLTDYTEMKKAILHVYWEEFQKDPVGLMSRVAQPASKKIDQNKLKPEMDEKGNLTTAGFACSQCGQPLFVYKLEQVSEKGKAYTNYFGRCNVAEHEKLILLAQLKPEKDSDEAVTYSLGKFGQRALDFYSIHVTKESTHPVKPLAQIAGNRYASGPVGKALSDACMGTIASFLSKYQDIIIEHQKVVKGNQKRLESLRELAGKENLEYPSVTLPPQPHTKEGVDAYNEVIARVRMWVNLNLWQKLKLSRDDAKPLLRLKGFPSFPLVERQANEVDWWDMVCNVKKLINEKKEDGKVFWQNLAGYKRQEALRPYLSSEEDRKKGKKFARYQLGDLLLHLEKKHGEDWGKVYDEAWERIDKKVEGLSKHIKLEEERRSEDAQSKAALTDWLRAKASFVIEGLKEADKDEFCRCELKLQKWYGDLRGKPFAIEAENSILDISGFSKQYNCAFIWQKDGVKKLNLYLIINYFKGGKLRFKKIKPEAFEANRFYTVINKKSGEIVPMEVNFNFDDPNLIILPLAFGKRQGREFIWNDLLSLETGSLKLANGRVIEKTLYNRRTRQDEPALFVALTFERREVLDSSNKKPMNLIGVDRGENIPAVIALTDPEGCPLSRFKDSKGNPTHILRIGESYKEKQRTIQAKKEVEQRRAGGYSRKYASKAKNLADDMVRNTARDLLYYAVTQDAMLIFENLSRGFGRQGKRTFMAERQYTRMEDWLTAKLAYEGLPSKTYLSKTLAQYTSKTCSNCGFTITSADYDRVLEKLKKTATGWMTTINGKELKVEGQITYYNRYKRQNVVKDLSVELDRLSEESVNNDISSWTKGRSGEALSLLKKRFSHRPVQEKFVCLNCGFETHADEQAALNIARSWLFLRSQEYKKYQTNKTTGNTDKRAFVETWQSFYRKKLKEVWKPAV

SEQ ID NO: 25128 - protein, 978 aa, synthetic construct
  REGION 1..978: note = engineered CasX variant
QEIKRINKIRRRLVKDSNTKKAGKTGPMKTLLVRVMTPDLRERLENLRKKPENIPQPISNTSRANLNKLLTDYTEMKKAILHVYWEEFQKDPVGLMSRVAQPASKKIDQNKLKPEMDEKGNLTTAGFACSQCGQPLFVYKLEQVSEKGKAYTNYFGRCNVAEHEKLILLAQLKPEKDSDEAVTYSLGKFGQRALDFYSIHVTKESTHPVKPLAQIAGNRYASGPVGKALSDACMGTIASFLSKYQDIIIEHQKVVKGNQKRLESLRELAGKENLEYPSVTLPPQPHTKEGVDAYNEVIARVRMWVNLNLWQKLKLSRDDAKPLLRLKGFPSFPLVERQANEVDWWDMVCNVKKLINEKKEDGKVFWQNLAGYKRQEALRPYLSSEEDRKKGKKFARYQLGDLLLHLEKKHGEDWGKVYDEAWERIDKKVEGLSKHIKLEEERRSEDAQSKAALTDWLRAKASFVIEGLKEADKDEFCRCELKLQKWYGDLRGKPFAIEAENSILDISGFSKQYNCAFIWQKDGVKKLNLYLIINYFKGGKLRFKKIKPEAFEANRFYTVINKKSGEIVPMEVNFNFDDPNLIILPLAFGKRQGREFIWNDLLSLETGSLKLANGRVIEKTLYNRRTRQDEPALFVALTFERREVLDSSNKKPMFLIGVDRGENIPAVIALTDPEGCPLSRFKDSLGNPTHILRIGESYKEKQRTIQAKKEVEQRRAGGYSRKYASKAKNLADDMVRNTARDLLYYAVTQDAMLIFENLSRGFGRQGKRTFMAERQYTRMEDWLTAKLAYEGLPSKTYLSKTLAQYTSKTCSNCGFTITSADYDRVLEKLKKTATGWMTTINGKELKVEGQITYYNRYKRQNVVKDLSVELDRLSEESVNNDISSWTKGRSGEALSLLKKRFSHRPVQEKFVCLNCGFETHADEQAALNIARSWLFLRSQEYKKYQTNKTTGNTDKRAFVETWQSFYRKKLKEVWKPAV

SEQ ID NO: 25129 - protein, 978 aa, synthetic construct
  REGION 1..978: note = engineered CasX variant
QEIKRINKIRRRLVKDSNTKKAGKTGPMKTLLVRVMTPDLRERLENLRKKPENIPQPISNTSRANLNKLLTDYTEMKKAILHVYWEEFQKDPVGLMSRVAQPASKKIDQNKLKPEMDEKGNLTTAGFACSQCGQPLFVYKLEQVSEKGKAYTNYFGRCNVAEHEKLILLAQLKPEKDSDEAVTYSLGKFGQRALDFYSIHVTKESTHPVKPLAQIAGNRYASGPVGKALSDACMGTIASFLSKYQDIIIEHQKVVKGNQKRLESLRELAGKENLEYPSVTLPPQPHTKEGVDAYNEVIARVRMWVNLNLWQKLKLSRDDAKPLLRLKGFPSFPLVERQANEVDWWDMVCNVKKLINEKKEDGKVFWQNLAGYKRQEALRPYLSSEEDRKKGKKFARYQLGDLLLHLEKKHGEDWGKVYDEAWERIDKKVEGLSKHIKLEEERRSEDAQSKAALTDWLRAKASFVIEGLKEADKDEFCRCELKLQKWYGDLRGKPFAIEAENSILDISGFSKQYNCAFIWQKDGVKKLNLYLIINYFKGGKLRFKKIKPEAFEANRFYTVINKKSGEIVPMEVNFNFDDPNLIILPLAFGKRQGREFIWNDLLSLETGSLKLANGRVIEKTLYNRRTRQDEPALFVALTFERREVLDSSNIYPMNLIGVDRGENIPAVIALTDPEGCPLSRFKDSLGNPTHILRIGESYKEKQRTIQAKKEVEQRRAGGYSRKYASKAKNLADDMVRNTARDLLYYAVTQDAMLIFENLSRGFGRQGKRTFMAERQYTRMEDWLTAKLAYEGLPSKTYLSKTLAQYTSKTCSNCGFTITSADYDRVLEKLKKTATGWMTTINGKELKVEGQITYYNRYKRQNVVKDLSVELDRLSEESVNNDISSWTKGRSGEALSLLKKRFSHRPVQEKFVCLNCGFETHADEQAALNIARSWLFLRSQEYKKYQTNKTTGNTDKRAFVETWQSFYRKKLKEVWKPAV

SEQ ID NO: 25130 - protein, 978 aa, synthetic construct
  REGION 1..978: note = engineered CasX variant
QEIKRINKIRRRLVKDSNTKKAGKTGPMKTLLVRVMTPDLRERLENLRKKPENIPQPISNTSRANLNKLLTDYTEMKKAILHVYWEEFQKDPVGLMSRVAQPASKKIDQNKLKPEMDEKGNLTTAGFACSQCGQPLFVYKLEQVSEKGKAYTNYFGRCNVAEHEKLILLAQLKPEKDSDEAVTYSLGKFGQRALDFYSIHVTKESTHPVKPLAQIAGNRYASGPVGKALSDACMGTIASFLSKYQDIIIEHQKVVKGNQKRLESLRELAGKENLEYPSVTLPPQPHTKEGVDAYNEVIARVRMWVNLNLWQKLKLSRDDAKPLLRLKGFPSFPLVERQANEVDWWDMVCNVKKLINEKKEDGKVFWQNLAGYKRQEALRPYLSSEEDRKKGKKFARYQLGDLLLHLEKKHGEDWGKVYDEAWERIDKKVEGLSKHIKLEEERRSEDAQSKAALTDWLRAKASFVIEGLKEADKDEFCRCELKLQKWYGDLRGKPFAIEAENSILDISGFSKQYNCAFIWQKDGVKKLNLYLIINYFKGGKLRFKKIKPEAFEANRFYTVINKKSGEIVPMEVNFNFDDPNLIILPLAFGKRQGREFIWNDLLSLETGSLKLANGRVIEKTLYNRRTRQDEPALFVALTFERREVLDSSNIWPMNLIGVDRGENIPAVIALTDPEGCPLSRFKDSLGNPTHILRIGESYKEKQSTIQAKKEVEQRRAGGYSRKYASKAKNLADDMVRNTARDLLYYAVTQDAMLIFENLSRGFGRQGKRTFMAERQYTRMEDWLTAKLAYEGLPSKTYLSKTLAQYTSKTCSNCGFTITSADYDRVLEKLKKTATGWMTTINGKELKVEGQITYYNRYKRQNVVKDLSVELDRLSEESVNNDISSWTKGRSGEALSLLKKRFSHRPVQEKFVCLNCGFETHADEQAALNIARSWLFLRSQEYKKYQTNKTTGNTDKRAFVETWQSFYRKKLKEVWKPAV

SEQ ID NO: 25131 - protein, 978 aa, synthetic construct
  REGION 1..978: note = engineered CasX variant
QEIKRINKIRRRLVKDSNTKKAGKTGPMKTLLVRVMTPDLRERLENLRKKPENIPQPISNTSRANLNKLLTDYTEMKKAILHVYWEEFQKDPVGLMSRVAQPASKKIDQNKLKPEMDEKGNLTTAGFACSQCGQPLFVYKLEQVSEKGKAYTNYFGRCNVAEHEKLILLAQLKPEKDSDEAVTYSLGKFGQRALDFYSIHVTKESTHPVKPLAQIAGNRYASGPVGKALSDACMGTIASFLSKYQDIIIEHQKVVKGNQKRLESLRELAGKENLEYPSVTLPPQPHTKEGVDAYNEVIARVRMWVNLNLWQKLKLSRDDAKPLLRLKGFPSFPLVERQANEVDWWDMVCNVKKLINEKKEDGKVFWQNLAGYKRQEALRPYLSSEEDRKKGKKFARYQLGDLLLHLEKKHGEDWGKVYDEAWERIDKKVEGLSKHIKLEEERRSEDAQSKAALTDWLRAKASFVIEGLKEADKDEFCRCELKLQKWYGDLRGKPFAIEAENSILDISGFSKQYNCAFIWQKDGVKKLNLYLIINYFKGGKLRFKKIKPEAFEANRFYTVINKKSGEIVPMEVNFNFDDPNLIILPLAFGKRQGREFIWNDLLSLETGSLKLANGRVIEKTLYNRRTRQDEPALFVALTFERREVLDSSNIWPMNLIGVDRGENIPAVIALTDPEGCPLSRFKDSLGNPTHILRIGESYKEKQRTIQAKKEVEQRRAGGYSRKYASKAKNLADDMVRNTARDLLYYAVTQDAMLIFENLSRGFGRQGKRTFMAERQYTRMEDWLTAKLAYEGLPSKTYLSKTLAQYTSKTCSNCGFTITSADYDRVLEKLKKTATGWMTTINGKELKVEGQITYYNRYKRQNVVKDLSVELDRLSEESVNNDISSWTKGRSGEALSLLKKRFSHRPVQEKFVCLNCGFETHADEQAALNIARSWLFLRSQEYKKYQTNKTTGNTDKRAFVETWQSFYRKKLKEVWKPAV

SEQ ID NO: 25132 - protein, 978 aa, synthetic construct
  REGION 1..978: note = engineered CasX variant
QEIKRINKIRRRLVKDSNTKKAGKTGPMKTLLVRVMTPDLRERLENLRKKPENIPQPISNTSRANLNKLLTDYTEMKKAILHVYWEEFQKDPVGLMSRVAQPASKKIDQNKLKPEMDEKGNLTTAGFACSQCGQPLFVYKLEQVSEKGKAYTNYFGRCNVAEHEKLILLAQLKPEKDSDEAVTYSLGKFGQRALDFYSIHVTKESTHPVKPLAQIAGNRYASGPVGKALSDACMGTIASFLSKYQDIIIEHQKVVKGNQKRLESLRELAGKENLEYPSVTLPPQPHTKEGVDAYNEVIARVRMWVNLNLWQKLKLSRDDAKPLLRLKGFPSFPLVERQANEVDWWDMVCNVKKLINEKKEDGKVFWQNLAGYKRQEALRPYLSSEEDRKKGKKFARYQLGDLLLHLEKKHGEDWGKVYDEAWERIDKKVEGLSKHIKLEEERRSEDAQSKAALTDWLRAKASFVIEGLKEADKDEFCRCELKLQKWYGDLRGKPFAIEAENSILDISGFSKQYNCAFIWQKDGVKKLNLYLIINYFKGGKLRFKKIKPEAFEANRFYTVINKKSGEIVPMEVNFNFDDPNLIILPLAFGKRQGREFIWNDLLSLETGSLKLANGRVIEKTLYNRRTRQDEPALFVALTFERREVLDSSNIVPMNLIGVDRGENIPAVIALTDPEGCPLSYFKDSLGNPTHILRIGESYKEKQRTIQAKKEVEQRRAGGYSRKYASKAKNLADDMVRNTARDLLYYAVTQDAMLIFENLSRGFGRQGKRTFMAERQYTRMEDWLTAKLAYEGLPSKTYLSKTLAQYTSKTCSNCGFTITSADYDRVLEKLKKTATGWMTTINGKELKVEGQITYYNRYKRQNVVKDLSVELDRLSEESVNNDISSWTKGRSGEALSLLKKRFSHRPVQEKFVCLNCGFETHADEQAALNIARSWLFLRSQEYKKYQTNKTTGNTDKRAFVETWQSFYRKKLKEVWKPAV

SEQ ID NO: 25133 - protein, 978 aa, synthetic construct
  REGION 1..978: note = engineered CasX variant
QEIKRINKIRRRLVKDSNTKKAGKTGPMKTLLVRVMTPDLRERLENLRKKPENIPQPISNTSRANLNKLLTDYTEMKKAILHVYWEEFQKDPVGLMSRVAQPASKKIDQNKLKPEMDEKGNLTTAGFACSQCGQPLFVYKLEQVSEKGKAYTNYFGRCNVAEHEKLILLAQLKPEKDSDEAVTYSLGKFGQRALDFYSIHVTKESTHPVKPLAQIAGNRYASGPVGKALSDACMGTIASFLSKYQDIIIEHQKVVKGNQKRLESLRELAGKENLEYPSVTLPPQPHTKEGVDAYNEVIARVRMWVNLNLWQKLKLSRDDAKPLLRLKGFPSFPLVERQANEVDWWDMVCNVKKLINEKKEDGKVFWQNLAGYKRQEALRPYLSSEEDRKKGKKFARYQLGDLLLHLEKKHGEDWGKVYDEAWERIDKKVEGLSKHIKLEEERRSEDAQSKAALTDWLRAKASFVIEGLKEADKDEFCRCELKLQKWYGDLRGKPFAIEAENSILDISGFSKQYNCAFIWQKDGVKKLNLYLIINYFKGGKLRFKKIKPEAFEANRFYTVINKKSGEIVPMEVNFNFDDPNLIILPLAFGKRQGREFIWNDLLSLETGSLKLANGRVIEKTLYNRRTRQDEPALFVALTFERREVLDSSNIVPMNLIGVDRGENIPAVIALTDPEGCPLSYFKDSKGNPTHILRIGESYKEKQRTIQAKKEVEQRRAGGYSRKYASKAKNLADDMVRNTARDLLYYAVTQDAMLIFENLSRGFGRQGKRTFMAERQYTRMEDWLTAKLAYEGLPSKTYLSKTLAQYTSKTCSNCGFTITSADYDRVLEKLKKTATGWMTTINGKELKVEGQITYYNRYKRQNVVKDLSVELDRLSEESVNNDISSWTKGRSGEALSLLKKRFSHRPVQEKFVCLNCGFETHADEQAALNIARSWLFLRSQEYKKYQTNKTTGNTDKRAFVETWQSFYRKKLKEVWKPAV

SEQ ID NO: 25134 - protein, 978 aa, synthetic construct
  REGION 1..978: note = engineered CasX variant
QEIKRINKIRRRLVKDSNTKKAGKTGPMKTLLVRVMTPDLRERLENLRKKPENIPQPISNTSRANLNKLLTDYTEMKKAILHVYWEEFQKDPVGLMSRVAQPASKKIDQNKLKPEMDEKGNLTTAGFACSQCGQPLFVYKLEQVSEKGKAYTNYFGRCNVAEHEKLILLAQLKPEKDSDEAVTYSLGKFGQRALDFYSIHVTKESTHPVKPLAQIAGNRYASGPVGKALSDACMGTIASFLSKYQDIIIEHQKVVKGNQKRLESLRELAGKENLEYPSVTLPPQPHTKEGVDAYNEVIARVRMWVNLNLWQKLKLSRDDAKPLLRLKGFPSFPLVERQANEVDWWDMVCNVKKLINEKKEDGKVFWQNLAGYKRQEALRPYLSSEEDRKKGKKFARYQLGDLLLHLEKKHGEDWGKVYDEAWERIDKKVEGLSKHIKLEEERRSEDAQSKAALTDWLRAKASFVIEGLKEADKDEFCRCELKLQKWYGDLRGKPFAIEAENSILDISGFSKQYNCAFIWQKDGVKKLNLYLIINYFKGGKLRFKKIKPEAFEANRFYTVINKKSGEIVPMEVNFNFDDPNLIILPLAFGKRQGREFIWNDLLSLETGSLKLANGRVIEKTLYNRRTRQDEPALFVALTFERREVLDSSNIVPMNLIGVDRGENIPAVIALTDPEGCPLSRFKDSLGNPTHILRIGESYKEKQRTIQCKKEVEQRRAGGYSRKYASKAKNLADDMVRNTARDLLYYAVTQDAMLIFENLSRGFGRQGKRTFMAERQYTRMEDWLTAKLAYEGLPSKTYLSKTLAQYTSKTCSNCGFTITSADYDRVLEKLKKTATGWMTTINGKELKVEGQITYYNRYKRQNVVKDLSVELDRLSEESVNNDISSWTKGRSGEALSLLKKRFSHRPVQEKFVCLNCGFETHADEQAALNIARSWLFLRSQEYKKYQTNKTTGNTDKRAFVETWQSFYRKKLKEVWKPAV

SEQ ID NO: 25135 - protein, 978 aa, synthetic construct
  REGION 1..978: note = engineered CasX variant
QEIKRINKIRRRLVKDSNTKKAGKTGPMKTLLVRVMTPDLRERLENLRKKPENIPQPISNTSRANLNKLLTDYTEMKKAILHVYWEEFQKDPVGLMSRVAQPASKKIDQNKLKPEMDEKGNLTTAGFACSQCGQPLFVYKLEQVSEKGKAYTNYFGRCNVAEHEKLILLAQLKPEKDSDEAVTYSLGKFGQRALDFYSIHVTKESTHPVKPLAQIAGNRYASGPVGKALSDACMGTIASFLSKYQDIIIEHQKVVKGNQKRLESLRELAGKENLEYPSVTLPPQPHTKEGVDAYNEVIARVRMWVNLNLWQKLKLSRDDAKPLLRLKGFPSFPLVERQANEVDWWDMVCNVKKLINEKKEDGKVFWQNLAGYKRQEALRPYLSSEEDRKKGKKFARYQLGDLLLHLEKKHGEDWGKVYDEAWERIDKKVEGLSKHIKLEEERRSEDAQSKAALTDWLRAKASFVIEGLKEADKDEFCRCELKLQKWYGDLRGKPFAIEAENSILDISGFSKQYNCAFIWQKDGVKKLNLYLIINYFKGGKLRFKKIKPEAFEANRFYTVINKKSGEIVPMEVNFNFDDPNLIILPLAFGKRQGREFIWNDLLSLETGSLKLANGRVIEKTLYNRRTRQDEPALFVALTFERREVLDSSNIVPMNLIGVDRGENIPAVIALTDPEGCPLSRFKDSLGNPTHILRIGESYKEKQRTIQAKKEVEQRRVGGYSRKYASKAKNLADDMVRNTARDLLYYAVTQDAMLIFENLSRGFGRQGKRTFMAERQYTRMEDWLTAKLAYEGLPSKTYLSKTLAQYTSKTCSNCGFTITSADYDRVLEKLKKTATGWMTTINGKELKVEGQITYYNRYKRQNVVKDLSVELDRLSEESVNNDISSWTKGRSGEALSLLKKRFSHRPVQEKFVCLNCGFETHADEQAALNIARSWLFLRSQEYKKYQTNKTTGNTDKRAFVETWQSFYRKKLKEVWKPAV

SEQ ID NO: 25136 - protein, 978 aa, synthetic construct
  REGION 1..978: note = engineered CasX variant
QEIKRINKIRRRLVKDSNTKKAGKTGPMKTLLVRVMTPDLRERLENLRKKPENIPQPISNTSRANLNKLLTDYTEMKKAILHVYWEEFQKDPVGLMSRVAQPASKKIDQNKLKPEMDEKGNLTTAGFACSQCGQPLFVYKLEQVSEKGKAYTNYFGRCNVAEHEKLILLAQLKPEKDSDEAVTYSLGKFGQRALDFYSIHVTKESTHPVKPLAQIAGNRYASGPVGKALSDACMGTIASFLSKYQDIIIEHQKVVKGNQKRLESLRELAGKENLEYPSVTLPPQPHTKEGVDAYNEVIARVRMWVNLNLWQKLKLSRDDAKPLLRLKGFPSFPLVERQANEVDWWDMVCNVKKLINEKKEDGKVFWQNLAGYKRQEALRPYLSSEEDRKKGKKFARYQLGDLLLHLEKKHGEDWGKVYDEAWERIDKKVEGLSKHIKLEEERRSEDAQSKAALTDWLRAKASFVIEGLKEADKDEFCRCELKLQKWYGDLRGKPFAIEAENSILDISGFSKQYNCAFIWQKDGVKKLNLYLIINYFKGGKLRFKKIKPEAFEANRFYTVINKKSGEIVPMEVNFNFDDPNLIILPLAFGKRQGREFIWNDLLSLETGSLKLANGRVIEKTLYNRRTRQDEPALFVALTFERREVLDSSNIVPMNLIGVDRGENIPAVIALTDPEGCPLSRFKDSLGNPTHILRIGESYKEKQRTIQAKKEVEQRRAGGYSRKYASKAKNLADDMVRNTARDLLYYAVTQDAMLIFENLSRGFGRQGKRTFMAERQYTRMEDWLTAKLAYEGLPSKTYLSKTLAQYTSKTCSNCGFTITSADYDRVLEKLKKTATGWMTTINGKELKVEGQITYYNRYKRQNVVKDLSVELDRLSEESVNNDISSWTKGRSGEALSLLKKRFSHRPVQEKFVCLNCGFETHADEQAALNIARSWLFLRSQEYKKYQTNKTTGNTDKRAFVETWQSFYRKKLKEVWKPAV

SEQ ID NO: 25137 - protein, 978 aa, synthetic construct
  REGION 1..978: note = engineered CasX variant
QEIKRINKIRRRLVKDSNTKKAGKTGPMKTLLVRVMTPDLRERLENLRKKPENIPQPISNTSRANLNKLLTDYTEMKKAILHVYWEEFQKDPVGLMSRVAQPASKKIDQNKLKPEMDEKGNLTTAGFACSQCGQPLFVYKLEQVSEKGKAYTNYFGRCNVAEHEKLILLAQLKPEKDSDEAVTYSLGKFGQRALDFYSIHVTKESTHPVKPLAQIAGNRYASGPVGKALSDACMGTIASFLSKYQDIIIEHQKVVKGNQKRLESLRELAGKENLEYPSVTLPPQPHTKEGVDAYNEVIARVRMWVNLNLWQKLKLSRDDAKPLLRLKGFPSFPLVERQANEVDWWDMVCNVKKLINEKKEDGKVFWQNLAGYKRQEALRPYLSSEEDRKKGKKFARYQLGDLLLHLEKKHGEDWGKVYDEAWERIDKKVEGLSKHIKLEEERRSEDAQSKAALTDWLRAKASFVIEGLKEADKDEFCRCELKLQKWYGDLRGKPFAIEAENSILDISGFSKQYNCAFIWQKDGVKKLNLYLIINYFKGGKLRFKKIKPEAFEANRFYTVINKKSGEIVPMEVNFNFDDPNLIILPLAFGKRQGREFIWNDLLSLETGSLKLANGRVIEKTLYNRRTRQDEPALFVALTFERREVLDSSNIVPMNLIGVDRGENIPAVIALTDPEGCPLSRFKDSLGNPTHILRIGESAKEKQRTIQAKKEVEQRRVGGYSRKYASKAKNLADDMVRNTARDLLYYAVTQDAMLIFENLSRGFGRQGKRTFMAERQYTRMEDWLTAKLAYEGLPSKTYLSKTLAQYTSKTCSNCGFTITSADYDRVLEKLKKTATGWMTTINGKELKVEGQITYYNRYKRQNVVKDLSVELDRLSEESVNNDISSWTKGRSGEALSLLKKRFSHRPVQEKFVCLNCGFETHADEQAALNIARSWLFLRSQEYKKYQTNKTTGNTDKRAFVETWQSFYRKKLKEVWKPAV

SEQ ID NO: 25138 - protein, 978 aa, synthetic construct
  REGION 1..978: note = engineered CasX variant
QEIKRINKIRRRLVKDSNTKKAGKTGPMKTLLVRVMTPDLRERLENLRKKPENIPQPISNTSRANLNKLLTDYTEMKKAILHVYWEEFQKDPVGLMSRVAQPASKKIDQNKLKPEMDEKGNLTTAGFACSQCGQPLFVYKLEQVSEKGKAYTNYFGRCNVAEHEKLILLAQLKPEKDSDEAVTYSLGKFGQRALDFYSIHVTKESTHPVKPLAQIAGNRYASGPVGKALSDACMGTIASFLSKYQDIIIEHQKVVKGNQKRLESLRELAGKENLEYPSVTLPPQPHTKEGVDAYNEVIARVRMWVNLNLWQKLKLSRDDAKPLLRLKGFPSFPLVERQANEVDWWDMVCNVKKLINEKKEDGKVFWQNLAGYKRQEALRPYLSSEEDRKKGKKFARYQLGDLLLHLEKKHGEDWGKVYDEAWERIDKKVEGLSKHIKLEEERRSEDAQSKAALTDWLRAKASFVIEGLKEADKDEFCRCELKLQKWYGDLRGKPFAIEAENSILDISGFSKQYNCAFIWQKDGVKKLNLYLIINYFKGGKLRFKKIKPEAFEANRFYTVINKKSGEIVPMEVNFNFDDPNLIILPLAFGKRQGREFIWNDLLSLETGSLKLANGRVIEKTLYNRRTRQDEPALFVALTFERREVLDSSNIVPMNLIGVDRGENIPAVIALTDPEGCPLSRFKDSLGNPTHILRIGESAKEKQRTIQAKKEVEQRRAGGYSRKYASKAKNLADDMVRNTARDLLYYAVTQDAMLIFENLSRGFGRQGKRTFMAERQYTRMEDWLTAKLAYEGLPSKTYLSKTLAQYTSKTCSNCGFTITSADYDRVLEKLKKTATGWMTTINGKELKVEGQITYYNRYKRQNVVKDLSVELDRLSEESVNNDISSWTKGRSGEALSLLKKRFSHRPVQEKFVCLNCGFETHADEQAALNIARSWLFLRSQEYKKYQTNKTTGNTDKRAFVETWQSFYRKKLKEVWKPAV

SEQ ID NO: 25139 - protein, 978 aa, synthetic construct
  REGION 1..978: note = engineered CasX variant
QEIKRINKIRRRLVKDSNTKKAGKTGPMKTLLVRVMTPDLRERLENLRKKPENIPQPISNTSRANLNKLLTDYTEMKKAILHVYWEEFQKDPVGLMSRVAQPASKKIDQNKLKPEMDEKGNLTTAGFACSQCGQPLFVYKLEQVSEKGKAYTNYFGRCNVAEHEKLILLAQLKPEKDSDEAVTYSLGKFGQRALDFYSIHVTKESTHPVKPLAQIAGNRYASGPVGKALSDACMGTIASFLSKYQDIIIEHQKVVKGNQKRLESLRELAGKENLEYPSVTLPPQPHTKEGVDAYNEVIARVRMWVNLNLWQKLKLSRDDAKPLLRLKGFPSFPLVERQANEVDWWDMVCNVKKLINEKKEDGKVFWQNLAGYKRQEALRPYLSSEEDRKKGKKFARYQLGDLLLHLEKKHGEDWGKVYDEAWERIDKKVEGLSKHIKLEEERRSEDAQSKAALTDWLRAKASFVIEGLKEADKDEFCRCELKLQKWYGDLRGKPFAIEAENSILDISGFSKQYNCAFIWQKDGVKKLNLYLIINYFKGGKLRFKKIKPEAFEANRFYTVINKKSGEIVPMEVNFNFDDPNLIILPLAFGKRQGREFIWNDLLSLETGSLKLANGRVIEKTLYNRRTRQDEPALFVALTFERREVLDSSNIVPMNLIGVDRGENIPAVIALTDPEGCPLSRFKDSKGNPTHILRIGESYKEKQRTIQAKKEVEQRRAGGYSRKYASKAKNLADDMVRNTARDLLYYAVTQDAMLIFENLSRGFGRQGKRTFMAERQYTRMEDWLTAKLAYEGLPSKTYLSKTLAQYTSKTCSNCGFTITSADYDRVLEKLKKTATGWMTTINGKELKVEGQITYYNRYKRQNVVKDLSVELDRLSEESVNNDISSWTKGRSGEALSLLKKRFSHRPVQEKFVCLNCGFETHADEQAALNIARSWLFLRSQEYKKYQTNKTTGNTDKRAFVETWQSFYRKKLKEVWKPAV

SEQ ID NO: 25140 - protein, 978 aa, synthetic construct
  REGION 1..978: note = engineered CasX variant
QEIKRINKIRRRLVKDSNTKKAGKTGPMKTLLVRVMTPDLRERLENLRKKPENIPQPISNTSRANLNKLLTDYTEMKKAILHVYWEEFQKDPVGLMSRVAQPASKKIDQNKLKPEMDEKGNLTTAGFACSQCGQPLFVYKLEQVSEKGKAYTNYFGRCNVAEHEKLILLAQLKPEKDSDEAVTYSLGKFGQRALDFYSIHVTKESTHPVKPLAQIAGNRYASGPVGKALSDACMGTIASFLSKYQDIIIEHQKVVKGNQKRLESLRELAGKENLEYPSVTLPPQPHTKEGVDAYNEVIARVRMWVNLNLWQKLKLSRDDAKPLLRLKGFPSFPLVERQANEVDWWDMVCNVKKLINEKKEDGKVFWQNLAGYKRQEALRPYLSSEEDRKKGKKFARYQLGDLLLHLEKKHGEDWGKVYDEAWERIDKKVEGLSKHIKLEEERRSEDAQSKAALTDWLRAKASFVIEGLKEADKDEFCRCELKLQKWYGDLRGKPFAIEAENSILDISGFSKQYNCAFIWQKDGVKKLNLYLIINYFKGGKLRFKKIKPEAFEANRFYTVINKKSGEIVPMEVNFNFDDPNLIILPLAFGKRQGREFIWNDLLSLETGSLKLANGRVIEKTLYNRRTRQDEPALFVALTFERREVLDSSNIVPMNLIGVDRGENIPAVIALTDPEGCPLSRFHDSLGNPTHILRIGESYKEKQRTIQAKKEVEQRRAGGYSRKYASKAKNLADDMVRNTARDLLYYAVTQDAMLIFENLSRGFGRQGKRTFMAERQYTRMEDWLTAKLAYEGLPSKTYLSKTLAQYTSKTCSNCGFTITSADYDRVLEKLKKTATGWMTTINGKELKVEGQITYYNRYKRQNVVKDLSVELDRLSEESVNNDISSWTKGRSGEALSLLKKRFSHRPVQEKFVCLNCGFETHADEQAALNIARSWLFLRSQEYKKYQTNKTTGNTDKRAFVETWQSFYRKKLKEVWKPAV

SEQ ID NO: 25141 - protein, 978 aa, synthetic construct
  REGION 1..978: note = engineered CasX variant
QEIKRINKIRRRLVKDSNTKKAGKTGPMKTLLVRVMTPDLRERLENLRKKPENIPQPISNTSRANLNKLLTDYTEMKKAILHVYWEEFQKDPVGLMSRVAQPASKKIDQNKLKPEMDEKGNLTTAGFACSQCGQPLFVYKLEQVSEKGKAYTNYFGRCNVAEHEKLILLAQLKPEKDSDEAVTYSLGKFGQRALDFYSIHVTKESTHPVKPLAQIAGNRYASGPVGKALSDACMGTIASFLSKYQDIIIEHQKVVKGNQKRLESLRELAGKENLEYPSVTLPPQPHTKEGVDAYNEVIARVRMWVNLNLWQKLKLSRDDAKPLLRLKGFPSFPLVERQANEVDWWDMVCNVKKLINEKKEDGKVFWQNLAGYKRQEALRPYLSSEEDRKKGKKFARYQLGDLLLHLEKKHGEDWGKVYDEAWERIDKKVEGLSKHIKLEEERRSEDAQSKAALTDWLRAKASFVIEGLKEADKDEFCRCELKLQKWYGDLRGKPFAIEAENSILDISGFSKQYNCAFIWQKDGVKKLNLYLIINYFKGGKLRFKKIKPEAFEANRFYTVINKKSGEIVPMEVNFNFDDPNLIILPLAFGKRQGREFIWNDLLSLETGSLKLANGRVIEKTLYNRRTRQDEPALFVALTFERREVLDSSNITPMNLIGVDRGENIPAVIALTSPEGCPLSRFKDSLGNPTHILRIGESYKEKQRTIQAKKEVEQRRAGGYSRKYASKAKNLADDMVRNTARDLLYYAVTQDAMLIFENLSRGFGRQGKRTFMAERQYTRMEDWLTAKLAYEGLPSKTYLSKTLAQYTSKTCSNCGFTITSADYDRVLEKLKKTATGWMTTINGKELKVEGQITYYNRYKRQNVVKDLSVELDRLSEESVNNDISSWTKGRSGEALSLLKKRFSHRPVQEKFVCLNCGFETHADEQAALNIARSWLFLRSQEYKKYQTNKTTGNTDKRAFVETWQSFYRKKLKEVWKPAV

SEQ ID NO: 25142 - protein, 978 aa, synthetic construct
  REGION 1..978: note = engineered CasX variant
QEIKRINKIRRRLVKDSNTKKAGKTGPMKTLLVRVMTPDLRERLENLRKKPENIPQPISNTSRANLNKLLTDYTEMKKAILHVYWEEFQKDPVGLMSRVAQPASKKIDQNKLKPEMDEKGNLTTAGFACSQCGQPLFVYKLEQVSEKGKAYTNYFGRCNVAEHEKLILLAQLKPEKDSDEAVTYSLGKFGQRALDFYSIHVTKESTHPVKPLAQIAGNRYASGPVGKALSDACMGTIASFLSKYQDIIIEHQKVVKGNQKRLESLRELAGKENLEYPSVTLPPQPHTKEGVDAYNEVIARVRMWVNLNLWQKLKLSRDDAKPLLRLKGFPSFPLVERQANEVDWWDMVCNVKKLINEKKEDGKVFWQNLAGYKRQEALRPYLSSEEDRKKGKKFARYQLGDLLLHLEKKHGEDWGKVYDEAWERIDKKVEGLSKHIKLEEERRSEDAQSKAALTDWLRAKASFVIEGLKEADKDEFCRCELKLQKWYGDLRGKPFAIEAENSILDISGFSKQYNCAFIWQKDGVKKLNLYLIINYFKGGKLRFKKIKPEAFEANRFYTVINKKSGEIVPMEVNFNFDDPNLIILPLAFGKRQGREFIWNDLLSLETGSLKLANGRVIEKTLYNRRTRQDEPALFVALTFERREVLDSSNITPMNLIGVDRGENIPAVIALTSPEGCPLSRFKDSLGNPTHILRIGESYKEKQRTIQAFKEVEQRRAGGYSRKYASKAKNLADDMVRNTARDLLYYAVTQDAMLIFENLSRGFGRQGKRTFMAERQYTRMEDWLTAKLAYEGLPSKTYLSKTLAQYTSKTCSNCGFTITSADYDRVLEKLKKTATGWMTTINGKELKVEGQITYYNRYKRQNVVKDLSVELDRLSEESVNNDISSWTKGRSGEALSLLKKRFSHRPVQEKFVCLNCGFETHADEQAALNIARSWLFLRSQEYKKYQTNKTTGNTDKRAFVETWQSFYRKKLKEVWKPAV

SEQ ID NO: 25143 - protein, 978 aa, synthetic construct
  REGION 1..978: note = engineered CasX variant
QEIKRINKIRRRLVKDSNTKKAGKTGPMKTLLVRVMTPDLRERLENLRKKPENIPQPISNTSRANLNKLLTDYTEMKKAILHVYWEEFQKDPVGLMSRVAQPASKKIDQNKLKPEMDEKGNLTTAGFACSQCGQPLFVYKLEQVSEKGKAYTNYFGRCNVAEHEKLILLAQLKPEKDSDEAVTYSLGKFGQRALDFYSIHVTKESTHPVKPLAQIAGNRYASGPVGKALSDACMGTIASFLSKYQDIIIEHQKVVKGNQKRLESLRELAGKENLEYPSVTLPPQPHTKEGVDAYNEVIARVRMWVNLNLWQKLKLSRDDAKPLLRLKGFPSFPLVERQANEVDWWDMVCNVKKLINEKKEDGKVFWQNLAGYKRQEALRPYLSSEEDRKKGKKFARYQLGDLLLHLEKKHGEDWGKVYDEAWERIDKKVEGLSKHIKLEEERRSEDAQSKAALTDWLRAKASFVIEGLKEADKDEFCRCELKLQKWYGDLRGKPFAIEAENSILDISGFSKQYNCAFIWQKDGVKKLNLYLIINYFKGGKLRFKKIKPEAFEANRFYTVINKKSGEIVPMEVNFNFDDPNLIILPLAFGKRQGREFIWNDLLSLETGSLKLANGRVIEKTLYNRRTRQDEPALFVALTFERREVLDSSNITPMNLIGVDRGENIPAVIALTDPEGCPLSRFKDSLGNPTHILRIGESYKEKQRTIQAKKEVEQRRAGGYSRKYASKAKNLADDMVRNTARDLLYYAVTQDAMLIFENLSRGFGRQGKRTFMAERQYTRMEDWLTAKLAYEGLPSKTYLSKTLAQYTSKTCSNCGFTITSADYDRVLEKLKKTATGWMTTINGKELKVEGQITYYNRYKRQNVVKDLSVELDRLSEESVNNDISSWTKGRSGEALSLLKKRFSHRPVQEKFVCLNCGFETHADEQAALNIARSWLFLRSQEYKKYQTNKTTGNTDKRAFVETWQSFYRKKLKEVWKPAV

SEQ ID NO: 25144 - protein, 978 aa, synthetic construct
  REGION 1..978: note = engineered CasX variant
QEIKRINKIRRRLVKDSNTKKAGKTGPMKTLLVRVMTPDLRERLENLRKKPENIPQPISNTSRANLNKLLTDYTEMKKAILHVYWEEFQKDPVGLMSRVAQPASKKIDQNKLKPEMDEKGNLTTAGFACSQCGQPLFVYKLEQVSEKGKAYTNYFGRCNVAEHEKLILLAQLKPEKDSDEAVTYSLGKFGQRALDFYSIHVTKESTHPVKPLAQIAGNRYASGPVGKALSDACMGTIASFLSKYQDIIIEHQKVVKGNQKRLESLRELAGKENLEYPSVTLPPQPHTKEGVDAYNEVIARVRMWVNLNLWQKLKLSRDDAKPLLRLKGFPSFPLVERQANEVDWWDMVCNVKKLINEKKEDGKVFWQNLAGYKRQEALRPYLSSEEDRKKGKKFARYQLGDLLLHLEKKHGEDWGKVYDEAWERIDKKVEGLSKHIKLEEERRSEDAQSKAALTDWLRAKASFVIEGLKEADKDEFCRCELKLQKWYGDLRGKPFAIEAENSILDISGFSKQYNCAFIWQKDGVKKLNLYLIINYFKGGKLRFKKIKPEAFEANRFYTVINKKSGEIVPMEVNFNFDDPNLIILPLAFGKRQGREFIWNDLLSLETGSLKLANGRVIEKTLYNRRTRQDEPALFVALTFERREVLDSSNITPMNLIGVDRGENIPAVIALTDPEGCPLSRFKDSLGNPTHILRIGESYKEKQRTIQAKKEVEFRRAGGYSRKYASKAKNLADDMVRNTARDLLYYAVTQDAMLIFENLSRGFGRQGKRTFMAERQYTRMEDWLTAKLAYEGLPSKTYLSKTLAQYTSKTCSNCGFTITSADYDRVLEKLKKTATGWMTTINGKELKVEGQITYYNRYKRQNVVKDLSVELDRLSEESVNNDISSWTKGRSGEALSLLKKRFSHRPVQEKFVCLNCGFETHADEQAALNIARSWLFLRSQEYKKYQTNKTTGNTDKRAFVETWQSFYRKKLKEVWKPAV

SEQ ID NO: 25145 - protein, 978 aa, synthetic construct
  REGION 1..978: note = engineered CasX variant
QEIKRINKIRRRLVKDSNTKKAGKTGPMKTLLVRVMTPDLRERLENLRKKPENIPQPISNTSRANLNKLLTDYTEMKKAILHVYWEEFQKDPVGLMSRVAQPASKKIDQNKLKPEMDEKGNLTTAGFACSQCGQPLFVYKLEQVSEKGKAYTNYFGRCNVAEHEKLILLAQLKPEKDSDEAVTYSLGKFGQRALDFYSIHVTKESTHPVKPLAQIAGNRYASGPVGKALSDACMGTIASFLSKYQDIIIEHQKVVKGNQKRLESLRELAGKENLEYPSVTLPPQPHTKEGVDAYNEVIARVRMWVNLNLWQKLKLSRDDAKPLLRLKGFPSFPLVERQANEVDWWDMVCNVKKLINEKKEDGKVFWQNLAGYKRQEALRPYLSSEEDRKKGKKFARYQLGDLLLHLEKKHGEDWGKVYDEAWERIDKKVEGLSKHIKLEEERRSEDAQSKAALTDWLRAKASFVIEGLKEADKDEFCRCELKLQKWYGDLRGKPFAIEAENSILDISGFSKQYNCAFIWQKDGVKKLNLYLIINYFKGGKLRFKKIKPEAFEANRFYTVINKKSGEIVPMEVNFNFDDPNLIILPLAFGKRQGREFIWNDLLSLETGSLKLANGRVIEKTLYNRRTRQDEPALFVALTFERREVLDSSNITPMNLIGVDRGENIPAVIALTDPEGCPLSRFKDSLGNPTHILRIGESYKEKQRTIQAFKEVEQRRAGGYSRKYASKAKNLADDMVRNTARDLLYYAVTQDAMLIFENLSRGFGRQGKRTFMAERQYTRMEDWLTAKLAYEGLPSKTYLSKTLAQYTSKTCSNCGFTITSADYDRVLEKLKKTATGWMTTINGKELKVEGQITYYNRYKRQNVVKDLSVELDRLSEESVNNDISSWTKGRSGEALSLLKKRFSHRPVQEKFVCLNCGFETHADEQAALNIARSWLFLRSQEYKKYQTNKTTGNTDKRAFVETWQSFYRKKLKEVWKPAV

SEQ ID NO: 25146 - protein, 978 aa, synthetic construct
  REGION 1..978: note = engineered CasX variant
QEIKRINKIRRRLVKDSNTKKAGKTGPMKTLLVRVMTPDLRERLENLRKKPENIPQPISNTSRANLNKLLTDYTEMKKAILHVYWEEFQKDPVGLMSRVAQPASKKIDQNKLKPEMDEKGNLTTAGFACSQCGQPLFVYKLEQVSEKGKAYTNYFGRCNVAEHEKLILLAQLKPEKDSDEAVTYSLGKFGQRALDFYSIHVTKESTHPVKPLAQIAGNRYASGPVGKALSDACMGTIASFLSKYQDIIIEHQKVVKGNQKRLESLRELAGKENLEYPSVTLPPQPHTKEGVDAYNEVIARVRMWVNLNLWQKLKLSRDDAKPLLRLKGFPSFPLVERQANEVDWWDMVCNVKKLINEKKEDGKVFWQNLAGYKRQEALRPYLSSEEDRKKGKKFARYQLGDLLLHLEKKHGEDWGKVYDEAWERIDKKVEGLSKHIKLEEERRSEDAQSKAALTDWLRAKASFVIEGLKEADKDEFCRCELKLQKWYGDLRGKPFAIEAENSILDISGFSKQYNCAFIWQKDGVKKLNLYLIINYFKGGKLRFKKIKPEAFEANRFYTVINKKSGEIVPMEVNFNFDDPNLIILPLAFGKRQGREFIWNDLLSLETGSLKLANGRVIEKTLYNRRTRQDEPALFVALTFERREVLDSSNISPMNLIGVDRGENIPAVIALTDPEGCPLSRFQDSLGNPTHILRITESYKEKQRTIQAKKEVEQRRAGGYSRKYASKAKNLADDMVRNTARDLLYYAVTQDAMLIFENLSRGFGRQGKRTFMAERQYTRMEDWLTAKLAYEGLPSKTYLSKTLAQYTSKTCSNCGFTITSADYDRVLEKLKKTATGWMTTINGKELKVEGQITYYNRYKRQNVVKDLSVELDRLSEESVNNDISSWTKGRSGEALSLLKKRFSHRPVQEKFVCLNCGFETHADEQAALNIARSWLFLRSQEYKKYQTNKTTGNTDKRAFVETWQSFYRKKLKEVWKPAV

SEQ ID NO: 25147 - protein, 978 aa, synthetic construct
  REGION 1..978: note = engineered CasX variant
QEIKRINKIRRRLVKDSNTKKAGKTGPMKTLLVRVMTPDLRERLENLRKKPENIPQPISNTSRANLNKLLTDYTEMKKAILHVYWEEFQKDPVGLMSRVAQPASKKIDQNKLKPEMDEKGNLTTAGFACSQCGQPLFVYKLEQVSEKGKAYTNYFGRCNVAEHEKLILLAQLKPEKDSDEAVTYSLGKFGQRALDFYSIHVTKESTHPVKPLAQIAGNRYASGPVGKALSDACMGTIASFLSKYQDIIIEHQKVVKGNQKRLESLRELAGKENLEYPSVTLPPQPHTKEGVDAYNEVIARVRMWVNLNLWQKLKLSRDDAKPLLRLKGFPSFPLVERQANEVDWWDMVCNVKKLINEKKEDGKVFWQNLAGYKRQEALRPYLSSEEDRKKGKKFARYQLGDLLLHLEKKHGEDWGKVYDEAWERIDKKVEGLSKHIKLEEERRSEDAQSKAALTDWLRAKASFVIEGLKEADKDEFCRCELKLQKWYGDLRGKPFAIEAENSILDISGFSKQYNCAFIWQKDGVKKLNLYLIINYFKGGKLRFKKIKPEAFEANRFYTVINKKSGEIVPMEVNFNFDDPNLIILPLAFGKRQGREFIWNDLLSLETGSLKLANGRVIEKTLYNRRTRQDEPALFVALTFERREVLDSSNISPMNLIGVDRGENIPAVIALTDPEGCPLSRFQDSLGNPTHILRIGESYKEKQRTIQAKKEVEQRRAGGYSRKYASKAKNLADDMVRNTARDLLYYAVTQDAMLIFENLSRGFGRQGKRTFMAERQYTRMEDWLTAKLAYEGLPSKTYLSKTLAQYTSKTCSNCGFTITSADYDRVLEKLKKTATGWMTTINGKELKVEGQITYYNRYKRQNVVKDLSVELDRLSEESVNNDISSWTKGRSGEALSLLKKRFSHRPVQEKFVCLNCGFETHADEQAALNIARSWLFLRSQEYKKYQTNKTTGNTDKRAFVETWQSFYRKKLKEVWKPAV

SEQ ID NO: 25148 - protein, 978 aa, synthetic construct
  REGION 1..978: note = engineered CasX variant
QEIKRINKIRRRLVKDSNTKKAGKTGPMKTLLVRVMTPDLRERLENLRKKPENIPQPISNTSRANLNKLLTDYTEMKKAILHVYWEEFQKDPVGLMSRVAQPASKKIDQNKLKPEMDEKGNLTTAGFACSQCGQPLFVYKLEQVSEKGKAYTNYFGRCNVAEHEKLILLAQLKPEKDSDEAVTYSLGKFGQRALDFYSIHVTKESTHPVKPLAQIAGNRYASGPVGKALSDACMGTIASFLSKYQDIIIEHQKVVKGNQKRLESLRELAGKENLEYPSVTLPPQPHTKEGVDAYNEVIARVRMWVNLNLWQKLKLSRDDAKPLLRLKGFPSFPLVERQANEVDWWDMVCNVKKLINEKKEDGKVFWQNLAGYKRQEALRPYLSSEEDRKKGKKFARYQLGDLLLHLEKKHGEDWGKVYDEAWERIDKKVEGLSKHIKLEEERRSEDAQSKAALTDWLRAKASFVIEGLKEADKDEFCRCELKLQKWYGDLRGKPFAIEAENSILDISGFSKQYNCAFIWQKDGVKKLNLYLIINYFKGGKLRFKKIKPEAFEANRFYTVINKKSGEIVPMEVNFNFDDPNLIILPLAFGKRQGREFIWNDLLSLETGSLKLANGRVIEKTLYNRRTRQDEPALFVALTFERREVLDSSNISPMNLIGVDRGENIPAVIALTDPEGCPLSRFKDSLGNPTHILRITESYKEKQRTIQAKKEVEQRRAGGYSRKYASKAKNLADDMVRNTARDLLYYAVTQDAMLIFENLSRGFGRQGKRTFMAERQYTRMEDWLTAKLAYEGLPSKTYLSKTLAQYTSKTCSNCGFTITSADYDRVLEKLKKTATGWMTTINGKELKVEGQITYYNRYKRQNVVKDLSVELDRLSEESVNNDISSWTKGRSGEALSLLKKRFSHRPVQEKFVCLNCGFETHADEQAALNIARSWLFLRSQEYKKYQTNKTTGNTDKRAFVETWQSFYRKKLKEVWKPAV

SEQ ID NO: 25149 - protein, 978 aa, synthetic construct
  REGION 1..978: note = engineered CasX variant
QEIKRINKIRRRLVKDSNTKKAGKTGPMKTLLVRVMTPDLRERLENLRKKPENIPQPISNTSRANLNKLLTDYTEMKKAILHVYWEEFQKDPVGLMSRVAQPASKKIDQNKLKPEMDEKGNLTTAGFACSQCGQPLFVYKLEQVSEKGKAYTNYFGRCNVAEHEKLILLAQLKPEKDSDEAVTYSLGKFGQRALDFYSIHVTKESTHPVKPLAQIAGNRYASGPVGKALSDACMGTIASFLSKYQDIIIEHQKVVKGNQKRLESLRELAGKENLEYPSVTLPPQPHTKEGVDAYNEVIARVRMWVNLNLWQKLKLSRDDAKPLLRLKGFPSFPLVERQANEVDWWDMVCNVKKLINEKKEDGKVFWQNLAGYKRQEALRPYLSSEEDRKKGKKFARYQLGDLLLHLEKKHGEDWGKVYDEAWERIDKKVEGLSKHIKLEEERRSEDAQSKAALTDWLRAKASFVIEGLKEADKDEFCRCELKLQKWYGDLRGKPFAIEAENSILDISGFSKQYNCAFIWQKDGVKKLNLYLIINYFKGGKLRFKKIKPEAFEANRFYTVINKKSGEIVPMEVNFNFDDPNLIILPLAFGKRQGREFIWNDLLSLETGSLKLANGRVIEKTLYNRRTRQDEPALFVALTFERREVLDSSNISPMNLIGVDRGENIPAVIALTDPEGCPLSRFKDSLGNPTHILRIGESYKEKQRTIQCKKEVEQRRAGGYSRKYASKAKNLADDMVRNTARDLLYYAVTQDAMLIFENLSRGFGRQGKRTFMAERQYTRMEDWLTAKLAYEGLPSKTYLSKTLAQYTSKTCSNCGFTITSADYDRVLEKLKKTATGWMTTINGKELKVEGQITYYNRYKRQNVVKDLSVELDRLSEESVNNDISSWTKGRSGEALSLLKKRFSHRPVQEKFVCLNCGFETHADEQAALNIARSWLFLRSQEYKKYQTNKTTGNTDKRAFVETWQSFYRKKLKEVWKPAV

SEQ ID NO: 25150 - protein, 978 aa, synthetic construct
  REGION 1..978: note = engineered CasX variant
QEIKRINKIRRRLVKDSNTKKAGKTGPMKTLLVRVMTPDLRERLENLRKKPENIPQPISNTSRANLNKLLTDYTEMKKAILHVYWEEFQKDPVGLMSRVAQPASKKIDQNKLKPEMDEKGNLTTAGFACSQCGQPLFVYKLEQVSEKGKAYTNYFGRCNVAEHEKLILLAQLKPEKDSDEAVTYSLGKFGQRALDFYSIHVTKESTHPVKPLAQIAGNRYASGPVGKALSDACMGTIASFLSKYQDIIIEHQKVVKGNQKRLESLRELAGKENLEYPSVTLPPQPHTKEGVDAYNEVIARVRMWVNLNLWQKLKLSRDDAKPLLRLKGFPSFPLVERQANEVDWWDMVCNVKKLINEKKEDGKVFWQNLAGYKRQEALRPYLSSEEDRKKGKKFARYQLGDLLLHLEKKHGEDWGKVYDEAWERIDKKVEGLSKHIKLEEERRSEDAQSKAALTDWLRAKASFVIEGLKEADKDEFCRCELKLQKWYGDLRGKPFAIEAENSILDISGFSKQYNCAFIWQKDGVKKLNLYLIINYFKGGKLRFKKIKPEAFEANRFYTVINKKSGEIVPMEVNFNFDDPNLIILPLAFGKRQGREFIWNDLLSLETGSLKLANGRVIEKTLYNRRTRQDEPALFVALTFERREVLDSSNISPMNLIGVDRGENIPAVIALTDPEGCPLSRFKDSLGNPTHILRIGESYKEKQRTIQAKKRVEQRRAGGYSRKYASKAKNLADDMVRNTARDLLYYAVTQDAMLIFENLSRGFGRQGKRTFMAERQYTRMEDWLTAKLAYEGLPSKTYLSKTLAQYTSKTCSNCGFTITSADYDRVLEKLKKTATGWMTTINGKELKVEGQITYYNRYKRQNVVKDLSVELDRLSEESVNNDISSWTKGRSGEALSLLKKRFSHRPVQEKFVCLNCGFETHADEQAALNIARSWLFLRSQEYKKYQTNKTTGNTDKRAFVETWQSFYRKKLKEVWKPAV

SEQ ID NO: 25151 - protein, 978 aa, synthetic construct
  REGION 1..978: note = engineered CasX variant
QEIKRINKIRRRLVKDSNTKKAGKTGPMKTLLVRVMTPDLRERLENLRKKPENIPQPISNTSRANLNKLLTDYTEMKKAILHVYWEEFQKDPVGLMSRVAQPASKKIDQNKLKPEMDEKGNLTTAGFACSQCGQPLFVYKLEQVSEKGKAYTNYFGRCNVAEHEKLILLAQLKPEKDSDEAVTYSLGKFGQRALDFYSIHVTKESTHPVKPLAQIAGNRYASGPVGKALSDACMGTIASFLSKYQDIIIEHQKVVKGNQKRLESLRELAGKENLEYPSVTLPPQPHTKEGVDAYNEVIARVRMWVNLNLWQKLKLSRDDAKPLLRLKGFPSFPLVERQANEVDWWDMVCNVKKLINEKKEDGKVFWQNLAGYKRQEALRPYLSSEEDRKKGKKFARYQLGDLLLHLEKKHGEDWGKVYDEAWERIDKKVEGLSKHIKLEEERRSEDAQSKAALTDWLRAKASFVIEGLKEADKDEFCRCELKLQKWYGDLRGKPFAIEAENSILDISGFSKQYNCAFIWQKDGVKKLNLYLIINYFKGGKLRFKKIKPEAFEANRFYTVINKKSGEIVPMEVNFNFDDPNLIILPLAFGKRQGREFIWNDLLSLETGSLKLANGRVIEKTLYNRRTRQDEPALFVALTFERREVLDSSNISPMNLIGVDRGENIPAVIALTDPEGCPLSRFKDSLGNPTHILRIGESYKEKQRTIQAKKEVGQRRAGGYSRKYASKAKNLADDMVRNTARDLLYYAVTQDAMLIFENLSRGFGRQGKRTFMAERQYTRMEDWLTAKLAYEGLPSKTYLSKTLAQYTSKTCSNCGFTITSADYDRVLEKLKKTATGWMTTINGKELKVEGQITYYNRYKRQNVVKDLSVELDRLSEESVNNDISSWTKGRSGEALSLLKKRFSHRPVQEKFVCLNCGFETHADEQAALNIARSWLFLRSQEYKKYQTNKTTGNTDKRAFVETWQSFYRKKLKEVWKPAV

SEQ ID NO: 25152 - protein, 978 aa, synthetic construct
  REGION 1..978: note = engineered CasX variant
QEIKRINKIRRRLVKDSNTKKAGKTGPMKTLLVRVMTPDLRERLENLRKKPENIPQPISNTSRANLNKLLTDYTEMKKAILHVYWEEFQKDPVGLMSRVAQPASKKIDQNKLKPEMDEKGNLTTAGFACSQCGQPLFVYKLEQVSEKGKAYTNYFGRCNVAEHEKLILLAQLKPEKDSDEAVTYSLGKFGQRALDFYSIHVTKESTHPVKPLAQIAGNRYASGPVGKALSDACMGTIASFLSKYQDIIIEHQKVVKGNQKRLESLRELAGKENLEYPSVTLPPQPHTKEGVDAYNEVIARVRMWVNLNLWQKLKLSRDDAKPLLRLKGFPSFPLVERQANEVDWWDMVCNVKKLINEKKEDGKVFWQNLAGYKRQEALRPYLSSEEDRKKGKKFARYQLGDLLLHLEKKHGEDWGKVYDEAWERIDKKVEGLSKHIKLEEERRSEDAQSKAALTDWLRAKASFVIEGLKEADKDEFCRCELKLQKWYGDLRGKPFAIEAENSILDISGFSKQYNCAFIWQKDGVKKLNLYLIINYFKGGKLRFKKIKPEAFEANRFYTVINKKSGEIVPMEVNFNFDDPNLIILPLAFGKRQGREFIWNDLLSLETGSLKLANGRVIEKTLYNRRTRQDEPALFVALTFERREVLDSSNISPMNLIGVDRGENIPAVIALTDPEGCPLSRFKDSLGNPTHILRIGESYKEKQRTIQAKKEVGQRLAGGYSRKYASKAKNLADDMVRNTARDLLYYAVTQDAMLIFENLSRGFGRQGKRTFMAERQYTRMEDWLTAKLAYEGLPSKTYLSKTLAQYTSKTCSNCGFTITSADYDRVLEKLKKTATGWMTTINGKELKVEGQITYYNRYKRQNVVKDLSVELDRLSEESVNNDISSWTKGRSGEALSLLKKRFSHRPVQEKFVCLNCGFETHADEQAALNIARSWLFLRSQEYKKYQTNKTTGNTDKRAFVETWQSFYRKKLKEVWKPAV

SEQ ID NO: 25153 - protein, 978 aa, synthetic construct
  REGION 1..978: note = engineered CasX variant
QEIKRINKIRRRLVKDSNTKKAGKTGPMKTLLVRVMTPDLRERLENLRKKPENIPQPISNTSRANLNKLLTDYTEMKKAILHVYWEEFQKDPVGLMSRVAQPASKKIDQNKLKPEMDEKGNLTTAGFACSQCGQPLFVYKLEQVSEKGKAYTNYFGRCNVAEHEKLILLAQLKPEKDSDEAVTYSLGKFGQRALDFYSIHVTKESTHPVKPLAQIAGNRYASGPVGKALSDACMGTIASFLSKYQDIIIEHQKVVKGNQKRLESLRELAGKENLEYPSVTLPPQPHTKEGVDAYNEVIARVRMWVNLNLWQKLKLSRDDAKPLLRLKGFPSFPLVERQANEVDWWDMVCNVKKLINEKKEDGKVFWQNLAGYKRQEALRPYLSSEEDRKKGKKFARYQLGDLLLHLEKKHGEDWGKVYDEAWERIDKKVEGLSKHIKLEEERRSEDAQSKAALTDWLRAKASFVIEGLKEADKDEFCRCELKLQKWYGDLRGKPFAIEAENSILDISGFSKQYNCAFIWQKDGVKKLNLYLIINYFKGGKLRFKKIKPEAFEANRFYTVINKKSGEIVPMEVNFNFDDPNLIILPLAFGKRQGREFIWNDLLSLETGSLKLANGRVIEKTLYNRRTRQDEPALFVALTFERREVLDSSNISPMNLIGVDRGENIPAVIALTDPEGCPLSRFKDSLGNPTHILRIGESYKEKQRTIQAKKEVEQRRAGGYSRKYASKAKNLADDMVRNTARDLLYYAVTQDAMLIFENLSRGFGRQGKRTFMAERQYTRMEDWLTAKLAYEGLPSKTYLSKTLAQYTSKTCSNCGFTITSADYDRVLEKLKKTATGWMTTINGKELKVEGQITYYNRYKRQNVVKDLSVELDRLSEESVNNDISSWTKGRSGEALSLLKKRFSHRPVQEKFVCLNCGFETHADEQAALNIARSWLFLRSQEYKKYQTNKTTGNTDKRAFVETWQSFYRKKLKEVWKPAV

SEQ ID NO: 25154 - protein, 978 aa, synthetic construct
  REGION 1..978: note = engineered CasX variant
QEIKRINKIRRRLVKDSNTKKAGKTGPMKTLLVRVMTPDLRERLENLRKKPENIPQPISNTSRANLNKLLTDYTEMKKAILHVYWEEFQKDPVGLMSRVAQPASKKIDQNKLKPEMDEKGNLTTAGFACSQCGQPLFVYKLEQVSEKGKAYTNYFGRCNVAEHEKLILLAQLKPEKDSDEAVTYSLGKFGQRALDFYSIHVTKESTHPVKPLAQIAGNRYASGPVGKALSDACMGTIASFLSKYQDIIIEHQKVVKGNQKRLESLRELAGKENLEYPSVTLPPQPHTKEGVDAYNEVIARVRMWVNLNLWQKLKLSRDDAKPLLRLKGFPSFPLVERQANEVDWWDMVCNVKKLINEKKEDGKVFWQNLAGYKRQEALRPYLSSEEDRKKGKKFARYQLGDLLLHLEKKHGEDWGKVYDEAWERIDKKVEGLSKHIKLEEERRSEDAQSKAALTDWLRAKASFVIEGLKEADKDEFCRCELKLQKWYGDLRGKPFAIEAENSILDISGFSKQYNCAFIWQKDGVKKLNLYLIINYFKGGKLRFKKIKPEAFEANRFYTVINKKSGEIVPMEVNFNFDDPNLIILPLAFGKRQGREFIWNDLLSLETGSLKLANGRVIEKTLYNRRTRQDEPALFVALTFERREVLDSSNISPMNLIGVDRGENIPAVIALTDPEGCPLSRFKDSLGNPTHILRIGESYKEKQRTIQAKKEVEQRLAGGYSRKYASKAKNLADDMVRNTARDLLYYAVTQDAMLIFENLSRGFGRQGKRTFMAERQYTRMEDWLTAKLAYEGLPSKTYLSKTLAQYTSKTCSNCGFTITSADYDRVLEKLKKTATGWMTTINGKELKVEGQITYYNRYKRQNVVKDLSVELDRLSEESVNNDISSWTKGRSGEALSLLKKRFSHRPVQEKFVCLNCGFETHADEQAALNIARSWLFLRSQEYKKYQTNKTTGNTDKRAFVETWQSFYRKKLKEVWKPAV

SEQ ID NO: 25155 - protein, 978 aa, synthetic construct
  REGION 1..978: note = engineered CasX variant
QEIKRINKIRRRLVKDSNTKKAGKTGPMKTLLVRVMTPDLRERLENLRKKPENIPQPISNTSRANLNKLLTDYTEMKKAILHVYWEEFQKDPVGLMSRVAQPASKKIDQNKLKPEMDEKGNLTTAGFACSQCGQPLFVYKLEQVSEKGKAYTNYFGRCNVAEHEKLILLAQLKPEKDSDEAVTYSLGKFGQRALDFYSIHVTKESTHPVKPLAQIAGNRYASGPVGKALSDACMGTIASFLSKYQDIIIEHQKVVKGNQKRLESLRELAGKENLEYPSVTLPPQPHTKEGVDAYNEVIARVRMWVNLNLWQKLKLSRDDAKPLLRLKGFPSFPLVERQANEVDWWDMVCNVKKLINEKKEDGKVFWQNLAGYKRQEALRPYLSSEEDRKKGKKFARYQLGDLLLHLEKKHGEDWGKVYDEAWERIDKKVEGLSKHIKLEEERRSEDAQSKAALTDWLRAKASFVIEGLKEADKDEFCRCELKLQKWYGDLRGKPFAIEAENSILDISGFSKQYNCAFIWQKDGVKKLNLYLIINYFKGGKLRFKKIKPEAFEANRFYTVINKKSGEIVPMEVNFNFDDPNLIILPLAFGKRQGREFIWNDLLSLETGSLKLANGRVIEKTLYNRRTRQDEPALFVALTFERREVLDSSNISPMNLIGVDRGENIPAVIALTDPEGCPLSRFKDSLGNPTHILRIGESYKEKQRTIQAFKEVEQRRAGGYSRKYASKAKNLADDMVRNTARDLLYYAVTQDAMLIFENLSRGFGRQGKRTFMAERQYTRMEDWLTAKLAYEGLPSKTYLSKTLAQYTSKTCSNCGFTITSADYDRVLEKLKKTATGWMTTINGKELKVEGQITYYNRYKRQNVVKDLSVELDRLSEESVNNDISSWTKGRSGEALSLLKKRFSHRPVQEKFVCLNCGFETHADEQAALNIARSWLFLRSQEYKKYQTNKTTGNTDKRAFVETWQSFYRKKLKEVWKPAV

SEQ ID NO: 25156 - protein, 978 aa, synthetic construct
  REGION 1..978: note = engineered CasX variant
QEIKRINKIRRRLVKDSNTKKAGKTGPMKTLLVRVMTPDLRERLENLRKKPENIPQPISNTSRANLNKLLTDYTEMKKAILHVYWEEFQKDPVGLMSRVAQPASKKIDQNKLKPEMDEKGNLTTAGFACSQCGQPLFVYKLEQVSEKGKAYTNYFGRCNVAEHEKLILLAQLKPEKDSDEAVTYSLGKFGQRALDFYSIHVTKESTHPVKPLAQIAGNRYASGPVGKALSDACMGTIASFLSKYQDIIIEHQKVVKGNQKRLESLRELAGKENLEYPSVTLPPQPHTKEGVDAYNEVIARVRMWVNLNLWQKLKLSRDDAKPLLRLKGFPSFPLVERQANEVDWWDMVCNVKKLINEKKEDGKVFWQNLAGYKRQEALRPYLSSEEDRKKGKKFARYQLGDLLLHLEKKHGEDWGKVYDEAWERIDKKVEGLSKHIKLEEERRSEDAQSKAALTDWLRAKASFVIEGLKEADKDEFCRCELKLQKWYGDLRGKPFAIEAENSILDISGFSKQYNCAFIWQKDGVKKLNLYLIINYFKGGKLRFKKIKPEAFEANRFYTVINKKSGEIVPMEVNFNFDDPNLIILPLAFGKRQGREFIWNDLLSLETGSLKLANGRVIEKTLYNRRTRQDEPALFVALTFERREVLDSSNISPMNLIGVDRGENIPAVIALTDLEGCPLSRFKDSLGNPTHILRIGESYKEKQRTIQAKKEVEQRRAGGYSRKYASKAKNLADDMVRNTARDLLYYAVTQDAMLIFENLSRGFGRQGKRTFMAERQYTRMEDWLTAKLAYEGLPSKTYLSKTLAQYTSKTCSNCGFTITSADYDRVLEKLKKTATGWMTTINGKELKVEGQITYYNRYKRQNVVKDLSVELDRLSEESVNNDISSWTKGRSGEALSLLKKRFSHRPVQEKFVCLNCGFETHADEQAALNIARSWLFLRSQEYKKYQTNKTTGNTDKRAFVETWQSFYRKKLKEVWKPAV

SEQ ID NO: 25157 - protein, 978 aa, synthetic construct
  REGION 1..978: note = engineered CasX variant
QEIKRINKIRRRLVKDSNTKKAGKTGPMKTLLVRVMTPDLRERLENLRKKPENIPQPISNTSRANLNKLLTDYTEMKKAILHVYWEEFQKDPVGLMSRVAQPASKKIDQNKLKPEMDEKGNLTTAGFACSQCGQPLFVYKLEQVSEKGKAYTNYFGRCNVAEHEKLILLAQLKPEKDSDEAVTYSLGKFGQRALDFYSIHVTKESTHPVKPLAQIAGNRYASGPVGKALSDACMGTIASFLSKYQDIIIEHQKVVKGNQKRLESLRELAGKENLEYPSVTLPPQPHTKEGVDAYNEVIARVRMWVNLNLWQKLKLSRDDAKPLLRLKGFPSFPLVERQANEVDWWDMVCNVKKLINEKKEDGKVFWQNLAGYKRQEALRPYLSSEEDRKKGKKFARYQLGDLLLHLEKKHGEDWGKVYDEAWERIDKKVEGLSKHIKLEEERRSEDAQSKAALTDWLRAKASFVIEGLKEADKDEFCRCELKLQKWYGDLRGKPFAIEAENSILDISGFSKQYNCAFIWQKDGVKKLNLYLIINYFKGGKLRFKKIKPEAFEANRFYTVINKKSGEIVPMEVNFNFDDPNLIILPLAFGKRQGREFIWNDLLSLETGSLKLANGRVIEKTLYNRRTRQDEPALFVALTFERREVLDSSNISPMNLIGVDRGENIPAVIALTDLEGCPLSRFKDSLGNPTHILRIGESYKEKQRTIQAFKEVEQRRAGGYSRKYASKAKNLADDMVRNTARDLLYYAVTQDAMLIFENLSRGFGRQGKRTFMAERQYTRMEDWLTAKLAYEGLPSKTYLSKTLAQYTSKTCSNCGFTITSADYDRVLEKLKKTATGWMTTINGKELKVEGQITYYNRYKRQNVVKDLSVELDRLSEESVNNDISSWTKGRSGEALSLLKKRFSHRPVQEKFVCLNCGFETHADEQAALNIARSWLFLRSQEYKKYQTNKTTGNTDKRAFVETWQSFYRKKLKEVWKPAV

SEQ ID NO: 25158 - protein, 978 aa, synthetic construct
  REGION 1..978: note = engineered CasX variant
QEIKRINKIRRRLVKDSNTKKAGKTGPMKTLLVRVMTPDLRERLENLRKKPENIPQPISNTSRANLNKLLTDYTEMKKAILHVYWEEFQKDPVGLMSRVAQPASKKIDQNKLKPEMDEKGNLTTAGFACSQCGQPLFVYKLEQVSEKGKAYTNYFGRCNVAEHEKLILLAQLKPEKDSDEAVTYSLGKFGQRALDFYSIHVTKESTHPVKPLAQIAGNRYASGPVGKALSDACMGTIASFLSKYQDIIIEHQKVVKGNQKRLESLRELAGKENLEYPSVTLPPQPHTKEGVDAYNEVIARVRMWVNLNLWQKLKLSRDDAKPLLRLKGFPSFPLVERQANEVDWWDMVCNVKKLINEKKEDGKVFWQNLAGYKRQEALRPYLSSEEDRKKGKKFARYQLGDLLLHLEKKHGEDWGKVYDEAWERIDKKVEGLSKHIKLEEERRSEDAQSKAALTDWLRAKASFVIEGLKEADKDEFCRCELKLQKWYGDLRGKPFAIEAENSILDISGFSKQYNCAFIWQKDGVKKLNLYLIINYFKGGKLRFKKIKPEAFEANRFYTVINKKSGEIVPMEVNFNFDDPNLIILPLAFGKRQGREFIWNDLLSLETGSLKLANGRVIEKTLYNRRTRQDEPALFVALTFERREVLDSSNIRPWNLIGVDRGENIPAVIALTDPEGCPLSRFKDSLGNPTHILRIGESYKEKQRTIQAKKEVEQRRAGGYSRKYASKAKNLADDMVRNTARDLLYYAVTQDAMLIFENLSRGFGRQGKRTFMAERQYTRMEDWLTAKLAYEGLPSKTYLSKTLAQYTSKTCSNCGFTITSADYDRVLEKLKKTATGWMTTINGKELKVEGQITYYNRYKRQNVVKDLSVELDRLSEESVNNDISSWTKGRSGEALSLLKKRFSHRPVQEKFVCLNCGFETHADEQAALNIARSWLFLRSQEYKKYQTNKTTGNTDKRAFVETWQSFYRKKLKEVWKPAV

SEQ ID NO: 25159 - protein, 978 aa, synthetic construct
  REGION 1..978: note = engineered CasX variant
QEIKRINKIRRRLVKDSNTKKAGKTGPMKTLLVRVMTPDLRERLENLRKKPENIPQPISNTSRANLNKLLTDYTEMKKAILHVYWEEFQKDPVGLMSRVAQPASKKIDQNKLKPEMDEKGNLTTAGFACSQCGQPLFVYKLEQVSEKGKAYTNYFGRCNVAEHEKLILLAQLKPEKDSDEAVTYSLGKFGQRALDFYSIHVTKESTHPVKPLAQIAGNRYASGPVGKALSDACMGTIASFLSKYQDIIIEHQKVVKGNQKRLESLRELAGKENLEYPSVTLPPQPHTKEGVDAYNEVIARVRMWVNLNLWQKLKLSRDDAKPLLRLKGFPSFPLVERQANEVDWWDMVCNVKKLINEKKEDGKVFWQNLAGYKRQEALRPYLSSEEDRKKGKKFARYQLGDLLLHLEKKHGEDWGKVYDEAWERIDKKVEGLSKHIKLEEERRSEDAQSKAALTDWLRAKASFVIEGLKEADKDEFCRCELKLQKWYGDLRGKPFAIEAENSILDISGFSKQYNCAFIWQKDGVKKLNLYLIINYFKGGKLRFKKIKPEAFEANRFYTVINKKSGEIVPMEVNFNFDDPNLIILPLAFGKRQGREFIWNDLLSLETGSLKLANGRVIEKTLYNRRTRQDEPALFVALTFERREVLDSSNIRPMNLIGVDRGENIPAVIALTDPEGCPLSRFKDSLGNPTHILRIGESYKEKQRTIQAKKEVEQRRAGGYSRKYASKAKNLADDMVRNTARDLLYYAVTQDAMLIFENLSRGFGRQGKRTFMAERQYTRMEDWLTAKLAYEGLPSKTYLSKTLAQYTSKTCSNCGFTITSADYDRVLEKLKKTATGWMTTINGKELKVEGQITYYNRYKRQNVVKDLSVELDRLSEESVNNDISSWTKGRSGEALSLLKKRFSHRPVQEKFVCLNCGFETHADEQAALNIARSWLFLRSQEYKKYQTNKTTGNTDKRAFVETWQSFYRKKLKEVWKPAV

SEQ ID NO: 25160 - protein, 978 aa, synthetic construct
  REGION 1..978: note = engineered CasX variant
QEIKRINKIRRRLVKDSNTKKAGKTGPMKTLLVRVMTPDLRERLENLRKKPENIPQPISNTSRANLNKLLTDYTEMKKAILHVYWEEFQKDPVGLMSRVAQPASKKIDQNKLKPEMDEKGNLTTAGFACSQCGQPLFVYKLEQVSEKGKAYTNYFGRCNVAEHEKLILLAQLKPEKDSDEAVTYSLGKFGQRALDFYSIHVTKESTHPVKPLAQIAGNRYASGPVGKALSDACMGTIASFLSKYQDIIIEHQKVVKGNQKRLESLRELAGKENLEYPSVTLPPQPHTKEGVDAYNEVIARVRMWVNLNLWQKLKLSRDDAKPLLRLKGFPSFPLVERQANEVDWWDMVCNVKKLINEKKEDGKVFWQNLAGYKRQEALRPYLSSEEDRKKGKKFARYQLGDLLLHLEKKHGEDWGKVYDEAWERIDKKVEGLSKHIKLEEERRSEDAQSKAALTDWLRAKASFVIEGLKEADKDEFCRCELKLQKWYGDLRGKPFAIEAENSILDISGFSKQYNCAFIWQKDGVKKLNLYLIINYFKGGKLRFKKIKPEAFEANRFYTVINKKSGEIVPMEVNFNFDDPNLIILPLAFGKRQGREFIWNDLLSLETGSLKLANGRVIEKTLYNRRTRQDEPALFVALTFERREVLDSSNIRPMNLIGVDRGENIPAVIALTDPEGCPLSRFKDSLGNPTHILRIGESYKEKQRTIQAKKEQEQRRAGGYSRKYASKAKNLADDMVRNTARDLLYYAVTQDAMLIFENLSRGFGRQGKRTFMAERQYTRMEDWLTAKLAYEGLPSKTYLSKTLAQYTSKTCSNCGFTITSADYDRVLEKLKKTATGWMTTINGKELKVEGQITYYNRYKRQNVVKDLSVELDRLSEESVNNDISSWTKGRSGEALSLLKKRFSHRPVQEKFVCLNCGFETHADEQAALNIARSWLFLRSQEYKKYQTNKTTGNTDKRAFVETWQSFYRKKLKEVWKPAV

SEQ ID NO: 25161 - protein, 978 aa, synthetic construct
  REGION 1..978: note = engineered CasX variant
QEIKRINKIRRRLVKDSNTKKAGKTGPMKTLLVRVMTPDLRERLENLRKKPENIPQPISNTSRANLNKLLTDYTEMKKAILHVYWEEFQKDPVGLMSRVAQPASKKIDQNKLKPEMDEKGNLTTAGFACSQCGQPLFVYKLEQVSEKGKAYTNYFGRCNVAEHEKLILLAQLKPEKDSDEAVTYSLGKFGQRALDFYSIHVTKESTHPVKPLAQIAGNRYASGPVGKALSDACMGTIASFLSKYQDIIIEHQKVVKGNQKRLESLRELAGKENLEYPSVTLPPQPHTKEGVDAYNEVIARVRMWVNLNLWQKLKLSRDDAKPLLRLKGFPSFPLVERQANEVDWWDMVCNVKKLINEKKEDGKVFWQNLAGYKRQEALRPYLSSEEDRKKGKKFARYQLGDLLLHLEKKHGEDWGKVYDEAWERIDKKVEGLSKHIKLEEERRSEDAQSKAALTDWLRAKASFVIEGLKEADKDEFCRCELKLQKWYGDLRGKPFAIEAENSILDISGFSKQYNCAFIWQKDGVKKLNLYLIINYFKGGKLRFKKIKPEAFEANRFYTVINKKSGEIVPMEVNFNFDDPNLIILPLAFGKRQGREFIWNDLLSLETGSLKLANGRVIEKTLYNRRTRQDEPALFVALTFERREVLDSSNIRPMNLIGVDRGENIPAVIALTDPEGCPLSRFKDSLGNPTHILRIGESYKEKQRQIQAKKEVEQRRAGGYSRKYASKAKNLADDMVRNTARDLLYYAVTQDAMLIFENLSRGFGRQGKRTFMAERQYTRMEDWLTAKLAYEGLPSKTYLSKTLAQYTSKTCSNCGFTITSADYDRVLEKLKKTATGWMTTINGKELKVEGQITYYNRYKRQNVVKDLSVELDRLSEESVNNDISSWTKGRSGEALSLLKKRFSHRPVQEKFVCLNCGFETHADEQAALNIARSWLFLRSQEYKKYQTNKTTGNTDKRAFVETWQSFYRKKLKEVWKPAV

SEQ ID NO: 25162 - protein, 978 aa, synthetic construct
  REGION 1..978: note = engineered CasX variant
QEIKRINKIRRRLVKDSNTKKAGKTGPMKTLLVRVMTPDLRERLENLRKKPENIPQPISNTSRANLNKLLTDYTEMKKAILHVYWEEFQKDPVGLMSRVAQPASKKIDQNKLKPEMDEKGNLTTAGFACSQCGQPLFVYKLEQVSEKGKAYTNYFGRCNVAEHEKLILLAQLKPEKDSDEAVTYSLGKFGQRALDFYSIHVTKESTHPVKPLAQIAGNRYASGPVGKALSDACMGTIASFLSKYQDIIIEHQKVVKGNQKRLESLRELAGKENLEYPSVTLPPQPHTKEGVDAYNEVIARVRMWVNLNLWQKLKLSRDDAKPLLRLKGFPSFPLVERQANEVDWWDMVCNVKKLINEKKEDGKVFWQNLAGYKRQEALRPYLSSEEDRKKGKKFARYQLGDLLLHLEKKHGEDWGKVYDEAWERIDKKVEGLSKHIKLEEERRSEDAQSKAALTDWLRAKASFVIEGLKEADKDEFCRCELKLQKWYGDLRGKPFAIEAENSILDISGFSKQYNCAFIWQKDGVKKLNLYLIINYFKGGKLRFKKIKPEAFEANRFYTVINKKSGEIVPMEVNFNFDDPNLIILPLAFGKRQGREFIWNDLLSLETGSLKLANGRVIEKTLYNRRTRQDEPALFVALTFERREVLDSSNIRPMNLIGVDRGENIPAVIALTDPEGCPLSRFKDSGGNPTHILRIGESYKEKQRTIQAKKEVEQRRAGGYSRKYASKAKNLADDMVRNTARDLLYYAVTQDAMLIFENLSRGFGRQGKRTFMAERQYTRMEDWLTAKLAYEGLPSKTYLSKTLAQYTSKTCSNCGFTITSADYDRVLEKLKKTATGWMTTINGKELKVEGQITYYNRYKRQNVVKDLSVELDRLSEESVNNDISSWTKGRSGEALSLLKKRFSHRPVQEKFVCLNCGFETHADEQAALNIARSWLFLRSQEYKKYQTNKTTGNTDKRAFVETWQSFYRKKLKEVWKPAV

SEQ ID NO: 25163 - protein, 978 aa, synthetic construct
  REGION 1..978: note = engineered CasX variant
QEIKRINKIRRRLVKDSNTKKAGKTGPMKTLLVRVMTPDLRERLENLRKKPENIPQPISNTSRANLNKLLTDYTEMKKAILHVYWEEFQKDPVGLMSRVAQPASKKIDQNKLKPEMDEKGNLTTAGFACSQCGQPLFVYKLEQVSEKGKAYTNYFGRCNVAEHEKLILLAQLKPEKDSDEAVTYSLGKFGQRALDFYSIHVTKESTHPVKPLAQIAGNRYASGPVGKALSDACMGTIASFLSKYQDIIIEHQKVVKGNQKRLESLRELAGKENLEYPSVTLPPQPHTKEGVDAYNEVIARVRMWVNLNLWQKLKLSRDDAKPLLRLKGFPSFPLVERQANEVDWWDMVCNVKKLINEKKEDGKVFWQNLAGYKRQEALRPYLSSEEDRKKGKKFARYQLGDLLLHLEKKHGEDWGKVYDEAWERIDKKVEGLSKHIKLEEERRSEDAQSKAALTDWLRAKASFVIEGLKEADKDEFCRCELKLQKWYGDLRGKPFAIEAENSILDISGFSKQYNCAFIWQKDGVKKLNLYLIINYFKGGKLRFKKIKPEAFEANRFYTVINKKSGEIVPMEVNFNFDDPNLIILPLAFGKRQGREFIWNDLLSLETGSLKLANGRVIEKTLYNRRTRQDEPALFVALTFERREVLDSSNIRPMNLIGVDRGENIPAVIALTDPEGCPLSCFKDSLGNPTHILRIGESYKEKQRTIQAKKEVEQRRAGGYSRKYASKAKNLADDMVRNTARDLLYYAVTQDAMLIFENLSRGFGRQGKRTFMAERQYTRMEDWLTAKLAYEGLPSKTYLSKTLAQYTSKTCSNCGFTITSADYDRVLEKLKKTATGWMTTINGKELKVEGQITYYNRYKRQNVVKDLSVELDRLSEESVNNDISSWTKGRSGEALSLLKKRFSHRPVQEKFVCLNCGFETHADEQAALNIARSWLFLRSQEYKKYQTNKTTGNTDKRAFVETWQSFYRKKLKEVWKPAV

SEQ ID NO: 25164 - protein, 978 aa, synthetic construct
  REGION 1..978: note = engineered CasX variant
QEIKRINKIRRRLVKDSNTKKAGKTGPMKTLLVRVMTPDLRERLENLRKKPENIPQPISNTSRANLNKLLTDYTEMKKAILHVYWEEFQKDPVGLMSRVAQPASKKIDQNKLKPEMDEKGNLTTAGFACSQCGQPLFVYKLEQVSEKGKAYTNYFGRCNVAEHEKLILLAQLKPEKDSDEAVTYSLGKFGQRALDFYSIHVTKESTHPVKPLAQIAGNRYASGPVGKALSDACMGTIASFLSKYQDIIIEHQKVVKGNQKRLESLRELAGKENLEYPSVTLPPQPHTKEGVDAYNEVIARVRMWVNLNLWQKLKLSRDDAKPLLRLKGFPSFPLVERQANEVDWWDMVCNVKKLINEKKEDGKVFWQNLAGYKRQEALRPYLSSEEDRKKGKKFARYQLGDLLLHLEKKHGEDWGKVYDEAWERIDKKVEGLSKHIKLEEERRSEDAQSKAALTDWLRAKASFVIEGLKEADKDEFCRCELKLQKWYGDLRGKPFAIEAENSILDISGFSKQYNCAFIWQKDGVKKLNLYLIINYFKGGKLRFKKIKPEAFEANRFYTVINKKSGEIVPMEVNFNFDDPNLIILPLAFGKRQGREFIWNDLLSLETGSLKLANGRVIEKTLYNRRTRQDEPALFVALTFERREVLDSSNIRPMNLIGVDRGENIPAVIALTDPEGCPLSCFKDSLGNPTHILRIGESYKEKQRQIQAKKEVEQRRAGGYSRKYASKAKNLADDMVRNTARDLLYYAVTQDAMLIFENLSRGFGRQGKRTFMAERQYTRMEDWLTAKLAYEGLPSKTYLSKTLAQYTSKTCSNCGFTITSADYDRVLEKLKKTATGWMTTINGKELKVEGQITYYNRYKRQNVVKDLSVELDRLSEESVNNDISSWTKGRSGEALSLLKKRFSHRPVQEKFVCLNCGFETHADEQAALNIARSWLFLRSQEYKKYQTNKTTGNTDKRAFVETWQSFYRKKLKEVWKPAV

SEQ ID NO: 25165 - protein, 978 aa, synthetic construct
  REGION 1..978: note = engineered CasX variant
QEIKRINKIRRRLVKDSNTKKAGKTGPMKTLLVRVMTPDLRERLENLRKKPENIPQPISNTSRANLNKLLTDYTEMKKAILHVYWEEFQKDPVGLMSRVAQPASKKIDQNKLKPEMDEKGNLTTAGFACSQCGQPLFVYKLEQVSEKGKAYTNYFGRCNVAEHEKLILLAQLKPEKDSDEAVTYSLGKFGQRALDFYSIHVTKESTHPVKPLAQIAGNRYASGPVGKALSDACMGTIASFLSKYQDIIIEHQKVVKGNQKRLESLRELAGKENLEYPSVTLPPQPHTKEGVDAYNEVIARVRMWVNLNLWQKLKLSRDDAKPLLRLKGFPSFPLVERQANEVDWWDMVCNVKKLINEKKEDGKVFWQNLAGYKRQEALRPYLSSEEDRKKGKKFARYQLGDLLLHLEKKHGEDWGKVYDEAWERIDKKVEGLSKHIKLEEERRSEDAQSKAALTDWLRAKASFVIEGLKEADKDEFCRCELKLQKWYGDLRGKPFAIEAENSILDISGFSKQYNCAFIWQKDGVKKLNLYLIINYFKGGKLRFKKIKPEAFEANRFYTVINKKSGEIVPMEVNFNFDDPNLIILPLAFGKRQGREFIWNDLLSLETGSLKLANGRVIEKTLYNRRTRQDEPALFVALTFERREVLDSSNIRPMNLIGVDRGENIPAVIALTDPEGCPLHRFKDSLGNPTHILRIGESYKEKQRTIQAKKEVEQRRAGGYSRKYASKAKNLADDMVRNTARDLLYYAVTQDAMLIFENLSRGFGRQGKRTFMAERQYTRMEDWLTAKLAYEGLPSKTYLSKTLAQYTSKTCSNCGFTITSADYDRVLEKLKKTATGWMTTINGKELKVEGQITYYNRYKRQNVVKDLSVELDRLSEESVNNDISSWTKGRSGEALSLLKKRFSHRPVQEKFVCLNCGFETHADEQAALNIARSWLFLRSQEYKKYQTNKTTGNTDKRAFVETWQSFYRKKLKEVWKPAV

SEQ ID NO: 25166 - protein, 978 aa, synthetic construct
  REGION 1..978: note = engineered CasX variant
QEIKRINKIRRRLVKDSNTKKAGKTGPMKTLLVRVMTPDLRERLENLRKKPENIPQPISNTSRANLNKLLTDYTEMKKAILHVYWEEFQKDPVGLMSRVAQPASKKIDQNKLKPEMDEKGNLTTAGFACSQCGQPLFVYKLEQVSEKGKAYTNYFGRCNVAEHEKLILLAQLKPEKDSDEAVTYSLGKFGQRALDFYSIHVTKESTHPVKPLAQIAGNRYASGPVGKALSDACMGTIASFLSKYQDIIIEHQKVVKGNQKRLESLRELAGKENLEYPSVTLPPQPHTKEGVDAYNEVIARVRMWVNLNLWQKLKLSRDDAKPLLRLKGFPSFPLVERQANEVDWWDMVCNVKKLINEKKEDGKVFWQNLAGYKRQEALRPYLSSEEDRKKGKKFARYQLGDLLLHLEKKHGEDWGKVYDEAWERIDKKVEGLSKHIKLEEERRSEDAQSKAALTDWLRAKASFVIEGLKEADKDEFCRCELKLQKWYGDLRGKPFAIEAENSILDISGFSKQYNCAFIWQKDGVKKLNLYLIINYFKGGKLRFKKIKPEAFEANRFYTVINKKSGEIVPMEVNFNFDDPNLIILPLAFGKRQGREFIWNDLLSLETGSLKLANGRVIEKTLYNRRTRQDEPALFVALTFERREVLDSSNIRPMNLIGVDRGENIPAVIALTDPEGCPLHRFKDSLGNPTHILRIGESYKEKQRTIQAKKEQEQRRAGGYSRKYASKAKNLADDMVRNTARDLLYYAVTQDAMLIFENLSRGFGRQGKRTFMAERQYTRMEDWLTAKLAYEGLPSKTYLSKTLAQYTSKTCSNCGFTITSADYDRVLEKLKKTATGWMTTINGKELKVEGQITYYNRYKRQNVVKDLSVELDRLSEESVNNDISSWTKGRSGEALSLLKKRFSHRPVQEKFVCLNCGFETHADEQAALNIARSWLFLRSQEYKKYQTNKTTGNTDKRAFVETWQSFYRKKLKEVWKPAV

SEQ ID NO: 25167 - protein, 978 aa, synthetic construct
  REGION 1..978: note = engineered CasX variant
QEIKRINKIRRRLVKDSNTKKAGKTGPMKTLLVRVMTPDLRERLENLRKKPENIPQPISNTSRANLNKLLTDYTEMKKAILHVYWEEFQKDPVGLMSRVAQPASKKIDQNKLKPEMDEKGNLTTAGFACSQCGQPLFVYKLEQVSEKGKAYTNYFGRCNVAEHEKLILLAQLKPEKDSDEAVTYSLGKFGQRALDFYSIHVTKESTHPVKPLAQIAGNRYASGPVGKALSDACMGTIASFLSKYQDIIIEHQKVVKGNQKRLESLRELAGKENLEYPSVTLPPQPHTKEGVDAYNEVIARVRMWVNLNLWQKLKLSRDDAKPLLRLKGFPSFPLVERQANEVDWWDMVCNVKKLINEKKEDGKVFWQNLAGYKRQEALRPYLSSEEDRKKGKKFARYQLGDLLLHLEKKHGEDWGKVYDEAWERIDKKVEGLSKHIKLEEERRSEDAQSKAALTDWLRAKASFVIEGLKEADKDEFCRCELKLQKWYGDLRGKPFAIEAENSILDISGFSKQYNCAFIWQKDGVKKLNLYLIINYFKGGKLRFKKIKPEAFEANRFYTVINKKSGEIVPMEVNFNFDDPNLIILPLAFGKRQGREFIWNDLLSLETGSLKLANGRVIEKTLYNRRTRQDEPALFVALTFERREVLDSSNIRPMNLIGVDRGENIPAVFALTDPEGCPLSRFKDSLGNPTHILRIGESYKEKQRTIQAKKEVEQRRAGGYSRKYASKAKNLADDMVRNTARDLLYYAVTQDAMLIFENLSRGFGRQGKRTFMAERQYTRMEDWLTAKLAYEGLPSKTYLSKTLAQYTSKTCSNCGFTITSADYDRVLEKLKKTATGWMTTINGKELKVEGQITYYNRYKRQNVVKDLSVELDRLSEESVNNDISSWTKGRSGEALSLLKKRFSHRPVQEKFVCLNCGFETHADEQAALNIARSWLFLRSQEYKKYQTNKTTGNTDKRAFVETWQSFYRKKLKEVWKPAV

SEQ ID NO: 25168 - protein, 978 aa, synthetic construct
  REGION 1..978: note = engineered CasX variant
QEIKRINKIRRRLVKDSNTKKAGKTGPMKTLLVRVMTPDLRERLENLRKKPENIPQPISNTSRANLNKLLTDYTEMKKAILHVYWEEFQKDPVGLMSRVAQPASKKIDQNKLKPEMDEKGNLTTAGFACSQCGQPLFVYKLEQVSEKGKAYTNYFGRCNVAEHEKLILLAQLKPEKDSDEAVTYSLGKFGQRALDFYSIHVTKESTHPVKPLAQIAGNRYASGPVGKALSDACMGTIASFLSKYQDIIIEHQKVVKGNQKRLESLRELAGKENLEYPSVTLPPQPHTKEGVDAYNEVIARVRMWVNLNLWQKLKLSRDDAKPLLRLKGFPSFPLVERQANEVDWWDMVCNVKKLINEKKEDGKVFWQNLAGYKRQEALRPYLSSEEDRKKGKKFARYQLGDLLLHLEKKHGEDWGKVYDEAWERIDKKVEGLSKHIKLEEERRSEDAQSKAALTDWLRAKASFVIEGLKEADKDEFCRCELKLQKWYGDLRGKPFAIEAENSILDISGFSKQYNCAFIWQKDGVKKLNLYLIINYFKGGKLRFKKIKPEAFEANRFYTVINKKSGEIVPMEVNFNFDDPNLIILPLAFGKRQGREFIWNDLLSLETGSLKLANGRVIEKTLYNRRTRQDEPALFVALTFERREVLDSSNIRPMNLIGVDRGENIPAVFALTDPEGCPLSRFKDSGGNPTHILRIGESYKEKQRTIQAKKEVEQRRAGGYSRKYASKAKNLADDMVRNTARDLLYYAVTQDAMLIFENLSRGFGRQGKRTFMAERQYTRMEDWLTAKLAYEGLPSKTYLSKTLAQYTSKTCSNCGFTITSADYDRVLEKLKKTATGWMTTINGKELKVEGQITYYNRYKRQNVVKDLSVELDRLSEESVNNDISSWTKGRSGEALSLLKKRFSHRPVQEKFVCLNCGFETHADEQAALNIARSWLFLRSQEYKKYQTNKTTGNTDKRAFVETWQSFYRKKLKEVWKPAV

SEQ ID NO: 25169 - protein, 978 aa, synthetic construct
  REGION 1..978: note = engineered CasX variant
QEIKRINKIRRRLVKDSNTKKAGKTGPMKTLLVRVMTPDLRERLENLRKKPENIPQPISNTSRANLNKLLTDYTEMKKAILHVYWEEFQKDPVGLMSRVAQPASKKIDQNKLKPEMDEKGNLTTAGFACSQCGQPLFVYKLEQVSEKGKAYTNYFGRCNVAEHEKLILLAQLKPEKDSDEAVTYSLGKFGQRALDFYSIHVTKESTHPVKPLAQIAGNRYASGPVGKALSDACMGTIASFLSKYQDIIIEHQKVVKGNQKRLESLRELAGKENLEYPSVTLPPQPHTKEGVDAYNEVIARVRMWVNLNLWQKLKLSRDDAKPLLRLKGFPSFPLVERQANEVDWWDMVCNVKKLINEKKEDGKVFWQNLAGYKRQEALRPYLSSEEDRKKGKKFARYQLGDLLLHLEKKHGEDWGKVYDEAWERIDKKVEGLSKHIKLEEERRSEDAQSKAALTDWLRAKASFVIEGLKEADKDEFCRCELKLQKWYGDLRGKPFAIEAENSILDISGFSKQYNCAFIWQKDGVKKLNLYLIINYFKGGKLRFKKIKPEAFEANRFYTVINKKSGEIVPMEVNFNFDDPNLIILPLAFGKRQGREFIWNDLLSLETGSLKLANGRVIEKTLYNRRTRQDEPALFVALTFERREVLDSSNIQPMNLIGVDRGENIPAVIALTDPEGRPLSRFKDSLGNPTHILRIGESYKEKQRTIQAKKEVEQRRAGGYSRKYASKAKNLADDMVRNTARDLLYYAVTQDAMLIFENLSRGFGRQGKRTFMAERQYTRMEDWLTAKLAYEGLPSKTYLSKTLAQYTSKTCSNCGFTITSADYDRVLEKLKKTATGWMTTINGKELKVEGQITYYNRYKRQNVVKDLSVELDRLSEESVNNDISSWTKGRSGEALSLLKKRFSHRPVQEKFVCLNCGFETHADEQAALNIARSWLFLRSQEYKKYQTNKTTGNTDKRAFVETWQSFYRKKLKEVWKPAV

SEQ ID NO: 25170 - protein, 978 aa, synthetic construct
  REGION 1..978: note = engineered CasX variant
QEIKRINKIRRRLVKDSNTKKAGKTGPMKTLLVRVMTPDLRERLENLRKKPENIPQPISNTSRANLNKLLTDYTEMKKAILHVYWEEFQKDPVGLMSRVAQPASKKIDQNKLKPEMDEKGNLTTAGFACSQCGQPLFVYKLEQVSEKGKAYTNYFGRCNVAEHEKLILLAQLKPEKDSDEAVTYSLGKFGQRALDFYSIHVTKESTHPVKPLAQIAGNRYASGPVGKALSDACMGTIASFLSKYQDIIIEHQKVVKGNQKRLESLRELAGKENLEYPSVTLPPQPHTKEGVDAYNEVIARVRMWVNLNLWQKLKLSRDDAKPLLRLKGFPSFPLVERQANEVDWWDMVCNVKKLINEKKEDGKVFWQNLAGYKRQEALRPYLSSEEDRKKGKKFARYQLGDLLLHLEKKHGEDWGKVYDEAWERIDKKVEGLSKHIKLEEERRSEDAQSKAALTDWLRAKASFVIEGLKEADKDEFCRCELKLQKWYGDLRGKPFAIEAENSILDISGFSKQYNCAFIWQKDGVKKLNLYLIINYFKGGKLRFKKIKPEAFEANRFYTVINKKSGEIVPMEVNFNFDDPNLIILPLAFGKRQGREFIWNDLLSLETGSLKLANGRVIEKTLYNRRTRQDEPALFVALTFERREVLDSSNIQPMNLIGVDRGENIPAVIALTDPEGCPLSRFKDSRGNPTHILRIGESYKEKQRTIQAKKEVEQRRAGGYSRKYASKAKNLADDMVRNTARDLLYYAVTQDAMLIFENLSRGFGRQGKRTFMAERQYTRMEDWLTAKLAYEGLPSKTYLSKTLAQYTSKTCSNCGFTITSADYDRVLEKLKKTATGWMTTINGKELKVEGQITYYNRYKRQNVVKDLSVELDRLSEESVNNDISSWTKGRSGEALSLLKKRFSHRPVQEKFVCLNCGFETHADEQAALNIARSWLFLRSQEYKKYQTNKTTGNTDKRAFVETWQSFYRKKLKEVWKPAV

SEQ ID NO: 25171 - protein, 978 aa, synthetic construct
  REGION 1..978: note = engineered CasX variant
QEIKRINKIRRRLVKDSNTKKAGKTGPMKTLLVRVMTPDLRERLENLRKKPENIPQPISNTSRANLNKLLTDYTEMKKAILHVYWEEFQKDPVGLMSRVAQPASKKIDQNKLKPEMDEKGNLTTAGFACSQCGQPLFVYKLEQVSEKGKAYTNYFGRCNVAEHEKLILLAQLKPEKDSDEAVTYSLGKFGQRALDFYSIHVTKESTHPVKPLAQIAGNRYASGPVGKALSDACMGTIASFLSKYQDIIIEHQKVVKGNQKRLESLRELAGKENLEYPSVTLPPQPHTKEGVDAYNEVIARVRMWVNLNLWQKLKLSRDDAKPLLRLKGFPSFPLVERQANEVDWWDMVCNVKKLINEKKEDGKVFWQNLAGYKRQEALRPYLSSEEDRKKGKKFARYQLGDLLLHLEKKHGEDWGKVYDEAWERIDKKVEGLSKHIKLEEERRSEDAQSKAALTDWLRAKASFVIEGLKEADKDEFCRCELKLQKWYGDLRGKPFAIEAENSILDISGFSKQYNCAFIWQKDGVKKLNLYLIINYFKGGKLRFKKIKPEAFEANRFYTVINKKSGEIVPMEVNFNFDDPNLIILPLAFGKRQGREFIWNDLLSLETGSLKLANGRVIEKTLYNRRTRQDEPALFVALTFERREVLDSSNIQPMNLIGVDRGENIPAVIALTDPEGCPLSRFKDSLGNPTHILRIGESYKEKQRTIQAKKEWEQRRAGGYSRKYASKAKNLADDMVRNTARDLLYYAVTQDAMLIFENLSRGFGRQGKRTFMAERQYTRMEDWLTAKLAYEGLPSKTYLSKTLAQYTSKTCSNCGFTITSADYDRVLEKLKKTATGWMTTINGKELKVEGQITYYNRYKRQNVVKDLSVELDRLSEESVNNDISSWTKGRSGEALSLLKKRFSHRPVQEKFVCLNCGFETHADEQAALNIARSWLFLRSQEYKKYQTNKTTGNTDKRAFVETWQSFYRKKLKEVWKPAV

SEQ ID NO: 25172 - protein, 978 aa, synthetic construct
  REGION 1..978: note = engineered CasX variant
QEIKRINKIRRRLVKDSNTKKAGKTGPMKTLLVRVMTPDLRERLENLRKKPENIPQPISNTSRANLNKLLTDYTEMKKAILHVYWEEFQKDPVGLMSRVAQPASKKIDQNKLKPEMDEKGNLTTAGFACSQCGQPLFVYKLEQVSEKGKAYTNYFGRCNVAEHEKLILLAQLKPEKDSDEAVTYSLGKFGQRALDFYSIHVTKESTHPVKPLAQIAGNRYASGPVGKALSDACMGTIASFLSKYQDIIIEHQKVVKGNQKRLESLRELAGKENLEYPSVTLPPQPHTKEGVDAYNEVIARVRMWVNLNLWQKLKLSRDDAKPLLRLKGFPSFPLVERQANEVDWWDMVCNVKKLINEKKEDGKVFWQNLAGYKRQEALRPYLSSEEDRKKGKKFARYQLGDLLLHLEKKHGEDWGKVYDEAWERIDKKVEGLSKHIKLEEERRSEDAQSKAALTDWLRAKASFVIEGLKEADKDEFCRCELKLQKWYGDLRGKPFAIEAENSILDISGFSKQYNCAFIWQKDGVKKLNLYLIINYFKGGKLRFKKIKPEAFEANRFYTVINKKSGEIVPMEVNFNFDDPNLIILPLAFGKRQGREFIWNDLLSLETGSLKLANGRVIEKTLYNRRTRQDEPALFVALTFERREVLDSSNIQPMNLIGVDRGENIPAVIALTDPEGCPLSRFKDSLGNPTHILRIGESYKEKQRTIQAKKEVEQRRAGGYSRKYASKAKNLADDMVRNTARDLLYYAVTQDAMLIFENLSRGFGRQGKRTFMAERQYTRMEDWLTAKLAYEGLPSKTYLSKTLAQYTSKTCSNCGFTITSADYDRVLEKLKKTATGWMTTINGKELKVEGQITYYNRYKRQNVVKDLSVELDRLSEESVNNDISSWTKGRSGEALSLLKKRFSHRPVQEKFVCLNCGFETHADEQAALNIARSWLFLRSQEYKKYQTNKTTGNTDKRAFVETWQSFYRKKLKEVWKPAV

SEQ ID NO: 25173 - protein, 978 aa, synthetic construct
  REGION 1..978: note = engineered CasX variant
QEIKRINKIRRRLVKDSNTKKAGKTGPMKTLLVRVMTPDLRERLENLRKKPENIPQPISNTSRANLNKLLTDYTEMKKAILHVYWEEFQKDPVGLMSRVAQPASKKIDQNKLKPEMDEKGNLTTAGFACSQCGQPLFVYKLEQVSEKGKAYTNYFGRCNVAEHEKLILLAQLKPEKDSDEAVTYSLGKFGQRALDFYSIHVTKESTHPVKPLAQIAGNRYASGPVGKALSDACMGTIASFLSKYQDIIIEHQKVVKGNQKRLESLRELAGKENLEYPSVTLPPQPHTKEGVDAYNEVIARVRMWVNLNLWQKLKLSRDDAKPLLRLKGFPSFPLVERQANEVDWWDMVCNVKKLINEKKEDGKVFWQNLAGYKRQEALRPYLSSEEDRKKGKKFARYQLGDLLLHLEKKHGEDWGKVYDEAWERIDKKVEGLSKHIKLEEERRSEDAQSKAALTDWLRAKASFVIEGLKEADKDEFCRCELKLQKWYGDLRGKPFAIEAENSILDISGFSKQYNCAFIWQKDGVKKLNLYLIINYFKGGKLRFKKIKPEAFEANRFYTVINKKSGEIVPMEVNFNFDDPNLIILPLAFGKRQGREFIWNDLLSLETGSLKLANGRVIEKTLYNRRTRQDEPALFVALTFERREVLDSSNIQPMNLIGVDRGENIPAVIALTDPEGCPLSRFKDSLGNPTHILRIGESYKEKQRTIFAKKEWEQRRAGGYSRKYASKAKNLADDMVRNTARDLLYYAVTQDAMLIFENLSRGFGRQGKRTFMAERQYTRMEDWLTAKLAYEGLPSKTYLSKTLAQYTSKTCSNCGFTITSADYDRVLEKLKKTATGWMTTINGKELKVEGQITYYNRYKRQNVVKDLSVELDRLSEESVNNDISSWTKGRSGEALSLLKKRFSHRPVQEKFVCLNCGFETHADEQAALNIARSWLFLRSQEYKKYQTNKTTGNTDKRAFVETWQSFYRKKLKEVWKPAV

SEQ ID NO: 25174 - protein, 978 aa, synthetic construct
  REGION 1..978: note = engineered CasX variant
QEIKRINKIRRRLVKDSNTKKAGKTGPMKTLLVRVMTPDLRERLENLRKKPENIPQPISNTSRANLNKLLTDYTEMKKAILHVYWEEFQKDPVGLMSRVAQPASKKIDQNKLKPEMDEKGNLTTAGFACSQCGQPLFVYKLEQVSEKGKAYTNYFGRCNVAEHEKLILLAQLKPEKDSDEAVTYSLGKFGQRALDFYSIHVTKESTHPVKPLAQIAGNRYASGPVGKALSDACMGTIASFLSKYQDIIIEHQKVVKGNQKRLESLRELAGKENLEYPSVTLPPQPHTKEGVDAYNEVIARVRMWVNLNLWQKLKLSRDDAKPLLRLKGFPSFPLVERQANEVDWWDMVCNVKKLINEKKEDGKVFWQNLAGYKRQEALRPYLSSEEDRKKGKKFARYQLGDLLLHLEKKHGEDWGKVYDEAWERIDKKVEGLSKHIKLEEERRSEDAQSKAALTDWLRAKASFVIEGLKEADKDEFCRCELKLQKWYGDLRGKPFAIEAENSILDISGFSKQYNCAFIWQKDGVKKLNLYLIINYFKGGKLRFKKIKPEAFEANRFYTVINKKSGEIVPMEVNFNFDDPNLIILPLAFGKRQGREFIWNDLLSLETGSLKLANGRVIEKTLYNRRTRQDEPALFVALTFERREVLDSSNIQPMNLIGVDRGENIPAVIALTDPEGCPLSRFKDSLGNPTHILRIGESYKEKQRTIFAKKEVEQRRAGGYSRKYASKAKNLADDMVRNTARDLLYYAVTQDAMLIFENLSRGFGRQGKRTFMAERQYTRMEDWLTAKLAYEGLPSKTYLSKTLAQYTSKTCSNCGFTITSADYDRVLEKLKKTATGWMTTINGKELKVEGQITYYNRYKRQNVVKDLSVELDRLSEESVNNDISSWTKGRSGEALSLLKKRFSHRPVQEKFVCLNCGFETHADEQAALNIARSWLFLRSQEYKKYQTNKTTGNTDKRAFVETWQSFYRKKLKEVWKPAV

SEQ ID NO: 25175 - protein, 978 aa, synthetic construct
  REGION 1..978: note = engineered CasX variant
QEIKRINKIRRRLVKDSNTKKAGKTGPMKTLLVRVMTPDLRERLENLRKKPENIPQPISNTSRANLNKLLTDYTEMKKAILHVYWEEFQKDPVGLMSRVAQPASKKIDQNKLKPEMDEKGNLTTAGFACSQCGQPLFVYKLEQVSEKGKAYTNYFGRCNVAEHEKLILLAQLKPEKDSDEAVTYSLGKFGQRALDFYSIHVTKESTHPVKPLAQIAGNRYASGPVGKALSDACMGTIASFLSKYQDIIIEHQKVVKGNQKRLESLRELAGKENLEYPSVTLPPQPHTKEGVDAYNEVIARVRMWVNLNLWQKLKLSRDDAKPLLRLKGFPSFPLVERQANEVDWWDMVCNVKKLINEKKEDGKVFWQNLAGYKRQEALRPYLSSEEDRKKGKKFARYQLGDLLLHLEKKHGEDWGKVYDEAWERIDKKVEGLSKHIKLEEERRSEDAQSKAALTDWLRAKASFVIEGLKEADKDEFCRCELKLQKWYGDLRGKPFAIEAENSILDISGFSKQYNCAFIWQKDGVKKLNLYLIINYFKGGKLRFKKIKPEAFEANRFYTVINKKSGEIVPMEVNFNFDDPNLIILPLAFGKRQGREFIWNDLLSLETGSLKLANGRVIEKTLYNRRTRQDEPALFVALTFERREVLDSSNIQPMNLIGVDRGENIPAVIALTDPEGCPLSRFKDILGNPTHILRIGESYKEKQRTIQAKKEVEQRRAGGYSRKYASKAKNLADDMVRNTARDLLYYAVTQDAMLIFENLSRGFGRQGKRTFMAERQYTRMEDWLTAKLAYEGLPSKTYLSKTLAQYTSKTCSNCGFTITSADYDRVLEKLKKTATGWMTTINGKELKVEGQITYYNRYKRQNVVKDLSVELDRLSEESVNNDISSWTKGRSGEALSLLKKRFSHRPVQEKFVCLNCGFETHADEQAALNIARSWLFLRSQEYKKYQTNKTTGNTDKRAFVETWQSFYRKKLKEVWKPAV

SEQ ID NO: 25176 - protein, 978 aa, synthetic construct
  REGION 1..978: note = engineered CasX variant
QEIKRINKIRRRLVKDSNTKKAGKTGPMKTLLVRVMTPDLRERLENLRKKPENIPQPISNTSRANLNKLLTDYTEMKKAILHVYWEEFQKDPVGLMSRVAQPASKKIDQNKLKPEMDEKGNLTTAGFACSQCGQPLFVYKLEQVSEKGKAYTNYFGRCNVAEHEKLILLAQLKPEKDSDEAVTYSLGKFGQRALDFYSIHVTKESTHPVKPLAQIAGNRYASGPVGKALSDACMGTIASFLSKYQDIIIEHQKVVKGNQKRLESLRELAGKENLEYPSVTLPPQPHTKEGVDAYNEVIARVRMWVNLNLWQKLKLSRDDAKPLLRLKGFPSFPLVERQANEVDWWDMVCNVKKLINEKKEDGKVFWQNLAGYKRQEALRPYLSSEEDRKKGKKFARYQLGDLLLHLEKKHGEDWGKVYDEAWERIDKKVEGLSKHIKLEEERRSEDAQSKAALTDWLRAKASFVIEGLKEADKDEFCRCELKLQKWYGDLRGKPFAIEAENSILDISGFSKQYNCAFIWQKDGVKKLNLYLIINYFKGGKLRFKKIKPEAFEANRFYTVINKKSGEIVPMEVNFNFDDPNLIILPLAFGKRQGREFIWNDLLSLETGSLKLANGRVIEKTLYNRRTRQDEPALFVALTFERREVLDSSNIQPMNLIGVDRGENIPAVIALTDPEGCPLKRFKDSRGNPTHILRIGESYKEKQRTIQAKKEVEQRRAGGYSRKYASKAKNLADDMVRNTARDLLYYAVTQDAMLIFENLSRGFGRQGKRTFMAERQYTRMEDWLTAKLAYEGLPSKTYLSKTLAQYTSKTCSNCGFTITSADYDRVLEKLKKTATGWMTTINGKELKVEGQITYYNRYKRQNVVKDLSVELDRLSEESVNNDISSWTKGRSGEALSLLKKRFSHRPVQEKFVCLNCGFETHADEQAALNIARSWLFLRSQEYKKYQTNKTTGNTDKRAFVETWQSFYRKKLKEVWKPAV

SEQ ID NO: 25177 - protein, 978 aa, synthetic construct
  REGION 1..978: note = engineered CasX variant
QEIKRINKIRRRLVKDSNTKKAGKTGPMKTLLVRVMTPDLRERLENLRKKPENIPQPISNTSRANLNKLLTDYTEMKKAILHVYWEEFQKDPVGLMSRVAQPASKKIDQNKLKPEMDEKGNLTTAGFACSQCGQPLFVYKLEQVSEKGKAYTNYFGRCNVAEHEKLILLAQLKPEKDSDEAVTYSLGKFGQRALDFYSIHVTKESTHPVKPLAQIAGNRYASGPVGKALSDACMGTIASFLSKYQDIIIEHQKVVKGNQKRLESLRELAGKENLEYPSVTLPPQPHTKEGVDAYNEVIARVRMWVNLNLWQKLKLSRDDAKPLLRLKGFPSFPLVERQANEVDWWDMVCNVKKLINEKKEDGKVFWQNLAGYKRQEALRPYLSSEEDRKKGKKFARYQLGDLLLHLEKKHGEDWGKVYDEAWERIDKKVEGLSKHIKLEEERRSEDAQSKAALTDWLRAKASFVIEGLKEADKDEFCRCELKLQKWYGDLRGKPFAIEAENSILDISGFSKQYNCAFIWQKDGVKKLNLYLIINYFKGGKLRFKKIKPEAFEANRFYTVINKKSGEIVPMEVNFNFDDPNLIILPLAFGKRQGREFIWNDLLSLETGSLKLANGRVIEKTLYNRRTRQDEPALFVALTFERREVLDSSNIQPMNLIGVDRGENIPAVIALTDPEGCPLKRFKDSLGNPTHILRIGESYKEKQRTIQAKKEVEQRRAGGYSRKYASKAKNLADDMVRNTARDLLYYAVTQDAMLIFENLSRGFGRQGKRTFMAERQYTRMEDWLTAKLAYEGLPSKTYLSKTLAQYTSKTCSNCGFTITSADYDRVLEKLKKTATGWMTTINGKELKVEGQITYYNRYKRQNVVKDLSVELDRLSEESVNNDISSWTKGRSGEALSLLKKRFSHRPVQEKFVCLNCGFETHADEQAALNIARSWLFLRSQEYKKYQTNKTTGNTDKRAFVETWQSFYRKKLKEVWKPAV

SEQ ID NO: 25178 - protein, 978 aa, synthetic construct
  REGION 1..978: note = engineered CasX variant
QEIKRINKIRRRLVKDSNTKKAGKTGPMKTLLVRVMTPDLRERLENLRKKPENIPQPISNTSRANLNKLLTDYTEMKKAILHVYWEEFQKDPVGLMSRVAQPASKKIDQNKLKPEMDEKGNLTTAGFACSQCGQPLFVYKLEQVSEKGKAYTNYFGRCNVAEHEKLILLAQLKPEKDSDEAVTYSLGKFGQRALDFYSIHVTKESTHPVKPLAQIAGNRYASGPVGKALSDACMGTIASFLSKYQDIIIEHQKVVKGNQKRLESLRELAGKENLEYPSVTLPPQPHTKEGVDAYNEVIARVRMWVNLNLWQKLKLSRDDAKPLLRLKGFPSFPLVERQANEVDWWDMVCNVKKLINEKKEDGKVFWQNLAGYKRQEALRPYLSSEEDRKKGKKFARYQLGDLLLHLEKKHGEDWGKVYDEAWERIDKKVEGLSKHIKLEEERRSEDAQSKAALTDWLRAKASFVIEGLKEADKDEFCRCELKLQKWYGDLRGKPFAIEAENSILDISGFSKQYNCAFIWQKDGVKKLNLYLIINYFKGGKLRFKKIKPEAFEANRFYTVINKKSGEIVPMEVNFNFDDPNLIILPLAFGKRQGREFIWNDLLSLETGSLKLANGRVIEKTLYNRRTRQDEPALFVALTFERREVLDSSNIPPNNLIGVDRGENIPAVIALTDPEGCPLSRFKDSLGNPTHILRIGESYKEKQRTIQAKKEVEQRRAGGYSRKYASKAKNLADDMVRNTARDLLYYAVTQDAMLIFENLSRGFGRQGKRTFMAERQYTRMEDWLTAKLAYEGLPSKTYLSKTLAQYTSKTCSNCGFTITSADYDRVLEKLKKTATGWMTTINGKELKVEGQITYYNRYKRQNVVKDLSVELDRLSEESVNNDISSWTKGRSGEALSLLKKRFSHRPVQEKFVCLNCGFETHADEQAALNIARSWLFLRSQEYKKYQTNKTTGNTDKRAFVETWQSFYRKKLKEVWKPAV

SEQ ID NO: 25179 - protein, 978 aa, synthetic construct
  REGION 1..978: note = engineered CasX variant
QEIKRINKIRRRLVKDSNTKKAGKTGPMKTLLVRVMTPDLRERLENLRKKPENIPQPISNTSRANLNKLLTDYTEMKKAILHVYWEEFQKDPVGLMSRVAQPASKKIDQNKLKPEMDEKGNLTTAGFACSQCGQPLFVYKLEQVSEKGKAYTNYFGRCNVAEHEKLILLAQLKPEKDSDEAVTYSLGKFGQRALDFYSIHVTKESTHPVKPLAQIAGNRYASGPVGKALSDACMGTIASFLSKYQDIIIEHQKVVKGNQKRLESLRELAGKENLEYPSVTLPPQPHTKEGVDAYNEVIARVRMWVNLNLWQKLKLSRDDAKPLLRLKGFPSFPLVERQANEVDWWDMVCNVKKLINEKKEDGKVFWQNLAGYKRQEALRPYLSSEEDRKKGKKFARYQLGDLLLHLEKKHGEDWGKVYDEAWERIDKKVEGLSKHIKLEEERRSEDAQSKAALTDWLRAKASFVIEGLKEADKDEFCRCELKLQKWYGDLRGKPFAIEAENSILDISGFSKQYNCAFIWQKDGVKKLNLYLIINYFKGGKLRFKKIKPEAFEANRFYTVINKKSGEIVPMEVNFNFDDPNLIILPLAFGKRQGREFIWNDLLSLETGSLKLANGRVIEKTLYNRRTRQDEPALFVALTFERREVLDSSNIPPMNLIGVDRGENIPAVIAMTDPEGCPLSRFKDSLGNPTHILRIGESYKEKQRTIQAKKEVEQRRAGGYSRKYASKAKNLADDMVRNTARDLLYYAVTQDAMLIFENLSRGFGRQGKRTFMAERQYTRMEDWLTAKLAYEGLPSKTYLSKTLAQYTSKTCSNCGFTITSADYDRVLEKLKKTATGWMTTINGKELKVEGQITYYNRYKRQNVVKDLSVELDRLSEESVNNDISSWTKGRSGEALSLLKKRFSHRPVQEKFVCLNCGFETHADEQAALNIARSWLFLRSQEYKKYQTNKTTGNTDKRAFVETWQSFYRKKLKEVWKPAV

SEQ ID NO: 25180 - protein, 978 aa, synthetic construct
  REGION 1..978: note = engineered CasX variant
QEIKRINKIRRRLVKDSNTKKAGKTGPMKTLLVRVMTPDLRERLENLRKKPENIPQPISNTSRANLNKLLTDYTEMKKAILHVYWEEFQKDPVGLMSRVAQPASKKIDQNKLKPEMDEKGNLTTAGFACSQCGQPLFVYKLEQVSEKGKAYTNYFGRCNVAEHEKLILLAQLKPEKDSDEAVTYSLGKFGQRALDFYSIHVTKESTHPVKPLAQIAGNRYASGPVGKALSDACMGTIASFLSKYQDIIIEHQKVVKGNQKRLESLRELAGKENLEYPSVTLPPQPHTKEGVDAYNEVIARVRMWVNLNLWQKLKLSRDDAKPLLRLKGFPSFPLVERQANEVDWWDMVCNVKKLINEKKEDGKVFWQNLAGYKRQEALRPYLSSEEDRKKGKKFARYQLGDLLLHLEKKHGEDWGKVYDEAWERIDKKVEGLSKHIKLEEERRSEDAQSKAALTDWLRAKASFVIEGLKEADKDEFCRCELKLQKWYGDLRGKPFAIEAENSILDISGFSKQYNCAFIWQKDGVKKLNLYLIINYFKGGKLRFKKIKPEAFEANRFYTVINKKSGEIVPMEVNFNFDDPNLIILPLAFGKRQGREFIWNDLLSLETGSLKLANGRVIEKTLYNRRTRQDEPALFVALTFERREVLDSSNIPPMNLIGVDRGENIPAVIAMTDPEGCPLSCFKDSLGNPTHILRIGESYKEKQRTIQAKKEVEQRRAGGYSRKYASKAKNLADDMVRNTARDLLYYAVTQDAMLIFENLSRGFGRQGKRTFMAERQYTRMEDWLTAKLAYEGLPSKTYLSKTLAQYTSKTCSNCGFTITSADYDRVLEKLKKTATGWMTTINGKELKVEGQITYYNRYKRQNVVKDLSVELDRLSEESVNNDISSWTKGRSGEALSLLKKRFSHRPVQEKFVCLNCGFETHADEQAALNIARSWLFLRSQEYKKYQTNKTTGNTDKRAFVETWQSFYRKKLKEVWKPAV

SEQ ID NO: 25181 - protein, 978 aa, synthetic construct
  REGION 1..978: note = engineered CasX variant
QEIKRINKIRRRLVKDSNTKKAGKTGPMKTLLVRVMTPDLRERLENLRKKPENIPQPISNTSRANLNKLLTDYTEMKKAILHVYWEEFQKDPVGLMSRVAQPASKKIDQNKLKPEMDEKGNLTTAGFACSQCGQPLFVYKLEQVSEKGKAYTNYFGRCNVAEHEKLILLAQLKPEKDSDEAVTYSLGKFGQRALDFYSIHVTKESTHPVKPLAQIAGNRYASGPVGKALSDACMGTIASFLSKYQDIIIEHQKVVKGNQKRLESLRELAGKENLEYPSVTLPPQPHTKEGVDAYNEVIARVRMWVNLNLWQKLKLSRDDAKPLLRLKGFPSFPLVERQANEVDWWDMVCNVKKLINEKKEDGKVFWQNLAGYKRQEALRPYLSSEEDRKKGKKFARYQLGDLLLHLEKKHGEDWGKVYDEAWERIDKKVEGLSKHIKLEEERRSEDAQSKAALTDWLRAKASFVIEGLKEADKDEFCRCELKLQKWYGDLRGKPFAIEAENSILDISGFSKQYNCAFIWQKDGVKKLNLYLIINYFKGGKLRFKKIKPEAFEANRFYTVINKKSGEIVPMEVNFNFDDPNLIILPLAFGKRQGREFIWNDLLSLETGSLKLANGRVIEKTLYNRRTRQDEPALFVALTFERREVLDSSNIPPMNLIGVDRGENIPAVIALTDPEGKPLSRFKDSLGNPTHILRIGESYKEKQRTIQAKKEVEQRRCGGYSRKYASKAKNLADDMVRNTARDLLYYAVTQDAMLIFENLSRGFGRQGKRTFMAERQYTRMEDWLTAKLAYEGLPSKTYLSKTLAQYTSKTCSNCGFTITSADYDRVLEKLKKTATGWMTTINGKELKVEGQITYYNRYKRQNVVKDLSVELDRLSEESVNNDISSWTKGRSGEALSLLKKRFSHRPVQEKFVCLNCGFETHADEQAALNIARSWLFLRSQEYKKYQTNKTTGNTDKRAFVETWQSFYRKKLKEVWKPAV

SEQ ID NO: 25182 - protein, 978 aa, synthetic construct
  REGION 1..978: note = engineered CasX variant
QEIKRINKIRRRLVKDSNTKKAGKTGPMKTLLVRVMTPDLRERLENLRKKPENIPQPISNTSRANLNKLLTDYTEMKKAILHVYWEEFQKDPVGLMSRVAQPASKKIDQNKLKPEMDEKGNLTTAGFACSQCGQPLFVYKLEQVSEKGKAYTNYFGRCNVAEHEKLILLAQLKPEKDSDEAVTYSLGKFGQRALDFYSIHVTKESTHPVKPLAQIAGNRYASGPVGKALSDACMGTIASFLSKYQDIIIEHQKVVKGNQKRLESLRELAGKENLEYPSVTLPPQPHTKEGVDAYNEVIARVRMWVNLNLWQKLKLSRDDAKPLLRLKGFPSFPLVERQANEVDWWDMVCNVKKLINEKKEDGKVFWQNLAGYKRQEALRPYLSSEEDRKKGKKFARYQLGDLLLHLEKKHGEDWGKVYDEAWERIDKKVEGLSKHIKLEEERRSEDAQSKAALTDWLRAKASFVIEGLKEADKDEFCRCELKLQKWYGDLRGKPFAIEAENSILDISGFSKQYNCAFIWQKDGVKKLNLYLIINYFKGGKLRFKKIKPEAFEANRFYTVINKKSGEIVPMEVNFNFDDPNLIILPLAFGKRQGREFIWNDLLSLETGSLKLANGRVIEKTLYNRRTRQDEPALFVALTFERREVLDSSNIPPMNLIGVDRGENIPAVIALTDPEGKPLSRFKDSLGNPTHILRIGESYKEKQRTIQAKKEVEQRRAGGYSRKYASKAKNLADDMVRNTARDLLYYAVTQDAMLIFENLSRGFGRQGKRTFMAERQYTRMEDWLTAKLAYEGLPSKTYLSKTLAQYTSKTCSNCGFTITSADYDRVLEKLKKTATGWMTTINGKELKVEGQITYYNRYKRQNVVKDLSVELDRLSEESVNNDISSWTKGRSGEALSLLKKRFSHRPVQEKFVCLNCGFETHADEQAALNIARSWLFLRSQEYKKYQTNKTTGNTDKRAFVETWQSFYRKKLKEVWKPAV

SEQ ID NO: 25183 - protein, 978 aa, synthetic construct
  REGION 1..978: note = engineered CasX variant
QEIKRINKIRRRLVKDSNTKKAGKTGPMKTLLVRVMTPDLRERLENLRKKPENIPQPISNTSRANLNKLLTDYTEMKKAILHVYWEEFQKDPVGLMSRVAQPASKKIDQNKLKPEMDEKGNLTTAGFACSQCGQPLFVYKLEQVSEKGKAYTNYFGRCNVAEHEKLILLAQLKPEKDSDEAVTYSLGKFGQRALDFYSIHVTKESTHPVKPLAQIAGNRYASGPVGKALSDACMGTIASFLSKYQDIIIEHQKVVKGNQKRLESLRELAGKENLEYPSVTLPPQPHTKEGVDAYNEVIARVRMWVNLNLWQKLKLSRDDAKPLLRLKGFPSFPLVERQANEVDWWDMVCNVKKLINEKKEDGKVFWQNLAGYKRQEALRPYLSSEEDRKKGKKFARYQLGDLLLHLEKKHGEDWGKVYDEAWERIDKKVEGLSKHIKLEEERRSEDAQSKAALTDWLRAKASFVIEGLKEADKDEFCRCELKLQKWYGDLRGKPFAIEAENSILDISGFSKQYNCAFIWQKDGVKKLNLYLIINYFKGGKLRFKKIKPEAFEANRFYTVINKKSGEIVPMEVNFNFDDPNLIILPLAFGKRQGREFIWNDLLSLETGSLKLANGRVIEKTLYNRRTRQDEPALFVALTFERREVLDSSNIPPMNLIGVDRGENIPAVIALTDPEGCPLSRFKDSLGNPTHILRIGESYKSKQRTIQAKKEVEQRRAGGYSRKYASKAKNLADDMVRNTARDLLYYAVTQDAMLIFENLSRGFGRQGKRTFMAERQYTRMEDWLTAKLAYEGLPSKTYLSKTLAQYTSKTCSNCGFTITSADYDRVLEKLKKTATGWMTTINGKELKVEGQITYYNRYKRQNVVKDLSVELDRLSEESVNNDISSWTKGRSGEALSLLKKRFSHRPVQEKFVCLNCGFETHADEQAALNIARSWLFLRSQEYKKYQTNKTTGNTDKRAFVETWQSFYRKKLKEVWKPAV

SEQ ID NO: 25184 - protein, 978 aa, synthetic construct
  REGION 1..978: note = engineered CasX variant
QEIKRINKIRRRLVKDSNTKKAGKTGPMKTLLVRVMTPDLRERLENLRKKPENIPQPISNTSRANLNKLLTDYTEMKKAILHVYWEEFQKDPVGLMSRVAQPASKKIDQNKLKPEMDEKGNLTTAGFACSQCGQPLFVYKLEQVSEKGKAYTNYFGRCNVAEHEKLILLAQLKPEKDSDEAVTYSLGKFGQRALDFYSIHVTKESTHPVKPLAQIAGNRYASGPVGKALSDACMGTIASFLSKYQDIIIEHQKVVKGNQKRLESLRELAGKENLEYPSVTLPPQPHTKEGVDAYNEVIARVRMWVNLNLWQKLKLSRDDAKPLLRLKGFPSFPLVERQANEVDWWDMVCNVKKLINEKKEDGKVFWQNLAGYKRQEALRPYLSSEEDRKKGKKFARYQLGDLLLHLEKKHGEDWGKVYDEAWERIDKKVEGLSKHIKLEEERRSEDAQSKAALTDWLRAKASFVIEGLKEADKDEFCRCELKLQKWYGDLRGKPFAIEAENSILDISGFSKQYNCAFIWQKDGVKKLNLYLIINYFKGGKLRFKKIKPEAFEANRFYTVINKKSGEIVPMEVNFNFDDPNLIILPLAFGKRQGREFIWNDLLSLETGSLKLANGRVIEKTLYNRRTRQDEPALFVALTFERREVLDSSNIPPMNLIGVDRGENIPAVIALTDPEGCPLSRFKDSLGNPTHILRIGESYKEKQRTIQAKKEVEQRRCGGYSRKYASKAKNLADDMVRNTARDLLYYAVTQDAMLIFENLSRGFGRQGKRTFMAERQYTRMEDWLTAKLAYEGLPSKTYLSKTLAQYTSKTCSNCGFTITSADYDRVLEKLKKTATGWMTTINGKELKVEGQITYYNRYKRQNVVKDLSVELDRLSEESVNNDISSWTKGRSGEALSLLKKRFSHRPVQEKFVCLNCGFETHADEQAALNIARSWLFLRSQEYKKYQTNKTTGNTDKRAFVETWQSFYRKKLKEVWKPAV

SEQ ID NO: 25185 - protein, 978 aa, synthetic construct
  REGION 1..978: note = engineered CasX variant
QEIKRINKIRRRLVKDSNTKKAGKTGPMKTLLVRVMTPDLRERLENLRKKPENIPQPISNTSRANLNKLLTDYTEMKKAILHVYWEEFQKDPVGLMSRVAQPASKKIDQNKLKPEMDEKGNLTTAGFACSQCGQPLFVYKLEQVSEKGKAYTNYFGRCNVAEHEKLILLAQLKPEKDSDEAVTYSLGKFGQRALDFYSIHVTKESTHPVKPLAQIAGNRYASGPVGKALSDACMGTIASFLSKYQDIIIEHQKVVKGNQKRLESLRELAGKENLEYPSVTLPPQPHTKEGVDAYNEVIARVRMWVNLNLWQKLKLSRDDAKPLLRLKGFPSFPLVERQANEVDWWDMVCNVKKLINEKKEDGKVFWQNLAGYKRQEALRPYLSSEEDRKKGKKFARYQLGDLLLHLEKKHGEDWGKVYDEAWERIDKKVEGLSKHIKLEEERRSEDAQSKAALTDWLRAKASFVIEGLKEADKDEFCRCELKLQKWYGDLRGKPFAIEAENSILDISGFSKQYNCAFIWQKDGVKKLNLYLIINYFKGGKLRFKKIKPEAFEANRFYTVINKKSGEIVPMEVNFNFDDPNLIILPLAFGKRQGREFIWNDLLSLETGSLKLANGRVIEKTLYNRRTRQDEPALFVALTFERREVLDSSNIPPMNLIGVDRGENIPAVIALTDPEGCPLSRFKDSLGNPTHILRIGESYKEKQRTIQAKKEVEQRRAGGYSRKYASKAKNLADDMVRNTARDLLYYAVTQDAMLIFENLSRGFGRQGKRTFMAERQYTRMEDWLTAKLAYEGLPSKTYLSKTLAQYTSKTCSNCGFTITSADYDRVLEKLKKTATGWMTTINGKELKVEGQITYYNRYKRQNVVKDLSVELDRLSEESVNNDISSWTKGRSGEALSLLKKRFSHRPVQEKFVCLNCGFETHADEQAALNIARSWLFLRSQEYKKYQTNKTTGNTDKRAFVETWQSFYRKKLKEVWKPAV

SEQ ID NO: 25186 - protein, 978 aa, synthetic construct
  REGION 1..978: note = engineered CasX variant
QEIKRINKIRRRLVKDSNTKKAGKTGPMKTLLVRVMTPDLRERLENLRKKPENIPQPISNTSRANLNKLLTDYTEMKKAILHVYWEEFQKDPVGLMSRVAQPASKKIDQNKLKPEMDEKGNLTTAGFACSQCGQPLFVYKLEQVSEKGKAYTNYFGRCNVAEHEKLILLAQLKPEKDSDEAVTYSLGKFGQRALDFYSIHVTKESTHPVKPLAQIAGNRYASGPVGKALSDACMGTIASFLSKYQDIIIEHQKVVKGNQKRLESLRELAGKENLEYPSVTLPPQPHTKEGVDAYNEVIARVRMWVNLNLWQKLKLSRDDAKPLLRLKGFPSFPLVERQANEVDWWDMVCNVKKLINEKKEDGKVFWQNLAGYKRQEALRPYLSSEEDRKKGKKFARYQLGDLLLHLEKKHGEDWGKVYDEAWERIDKKVEGLSKHIKLEEERRSEDAQSKAALTDWLRAKASFVIEGLKEADKDEFCRCELKLQKWYGDLRGKPFAIEAENSILDISGFSKQYNCAFIWQKDGVKKLNLYLIINYFKGGKLRFKKIKPEAFEANRFYTVINKKSGEIVPMEVNFNFDDPNLIILPLAFGKRQGREFIWNDLLSLETGSLKLANGRVIEKTLYNRRTRQDEPALFVALTFERREVLDSSNIPPMNLIGVDRGENIPAVIALTDPEGCPLSLFKDSLGNPTHILRIGESYKSKQRTIQAKKEVEQRRAGGYSRKYASKAKNLADDMVRNTARDLLYYAVTQDAMLIFENLSRGFGRQGKRTFMAERQYTRMEDWLTAKLAYEGLPSKTYLSKTLAQYTSKTCSNCGFTITSADYDRVLEKLKKTATGWMTTINGKELKVEGQITYYNRYKRQNVVKDLSVELDRLSEESVNNDISSWTKGRSGEALSLLKKRFSHRPVQEKFVCLNCGFETHADEQAALNIARSWLFLRSQEYKKYQTNKTTGNTDKRAFVETWQSFYRKKLKEVWKPAV

SEQ ID NO: 25187 - protein, 978 aa, synthetic construct
  REGION 1..978: note = engineered CasX variant
QEIKRINKIRRRLVKDSNTKKAGKTGPMKTLLVRVMTPDLRERLENLRKKPENIPQPISNTSRANLNKLLTDYTEMKKAILHVYWEEFQKDPVGLMSRVAQPASKKIDQNKLKPEMDEKGNLTTAGFACSQCGQPLFVYKLEQVSEKGKAYTNYFGRCNVAEHEKLILLAQLKPEKDSDEAVTYSLGKFGQRALDFYSIHVTKESTHPVKPLAQIAGNRYASGPVGKALSDACMGTIASFLSKYQDIIIEHQKVVKGNQKRLESLRELAGKENLEYPSVTLPPQPHTKEGVDAYNEVIARVRMWVNLNLWQKLKLSRDDAKPLLRLKGFPSFPLVERQANEVDWWDMVCNVKKLINEKKEDGKVFWQNLAGYKRQEALRPYLSSEEDRKKGKKFARYQLGDLLLHLEKKHGEDWGKVYDEAWERIDKKVEGLSKHIKLEEERRSEDAQSKAALTDWLRAKASFVIEGLKEADKDEFCRCELKLQKWYGDLRGKPFAIEAENSILDISGFSKQYNCAFIWQKDGVKKLNLYLIINYFKGGKLRFKKIKPEAFEANRFYTVINKKSGEIVPMEVNFNFDDPNLIILPLAFGKRQGREFIWNDLLSLETGSLKLANGRVIEKTLYNRRTRQDEPALFVALTFERREVLDSSNIPPMNLIGVDRGENIPAVIALTDPEGCPLSLFKDSLGNPTHILRIGESYKEKQRTIQAKKEVEQRRAGGYSRKYASKAKNLADDMVRNTARDLLYYAVTQDAMLIFENLSRGFGRQGKRTFMAERQYTRMEDWLTAKLAYEGLPSKTYLSKTLAQYTSKTCSNCGFTITSADYDRVLEKLKKTATGWMTTINGKELKVEGQITYYNRYKRQNVVKDLSVELDRLSEESVNNDISSWTKGRSGEALSLLKKRFSHRPVQEKFVCLNCGFETHADEQAALNIARSWLFLRSQEYKKYQTNKTTGNTDKRAFVETWQSFYRKKLKEVWKPAV

SEQ ID NO: 25188 - protein, 978 aa, synthetic construct
  REGION 1..978: note = engineered CasX variant
QEIKRINKIRRRLVKDSNTKKAGKTGPMKTLLVRVMTPDLRERLENLRKKPENIPQPISNTSRANLNKLLTDYTEMKKAILHVYWEEFQKDPVGLMSRVAQPASKKIDQNKLKPEMDEKGNLTTAGFACSQCGQPLFVYKLEQVSEKGKAYTNYFGRCNVAEHEKLILLAQLKPEKDSDEAVTYSLGKFGQRALDFYSIHVTKESTHPVKPLAQIAGNRYASGPVGKALSDACMGTIASFLSKYQDIIIEHQKVVKGNQKRLESLRELAGKENLEYPSVTLPPQPHTKEGVDAYNEVIARVRMWVNLNLWQKLKLSRDDAKPLLRLKGFPSFPLVERQANEVDWWDMVCNVKKLINEKKEDGKVFWQNLAGYKRQEALRPYLSSEEDRKKGKKFARYQLGDLLLHLEKKHGEDWGKVYDEAWERIDKKVEGLSKHIKLEEERRSEDAQSKAALTDWLRAKASFVIEGLKEADKDEFCRCELKLQKWYGDLRGKPFAIEAENSILDISGFSKQYNCAFIWQKDGVKKLNLYLIINYFKGGKLRFKKIKPEAFEANRFYTVINKKSGEIVPMEVNFNFDDPNLIILPLAFGKRQGREFIWNDLLSLETGSLKLANGRVIEKTLYNRRTRQDEPALFVALTFERREVLDSSNIPPMNLIGVDRGENIPAVIALTDPEGCPLSCFKDSLGNPTHILRIGESYKEKQRTIQAKKEVEQRRAGGYSRKYASKAKNLADDMVRNTARDLLYYAVTQDAMLIFENLSRGFGRQGKRTFMAERQYTRMEDWLTAKLAYEGLPSKTYLSKTLAQYTSKTCSNCGFTITSADYDRVLEKLKKTATGWMTTINGKELKVEGQITYYNRYKRQNVVKDLSVELDRLSEESVNNDISSWTKGRSGEALSLLKKRFSHRPVQEKFVCLNCGFETHADEQAALNIARSWLFLRSQEYKKYQTNKTTGNTDKRAFVETWQSFYRKKLKEVWKPAV

SEQ ID NO: 25189 - protein, 978 aa, synthetic construct
  REGION 1..978: note = engineered CasX variant
QEIKRINKIRRRLVKDSNTKKAGKTGPMKTLLVRVMTPDLRERLENLRKKPENIPQPISNTSRANLNKLLTDYTEMKKAILHVYWEEFQKDPVGLMSRVAQPASKKIDQNKLKPEMDEKGNLTTAGFACSQCGQPLFVYKLEQVSEKGKAYTNYFGRCNVAEHEKLILLAQLKPEKDSDEAVTYSLGKFGQRALDFYSIHVTKESTHPVKPLAQIAGNRYASGPVGKALSDACMGTIASFLSKYQDIIIEHQKVVKGNQKRLESLRELAGKENLEYPSVTLPPQPHTKEGVDAYNEVIARVRMWVNLNLWQKLKLSRDDAKPLLRLKGFPSFPLVERQANEVDWWDMVCNVKKLINEKKEDGKVFWQNLAGYKRQEALRPYLSSEEDRKKGKKFARYQLGDLLLHLEKKHGEDWGKVYDEAWERIDKKVEGLSKHIKLEEERRSEDAQSKAALTDWLRAKASFVIEGLKEADKDEFCRCELKLQKWYGDLRGKPFAIEAENSILDISGFSKQYNCAFIWQKDGVKKLNLYLIINYFKGGKLRFKKIKPEAFEANRFYTVINKKSGEIVPMEVNFNFDDPNLIILPLAFGKRQGREFIWNDLLSLETGSLKLANGRVIEKTLYNRRTRQDEPALFVALTFERREVLDSSNINPMNLIGVDRGENIPAVIALTDPEGCPLSRFKDSLGNPTHILRIGESYKENQRTIQAKKEVEQRRAGGYSRKYASKAKNLADDMVRNTARDLLYYAVTQDAMLIFENLSRGFGRQGKRTFMAERQYTRMEDWLTAKLAYEGLPSKTYLSKTLAQYTSKTCSNCGFTITSADYDRVLEKLKKTATGWMTTINGKELKVEGQITYYNRYKRQNVVKDLSVELDRLSEESVNNDISSWTKGRSGEALSLLKKRFSHRPVQEKFVCLNCGFETHADEQAALNIARSWLFLRSQEYKKYQTNKTTGNTDKRAFVETWQSFYRKKLKEVWKPAV

SEQ ID NO: 25190 - protein, 978 aa, synthetic construct
  REGION 1..978: note = engineered CasX variant
QEIKRINKIRRRLVKDSNTKKAGKTGPMKTLLVRVMTPDLRERLENLRKKPENIPQPISNTSRANLNKLLTDYTEMKKAILHVYWEEFQKDPVGLMSRVAQPASKKIDQNKLKPEMDEKGNLTTAGFACSQCGQPLFVYKLEQVSEKGKAYTNYFGRCNVAEHEKLILLAQLKPEKDSDEAVTYSLGKFGQRALDFYSIHVTKESTHPVKPLAQIAGNRYASGPVGKALSDACMGTIASFLSKYQDIIIEHQKVVKGNQKRLESLRELAGKENLEYPSVTLPPQPHTKEGVDAYNEVIARVRMWVNLNLWQKLKLSRDDAKPLLRLKGFPSFPLVERQANEVDWWDMVCNVKKLINEKKEDGKVFWQNLAGYKRQEALRPYLSSEEDRKKGKKFARYQLGDLLLHLEKKHGEDWGKVYDEAWERIDKKVEGLSKHIKLEEERRSEDAQSKAALTDWLRAKASFVIEGLKEADKDEFCRCELKLQKWYGDLRGKPFAIEAENSILDISGFSKQYNCAFIWQKDGVKKLNLYLIINYFKGGKLRFKKIKPEAFEANRFYTVINKKSGEIVPMEVNFNFDDPNLIILPLAFGKRQGREFIWNDLLSLETGSLKLANGRVIEKTLYNRRTRQDEPALFVALTFERREVLDSSNINPMNLIGVDRGENIPAVIALTDPEGCPLSRFKDSLGNPTHILRIGESYKEKQRTIQAKKEVEQRRAGGYSRKYASKAKNLADDMVRNTARDLLYYAVTQDAMLIFENLSRGFGRQGKRTFMAERQYTRMEDWLTAKLAYEGLPSKTYLSKTLAQYTSKTCSNCGFTITSADYDRVLEKLKKTATGWMTTINGKELKVEGQITYYNRYKRQNVVKDLSVELDRLSEESVNNDISSWTKGRSGEALSLLKKRFSHRPVQEKFVCLNCGFETHADEQAALNIARSWLFLRSQEYKKYQTNKTTGNTDKRAFVETWQSFYRKKLKEVWKPAV

SEQ ID NO: 25191 - protein, 978 aa, synthetic construct
  REGION 1..978: note = engineered CasX variant
QEIKRINKIRRRLVKDSNTKKAGKTGPMKTLLVRVMTPDLRERLENLRKKPENIPQPISNTSRANLNKLLTDYTEMKKAILHVYWEEFQKDPVGLMSRVAQPASKKIDQNKLKPEMDEKGNLTTAGFACSQCGQPLFVYKLEQVSEKGKAYTNYFGRCNVAEHEKLILLAQLKPEKDSDEAVTYSLGKFGQRALDFYSIHVTKESTHPVKPLAQIAGNRYASGPVGKALSDACMGTIASFLSKYQDIIIEHQKVVKGNQKRLESLRELAGKENLEYPSVTLPPQPHTKEGVDAYNEVIARVRMWVNLNLWQKLKLSRDDAKPLLRLKGFPSFPLVERQANEVDWWDMVCNVKKLINEKKEDGKVFWQNLAGYKRQEALRPYLSSEEDRKKGKKFARYQLGDLLLHLEKKHGEDWGKVYDEAWERIDKKVEGLSKHIKLEEERRSEDAQSKAALTDWLRAKASFVIEGLKEADKDEFCRCELKLQKWYGDLRGKPFAIEAENSILDISGFSKQYNCAFIWQKDGVKKLNLYLIINYFKGGKLRFKKIKPEAFEANRFYTVINKKSGEIVPMEVNFNFDDPNLIILPLAFGKRQGREFIWNDLLSLETGSLKLANGRVIEKTLYNRRTRQDEPALFVALTFERREVLDSSNINPMNLIGVDRGENIPAVIALTDPEGCPLSRFKDSAGNPTHILRIGESYKEKQRTIQAKKEVEQRRAGGYSRKYASKAKNLADDMVRNTARDLLYYAVTQDAMLIFENLSRGFGRQGKRTFMAERQYTRMEDWLTAKLAYEGLPSKTYLSKTLAQYTSKTCSNCGFTITSADYDRVLEKLKKTATGWMTTINGKELKVEGQITYYNRYKRQNVVKDLSVELDRLSEESVNNDISSWTKGRSGEALSLLKKRFSHRPVQEKFVCLNCGFETHADEQAALNIARSWLFLRSQEYKKYQTNKTTGNTDKRAFVETWQSFYRKKLKEVWKPAV

SEQ ID NO: 25192 - protein, 978 aa, synthetic construct
  REGION 1..978: note = engineered CasX variant
QEIKRINKIRRRLVKDSNTKKAGKTGPMKTLLVRVMTPDLRERLENLRKKPENIPQPISNTSRANLNKLLTDYTEMKKAILHVYWEEFQKDPVGLMSRVAQPASKKIDQNKLKPEMDEKGNLTTAGFACSQCGQPLFVYKLEQVSEKGKAYTNYFGRCNVAEHEKLILLAQLKPEKDSDEAVTYSLGKFGQRALDFYSIHVTKESTHPVKPLAQIAGNRYASGPVGKALSDACMGTIASFLSKYQDIIIEHQKVVKGNQKRLESLRELAGKENLEYPSVTLPPQPHTKEGVDAYNEVIARVRMWVNLNLWQKLKLSRDDAKPLLRLKGFPSFPLVERQANEVDWWDMVCNVKKLINEKKEDGKVFWQNLAGYKRQEALRPYLSSEEDRKKGKKFARYQLGDLLLHLEKKHGEDWGKVYDEAWERIDKKVEGLSKHIKLEEERRSEDAQSKAALTDWLRAKASFVIEGLKEADKDEFCRCELKLQKWYGDLRGKPFAIEAENSILDISGFSKQYNCAFIWQKDGVKKLNLYLIINYFKGGKLRFKKIKPEAFEANRFYTVINKKSGEIVPMEVNFNFDDPNLIILPLAFGKRQGREFIWNDLLSLETGSLKLANGRVIEKTLYNRRTRQDEPALFVALTFERREVLDSSNINPMNLIGVDRGENIPAVIAITDPEGCPLSRFKDSLGNPTHILRIGESYKENQRTIQAKKEVEQRRAGGYSRKYASKAKNLADDMVRNTARDLLYYAVTQDAMLIFENLSRGFGRQGKRTFMAERQYTRMEDWLTAKLAYEGLPSKTYLSKTLAQYTSKTCSNCGFTITSADYDRVLEKLKKTATGWMTTINGKELKVEGQITYYNRYKRQNVVKDLSVELDRLSEESVNNDISSWTKGRSGEALSLLKKRFSHRPVQEKFVCLNCGFETHADEQAALNIARSWLFLRSQEYKKYQTNKTTGNTDKRAFVETWQSFYRKKLKEVWKPAV

SEQ ID NO: 25193 - protein, 978 aa, synthetic construct
  REGION 1..978: note = engineered CasX variant
QEIKRINKIRRRLVKDSNTKKAGKTGPMKTLLVRVMTPDLRERLENLRKKPENIPQPISNTSRANLNKLLTDYTEMKKAILHVYWEEFQKDPVGLMSRVAQPASKKIDQNKLKPEMDEKGNLTTAGFACSQCGQPLFVYKLEQVSEKGKAYTNYFGRCNVAEHEKLILLAQLKPEKDSDEAVTYSLGKFGQRALDFYSIHVTKESTHPVKPLAQIAGNRYASGPVGKALSDACMGTIASFLSKYQDIIIEHQKVVKGNQKRLESLRELAGKENLEYPSVTLPPQPHTKEGVDAYNEVIARVRMWVNLNLWQKLKLSRDDAKPLLRLKGFPSFPLVERQANEVDWWDMVCNVKKLINEKKEDGKVFWQNLAGYKRQEALRPYLSSEEDRKKGKKFARYQLGDLLLHLEKKHGEDWGKVYDEAWERIDKKVEGLSKHIKLEEERRSEDAQSKAALTDWLRAKASFVIEGLKEADKDEFCRCELKLQKWYGDLRGKPFAIEAENSILDISGFSKQYNCAFIWQKDGVKKLNLYLIINYFKGGKLRFKKIKPEAFEANRFYTVINKKSGEIVPMEVNFNFDDPNLIILPLAFGKRQGREFIWNDLLSLETGSLKLANGRVIEKTLYNRRTRQDEPALFVALTFERREVLDSSNINPMNLIGVDRGENIPAVIAITDPEGCPLSRFKDSLGNPTHILRIGESYKEKQRTIQAKKEVEQRRAGGYSRKYASKAKNLADDMVRNTARDLLYYAVTQDAMLIFENLSRGFGRQGKRTFMAERQYTRMEDWLTAKLAYEGLPSKTYLSKTLAQYTSKTCSNCGFTITSADYDRVLEKLKKTATGWMTTINGKELKVEGQITYYNRYKRQNVVKDLSVELDRLSEESVNNDISSWTKGRSGEALSLLKKRFSHRPVQEKFVCLNCGFETHADEQAALNIARSWLFLRSQEYKKYQTNKTTGNTDKRAFVETWQSFYRKKLKEVWKPAV

SEQ ID NO: 25194 - protein, 978 aa, synthetic construct
  REGION 1..978: note = engineered CasX variant
QEIKRINKIRRRLVKDSNTKKAGKTGPMKTLLVRVMTPDLRERLENLRKKPENIPQPISNTSRANLNKLLTDYTEMKKAILHVYWEEFQKDPVGLMSRVAQPASKKIDQNKLKPEMDEKGNLTTAGFACSQCGQPLFVYKLEQVSEKGKAYTNYFGRCNVAEHEKLILLAQLKPEKDSDEAVTYSLGKFGQRALDFYSIHVTKESTHPVKPLAQIAGNRYASGPVGKALSDACMGTIASFLSKYQDIIIEHQKVVKGNQKRLESLRELAGKENLEYPSVTLPPQPHTKEGVDAYNEVIARVRMWVNLNLWQKLKLSRDDAKPLLRLKGFPSFPLVERQANEVDWWDMVCNVKKLINEKKEDGKVFWQNLAGYKRQEALRPYLSSEEDRKKGKKFARYQLGDLLLHLEKKHGEDWGKVYDEAWERIDKKVEGLSKHIKLEEERRSEDAQSKAALTDWLRAKASFVIEGLKEADKDEFCRCELKLQKWYGDLRGKPFAIEAENSILDISGFSKQYNCAFIWQKDGVKKLNLYLIINYFKGGKLRFKKIKPEAFEANRFYTVINKKSGEIVPMEVNFNFDDPNLIILPLAFGKRQGREFIWNDLLSLETGSLKLANGRVIEKTLYNRRTRQDEPALFVALTFERREVLDSSNINPMNLIGVDRGENIPAVFALTDPEGCPLSRFKDSLGNPTHILRIGESYKEKQRTIQAKKEVEQRRAGGYSRKYASKAKNLADDMVRNTARDLLYYAVTQDAMLIFENLSRGFGRQGKRTFMAERQYTRMEDWLTAKLAYEGLPSKTYLSKTLAQYTSKTCSNCGFTITSADYDRVLEKLKKTATGWMTTINGKELKVEGQITYYNRYKRQNVVKDLSVELDRLSEESVNNDISSWTKGRSGEALSLLKKRFSHRPVQEKFVCLNCGFETHADEQAALNIARSWLFLRSQEYKKYQTNKTTGNTDKRAFVETWQSFYRKKLKEVWKPAV

SEQ ID NO: 25195 - protein, 978 aa, synthetic construct
  REGION 1..978: note = engineered CasX variant
QEIKRINKIRRRLVKDSNTKKAGKTGPMKTLLVRVMTPDLRERLENLRKKPENIPQPISNTSRANLNKLLTDYTEMKKAILHVYWEEFQKDPVGLMSRVAQPASKKIDQNKLKPEMDEKGNLTTAGFACSQCGQPLFVYKLEQVSEKGKAYTNYFGRCNVAEHEKLILLAQLKPEKDSDEAVTYSLGKFGQRALDFYSIHVTKESTHPVKPLAQIAGNRYASGPVGKALSDACMGTIASFLSKYQDIIIEHQKVVKGNQKRLESLRELAGKENLEYPSVTLPPQPHTKEGVDAYNEVIARVRMWVNLNLWQKLKLSRDDAKPLLRLKGFPSFPLVERQANEVDWWDMVCNVKKLINEKKEDGKVFWQNLAGYKRQEALRPYLSSEEDRKKGKKFARYQLGDLLLHLEKKHGEDWGKVYDEAWERIDKKVEGLSKHIKLEEERRSEDAQSKAALTDWLRAKASFVIEGLKEADKDEFCRCELKLQKWYGDLRGKPFAIEAENSILDISGFSKQYNCAFIWQKDGVKKLNLYLIINYFKGGKLRFKKIKPEAFEANRFYTVINKKSGEIVPMEVNFNFDDPNLIILPLAFGKRQGREFIWNDLLSLETGSLKLANGRVIEKTLYNRRTRQDEPALFVALTFERREVLDSSNINPMNLIGVDRGENIPAVFALTDPEGCPLSRFKDSAGNPTHILRIGESYKEKQRTIQAKKEVEQRRAGGYSRKYASKAKNLADDMVRNTARDLLYYAVTQDAMLIFENLSRGFGRQGKRTFMAERQYTRMEDWLTAKLAYEGLPSKTYLSKTLAQYTSKTCSNCGFTITSADYDRVLEKLKKTATGWMTTINGKELKVEGQITYYNRYKRQNVVKDLSVELDRLSEESVNNDISSWTKGRSGEALSLLKKRFSHRPVQEKFVCLNCGFETHADEQAALNIARSWLFLRSQEYKKYQTNKTTGNTDKRAFVETWQSFYRKKLKEVWKPAV

SEQ ID NO: 25196 - protein, 978 aa, synthetic construct
  REGION 1..978: note = engineered CasX variant
QEIKRINKIRRRLVKDSNTKKAGKTGPMKTLLVRVMTPDLRERLENLRKKPENIPQPISNTSRANLNKLLTDYTEMKKAILHVYWEEFQKDPVGLMSRVAQPASKKIDQNKLKPEMDEKGNLTTAGFACSQCGQPLFVYKLEQVSEKGKAYTNYFGRCNVAEHEKLILLAQLKPEKDSDEAVTYSLGKFGQRALDFYSIHVTKESTHPVKPLAQIAGNRYASGPVGKALSDACMGTIASFLSKYQDIIIEHQKVVKGNQKRLESLRELAGKENLEYPSVTLPPQPHTKEGVDAYNEVIARVRMWVNLNLWQKLKLSRDDAKPLLRLKGFPSFPLVERQANEVDWWDMVCNVKKLINEKKEDGKVFWQNLAGYKRQEALRPYLSSEEDRKKGKKFARYQLGDLLLHLEKKHGEDWGKVYDEAWERIDKKVEGLSKHIKLEEERRSEDAQSKAALTDWLRAKASFVIEGLKEADKDEFCRCELKLQKWYGDLRGKPFAIEAENSILDISGFSKQYNCAFIWQKDGVKKLNLYLIINYFKGGKLRFKKIKPEAFEANRFYTVINKKSGEIVPMEVNFNFDDPNLIILPLAFGKRQGREFIWNDLLSLETGSLKLANGRVIEKTLYNRRTRQDEPALFVALTFERREVLDSSNIMPMNLIGVDRGENIPAVIALTDPEGCPYSRFKDSLGNPTHILRIGESYKEKQRTIQAKKEVEQRRAGGYSRKYASKAKNLADDMVRNTARDLLYYAVTQDAMLIFENLSRGFGRQGKRTFMAERQYTRMEDWLTAKLAYEGLPSKTYLSKTLAQYTSKTCSNCGFTITSADYDRVLEKLKKTATGWMTTINGKELKVEGQITYYNRYKRQNVVKDLSVELDRLSEESVNNDISSWTKGRSGEALSLLKKRFSHRPVQEKFVCLNCGFETHADEQAALNIARSWLFLRSQEYKKYQTNKTTGNTDKRAFVETWQSFYRKKLKEVWKPAV

SEQ ID NO: 25197 - protein, 978 aa, synthetic construct
  REGION 1..978: note = engineered CasX variant
QEIKRINKIRRRLVKDSNTKKAGKTGPMKTLLVRVMTPDLRERLENLRKKPENIPQPISNTSRANLNKLLTDYTEMKKAILHVYWEEFQKDPVGLMSRVAQPASKKIDQNKLKPEMDEKGNLTTAGFACSQCGQPLFVYKLEQVSEKGKAYTNYFGRCNVAEHEKLILLAQLKPEKDSDEAVTYSLGKFGQRALDFYSIHVTKESTHPVKPLAQIAGNRYASGPVGKALSDACMGTIASFLSKYQDIIIEHQKVVKGNQKRLESLRELAGKENLEYPSVTLPPQPHTKEGVDAYNEVIARVRMWVNLNLWQKLKLSRDDAKPLLRLKGFPSFPLVERQANEVDWWDMVCNVKKLINEKKEDGKVFWQNLAGYKRQEALRPYLSSEEDRKKGKKFARYQLGDLLLHLEKKHGEDWGKVYDEAWERIDKKVEGLSKHIKLEEERRSEDAQSKAALTDWLRAKASFVIEGLKEADKDEFCRCELKLQKWYGDLRGKPFAIEAENSILDISGFSKQYNCAFIWQKDGVKKLNLYLIINYFKGGKLRFKKIKPEAFEANRFYTVINKKSGEIVPMEVNFNFDDPNLIILPLAFGKRQGREFIWNDLLSLETGSLKLANGRVIEKTLYNRRTRQDEPALFVALTFERREVLDSSNIMPMNLIGVDRGENIPAVIALTDPEGCPLSRFKDSLGNPTHILRIGESYKEKQRTIQAKKSVEQRRAGGYSRKYASKAKNLADDMVRNTARDLLYYAVTQDAMLIFENLSRGFGRQGKRTFMAERQYTRMEDWLTAKLAYEGLPSKTYLSKTLAQYTSKTCSNCGFTITSADYDRVLEKLKKTATGWMTTINGKELKVEGQITYYNRYKRQNVVKDLSVELDRLSEESVNNDISSWTKGRSGEALSLLKKRFSHRPVQEKFVCLNCGFETHADEQAALNIARSWLFLRSQEYKKYQTNKTTGNTDKRAFVETWQSFYRKKLKEVWKPAV

SEQ ID NO: 25198 - protein, 978 aa, synthetic construct
  REGION 1..978: note = engineered CasX variant
QEIKRINKIRRRLVKDSNTKKAGKTGPMKTLLVRVMTPDLRERLENLRKKPENIPQPISNTSRANLNKLLTDYTEMKKAILHVYWEEFQKDPVGLMSRVAQPASKKIDQNKLKPEMDEKGNLTTAGFACSQCGQPLFVYKLEQVSEKGKAYTNYFGRCNVAEHEKLILLAQLKPEKDSDEAVTYSLGKFGQRALDFYSIHVTKESTHPVKPLAQIAGNRYASGPVGKALSDACMGTIASFLSKYQDIIIEHQKVVKGNQKRLESLRELAGKENLEYPSVTLPPQPHTKEGVDAYNEVIARVRMWVNLNLWQKLKLSRDDAKPLLRLKGFPSFPLVERQANEVDWWDMVCNVKKLINEKKEDGKVFWQNLAGYKRQEALRPYLSSEEDRKKGKKFARYQLGDLLLHLEKKHGEDWGKVYDEAWERIDKKVEGLSKHIKLEEERRSEDAQSKAALTDWLRAKASFVIEGLKEADKDEFCRCELKLQKWYGDLRGKPFAIEAENSILDISGFSKQYNCAFIWQKDGVKKLNLYLIINYFKGGKLRFKKIKPEAFEANRFYTVINKKSGEIVPMEVNFNFDDPNLIILPLAFGKRQGREFIWNDLLSLETGSLKLANGRVIEKTLYNRRTRQDEPALFVALTFERREVLDSSNIMPMNLIGVDRGENIPAVIALTDPEGCPLSRFKDSLGNPTHILRIGESYKEKQRTIQAKKEVEQRRAGGYSRKYASKAKNLADDMVRNTARDLLYYAVTQDAMLIFENLSRGFGRQGKRTFMAERQYTRMEDWLTAKLAYEGLPSKTYLSKTLAQYTSKTCSNCGFTITSADYDRVLEKLKKTATGWMTTINGKELKVEGQITYYNRYKRQNVVKDLSVELDRLSEESVNNDISSWTKGRSGEALSLLKKRFSHRPVQEKFVCLNCGFETHADEQAALNIARSWLFLRSQEYKKYQTNKTTGNTDKRAFVETWQSFYRKKLKEVWKPAV

SEQ ID NO: 25199 - protein, 978 aa, synthetic construct
  REGION 1..978: note = engineered CasX variant
QEIKRINKIRRRLVKDSNTKKAGKTGPMKTLLVRVMTPDLRERLENLRKKPENIPQPISNTSRANLNKLLTDYTEMKKAILHVYWEEFQKDPVGLMSRVAQPASKKIDQNKLKPEMDEKGNLTTAGFACSQCGQPLFVYKLEQVSEKGKAYTNYFGRCNVAEHEKLILLAQLKPEKDSDEAVTYSLGKFGQRALDFYSIHVTKESTHPVKPLAQIAGNRYASGPVGKALSDACMGTIASFLSKYQDIIIEHQKVVKGNQKRLESLRELAGKENLEYPSVTLPPQPHTKEGVDAYNEVIARVRMWVNLNLWQKLKLSRDDAKPLLRLKGFPSFPLVERQANEVDWWDMVCNVKKLINEKKEDGKVFWQNLAGYKRQEALRPYLSSEEDRKKGKKFARYQLGDLLLHLEKKHGEDWGKVYDEAWERIDKKVEGLSKHIKLEEERRSEDAQSKAALTDWLRAKASFVIEGLKEADKDEFCRCELKLQKWYGDLRGKPFAIEAENSILDISGFSKQYNCAFIWQKDGVKKLNLYLIINYFKGGKLRFKKIKPEAFEANRFYTVINKKSGEIVPMEVNFNFDDPNLIILPLAFGKRQGREFIWNDLLSLETGSLKLANGRVIEKTLYNRRTRQDEPALFVALTFERREVLDSSNIMPMNLIGVDRGENIPAVIALTDPEGCPLSRFEDSLGNPTHILRIGESYKEKQRTIQAKKSVEQRRAGGYSRKYASKAKNLADDMVRNTARDLLYYAVTQDAMLIFENLSRGFGRQGKRTFMAERQYTRMEDWLTAKLAYEGLPSKTYLSKTLAQYTSKTCSNCGFTITSADYDRVLEKLKKTATGWMTTINGKELKVEGQITYYNRYKRQNVVKDLSVELDRLSEESVNNDISSWTKGRSGEALSLLKKRFSHRPVQEKFVCLNCGFETHADEQAALNIARSWLFLRSQEYKKYQTNKTTGNTDKRAFVETWQSFYRKKLKEVWKPAV

SEQ ID NO: 25200 - protein, 978 aa, synthetic construct
  REGION 1..978: note = engineered CasX variant
QEIKRINKIRRRLVKDSNTKKAGKTGPMKTLLVRVMTPDLRERLENLRKKPENIPQPISNTSRANLNKLLTDYTEMKKAILHVYWEEFQKDPVGLMSRVAQPASKKIDQNKLKPEMDEKGNLTTAGFACSQCGQPLFVYKLEQVSEKGKAYTNYFGRCNVAEHEKLILLAQLKPEKDSDEAVTYSLGKFGQRALDFYSIHVTKESTHPVKPLAQIAGNRYASGPVGKALSDACMGTIASFLSKYQDIIIEHQKVVKGNQKRLESLRELAGKENLEYPSVTLPPQPHTKEGVDAYNEVIARVRMWVNLNLWQKLKLSRDDAKPLLRLKGFPSFPLVERQANEVDWWDMVCNVKKLINEKKEDGKVFWQNLAGYKRQEALRPYLSSEEDRKKGKKFARYQLGDLLLHLEKKHGEDWGKVYDEAWERIDKKVEGLSKHIKLEEERRSEDAQSKAALTDWLRAKASFVIEGLKEADKDEFCRCELKLQKWYGDLRGKPFAIEAENSILDISGFSKQYNCAFIWQKDGVKKLNLYLIINYFKGGKLRFKKIKPEAFEANRFYTVINKKSGEIVPMEVNFNFDDPNLIILPLAFGKRQGREFIWNDLLSLETGSLKLANGRVIEKTLYNRRTRQDEPALFVALTFERREVLDSSNIMPMNLIGVDRGENIPAVIALTDPEGCPLSRFEDSLGNPTHILRIGESYKEKQRTIQAKKEVEQRRAGGYSRKYASKAKNLADDMVRNTARDLLYYAVTQDAMLIFENLSRGFGRQGKRTFMAERQYTRMEDWLTAKLAYEGLPSKTYLSKTLAQYTSKTCSNCGFTITSADYDRVLEKLKKTATGWMTTINGKELKVEGQITYYNRYKRQNVVKDLSVELDRLSEESVNNDISSWTKGRSGEALSLLKKRFSHRPVQEKFVCLNCGFETHADEQAALNIARSWLFLRSQEYKKYQTNKTTGNTDKRAFVETWQSFYRKKLKEVWKPAV

SEQ ID NO: 25201 - protein, 978 aa, synthetic construct
  REGION 1..978: note = engineered CasX variant
QEIKRINKIRRRLVKDSNTKKAGKTGPMKTLLVRVMTPDLRERLENLRKKPENIPQPISNTSRANLNKLLTDYTEMKKAILHVYWEEFQKDPVGLMSRVAQPASKKIDQNKLKPEMDEKGNLTTAGFACSQCGQPLFVYKLEQVSEKGKAYTNYFGRCNVAEHEKLILLAQLKPEKDSDEAVTYSLGKFGQRALDFYSIHVTKESTHPVKPLAQIAGNRYASGPVGKALSDACMGTIASFLSKYQDIIIEHQKVVKGNQKRLESLRELAGKENLEYPSVTLPPQPHTKEGVDAYNEVIARVRMWVNLNLWQKLKLSRDDAKPLLRLKGFPSFPLVERQANEVDWWDMVCNVKKLINEKKEDGKVFWQNLAGYKRQEALRPYLSSEEDRKKGKKFARYQLGDLLLHLEKKHGEDWGKVYDEAWERIDKKVEGLSKHIKLEEERRSEDAQSKAALTDWLRAKASFVIEGLKEADKDEFCRCELKLQKWYGDLRGKPFAIEAENSILDISGFSKQYNCAFIWQKDGVKKLNLYLIINYFKGGKLRFKKIKPEAFEANRFYTVINKKSGEIVPMEVNFNFDDPNLIILPLAFGKRQGREFIWNDLLSLETGSLKLANGRVIEKTLYNRRTRQDEPALFVALTFERREVLDSSNILPMNLIGVDRGENIPAVIALTDPEGCPLSRFKDSLGRPTHILRIGESYKEWQRTIQAKKEVEQRRAGGYSRKYASKAKNLADDMVRNTARDLLYYAVTQDAMLIFENLSRGFGRQGKRTFMAERQYTRMEDWLTAKLAYEGLPSKTYLSKTLAQYTSKTCSNCGFTITSADYDRVLEKLKKTATGWMTTINGKELKVEGQITYYNRYKRQNVVKDLSVELDRLSEESVNNDISSWTKGRSGEALSLLKKRFSHRPVQEKFVCLNCGFETHADEQAALNIARSWLFLRSQEYKKYQTNKTTGNTDKRAFVETWQSFYRKKLKEVWKPAV

SEQ ID NO: 25202 - protein, 978 aa, synthetic construct
  REGION 1..978: note = engineered CasX variant
QEIKRINKIRRRLVKDSNTKKAGKTGPMKTLLVRVMTPDLRERLENLRKKPENIPQPISNTSRANLNKLLTDYTEMKKAILHVYWEEFQKDPVGLMSRVAQPASKKIDQNKLKPEMDEKGNLTTAGFACSQCGQPLFVYKLEQVSEKGKAYTNYFGRCNVAEHEKLILLAQLKPEKDSDEAVTYSLGKFGQRALDFYSIHVTKESTHPVKPLAQIAGNRYASGPVGKALSDACMGTIASFLSKYQDIIIEHQKVVKGNQKRLESLRELAGKENLEYPSVTLPPQPHTKEGVDAYNEVIARVRMWVNLNLWQKLKLSRDDAKPLLRLKGFPSFPLVERQANEVDWWDMVCNVKKLINEKKEDGKVFWQNLAGYKRQEALRPYLSSEEDRKKGKKFARYQLGDLLLHLEKKHGEDWGKVYDEAWERIDKKVEGLSKHIKLEEERRSEDAQSKAALTDWLRAKASFVIEGLKEADKDEFCRCELKLQKWYGDLRGKPFAIEAENSILDISGFSKQYNCAFIWQKDGVKKLNLYLIINYFKGGKLRFKKIKPEAFEANRFYTVINKKSGEIVPMEVNFNFDDPNLIILPLAFGKRQGREFIWNDLLSLETGSLKLANGRVIEKTLYNRRTRQDEPALFVALTFERREVLDSSNILPMNLIGVDRGENIPAVIALTDPEGCPLSRFKDSLGRPTHILRIGESYKEKQRTIQAKKEVEQRRAGGYSRKYASKAKNLADDMVRNTARDLLYYAVTQDAMLIFENLSRGFGRQGKRTFMAERQYTRMEDWLTAKLAYEGLPSKTYLSKTLAQYTSKTCSNCGFTITSADYDRVLEKLKKTATGWMTTINGKELKVEGQITYYNRYKRQNVVKDLSVELDRLSEESVNNDISSWTKGRSGEALSLLKKRFSHRPVQEKFVCLNCGFETHADEQAALNIARSWLFLRSQEYKKYQTNKTTGNTDKRAFVETWQSFYRKKLKEVWKPAV

SEQ ID NO: 25203 - protein, 978 aa, synthetic construct
  REGION 1..978: note = engineered CasX variant
QEIKRINKIRRRLVKDSNTKKAGKTGPMKTLLVRVMTPDLRERLENLRKKPENIPQPISNTSRANLNKLLTDYTEMKKAILHVYWEEFQKDPVGLMSRVAQPASKKIDQNKLKPEMDEKGNLTTAGFACSQCGQPLFVYKLEQVSEKGKAYTNYFGRCNVAEHEKLILLAQLKPEKDSDEAVTYSLGKFGQRALDFYSIHVTKESTHPVKPLAQIAGNRYASGPVGKALSDACMGTIASFLSKYQDIIIEHQKVVKGNQKRLESLRELAGKENLEYPSVTLPPQPHTKEGVDAYNEVIARVRMWVNLNLWQKLKLSRDDAKPLLRLKGFPSFPLVERQANEVDWWDMVCNVKKLINEKKEDGKVFWQNLAGYKRQEALRPYLSSEEDRKKGKKFARYQLGDLLLHLEKKHGEDWGKVYDEAWERIDKKVEGLSKHIKLEEERRSEDAQSKAALTDWLRAKASFVIEGLKEADKDEFCRCELKLQKWYGDLRGKPFAIEAENSILDISGFSKQYNCAFIWQKDGVKKLNLYLIINYFKGGKLRFKKIKPEAFEANRFYTVINKKSGEIVPMEVNFNFDDPNLIILPLAFGKRQGREFIWNDLLSLETGSLKLANGRVIEKTLYNRRTRQDEPALFVALTFERREVLDSSNILPMNLIGVDRGENIPAVIALTDPEGCPLSRFKDSLGNPTHILRIGESYKEWQRTIQAKKEVEQRRAGGYSRKYASKAKNLADDMVRNTARDLLYYAVTQDAMLIFENLSRGFGRQGKRTFMAERQYTRMEDWLTAKLAYEGLPSKTYLSKTLAQYTSKTCSNCGFTITSADYDRVLEKLKKTATGWMTTINGKELKVEGQITYYNRYKRQNVVKDLSVELDRLSEESVNNDISSWTKGRSGEALSLLKKRFSHRPVQEKFVCLNCGFETHADEQAALNIARSWLFLRSQEYKKYQTNKTTGNTDKRAFVETWQSFYRKKLKEVWKPAV

SEQ ID NO: 25204 - protein, 978 aa, synthetic construct
  REGION 1..978: note = engineered CasX variant
QEIKRINKIRRRLVKDSNTKKAGKTGPMKTLLVRVMTPDLRERLENLRKKPENIPQPISNTSRANLNKLLTDYTEMKKAILHVYWEEFQKDPVGLMSRVAQPASKKIDQNKLKPEMDEKGNLTTAGFACSQCGQPLFVYKLEQVSEKGKAYTNYFGRCNVAEHEKLILLAQLKPEKDSDEAVTYSLGKFGQRALDFYSIHVTKESTHPVKPLAQIAGNRYASGPVGKALSDACMGTIASFLSKYQDIIIEHQKVVKGNQKRLESLRELAGKENLEYPSVTLPPQPHTKEGVDAYNEVIARVRMWVNLNLWQKLKLSRDDAKPLLRLKGFPSFPLVERQANEVDWWDMVCNVKKLINEKKEDGKVFWQNLAGYKRQEALRPYLSSEEDRKKGKKFARYQLGDLLLHLEKKHGEDWGKVYDEAWERIDKKVEGLSKHIKLEEERRSEDAQSKAALTDWLRAKASFVIEGLKEADKDEFCRCELKLQKWYGDLRGKPFAIEAENSILDISGFSKQYNCAFIWQKDGVKKLNLYLIINYFKGGKLRFKKIKPEAFEANRFYTVINKKSGEIVPMEVNFNFDDPNLIILPLAFGKRQGREFIWNDLLSLETGSLKLANGRVIEKTLYNRRTRQDEPALFVALTFERREVLDSSNILPMNLIGVDRGENIPAVIALTDPEGCPLSRFKDSLGNPTHILRIGESYKETQRTIQAKKEVEQRRAGGYSRKYASKAKNLADDMVRNTARDLLYYAVTQDAMLIFENLSRGFGRQGKRTFMAERQYTRMEDWLTAKLAYEGLPSKTYLSKTLAQYTSKTCSNCGFTITSADYDRVLEKLKKTATGWMTTINGKELKVEGQITYYNRYKRQNVVKDLSVELDRLSEESVNNDISSWTKGRSGEALSLLKKRFSHRPVQEKFVCLNCGFETHADEQAALNIARSWLFLRSQEYKKYQTNKTTGNTDKRAFVETWQSFYRKKLKEVWKPAV

SEQ ID NO: 25205 - protein, 978 aa, synthetic construct
  REGION 1..978: note = engineered CasX variant
QEIKRINKIRRRLVKDSNTKKAGKTGPMKTLLVRVMTPDLRERLENLRKKPENIPQPISNTSRANLNKLLTDYTEMKKAILHVYWEEFQKDPVGLMSRVAQPASKKIDQNKLKPEMDEKGNLTTAGFACSQCGQPLFVYKLEQVSEKGKAYTNYFGRCNVAEHEKLILLAQLKPEKDSDEAVTYSLGKFGQRALDFYSIHVTKESTHPVKPLAQIAGNRYASGPVGKALSDACMGTIASFLSKYQDIIIEHQKVVKGNQKRLESLRELAGKENLEYPSVTLPPQPHTKEGVDAYNEVIARVRMWVNLNLWQKLKLSRDDAKPLLRLKGFPSFPLVERQANEVDWWDMVCNVKKLINEKKEDGKVFWQNLAGYKRQEALRPYLSSEEDRKKGKKFARYQLGDLLLHLEKKHGEDWGKVYDEAWERIDKKVEGLSKHIKLEEERRSEDAQSKAALTDWLRAKASFVIEGLKEADKDEFCRCELKLQKWYGDLRGKPFAIEAENSILDISGFSKQYNCAFIWQKDGVKKLNLYLIINYFKGGKLRFKKIKPEAFEANRFYTVINKKSGEIVPMEVNFNFDDPNLIILPLAFGKRQGREFIWNDLLSLETGSLKLANGRVIEKTLYNRRTRQDEPALFVALTFERREVLDSSNILPMNLIGVDRGENIPAVIALTDPEGCPLSRFKDSLGNPTHILRIGESYKEKQRTIQAKKEVEQRRRGGYSRKYASKAKNLADDMVRNTARDLLYYAVTQDAMLIFENLSRGFGRQGKRTFMAERQYTRMEDWLTAKLAYEGLPSKTYLSKTLAQYTSKTCSNCGFTITSADYDRVLEKLKKTATGWMTTINGKELKVEGQITYYNRYKRQNVVKDLSVELDRLSEESVNNDISSWTKGRSGEALSLLKKRFSHRPVQEKFVCLNCGFETHADEQAALNIARSWLFLRSQEYKKYQTNKTTGNTDKRAFVETWQSFYRKKLKEVWKPAV

SEQ ID NO: 25206 - protein, 978 aa, synthetic construct
  REGION 1..978: note = engineered CasX variant
QEIKRINKIRRRLVKDSNTKKAGKTGPMKTLLVRVMTPDLRERLENLRKKPENIPQPISNTSRANLNKLLTDYTEMKKAILHVYWEEFQKDPVGLMSRVAQPASKKIDQNKLKPEMDEKGNLTTAGFACSQCGQPLFVYKLEQVSEKGKAYTNYFGRCNVAEHEKLILLAQLKPEKDSDEAVTYSLGKFGQRALDFYSIHVTKESTHPVKPLAQIAGNRYASGPVGKALSDACMGTIASFLSKYQDIIIEHQKVVKGNQKRLESLRELAGKENLEYPSVTLPPQPHTKEGVDAYNEVIARVRMWVNLNLWQKLKLSRDDAKPLLRLKGFPSFPLVERQANEVDWWDMVCNVKKLINEKKEDGKVFWQNLAGYKRQEALRPYLSSEEDRKKGKKFARYQLGDLLLHLEKKHGEDWGKVYDEAWERIDKKVEGLSKHIKLEEERRSEDAQSKAALTDWLRAKASFVIEGLKEADKDEFCRCELKLQKWYGDLRGKPFAIEAENSILDISGFSKQYNCAFIWQKDGVKKLNLYLIINYFKGGKLRFKKIKPEAFEANRFYTVINKKSGEIVPMEVNFNFDDPNLIILPLAFGKRQGREFIWNDLLSLETGSLKLANGRVIEKTLYNRRTRQDEPALFVALTFERREVLDSSNILPMNLIGVDRGENIPAVIALTDPEGCPLSRFKDSLGNPTHILRIGESYKEKQRTIQAKKEVEQRRAGGYSRKYASKAKNLADDMVRNTARDLLYYAVTQDAMLIFENLSRGFGRQGKRTFMAERQYTRMEDWLTAKLAYEGLPSKTYLSKTLAQYTSKTCSNCGFTITSADYDRVLEKLKKTATGWMTTINGKELKVEGQITYYNRYKRQNVVKDLSVELDRLSEESVNNDISSWTKGRSGEALSLLKKRFSHRPVQEKFVCLNCGFETHADEQAALNIARSWLFLRSQEYKKYQTNKTTGNTDKRAFVETWQSFYRKKLKEVWKPAV

SEQ ID NO: 25207 - protein, 978 aa, synthetic construct
  REGION 1..978: note = engineered CasX variant
QEIKRINKIRRRLVKDSNTKKAGKTGPMKTLLVRVMTPDLRERLENLRKKPENIPQPISNTSRANLNKLLTDYTEMKKAILHVYWEEFQKDPVGLMSRVAQPASKKIDQNKLKPEMDEKGNLTTAGFACSQCGQPLFVYKLEQVSEKGKAYTNYFGRCNVAEHEKLILLAQLKPEKDSDEAVTYSLGKFGQRALDFYSIHVTKESTHPVKPLAQIAGNRYASGPVGKALSDACMGTIASFLSKYQDIIIEHQKVVKGNQKRLESLRELAGKENLEYPSVTLPPQPHTKEGVDAYNEVIARVRMWVNLNLWQKLKLSRDDAKPLLRLKGFPSFPLVERQANEVDWWDMVCNVKKLINEKKEDGKVFWQNLAGYKRQEALRPYLSSEEDRKKGKKFARYQLGDLLLHLEKKHGEDWGKVYDEAWERIDKKVEGLSKHIKLEEERRSEDAQSKAALTDWLRAKASFVIEGLKEADKDEFCRCELKLQKWYGDLRGKPFAIEAENSILDISGFSKQYNCAFIWQKDGVKKLNLYLIINYFKGGKLRFKKIKPEAFEANRFYTVINKKSGEIVPMEVNFNFDDPNLIILPLAFGKRQGREFIWNDLLSLETGSLKLANGRVIEKTLYNRRTRQDEPALFVALTFERREVLDSSNILPMNLIGVDRGENIPAVIALTDPEGCPLSRFKDSLGNPTHILRIGESYKEKQRTIFAKKEVEQRRAGGYSRKYASKAKNLADDMVRNTARDLLYYAVTQDAMLIFENLSRGFGRQGKRTFMAERQYTRMEDWLTAKLAYEGLPSKTYLSKTLAQYTSKTCSNCGFTITSADYDRVLEKLKKTATGWMTTINGKELKVEGQITYYNRYKRQNVVKDLSVELDRLSEESVNNDISSWTKGRSGEALSLLKKRFSHRPVQEKFVCLNCGFETHADEQAALNIARSWLFLRSQEYKKYQTNKTTGNTDKRAFVETWQSFYRKKLKEVWKPAV

SEQ ID NO: 25208 - protein, 978 aa, synthetic construct
  REGION 1..978: note = engineered CasX variant
QEIKRINKIRRRLVKDSNTKKAGKTGPMKTLLVRVMTPDLRERLENLRKKPENIPQPISNTSRANLNKLLTDYTEMKKAILHVYWEEFQKDPVGLMSRVAQPASKKIDQNKLKPEMDEKGNLTTAGFACSQCGQPLFVYKLEQVSEKGKAYTNYFGRCNVAEHEKLILLAQLKPEKDSDEAVTYSLGKFGQRALDFYSIHVTKESTHPVKPLAQIAGNRYASGPVGKALSDACMGTIASFLSKYQDIIIEHQKVVKGNQKRLESLRELAGKENLEYPSVTLPPQPHTKEGVDAYNEVIARVRMWVNLNLWQKLKLSRDDAKPLLRLKGFPSFPLVERQANEVDWWDMVCNVKKLINEKKEDGKVFWQNLAGYKRQEALRPYLSSEEDRKKGKKFARYQLGDLLLHLEKKHGEDWGKVYDEAWERIDKKVEGLSKHIKLEEERRSEDAQSKAALTDWLRAKASFVIEGLKEADKDEFCRCELKLQKWYGDLRGKPFAIEAENSILDISGFSKQYNCAFIWQKDGVKKLNLYLIINYFKGGKLRFKKIKPEAFEANRFYTVINKKSGEIVPMEVNFNFDDPNLIILPLAFGKRQGREFIWNDLLSLETGSLKLANGRVIEKTLYNRRTRQDEPALFVALTFERREVLDSSNILPMNLIGVDRGENIPAVIALTDPEGCPLSRFKDSGGNPTHILRIGESYKETQRTIQAKKEVEQRRAGGYSRKYASKAKNLADDMVRNTARDLLYYAVTQDAMLIFENLSRGFGRQGKRTFMAERQYTRMEDWLTAKLAYEGLPSKTYLSKTLAQYTSKTCSNCGFTITSADYDRVLEKLKKTATGWMTTINGKELKVEGQITYYNRYKRQNVVKDLSVELDRLSEESVNNDISSWTKGRSGEALSLLKKRFSHRPVQEKFVCLNCGFETHADEQAALNIARSWLFLRSQEYKKYQTNKTTGNTDKRAFVETWQSFYRKKLKEVWKPAV

SEQ ID NO: 25209 - protein, 978 aa, synthetic construct
  REGION 1..978: note = engineered CasX variant
QEIKRINKIRRRLVKDSNTKKAGKTGPMKTLLVRVMTPDLRERLENLRKKPENIPQPISNTSRANLNKLLTDYTEMKKAILHVYWEEFQKDPVGLMSRVAQPASKKIDQNKLKPEMDEKGNLTTAGFACSQCGQPLFVYKLEQVSEKGKAYTNYFGRCNVAEHEKLILLAQLKPEKDSDEAVTYSLGKFGQRALDFYSIHVTKESTHPVKPLAQIAGNRYASGPVGKALSDACMGTIASFLSKYQDIIIEHQKVVKGNQKRLESLRELAGKENLEYPSVTLPPQPHTKEGVDAYNEVIARVRMWVNLNLWQKLKLSRDDAKPLLRLKGFPSFPLVERQANEVDWWDMVCNVKKLINEKKEDGKVFWQNLAGYKRQEALRPYLSSEEDRKKGKKFARYQLGDLLLHLEKKHGEDWGKVYDEAWERIDKKVEGLSKHIKLEEERRSEDAQSKAALTDWLRAKASFVIEGLKEADKDEFCRCELKLQKWYGDLRGKPFAIEAENSILDISGFSKQYNCAFIWQKDGVKKLNLYLIINYFKGGKLRFKKIKPEAFEANRFYTVINKKSGEIVPMEVNFNFDDPNLIILPLAFGKRQGREFIWNDLLSLETGSLKLANGRVIEKTLYNRRTRQDEPALFVALTFERREVLDSSNILPMNLIGVDRGENIPAVIALTDPEGCPLSRFKDSGGNPTHILRIGESYKEKQRTIQAKKEVEQRRAGGYSRKYASKAKNLADDMVRNTARDLLYYAVTQDAMLIFENLSRGFGRQGKRTFMAERQYTRMEDWLTAKLAYEGLPSKTYLSKTLAQYTSKTCSNCGFTITSADYDRVLEKLKKTATGWMTTINGKELKVEGQITYYNRYKRQNVVKDLSVELDRLSEESVNNDISSWTKGRSGEALSLLKKRFSHRPVQEKFVCLNCGFETHADEQAALNIARSWLFLRSQEYKKYQTNKTTGNTDKRAFVETWQSFYRKKLKEVWKPAV

SEQ ID NO: 25210 - protein, 978 aa, synthetic construct
  REGION 1..978: note = engineered CasX variant
QEIKRINKIRRRLVKDSNTKKAGKTGPMKTLLVRVMTPDLRERLENLRKKPENIPQPISNTSRANLNKLLTDYTEMKKAILHVYWEEFQKDPVGLMSRVAQPASKKIDQNKLKPEMDEKGNLTTAGFACSQCGQPLFVYKLEQVSEKGKAYTNYFGRCNVAEHEKLILLAQLKPEKDSDEAVTYSLGKFGQRALDFYSIHVTKESTHPVKPLAQIAGNRYASGPVGKALSDACMGTIASFLSKYQDIIIEHQKVVKGNQKRLESLRELAGKENLEYPSVTLPPQPHTKEGVDAYNEVIARVRMWVNLNLWQKLKLSRDDAKPLLRLKGFPSFPLVERQANEVDWWDMVCNVKKLINEKKEDGKVFWQNLAGYKRQEALRPYLSSEEDRKKGKKFARYQLGDLLLHLEKKHGEDWGKVYDEAWERIDKKVEGLSKHIKLEEERRSEDAQSKAALTDWLRAKASFVIEGLKEADKDEFCRCELKLQKWYGDLRGKPFAIEAENSILDISGFSKQYNCAFIWQKDGVKKLNLYLIINYFKGGKLRFKKIKPEAFEANRFYTVINKKSGEIVPMEVNFNFDDPNLIILPLAFGKRQGREFIWNDLLSLETGSLKLANGRVIEKTLYNRRTRQDEPALFVALTFERREVLDSSNILPMNLIGVDRGENIPAVIALTDPEGCPLSRFKDHLGNPTHILRIGESYKEKQRTIQAKKEVEQRRRGGYSRKYASKAKNLADDMVRNTARDLLYYAVTQDAMLIFENLSRGFGRQGKRTFMAERQYTRMEDWLTAKLAYEGLPSKTYLSKTLAQYTSKTCSNCGFTITSADYDRVLEKLKKTATGWMTTINGKELKVEGQITYYNRYKRQNVVKDLSVELDRLSEESVNNDISSWTKGRSGEALSLLKKRFSHRPVQEKFVCLNCGFETHADEQAALNIARSWLFLRSQEYKKYQTNKTTGNTDKRAFVETWQSFYRKKLKEVWKPAV

SEQ ID NO: 25211 - protein, 978 aa, synthetic construct
  REGION 1..978: note = engineered CasX variant
QEIKRINKIRRRLVKDSNTKKAGKTGPMKTLLVRVMTPDLRERLENLRKKPENIPQPISNTSRANLNKLLTDYTEMKKAILHVYWEEFQKDPVGLMSRVAQPASKKIDQNKLKPEMDEKGNLTTAGFACSQCGQPLFVYKLEQVSEKGKAYTNYFGRCNVAEHEKLILLAQLKPEKDSDEAVTYSLGKFGQRALDFYSIHVTKESTHPVKPLAQIAGNRYASGPVGKALSDACMGTIASFLSKYQDIIIEHQKVVKGNQKRLESLRELAGKENLEYPSVTLPPQPHTKEGVDAYNEVIARVRMWVNLNLWQKLKLSRDDAKPLLRLKGFPSFPLVERQANEVDWWDMVCNVKKLINEKKEDGKVFWQNLAGYKRQEALRPYLSSEEDRKKGKKFARYQLGDLLLHLEKKHGEDWGKVYDEAWERIDKKVEGLSKHIKLEEERRSEDAQSKAALTDWLRAKASFVIEGLKEADKDEFCRCELKLQKWYGDLRGKPFAIEAENSILDISGFSKQYNCAFIWQKDGVKKLNLYLIINYFKGGKLRFKKIKPEAFEANRFYTVINKKSGEIVPMEVNFNFDDPNLIILPLAFGKRQGREFIWNDLLSLETGSLKLANGRVIEKTLYNRRTRQDEPALFVALTFERREVLDSSNILPMNLIGVDRGENIPAVIALTDPEGCPLSRFKDHLGNPTHILRIGESYKEKQRTIQAKKEVEQRRAGGYSRKYASKAKNLADDMVRNTARDLLYYAVTQDAMLIFENLSRGFGRQGKRTFMAERQYTRMEDWLTAKLAYEGLPSKTYLSKTLAQYTSKTCSNCGFTITSADYDRVLEKLKKTATGWMTTINGKELKVEGQITYYNRYKRQNVVKDLSVELDRLSEESVNNDISSWTKGRSGEALSLLKKRFSHRPVQEKFVCLNCGFETHADEQAALNIARSWLFLRSQEYKKYQTNKTTGNTDKRAFVETWQSFYRKKLKEVWKPAV

SEQ ID NO: 25212 - protein, 978 aa, synthetic construct
  REGION 1..978: note = engineered CasX variant
QEIKRINKIRRRLVKDSNTKKAGKTGPMKTLLVRVMTPDLRERLENLRKKPENIPQPISNTSRANLNKLLTDYTEMKKAILHVYWEEFQKDPVGLMSRVAQPASKKIDQNKLKPEMDEKGNLTTAGFACSQCGQPLFVYKLEQVSEKGKAYTNYFGRCNVAEHEKLILLAQLKPEKDSDEAVTYSLGKFGQRALDFYSIHVTKESTHPVKPLAQIAGNRYASGPVGKALSDACMGTIASFLSKYQDIIIEHQKVVKGNQKRLESLRELAGKENLEYPSVTLPPQPHTKEGVDAYNEVIARVRMWVNLNLWQKLKLSRDDAKPLLRLKGFPSFPLVERQANEVDWWDMVCNVKKLINEKKEDGKVFWQNLAGYKRQEALRPYLSSEEDRKKGKKFARYQLGDLLLHLEKKHGEDWGKVYDEAWERIDKKVEGLSKHIKLEEERRSEDAQSKAALTDWLRAKASFVIEGLKEADKDEFCRCELKLQKWYGDLRGKPFAIEAENSILDISGFSKQYNCAFIWQKDGVKKLNLYLIINYFKGGKLRFKKIKPEAFEANRFYTVINKKSGEIVPMEVNFNFDDPNLIILPLAFGKRQGREFIWNDLLSLETGSLKLANGRVIEKTLYNRRTRQDEPALFVALTFERREVLDSSNIKYMNLIGVDRGENIPAVIALTDPEGCPLSSFKDSLGNPTHILRIGESYKEKQRTIQAKKEVGQRRAGGYSRKYASKAKNLADDMVRNTARDLLYYAVTQDAMLIFENLSRGFGRQGKRTFMAERQYTRMEDWLTAKLAYEGLPSKTYLSKTLAQYTSKTCSNCGFTITSADYDRVLEKLKKTATGWMTTINGKELKVEGQITYYNRYKRQNVVKDLSVELDRLSEESVNNDISSWTKGRSGEALSLLKKRFSHRPVQEKFVCLNCGFETHADEQAALNIARSWLFLRSQEYKKYQTNKTTGNTDKRAFVETWQSFYRKKLKEVWKPAV

SEQ ID NO: 25213 - protein, 978 aa, synthetic construct
  REGION 1..978: note = engineered CasX variant
QEIKRINKIRRRLVKDSNTKKAGKTGPMKTLLVRVMTPDLRERLENLRKKPENIPQPISNTSRANLNKLLTDYTEMKKAILHVYWEEFQKDPVGLMSRVAQPASKKIDQNKLKPEMDEKGNLTTAGFACSQCGQPLFVYKLEQVSEKGKAYTNYFGRCNVAEHEKLILLAQLKPEKDSDEAVTYSLGKFGQRALDFYSIHVTKESTHPVKPLAQIAGNRYASGPVGKALSDACMGTIASFLSKYQDIIIEHQKVVKGNQKRLESLRELAGKENLEYPSVTLPPQPHTKEGVDAYNEVIARVRMWVNLNLWQKLKLSRDDAKPLLRLKGFPSFPLVERQANEVDWWDMVCNVKKLINEKKEDGKVFWQNLAGYKRQEALRPYLSSEEDRKKGKKFARYQLGDLLLHLEKKHGEDWGKVYDEAWERIDKKVEGLSKHIKLEEERRSEDAQSKAALTDWLRAKASFVIEGLKEADKDEFCRCELKLQKWYGDLRGKPFAIEAENSILDISGFSKQYNCAFIWQKDGVKKLNLYLIINYFKGGKLRFKKIKPEAFEANRFYTVINKKSGEIVPMEVNFNFDDPNLIILPLAFGKRQGREFIWNDLLSLETGSLKLANGRVIEKTLYNRRTRQDEPALFVALTFERREVLDSSNIKYMNLIGVDRGENIPAVIALTDPEGCPLSSFKDSLGNPTHILRIGESYKEKQRTIQAKKEVEQRRAGGYSRKYASKAKNLADDMVRNTARDLLYYAVTQDAMLIFENLSRGFGRQGKRTFMAERQYTRMEDWLTAKLAYEGLPSKTYLSKTLAQYTSKTCSNCGFTITSADYDRVLEKLKKTATGWMTTINGKELKVEGQITYYNRYKRQNVVKDLSVELDRLSEESVNNDISSWTKGRSGEALSLLKKRFSHRPVQEKFVCLNCGFETHADEQAALNIARSWLFLRSQEYKKYQTNKTTGNTDKRAFVETWQSFYRKKLKEVWKPAV

SEQ ID NO: 25214 - protein, 978 aa, synthetic construct
  REGION 1..978: note = engineered CasX variant
QEIKRINKIRRRLVKDSNTKKAGKTGPMKTLLVRVMTPDLRERLENLRKKPENIPQPISNTSRANLNKLLTDYTEMKKAILHVYWEEFQKDPVGLMSRVAQPASKKIDQNKLKPEMDEKGNLTTAGFACSQCGQPLFVYKLEQVSEKGKAYTNYFGRCNVAEHEKLILLAQLKPEKDSDEAVTYSLGKFGQRALDFYSIHVTKESTHPVKPLAQIAGNRYASGPVGKALSDACMGTIASFLSKYQDIIIEHQKVVKGNQKRLESLRELAGKENLEYPSVTLPPQPHTKEGVDAYNEVIARVRMWVNLNLWQKLKLSRDDAKPLLRLKGFPSFPLVERQANEVDWWDMVCNVKKLINEKKEDGKVFWQNLAGYKRQEALRPYLSSEEDRKKGKKFARYQLGDLLLHLEKKHGEDWGKVYDEAWERIDKKVEGLSKHIKLEEERRSEDAQSKAALTDWLRAKASFVIEGLKEADKDEFCRCELKLQKWYGDLRGKPFAIEAENSILDISGFSKQYNCAFIWQKDGVKKLNLYLIINYFKGGKLRFKKIKPEAFEANRFYTVINKKSGEIVPMEVNFNFDDPNLIILPLAFGKRQGREFIWNDLLSLETGSLKLANGRVIEKTLYNRRTRQDEPALFVALTFERREVLDSSNIKYMNLIGVDRGENIPAVIALTDPEGCPLSRFKDSLGNPTHILRIGESYKEKQRTIQAKKEVGQRRAGGYSRKYASKAKNLADDMVRNTARDLLYYAVTQDAMLIFENLSRGFGRQGKRTFMAERQYTRMEDWLTAKLAYEGLPSKTYLSKTLAQYTSKTCSNCGFTITSADYDRVLEKLKKTATGWMTTINGKELKVEGQITYYNRYKRQNVVKDLSVELDRLSEESVNNDISSWTKGRSGEALSLLKKRFSHRPVQEKFVCLNCGFETHADEQAALNIARSWLFLRSQEYKKYQTNKTTGNTDKRAFVETWQSFYRKKLKEVWKPAV

SEQ ID NO: 25215 - protein, 978 aa, synthetic construct
  REGION 1..978: note = engineered CasX variant
QEIKRINKIRRRLVKDSNTKKAGKTGPMKTLLVRVMTPDLRERLENLRKKPENIPQPISNTSRANLNKLLTDYTEMKKAILHVYWEEFQKDPVGLMSRVAQPASKKIDQNKLKPEMDEKGNLTTAGFACSQCGQPLFVYKLEQVSEKGKAYTNYFGRCNVAEHEKLILLAQLKPEKDSDEAVTYSLGKFGQRALDFYSIHVTKESTHPVKPLAQIAGNRYASGPVGKALSDACMGTIASFLSKYQDIIIEHQKVVKGNQKRLESLRELAGKENLEYPSVTLPPQPHTKEGVDAYNEVIARVRMWVNLNLWQKLKLSRDDAKPLLRLKGFPSFPLVERQANEVDWWDMVCNVKKLINEKKEDGKVFWQNLAGYKRQEALRPYLSSEEDRKKGKKFARYQLGDLLLHLEKKHGEDWGKVYDEAWERIDKKVEGLSKHIKLEEERRSEDAQSKAALTDWLRAKASFVIEGLKEADKDEFCRCELKLQKWYGDLRGKPFAIEAENSILDISGFSKQYNCAFIWQKDGVKKLNLYLIINYFKGGKLRFKKIKPEAFEANRFYTVINKKSGEIVPMEVNFNFDDPNLIILPLAFGKRQGREFIWNDLLSLETGSLKLANGRVIEKTLYNRRTRQDEPALFVALTFERREVLDSSNIKYMNLIGVDRGENIPAVIALTDPEGCPLSRFKDSLGNPTHILRIGESYKEKQRTIQAKKEVEQRRAGGYSRKYASKAKNLADDMVRNTARDLLYYAVTQDAMLIFENLSRGFGRQGKRTFMAERQYTRMEDWLTAKLAYEGLPSKTYLSKTLAQYTSKTCSNCGFTITSADYDRVLEKLKKTATGWMTTINGKELKVEGQITYYNRYKRQNVVKDLSVELDRLSEESVNNDISSWTKGRSGEALSLLKKRFSHRPVQEKFVCLNCGFETHADEQAALNIARSWLFLRSQEYKKYQTNKTTGNTDKRAFVETWQSFYRKKLKEVWKPAV

SEQ ID NO: 25216 - protein, 978 aa, synthetic construct
  REGION 1..978: note = engineered CasX variant
QEIKRINKIRRRLVKDSNTKKAGKTGPMKTLLVRVMTPDLRERLENLRKKPENIPQPISNTSRANLNKLLTDYTEMKKAILHVYWEEFQKDPVGLMSRVAQPASKKIDQNKLKPEMDEKGNLTTAGFACSQCGQPLFVYKLEQVSEKGKAYTNYFGRCNVAEHEKLILLAQLKPEKDSDEAVTYSLGKFGQRALDFYSIHVTKESTHPVKPLAQIAGNRYASGPVGKALSDACMGTIASFLSKYQDIIIEHQKVVKGNQKRLESLRELAGKENLEYPSVTLPPQPHTKEGVDAYNEVIARVRMWVNLNLWQKLKLSRDDAKPLLRLKGFPSFPLVERQANEVDWWDMVCNVKKLINEKKEDGKVFWQNLAGYKRQEALRPYLSSEEDRKKGKKFARYQLGDLLLHLEKKHGEDWGKVYDEAWERIDKKVEGLSKHIKLEEERRSEDAQSKAALTDWLRAKASFVIEGLKEADKDEFCRCELKLQKWYGDLRGKPFAIEAENSILDISGFSKQYNCAFIWQKDGVKKLNLYLIINYFKGGKLRFKKIKPEAFEANRFYTVINKKSGEIVPMEVNFNFDDPNLIILPLAFGKRQGREFIWNDLLSLETGSLKLANGRVIEKTLYNRRTRQDEPALFVALTFERREVLDSSNIKWMNLIGVDRGENIPAVIALTDPEGCPLSRFKDSLGNPTHIYRIGESYKEKQRTIFAKKEVEQRRAGGYSRKYASKAKNLADDMVRNTARDLLYYAVTQDAMLIFENLSRGFGRQGKRTFMAERQYTRMEDWLTAKLAYEGLPSKTYLSKTLAQYTSKTCSNCGFTITSADYDRVLEKLKKTATGWMTTINGKELKVEGQITYYNRYKRQNVVKDLSVELDRLSEESVNNDISSWTKGRSGEALSLLKKRFSHRPVQEKFVCLNCGFETHADEQAALNIARSWLFLRSQEYKKYQTNKTTGNTDKRAFVETWQSFYRKKLKEVWKPAV

SEQ ID NO: 25217 - protein, 978 aa, synthetic construct
  REGION 1..978: note = engineered CasX variant
QEIKRINKIRRRLVKDSNTKKAGKTGPMKTLLVRVMTPDLRERLENLRKKPENIPQPISNTSRANLNKLLTDYTEMKKAILHVYWEEFQKDPVGLMSRVAQPASKKIDQNKLKPEMDEKGNLTTAGFACSQCGQPLFVYKLEQVSEKGKAYTNYFGRCNVAEHEKLILLAQLKPEKDSDEAVTYSLGKFGQRALDFYSIHVTKESTHPVKPLAQIAGNRYASGPVGKALSDACMGTIASFLSKYQDIIIEHQKVVKGNQKRLESLRELAGKENLEYPSVTLPPQPHTKEGVDAYNEVIARVRMWVNLNLWQKLKLSRDDAKPLLRLKGFPSFPLVERQANEVDWWDMVCNVKKLINEKKEDGKVFWQNLAGYKRQEALRPYLSSEEDRKKGKKFARYQLGDLLLHLEKKHGEDWGKVYDEAWERIDKKVEGLSKHIKLEEERRSEDAQSKAALTDWLRAKASFVIEGLKEADKDEFCRCELKLQKWYGDLRGKPFAIEAENSILDISGFSKQYNCAFIWQKDGVKKLNLYLIINYFKGGKLRFKKIKPEAFEANRFYTVINKKSGEIVPMEVNFNFDDPNLIILPLAFGKRQGREFIWNDLLSLETGSLKLANGRVIEKTLYNRRTRQDEPALFVALTFERREVLDSSNIKWMNLIGVDRGENIPAVIALTDPEGCPLSRFKDSLGNPTHILRIGESYKEKQRTIQAKKEVEQRRAGGYSRKYASKAKNLADDMVRNTARDLLYYAVTQDAMLIFENLSRGFGRQGKRTFMAERQYTRMEDWLTAKLAYEGLPSKTYLSKTLAQYTSKTCSNCGFTITSADYDRVLEKLKKTATGWMTTINGKELKVEGQITYYNRYKRQNVVKDLSVELDRLSEESVNNDISSWTKGRSGEALSLLKKRFSHRPVQEKFVCLNCGFETHADEQAALNIARSWLFLRSQEYKKYQTNKTTGNTDKRAFVETWQSFYRKKLKEVWKPAV

SEQ ID NO: 25218 - protein, 978 aa, synthetic construct
  REGION 1..978: note = engineered CasX variant
QEIKRINKIRRRLVKDSNTKKAGKTGPMKTLLVRVMTPDLRERLENLRKKPENIPQPISNTSRANLNKLLTDYTEMKKAILHVYWEEFQKDPVGLMSRVAQPASKKIDQNKLKPEMDEKGNLTTAGFACSQCGQPLFVYKLEQVSEKGKAYTNYFGRCNVAEHEKLILLAQLKPEKDSDEAVTYSLGKFGQRALDFYSIHVTKESTHPVKPLAQIAGNRYASGPVGKALSDACMGTIASFLSKYQDIIIEHQKVVKGNQKRLESLRELAGKENLEYPSVTLPPQPHTKEGVDAYNEVIARVRMWVNLNLWQKLKLSRDDAKPLLRLKGFPSFPLVERQANEVDWWDMVCNVKKLINEKKEDGKVFWQNLAGYKRQEALRPYLSSEEDRKKGKKFARYQLGDLLLHLEKKHGEDWGKVYDEAWERIDKKVEGLSKHIKLEEERRSEDAQSKAALTDWLRAKASFVIEGLKEADKDEFCRCELKLQKWYGDLRGKPFAIEAENSILDISGFSKQYNCAFIWQKDGVKKLNLYLIINYFKGGKLRFKKIKPEAFEANRFYTVINKKSGEIVPMEVNFNFDDPNLIILPLAFGKRQGREFIWNDLLSLETGSLKLANGRVIEKTLYNRRTRQDEPALFVALTFERREVLDSSNIKWMNLIGVDRGENIPAVIALTDPEGCPLSRFKDSLGNPTHILRIGESYKEKQRTIQAKKEKEQRRAGGYSRKYASKAKNLADDMVRNTARDLLYYAVTQDAMLIFENLSRGFGRQGKRTFMAERQYTRMEDWLTAKLAYEGLPSKTYLSKTLAQYTSKTCSNCGFTITSADYDRVLEKLKKTATGWMTTINGKELKVEGQITYYNRYKRQNVVKDLSVELDRLSEESVNNDISSWTKGRSGEALSLLKKRFSHRPVQEKFVCLNCGFETHADEQAALNIARSWLFLRSQEYKKYQTNKTTGNTDKRAFVETWQSFYRKKLKEVWKPAV

SEQ ID NO: 25219 - protein, 978 aa, synthetic construct
  REGION 1..978: note = engineered CasX variant
QEIKRINKIRRRLVKDSNTKKAGKTGPMKTLLVRVMTPDLRERLENLRKKPENIPQPISNTSRANLNKLLTDYTEMKKAILHVYWEEFQKDPVGLMSRVAQPASKKIDQNKLKPEMDEKGNLTTAGFACSQCGQPLFVYKLEQVSEKGKAYTNYFGRCNVAEHEKLILLAQLKPEKDSDEAVTYSLGKFGQRALDFYSIHVTKESTHPVKPLAQIAGNRYASGPVGKALSDACMGTIASFLSKYQDIIIEHQKVVKGNQKRLESLRELAGKENLEYPSVTLPPQPHTKEGVDAYNEVIARVRMWVNLNLWQKLKLSRDDAKPLLRLKGFPSFPLVERQANEVDWWDMVCNVKKLINEKKEDGKVFWQNLAGYKRQEALRPYLSSEEDRKKGKKFARYQLGDLLLHLEKKHGEDWGKVYDEAWERIDKKVEGLSKHIKLEEERRSEDAQSKAALTDWLRAKASFVIEGLKEADKDEFCRCELKLQKWYGDLRGKPFAIEAENSILDISGFSKQYNCAFIWQKDGVKKLNLYLIINYFKGGKLRFKKIKPEAFEANRFYTVINKKSGEIVPMEVNFNFDDPNLIILPLAFGKRQGREFIWNDLLSLETGSLKLANGRVIEKTLYNRRTRQDEPALFVALTFERREVLDSSNIKWMNLIGVDRGENIPAVIALTDPEGCPLSRFKDSLGNPTHILRIGESYKEKQRTIFAKKEVEQRRAGGYSRKYASKAKNLADDMVRNTARDLLYYAVTQDAMLIFENLSRGFGRQGKRTFMAERQYTRMEDWLTAKLAYEGLPSKTYLSKTLAQYTSKTCSNCGFTITSADYDRVLEKLKKTATGWMTTINGKELKVEGQITYYNRYKRQNVVKDLSVELDRLSEESVNNDISSWTKGRSGEALSLLKKRFSHRPVQEKFVCLNCGFETHADEQAALNIARSWLFLRSQEYKKYQTNKTTGNTDKRAFVETWQSFYRKKLKEVWKPAV

SEQ ID NO: 25220 - protein, 978 aa, synthetic construct
  REGION 1..978: note = engineered CasX variant
QEIKRINKIRRRLVKDSNTKKAGKTGPMKTLLVRVMTPDLRERLENLRKKPENIPQPISNTSRANLNKLLTDYTEMKKAILHVYWEEFQKDPVGLMSRVAQPASKKIDQNKLKPEMDEKGNLTTAGFACSQCGQPLFVYKLEQVSEKGKAYTNYFGRCNVAEHEKLILLAQLKPEKDSDEAVTYSLGKFGQRALDFYSIHVTKESTHPVKPLAQIAGNRYASGPVGKALSDACMGTIASFLSKYQDIIIEHQKVVKGNQKRLESLRELAGKENLEYPSVTLPPQPHTKEGVDAYNEVIARVRMWVNLNLWQKLKLSRDDAKPLLRLKGFPSFPLVERQANEVDWWDMVCNVKKLINEKKEDGKVFWQNLAGYKRQEALRPYLSSEEDRKKGKKFARYQLGDLLLHLEKKHGEDWGKVYDEAWERIDKKVEGLSKHIKLEEERRSEDAQSKAALTDWLRAKASFVIEGLKEADKDEFCRCELKLQKWYGDLRGKPFAIEAENSILDISGFSKQYNCAFIWQKDGVKKLNLYLIINYFKGGKLRFKKIKPEAFEANRFYTVINKKSGEIVPMEVNFNFDDPNLIILPLAFGKRQGREFIWNDLLSLETGSLKLANGRVIEKTLYNRRTRQDEPALFVALTFERREVLDSSNIKVMNLIGVDRGENIPAVIALTDPEGCPLSRFTDSLGNPTHILRIGESYKEKQRTIQAKKEVEQRRAGGYSRKYASKAKNLADDMVRNTARDLLYYAVTQDAMLIFENLSRGFGRQGKRTFMAERQYTRMEDWLTAKLAYEGLPSKTYLSKTLAQYTSKTCSNCGFTITSADYDRVLEKLKKTATGWMTTINGKELKVEGQITYYNRYKRQNVVKDLSVELDRLSEESVNNDISSWTKGRSGEALSLLKKRFSHRPVQEKFVCLNCGFETHADEQAALNIARSWLFLRSQEYKKYQTNKTTGNTDKRAFVETWQSFYRKKLKEVWKPAV

SEQ ID NO: 25221 - protein, 978 aa, synthetic construct
  REGION 1..978: note = engineered CasX variant
QEIKRINKIRRRLVKDSNTKKAGKTGPMKTLLVRVMTPDLRERLENLRKKPENIPQPISNTSRANLNKLLTDYTEMKKAILHVYWEEFQKDPVGLMSRVAQPASKKIDQNKLKPEMDEKGNLTTAGFACSQCGQPLFVYKLEQVSEKGKAYTNYFGRCNVAEHEKLILLAQLKPEKDSDEAVTYSLGKFGQRALDFYSIHVTKESTHPVKPLAQIAGNRYASGPVGKALSDACMGTIASFLSKYQDIIIEHQKVVKGNQKRLESLRELAGKENLEYPSVTLPPQPHTKEGVDAYNEVIARVRMWVNLNLWQKLKLSRDDAKPLLRLKGFPSFPLVERQANEVDWWDMVCNVKKLINEKKEDGKVFWQNLAGYKRQEALRPYLSSEEDRKKGKKFARYQLGDLLLHLEKKHGEDWGKVYDEAWERIDKKVEGLSKHIKLEEERRSEDAQSKAALTDWLRAKASFVIEGLKEADKDEFCRCELKLQKWYGDLRGKPFAIEAENSILDISGFSKQYNCAFIWQKDGVKKLNLYLIINYFKGGKLRFKKIKPEAFEANRFYTVINKKSGEIVPMEVNFNFDDPNLIILPLAFGKRQGREFIWNDLLSLETGSLKLANGRVIEKTLYNRRTRQDEPALFVALTFERREVLDSSNIKTMNLIGVDRGENIPAVIALTDPEGCPLSRFKDSLGNPTHIMRIGESYKEKQRTIQAKKEVEQRRAGGYSRKYASKAKNLADDMVRNTARDLLYYAVTQDAMLIFENLSRGFGRQGKRTFMAERQYTRMEDWLTAKLAYEGLPSKTYLSKTLAQYTSKTCSNCGFTITSADYDRVLEKLKKTATGWMTTINGKELKVEGQITYYNRYKRQNVVKDLSVELDRLSEESVNNDISSWTKGRSGEALSLLKKRFSHRPVQEKFVCLNCGFETHADEQAALNIARSWLFLRSQEYKKYQTNKTTGNTDKRAFVETWQSFYRKKLKEVWKPAV

SEQ ID NO: 25222 - protein, 978 aa, synthetic construct
  REGION 1..978: note = engineered CasX variant
QEIKRINKIRRRLVKDSNTKKAGKTGPMKTLLVRVMTPDLRERLENLRKKPENIPQPISNTSRANLNKLLTDYTEMKKAILHVYWEEFQKDPVGLMSRVAQPASKKIDQNKLKPEMDEKGNLTTAGFACSQCGQPLFVYKLEQVSEKGKAYTNYFGRCNVAEHEKLILLAQLKPEKDSDEAVTYSLGKFGQRALDFYSIHVTKESTHPVKPLAQIAGNRYASGPVGKALSDACMGTIASFLSKYQDIIIEHQKVVKGNQKRLESLRELAGKENLEYPSVTLPPQPHTKEGVDAYNEVIARVRMWVNLNLWQKLKLSRDDAKPLLRLKGFPSFPLVERQANEVDWWDMVCNVKKLINEKKEDGKVFWQNLAGYKRQEALRPYLSSEEDRKKGKKFARYQLGDLLLHLEKKHGEDWGKVYDEAWERIDKKVEGLSKHIKLEEERRSEDAQSKAALTDWLRAKASFVIEGLKEADKDEFCRCELKLQKWYGDLRGKPFAIEAENSILDISGFSKQYNCAFIWQKDGVKKLNLYLIINYFKGGKLRFKKIKPEAFEANRFYTVINKKSGEIVPMEVNFNFDDPNLIILPLAFGKRQGREFIWNDLLSLETGSLKLANGRVIEKTLYNRRTRQDEPALFVALTFERREVLDSSNIKTMNLIGVDRGENIPAVIALTDPEGCPLSRFKDSLGNPTHILRITESYKEKQRTIQAKKEVEQRRAGGYSRKYASKAKNLADDMVRNTARDLLYYAVTQDAMLIFENLSRGFGRQGKRTFMAERQYTRMEDWLTAKLAYEGLPSKTYLSKTLAQYTSKTCSNCGFTITSADYDRVLEKLKKTATGWMTTINGKELKVEGQITYYNRYKRQNVVKDLSVELDRLSEESVNNDISSWTKGRSGEALSLLKKRFSHRPVQEKFVCLNCGFETHADEQAALNIARSWLFLRSQEYKKYQTNKTTGNTDKRAFVETWQSFYRKKLKEVWKPAV

SEQ ID NO: 25223 - protein, 978 aa, synthetic construct
  REGION 1..978: note = engineered CasX variant
QEIKRINKIRRRLVKDSNTKKAGKTGPMKTLLVRVMTPDLRERLENLRKKPENIPQPISNTSRANLNKLLTDYTEMKKAILHVYWEEFQKDPVGLMSRVAQPASKKIDQNKLKPEMDEKGNLTTAGFACSQCGQPLFVYKLEQVSEKGKAYTNYFGRCNVAEHEKLILLAQLKPEKDSDEAVTYSLGKFGQRALDFYSIHVTKESTHPVKPLAQIAGNRYASGPVGKALSDACMGTIASFLSKYQDIIIEHQKVVKGNQKRLESLRELAGKENLEYPSVTLPPQPHTKEGVDAYNEVIARVRMWVNLNLWQKLKLSRDDAKPLLRLKGFPSFPLVERQANEVDWWDMVCNVKKLINEKKEDGKVFWQNLAGYKRQEALRPYLSSEEDRKKGKKFARYQLGDLLLHLEKKHGEDWGKVYDEAWERIDKKVEGLSKHIKLEEERRSEDAQSKAALTDWLRAKASFVIEGLKEADKDEFCRCELKLQKWYGDLRGKPFAIEAENSILDISGFSKQYNCAFIWQKDGVKKLNLYLIINYFKGGKLRFKKIKPEAFEANRFYTVINKKSGEIVPMEVNFNFDDPNLIILPLAFGKRQGREFIWNDLLSLETGSLKLANGRVIEKTLYNRRTRQDEPALFVALTFERREVLDSSNIKTMNLIGVDRGENIPAVIALTDPEGCPLSRFKDSLGNPTHILRIGESYKEKQRTIQAKKEVEQRRAGGYSRKYASKAKNLADDMVRNTARDLLYYAVTQDAMLIFENLSRGFGRQGKRTFMAERQYTRMEDWLTAKLAYEGLPSKTYLSKTLAQYTSKTCSNCGFTITSADYDRVLEKLKKTATGWMTTINGKELKVEGQITYYNRYKRQNVVKDLSVELDRLSEESVNNDISSWTKGRSGEALSLLKKRFSHRPVQEKFVCLNCGFETHADEQAALNIARSWLFLRSQEYKKYQTNKTTGNTDKRAFVETWQSFYRKKLKEVWKPAV

SEQ ID NO: 25224 - protein, 978 aa, synthetic construct
  REGION 1..978: note = engineered CasX variant
QEIKRINKIRRRLVKDSNTKKAGKTGPMKTLLVRVMTPDLRERLENLRKKPENIPQPISNTSRANLNKLLTDYTEMKKAILHVYWEEFQKDPVGLMSRVAQPASKKIDQNKLKPEMDEKGNLTTAGFACSQCGQPLFVYKLEQVSEKGKAYTNYFGRCNVAEHEKLILLAQLKPEKDSDEAVTYSLGKFGQRALDFYSIHVTKESTHPVKPLAQIAGNRYASGPVGKALSDACMGTIASFLSKYQDIIIEHQKVVKGNQKRLESLRELAGKENLEYPSVTLPPQPHTKEGVDAYNEVIARVRMWVNLNLWQKLKLSRDDAKPLLRLKGFPSFPLVERQANEVDWWDMVCNVKKLINEKKEDGKVFWQNLAGYKRQEALRPYLSSEEDRKKGKKFARYQLGDLLLHLEKKHGEDWGKVYDEAWERIDKKVEGLSKHIKLEEERRSEDAQSKAALTDWLRAKASFVIEGLKEADKDEFCRCELKLQKWYGDLRGKPFAIEAENSILDISGFSKQYNCAFIWQKDGVKKLNLYLIINYFKGGKLRFKKIKPEAFEANRFYTVINKKSGEIVPMEVNFNFDDPNLIILPLAFGKRQGREFIWNDLLSLETGSLKLANGRVIEKTLYNRRTRQDEPALFVALTFERREVLDSSNIKTMNLIGVDRGENIPAVFALTDPEGCPLSRFKDSLGNPTHIMRIGESYKEKQRTIQAKKEVEQRRAGGYSRKYASKAKNLADDMVRNTARDLLYYAVTQDAMLIFENLSRGFGRQGKRTFMAERQYTRMEDWLTAKLAYEGLPSKTYLSKTLAQYTSKTCSNCGFTITSADYDRVLEKLKKTATGWMTTINGKELKVEGQITYYNRYKRQNVVKDLSVELDRLSEESVNNDISSWTKGRSGEALSLLKKRFSHRPVQEKFVCLNCGFETHADEQAALNIARSWLFLRSQEYKKYQTNKTTGNTDKRAFVETWQSFYRKKLKEVWKPAV

SEQ ID NO: 25225 - protein, 978 aa, synthetic construct
  REGION 1..978: note = engineered CasX variant
QEIKRINKIRRRLVKDSNTKKAGKTGPMKTLLVRVMTPDLRERLENLRKKPENIPQPISNTSRANLNKLLTDYTEMKKAILHVYWEEFQKDPVGLMSRVAQPASKKIDQNKLKPEMDEKGNLTTAGFACSQCGQPLFVYKLEQVSEKGKAYTNYFGRCNVAEHEKLILLAQLKPEKDSDEAVTYSLGKFGQRALDFYSIHVTKESTHPVKPLAQIAGNRYASGPVGKALSDACMGTIASFLSKYQDIIIEHQKVVKGNQKRLESLRELAGKENLEYPSVTLPPQPHTKEGVDAYNEVIARVRMWVNLNLWQKLKLSRDDAKPLLRLKGFPSFPLVERQANEVDWWDMVCNVKKLINEKKEDGKVFWQNLAGYKRQEALRPYLSSEEDRKKGKKFARYQLGDLLLHLEKKHGEDWGKVYDEAWERIDKKVEGLSKHIKLEEERRSEDAQSKAALTDWLRAKASFVIEGLKEADKDEFCRCELKLQKWYGDLRGKPFAIEAENSILDISGFSKQYNCAFIWQKDGVKKLNLYLIINYFKGGKLRFKKIKPEAFEANRFYTVINKKSGEIVPMEVNFNFDDPNLIILPLAFGKRQGREFIWNDLLSLETGSLKLANGRVIEKTLYNRRTRQDEPALFVALTFERREVLDSSNIKTMNLIGVDRGENIPAVFALTDPEGCPLSRFKDSLGNPTHILRIGESYKEKQRTIQAKKEVEQRRAGGYSRKYASKAKNLADDMVRNTARDLLYYAVTQDAMLIFENLSRGFGRQGKRTFMAERQYTRMEDWLTAKLAYEGLPSKTYLSKTLAQYTSKTCSNCGFTITSADYDRVLEKLKKTATGWMTTINGKELKVEGQITYYNRYKRQNVVKDLSVELDRLSEESVNNDISSWTKGRSGEALSLLKKRFSHRPVQEKFVCLNCGFETHADEQAALNIARSWLFLRSQEYKKYQTNKTTGNTDKRAFVETWQSFYRKKLKEVWKPAV

SEQ ID NO: 25226 - protein, 978 aa, synthetic construct
  REGION 1..978: note = engineered CasX variant
QEIKRINKIRRRLVKDSNTKKAGKTGPMKTLLVRVMTPDLRERLENLRKKPENIPQPISNTSRANLNKLLTDYTEMKKAILHVYWEEFQKDPVGLMSRVAQPASKKIDQNKLKPEMDEKGNLTTAGFACSQCGQPLFVYKLEQVSEKGKAYTNYFGRCNVAEHEKLILLAQLKPEKDSDEAVTYSLGKFGQRALDFYSIHVTKESTHPVKPLAQIAGNRYASGPVGKALSDACMGTIASFLSKYQDIIIEHQKVVKGNQKRLESLRELAGKENLEYPSVTLPPQPHTKEGVDAYNEVIARVRMWVNLNLWQKLKLSRDDAKPLLRLKGFPSFPLVERQANEVDWWDMVCNVKKLINEKKEDGKVFWQNLAGYKRQEALRPYLSSEEDRKKGKKFARYQLGDLLLHLEKKHGEDWGKVYDEAWERIDKKVEGLSKHIKLEEERRSEDAQSKAALTDWLRAKASFVIEGLKEADKDEFCRCELKLQKWYGDLRGKPFAIEAENSILDISGFSKQYNCAFIWQKDGVKKLNLYLIINYFKGGKLRFKKIKPEAFEANRFYTVINKKSGEIVPMEVNFNFDDPNLIILPLAFGKRQGREFIWNDLLSLETGSLKLANGRVIEKTLYNRRTRQDEPALFVALTFERREVLDSSNIKSMNLIGVDRGENIPAVIALTDPEGCPLSRWKDSLGNPTHILRIGESYKEKQRTIQAKKEVEQRRAGGYSRKYASKAKNLADDMVRNTARDLLYYAVTQDAMLIFENLSRGFGRQGKRTFMAERQYTRMEDWLTAKLAYEGLPSKTYLSKTLAQYTSKTCSNCGFTITSADYDRVLEKLKKTATGWMTTINGKELKVEGQITYYNRYKRQNVVKDLSVELDRLSEESVNNDISSWTKGRSGEALSLLKKRFSHRPVQEKFVCLNCGFETHADEQAALNIARSWLFLRSQEYKKYQTNKTTGNTDKRAFVETWQSFYRKKLKEVWKPAV

SEQ ID NO: 25227 - protein, 978 aa, synthetic construct
  REGION 1..978: note = engineered CasX variant
QEIKRINKIRRRLVKDSNTKKAGKTGPMKTLLVRVMTPDLRERLENLRKKPENIPQPISNTSRANLNKLLTDYTEMKKAILHVYWEEFQKDPVGLMSRVAQPASKKIDQNKLKPEMDEKGNLTTAGFACSQCGQPLFVYKLEQVSEKGKAYTNYFGRCNVAEHEKLILLAQLKPEKDSDEAVTYSLGKFGQRALDFYSIHVTKESTHPVKPLAQIAGNRYASGPVGKALSDACMGTIASFLSKYQDIIIEHQKVVKGNQKRLESLRELAGKENLEYPSVTLPPQPHTKEGVDAYNEVIARVRMWVNLNLWQKLKLSRDDAKPLLRLKGFPSFPLVERQANEVDWWDMVCNVKKLINEKKEDGKVFWQNLAGYKRQEALRPYLSSEEDRKKGKKFARYQLGDLLLHLEKKHGEDWGKVYDEAWERIDKKVEGLSKHIKLEEERRSEDAQSKAALTDWLRAKASFVIEGLKEADKDEFCRCELKLQKWYGDLRGKPFAIEAENSILDISGFSKQYNCAFIWQKDGVKKLNLYLIINYFKGGKLRFKKIKPEAFEANRFYTVINKKSGEIVPMEVNFNFDDPNLIILPLAFGKRQGREFIWNDLLSLETGSLKLANGRVIEKTLYNRRTRQDEPALFVALTFERREVLDSSNIKSMNLIGVDRGENIPAVIALTDPEGCPLSRFKDSLGNYTHILRIGESYKEKQRTIQAKKEVEQRRAGGYSRKYASKAKNLADDMVRNTARDLLYYAVTQDAMLIFENLSRGFGRQGKRTFMAERQYTRMEDWLTAKLAYEGLPSKTYLSKTLAQYTSKTCSNCGFTITSADYDRVLEKLKKTATGWMTTINGKELKVEGQITYYNRYKRQNVVKDLSVELDRLSEESVNNDISSWTKGRSGEALSLLKKRFSHRPVQEKFVCLNCGFETHADEQAALNIARSWLFLRSQEYKKYQTNKTTGNTDKRAFVETWQSFYRKKLKEVWKPAV

SEQ ID NO: 25228 - protein, 978 aa, synthetic construct
  REGION 1..978: note = engineered CasX variant
QEIKRINKIRRRLVKDSNTKKAGKTGPMKTLLVRVMTPDLRERLENLRKKPENIPQPISNTSRANLNKLLTDYTEMKKAILHVYWEEFQKDPVGLMSRVAQPASKKIDQNKLKPEMDEKGNLTTAGFACSQCGQPLFVYKLEQVSEKGKAYTNYFGRCNVAEHEKLILLAQLKPEKDSDEAVTYSLGKFGQRALDFYSIHVTKESTHPVKPLAQIAGNRYASGPVGKALSDACMGTIASFLSKYQDIIIEHQKVVKGNQKRLESLRELAGKENLEYPSVTLPPQPHTKEGVDAYNEVIARVRMWVNLNLWQKLKLSRDDAKPLLRLKGFPSFPLVERQANEVDWWDMVCNVKKLINEKKEDGKVFWQNLAGYKRQEALRPYLSSEEDRKKGKKFARYQLGDLLLHLEKKHGEDWGKVYDEAWERIDKKVEGLSKHIKLEEERRSEDAQSKAALTDWLRAKASFVIEGLKEADKDEFCRCELKLQKWYGDLRGKPFAIEAENSILDISGFSKQYNCAFIWQKDGVKKLNLYLIINYFKGGKLRFKKIKPEAFEANRFYTVINKKSGEIVPMEVNFNFDDPNLIILPLAFGKRQGREFIWNDLLSLETGSLKLANGRVIEKTLYNRRTRQDEPALFVALTFERREVLDSSNIKSMNLIGVDRGENIPAVIALTDPEGCPLSRFKDSLGNPTHILRIGESYKEKQRTIQAKKEVEQRRAGGYSRKYASKAKNLADDMVRNTARDLLYYAVTQDAMLIFENLSRGFGRQGKRTFMAERQYTRMEDWLTAKLAYEGLPSKTYLSKTLAQYTSKTCSNCGFTITSADYDRVLEKLKKTATGWMTTINGKELKVEGQITYYNRYKRQNVVKDLSVELDRLSEESVNNDISSWTKGRSGEALSLLKKRFSHRPVQEKFVCLNCGFETHADEQAALNIARSWLFLRSQEYKKYQTNKTTGNTDKRAFVETWQSFYRKKLKEVWKPAV

SEQ ID NO: 25229 - protein, 978 aa, synthetic construct
  REGION 1..978: note = engineered CasX variant
QEIKRINKIRRRLVKDSNTKKAGKTGPMKTLLVRVMTPDLRERLENLRKKPENIPQPISNTSRANLNKLLTDYTEMKKAILHVYWEEFQKDPVGLMSRVAQPASKKIDQNKLKPEMDEKGNLTTAGFACSQCGQPLFVYKLEQVSEKGKAYTNYFGRCNVAEHEKLILLAQLKPEKDSDEAVTYSLGKFGQRALDFYSIHVTKESTHPVKPLAQIAGNRYASGPVGKALSDACMGTIASFLSKYQDIIIEHQKVVKGNQKRLESLRELAGKENLEYPSVTLPPQPHTKEGVDAYNEVIARVRMWVNLNLWQKLKLSRDDAKPLLRLKGFPSFPLVERQANEVDWWDMVCNVKKLINEKKEDGKVFWQNLAGYKRQEALRPYLSSEEDRKKGKKFARYQLGDLLLHLEKKHGEDWGKVYDEAWERIDKKVEGLSKHIKLEEERRSEDAQSKAALTDWLRAKASFVIEGLKEADKDEFCRCELKLQKWYGDLRGKPFAIEAENSILDISGFSKQYNCAFIWQKDGVKKLNLYLIINYFKGGKLRFKKIKPEAFEANRFYTVINKKSGEIVPMEVNFNFDDPNLIILPLAFGKRQGREFIWNDLLSLETGSLKLANGRVIEKTLYNRRTRQDEPALFVALTFERREVLDSSNIKSMNLIGVDRGENIPAVIALTDPEGCPLSRFKDSLGNNTHILRIGESYKEKQRTIQAKKEVEQRRAGGYSRKYASKAKNLADDMVRNTARDLLYYAVTQDAMLIFENLSRGFGRQGKRTFMAERQYTRMEDWLTAKLAYEGLPSKTYLSKTLAQYTSKTCSNCGFTITSADYDRVLEKLKKTATGWMTTINGKELKVEGQITYYNRYKRQNVVKDLSVELDRLSEESVNNDISSWTKGRSGEALSLLKKRFSHRPVQEKFVCLNCGFETHADEQAALNIARSWLFLRSQEYKKYQTNKTTGNTDKRAFVETWQSFYRKKLKEVWKPAV

SEQ ID NO: 25230 - protein, 978 aa, synthetic construct
  REGION 1..978: note = engineered CasX variant
QEIKRINKIRRRLVKDSNTKKAGKTGPMKTLLVRVMTPDLRERLENLRKKPENIPQPISNTSRANLNKLLTDYTEMKKAILHVYWEEFQKDPVGLMSRVAQPASKKIDQNKLKPEMDEKGNLTTAGFACSQCGQPLFVYKLEQVSEKGKAYTNYFGRCNVAEHEKLILLAQLKPEKDSDEAVTYSLGKFGQRALDFYSIHVTKESTHPVKPLAQIAGNRYASGPVGKALSDACMGTIASFLSKYQDIIIEHQKVVKGNQKRLESLRELAGKENLEYPSVTLPPQPHTKEGVDAYNEVIARVRMWVNLNLWQKLKLSRDDAKPLLRLKGFPSFPLVERQANEVDWWDMVCNVKKLINEKKEDGKVFWQNLAGYKRQEALRPYLSSEEDRKKGKKFARYQLGDLLLHLEKKHGEDWGKVYDEAWERIDKKVEGLSKHIKLEEERRSEDAQSKAALTDWLRAKASFVIEGLKEADKDEFCRCELKLQKWYGDLRGKPFAIEAENSILDISGFSKQYNCAFIWQKDGVKKLNLYLIINYFKGGKLRFKKIKPEAFEANRFYTVINKKSGEIVPMEVNFNFDDPNLIILPLAFGKRQGREFIWNDLLSLETGSLKLANGRVIEKTLYNRRTRQDEPALFVALTFERREVLDSSNIKSMNLIGVDRGENIPAVIALTDPEGCPLSRFKDSLGNNTHILRIGESYKEKQRTIQAKKEVEQRPAGGYSRKYASKAKNLADDMVRNTARDLLYYAVTQDAMLIFENLSRGFGRQGKRTFMAERQYTRMEDWLTAKLAYEGLPSKTYLSKTLAQYTSKTCSNCGFTITSADYDRVLEKLKKTATGWMTTINGKELKVEGQITYYNRYKRQNVVKDLSVELDRLSEESVNNDISSWTKGRSGEALSLLKKRFSHRPVQEKFVCLNCGFETHADEQAALNIARSWLFLRSQEYKKYQTNKTTGNTDKRAFVETWQSFYRKKLKEVWKPAV

SEQ ID NO: 25231 - protein, 978 aa, synthetic construct
  REGION 1..978: note = engineered CasX variant
QEIKRINKIRRRLVKDSNTKKAGKTGPMKTLLVRVMTPDLRERLENLRKKPENIPQPISNTSRANLNKLLTDYTEMKKAILHVYWEEFQKDPVGLMSRVAQPASKKIDQNKLKPEMDEKGNLTTAGFACSQCGQPLFVYKLEQVSEKGKAYTNYFGRCNVAEHEKLILLAQLKPEKDSDEAVTYSLGKFGQRALDFYSIHVTKESTHPVKPLAQIAGNRYASGPVGKALSDACMGTIASFLSKYQDIIIEHQKVVKGNQKRLESLRELAGKENLEYPSVTLPPQPHTKEGVDAYNEVIARVRMWVNLNLWQKLKLSRDDAKPLLRLKGFPSFPLVERQANEVDWWDMVCNVKKLINEKKEDGKVFWQNLAGYKRQEALRPYLSSEEDRKKGKKFARYQLGDLLLHLEKKHGEDWGKVYDEAWERIDKKVEGLSKHIKLEEERRSEDAQSKAALTDWLRAKASFVIEGLKEADKDEFCRCELKLQKWYGDLRGKPFAIEAENSILDISGFSKQYNCAFIWQKDGVKKLNLYLIINYFKGGKLRFKKIKPEAFEANRFYTVINKKSGEIVPMEVNFNFDDPNLIILPLAFGKRQGREFIWNDLLSLETGSLKLANGRVIEKTLYNRRTRQDEPALFVALTFERREVLDSSNIKSMNLIGVDRGENIPAVIALTDPEGCPLSRFCDSLGNPTHILRIGESYKEKQRTIQAKKEVEQRRAGGYSRKYASKAKNLADDMVRNTARDLLYYAVTQDAMLIFENLSRGFGRQGKRTFMAERQYTRMEDWLTAKLAYEGLPSKTYLSKTLAQYTSKTCSNCGFTITSADYDRVLEKLKKTATGWMTTINGKELKVEGQITYYNRYKRQNVVKDLSVELDRLSEESVNNDISSWTKGRSGEALSLLKKRFSHRPVQEKFVCLNCGFETHADEQAALNIARSWLFLRSQEYKKYQTNKTTGNTDKRAFVETWQSFYRKKLKEVWKPAV

SEQ ID NO: 25232 - protein, 978 aa, synthetic construct
  REGION 1..978: note = engineered CasX variant
QEIKRINKIRRRLVKDSNTKKAGKTGPMKTLLVRVMTPDLRERLENLRKKPENIPQPISNTSRANLNKLLTDYTEMKKAILHVYWEEFQKDPVGLMSRVAQPASKKIDQNKLKPEMDEKGNLTTAGFACSQCGQPLFVYKLEQVSEKGKAYTNYFGRCNVAEHEKLILLAQLKPEKDSDEAVTYSLGKFGQRALDFYSIHVTKESTHPVKPLAQIAGNRYASGPVGKALSDACMGTIASFLSKYQDIIIEHQKVVKGNQKRLESLRELAGKENLEYPSVTLPPQPHTKEGVDAYNEVIARVRMWVNLNLWQKLKLSRDDAKPLLRLKGFPSFPLVERQANEVDWWDMVCNVKKLINEKKEDGKVFWQNLAGYKRQEALRPYLSSEEDRKKGKKFARYQLGDLLLHLEKKHGEDWGKVYDEAWERIDKKVEGLSKHIKLEEERRSEDAQSKAALTDWLRAKASFVIEGLKEADKDEFCRCELKLQKWYGDLRGKPFAIEAENSILDISGFSKQYNCAFIWQKDGVKKLNLYLIINYFKGGKLRFKKIKPEAFEANRFYTVINKKSGEIVPMEVNFNFDDPNLIILPLAFGKRQGREFIWNDLLSLETGSLKLANGRVIEKTLYNRRTRQDEPALFVALTFERREVLDSSNIKRNNLIGVDRGENIQAVIALTDPEGCPLSRFKDSLGNPTHILRIGESYKEKQRTIQAKKEVEQRRAGGYSRKYASKAKNLADDMVRNTARDLLYYAVTQDAMLIFENLSRGFGRQGKRTFMAERQYTRMEDWLTAKLAYEGLPSKTYLSKTLAQYTSKTCSNCGFTITSADYDRVLEKLKKTATGWMTTINGKELKVEGQITYYNRYKRQNVVKDLSVELDRLSEESVNNDISSWTKGRSGEALSLLKKRFSHRPVQEKFVCLNCGFETHADEQAALNIARSWLFLRSQEYKKYQTNKTTGNTDKRAFVETWQSFYRKKLKEVWKPAV

SEQ ID NO: 25233 - protein, 978 aa, synthetic construct
  REGION 1..978: note = engineered CasX variant
QEIKRINKIRRRLVKDSNTKKAGKTGPMKTLLVRVMTPDLRERLENLRKKPENIPQPISNTSRANLNKLLTDYTEMKKAILHVYWEEFQKDPVGLMSRVAQPASKKIDQNKLKPEMDEKGNLTTAGFACSQCGQPLFVYKLEQVSEKGKAYTNYFGRCNVAEHEKLILLAQLKPEKDSDEAVTYSLGKFGQRALDFYSIHVTKESTHPVKPLAQIAGNRYASGPVGKALSDACMGTIASFLSKYQDIIIEHQKVVKGNQKRLESLRELAGKENLEYPSVTLPPQPHTKEGVDAYNEVIARVRMWVNLNLWQKLKLSRDDAKPLLRLKGFPSFPLVERQANEVDWWDMVCNVKKLINEKKEDGKVFWQNLAGYKRQEALRPYLSSEEDRKKGKKFARYQLGDLLLHLEKKHGEDWGKVYDEAWERIDKKVEGLSKHIKLEEERRSEDAQSKAALTDWLRAKASFVIEGLKEADKDEFCRCELKLQKWYGDLRGKPFAIEAENSILDISGFSKQYNCAFIWQKDGVKKLNLYLIINYFKGGKLRFKKIKPEAFEANRFYTVINKKSGEIVPMEVNFNFDDPNLIILPLAFGKRQGREFIWNDLLSLETGSLKLANGRVIEKTLYNRRTRQDEPALFVALTFERREVLDSSNIKRNNLIGVDRGENIPAVIALTDPEGCPLSRFKDSLGNPTHILRIGESYKEKQRTIQAKKEVEQRRAGGYSRKYASKAKNLADDMVRNTARDLLYYAVTQDAMLIFENLSRGFGRQGKRTFMAERQYTRMEDWLTAKLAYEGLPSKTYLSKTLAQYTSKTCSNCGFTITSADYDRVLEKLKKTATGWMTTINGKELKVEGQITYYNRYKRQNVVKDLSVELDRLSEESVNNDISSWTKGRSGEALSLLKKRFSHRPVQEKFVCLNCGFETHADEQAALNIARSWLFLRSQEYKKYQTNKTTGNTDKRAFVETWQSFYRKKLKEVWKPAV

SEQ ID NO: 25234 - protein, 978 aa, synthetic construct
  REGION 1..978: note = engineered CasX variant
QEIKRINKIRRRLVKDSNTKKAGKTGPMKTLLVRVMTPDLRERLENLRKKPENIPQPISNTSRANLNKLLTDYTEMKKAILHVYWEEFQKDPVGLMSRVAQPASKKIDQNKLKPEMDEKGNLTTAGFACSQCGQPLFVYKLEQVSEKGKAYTNYFGRCNVAEHEKLILLAQLKPEKDSDEAVTYSLGKFGQRALDFYSIHVTKESTHPVKPLAQIAGNRYASGPVGKALSDACMGTIASFLSKYQDIIIEHQKVVKGNQKRLESLRELAGKENLEYPSVTLPPQPHTKEGVDAYNEVIARVRMWVNLNLWQKLKLSRDDAKPLLRLKGFPSFPLVERQANEVDWWDMVCNVKKLINEKKEDGKVFWQNLAGYKRQEALRPYLSSEEDRKKGKKFARYQLGDLLLHLEKKHGEDWGKVYDEAWERIDKKVEGLSKHIKLEEERRSEDAQSKAALTDWLRAKASFVIEGLKEADKDEFCRCELKLQKWYGDLRGKPFAIEAENSILDISGFSKQYNCAFIWQKDGVKKLNLYLIINYFKGGKLRFKKIKPEAFEANRFYTVINKKSGEIVPMEVNFNFDDPNLIILPLAFGKRQGREFIWNDLLSLETGSLKLANGRVIEKTLYNRRTRQDEPALFVALTFERREVLDSSNIKRMNLIGVDRGENIQAVIALTDPEGCPLSRFKDSLGNPTHILRIGESYKEKQRTIQAKKEVEQRRAGGYSRKYASKAKNLADDMVRNTARDLLYYAVTQDAMLIFENLSRGFGRQGKRTFMAERQYTRMEDWLTAKLAYEGLPSKTYLSKTLAQYTSKTCSNCGFTITSADYDRVLEKLKKTATGWMTTINGKELKVEGQITYYNRYKRQNVVKDLSVELDRLSEESVNNDISSWTKGRSGEALSLLKKRFSHRPVQEKFVCLNCGFETHADEQAALNIARSWLFLRSQEYKKYQTNKTTGNTDKRAFVETWQSFYRKKLKEVWKPAV

SEQ ID NO: 25235 - protein, 978 aa, synthetic construct
  REGION 1..978: note = engineered CasX variant
QEIKRINKIRRRLVKDSNTKKAGKTGPMKTLLVRVMTPDLRERLENLRKKPENIPQPISNTSRANLNKLLTDYTEMKKAILHVYWEEFQKDPVGLMSRVAQPASKKIDQNKLKPEMDEKGNLTTAGFACSQCGQPLFVYKLEQVSEKGKAYTNYFGRCNVAEHEKLILLAQLKPEKDSDEAVTYSLGKFGQRALDFYSIHVTKESTHPVKPLAQIAGNRYASGPVGKALSDACMGTIASFLSKYQDIIIEHQKVVKGNQKRLESLRELAGKENLEYPSVTLPPQPHTKEGVDAYNEVIARVRMWVNLNLWQKLKLSRDDAKPLLRLKGFPSFPLVERQANEVDWWDMVCNVKKLINEKKEDGKVFWQNLAGYKRQEALRPYLSSEEDRKKGKKFARYQLGDLLLHLEKKHGEDWGKVYDEAWERIDKKVEGLSKHIKLEEERRSEDAQSKAALTDWLRAKASFVIEGLKEADKDEFCRCELKLQKWYGDLRGKPFAIEAENSILDISGFSKQYNCAFIWQKDGVKKLNLYLIINYFKGGKLRFKKIKPEAFEANRFYTVINKKSGEIVPMEVNFNFDDPNLIILPLAFGKRQGREFIWNDLLSLETGSLKLANGRVIEKTLYNRRTRQDEPALFVALTFERREVLDSSNIKRMNLIGVDRGENIPAVIALTDPEGCPLYRFKDSRGNPTHILRIGESYKEKQRTIQAKKEVEQRRAGGYSRKYASKAKNLADDMVRNTARDLLYYAVTQDAMLIFENLSRGFGRQGKRTFMAERQYTRMEDWLTAKLAYEGLPSKTYLSKTLAQYTSKTCSNCGFTITSADYDRVLEKLKKTATGWMTTINGKELKVEGQITYYNRYKRQNVVKDLSVELDRLSEESVNNDISSWTKGRSGEALSLLKKRFSHRPVQEKFVCLNCGFETHADEQAALNIARSWLFLRSQEYKKYQTNKTTGNTDKRAFVETWQSFYRKKLKEVWKPAV

SEQ ID NO: 25236 - protein, 978 aa, synthetic construct
  REGION 1..978: note = engineered CasX variant
QEIKRINKIRRRLVKDSNTKKAGKTGPMKTLLVRVMTPDLRERLENLRKKPENIPQPISNTSRANLNKLLTDYTEMKKAILHVYWEEFQKDPVGLMSRVAQPASKKIDQNKLKPEMDEKGNLTTAGFACSQCGQPLFVYKLEQVSEKGKAYTNYFGRCNVAEHEKLILLAQLKPEKDSDEAVTYSLGKFGQRALDFYSIHVTKESTHPVKPLAQIAGNRYASGPVGKALSDACMGTIASFLSKYQDIIIEHQKVVKGNQKRLESLRELAGKENLEYPSVTLPPQPHTKEGVDAYNEVIARVRMWVNLNLWQKLKLSRDDAKPLLRLKGFPSFPLVERQANEVDWWDMVCNVKKLINEKKEDGKVFWQNLAGYKRQEALRPYLSSEEDRKKGKKFARYQLGDLLLHLEKKHGEDWGKVYDEAWERIDKKVEGLSKHIKLEEERRSEDAQSKAALTDWLRAKASFVIEGLKEADKDEFCRCELKLQKWYGDLRGKPFAIEAENSILDISGFSKQYNCAFIWQKDGVKKLNLYLIINYFKGGKLRFKKIKPEAFEANRFYTVINKKSGEIVPMEVNFNFDDPNLIILPLAFGKRQGREFIWNDLLSLETGSLKLANGRVIEKTLYNRRTRQDEPALFVALTFERREVLDSSNIKRMNLIGVDRGENIPAVIALTDPEGCPLYRFKDSLGNPTHILRIGESYKEKQRTIQAKKEVEQRRAGGYSRKYASKAKNLADDMVRNTARDLLYYAVTQDAMLIFENLSRGFGRQGKRTFMAERQYTRMEDWLTAKLAYEGLPSKTYLSKTLAQYTSKTCSNCGFTITSADYDRVLEKLKKTATGWMTTINGKELKVEGQITYYNRYKRQNVVKDLSVELDRLSEESVNNDISSWTKGRSGEALSLLKKRFSHRPVQEKFVCLNCGFETHADEQAALNIARSWLFLRSQEYKKYQTNKTTGNTDKRAFVETWQSFYRKKLKEVWKPAV

SEQ ID NO: 25237 - protein, 978 aa, synthetic construct
  REGION 1..978: note = engineered CasX variant
QEIKRINKIRRRLVKDSNTKKAGKTGPMKTLLVRVMTPDLRERLENLRKKPENIPQPISNTSRANLNKLLTDYTEMKKAILHVYWEEFQKDPVGLMSRVAQPASKKIDQNKLKPEMDEKGNLTTAGFACSQCGQPLFVYKLEQVSEKGKAYTNYFGRCNVAEHEKLILLAQLKPEKDSDEAVTYSLGKFGQRALDFYSIHVTKESTHPVKPLAQIAGNRYASGPVGKALSDACMGTIASFLSKYQDIIIEHQKVVKGNQKRLESLRELAGKENLEYPSVTLPPQPHTKEGVDAYNEVIARVRMWVNLNLWQKLKLSRDDAKPLLRLKGFPSFPLVERQANEVDWWDMVCNVKKLINEKKEDGKVFWQNLAGYKRQEALRPYLSSEEDRKKGKKFARYQLGDLLLHLEKKHGEDWGKVYDEAWERIDKKVEGLSKHIKLEEERRSEDAQSKAALTDWLRAKASFVIEGLKEADKDEFCRCELKLQKWYGDLRGKPFAIEAENSILDISGFSKQYNCAFIWQKDGVKKLNLYLIINYFKGGKLRFKKIKPEAFEANRFYTVINKKSGEIVPMEVNFNFDDPNLIILPLAFGKRQGREFIWNDLLSLETGSLKLANGRVIEKTLYNRRTRQDEPALFVALTFERREVLDSSNIKRMNLIGVDRGENIPAVIALTDPEGCPLSRFKDSRGNPTHILRIGESYKEKQRTIQAKKEVEQRRAGGYSRKYASKAKNLADDMVRNTARDLLYYAVTQDAMLIFENLSRGFGRQGKRTFMAERQYTRMEDWLTAKLAYEGLPSKTYLSKTLAQYTSKTCSNCGFTITSADYDRVLEKLKKTATGWMTTINGKELKVEGQITYYNRYKRQNVVKDLSVELDRLSEESVNNDISSWTKGRSGEALSLLKKRFSHRPVQEKFVCLNCGFETHADEQAALNIARSWLFLRSQEYKKYQTNKTTGNTDKRAFVETWQSFYRKKLKEVWKPAV

SEQ ID NO: 25238 - protein, 978 aa, synthetic construct
  REGION 1..978: note = engineered CasX variant
QEIKRINKIRRRLVKDSNTKKAGKTGPMKTLLVRVMTPDLRERLENLRKKPENIPQPISNTSRANLNKLLTDYTEMKKAILHVYWEEFQKDPVGLMSRVAQPASKKIDQNKLKPEMDEKGNLTTAGFACSQCGQPLFVYKLEQVSEKGKAYTNYFGRCNVAEHEKLILLAQLKPEKDSDEAVTYSLGKFGQRALDFYSIHVTKESTHPVKPLAQIAGNRYASGPVGKALSDACMGTIASFLSKYQDIIIEHQKVVKGNQKRLESLRELAGKENLEYPSVTLPPQPHTKEGVDAYNEVIARVRMWVNLNLWQKLKLSRDDAKPLLRLKGFPSFPLVERQANEVDWWDMVCNVKKLINEKKEDGKVFWQNLAGYKRQEALRPYLSSEEDRKKGKKFARYQLGDLLLHLEKKHGEDWGKVYDEAWERIDKKVEGLSKHIKLEEERRSEDAQSKAALTDWLRAKASFVIEGLKEADKDEFCRCELKLQKWYGDLRGKPFAIEAENSILDISGFSKQYNCAFIWQKDGVKKLNLYLIINYFKGGKLRFKKIKPEAFEANRFYTVINKKSGEIVPMEVNFNFDDPNLIILPLAFGKRQGREFIWNDLLSLETGSLKLANGRVIEKTLYNRRTRQDEPALFVALTFERREVLDSSNIKRMNLIGVDRGENIPAVIALTDPEGCPLSRFKDSQGNPTHILRIGESYKEKQRTIQAKKEVEQRRAGGYSRKYASKAKNLADDMVRNTARDLLYYAVTQDAMLIFENLSRGFGRQGKRTFMAERQYTRMEDWLTAKLAYEGLPSKTYLSKTLAQYTSKTCSNCGFTITSADYDRVLEKLKKTATGWMTTINGKELKVEGQITYYNRYKRQNVVKDLSVELDRLSEESVNNDISSWTKGRSGEALSLLKKRFSHRPVQEKFVCLNCGFETHADEQAALNIARSWLFLRSQEYKKYQTNKTTGNTDKRAFVETWQSFYRKKLKEVWKPAV

SEQ ID NO: 25239 - protein, 978 aa, synthetic construct
  REGION 1..978: note = engineered CasX variant
QEIKRINKIRRRLVKDSNTKKAGKTGPMKTLLVRVMTPDLRERLENLRKKPENIPQPISNTSRANLNKLLTDYTEMKKAILHVYWEEFQKDPVGLMSRVAQPASKKIDQNKLKPEMDEKGNLTTAGFACSQCGQPLFVYKLEQVSEKGKAYTNYFGRCNVAEHEKLILLAQLKPEKDSDEAVTYSLGKFGQRALDFYSIHVTKESTHPVKPLAQIAGNRYASGPVGKALSDACMGTIASFLSKYQDIIIEHQKVVKGNQKRLESLRELAGKENLEYPSVTLPPQPHTKEGVDAYNEVIARVRMWVNLNLWQKLKLSRDDAKPLLRLKGFPSFPLVERQANEVDWWDMVCNVKKLINEKKEDGKVFWQNLAGYKRQEALRPYLSSEEDRKKGKKFARYQLGDLLLHLEKKHGEDWGKVYDEAWERIDKKVEGLSKHIKLEEERRSEDAQSKAALTDWLRAKASFVIEGLKEADKDEFCRCELKLQKWYGDLRGKPFAIEAENSILDISGFSKQYNCAFIWQKDGVKKLNLYLIINYFKGGKLRFKKIKPEAFEANRFYTVINKKSGEIVPMEVNFNFDDPNLIILPLAFGKRQGREFIWNDLLSLETGSLKLANGRVIEKTLYNRRTRQDEPALFVALTFERREVLDSSNIKRMNLIGVDRGENIPAVIALTDPEGCPLSRFKDSQGNPTHILRIGESYKEKQRTIQAFKEVEQRRAGGYSRKYASKAKNLADDMVRNTARDLLYYAVTQDAMLIFENLSRGFGRQGKRTFMAERQYTRMEDWLTAKLAYEGLPSKTYLSKTLAQYTSKTCSNCGFTITSADYDRVLEKLKKTATGWMTTINGKELKVEGQITYYNRYKRQNVVKDLSVELDRLSEESVNNDISSWTKGRSGEALSLLKKRFSHRPVQEKFVCLNCGFETHADEQAALNIARSWLFLRSQEYKKYQTNKTTGNTDKRAFVETWQSFYRKKLKEVWKPAV

SEQ ID NO: 25240 - protein, 978 aa, synthetic construct
  REGION 1..978: note = engineered CasX variant
QEIKRINKIRRRLVKDSNTKKAGKTGPMKTLLVRVMTPDLRERLENLRKKPENIPQPISNTSRANLNKLLTDYTEMKKAILHVYWEEFQKDPVGLMSRVAQPASKKIDQNKLKPEMDEKGNLTTAGFACSQCGQPLFVYKLEQVSEKGKAYTNYFGRCNVAEHEKLILLAQLKPEKDSDEAVTYSLGKFGQRALDFYSIHVTKESTHPVKPLAQIAGNRYASGPVGKALSDACMGTIASFLSKYQDIIIEHQKVVKGNQKRLESLRELAGKENLEYPSVTLPPQPHTKEGVDAYNEVIARVRMWVNLNLWQKLKLSRDDAKPLLRLKGFPSFPLVERQANEVDWWDMVCNVKKLINEKKEDGKVFWQNLAGYKRQEALRPYLSSEEDRKKGKKFARYQLGDLLLHLEKKHGEDWGKVYDEAWERIDKKVEGLSKHIKLEEERRSEDAQSKAALTDWLRAKASFVIEGLKEADKDEFCRCELKLQKWYGDLRGKPFAIEAENSILDISGFSKQYNCAFIWQKDGVKKLNLYLIINYFKGGKLRFKKIKPEAFEANRFYTVINKKSGEIVPMEVNFNFDDPNLIILPLAFGKRQGREFIWNDLLSLETGSLKLANGRVIEKTLYNRRTRQDEPALFVALTFERREVLDSSNIKRMNLIGVDRGENIPAVIALTDPEGCPLSRFKDSLGNPTHILRIGESYKEKQRTIQQKKEVEQRRAGGYSRKYASKAKNLADDMVRNTARDLLYYAVTQDAMLIFENLSRGFGRQGKRTFMAERQYTRMEDWLTAKLAYEGLPSKTYLSKTLAQYTSKTCSNCGFTITSADYDRVLEKLKKTATGWMTTINGKELKVEGQITYYNRYKRQNVVKDLSVELDRLSEESVNNDISSWTKGRSGEALSLLKKRFSHRPVQEKFVCLNCGFETHADEQAALNIARSWLFLRSQEYKKYQTNKTTGNTDKRAFVETWQSFYRKKLKEVWKPAV

SEQ ID NO: 25241 - protein, 978 aa, synthetic construct
  REGION 1..978: note = engineered CasX variant
QEIKRINKIRRRLVKDSNTKKAGKTGPMKTLLVRVMTPDLRERLENLRKKPENIPQPISNTSRANLNKLLTDYTEMKKAILHVYWEEFQKDPVGLMSRVAQPASKKIDQNKLKPEMDEKGNLTTAGFACSQCGQPLFVYKLEQVSEKGKAYTNYFGRCNVAEHEKLILLAQLKPEKDSDEAVTYSLGKFGQRALDFYSIHVTKESTHPVKPLAQIAGNRYASGPVGKALSDACMGTIASFLSKYQDIIIEHQKVVKGNQKRLESLRELAGKENLEYPSVTLPPQPHTKEGVDAYNEVIARVRMWVNLNLWQKLKLSRDDAKPLLRLKGFPSFPLVERQANEVDWWDMVCNVKKLINEKKEDGKVFWQNLAGYKRQEALRPYLSSEEDRKKGKKFARYQLGDLLLHLEKKHGEDWGKVYDEAWERIDKKVEGLSKHIKLEEERRSEDAQSKAALTDWLRAKASFVIEGLKEADKDEFCRCELKLQKWYGDLRGKPFAIEAENSILDISGFSKQYNCAFIWQKDGVKKLNLYLIINYFKGGKLRFKKIKPEAFEANRFYTVINKKSGEIVPMEVNFNFDDPNLIILPLAFGKRQGREFIWNDLLSLETGSLKLANGRVIEKTLYNRRTRQDEPALFVALTFERREVLDSSNIKRMNLIGVDRGENIPAVIALTDPEGCPLSRFKDSLGNPTHILRIGESYKEKQRTIQAKKEVEQRRLGGYSRKYASKAKNLADDMVRNTARDLLYYAVTQDAMLIFENLSRGFGRQGKRTFMAERQYTRMEDWLTAKLAYEGLPSKTYLSKTLAQYTSKTCSNCGFTITSADYDRVLEKLKKTATGWMTTINGKELKVEGQITYYNRYKRQNVVKDLSVELDRLSEESVNNDISSWTKGRSGEALSLLKKRFSHRPVQEKFVCLNCGFETHADEQAALNIARSWLFLRSQEYKKYQTNKTTGNTDKRAFVETWQSFYRKKLKEVWKPAV

SEQ ID NO: 25242 - protein, 978 aa, synthetic construct
  REGION 1..978: note = engineered CasX variant
QEIKRINKIRRRLVKDSNTKKAGKTGPMKTLLVRVMTPDLRERLENLRKKPENIPQPISNTSRANLNKLLTDYTEMKKAILHVYWEEFQKDPVGLMSRVAQPASKKIDQNKLKPEMDEKGNLTTAGFACSQCGQPLFVYKLEQVSEKGKAYTNYFGRCNVAEHEKLILLAQLKPEKDSDEAVTYSLGKFGQRALDFYSIHVTKESTHPVKPLAQIAGNRYASGPVGKALSDACMGTIASFLSKYQDIIIEHQKVVKGNQKRLESLRELAGKENLEYPSVTLPPQPHTKEGVDAYNEVIARVRMWVNLNLWQKLKLSRDDAKPLLRLKGFPSFPLVERQANEVDWWDMVCNVKKLINEKKEDGKVFWQNLAGYKRQEALRPYLSSEEDRKKGKKFARYQLGDLLLHLEKKHGEDWGKVYDEAWERIDKKVEGLSKHIKLEEERRSEDAQSKAALTDWLRAKASFVIEGLKEADKDEFCRCELKLQKWYGDLRGKPFAIEAENSILDISGFSKQYNCAFIWQKDGVKKLNLYLIINYFKGGKLRFKKIKPEAFEANRFYTVINKKSGEIVPMEVNFNFDDPNLIILPLAFGKRQGREFIWNDLLSLETGSLKLANGRVIEKTLYNRRTRQDEPALFVALTFERREVLDSSNIKRMNLIGVDRGENIPAVIALTDPEGCPLSRFKDSLGNPTHILRIGESYKEKQRTIQAKKEVEQRRAGGYSRKYASKAKNLADDMVRNTARDLLYYAVTQDAMLIFENLSRGFGRQGKRTFMAERQYTRMEDWLTAKLAYEGLPSKTYLSKTLAQYTSKTCSNCGFTITSADYDRVLEKLKKTATGWMTTINGKELKVEGQITYYNRYKRQNVVKDLSVELDRLSEESVNNDISSWTKGRSGEALSLLKKRFSHRPVQEKFVCLNCGFETHADEQAALNIARSWLFLRSQEYKKYQTNKTTGNTDKRAFVETWQSFYRKKLKEVWKPAV

SEQ ID NO: 25243 - protein, 978 aa, synthetic construct
  REGION 1..978: note = engineered CasX variant
QEIKRINKIRRRLVKDSNTKKAGKTGPMKTLLVRVMTPDLRERLENLRKKPENIPQPISNTSRANLNKLLTDYTEMKKAILHVYWEEFQKDPVGLMSRVAQPASKKIDQNKLKPEMDEKGNLTTAGFACSQCGQPLFVYKLEQVSEKGKAYTNYFGRCNVAEHEKLILLAQLKPEKDSDEAVTYSLGKFGQRALDFYSIHVTKESTHPVKPLAQIAGNRYASGPVGKALSDACMGTIASFLSKYQDIIIEHQKVVKGNQKRLESLRELAGKENLEYPSVTLPPQPHTKEGVDAYNEVIARVRMWVNLNLWQKLKLSRDDAKPLLRLKGFPSFPLVERQANEVDWWDMVCNVKKLINEKKEDGKVFWQNLAGYKRQEALRPYLSSEEDRKKGKKFARYQLGDLLLHLEKKHGEDWGKVYDEAWERIDKKVEGLSKHIKLEEERRSEDAQSKAALTDWLRAKASFVIEGLKEADKDEFCRCELKLQKWYGDLRGKPFAIEAENSILDISGFSKQYNCAFIWQKDGVKKLNLYLIINYFKGGKLRFKKIKPEAFEANRFYTVINKKSGEIVPMEVNFNFDDPNLIILPLAFGKRQGREFIWNDLLSLETGSLKLANGRVIEKTLYNRRTRQDEPALFVALTFERREVLDSSNIKRMNLIGVDRGENIPAVIALTDPEGCPLSRFKDSLGNPTHILRIGESYKEKQRTIQAKKEVEQRRAFGYSRKYASKAKNLADDMVRNTARDLLYYAVTQDAMLIFENLSRGFGRQGKRTFMAERQYTRMEDWLTAKLAYEGLPSKTYLSKTLAQYTSKTCSNCGFTITSADYDRVLEKLKKTATGWMTTINGKELKVEGQITYYNRYKRQNVVKDLSVELDRLSEESVNNDISSWTKGRSGEALSLLKKRFSHRPVQEKFVCLNCGFETHADEQAALNIARSWLFLRSQEYKKYQTNKTTGNTDKRAFVETWQSFYRKKLKEVWKPAV

SEQ ID NO: 25244 - protein, 978 aa, synthetic construct
  REGION 1..978: note = engineered CasX variant
QEIKRINKIRRRLVKDSNTKKAGKTGPMKTLLVRVMTPDLRERLENLRKKPENIPQPISNTSRANLNKLLTDYTEMKKAILHVYWEEFQKDPVGLMSRVAQPASKKIDQNKLKPEMDEKGNLTTAGFACSQCGQPLFVYKLEQVSEKGKAYTNYFGRCNVAEHEKLILLAQLKPEKDSDEAVTYSLGKFGQRALDFYSIHVTKESTHPVKPLAQIAGNRYASGPVGKALSDACMGTIASFLSKYQDIIIEHQKVVKGNQKRLESLRELAGKENLEYPSVTLPPQPHTKEGVDAYNEVIARVRMWVNLNLWQKLKLSRDDAKPLLRLKGFPSFPLVERQANEVDWWDMVCNVKKLINEKKEDGKVFWQNLAGYKRQEALRPYLSSEEDRKKGKKFARYQLGDLLLHLEKKHGEDWGKVYDEAWERIDKKVEGLSKHIKLEEERRSEDAQSKAALTDWLRAKASFVIEGLKEADKDEFCRCELKLQKWYGDLRGKPFAIEAENSILDISGFSKQYNCAFIWQKDGVKKLNLYLIINYFKGGKLRFKKIKPEAFEANRFYTVINKKSGEIVPMEVNFNFDDPNLIILPLAFGKRQGREFIWNDLLSLETGSLKLANGRVIEKTLYNRRTRQDEPALFVALTFERREVLDSSNIKRMNLIGVDRGENIPAVIALTDPEGCPLSRFKDSLGNPTHILRIGESYKEKQRTIQAFKEVEQRRAGGYSRKYASKAKNLADDMVRNTARDLLYYAVTQDAMLIFENLSRGFGRQGKRTFMAERQYTRMEDWLTAKLAYEGLPSKTYLSKTLAQYTSKTCSNCGFTITSADYDRVLEKLKKTATGWMTTINGKELKVEGQITYYNRYKRQNVVKDLSVELDRLSEESVNNDISSWTKGRSGEALSLLKKRFSHRPVQEKFVCLNCGFETHADEQAALNIARSWLFLRSQEYKKYQTNKTTGNTDKRAFVETWQSFYRKKLKEVWKPAV

SEQ ID NO: 25245 - protein, 978 aa, synthetic construct
  REGION 1..978: note = engineered CasX variant
QEIKRINKIRRRLVKDSNTKKAGKTGPMKTLLVRVMTPDLRERLENLRKKPENIPQPISNTSRANLNKLLTDYTEMKKAILHVYWEEFQKDPVGLMSRVAQPASKKIDQNKLKPEMDEKGNLTTAGFACSQCGQPLFVYKLEQVSEKGKAYTNYFGRCNVAEHEKLILLAQLKPEKDSDEAVTYSLGKFGQRALDFYSIHVTKESTHPVKPLAQIAGNRYASGPVGKALSDACMGTIASFLSKYQDIIIEHQKVVKGNQKRLESLRELAGKENLEYPSVTLPPQPHTKEGVDAYNEVIARVRMWVNLNLWQKLKLSRDDAKPLLRLKGFPSFPLVERQANEVDWWDMVCNVKKLINEKKEDGKVFWQNLAGYKRQEALRPYLSSEEDRKKGKKFARYQLGDLLLHLEKKHGEDWGKVYDEAWERIDKKVEGLSKHIKLEEERRSEDAQSKAALTDWLRAKASFVIEGLKEADKDEFCRCELKLQKWYGDLRGKPFAIEAENSILDISGFSKQYNCAFIWQKDGVKKLNLYLIINYFKGGKLRFKKIKPEAFEANRFYTVINKKSGEIVPMEVNFNFDDPNLIILPLAFGKRQGREFIWNDLLSLETGSLKLANGRVIEKTLYNRRTRQDEPALFVALTFERREVLDSSNIKRMNLIGVDRGENIPAVIALTDPEGCPLSRFKDSLGNPTHILRIGECYKEKQRTIQAKKEVEQRRAGGYSRKYASKAKNLADDMVRNTARDLLYYAVTQDAMLIFENLSRGFGRQGKRTFMAERQYTRMEDWLTAKLAYEGLPSKTYLSKTLAQYTSKTCSNCGFTITSADYDRVLEKLKKTATGWMTTINGKELKVEGQITYYNRYKRQNVVKDLSVELDRLSEESVNNDISSWTKGRSGEALSLLKKRFSHRPVQEKFVCLNCGFETHADEQAALNIARSWLFLRSQEYKKYQTNKTTGNTDKRAFVETWQSFYRKKLKEVWKPAV

SEQ ID NO: 25246 - protein, 978 aa, synthetic construct
  REGION 1..978: note = engineered CasX variant
QEIKRINKIRRRLVKDSNTKKAGKTGPMKTLLVRVMTPDLRERLENLRKKPENIPQPISNTSRANLNKLLTDYTEMKKAILHVYWEEFQKDPVGLMSRVAQPASKKIDQNKLKPEMDEKGNLTTAGFACSQCGQPLFVYKLEQVSEKGKAYTNYFGRCNVAEHEKLILLAQLKPEKDSDEAVTYSLGKFGQRALDFYSIHVTKESTHPVKPLAQIAGNRYASGPVGKALSDACMGTIASFLSKYQDIIIEHQKVVKGNQKRLESLRELAGKENLEYPSVTLPPQPHTKEGVDAYNEVIARVRMWVNLNLWQKLKLSRDDAKPLLRLKGFPSFPLVERQANEVDWWDMVCNVKKLINEKKEDGKVFWQNLAGYKRQEALRPYLSSEEDRKKGKKFARYQLGDLLLHLEKKHGEDWGKVYDEAWERIDKKVEGLSKHIKLEEERRSEDAQSKAALTDWLRAKASFVIEGLKEADKDEFCRCELKLQKWYGDLRGKPFAIEAENSILDISGFSKQYNCAFIWQKDGVKKLNLYLIINYFKGGKLRFKKIKPEAFEANRFYTVINKKSGEIVPMEVNFNFDDPNLIILPLAFGKRQGREFIWNDLLSLETGSLKLANGRVIEKTLYNRRTRQDEPALFVALTFERREVLDSSNIKRMNLIGVDRGENIPAVIALTDPEGCPLSRFKDSLGNPTHILRFGESYKEKQRTIQAKKEVEQRRAGGYSRKYASKAKNLADDMVRNTARDLLYYAVTQDAMLIFENLSRGFGRQGKRTFMAERQYTRMEDWLTAKLAYEGLPSKTYLSKTLAQYTSKTCSNCGFTITSADYDRVLEKLKKTATGWMTTINGKELKVEGQITYYNRYKRQNVVKDLSVELDRLSEESVNNDISSWTKGRSGEALSLLKKRFSHRPVQEKFVCLNCGFETHADEQAALNIARSWLFLRSQEYKKYQTNKTTGNTDKRAFVETWQSFYRKKLKEVWKPAV

SEQ ID NO: 25247 - protein, 978 aa, synthetic construct
  REGION 1..978: note = engineered CasX variant
QEIKRINKIRRRLVKDSNTKKAGKTGPMKTLLVRVMTPDLRERLENLRKKPENIPQPISNTSRANLNKLLTDYTEMKKAILHVYWEEFQKDPVGLMSRVAQPASKKIDQNKLKPEMDEKGNLTTAGFACSQCGQPLFVYKLEQVSEKGKAYTNYFGRCNVAEHEKLILLAQLKPEKDSDEAVTYSLGKFGQRALDFYSIHVTKESTHPVKPLAQIAGNRYASGPVGKALSDACMGTIASFLSKYQDIIIEHQKVVKGNQKRLESLRELAGKENLEYPSVTLPPQPHTKEGVDAYNEVIARVRMWVNLNLWQKLKLSRDDAKPLLRLKGFPSFPLVERQANEVDWWDMVCNVKKLINEKKEDGKVFWQNLAGYKRQEALRPYLSSEEDRKKGKKFARYQLGDLLLHLEKKHGEDWGKVYDEAWERIDKKVEGLSKHIKLEEERRSEDAQSKAALTDWLRAKASFVIEGLKEADKDEFCRCELKLQKWYGDLRGKPFAIEAENSILDISGFSKQYNCAFIWQKDGVKKLNLYLIINYFKGGKLRFKKIKPEAFEANRFYTVINKKSGEIVPMEVNFNFDDPNLIILPLAFGKRQGREFIWNDLLSLETGSLKLANGRVIEKTLYNRRTRQDEPALFVALTFERREVLDSSNIKRMNLIGVDRGENIPAVIALTDPEGCPLSRFKDSLGNPTHILRFGESYKEKQRTIQAKKEVEQRRAFGYSRKYASKAKNLADDMVRNTARDLLYYAVTQDAMLIFENLSRGFGRQGKRTFMAERQYTRMEDWLTAKLAYEGLPSKTYLSKTLAQYTSKTCSNCGFTITSADYDRVLEKLKKTATGWMTTINGKELKVEGQITYYNRYKRQNVVKDLSVELDRLSEESVNNDISSWTKGRSGEALSLLKKRFSHRPVQEKFVCLNCGFETHADEQAALNIARSWLFLRSQEYKKYQTNKTTGNTDKRAFVETWQSFYRKKLKEVWKPAV

SEQ ID NO: 25248 - protein, 978 aa, synthetic construct
  REGION 1..978: note = engineered CasX variant
QEIKRINKIRRRLVKDSNTKKAGKTGPMKTLLVRVMTPDLRERLENLRKKPENIPQPISNTSRANLNKLLTDYTEMKKAILHVYWEEFQKDPVGLMSRVAQPASKKIDQNKLKPEMDEKGNLTTAGFACSQCGQPLFVYKLEQVSEKGKAYTNYFGRCNVAEHEKLILLAQLKPEKDSDEAVTYSLGKFGQRALDFYSIHVTKESTHPVKPLAQIAGNRYASGPVGKALSDACMGTIASFLSKYQDIIIEHQKVVKGNQKRLESLRELAGKENLEYPSVTLPPQPHTKEGVDAYNEVIARVRMWVNLNLWQKLKLSRDDAKPLLRLKGFPSFPLVERQANEVDWWDMVCNVKKLINEKKEDGKVFWQNLAGYKRQEALRPYLSSEEDRKKGKKFARYQLGDLLLHLEKKHGEDWGKVYDEAWERIDKKVEGLSKHIKLEEERRSEDAQSKAALTDWLRAKASFVIEGLKEADKDEFCRCELKLQKWYGDLRGKPFAIEAENSILDISGFSKQYNCAFIWQKDGVKKLNLYLIINYFKGGKLRFKKIKPEAFEANRFYTVINKKSGEIVPMEVNFNFDDPNLIILPLAFGKRQGREFIWNDLLSLETGSLKLANGRVIEKTLYNRRTRQDEPALFVALTFERREVLDSSNIKRMNLIGVDRGENIPAVIALTDPEGCPLSRFKDSAGNPTHILRIGESYKEKQRTIQAKKEVEQRRAGGYSRKYASKAKNLADDMVRNTARDLLYYAVTQDAMLIFENLSRGFGRQGKRTFMAERQYTRMEDWLTAKLAYEGLPSKTYLSKTLAQYTSKTCSNCGFTITSADYDRVLEKLKKTATGWMTTINGKELKVEGQITYYNRYKRQNVVKDLSVELDRLSEESVNNDISSWTKGRSGEALSLLKKRFSHRPVQEKFVCLNCGFETHADEQAALNIARSWLFLRSQEYKKYQTNKTTGNTDKRAFVETWQSFYRKKLKEVWKPAV

SEQ ID NO: 25249 - protein, 978 aa, synthetic construct
  REGION 1..978: note = engineered CasX variant
QEIKRINKIRRRLVKDSNTKKAGKTGPMKTLLVRVMTPDLRERLENLRKKPENIPQPISNTSRANLNKLLTDYTEMKKAILHVYWEEFQKDPVGLMSRVAQPASKKIDQNKLKPEMDEKGNLTTAGFACSQCGQPLFVYKLEQVSEKGKAYTNYFGRCNVAEHEKLILLAQLKPEKDSDEAVTYSLGKFGQRALDFYSIHVTKESTHPVKPLAQIAGNRYASGPVGKALSDACMGTIASFLSKYQDIIIEHQKVVKGNQKRLESLRELAGKENLEYPSVTLPPQPHTKEGVDAYNEVIARVRMWVNLNLWQKLKLSRDDAKPLLRLKGFPSFPLVERQANEVDWWDMVCNVKKLINEKKEDGKVFWQNLAGYKRQEALRPYLSSEEDRKKGKKFARYQLGDLLLHLEKKHGEDWGKVYDEAWERIDKKVEGLSKHIKLEEERRSEDAQSKAALTDWLRAKASFVIEGLKEADKDEFCRCELKLQKWYGDLRGKPFAIEAENSILDISGFSKQYNCAFIWQKDGVKKLNLYLIINYFKGGKLRFKKIKPEAFEANRFYTVINKKSGEIVPMEVNFNFDDPNLIILPLAFGKRQGREFIWNDLLSLETGSLKLANGRVIEKTLYNRRTRQDEPALFVALTFERREVLDSSNIKRMNLIGVDRGENIPAVIALTDPEGCPLSRFKDHQGNPTHILRIGESYKEKQRTIQAKKEVEQRRAGGYSRKYASKAKNLADDMVRNTARDLLYYAVTQDAMLIFENLSRGFGRQGKRTFMAERQYTRMEDWLTAKLAYEGLPSKTYLSKTLAQYTSKTCSNCGFTITSADYDRVLEKLKKTATGWMTTINGKELKVEGQITYYNRYKRQNVVKDLSVELDRLSEESVNNDISSWTKGRSGEALSLLKKRFSHRPVQEKFVCLNCGFETHADEQAALNIARSWLFLRSQEYKKYQTNKTTGNTDKRAFVETWQSFYRKKLKEVWKPAV

SEQ ID NO: 25250 - protein, 978 aa, synthetic construct
  REGION 1..978: note = engineered CasX variant
QEIKRINKIRRRLVKDSNTKKAGKTGPMKTLLVRVMTPDLRERLENLRKKPENIPQPISNTSRANLNKLLTDYTEMKKAILHVYWEEFQKDPVGLMSRVAQPASKKIDQNKLKPEMDEKGNLTTAGFACSQCGQPLFVYKLEQVSEKGKAYTNYFGRCNVAEHEKLILLAQLKPEKDSDEAVTYSLGKFGQRALDFYSIHVTKESTHPVKPLAQIAGNRYASGPVGKALSDACMGTIASFLSKYQDIIIEHQKVVKGNQKRLESLRELAGKENLEYPSVTLPPQPHTKEGVDAYNEVIARVRMWVNLNLWQKLKLSRDDAKPLLRLKGFPSFPLVERQANEVDWWDMVCNVKKLINEKKEDGKVFWQNLAGYKRQEALRPYLSSEEDRKKGKKFARYQLGDLLLHLEKKHGEDWGKVYDEAWERIDKKVEGLSKHIKLEEERRSEDAQSKAALTDWLRAKASFVIEGLKEADKDEFCRCELKLQKWYGDLRGKPFAIEAENSILDISGFSKQYNCAFIWQKDGVKKLNLYLIINYFKGGKLRFKKIKPEAFEANRFYTVINKKSGEIVPMEVNFNFDDPNLIILPLAFGKRQGREFIWNDLLSLETGSLKLANGRVIEKTLYNRRTRQDEPALFVALTFERREVLDSSNIKRMNLIGVDRGENIPAVIALTDPEGCPLSRFKDHLGNPTHILRIGESYKEKQRTIQAKKEVEQRRLGGYSRKYASKAKNLADDMVRNTARDLLYYAVTQDAMLIFENLSRGFGRQGKRTFMAERQYTRMEDWLTAKLAYEGLPSKTYLSKTLAQYTSKTCSNCGFTITSADYDRVLEKLKKTATGWMTTINGKELKVEGQITYYNRYKRQNVVKDLSVELDRLSEESVNNDISSWTKGRSGEALSLLKKRFSHRPVQEKFVCLNCGFETHADEQAALNIARSWLFLRSQEYKKYQTNKTTGNTDKRAFVETWQSFYRKKLKEVWKPAV

SEQ ID NO: 25251 - protein, 978 aa, synthetic construct
  REGION 1..978: note = engineered CasX variant
QEIKRINKIRRRLVKDSNTKKAGKTGPMKTLLVRVMTPDLRERLENLRKKPENIPQPISNTSRANLNKLLTDYTEMKKAILHVYWEEFQKDPVGLMSRVAQPASKKIDQNKLKPEMDEKGNLTTAGFACSQCGQPLFVYKLEQVSEKGKAYTNYFGRCNVAEHEKLILLAQLKPEKDSDEAVTYSLGKFGQRALDFYSIHVTKESTHPVKPLAQIAGNRYASGPVGKALSDACMGTIASFLSKYQDIIIEHQKVVKGNQKRLESLRELAGKENLEYPSVTLPPQPHTKEGVDAYNEVIARVRMWVNLNLWQKLKLSRDDAKPLLRLKGFPSFPLVERQANEVDWWDMVCNVKKLINEKKEDGKVFWQNLAGYKRQEALRPYLSSEEDRKKGKKFARYQLGDLLLHLEKKHGEDWGKVYDEAWERIDKKVEGLSKHIKLEEERRSEDAQSKAALTDWLRAKASFVIEGLKEADKDEFCRCELKLQKWYGDLRGKPFAIEAENSILDISGFSKQYNCAFIWQKDGVKKLNLYLIINYFKGGKLRFKKIKPEAFEANRFYTVINKKSGEIVPMEVNFNFDDPNLIILPLAFGKRQGREFIWNDLLSLETGSLKLANGRVIEKTLYNRRTRQDEPALFVALTFERREVLDSSNIKRMNLIGVDRGENIPAVIALTDPEGCPLSRFKDHLGNPTHILRIGESYKEKQRTIQAKKEVEQRRAGGYSRKYASKAKNLADDMVRNTARDLLYYAVTQDAMLIFENLSRGFGRQGKRTFMAERQYTRMEDWLTAKLAYEGLPSKTYLSKTLAQYTSKTCSNCGFTITSADYDRVLEKLKKTATGWMTTINGKELKVEGQITYYNRYKRQNVVKDLSVELDRLSEESVNNDISSWTKGRSGEALSLLKKRFSHRPVQEKFVCLNCGFETHADEQAALNIARSWLFLRSQEYKKYQTNKTTGNTDKRAFVETWQSFYRKKLKEVWKPAV

SEQ ID NO: 25252 - protein, 978 aa, synthetic construct
  REGION 1..978: note = engineered CasX variant
QEIKRINKIRRRLVKDSNTKKAGKTGPMKTLLVRVMTPDLRERLENLRKKPENIPQPISNTSRANLNKLLTDYTEMKKAILHVYWEEFQKDPVGLMSRVAQPASKKIDQNKLKPEMDEKGNLTTAGFACSQCGQPLFVYKLEQVSEKGKAYTNYFGRCNVAEHEKLILLAQLKPEKDSDEAVTYSLGKFGQRALDFYSIHVTKESTHPVKPLAQIAGNRYASGPVGKALSDACMGTIASFLSKYQDIIIEHQKVVKGNQKRLESLRELAGKENLEYPSVTLPPQPHTKEGVDAYNEVIARVRMWVNLNLWQKLKLSRDDAKPLLRLKGFPSFPLVERQANEVDWWDMVCNVKKLINEKKEDGKVFWQNLAGYKRQEALRPYLSSEEDRKKGKKFARYQLGDLLLHLEKKHGEDWGKVYDEAWERIDKKVEGLSKHIKLEEERRSEDAQSKAALTDWLRAKASFVIEGLKEADKDEFCRCELKLQKWYGDLRGKPFAIEAENSILDISGFSKQYNCAFIWQKDGVKKLNLYLIINYFKGGKLRFKKIKPEAFEANRFYTVINKKSGEIVPMEVNFNFDDPNLIILPLAFGKRQGREFIWNDLLSLETGSLKLANGRVIEKTLYNRRTRQDEPALFVALTFERREVLDSSNIKRMNLIGVDRGENIPAVIALTDPEGCPLSRFKDHAGNPTHILRIGESYKEKQRTIQAKKEVEQRRAGGYSRKYASKAKNLADDMVRNTARDLLYYAVTQDAMLIFENLSRGFGRQGKRTFMAERQYTRMEDWLTAKLAYEGLPSKTYLSKTLAQYTSKTCSNCGFTITSADYDRVLEKLKKTATGWMTTINGKELKVEGQITYYNRYKRQNVVKDLSVELDRLSEESVNNDISSWTKGRSGEALSLLKKRFSHRPVQEKFVCLNCGFETHADEQAALNIARSWLFLRSQEYKKYQTNKTTGNTDKRAFVETWQSFYRKKLKEVWKPAV

SEQ ID NO: 25253 - protein, 978 aa, synthetic construct
  REGION 1..978: note = engineered CasX variant
QEIKRINKIRRRLVKDSNTKKAGKTGPMKTLLVRVMTPDLRERLENLRKKPENIPQPISNTSRANLNKLLTDYTEMKKAILHVYWEEFQKDPVGLMSRVAQPASKKIDQNKLKPEMDEKGNLTTAGFACSQCGQPLFVYKLEQVSEKGKAYTNYFGRCNVAEHEKLILLAQLKPEKDSDEAVTYSLGKFGQRALDFYSIHVTKESTHPVKPLAQIAGNRYASGPVGKALSDACMGTIASFLSKYQDIIIEHQKVVKGNQKRLESLRELAGKENLEYPSVTLPPQPHTKEGVDAYNEVIARVRMWVNLNLWQKLKLSRDDAKPLLRLKGFPSFPLVERQANEVDWWDMVCNVKKLINEKKEDGKVFWQNLAGYKRQEALRPYLSSEEDRKKGKKFARYQLGDLLLHLEKKHGEDWGKVYDEAWERIDKKVEGLSKHIKLEEERRSEDAQSKAALTDWLRAKASFVIEGLKEADKDEFCRCELKLQKWYGDLRGKPFAIEAENSILDISGFSKQYNCAFIWQKDGVKKLNLYLIINYFKGGKLRFKKIKPEAFEANRFYTVINKKSGEIVPMEVNFNFDDPNLIILPLAFGKRQGREFIWNDLLSLETGSLKLANGRVIEKTLYNRRTRQDEPALFVALTFERREVLDSSNIKRMNLIGVDRGENIPAVIALTDPEGCPLSKFKDSQGNPTHILRIGESYKEKQRTIQAKKEVEQRRAGGYSRKYASKAKNLADDMVRNTARDLLYYAVTQDAMLIFENLSRGFGRQGKRTFMAERQYTRMEDWLTAKLAYEGLPSKTYLSKTLAQYTSKTCSNCGFTITSADYDRVLEKLKKTATGWMTTINGKELKVEGQITYYNRYKRQNVVKDLSVELDRLSEESVNNDISSWTKGRSGEALSLLKKRFSHRPVQEKFVCLNCGFETHADEQAALNIARSWLFLRSQEYKKYQTNKTTGNTDKRAFVETWQSFYRKKLKEVWKPAV

SEQ ID NO: 25254 - protein, 978 aa, synthetic construct
  REGION 1..978: note = engineered CasX variant
QEIKRINKIRRRLVKDSNTKKAGKTGPMKTLLVRVMTPDLRERLENLRKKPENIPQPISNTSRANLNKLLTDYTEMKKAILHVYWEEFQKDPVGLMSRVAQPASKKIDQNKLKPEMDEKGNLTTAGFACSQCGQPLFVYKLEQVSEKGKAYTNYFGRCNVAEHEKLILLAQLKPEKDSDEAVTYSLGKFGQRALDFYSIHVTKESTHPVKPLAQIAGNRYASGPVGKALSDACMGTIASFLSKYQDIIIEHQKVVKGNQKRLESLRELAGKENLEYPSVTLPPQPHTKEGVDAYNEVIARVRMWVNLNLWQKLKLSRDDAKPLLRLKGFPSFPLVERQANEVDWWDMVCNVKKLINEKKEDGKVFWQNLAGYKRQEALRPYLSSEEDRKKGKKFARYQLGDLLLHLEKKHGEDWGKVYDEAWERIDKKVEGLSKHIKLEEERRSEDAQSKAALTDWLRAKASFVIEGLKEADKDEFCRCELKLQKWYGDLRGKPFAIEAENSILDISGFSKQYNCAFIWQKDGVKKLNLYLIINYFKGGKLRFKKIKPEAFEANRFYTVINKKSGEIVPMEVNFNFDDPNLIILPLAFGKRQGREFIWNDLLSLETGSLKLANGRVIEKTLYNRRTRQDEPALFVALTFERREVLDSSNIKRMNLIGVDRGENIPAVIALTDPEGCPLSKFKDSLGNPTHILRIGESYKEKQRTIQQKKEVEQRRAGGYSRKYASKAKNLADDMVRNTARDLLYYAVTQDAMLIFENLSRGFGRQGKRTFMAERQYTRMEDWLTAKLAYEGLPSKTYLSKTLAQYTSKTCSNCGFTITSADYDRVLEKLKKTATGWMTTINGKELKVEGQITYYNRYKRQNVVKDLSVELDRLSEESVNNDISSWTKGRSGEALSLLKKRFSHRPVQEKFVCLNCGFETHADEQAALNIARSWLFLRSQEYKKYQTNKTTGNTDKRAFVETWQSFYRKKLKEVWKPAV

SEQ ID NO: 25255 - protein, 978 aa, synthetic construct
  REGION 1..978: note = engineered CasX variant
QEIKRINKIRRRLVKDSNTKKAGKTGPMKTLLVRVMTPDLRERLENLRKKPENIPQPISNTSRANLNKLLTDYTEMKKAILHVYWEEFQKDPVGLMSRVAQPASKKIDQNKLKPEMDEKGNLTTAGFACSQCGQPLFVYKLEQVSEKGKAYTNYFGRCNVAEHEKLILLAQLKPEKDSDEAVTYSLGKFGQRALDFYSIHVTKESTHPVKPLAQIAGNRYASGPVGKALSDACMGTIASFLSKYQDIIIEHQKVVKGNQKRLESLRELAGKENLEYPSVTLPPQPHTKEGVDAYNEVIARVRMWVNLNLWQKLKLSRDDAKPLLRLKGFPSFPLVERQANEVDWWDMVCNVKKLINEKKEDGKVFWQNLAGYKRQEALRPYLSSEEDRKKGKKFARYQLGDLLLHLEKKHGEDWGKVYDEAWERIDKKVEGLSKHIKLEEERRSEDAQSKAALTDWLRAKASFVIEGLKEADKDEFCRCELKLQKWYGDLRGKPFAIEAENSILDISGFSKQYNCAFIWQKDGVKKLNLYLIINYFKGGKLRFKKIKPEAFEANRFYTVINKKSGEIVPMEVNFNFDDPNLIILPLAFGKRQGREFIWNDLLSLETGSLKLANGRVIEKTLYNRRTRQDEPALFVALTFERREVLDSSNIKRMNLIGVDRGENIPAVIALTDPEGCPLSKFKDSLGNPTHILRIGESYKEKQRTIQAKKEVEQRRAGGYSRKYASKAKNLADDMVRNTARDLLYYAVTQDAMLIFENLSRGFGRQGKRTFMAERQYTRMEDWLTAKLAYEGLPSKTYLSKTLAQYTSKTCSNCGFTITSADYDRVLEKLKKTATGWMTTINGKELKVEGQITYYNRYKRQNVVKDLSVELDRLSEESVNNDISSWTKGRSGEALSLLKKRFSHRPVQEKFVCLNCGFETHADEQAALNIARSWLFLRSQEYKKYQTNKTTGNTDKRAFVETWQSFYRKKLKEVWKPAV

SEQ ID NO: 25256 - protein, 978 aa, synthetic construct
  REGION 1..978: note = engineered CasX variant
QEIKRINKIRRRLVKDSNTKKAGKTGPMKTLLVRVMTPDLRERLENLRKKPENIPQPISNTSRANLNKLLTDYTEMKKAILHVYWEEFQKDPVGLMSRVAQPASKKIDQNKLKPEMDEKGNLTTAGFACSQCGQPLFVYKLEQVSEKGKAYTNYFGRCNVAEHEKLILLAQLKPEKDSDEAVTYSLGKFGQRALDFYSIHVTKESTHPVKPLAQIAGNRYASGPVGKALSDACMGTIASFLSKYQDIIIEHQKVVKGNQKRLESLRELAGKENLEYPSVTLPPQPHTKEGVDAYNEVIARVRMWVNLNLWQKLKLSRDDAKPLLRLKGFPSFPLVERQANEVDWWDMVCNVKKLINEKKEDGKVFWQNLAGYKRQEALRPYLSSEEDRKKGKKFARYQLGDLLLHLEKKHGEDWGKVYDEAWERIDKKVEGLSKHIKLEEERRSEDAQSKAALTDWLRAKASFVIEGLKEADKDEFCRCELKLQKWYGDLRGKPFAIEAENSILDISGFSKQYNCAFIWQKDGVKKLNLYLIINYFKGGKLRFKKIKPEAFEANRFYTVINKKSGEIVPMEVNFNFDDPNLIILPLAFGKRQGREFIWNDLLSLETGSLKLANGRVIEKTLYNRRTRQDEPALFVALTFERREVLDSSNIKRMNLIGVDRGENIPAVIALTDPEGCPLSKFKDSLGNPTHILRIGESYKEKQRTIQAFKEVEQRRAGGYSRKYASKAKNLADDMVRNTARDLLYYAVTQDAMLIFENLSRGFGRQGKRTFMAERQYTRMEDWLTAKLAYEGLPSKTYLSKTLAQYTSKTCSNCGFTITSADYDRVLEKLKKTATGWMTTINGKELKVEGQITYYNRYKRQNVVKDLSVELDRLSEESVNNDISSWTKGRSGEALSLLKKRFSHRPVQEKFVCLNCGFETHADEQAALNIARSWLFLRSQEYKKYQTNKTTGNTDKRAFVETWQSFYRKKLKEVWKPAV

SEQ ID NO: 25257 - protein, 978 aa, synthetic construct
  REGION 1..978: note = engineered CasX variant
QEIKRINKIRRRLVKDSNTKKAGKTGPMKTLLVRVMTPDLRERLENLRKKPENIPQPISNTSRANLNKLLTDYTEMKKAILHVYWEEFQKDPVGLMSRVAQPASKKIDQNKLKPEMDEKGNLTTAGFACSQCGQPLFVYKLEQVSEKGKAYTNYFGRCNVAEHEKLILLAQLKPEKDSDEAVTYSLGKFGQRALDFYSIHVTKESTHPVKPLAQIAGNRYASGPVGKALSDACMGTIASFLSKYQDIIIEHQKVVKGNQKRLESLRELAGKENLEYPSVTLPPQPHTKEGVDAYNEVIARVRMWVNLNLWQKLKLSRDDAKPLLRLKGFPSFPLVERQANEVDWWDMVCNVKKLINEKKEDGKVFWQNLAGYKRQEALRPYLSSEEDRKKGKKFARYQLGDLLLHLEKKHGEDWGKVYDEAWERIDKKVEGLSKHIKLEEERRSEDAQSKAALTDWLRAKASFVIEGLKEADKDEFCRCELKLQKWYGDLRGKPFAIEAENSILDISGFSKQYNCAFIWQKDGVKKLNLYLIINYFKGGKLRFKKIKPEAFEANRFYTVINKKSGEIVPMEVNFNFDDPNLIILPLAFGKRQGREFIWNDLLSLETGSLKLANGRVIEKTLYNRRTRQDEPALFVALTFERREVLDSSNIKRMNLIGVDRGENIPAVIALTDPEGCPLSKFKDHLGNPTHILRIGESYKEKQRTIQAKKEVEQRRAGGYSRKYASKAKNLADDMVRNTARDLLYYAVTQDAMLIFENLSRGFGRQGKRTFMAERQYTRMEDWLTAKLAYEGLPSKTYLSKTLAQYTSKTCSNCGFTITSADYDRVLEKLKKTATGWMTTINGKELKVEGQITYYNRYKRQNVVKDLSVELDRLSEESVNNDISSWTKGRSGEALSLLKKRFSHRPVQEKFVCLNCGFETHADEQAALNIARSWLFLRSQEYKKYQTNKTTGNTDKRAFVETWQSFYRKKLKEVWKPAV

SEQ ID NO: 25258 - protein, 978 aa, synthetic construct
  REGION 1..978: note = engineered CasX variant
QEIKRINKIRRRLVKDSNTKKAGKTGPMKTLLVRVMTPDLRERLENLRKKPENIPQPISNTSRANLNKLLTDYTEMKKAILHVYWEEFQKDPVGLMSRVAQPASKKIDQNKLKPEMDEKGNLTTAGFACSQCGQPLFVYKLEQVSEKGKAYTNYFGRCNVAEHEKLILLAQLKPEKDSDEAVTYSLGKFGQRALDFYSIHVTKESTHPVKPLAQIAGNRYASGPVGKALSDACMGTIASFLSKYQDIIIEHQKVVKGNQKRLESLRELAGKENLEYPSVTLPPQPHTKEGVDAYNEVIARVRMWVNLNLWQKLKLSRDDAKPLLRLKGFPSFPLVERQANEVDWWDMVCNVKKLINEKKEDGKVFWQNLAGYKRQEALRPYLSSEEDRKKGKKFARYQLGDLLLHLEKKHGEDWGKVYDEAWERIDKKVEGLSKHIKLEEERRSEDAQSKAALTDWLRAKASFVIEGLKEADKDEFCRCELKLQKWYGDLRGKPFAIEAENSILDISGFSKQYNCAFIWQKDGVKKLNLYLIINYFKGGKLRFKKIKPEAFEANRFYTVINKKSGEIVPMEVNFNFDDPNLIILPLAFGKRQGREFIWNDLLSLETGSLKLANGRVIEKTLYNRRTRQDEPALFVALTFERREVLDSSNIKRMNLIGVDRGENIPAVIALTDPEGCPLSCFKDSQGNPTHILRIGESYKEKQRTIQAKKEVEQRRAGGYSRKYASKAKNLADDMVRNTARDLLYYAVTQDAMLIFENLSRGFGRQGKRTFMAERQYTRMEDWLTAKLAYEGLPSKTYLSKTLAQYTSKTCSNCGFTITSADYDRVLEKLKKTATGWMTTINGKELKVEGQITYYNRYKRQNVVKDLSVELDRLSEESVNNDISSWTKGRSGEALSLLKKRFSHRPVQEKFVCLNCGFETHADEQAALNIARSWLFLRSQEYKKYQTNKTTGNTDKRAFVETWQSFYRKKLKEVWKPAV

SEQ ID NO: 25259 - protein, 978 aa, synthetic construct
  REGION 1..978: note = engineered CasX variant
QEIKRINKIRRRLVKDSNTKKAGKTGPMKTLLVRVMTPDLRERLENLRKKPENIPQPISNTSRANLNKLLTDYTEMKKAILHVYWEEFQKDPVGLMSRVAQPASKKIDQNKLKPEMDEKGNLTTAGFACSQCGQPLFVYKLEQVSEKGKAYTNYFGRCNVAEHEKLILLAQLKPEKDSDEAVTYSLGKFGQRALDFYSIHVTKESTHPVKPLAQIAGNRYASGPVGKALSDACMGTIASFLSKYQDIIIEHQKVVKGNQKRLESLRELAGKENLEYPSVTLPPQPHTKEGVDAYNEVIARVRMWVNLNLWQKLKLSRDDAKPLLRLKGFPSFPLVERQANEVDWWDMVCNVKKLINEKKEDGKVFWQNLAGYKRQEALRPYLSSEEDRKKGKKFARYQLGDLLLHLEKKHGEDWGKVYDEAWERIDKKVEGLSKHIKLEEERRSEDAQSKAALTDWLRAKASFVIEGLKEADKDEFCRCELKLQKWYGDLRGKPFAIEAENSILDISGFSKQYNCAFIWQKDGVKKLNLYLIINYFKGGKLRFKKIKPEAFEANRFYTVINKKSGEIVPMEVNFNFDDPNLIILPLAFGKRQGREFIWNDLLSLETGSLKLANGRVIEKTLYNRRTRQDEPALFVALTFERREVLDSSNIKRMNLIGVDRGENIPAVIALTDPEGCPLSCFKDSLGNPTHILRIGESYKEKQRTIQAKKEVEQRRAGGYSRKYASKAKNLADDMVRNTARDLLYYAVTQDAMLIFENLSRGFGRQGKRTFMAERQYTRMEDWLTAKLAYEGLPSKTYLSKTLAQYTSKTCSNCGFTITSADYDRVLEKLKKTATGWMTTINGKELKVEGQITYYNRYKRQNVVKDLSVELDRLSEESVNNDISSWTKGRSGEALSLLKKRFSHRPVQEKFVCLNCGFETHADEQAALNIARSWLFLRSQEYKKYQTNKTTGNTDKRAFVETWQSFYRKKLKEVWKPAV

SEQ ID NO: 25260 - protein, 978 aa, synthetic construct
  REGION 1..978: note = engineered CasX variant
QEIKRINKIRRRLVKDSNTKKAGKTGPMKTLLVRVMTPDLRERLENLRKKPENIPQPISNTSRANLNKLLTDYTEMKKAILHVYWEEFQKDPVGLMSRVAQPASKKIDQNKLKPEMDEKGNLTTAGFACSQCGQPLFVYKLEQVSEKGKAYTNYFGRCNVAEHEKLILLAQLKPEKDSDEAVTYSLGKFGQRALDFYSIHVTKESTHPVKPLAQIAGNRYASGPVGKALSDACMGTIASFLSKYQDIIIEHQKVVKGNQKRLESLRELAGKENLEYPSVTLPPQPHTKEGVDAYNEVIARVRMWVNLNLWQKLKLSRDDAKPLLRLKGFPSFPLVERQANEVDWWDMVCNVKKLINEKKEDGKVFWQNLAGYKRQEALRPYLSSEEDRKKGKKFARYQLGDLLLHLEKKHGEDWGKVYDEAWERIDKKVEGLSKHIKLEEERRSEDAQSKAALTDWLRAKASFVIEGLKEADKDEFCRCELKLQKWYGDLRGKPFAIEAENSILDISGFSKQYNCAFIWQKDGVKKLNLYLIINYFKGGKLRFKKIKPEAFEANRFYTVINKKSGEIVPMEVNFNFDDPNLIILPLAFGKRQGREFIWNDLLSLETGSLKLANGRVIEKTLYNRRTRQDEPALFVALTFERREVLDSSNIKRMNLIGVDRGENIPAVIALTDPEGCPLSCFKDSLGNPTHILRIGESYKEKQRTIQAFKEVEQRRAGGYSRKYASKAKNLADDMVRNTARDLLYYAVTQDAMLIFENLSRGFGRQGKRTFMAERQYTRMEDWLTAKLAYEGLPSKTYLSKTLAQYTSKTCSNCGFTITSADYDRVLEKLKKTATGWMTTINGKELKVEGQITYYNRYKRQNVVKDLSVELDRLSEESVNNDISSWTKGRSGEALSLLKKRFSHRPVQEKFVCLNCGFETHADEQAALNIARSWLFLRSQEYKKYQTNKTTGNTDKRAFVETWQSFYRKKLKEVWKPAV

SEQ ID NO: 25261 - protein, 978 aa, synthetic construct
  REGION 1..978: note = engineered CasX variant
QEIKRINKIRRRLVKDSNTKKAGKTGPMKTLLVRVMTPDLRERLENLRKKPENIPQPISNTSRANLNKLLTDYTEMKKAILHVYWEEFQKDPVGLMSRVAQPASKKIDQNKLKPEMDEKGNLTTAGFACSQCGQPLFVYKLEQVSEKGKAYTNYFGRCNVAEHEKLILLAQLKPEKDSDEAVTYSLGKFGQRALDFYSIHVTKESTHPVKPLAQIAGNRYASGPVGKALSDACMGTIASFLSKYQDIIIEHQKVVKGNQKRLESLRELAGKENLEYPSVTLPPQPHTKEGVDAYNEVIARVRMWVNLNLWQKLKLSRDDAKPLLRLKGFPSFPLVERQANEVDWWDMVCNVKKLINEKKEDGKVFWQNLAGYKRQEALRPYLSSEEDRKKGKKFARYQLGDLLLHLEKKHGEDWGKVYDEAWERIDKKVEGLSKHIKLEEERRSEDAQSKAALTDWLRAKASFVIEGLKEADKDEFCRCELKLQKWYGDLRGKPFAIEAENSILDISGFSKQYNCAFIWQKDGVKKLNLYLIINYFKGGKLRFKKIKPEAFEANRFYTVINKKSGEIVPMEVNFNFDDPNLIILPLAFGKRQGREFIWNDLLSLETGSLKLANGRVIEKTLYNRRTRQDEPALFVALTFERREVLDSSNIKRMNLIGVDRGENIPAVIALTDPEGCPLSCFKDHLGNPTHILRIGESYKEKQRTIQAKKEVEQRRAGGYSRKYASKAKNLADDMVRNTARDLLYYAVTQDAMLIFENLSRGFGRQGKRTFMAERQYTRMEDWLTAKLAYEGLPSKTYLSKTLAQYTSKTCSNCGFTITSADYDRVLEKLKKTATGWMTTINGKELKVEGQITYYNRYKRQNVVKDLSVELDRLSEESVNNDISSWTKGRSGEALSLLKKRFSHRPVQEKFVCLNCGFETHADEQAALNIARSWLFLRSQEYKKYQTNKTTGNTDKRAFVETWQSFYRKKLKEVWKPAV

SEQ ID NO: 25262 - protein, 978 aa, synthetic construct
  REGION 1..978: note = engineered CasX variant
QEIKRINKIRRRLVKDSNTKKAGKTGPMKTLLVRVMTPDLRERLENLRKKPENIPQPISNTSRANLNKLLTDYTEMKKAILHVYWEEFQKDPVGLMSRVAQPASKKIDQNKLKPEMDEKGNLTTAGFACSQCGQPLFVYKLEQVSEKGKAYTNYFGRCNVAEHEKLILLAQLKPEKDSDEAVTYSLGKFGQRALDFYSIHVTKESTHPVKPLAQIAGNRYASGPVGKALSDACMGTIASFLSKYQDIIIEHQKVVKGNQKRLESLRELAGKENLEYPSVTLPPQPHTKEGVDAYNEVIARVRMWVNLNLWQKLKLSRDDAKPLLRLKGFPSFPLVERQANEVDWWDMVCNVKKLINEKKEDGKVFWQNLAGYKRQEALRPYLSSEEDRKKGKKFARYQLGDLLLHLEKKHGEDWGKVYDEAWERIDKKVEGLSKHIKLEEERRSEDAQSKAALTDWLRAKASFVIEGLKEADKDEFCRCELKLQKWYGDLRGKPFAIEAENSILDISGFSKQYNCAFIWQKDGVKKLNLYLIINYFKGGKLRFKKIKPEAFEANRFYTVINKKSGEIVPMEVNFNFDDPNLIILPLAFGKRQGREFIWNDLLSLETGSLKLANGRVIEKTLYNRRTRQDEPALFVALTFERREVLDSSNIKRMNLIGVDRGENIPAVIALTDPEGCPLERFKDSLGNPTHILRIGESYKEKQRTIQAKKEVEQRRLGGYSRKYASKAKNLADDMVRNTARDLLYYAVTQDAMLIFENLSRGFGRQGKRTFMAERQYTRMEDWLTAKLAYEGLPSKTYLSKTLAQYTSKTCSNCGFTITSADYDRVLEKLKKTATGWMTTINGKELKVEGQITYYNRYKRQNVVKDLSVELDRLSEESVNNDISSWTKGRSGEALSLLKKRFSHRPVQEKFVCLNCGFETHADEQAALNIARSWLFLRSQEYKKYQTNKTTGNTDKRAFVETWQSFYRKKLKEVWKPAV

SEQ ID NO: 25263 - protein, 978 aa, synthetic construct
  REGION 1..978: note = engineered CasX variant
QEIKRINKIRRRLVKDSNTKKAGKTGPMKTLLVRVMTPDLRERLENLRKKPENIPQPISNTSRANLNKLLTDYTEMKKAILHVYWEEFQKDPVGLMSRVAQPASKKIDQNKLKPEMDEKGNLTTAGFACSQCGQPLFVYKLEQVSEKGKAYTNYFGRCNVAEHEKLILLAQLKPEKDSDEAVTYSLGKFGQRALDFYSIHVTKESTHPVKPLAQIAGNRYASGPVGKALSDACMGTIASFLSKYQDIIIEHQKVVKGNQKRLESLRELAGKENLEYPSVTLPPQPHTKEGVDAYNEVIARVRMWVNLNLWQKLKLSRDDAKPLLRLKGFPSFPLVERQANEVDWWDMVCNVKKLINEKKEDGKVFWQNLAGYKRQEALRPYLSSEEDRKKGKKFARYQLGDLLLHLEKKHGEDWGKVYDEAWERIDKKVEGLSKHIKLEEERRSEDAQSKAALTDWLRAKASFVIEGLKEADKDEFCRCELKLQKWYGDLRGKPFAIEAENSILDISGFSKQYNCAFIWQKDGVKKLNLYLIINYFKGGKLRFKKIKPEAFEANRFYTVINKKSGEIVPMEVNFNFDDPNLIILPLAFGKRQGREFIWNDLLSLETGSLKLANGRVIEKTLYNRRTRQDEPALFVALTFERREVLDSSNIKRMNLIGVDRGENIPAVIALTDPEGCPLERFKDSLGNPTHILRIGESYKEKQRTIQAKKEVEQRRAGGYSRKYASKAKNLADDMVRNTARDLLYYAVTQDAMLIFENLSRGFGRQGKRTFMAERQYTRMEDWLTAKLAYEGLPSKTYLSKTLAQYTSKTCSNCGFTITSADYDRVLEKLKKTATGWMTTINGKELKVEGQITYYNRYKRQNVVKDLSVELDRLSEESVNNDISSWTKGRSGEALSLLKKRFSHRPVQEKFVCLNCGFETHADEQAALNIARSWLFLRSQEYKKYQTNKTTGNTDKRAFVETWQSFYRKKLKEVWKPAV

SEQ ID NO: 25264 - protein, 978 aa, synthetic construct
  REGION 1..978: note = engineered CasX variant
QEIKRINKIRRRLVKDSNTKKAGKTGPMKTLLVRVMTPDLRERLENLRKKPENIPQPISNTSRANLNKLLTDYTEMKKAILHVYWEEFQKDPVGLMSRVAQPASKKIDQNKLKPEMDEKGNLTTAGFACSQCGQPLFVYKLEQVSEKGKAYTNYFGRCNVAEHEKLILLAQLKPEKDSDEAVTYSLGKFGQRALDFYSIHVTKESTHPVKPLAQIAGNRYASGPVGKALSDACMGTIASFLSKYQDIIIEHQKVVKGNQKRLESLRELAGKENLEYPSVTLPPQPHTKEGVDAYNEVIARVRMWVNLNLWQKLKLSRDDAKPLLRLKGFPSFPLVERQANEVDWWDMVCNVKKLINEKKEDGKVFWQNLAGYKRQEALRPYLSSEEDRKKGKKFARYQLGDLLLHLEKKHGEDWGKVYDEAWERIDKKVEGLSKHIKLEEERRSEDAQSKAALTDWLRAKASFVIEGLKEADKDEFCRCELKLQKWYGDLRGKPFAIEAENSILDISGFSKQYNCAFIWQKDGVKKLNLYLIINYFKGGKLRFKKIKPEAFEANRFYTVINKKSGEIVPMEVNFNFDDPNLIILPLAFGKRQGREFIWNDLLSLETGSLKLANGRVIEKTLYNRRTRQDEPALFVALTFERREVLDSSNIKRMNLIGVDRGENIPAVIALTDPEGCPLERFKDSLGNPTHILRIGESYKEKQRTIQAKKEVEQRRAFGYSRKYASKAKNLADDMVRNTARDLLYYAVTQDAMLIFENLSRGFGRQGKRTFMAERQYTRMEDWLTAKLAYEGLPSKTYLSKTLAQYTSKTCSNCGFTITSADYDRVLEKLKKTATGWMTTINGKELKVEGQITYYNRYKRQNVVKDLSVELDRLSEESVNNDISSWTKGRSGEALSLLKKRFSHRPVQEKFVCLNCGFETHADEQAALNIARSWLFLRSQEYKKYQTNKTTGNTDKRAFVETWQSFYRKKLKEVWKPAV

SEQ ID NO: 25265 - protein, 978 aa, synthetic construct
  REGION 1..978: note = engineered CasX variant
QEIKRINKIRRRLVKDSNTKKAGKTGPMKTLLVRVMTPDLRERLENLRKKPENIPQPISNTSRANLNKLLTDYTEMKKAILHVYWEEFQKDPVGLMSRVAQPASKKIDQNKLKPEMDEKGNLTTAGFACSQCGQPLFVYKLEQVSEKGKAYTNYFGRCNVAEHEKLILLAQLKPEKDSDEAVTYSLGKFGQRALDFYSIHVTKESTHPVKPLAQIAGNRYASGPVGKALSDACMGTIASFLSKYQDIIIEHQKVVKGNQKRLESLRELAGKENLEYPSVTLPPQPHTKEGVDAYNEVIARVRMWVNLNLWQKLKLSRDDAKPLLRLKGFPSFPLVERQANEVDWWDMVCNVKKLINEKKEDGKVFWQNLAGYKRQEALRPYLSSEEDRKKGKKFARYQLGDLLLHLEKKHGEDWGKVYDEAWERIDKKVEGLSKHIKLEEERRSEDAQSKAALTDWLRAKASFVIEGLKEADKDEFCRCELKLQKWYGDLRGKPFAIEAENSILDISGFSKQYNCAFIWQKDGVKKLNLYLIINYFKGGKLRFKKIKPEAFEANRFYTVINKKSGEIVPMEVNFNFDDPNLIILPLAFGKRQGREFIWNDLLSLETGSLKLANGRVIEKTLYNRRTRQDEPALFVALTFERREVLDSSNIKRMNLIGVDRGENIPAVIALTDPEGCPLERFKDSLGNPTHILRIGECYKEKQRTIQAKKEVEQRRAGGYSRKYASKAKNLADDMVRNTARDLLYYAVTQDAMLIFENLSRGFGRQGKRTFMAERQYTRMEDWLTAKLAYEGLPSKTYLSKTLAQYTSKTCSNCGFTITSADYDRVLEKLKKTATGWMTTINGKELKVEGQITYYNRYKRQNVVKDLSVELDRLSEESVNNDISSWTKGRSGEALSLLKKRFSHRPVQEKFVCLNCGFETHADEQAALNIARSWLFLRSQEYKKYQTNKTTGNTDKRAFVETWQSFYRKKLKEVWKPAV

SEQ ID NO: 25266 - protein, 978 aa, synthetic construct
  REGION 1..978: note = engineered CasX variant
QEIKRINKIRRRLVKDSNTKKAGKTGPMKTLLVRVMTPDLRERLENLRKKPENIPQPISNTSRANLNKLLTDYTEMKKAILHVYWEEFQKDPVGLMSRVAQPASKKIDQNKLKPEMDEKGNLTTAGFACSQCGQPLFVYKLEQVSEKGKAYTNYFGRCNVAEHEKLILLAQLKPEKDSDEAVTYSLGKFGQRALDFYSIHVTKESTHPVKPLAQIAGNRYASGPVGKALSDACMGTIASFLSKYQDIIIEHQKVVKGNQKRLESLRELAGKENLEYPSVTLPPQPHTKEGVDAYNEVIARVRMWVNLNLWQKLKLSRDDAKPLLRLKGFPSFPLVERQANEVDWWDMVCNVKKLINEKKEDGKVFWQNLAGYKRQEALRPYLSSEEDRKKGKKFARYQLGDLLLHLEKKHGEDWGKVYDEAWERIDKKVEGLSKHIKLEEERRSEDAQSKAALTDWLRAKASFVIEGLKEADKDEFCRCELKLQKWYGDLRGKPFAIEAENSILDISGFSKQYNCAFIWQKDGVKKLNLYLIINYFKGGKLRFKKIKPEAFEANRFYTVINKKSGEIVPMEVNFNFDDPNLIILPLAFGKRQGREFIWNDLLSLETGSLKLANGRVIEKTLYNRRTRQDEPALFVALTFERREVLDSSNIKRMNLIGVDRGENIPAVIAFTDPEGCPLSRFKDSLGNPTHILRIGESYKEKQRTIQAKKEVEQRRAGGYSRKYASKAKNLADDMVRNTARDLLYYAVTQDAMLIFENLSRGFGRQGKRTFMAERQYTRMEDWLTAKLAYEGLPSKTYLSKTLAQYTSKTCSNCGFTITSADYDRVLEKLKKTATGWMTTINGKELKVEGQITYYNRYKRQNVVKDLSVELDRLSEESVNNDISSWTKGRSGEALSLLKKRFSHRPVQEKFVCLNCGFETHADEQAALNIARSWLFLRSQEYKKYQTNKTTGNTDKRAFVETWQSFYRKKLKEVWKPAV

SEQ ID NO: 25267 - protein, 978 aa, synthetic construct
  REGION 1..978: note = engineered CasX variant
QEIKRINKIRRRLVKDSNTKKAGKTGPMKTLLVRVMTPDLRERLENLRKKPENIPQPISNTSRANLNKLLTDYTEMKKAILHVYWEEFQKDPVGLMSRVAQPASKKIDQNKLKPEMDEKGNLTTAGFACSQCGQPLFVYKLEQVSEKGKAYTNYFGRCNVAEHEKLILLAQLKPEKDSDEAVTYSLGKFGQRALDFYSIHVTKESTHPVKPLAQIAGNRYASGPVGKALSDACMGTIASFLSKYQDIIIEHQKVVKGNQKRLESLRELAGKENLEYPSVTLPPQPHTKEGVDAYNEVIARVRMWVNLNLWQKLKLSRDDAKPLLRLKGFPSFPLVERQANEVDWWDMVCNVKKLINEKKEDGKVFWQNLAGYKRQEALRPYLSSEEDRKKGKKFARYQLGDLLLHLEKKHGEDWGKVYDEAWERIDKKVEGLSKHIKLEEERRSEDAQSKAALTDWLRAKASFVIEGLKEADKDEFCRCELKLQKWYGDLRGKPFAIEAENSILDISGFSKQYNCAFIWQKDGVKKLNLYLIINYFKGGKLRFKKIKPEAFEANRFYTVINKKSGEIVPMEVNFNFDDPNLIILPLAFGKRQGREFIWNDLLSLETGSLKLANGRVIEKTLYNRRTRQDEPALFVALTFERREVLDSSNIKRMNLIGVDRGENIPAVIAFTDPEGCPLSRFKDSLGNPTHILRIGESYKEKQRTIQAFKEVEQRRAGGYSRKYASKAKNLADDMVRNTARDLLYYAVTQDAMLIFENLSRGFGRQGKRTFMAERQYTRMEDWLTAKLAYEGLPSKTYLSKTLAQYTSKTCSNCGFTITSADYDRVLEKLKKTATGWMTTINGKELKVEGQITYYNRYKRQNVVKDLSVELDRLSEESVNNDISSWTKGRSGEALSLLKKRFSHRPVQEKFVCLNCGFETHADEQAALNIARSWLFLRSQEYKKYQTNKTTGNTDKRAFVETWQSFYRKKLKEVWKPAV

SEQ ID NO: 25268 - protein, 978 aa, synthetic construct
  REGION 1..978: note = engineered CasX variant
QEIKRINKIRRRLVKDSNTKKAGKTGPMKTLLVRVMTPDLRERLENLRKKPENIPQPISNTSRANLNKLLTDYTEMKKAILHVYWEEFQKDPVGLMSRVAQPASKKIDQNKLKPEMDEKGNLTTAGFACSQCGQPLFVYKLEQVSEKGKAYTNYFGRCNVAEHEKLILLAQLKPEKDSDEAVTYSLGKFGQRALDFYSIHVTKESTHPVKPLAQIAGNRYASGPVGKALSDACMGTIASFLSKYQDIIIEHQKVVKGNQKRLESLRELAGKENLEYPSVTLPPQPHTKEGVDAYNEVIARVRMWVNLNLWQKLKLSRDDAKPLLRLKGFPSFPLVERQANEVDWWDMVCNVKKLINEKKEDGKVFWQNLAGYKRQEALRPYLSSEEDRKKGKKFARYQLGDLLLHLEKKHGEDWGKVYDEAWERIDKKVEGLSKHIKLEEERRSEDAQSKAALTDWLRAKASFVIEGLKEADKDEFCRCELKLQKWYGDLRGKPFAIEAENSILDISGFSKQYNCAFIWQKDGVKKLNLYLIINYFKGGKLRFKKIKPEAFEANRFYTVINKKSGEIVPMEVNFNFDDPNLIILPLAFGKRQGREFIWNDLLSLETGSLKLANGRVIEKTLYNRRTRQDEPALFVALTFERREVLDSSNIKRMNLIGVDRGENIPAVIAFTDPEGCPLSKFKDSLGNPTHILRIGESYKEKQRTIQAKKEVEQRRAGGYSRKYASKAKNLADDMVRNTARDLLYYAVTQDAMLIFENLSRGFGRQGKRTFMAERQYTRMEDWLTAKLAYEGLPSKTYLSKTLAQYTSKTCSNCGFTITSADYDRVLEKLKKTATGWMTTINGKELKVEGQITYYNRYKRQNVVKDLSVELDRLSEESVNNDISSWTKGRSGEALSLLKKRFSHRPVQEKFVCLNCGFETHADEQAALNIARSWLFLRSQEYKKYQTNKTTGNTDKRAFVETWQSFYRKKLKEVWKPAV

SEQ ID NO: 25269 - protein, 978 aa, synthetic construct
  REGION 1..978: note = engineered CasX variant
QEIKRINKIRRRLVKDSNTKKAGKTGPMKTLLVRVMTPDLRERLENLRKKPENIPQPISNTSRANLNKLLTDYTEMKKAILHVYWEEFQKDPVGLMSRVAQPASKKIDQNKLKPEMDEKGNLTTAGFACSQCGQPLFVYKLEQVSEKGKAYTNYFGRCNVAEHEKLILLAQLKPEKDSDEAVTYSLGKFGQRALDFYSIHVTKESTHPVKPLAQIAGNRYASGPVGKALSDACMGTIASFLSKYQDIIIEHQKVVKGNQKRLESLRELAGKENLEYPSVTLPPQPHTKEGVDAYNEVIARVRMWVNLNLWQKLKLSRDDAKPLLRLKGFPSFPLVERQANEVDWWDMVCNVKKLINEKKEDGKVFWQNLAGYKRQEALRPYLSSEEDRKKGKKFARYQLGDLLLHLEKKHGEDWGKVYDEAWERIDKKVEGLSKHIKLEEERRSEDAQSKAALTDWLRAKASFVIEGLKEADKDEFCRCELKLQKWYGDLRGKPFAIEAENSILDISGFSKQYNCAFIWQKDGVKKLNLYLIINYFKGGKLRFKKIKPEAFEANRFYTVINKKSGEIVPMEVNFNFDDPNLIILPLAFGKRQGREFIWNDLLSLETGSLKLANGRVIEKTLYNRRTRQDEPALFVALTFERREVLDSSNIKQMNLIGVDRGENIPAVIALTDPNGCPLSRFKDSQGNPTHILRIGESYKEKQRTIQAKKEVEQRRAGGYSRKYASKAKNLADDMVRNTARDLLYYAVTQDAMLIFENLSRGFGRQGKRTFMAERQYTRMEDWLTAKLAYEGLPSKTYLSKTLAQYTSKTCSNCGFTITSADYDRVLEKLKKTATGWMTTINGKELKVEGQITYYNRYKRQNVVKDLSVELDRLSEESVNNDISSWTKGRSGEALSLLKKRFSHRPVQEKFVCLNCGFETHADEQAALNIARSWLFLRSQEYKKYQTNKTTGNTDKRAFVETWQSFYRKKLKEVWKPAV

SEQ ID NO: 25270 - protein, 978 aa, synthetic construct
  REGION 1..978: note = engineered CasX variant
QEIKRINKIRRRLVKDSNTKKAGKTGPMKTLLVRVMTPDLRERLENLRKKPENIPQPISNTSRANLNKLLTDYTEMKKAILHVYWEEFQKDPVGLMSRVAQPASKKIDQNKLKPEMDEKGNLTTAGFACSQCGQPLFVYKLEQVSEKGKAYTNYFGRCNVAEHEKLILLAQLKPEKDSDEAVTYSLGKFGQRALDFYSIHVTKESTHPVKPLAQIAGNRYASGPVGKALSDACMGTIASFLSKYQDIIIEHQKVVKGNQKRLESLRELAGKENLEYPSVTLPPQPHTKEGVDAYNEVIARVRMWVNLNLWQKLKLSRDDAKPLLRLKGFPSFPLVERQANEVDWWDMVCNVKKLINEKKEDGKVFWQNLAGYKRQEALRPYLSSEEDRKKGKKFARYQLGDLLLHLEKKHGEDWGKVYDEAWERIDKKVEGLSKHIKLEEERRSEDAQSKAALTDWLRAKASFVIEGLKEADKDEFCRCELKLQKWYGDLRGKPFAIEAENSILDISGFSKQYNCAFIWQKDGVKKLNLYLIINYFKGGKLRFKKIKPEAFEANRFYTVINKKSGEIVPMEVNFNFDDPNLIILPLAFGKRQGREFIWNDLLSLETGSLKLANGRVIEKTLYNRRTRQDEPALFVALTFERREVLDSSNIKQMNLIGVDRGENIPAVIALTDPNGCPLSRFKDSLGNPTHILRIGESYKEKQRTIQAKKEVEQRRAGGYSRKYASKAKNLADDMVRNTARDLLYYAVTQDAMLIFENLSRGFGRQGKRTFMAERQYTRMEDWLTAKLAYEGLPSKTYLSKTLAQYTSKTCSNCGFTITSADYDRVLEKLKKTATGWMTTINGKELKVEGQITYYNRYKRQNVVKDLSVELDRLSEESVNNDISSWTKGRSGEALSLLKKRFSHRPVQEKFVCLNCGFETHADEQAALNIARSWLFLRSQEYKKYQTNKTTGNTDKRAFVETWQSFYRKKLKEVWKPAV

SEQ ID NO: 25271 - protein, 978 aa, synthetic construct
  REGION 1..978: note = engineered CasX variant
QEIKRINKIRRRLVKDSNTKKAGKTGPMKTLLVRVMTPDLRERLENLRKKPENIPQPISNTSRANLNKLLTDYTEMKKAILHVYWEEFQKDPVGLMSRVAQPASKKIDQNKLKPEMDEKGNLTTAGFACSQCGQPLFVYKLEQVSEKGKAYTNYFGRCNVAEHEKLILLAQLKPEKDSDEAVTYSLGKFGQRALDFYSIHVTKESTHPVKPLAQIAGNRYASGPVGKALSDACMGTIASFLSKYQDIIIEHQKVVKGNQKRLESLRELAGKENLEYPSVTLPPQPHTKEGVDAYNEVIARVRMWVNLNLWQKLKLSRDDAKPLLRLKGFPSFPLVERQANEVDWWDMVCNVKKLINEKKEDGKVFWQNLAGYKRQEALRPYLSSEEDRKKGKKFARYQLGDLLLHLEKKHGEDWGKVYDEAWERIDKKVEGLSKHIKLEEERRSEDAQSKAALTDWLRAKASFVIEGLKEADKDEFCRCELKLQKWYGDLRGKPFAIEAENSILDISGFSKQYNCAFIWQKDGVKKLNLYLIINYFKGGKLRFKKIKPEAFEANRFYTVINKKSGEIVPMEVNFNFDDPNLIILPLAFGKRQGREFIWNDLLSLETGSLKLANGRVIEKTLYNRRTRQDEPALFVALTFERREVLDSSNIKQMNLIGVDRGENIPAVIALTDPEGCPLSRFKDSQGNPTHILRIGESYKEKQRTIQAKKEVEQRRAGGYSRKYASKAKNLADDMVRNTARDLLYYAVTQDAMLIFENLSRGFGRQGKRTFMAERQYTRMEDWLTAKLAYEGLPSKTYLSKTLAQYTSKTCSNCGFTITSADYDRVLEKLKKTATGWMTTINGKELKVEGQITYYNRYKRQNVVKDLSVELDRLSEESVNNDISSWTKGRSGEALSLLKKRFSHRPVQEKFVCLNCGFETHADEQAALNIARSWLFLRSQEYKKYQTNKTTGNTDKRAFVETWQSFYRKKLKEVWKPAV

SEQ ID NO: 25272 - protein, 978 aa, synthetic construct
  REGION 1..978: note = engineered CasX variant
QEIKRINKIRRRLVKDSNTKKAGKTGPMKTLLVRVMTPDLRERLENLRKKPENIPQPISNTSRANLNKLLTDYTEMKKAILHVYWEEFQKDPVGLMSRVAQPASKKIDQNKLKPEMDEKGNLTTAGFACSQCGQPLFVYKLEQVSEKGKAYTNYFGRCNVAEHEKLILLAQLKPEKDSDEAVTYSLGKFGQRALDFYSIHVTKESTHPVKPLAQIAGNRYASGPVGKALSDACMGTIASFLSKYQDIIIEHQKVVKGNQKRLESLRELAGKENLEYPSVTLPPQPHTKEGVDAYNEVIARVRMWVNLNLWQKLKLSRDDAKPLLRLKGFPSFPLVERQANEVDWWDMVCNVKKLINEKKEDGKVFWQNLAGYKRQEALRPYLSSEEDRKKGKKFARYQLGDLLLHLEKKHGEDWGKVYDEAWERIDKKVEGLSKHIKLEEERRSEDAQSKAALTDWLRAKASFVIEGLKEADKDEFCRCELKLQKWYGDLRGKPFAIEAENSILDISGFSKQYNCAFIWQKDGVKKLNLYLIINYFKGGKLRFKKIKPEAFEANRFYTVINKKSGEIVPMEVNFNFDDPNLIILPLAFGKRQGREFIWNDLLSLETGSLKLANGRVIEKTLYNRRTRQDEPALFVALTFERREVLDSSNIKQMNLIGVDRGENIPAVIALTDPEGCPLSRFKDSLGNPTHILRIGESYKEKQRTIQAKKEVEQRRAGGYSRKYASKAKNLADDMVRNTARDLLYYAVTQDAMLIFENLSRGFGRQGKRTFMAERQYTRMEDWLTAKLAYEGLPSKTYLSKTLAQYTSKTCSNCGFTITSADYDRVLEKLKKTATGWMTTINGKELKVEGQITYYNRYKRQNVVKDLSVELDRLSEESVNNDISSWTKGRSGEALSLLKKRFSHRPVQEKFVCLNCGFETHADEQAALNIARSWLFLRSQEYKKYQTNKTTGNTDKRAFVETWQSFYRKKLKEVWKPAV

SEQ ID NO: 25273 - protein, 978 aa, synthetic construct
  REGION 1..978: note = engineered CasX variant
QEIKRINKIRRRLVKDSNTKKAGKTGPMKTLLVRVMTPDLRERLENLRKKPENIPQPISNTSRANLNKLLTDYTEMKKAILHVYWEEFQKDPVGLMSRVAQPASKKIDQNKLKPEMDEKGNLTTAGFACSQCGQPLFVYKLEQVSEKGKAYTNYFGRCNVAEHEKLILLAQLKPEKDSDEAVTYSLGKFGQRALDFYSIHVTKESTHPVKPLAQIAGNRYASGPVGKALSDACMGTIASFLSKYQDIIIEHQKVVKGNQKRLESLRELAGKENLEYPSVTLPPQPHTKEGVDAYNEVIARVRMWVNLNLWQKLKLSRDDAKPLLRLKGFPSFPLVERQANEVDWWDMVCNVKKLINEKKEDGKVFWQNLAGYKRQEALRPYLSSEEDRKKGKKFARYQLGDLLLHLEKKHGEDWGKVYDEAWERIDKKVEGLSKHIKLEEERRSEDAQSKAALTDWLRAKASFVIEGLKEADKDEFCRCELKLQKWYGDLRGKPFAIEAENSILDISGFSKQYNCAFIWQKDGVKKLNLYLIINYFKGGKLRFKKIKPEAFEANRFYTVINKKSGEIVPMEVNFNFDDPNLIILPLAFGKRQGREFIWNDLLSLETGSLKLANGRVIEKTLYNRRTRQDEPALFVALTFERREVLDSSNIKQMNLIGVDRGENIPAVIALTDPEGCPLSRFKDSLGNPTHILRIGESFKEKQRTIQAKKEVEQRRAGGYSRKYASKAKNLADDMVRNTARDLLYYAVTQDAMLIFENLSRGFGRQGKRTFMAERQYTRMEDWLTAKLAYEGLPSKTYLSKTLAQYTSKTCSNCGFTITSADYDRVLEKLKKTATGWMTTINGKELKVEGQITYYNRYKRQNVVKDLSVELDRLSEESVNNDISSWTKGRSGEALSLLKKRFSHRPVQEKFVCLNCGFETHADEQAALNIARSWLFLRSQEYKKYQTNKTTGNTDKRAFVETWQSFYRKKLKEVWKPAV

SEQ ID NO: 25274 - protein, 978 aa, synthetic construct
  REGION 1..978: note = engineered CasX variant
QEIKRINKIRRRLVKDSNTKKAGKTGPMKTLLVRVMTPDLRERLENLRKKPENIPQPISNTSRANLNKLLTDYTEMKKAILHVYWEEFQKDPVGLMSRVAQPASKKIDQNKLKPEMDEKGNLTTAGFACSQCGQPLFVYKLEQVSEKGKAYTNYFGRCNVAEHEKLILLAQLKPEKDSDEAVTYSLGKFGQRALDFYSIHVTKESTHPVKPLAQIAGNRYASGPVGKALSDACMGTIASFLSKYQDIIIEHQKVVKGNQKRLESLRELAGKENLEYPSVTLPPQPHTKEGVDAYNEVIARVRMWVNLNLWQKLKLSRDDAKPLLRLKGFPSFPLVERQANEVDWWDMVCNVKKLINEKKEDGKVFWQNLAGYKRQEALRPYLSSEEDRKKGKKFARYQLGDLLLHLEKKHGEDWGKVYDEAWERIDKKVEGLSKHIKLEEERRSEDAQSKAALTDWLRAKASFVIEGLKEADKDEFCRCELKLQKWYGDLRGKPFAIEAENSILDISGFSKQYNCAFIWQKDGVKKLNLYLIINYFKGGKLRFKKIKPEAFEANRFYTVINKKSGEIVPMEVNFNFDDPNLIILPLAFGKRQGREFIWNDLLSLETGSLKLANGRVIEKTLYNRRTRQDEPALFVALTFERREVLDSSNIKQMNLIGVDRGENIPAVIALTDPEGCPLSRFKDSLGNPTHCLRIGESYKEKQRTIQAKKEVEQRRAGGYSRKYASKAKNLADDMVRNTARDLLYYAVTQDAMLIFENLSRGFGRQGKRTFMAERQYTRMEDWLTAKLAYEGLPSKTYLSKTLAQYTSKTCSNCGFTITSADYDRVLEKLKKTATGWMTTINGKELKVEGQITYYNRYKRQNVVKDLSVELDRLSEESVNNDISSWTKGRSGEALSLLKKRFSHRPVQEKFVCLNCGFETHADEQAALNIARSWLFLRSQEYKKYQTNKTTGNTDKRAFVETWQSFYRKKLKEVWKPAV

SEQ ID NO: 25275 - protein, 978 aa, synthetic construct
  REGION 1..978: note = engineered CasX variant
QEIKRINKIRRRLVKDSNTKKAGKTGPMKTLLVRVMTPDLRERLENLRKKPENIPQPISNTSRANLNKLLTDYTEMKKAILHVYWEEFQKDPVGLMSRVAQPASKKIDQNKLKPEMDEKGNLTTAGFACSQCGQPLFVYKLEQVSEKGKAYTNYFGRCNVAEHEKLILLAQLKPEKDSDEAVTYSLGKFGQRALDFYSIHVTKESTHPVKPLAQIAGNRYASGPVGKALSDACMGTIASFLSKYQDIIIEHQKVVKGNQKRLESLRELAGKENLEYPSVTLPPQPHTKEGVDAYNEVIARVRMWVNLNLWQKLKLSRDDAKPLLRLKGFPSFPLVERQANEVDWWDMVCNVKKLINEKKEDGKVFWQNLAGYKRQEALRPYLSSEEDRKKGKKFARYQLGDLLLHLEKKHGEDWGKVYDEAWERIDKKVEGLSKHIKLEEERRSEDAQSKAALTDWLRAKASFVIEGLKEADKDEFCRCELKLQKWYGDLRGKPFAIEAENSILDISGFSKQYNCAFIWQKDGVKKLNLYLIINYFKGGKLRFKKIKPEAFEANRFYTVINKKSGEIVPMEVNFNFDDPNLIILPLAFGKRQGREFIWNDLLSLETGSLKLANGRVIEKTLYNRRTRQDEPALFVALTFERREVLDSSNIKQMNLIGVDRGENIPAVIALTDPEGCPLSRFKDSLGNPTHCLRIGESFKEKQRTIQAKKEVEQRRAGGYSRKYASKAKNLADDMVRNTARDLLYYAVTQDAMLIFENLSRGFGRQGKRTFMAERQYTRMEDWLTAKLAYEGLPSKTYLSKTLAQYTSKTCSNCGFTITSADYDRVLEKLKKTATGWMTTINGKELKVEGQITYYNRYKRQNVVKDLSVELDRLSEESVNNDISSWTKGRSGEALSLLKKRFSHRPVQEKFVCLNCGFETHADEQAALNIARSWLFLRSQEYKKYQTNKTTGNTDKRAFVETWQSFYRKKLKEVWKPAV

SEQ ID NO: 25276 - protein, 978 aa, synthetic construct
  REGION 1..978: note = engineered CasX variant
QEIKRINKIRRRLVKDSNTKKAGKTGPMKTLLVRVMTPDLRERLENLRKKPENIPQPISNTSRANLNKLLTDYTEMKKAILHVYWEEFQKDPVGLMSRVAQPASKKIDQNKLKPEMDEKGNLTTAGFACSQCGQPLFVYKLEQVSEKGKAYTNYFGRCNVAEHEKLILLAQLKPEKDSDEAVTYSLGKFGQRALDFYSIHVTKESTHPVKPLAQIAGNRYASGPVGKALSDACMGTIASFLSKYQDIIIEHQKVVKGNQKRLESLRELAGKENLEYPSVTLPPQPHTKEGVDAYNEVIARVRMWVNLNLWQKLKLSRDDAKPLLRLKGFPSFPLVERQANEVDWWDMVCNVKKLINEKKEDGKVFWQNLAGYKRQEALRPYLSSEEDRKKGKKFARYQLGDLLLHLEKKHGEDWGKVYDEAWERIDKKVEGLSKHIKLEEERRSEDAQSKAALTDWLRAKASFVIEGLKEADKDEFCRCELKLQKWYGDLRGKPFAIEAENSILDISGFSKQYNCAFIWQKDGVKKLNLYLIINYFKGGKLRFKKIKPEAFEANRFYTVINKKSGEIVPMEVNFNFDDPNLIILPLAFGKRQGREFIWNDLLSLETGSLKLANGRVIEKTLYNRRTRQDEPALFVALTFERREVLDSSNIKQMNLIGVDRGENIPAVIALTDNEGCPLSRFKDSLGNPTHILRIGESYKEKQRTIQAKKEVEQRRAGGYSRKYASKAKNLADDMVRNTARDLLYYAVTQDAMLIFENLSRGFGRQGKRTFMAERQYTRMEDWLTAKLAYEGLPSKTYLSKTLAQYTSKTCSNCGFTITSADYDRVLEKLKKTATGWMTTINGKELKVEGQITYYNRYKRQNVVKDLSVELDRLSEESVNNDISSWTKGRSGEALSLLKKRFSHRPVQEKFVCLNCGFETHADEQAALNIARSWLFLRSQEYKKYQTNKTTGNTDKRAFVETWQSFYRKKLKEVWKPAV

SEQ ID NO: 25277 - protein, 978 aa, synthetic construct
  REGION 1..978: note = engineered CasX variant
QEIKRINKIRRRLVKDSNTKKAGKTGPMKTLLVRVMTPDLRERLENLRKKPENIPQPISNTSRANLNKLLTDYTEMKKAILHVYWEEFQKDPVGLMSRVAQPASKKIDQNKLKPEMDEKGNLTTAGFACSQCGQPLFVYKLEQVSEKGKAYTNYFGRCNVAEHEKLILLAQLKPEKDSDEAVTYSLGKFGQRALDFYSIHVTKESTHPVKPLAQIAGNRYASGPVGKALSDACMGTIASFLSKYQDIIIEHQKVVKGNQKRLESLRELAGKENLEYPSVTLPPQPHTKEGVDAYNEVIARVRMWVNLNLWQKLKLSRDDAKPLLRLKGFPSFPLVERQANEVDWWDMVCNVKKLINEKKEDGKVFWQNLAGYKRQEALRPYLSSEEDRKKGKKFARYQLGDLLLHLEKKHGEDWGKVYDEAWERIDKKVEGLSKHIKLEEERRSEDAQSKAALTDWLRAKASFVIEGLKEADKDEFCRCELKLQKWYGDLRGKPFAIEAENSILDISGFSKQYNCAFIWQKDGVKKLNLYLIINYFKGGKLRFKKIKPEAFEANRFYTVINKKSGEIVPMEVNFNFDDPNLIILPLAFGKRQGREFIWNDLLSLETGSLKLANGRVIEKTLYNRRTRQDEPALFVALTFERREVLDSSNIKPYNLIGVDRGENIPAVIALTDPEGCPLSRFLDSLGNPTHILRIGESYKEKQRTIQAKKEVEQRRAGGYSRKYASKAKNLADDMVRNTARDLLYYAVTQDAMLIFENLSRGFGRQGKRTFMAERQYTRMEDWLTAKLAYEGLPSKTYLSKTLAQYTSKTCSNCGFTITSADYDRVLEKLKKTATGWMTTINGKELKVEGQITYYNRYKRQNVVKDLSVELDRLSEESVNNDISSWTKGRSGEALSLLKKRFSHRPVQEKFVCLNCGFETHADEQAALNIARSWLFLRSQEYKKYQTNKTTGNTDKRAFVETWQSFYRKKLKEVWKPAV

SEQ ID NO: 25278 - protein, 978 aa, synthetic construct
  REGION 1..978: note = engineered CasX variant
QEIKRINKIRRRLVKDSNTKKAGKTGPMKTLLVRVMTPDLRERLENLRKKPENIPQPISNTSRANLNKLLTDYTEMKKAILHVYWEEFQKDPVGLMSRVAQPASKKIDQNKLKPEMDEKGNLTTAGFACSQCGQPLFVYKLEQVSEKGKAYTNYFGRCNVAEHEKLILLAQLKPEKDSDEAVTYSLGKFGQRALDFYSIHVTKESTHPVKPLAQIAGNRYASGPVGKALSDACMGTIASFLSKYQDIIIEHQKVVKGNQKRLESLRELAGKENLEYPSVTLPPQPHTKEGVDAYNEVIARVRMWVNLNLWQKLKLSRDDAKPLLRLKGFPSFPLVERQANEVDWWDMVCNVKKLINEKKEDGKVFWQNLAGYKRQEALRPYLSSEEDRKKGKKFARYQLGDLLLHLEKKHGEDWGKVYDEAWERIDKKVEGLSKHIKLEEERRSEDAQSKAALTDWLRAKASFVIEGLKEADKDEFCRCELKLQKWYGDLRGKPFAIEAENSILDISGFSKQYNCAFIWQKDGVKKLNLYLIINYFKGGKLRFKKIKPEAFEANRFYTVINKKSGEIVPMEVNFNFDDPNLIILPLAFGKRQGREFIWNDLLSLETGSLKLANGRVIEKTLYNRRTRQDEPALFVALTFERREVLDSSNIKPYNLIGVDRGENIPAVIALTDPEGCPLSRFKDSNGNPTHILRIGESYKEKQRTIQAKKEVEQRRAGGYSRKYASKAKNLADDMVRNTARDLLYYAVTQDAMLIFENLSRGFGRQGKRTFMAERQYTRMEDWLTAKLAYEGLPSKTYLSKTLAQYTSKTCSNCGFTITSADYDRVLEKLKKTATGWMTTINGKELKVEGQITYYNRYKRQNVVKDLSVELDRLSEESVNNDISSWTKGRSGEALSLLKKRFSHRPVQEKFVCLNCGFETHADEQAALNIARSWLFLRSQEYKKYQTNKTTGNTDKRAFVETWQSFYRKKLKEVWKPAV

SEQ ID NO: 25279 - protein, 978 aa, synthetic construct
  REGION 1..978: note = engineered CasX variant
QEIKRINKIRRRLVKDSNTKKAGKTGPMKTLLVRVMTPDLRERLENLRKKPENIPQPISNTSRANLNKLLTDYTEMKKAILHVYWEEFQKDPVGLMSRVAQPASKKIDQNKLKPEMDEKGNLTTAGFACSQCGQPLFVYKLEQVSEKGKAYTNYFGRCNVAEHEKLILLAQLKPEKDSDEAVTYSLGKFGQRALDFYSIHVTKESTHPVKPLAQIAGNRYASGPVGKALSDACMGTIASFLSKYQDIIIEHQKVVKGNQKRLESLRELAGKENLEYPSVTLPPQPHTKEGVDAYNEVIARVRMWVNLNLWQKLKLSRDDAKPLLRLKGFPSFPLVERQANEVDWWDMVCNVKKLINEKKEDGKVFWQNLAGYKRQEALRPYLSSEEDRKKGKKFARYQLGDLLLHLEKKHGEDWGKVYDEAWERIDKKVEGLSKHIKLEEERRSEDAQSKAALTDWLRAKASFVIEGLKEADKDEFCRCELKLQKWYGDLRGKPFAIEAENSILDISGFSKQYNCAFIWQKDGVKKLNLYLIINYFKGGKLRFKKIKPEAFEANRFYTVINKKSGEIVPMEVNFNFDDPNLIILPLAFGKRQGREFIWNDLLSLETGSLKLANGRVIEKTLYNRRTRQDEPALFVALTFERREVLDSSNIKPYNLIGVDRGENIPAVIALTDPEGCPLSRFKDSLGNPTHILRIGESYKEKQRTIQAKKEVEQRRAGGYSRKYASKAKNLADDMVRNTARDLLYYAVTQDAMLIFENLSRGFGRQGKRTFMAERQYTRMEDWLTAKLAYEGLPSKTYLSKTLAQYTSKTCSNCGFTITSADYDRVLEKLKKTATGWMTTINGKELKVEGQITYYNRYKRQNVVKDLSVELDRLSEESVNNDISSWTKGRSGEALSLLKKRFSHRPVQEKFVCLNCGFETHADEQAALNIARSWLFLRSQEYKKYQTNKTTGNTDKRAFVETWQSFYRKKLKEVWKPAV

SEQ ID NO: 25280 - protein, 978 aa, synthetic construct
  REGION 1..978: note = engineered CasX variant
QEIKRINKIRRRLVKDSNTKKAGKTGPMKTLLVRVMTPDLRERLENLRKKPENIPQPISNTSRANLNKLLTDYTEMKKAILHVYWEEFQKDPVGLMSRVAQPASKKIDQNKLKPEMDEKGNLTTAGFACSQCGQPLFVYKLEQVSEKGKAYTNYFGRCNVAEHEKLILLAQLKPEKDSDEAVTYSLGKFGQRALDFYSIHVTKESTHPVKPLAQIAGNRYASGPVGKALSDACMGTIASFLSKYQDIIIEHQKVVKGNQKRLESLRELAGKENLEYPSVTLPPQPHTKEGVDAYNEVIARVRMWVNLNLWQKLKLSRDDAKPLLRLKGFPSFPLVERQANEVDWWDMVCNVKKLINEKKEDGKVFWQNLAGYKRQEALRPYLSSEEDRKKGKKFARYQLGDLLLHLEKKHGEDWGKVYDEAWERIDKKVEGLSKHIKLEEERRSEDAQSKAALTDWLRAKASFVIEGLKEADKDEFCRCELKLQKWYGDLRGKPFAIEAENSILDISGFSKQYNCAFIWQKDGVKKLNLYLIINYFKGGKLRFKKIKPEAFEANRFYTVINKKSGEIVPMEVNFNFDDPNLIILPLAFGKRQGREFIWNDLLSLETGSLKLANGRVIEKTLYNRRTRQDEPALFVALTFERREVLDSSNIKPYNLIGVDRGENIPAVIALTDPEGCPESRFKDSNGNPTHILRIGESYKEKQRTIQAKKEVEQRRAGGYSRKYASKAKNLADDMVRNTARDLLYYAVTQDAMLIFENLSRGFGRQGKRTFMAERQYTRMEDWLTAKLAYEGLPSKTYLSKTLAQYTSKTCSNCGFTITSADYDRVLEKLKKTATGWMTTINGKELKVEGQITYYNRYKRQNVVKDLSVELDRLSEESVNNDISSWTKGRSGEALSLLKKRFSHRPVQEKFVCLNCGFETHADEQAALNIARSWLFLRSQEYKKYQTNKTTGNTDKRAFVETWQSFYRKKLKEVWKPAV

SEQ ID NO: 25281 - protein, 978 aa, synthetic construct
  REGION 1..978: note = engineered CasX variant
QEIKRINKIRRRLVKDSNTKKAGKTGPMKTLLVRVMTPDLRERLENLRKKPENIPQPISNTSRANLNKLLTDYTEMKKAILHVYWEEFQKDPVGLMSRVAQPASKKIDQNKLKPEMDEKGNLTTAGFACSQCGQPLFVYKLEQVSEKGKAYTNYFGRCNVAEHEKLILLAQLKPEKDSDEAVTYSLGKFGQRALDFYSIHVTKESTHPVKPLAQIAGNRYASGPVGKALSDACMGTIASFLSKYQDIIIEHQKVVKGNQKRLESLRELAGKENLEYPSVTLPPQPHTKEGVDAYNEVIARVRMWVNLNLWQKLKLSRDDAKPLLRLKGFPSFPLVERQANEVDWWDMVCNVKKLINEKKEDGKVFWQNLAGYKRQEALRPYLSSEEDRKKGKKFARYQLGDLLLHLEKKHGEDWGKVYDEAWERIDKKVEGLSKHIKLEEERRSEDAQSKAALTDWLRAKASFVIEGLKEADKDEFCRCELKLQKWYGDLRGKPFAIEAENSILDISGFSKQYNCAFIWQKDGVKKLNLYLIINYFKGGKLRFKKIKPEAFEANRFYTVINKKSGEIVPMEVNFNFDDPNLIILPLAFGKRQGREFIWNDLLSLETGSLKLANGRVIEKTLYNRRTRQDEPALFVALTFERREVLDSSNIKPWNLIGVDRGENIPAVIALTDPEGCPLSRFKDSLGNPTHILRIGESYKEKQRTIQAKKEVEQRRAGGYSRKYASKAKNLADDMVRNTARDLLYYAVTQDAMLIFENLSRGFGRQGKRTFMAERQYTRMEDWLTAKLAYEGLPSKTYLSKTLAQYTSKTCSNCGFTITSADYDRVLEKLKKTATGWMTTINGKELKVEGQITYYNRYKRQNVVKDLSVELDRLSEESVNNDISSWTKGRSGEALSLLKKRFSHRPVQEKFVCLNCGFETHADEQAALNIARSWLFLRSQEYKKYQTNKTTGNTDKRAFVETWQSFYRKKLKEVWKPAV

SEQ ID NO: 25282 - protein, 978 aa, synthetic construct
  REGION 1..978: note = engineered CasX variant
QEIKRINKIRRRLVKDSNTKKAGKTGPMKTLLVRVMTPDLRERLENLRKKPENIPQPISNTSRANLNKLLTDYTEMKKAILHVYWEEFQKDPVGLMSRVAQPASKKIDQNKLKPEMDEKGNLTTAGFACSQCGQPLFVYKLEQVSEKGKAYTNYFGRCNVAEHEKLILLAQLKPEKDSDEAVTYSLGKFGQRALDFYSIHVTKESTHPVKPLAQIAGNRYASGPVGKALSDACMGTIASFLSKYQDIIIEHQKVVKGNQKRLESLRELAGKENLEYPSVTLPPQPHTKEGVDAYNEVIARVRMWVNLNLWQKLKLSRDDAKPLLRLKGFPSFPLVERQANEVDWWDMVCNVKKLINEKKEDGKVFWQNLAGYKRQEALRPYLSSEEDRKKGKKFARYQLGDLLLHLEKKHGEDWGKVYDEAWERIDKKVEGLSKHIKLEEERRSEDAQSKAALTDWLRAKASFVIEGLKEADKDEFCRCELKLQKWYGDLRGKPFAIEAENSILDISGFSKQYNCAFIWQKDGVKKLNLYLIINYFKGGKLRFKKIKPEAFEANRFYTVINKKSGEIVPMEVNFNFDDPNLIILPLAFGKRQGREFIWNDLLSLETGSLKLANGRVIEKTLYNRRTRQDEPALFVALTFERREVLDSSNIKPWNLIGVDRGENIPAVIALTDPEGCPLSRFKDSLGNPTHILRIGESYKEKQRTIQAKKEVEQRKAGGYSRKYASKAKNLADDMVRNTARDLLYYAVTQDAMLIFENLSRGFGRQGKRTFMAERQYTRMEDWLTAKLAYEGLPSKTYLSKTLAQYTSKTCSNCGFTITSADYDRVLEKLKKTATGWMTTINGKELKVEGQITYYNRYKRQNVVKDLSVELDRLSEESVNNDISSWTKGRSGEALSLLKKRFSHRPVQEKFVCLNCGFETHADEQAALNIARSWLFLRSQEYKKYQTNKTTGNTDKRAFVETWQSFYRKKLKEVWKPAV

SEQ ID NO: 25283 - protein, 978 aa, synthetic construct
  REGION 1..978: note = engineered CasX variant
QEIKRINKIRRRLVKDSNTKKAGKTGPMKTLLVRVMTPDLRERLENLRKKPENIPQPISNTSRANLNKLLTDYTEMKKAILHVYWEEFQKDPVGLMSRVAQPASKKIDQNKLKPEMDEKGNLTTAGFACSQCGQPLFVYKLEQVSEKGKAYTNYFGRCNVAEHEKLILLAQLKPEKDSDEAVTYSLGKFGQRALDFYSIHVTKESTHPVKPLAQIAGNRYASGPVGKALSDACMGTIASFLSKYQDIIIEHQKVVKGNQKRLESLRELAGKENLEYPSVTLPPQPHTKEGVDAYNEVIARVRMWVNLNLWQKLKLSRDDAKPLLRLKGFPSFPLVERQANEVDWWDMVCNVKKLINEKKEDGKVFWQNLAGYKRQEALRPYLSSEEDRKKGKKFARYQLGDLLLHLEKKHGEDWGKVYDEAWERIDKKVEGLSKHIKLEEERRSEDAQSKAALTDWLRAKASFVIEGLKEADKDEFCRCELKLQKWYGDLRGKPFAIEAENSILDISGFSKQYNCAFIWQKDGVKKLNLYLIINYFKGGKLRFKKIKPEAFEANRFYTVINKKSGEIVPMEVNFNFDDPNLIILPLAFGKRQGREFIWNDLLSLETGSLKLANGRVIEKTLYNRRTRQDEPALFVALTFERREVLDSSNIKPVNLIGVDRGENIPSVIALTDPEGCPLSRFKDSLGNPTHILRIGESYKEKQRTIQAKKEVEQRRAGGYSRKYASKAKNLADDMVRNTARDLLYYAVTQDAMLIFENLSRGFGRQGKRTFMAERQYTRMEDWLTAKLAYEGLPSKTYLSKTLAQYTSKTCSNCGFTITSADYDRVLEKLKKTATGWMTTINGKELKVEGQITYYNRYKRQNVVKDLSVELDRLSEESVNNDISSWTKGRSGEALSLLKKRFSHRPVQEKFVCLNCGFETHADEQAALNIARSWLFLRSQEYKKYQTNKTTGNTDKRAFVETWQSFYRKKLKEVWKPAV

SEQ ID NO: 25284 - protein, 978 aa, synthetic construct
  REGION 1..978: note = engineered CasX variant
QEIKRINKIRRRLVKDSNTKKAGKTGPMKTLLVRVMTPDLRERLENLRKKPENIPQPISNTSRANLNKLLTDYTEMKKAILHVYWEEFQKDPVGLMSRVAQPASKKIDQNKLKPEMDEKGNLTTAGFACSQCGQPLFVYKLEQVSEKGKAYTNYFGRCNVAEHEKLILLAQLKPEKDSDEAVTYSLGKFGQRALDFYSIHVTKESTHPVKPLAQIAGNRYASGPVGKALSDACMGTIASFLSKYQDIIIEHQKVVKGNQKRLESLRELAGKENLEYPSVTLPPQPHTKEGVDAYNEVIARVRMWVNLNLWQKLKLSRDDAKPLLRLKGFPSFPLVERQANEVDWWDMVCNVKKLINEKKEDGKVFWQNLAGYKRQEALRPYLSSEEDRKKGKKFARYQLGDLLLHLEKKHGEDWGKVYDEAWERIDKKVEGLSKHIKLEEERRSEDAQSKAALTDWLRAKASFVIEGLKEADKDEFCRCELKLQKWYGDLRGKPFAIEAENSILDISGFSKQYNCAFIWQKDGVKKLNLYLIINYFKGGKLRFKKIKPEAFEANRFYTVINKKSGEIVPMEVNFNFDDPNLIILPLAFGKRQGREFIWNDLLSLETGSLKLANGRVIEKTLYNRRTRQDEPALFVALTFERREVLDSSNIKPVNLIGVDRGENIPAVIALTDPEGRPLSRFKDSLGNPTHILRIGESYKEKQRTIQAKKEVEQRRAGGYSRKYASKAKNLADDMVRNTARDLLYYAVTQDAMLIFENLSRGFGRQGKRTFMAERQYTRMEDWLTAKLAYEGLPSKTYLSKTLAQYTSKTCSNCGFTITSADYDRVLEKLKKTATGWMTTINGKELKVEGQITYYNRYKRQNVVKDLSVELDRLSEESVNNDISSWTKGRSGEALSLLKKRFSHRPVQEKFVCLNCGFETHADEQAALNIARSWLFLRSQEYKKYQTNKTTGNTDKRAFVETWQSFYRKKLKEVWKPAV

SEQ ID NO: 25285 - protein, 978 aa, synthetic construct
  REGION 1..978: note = engineered CasX variant
QEIKRINKIRRRLVKDSNTKKAGKTGPMKTLLVRVMTPDLRERLENLRKKPENIPQPISNTSRANLNKLLTDYTEMKKAILHVYWEEFQKDPVGLMSRVAQPASKKIDQNKLKPEMDEKGNLTTAGFACSQCGQPLFVYKLEQVSEKGKAYTNYFGRCNVAEHEKLILLAQLKPEKDSDEAVTYSLGKFGQRALDFYSIHVTKESTHPVKPLAQIAGNRYASGPVGKALSDACMGTIASFLSKYQDIIIEHQKVVKGNQKRLESLRELAGKENLEYPSVTLPPQPHTKEGVDAYNEVIARVRMWVNLNLWQKLKLSRDDAKPLLRLKGFPSFPLVERQANEVDWWDMVCNVKKLINEKKEDGKVFWQNLAGYKRQEALRPYLSSEEDRKKGKKFARYQLGDLLLHLEKKHGEDWGKVYDEAWERIDKKVEGLSKHIKLEEERRSEDAQSKAALTDWLRAKASFVIEGLKEADKDEFCRCELKLQKWYGDLRGKPFAIEAENSILDISGFSKQYNCAFIWQKDGVKKLNLYLIINYFKGGKLRFKKIKPEAFEANRFYTVINKKSGEIVPMEVNFNFDDPNLIILPLAFGKRQGREFIWNDLLSLETGSLKLANGRVIEKTLYNRRTRQDEPALFVALTFERREVLDSSNIKPVNLIGVDRGENIPAVIALTDPEGRPLSRFKDSLGNPTHILRIDESYKEKQRTIQAKKEVEQRRAGGYSRKYASKAKNLADDMVRNTARDLLYYAVTQDAMLIFENLSRGFGRQGKRTFMAERQYTRMEDWLTAKLAYEGLPSKTYLSKTLAQYTSKTCSNCGFTITSADYDRVLEKLKKTATGWMTTINGKELKVEGQITYYNRYKRQNVVKDLSVELDRLSEESVNNDISSWTKGRSGEALSLLKKRFSHRPVQEKFVCLNCGFETHADEQAALNIARSWLFLRSQEYKKYQTNKTTGNTDKRAFVETWQSFYRKKLKEVWKPAV

SEQ ID NO: 25286 - protein, 978 aa, synthetic construct
  REGION 1..978: note = engineered CasX variant
QEIKRINKIRRRLVKDSNTKKAGKTGPMKTLLVRVMTPDLRERLENLRKKPENIPQPISNTSRANLNKLLTDYTEMKKAILHVYWEEFQKDPVGLMSRVAQPASKKIDQNKLKPEMDEKGNLTTAGFACSQCGQPLFVYKLEQVSEKGKAYTNYFGRCNVAEHEKLILLAQLKPEKDSDEAVTYSLGKFGQRALDFYSIHVTKESTHPVKPLAQIAGNRYASGPVGKALSDACMGTIASFLSKYQDIIIEHQKVVKGNQKRLESLRELAGKENLEYPSVTLPPQPHTKEGVDAYNEVIARVRMWVNLNLWQKLKLSRDDAKPLLRLKGFPSFPLVERQANEVDWWDMVCNVKKLINEKKEDGKVFWQNLAGYKRQEALRPYLSSEEDRKKGKKFARYQLGDLLLHLEKKHGEDWGKVYDEAWERIDKKVEGLSKHIKLEEERRSEDAQSKAALTDWLRAKASFVIEGLKEADKDEFCRCELKLQKWYGDLRGKPFAIEAENSILDISGFSKQYNCAFIWQKDGVKKLNLYLIINYFKGGKLRFKKIKPEAFEANRFYTVINKKSGEIVPMEVNFNFDDPNLIILPLAFGKRQGREFIWNDLLSLETGSLKLANGRVIEKTLYNRRTRQDEPALFVALTFERREVLDSSNIKPVNLIGVDRGENIPAVIALTDPEGCPLSRFKDSLGNYTHILRIGESYKEKQRTIQAKKEVEQRRAGGYSRKYASKAKNLADDMVRNTARDLLYYAVTQDAMLIFENLSRGFGRQGKRTFMAERQYTRMEDWLTAKLAYEGLPSKTYLSKTLAQYTSKTCSNCGFTITSADYDRVLEKLKKTATGWMTTINGKELKVEGQITYYNRYKRQNVVKDLSVELDRLSEESVNNDISSWTKGRSGEALSLLKKRFSHRPVQEKFVCLNCGFETHADEQAALNIARSWLFLRSQEYKKYQTNKTTGNTDKRAFVETWQSFYRKKLKEVWKPAV

SEQ ID NO: 25287 - protein, 978 aa, synthetic construct
  REGION 1..978: note = engineered CasX variant
QEIKRINKIRRRLVKDSNTKKAGKTGPMKTLLVRVMTPDLRERLENLRKKPENIPQPISNTSRANLNKLLTDYTEMKKAILHVYWEEFQKDPVGLMSRVAQPASKKIDQNKLKPEMDEKGNLTTAGFACSQCGQPLFVYKLEQVSEKGKAYTNYFGRCNVAEHEKLILLAQLKPEKDSDEAVTYSLGKFGQRALDFYSIHVTKESTHPVKPLAQIAGNRYASGPVGKALSDACMGTIASFLSKYQDIIIEHQKVVKGNQKRLESLRELAGKENLEYPSVTLPPQPHTKEGVDAYNEVIARVRMWVNLNLWQKLKLSRDDAKPLLRLKGFPSFPLVERQANEVDWWDMVCNVKKLINEKKEDGKVFWQNLAGYKRQEALRPYLSSEEDRKKGKKFARYQLGDLLLHLEKKHGEDWGKVYDEAWERIDKKVEGLSKHIKLEEERRSEDAQSKAALTDWLRAKASFVIEGLKEADKDEFCRCELKLQKWYGDLRGKPFAIEAENSILDISGFSKQYNCAFIWQKDGVKKLNLYLIINYFKGGKLRFKKIKPEAFEANRFYTVINKKSGEIVPMEVNFNFDDPNLIILPLAFGKRQGREFIWNDLLSLETGSLKLANGRVIEKTLYNRRTRQDEPALFVALTFERREVLDSSNIKPVNLIGVDRGENIPAVIALTDPEGCPLSRFKDSLGNYTHILRIGESYKEKQRTIQAKKEVEQRRAFGYSRKYASKAKNLADDMVRNTARDLLYYAVTQDAMLIFENLSRGFGRQGKRTFMAERQYTRMEDWLTAKLAYEGLPSKTYLSKTLAQYTSKTCSNCGFTITSADYDRVLEKLKKTATGWMTTINGKELKVEGQITYYNRYKRQNVVKDLSVELDRLSEESVNNDISSWTKGRSGEALSLLKKRFSHRPVQEKFVCLNCGFETHADEQAALNIARSWLFLRSQEYKKYQTNKTTGNTDKRAFVETWQSFYRKKLKEVWKPAV

SEQ ID NO: 25288 - protein, 978 aa, synthetic construct
  REGION 1..978: note = engineered CasX variant
QEIKRINKIRRRLVKDSNTKKAGKTGPMKTLLVRVMTPDLRERLENLRKKPENIPQPISNTSRANLNKLLTDYTEMKKAILHVYWEEFQKDPVGLMSRVAQPASKKIDQNKLKPEMDEKGNLTTAGFACSQCGQPLFVYKLEQVSEKGKAYTNYFGRCNVAEHEKLILLAQLKPEKDSDEAVTYSLGKFGQRALDFYSIHVTKESTHPVKPLAQIAGNRYASGPVGKALSDACMGTIASFLSKYQDIIIEHQKVVKGNQKRLESLRELAGKENLEYPSVTLPPQPHTKEGVDAYNEVIARVRMWVNLNLWQKLKLSRDDAKPLLRLKGFPSFPLVERQANEVDWWDMVCNVKKLINEKKEDGKVFWQNLAGYKRQEALRPYLSSEEDRKKGKKFARYQLGDLLLHLEKKHGEDWGKVYDEAWERIDKKVEGLSKHIKLEEERRSEDAQSKAALTDWLRAKASFVIEGLKEADKDEFCRCELKLQKWYGDLRGKPFAIEAENSILDISGFSKQYNCAFIWQKDGVKKLNLYLIINYFKGGKLRFKKIKPEAFEANRFYTVINKKSGEIVPMEVNFNFDDPNLIILPLAFGKRQGREFIWNDLLSLETGSLKLANGRVIEKTLYNRRTRQDEPALFVALTFERREVLDSSNIKPVNLIGVDRGENIPAVIALTDPEGCPLSRFKDSLGNPTHILRIGESYKHKQRTIQAKKEVEQRRAGGYSRKYASKAKNLADDMVRNTARDLLYYAVTQDAMLIFENLSRGFGRQGKRTFMAERQYTRMEDWLTAKLAYEGLPSKTYLSKTLAQYTSKTCSNCGFTITSADYDRVLEKLKKTATGWMTTINGKELKVEGQITYYNRYKRQNVVKDLSVELDRLSEESVNNDISSWTKGRSGEALSLLKKRFSHRPVQEKFVCLNCGFETHADEQAALNIARSWLFLRSQEYKKYQTNKTTGNTDKRAFVETWQSFYRKKLKEVWKPAV

SEQ ID NO: 25289 - protein, 978 aa, synthetic construct
  REGION 1..978: note = engineered CasX variant
QEIKRINKIRRRLVKDSNTKKAGKTGPMKTLLVRVMTPDLRERLENLRKKPENIPQPISNTSRANLNKLLTDYTEMKKAILHVYWEEFQKDPVGLMSRVAQPASKKIDQNKLKPEMDEKGNLTTAGFACSQCGQPLFVYKLEQVSEKGKAYTNYFGRCNVAEHEKLILLAQLKPEKDSDEAVTYSLGKFGQRALDFYSIHVTKESTHPVKPLAQIAGNRYASGPVGKALSDACMGTIASFLSKYQDIIIEHQKVVKGNQKRLESLRELAGKENLEYPSVTLPPQPHTKEGVDAYNEVIARVRMWVNLNLWQKLKLSRDDAKPLLRLKGFPSFPLVERQANEVDWWDMVCNVKKLINEKKEDGKVFWQNLAGYKRQEALRPYLSSEEDRKKGKKFARYQLGDLLLHLEKKHGEDWGKVYDEAWERIDKKVEGLSKHIKLEEERRSEDAQSKAALTDWLRAKASFVIEGLKEADKDEFCRCELKLQKWYGDLRGKPFAIEAENSILDISGFSKQYNCAFIWQKDGVKKLNLYLIINYFKGGKLRFKKIKPEAFEANRFYTVINKKSGEIVPMEVNFNFDDPNLIILPLAFGKRQGREFIWNDLLSLETGSLKLANGRVIEKTLYNRRTRQDEPALFVALTFERREVLDSSNIKPVNLIGVDRGENIPAVIALTDPEGCPLSRFKDSLGNPTHILRIGESYKEKTRTIQAKKEVEQRRAGGYSRKYASKAKNLADDMVRNTARDLLYYAVTQDAMLIFENLSRGFGRQGKRTFMAERQYTRMEDWLTAKLAYEGLPSKTYLSKTLAQYTSKTCSNCGFTITSADYDRVLEKLKKTATGWMTTINGKELKVEGQITYYNRYKRQNVVKDLSVELDRLSEESVNNDISSWTKGRSGEALSLLKKRFSHRPVQEKFVCLNCGFETHADEQAALNIARSWLFLRSQEYKKYQTNKTTGNTDKRAFVETWQSFYRKKLKEVWKPAV

SEQ ID NO: 25290 - protein, 978 aa, synthetic construct
  REGION 1..978: note = engineered CasX variant
QEIKRINKIRRRLVKDSNTKKAGKTGPMKTLLVRVMTPDLRERLENLRKKPENIPQPISNTSRANLNKLLTDYTEMKKAILHVYWEEFQKDPVGLMSRVAQPASKKIDQNKLKPEMDEKGNLTTAGFACSQCGQPLFVYKLEQVSEKGKAYTNYFGRCNVAEHEKLILLAQLKPEKDSDEAVTYSLGKFGQRALDFYSIHVTKESTHPVKPLAQIAGNRYASGPVGKALSDACMGTIASFLSKYQDIIIEHQKVVKGNQKRLESLRELAGKENLEYPSVTLPPQPHTKEGVDAYNEVIARVRMWVNLNLWQKLKLSRDDAKPLLRLKGFPSFPLVERQANEVDWWDMVCNVKKLINEKKEDGKVFWQNLAGYKRQEALRPYLSSEEDRKKGKKFARYQLGDLLLHLEKKHGEDWGKVYDEAWERIDKKVEGLSKHIKLEEERRSEDAQSKAALTDWLRAKASFVIEGLKEADKDEFCRCELKLQKWYGDLRGKPFAIEAENSILDISGFSKQYNCAFIWQKDGVKKLNLYLIINYFKGGKLRFKKIKPEAFEANRFYTVINKKSGEIVPMEVNFNFDDPNLIILPLAFGKRQGREFIWNDLLSLETGSLKLANGRVIEKTLYNRRTRQDEPALFVALTFERREVLDSSNIKPVNLIGVDRGENIPAVIALTDPEGCPLSRFKDSLGNPTHILRIGESYKEKQRTIQAKKEVEQRRMGGYSRKYASKAKNLADDMVRNTARDLLYYAVTQDAMLIFENLSRGFGRQGKRTFMAERQYTRMEDWLTAKLAYEGLPSKTYLSKTLAQYTSKTCSNCGFTITSADYDRVLEKLKKTATGWMTTINGKELKVEGQITYYNRYKRQNVVKDLSVELDRLSEESVNNDISSWTKGRSGEALSLLKKRFSHRPVQEKFVCLNCGFETHADEQAALNIARSWLFLRSQEYKKYQTNKTTGNTDKRAFVETWQSFYRKKLKEVWKPAV

SEQ ID NO: 25291 - protein, 978 aa, synthetic construct
  REGION 1..978: note = engineered CasX variant
QEIKRINKIRRRLVKDSNTKKAGKTGPMKTLLVRVMTPDLRERLENLRKKPENIPQPISNTSRANLNKLLTDYTEMKKAILHVYWEEFQKDPVGLMSRVAQPASKKIDQNKLKPEMDEKGNLTTAGFACSQCGQPLFVYKLEQVSEKGKAYTNYFGRCNVAEHEKLILLAQLKPEKDSDEAVTYSLGKFGQRALDFYSIHVTKESTHPVKPLAQIAGNRYASGPVGKALSDACMGTIASFLSKYQDIIIEHQKVVKGNQKRLESLRELAGKENLEYPSVTLPPQPHTKEGVDAYNEVIARVRMWVNLNLWQKLKLSRDDAKPLLRLKGFPSFPLVERQANEVDWWDMVCNVKKLINEKKEDGKVFWQNLAGYKRQEALRPYLSSEEDRKKGKKFARYQLGDLLLHLEKKHGEDWGKVYDEAWERIDKKVEGLSKHIKLEEERRSEDAQSKAALTDWLRAKASFVIEGLKEADKDEFCRCELKLQKWYGDLRGKPFAIEAENSILDISGFSKQYNCAFIWQKDGVKKLNLYLIINYFKGGKLRFKKIKPEAFEANRFYTVINKKSGEIVPMEVNFNFDDPNLIILPLAFGKRQGREFIWNDLLSLETGSLKLANGRVIEKTLYNRRTRQDEPALFVALTFERREVLDSSNIKPVNLIGVDRGENIPAVIALTDPEGCPLSRFKDSLGNPTHILRIGESYKEKQRTIQAKKEVEQRRAGGYSRKYASKAKNLADDMVRNTARDLLYYAVTQDAMLIFENLSRGFGRQGKRTFMAERQYTRMEDWLTAKLAYEGLPSKTYLSKTLAQYTSKTCSNCGFTITSADYDRVLEKLKKTATGWMTTINGKELKVEGQITYYNRYKRQNVVKDLSVELDRLSEESVNNDISSWTKGRSGEALSLLKKRFSHRPVQEKFVCLNCGFETHADEQAALNIARSWLFLRSQEYKKYQTNKTTGNTDKRAFVETWQSFYRKKLKEVWKPAV

SEQ ID NO: 25292 - protein, 978 aa, synthetic construct
  REGION 1..978: note = engineered CasX variant
QEIKRINKIRRRLVKDSNTKKAGKTGPMKTLLVRVMTPDLRERLENLRKKPENIPQPISNTSRANLNKLLTDYTEMKKAILHVYWEEFQKDPVGLMSRVAQPASKKIDQNKLKPEMDEKGNLTTAGFACSQCGQPLFVYKLEQVSEKGKAYTNYFGRCNVAEHEKLILLAQLKPEKDSDEAVTYSLGKFGQRALDFYSIHVTKESTHPVKPLAQIAGNRYASGPVGKALSDACMGTIASFLSKYQDIIIEHQKVVKGNQKRLESLRELAGKENLEYPSVTLPPQPHTKEGVDAYNEVIARVRMWVNLNLWQKLKLSRDDAKPLLRLKGFPSFPLVERQANEVDWWDMVCNVKKLINEKKEDGKVFWQNLAGYKRQEALRPYLSSEEDRKKGKKFARYQLGDLLLHLEKKHGEDWGKVYDEAWERIDKKVEGLSKHIKLEEERRSEDAQSKAALTDWLRAKASFVIEGLKEADKDEFCRCELKLQKWYGDLRGKPFAIEAENSILDISGFSKQYNCAFIWQKDGVKKLNLYLIINYFKGGKLRFKKIKPEAFEANRFYTVINKKSGEIVPMEVNFNFDDPNLIILPLAFGKRQGREFIWNDLLSLETGSLKLANGRVIEKTLYNRRTRQDEPALFVALTFERREVLDSSNIKPVNLIGVDRGENIPAVIALTDPEGCPLSRFKDSLGNPTHILRIGESYKEKQRTIQAKKEVEQRRAFGYSRKYASKAKNLADDMVRNTARDLLYYAVTQDAMLIFENLSRGFGRQGKRTFMAERQYTRMEDWLTAKLAYEGLPSKTYLSKTLAQYTSKTCSNCGFTITSADYDRVLEKLKKTATGWMTTINGKELKVEGQITYYNRYKRQNVVKDLSVELDRLSEESVNNDISSWTKGRSGEALSLLKKRFSHRPVQEKFVCLNCGFETHADEQAALNIARSWLFLRSQEYKKYQTNKTTGNTDKRAFVETWQSFYRKKLKEVWKPAV

SEQ ID NO: 25293 - protein, 978 aa, synthetic construct
  REGION 1..978: note = engineered CasX variant
QEIKRINKIRRRLVKDSNTKKAGKTGPMKTLLVRVMTPDLRERLENLRKKPENIPQPISNTSRANLNKLLTDYTEMKKAILHVYWEEFQKDPVGLMSRVAQPASKKIDQNKLKPEMDEKGNLTTAGFACSQCGQPLFVYKLEQVSEKGKAYTNYFGRCNVAEHEKLILLAQLKPEKDSDEAVTYSLGKFGQRALDFYSIHVTKESTHPVKPLAQIAGNRYASGPVGKALSDACMGTIASFLSKYQDIIIEHQKVVKGNQKRLESLRELAGKENLEYPSVTLPPQPHTKEGVDAYNEVIARVRMWVNLNLWQKLKLSRDDAKPLLRLKGFPSFPLVERQANEVDWWDMVCNVKKLINEKKEDGKVFWQNLAGYKRQEALRPYLSSEEDRKKGKKFARYQLGDLLLHLEKKHGEDWGKVYDEAWERIDKKVEGLSKHIKLEEERRSEDAQSKAALTDWLRAKASFVIEGLKEADKDEFCRCELKLQKWYGDLRGKPFAIEAENSILDISGFSKQYNCAFIWQKDGVKKLNLYLIINYFKGGKLRFKKIKPEAFEANRFYTVINKKSGEIVPMEVNFNFDDPNLIILPLAFGKRQGREFIWNDLLSLETGSLKLANGRVIEKTLYNRRTRQDEPALFVALTFERREVLDSSNIKPVNLIGVDRGENIPAVIALTDPEGCPLSRFKDSLGNPTHILRIGESYKEKQRTIQAKKEVEQRIAGGYSRKYASKAKNLADDMVRNTARDLLYYAVTQDAMLIFENLSRGFGRQGKRTFMAERQYTRMEDWLTAKLAYEGLPSKTYLSKTLAQYTSKTCSNCGFTITSADYDRVLEKLKKTATGWMTTINGKELKVEGQITYYNRYKRQNVVKDLSVELDRLSEESVNNDISSWTKGRSGEALSLLKKRFSHRPVQEKFVCLNCGFETHADEQAALNIARSWLFLRSQEYKKYQTNKTTGNTDKRAFVETWQSFYRKKLKEVWKPAV

SEQ ID NO: 25294 - protein, 978 aa, synthetic construct
  REGION 1..978: note = engineered CasX variant
QEIKRINKIRRRLVKDSNTKKAGKTGPMKTLLVRVMTPDLRERLENLRKKPENIPQPISNTSRANLNKLLTDYTEMKKAILHVYWEEFQKDPVGLMSRVAQPASKKIDQNKLKPEMDEKGNLTTAGFACSQCGQPLFVYKLEQVSEKGKAYTNYFGRCNVAEHEKLILLAQLKPEKDSDEAVTYSLGKFGQRALDFYSIHVTKESTHPVKPLAQIAGNRYASGPVGKALSDACMGTIASFLSKYQDIIIEHQKVVKGNQKRLESLRELAGKENLEYPSVTLPPQPHTKEGVDAYNEVIARVRMWVNLNLWQKLKLSRDDAKPLLRLKGFPSFPLVERQANEVDWWDMVCNVKKLINEKKEDGKVFWQNLAGYKRQEALRPYLSSEEDRKKGKKFARYQLGDLLLHLEKKHGEDWGKVYDEAWERIDKKVEGLSKHIKLEEERRSEDAQSKAALTDWLRAKASFVIEGLKEADKDEFCRCELKLQKWYGDLRGKPFAIEAENSILDISGFSKQYNCAFIWQKDGVKKLNLYLIINYFKGGKLRFKKIKPEAFEANRFYTVINKKSGEIVPMEVNFNFDDPNLIILPLAFGKRQGREFIWNDLLSLETGSLKLANGRVIEKTLYNRRTRQDEPALFVALTFERREVLDSSNIKPVNLIGVDRGENIPAVIALTDPEGCPLSRFKDSLGNPTHILRIGESYKEKQRTIQAKKCVEQRRAGGYSRKYASKAKNLADDMVRNTARDLLYYAVTQDAMLIFENLSRGFGRQGKRTFMAERQYTRMEDWLTAKLAYEGLPSKTYLSKTLAQYTSKTCSNCGFTITSADYDRVLEKLKKTATGWMTTINGKELKVEGQITYYNRYKRQNVVKDLSVELDRLSEESVNNDISSWTKGRSGEALSLLKKRFSHRPVQEKFVCLNCGFETHADEQAALNIARSWLFLRSQEYKKYQTNKTTGNTDKRAFVETWQSFYRKKLKEVWKPAV

SEQ ID NO: 25295 - protein, 978 aa, synthetic construct
  REGION 1..978: note = engineered CasX variant
QEIKRINKIRRRLVKDSNTKKAGKTGPMKTLLVRVMTPDLRERLENLRKKPENIPQPISNTSRANLNKLLTDYTEMKKAILHVYWEEFQKDPVGLMSRVAQPASKKIDQNKLKPEMDEKGNLTTAGFACSQCGQPLFVYKLEQVSEKGKAYTNYFGRCNVAEHEKLILLAQLKPEKDSDEAVTYSLGKFGQRALDFYSIHVTKESTHPVKPLAQIAGNRYASGPVGKALSDACMGTIASFLSKYQDIIIEHQKVVKGNQKRLESLRELAGKENLEYPSVTLPPQPHTKEGVDAYNEVIARVRMWVNLNLWQKLKLSRDDAKPLLRLKGFPSFPLVERQANEVDWWDMVCNVKKLINEKKEDGKVFWQNLAGYKRQEALRPYLSSEEDRKKGKKFARYQLGDLLLHLEKKHGEDWGKVYDEAWERIDKKVEGLSKHIKLEEERRSEDAQSKAALTDWLRAKASFVIEGLKEADKDEFCRCELKLQKWYGDLRGKPFAIEAENSILDISGFSKQYNCAFIWQKDGVKKLNLYLIINYFKGGKLRFKKIKPEAFEANRFYTVINKKSGEIVPMEVNFNFDDPNLIILPLAFGKRQGREFIWNDLLSLETGSLKLANGRVIEKTLYNRRTRQDEPALFVALTFERREVLDSSNIKPVNLIGVDRGENIPAVIALTDPEGCPLSRFKDSLGNPTHILRIGESYKCKQRTIQAKKEVEQRRAGGYSRKYASKAKNLADDMVRNTARDLLYYAVTQDAMLIFENLSRGFGRQGKRTFMAERQYTRMEDWLTAKLAYEGLPSKTYLSKTLAQYTSKTCSNCGFTITSADYDRVLEKLKKTATGWMTTINGKELKVEGQITYYNRYKRQNVVKDLSVELDRLSEESVNNDISSWTKGRSGEALSLLKKRFSHRPVQEKFVCLNCGFETHADEQAALNIARSWLFLRSQEYKKYQTNKTTGNTDKRAFVETWQSFYRKKLKEVWKPAV

SEQ ID NO: 25296 - protein, 978 aa, synthetic construct
  REGION 1..978: note = engineered CasX variant
QEIKRINKIRRRLVKDSNTKKAGKTGPMKTLLVRVMTPDLRERLENLRKKPENIPQPISNTSRANLNKLLTDYTEMKKAILHVYWEEFQKDPVGLMSRVAQPASKKIDQNKLKPEMDEKGNLTTAGFACSQCGQPLFVYKLEQVSEKGKAYTNYFGRCNVAEHEKLILLAQLKPEKDSDEAVTYSLGKFGQRALDFYSIHVTKESTHPVKPLAQIAGNRYASGPVGKALSDACMGTIASFLSKYQDIIIEHQKVVKGNQKRLESLRELAGKENLEYPSVTLPPQPHTKEGVDAYNEVIARVRMWVNLNLWQKLKLSRDDAKPLLRLKGFPSFPLVERQANEVDWWDMVCNVKKLINEKKEDGKVFWQNLAGYKRQEALRPYLSSEEDRKKGKKFARYQLGDLLLHLEKKHGEDWGKVYDEAWERIDKKVEGLSKHIKLEEERRSEDAQSKAALTDWLRAKASFVIEGLKEADKDEFCRCELKLQKWYGDLRGKPFAIEAENSILDISGFSKQYNCAFIWQKDGVKKLNLYLIINYFKGGKLRFKKIKPEAFEANRFYTVINKKSGEIVPMEVNFNFDDPNLIILPLAFGKRQGREFIWNDLLSLETGSLKLANGRVIEKTLYNRRTRQDEPALFVALTFERREVLDSSNIKPVNLIGVDRGENIPAVIALTDPEGCPLSRFKDSLGNPTHILRIGEPYKEKQRTIQAKKEVEQRRAGGYSRKYASKAKNLADDMVRNTARDLLYYAVTQDAMLIFENLSRGFGRQGKRTFMAERQYTRMEDWLTAKLAYEGLPSKTYLSKTLAQYTSKTCSNCGFTITSADYDRVLEKLKKTATGWMTTINGKELKVEGQITYYNRYKRQNVVKDLSVELDRLSEESVNNDISSWTKGRSGEALSLLKKRFSHRPVQEKFVCLNCGFETHADEQAALNIARSWLFLRSQEYKKYQTNKTTGNTDKRAFVETWQSFYRKKLKEVWKPAV

SEQ ID NO: 25297 - protein, 978 aa, synthetic construct
  REGION 1..978: note = engineered CasX variant
QEIKRINKIRRRLVKDSNTKKAGKTGPMKTLLVRVMTPDLRERLENLRKKPENIPQPISNTSRANLNKLLTDYTEMKKAILHVYWEEFQKDPVGLMSRVAQPASKKIDQNKLKPEMDEKGNLTTAGFACSQCGQPLFVYKLEQVSEKGKAYTNYFGRCNVAEHEKLILLAQLKPEKDSDEAVTYSLGKFGQRALDFYSIHVTKESTHPVKPLAQIAGNRYASGPVGKALSDACMGTIASFLSKYQDIIIEHQKVVKGNQKRLESLRELAGKENLEYPSVTLPPQPHTKEGVDAYNEVIARVRMWVNLNLWQKLKLSRDDAKPLLRLKGFPSFPLVERQANEVDWWDMVCNVKKLINEKKEDGKVFWQNLAGYKRQEALRPYLSSEEDRKKGKKFARYQLGDLLLHLEKKHGEDWGKVYDEAWERIDKKVEGLSKHIKLEEERRSEDAQSKAALTDWLRAKASFVIEGLKEADKDEFCRCELKLQKWYGDLRGKPFAIEAENSILDISGFSKQYNCAFIWQKDGVKKLNLYLIINYFKGGKLRFKKIKPEAFEANRFYTVINKKSGEIVPMEVNFNFDDPNLIILPLAFGKRQGREFIWNDLLSLETGSLKLANGRVIEKTLYNRRTRQDEPALFVALTFERREVLDSSNIKPVNLIGVDRGENIPAVIALTDPEGCPLSRFKDSLGNPTHILRIGEPYKCKQRTIQAKKEVEQRRAGGYSRKYASKAKNLADDMVRNTARDLLYYAVTQDAMLIFENLSRGFGRQGKRTFMAERQYTRMEDWLTAKLAYEGLPSKTYLSKTLAQYTSKTCSNCGFTITSADYDRVLEKLKKTATGWMTTINGKELKVEGQITYYNRYKRQNVVKDLSVELDRLSEESVNNDISSWTKGRSGEALSLLKKRFSHRPVQEKFVCLNCGFETHADEQAALNIARSWLFLRSQEYKKYQTNKTTGNTDKRAFVETWQSFYRKKLKEVWKPAV

SEQ ID NO: 25298 - protein, 978 aa, synthetic construct
  REGION 1..978: note = engineered CasX variant
QEIKRINKIRRRLVKDSNTKKAGKTGPMKTLLVRVMTPDLRERLENLRKKPENIPQPISNTSRANLNKLLTDYTEMKKAILHVYWEEFQKDPVGLMSRVAQPASKKIDQNKLKPEMDEKGNLTTAGFACSQCGQPLFVYKLEQVSEKGKAYTNYFGRCNVAEHEKLILLAQLKPEKDSDEAVTYSLGKFGQRALDFYSIHVTKESTHPVKPLAQIAGNRYASGPVGKALSDACMGTIASFLSKYQDIIIEHQKVVKGNQKRLESLRELAGKENLEYPSVTLPPQPHTKEGVDAYNEVIARVRMWVNLNLWQKLKLSRDDAKPLLRLKGFPSFPLVERQANEVDWWDMVCNVKKLINEKKEDGKVFWQNLAGYKRQEALRPYLSSEEDRKKGKKFARYQLGDLLLHLEKKHGEDWGKVYDEAWERIDKKVEGLSKHIKLEEERRSEDAQSKAALTDWLRAKASFVIEGLKEADKDEFCRCELKLQKWYGDLRGKPFAIEAENSILDISGFSKQYNCAFIWQKDGVKKLNLYLIINYFKGGKLRFKKIKPEAFEANRFYTVINKKSGEIVPMEVNFNFDDPNLIILPLAFGKRQGREFIWNDLLSLETGSLKLANGRVIEKTLYNRRTRQDEPALFVALTFERREVLDSSNIKPVNLIGVDRGENIPAVIALTDPEGCPLSRFKDSLGNPTHILRIDESYKHKQRTIQAKKEVEQRRAGGYSRKYASKAKNLADDMVRNTARDLLYYAVTQDAMLIFENLSRGFGRQGKRTFMAERQYTRMEDWLTAKLAYEGLPSKTYLSKTLAQYTSKTCSNCGFTITSADYDRVLEKLKKTATGWMTTINGKELKVEGQITYYNRYKRQNVVKDLSVELDRLSEESVNNDISSWTKGRSGEALSLLKKRFSHRPVQEKFVCLNCGFETHADEQAALNIARSWLFLRSQEYKKYQTNKTTGNTDKRAFVETWQSFYRKKLKEVWKPAV

SEQ ID NO: 25299 - protein, 978 aa, synthetic construct
  REGION 1..978: note = engineered CasX variant
QEIKRINKIRRRLVKDSNTKKAGKTGPMKTLLVRVMTPDLRERLENLRKKPENIPQPISNTSRANLNKLLTDYTEMKKAILHVYWEEFQKDPVGLMSRVAQPASKKIDQNKLKPEMDEKGNLTTAGFACSQCGQPLFVYKLEQVSEKGKAYTNYFGRCNVAEHEKLILLAQLKPEKDSDEAVTYSLGKFGQRALDFYSIHVTKESTHPVKPLAQIAGNRYASGPVGKALSDACMGTIASFLSKYQDIIIEHQKVVKGNQKRLESLRELAGKENLEYPSVTLPPQPHTKEGVDAYNEVIARVRMWVNLNLWQKLKLSRDDAKPLLRLKGFPSFPLVERQANEVDWWDMVCNVKKLINEKKEDGKVFWQNLAGYKRQEALRPYLSSEEDRKKGKKFARYQLGDLLLHLEKKHGEDWGKVYDEAWERIDKKVEGLSKHIKLEEERRSEDAQSKAALTDWLRAKASFVIEGLKEADKDEFCRCELKLQKWYGDLRGKPFAIEAENSILDISGFSKQYNCAFIWQKDGVKKLNLYLIINYFKGGKLRFKKIKPEAFEANRFYTVINKKSGEIVPMEVNFNFDDPNLIILPLAFGKRQGREFIWNDLLSLETGSLKLANGRVIEKTLYNRRTRQDEPALFVALTFERREVLDSSNIKPVNLIGVDRGENIPAVIALTDPEGCPLSRFKDSLGNPTHILRIDESYKEKTRTIQAKKEVEQRRAGGYSRKYASKAKNLADDMVRNTARDLLYYAVTQDAMLIFENLSRGFGRQGKRTFMAERQYTRMEDWLTAKLAYEGLPSKTYLSKTLAQYTSKTCSNCGFTITSADYDRVLEKLKKTATGWMTTINGKELKVEGQITYYNRYKRQNVVKDLSVELDRLSEESVNNDISSWTKGRSGEALSLLKKRFSHRPVQEKFVCLNCGFETHADEQAALNIARSWLFLRSQEYKKYQTNKTTGNTDKRAFVETWQSFYRKKLKEVWKPAV

SEQ ID NO: 25300 - protein, 978 aa, synthetic construct
  REGION 1..978: note = engineered CasX variant
QEIKRINKIRRRLVKDSNTKKAGKTGPMKTLLVRVMTPDLRERLENLRKKPENIPQPISNTSRANLNKLLTDYTEMKKAILHVYWEEFQKDPVGLMSRVAQPASKKIDQNKLKPEMDEKGNLTTAGFACSQCGQPLFVYKLEQVSEKGKAYTNYFGRCNVAEHEKLILLAQLKPEKDSDEAVTYSLGKFGQRALDFYSIHVTKESTHPVKPLAQIAGNRYASGPVGKALSDACMGTIASFLSKYQDIIIEHQKVVKGNQKRLESLRELAGKENLEYPSVTLPPQPHTKEGVDAYNEVIARVRMWVNLNLWQKLKLSRDDAKPLLRLKGFPSFPLVERQANEVDWWDMVCNVKKLINEKKEDGKVFWQNLAGYKRQEALRPYLSSEEDRKKGKKFARYQLGDLLLHLEKKHGEDWGKVYDEAWERIDKKVEGLSKHIKLEEERRSEDAQSKAALTDWLRAKASFVIEGLKEADKDEFCRCELKLQKWYGDLRGKPFAIEAENSILDISGFSKQYNCAFIWQKDGVKKLNLYLIINYFKGGKLRFKKIKPEAFEANRFYTVINKKSGEIVPMEVNFNFDDPNLIILPLAFGKRQGREFIWNDLLSLETGSLKLANGRVIEKTLYNRRTRQDEPALFVALTFERREVLDSSNIKPVNLIGVDRGENIPAVIALTDPEGCPLSRFKDSLGNPTHILRIDESYKEKQRTIQAKKEVEQRRMGGYSRKYASKAKNLADDMVRNTARDLLYYAVTQDAMLIFENLSRGFGRQGKRTFMAERQYTRMEDWLTAKLAYEGLPSKTYLSKTLAQYTSKTCSNCGFTITSADYDRVLEKLKKTATGWMTTINGKELKVEGQITYYNRYKRQNVVKDLSVELDRLSEESVNNDISSWTKGRSGEALSLLKKRFSHRPVQEKFVCLNCGFETHADEQAALNIARSWLFLRSQEYKKYQTNKTTGNTDKRAFVETWQSFYRKKLKEVWKPAV

SEQ ID NO: 25301 - protein, 978 aa, synthetic construct
  REGION 1..978: note = engineered CasX variant
QEIKRINKIRRRLVKDSNTKKAGKTGPMKTLLVRVMTPDLRERLENLRKKPENIPQPISNTSRANLNKLLTDYTEMKKAILHVYWEEFQKDPVGLMSRVAQPASKKIDQNKLKPEMDEKGNLTTAGFACSQCGQPLFVYKLEQVSEKGKAYTNYFGRCNVAEHEKLILLAQLKPEKDSDEAVTYSLGKFGQRALDFYSIHVTKESTHPVKPLAQIAGNRYASGPVGKALSDACMGTIASFLSKYQDIIIEHQKVVKGNQKRLESLRELAGKENLEYPSVTLPPQPHTKEGVDAYNEVIARVRMWVNLNLWQKLKLSRDDAKPLLRLKGFPSFPLVERQANEVDWWDMVCNVKKLINEKKEDGKVFWQNLAGYKRQEALRPYLSSEEDRKKGKKFARYQLGDLLLHLEKKHGEDWGKVYDEAWERIDKKVEGLSKHIKLEEERRSEDAQSKAALTDWLRAKASFVIEGLKEADKDEFCRCELKLQKWYGDLRGKPFAIEAENSILDISGFSKQYNCAFIWQKDGVKKLNLYLIINYFKGGKLRFKKIKPEAFEANRFYTVINKKSGEIVPMEVNFNFDDPNLIILPLAFGKRQGREFIWNDLLSLETGSLKLANGRVIEKTLYNRRTRQDEPALFVALTFERREVLDSSNIKPVNLIGVDRGENIPAVIALTDPEGCPLSRFKDSLGNPTHILRIDESYKEKQRTIQAKKEVEQRRAGGYSRKYASKAKNLADDMVRNTARDLLYYAVTQDAMLIFENLSRGFGRQGKRTFMAERQYTRMEDWLTAKLAYEGLPSKTYLSKTLAQYTSKTCSNCGFTITSADYDRVLEKLKKTATGWMTTINGKELKVEGQITYYNRYKRQNVVKDLSVELDRLSEESVNNDISSWTKGRSGEALSLLKKRFSHRPVQEKFVCLNCGFETHADEQAALNIARSWLFLRSQEYKKYQTNKTTGNTDKRAFVETWQSFYRKKLKEVWKPAV

SEQ ID NO: 25302 - protein, 978 aa, synthetic construct
  REGION 1..978: note = engineered CasX variant
QEIKRINKIRRRLVKDSNTKKAGKTGPMKTLLVRVMTPDLRERLENLRKKPENIPQPISNTSRANLNKLLTDYTEMKKAILHVYWEEFQKDPVGLMSRVAQPASKKIDQNKLKPEMDEKGNLTTAGFACSQCGQPLFVYKLEQVSEKGKAYTNYFGRCNVAEHEKLILLAQLKPEKDSDEAVTYSLGKFGQRALDFYSIHVTKESTHPVKPLAQIAGNRYASGPVGKALSDACMGTIASFLSKYQDIIIEHQKVVKGNQKRLESLRELAGKENLEYPSVTLPPQPHTKEGVDAYNEVIARVRMWVNLNLWQKLKLSRDDAKPLLRLKGFPSFPLVERQANEVDWWDMVCNVKKLINEKKEDGKVFWQNLAGYKRQEALRPYLSSEEDRKKGKKFARYQLGDLLLHLEKKHGEDWGKVYDEAWERIDKKVEGLSKHIKLEEERRSEDAQSKAALTDWLRAKASFVIEGLKEADKDEFCRCELKLQKWYGDLRGKPFAIEAENSILDISGFSKQYNCAFIWQKDGVKKLNLYLIINYFKGGKLRFKKIKPEAFEANRFYTVINKKSGEIVPMEVNFNFDDPNLIILPLAFGKRQGREFIWNDLLSLETGSLKLANGRVIEKTLYNRRTRQDEPALFVALTFERREVLDSSNIKPVNLIGVDRGENIPAVIALTDPEGCPLSRFKDSLGNPTHILRIDESYKEKQRTIQAKKCVEQRRAGGYSRKYASKAKNLADDMVRNTARDLLYYAVTQDAMLIFENLSRGFGRQGKRTFMAERQYTRMEDWLTAKLAYEGLPSKTYLSKTLAQYTSKTCSNCGFTITSADYDRVLEKLKKTATGWMTTINGKELKVEGQITYYNRYKRQNVVKDLSVELDRLSEESVNNDISSWTKGRSGEALSLLKKRFSHRPVQEKFVCLNCGFETHADEQAALNIARSWLFLRSQEYKKYQTNKTTGNTDKRAFVETWQSFYRKKLKEVWKPAV

SEQ ID NO: 25303 - protein, 978 aa, synthetic construct
  REGION 1..978: note = engineered CasX variant
QEIKRINKIRRRLVKDSNTKKAGKTGPMKTLLVRVMTPDLRERLENLRKKPENIPQPISNTSRANLNKLLTDYTEMKKAILHVYWEEFQKDPVGLMSRVAQPASKKIDQNKLKPEMDEKGNLTTAGFACSQCGQPLFVYKLEQVSEKGKAYTNYFGRCNVAEHEKLILLAQLKPEKDSDEAVTYSLGKFGQRALDFYSIHVTKESTHPVKPLAQIAGNRYASGPVGKALSDACMGTIASFLSKYQDIIIEHQKVVKGNQKRLESLRELAGKENLEYPSVTLPPQPHTKEGVDAYNEVIARVRMWVNLNLWQKLKLSRDDAKPLLRLKGFPSFPLVERQANEVDWWDMVCNVKKLINEKKEDGKVFWQNLAGYKRQEALRPYLSSEEDRKKGKKFARYQLGDLLLHLEKKHGEDWGKVYDEAWERIDKKVEGLSKHIKLEEERRSEDAQSKAALTDWLRAKASFVIEGLKEADKDEFCRCELKLQKWYGDLRGKPFAIEAENSILDISGFSKQYNCAFIWQKDGVKKLNLYLIINYFKGGKLRFKKIKPEAFEANRFYTVINKKSGEIVPMEVNFNFDDPNLIILPLAFGKRQGREFIWNDLLSLETGSLKLANGRVIEKTLYNRRTRQDEPALFVALTFERREVLDSSNIKPVNLIGVDRGENIPAVIALTDPEGCPLSRFKDSLGNPTHILRIDESYKCKQRTIQAKKEVEQRRAGGYSRKYASKAKNLADDMVRNTARDLLYYAVTQDAMLIFENLSRGFGRQGKRTFMAERQYTRMEDWLTAKLAYEGLPSKTYLSKTLAQYTSKTCSNCGFTITSADYDRVLEKLKKTATGWMTTINGKELKVEGQITYYNRYKRQNVVKDLSVELDRLSEESVNNDISSWTKGRSGEALSLLKKRFSHRPVQEKFVCLNCGFETHADEQAALNIARSWLFLRSQEYKKYQTNKTTGNTDKRAFVETWQSFYRKKLKEVWKPAV

SEQ ID NO: 25304 - protein, 978 aa, synthetic construct
  REGION 1..978: note = engineered CasX variant
QEIKRINKIRRRLVKDSNTKKAGKTGPMKTLLVRVMTPDLRERLENLRKKPENIPQPISNTSRANLNKLLTDYTEMKKAILHVYWEEFQKDPVGLMSRVAQPASKKIDQNKLKPEMDEKGNLTTAGFACSQCGQPLFVYKLEQVSEKGKAYTNYFGRCNVAEHEKLILLAQLKPEKDSDEAVTYSLGKFGQRALDFYSIHVTKESTHPVKPLAQIAGNRYASGPVGKALSDACMGTIASFLSKYQDIIIEHQKVVKGNQKRLESLRELAGKENLEYPSVTLPPQPHTKEGVDAYNEVIARVRMWVNLNLWQKLKLSRDDAKPLLRLKGFPSFPLVERQANEVDWWDMVCNVKKLINEKKEDGKVFWQNLAGYKRQEALRPYLSSEEDRKKGKKFARYQLGDLLLHLEKKHGEDWGKVYDEAWERIDKKVEGLSKHIKLEEERRSEDAQSKAALTDWLRAKASFVIEGLKEADKDEFCRCELKLQKWYGDLRGKPFAIEAENSILDISGFSKQYNCAFIWQKDGVKKLNLYLIINYFKGGKLRFKKIKPEAFEANRFYTVINKKSGEIVPMEVNFNFDDPNLIILPLAFGKRQGREFIWNDLLSLETGSLKLANGRVIEKTLYNRRTRQDEPALFVALTFERREVLDSSNIKPVNLIGVDRGENIPAVIALTDPEGCPLSRFKDSLGNPTHILRIDEPYKEKQRTIQAKKEVEQRRAGGYSRKYASKAKNLADDMVRNTARDLLYYAVTQDAMLIFENLSRGFGRQGKRTFMAERQYTRMEDWLTAKLAYEGLPSKTYLSKTLAQYTSKTCSNCGFTITSADYDRVLEKLKKTATGWMTTINGKELKVEGQITYYNRYKRQNVVKDLSVELDRLSEESVNNDISSWTKGRSGEALSLLKKRFSHRPVQEKFVCLNCGFETHADEQAALNIARSWLFLRSQEYKKYQTNKTTGNTDKRAFVETWQSFYRKKLKEVWKPAV

SEQ ID NO: 25305 - protein, 978 aa, synthetic construct
  REGION 1..978: note = engineered CasX variant
QEIKRINKIRRRLVKDSNTKKAGKTGPMKTLLVRVMTPDLRERLENLRKKPENIPQPISNTSRANLNKLLTDYTEMKKAILHVYWEEFQKDPVGLMSRVAQPASKKIDQNKLKPEMDEKGNLTTAGFACSQCGQPLFVYKLEQVSEKGKAYTNYFGRCNVAEHEKLILLAQLKPEKDSDEAVTYSLGKFGQRALDFYSIHVTKESTHPVKPLAQIAGNRYASGPVGKALSDACMGTIASFLSKYQDIIIEHQKVVKGNQKRLESLRELAGKENLEYPSVTLPPQPHTKEGVDAYNEVIARVRMWVNLNLWQKLKLSRDDAKPLLRLKGFPSFPLVERQANEVDWWDMVCNVKKLINEKKEDGKVFWQNLAGYKRQEALRPYLSSEEDRKKGKKFARYQLGDLLLHLEKKHGEDWGKVYDEAWERIDKKVEGLSKHIKLEEERRSEDAQSKAALTDWLRAKASFVIEGLKEADKDEFCRCELKLQKWYGDLRGKPFAIEAENSILDISGFSKQYNCAFIWQKDGVKKLNLYLIINYFKGGKLRFKKIKPEAFEANRFYTVINKKSGEIVPMEVNFNFDDPNLIILPLAFGKRQGREFIWNDLLSLETGSLKLANGRVIEKTLYNRRTRQDEPALFVALTFERREVLDSSNIKPVNLIGVDRGENIPAVIALTDPEGCPLSRFKDKLGNPTHILRIGESYKEKQRTIQAKKEVEQRRAGGYSRKYASKAKNLADDMVRNTARDLLYYAVTQDAMLIFENLSRGFGRQGKRTFMAERQYTRMEDWLTAKLAYEGLPSKTYLSKTLAQYTSKTCSNCGFTITSADYDRVLEKLKKTATGWMTTINGKELKVEGQITYYNRYKRQNVVKDLSVELDRLSEESVNNDISSWTKGRSGEALSLLKKRFSHRPVQEKFVCLNCGFETHADEQAALNIARSWLFLRSQEYKKYQTNKTTGNTDKRAFVETWQSFYRKKLKEVWKPAV

SEQ ID NO: 25306 - protein, 978 aa, synthetic construct
  REGION 1..978: note = engineered CasX variant
QEIKRINKIRRRLVKDSNTKKAGKTGPMKTLLVRVMTPDLRERLENLRKKPENIPQPISNTSRANLNKLLTDYTEMKKAILHVYWEEFQKDPVGLMSRVAQPASKKIDQNKLKPEMDEKGNLTTAGFACSQCGQPLFVYKLEQVSEKGKAYTNYFGRCNVAEHEKLILLAQLKPEKDSDEAVTYSLGKFGQRALDFYSIHVTKESTHPVKPLAQIAGNRYASGPVGKALSDACMGTIASFLSKYQDIIIEHQKVVKGNQKRLESLRELAGKENLEYPSVTLPPQPHTKEGVDAYNEVIARVRMWVNLNLWQKLKLSRDDAKPLLRLKGFPSFPLVERQANEVDWWDMVCNVKKLINEKKEDGKVFWQNLAGYKRQEALRPYLSSEEDRKKGKKFARYQLGDLLLHLEKKHGEDWGKVYDEAWERIDKKVEGLSKHIKLEEERRSEDAQSKAALTDWLRAKASFVIEGLKEADKDEFCRCELKLQKWYGDLRGKPFAIEAENSILDISGFSKQYNCAFIWQKDGVKKLNLYLIINYFKGGKLRFKKIKPEAFEANRFYTVINKKSGEIVPMEVNFNFDDPNLIILPLAFGKRQGREFIWNDLLSLETGSLKLANGRVIEKTLYNRRTRQDEPALFVALTFERREVLDSSNIKPVNLIGVDRGENIPAVIALTDPEGCPLSRFKDKLGNPTHILRIGEPYKEKQRTIQAKKEVEQRRAGGYSRKYASKAKNLADDMVRNTARDLLYYAVTQDAMLIFENLSRGFGRQGKRTFMAERQYTRMEDWLTAKLAYEGLPSKTYLSKTLAQYTSKTCSNCGFTITSADYDRVLEKLKKTATGWMTTINGKELKVEGQITYYNRYKRQNVVKDLSVELDRLSEESVNNDISSWTKGRSGEALSLLKKRFSHRPVQEKFVCLNCGFETHADEQAALNIARSWLFLRSQEYKKYQTNKTTGNTDKRAFVETWQSFYRKKLKEVWKPAV

SEQ ID NO: 25307 - protein, 978 aa, synthetic construct
  REGION 1..978: note = engineered CasX variant
QEIKRINKIRRRLVKDSNTKKAGKTGPMKTLLVRVMTPDLRERLENLRKKPENIPQPISNTSRANLNKLLTDYTEMKKAILHVYWEEFQKDPVGLMSRVAQPASKKIDQNKLKPEMDEKGNLTTAGFACSQCGQPLFVYKLEQVSEKGKAYTNYFGRCNVAEHEKLILLAQLKPEKDSDEAVTYSLGKFGQRALDFYSIHVTKESTHPVKPLAQIAGNRYASGPVGKALSDACMGTIASFLSKYQDIIIEHQKVVKGNQKRLESLRELAGKENLEYPSVTLPPQPHTKEGVDAYNEVIARVRMWVNLNLWQKLKLSRDDAKPLLRLKGFPSFPLVERQANEVDWWDMVCNVKKLINEKKEDGKVFWQNLAGYKRQEALRPYLSSEEDRKKGKKFARYQLGDLLLHLEKKHGEDWGKVYDEAWERIDKKVEGLSKHIKLEEERRSEDAQSKAALTDWLRAKASFVIEGLKEADKDEFCRCELKLQKWYGDLRGKPFAIEAENSILDISGFSKQYNCAFIWQKDGVKKLNLYLIINYFKGGKLRFKKIKPEAFEANRFYTVINKKSGEIVPMEVNFNFDDPNLIILPLAFGKRQGREFIWNDLLSLETGSLKLANGRVIEKTLYNRRTRQDEPALFVALTFERREVLDSSNIKPVNLIGVDRGENIPAVIALTDPEGCPLSAFKDSLGNPTHILRIGESYKEKQRTIQAKKEVEQRRAGGYSRKYASKAKNLADDMVRNTARDLLYYAVTQDAMLIFENLSRGFGRQGKRTFMAERQYTRMEDWLTAKLAYEGLPSKTYLSKTLAQYTSKTCSNCGFTITSADYDRVLEKLKKTATGWMTTINGKELKVEGQITYYNRYKRQNVVKDLSVELDRLSEESVNNDISSWTKGRSGEALSLLKKRFSHRPVQEKFVCLNCGFETHADEQAALNIARSWLFLRSQEYKKYQTNKTTGNTDKRAFVETWQSFYRKKLKEVWKPAV

SEQ ID NO: 25308 - protein, 978 aa, synthetic construct
  REGION 1..978: note = engineered CasX variant
QEIKRINKIRRRLVKDSNTKKAGKTGPMKTLLVRVMTPDLRERLENLRKKPENIPQPISNTSRANLNKLLTDYTEMKKAILHVYWEEFQKDPVGLMSRVAQPASKKIDQNKLKPEMDEKGNLTTAGFACSQCGQPLFVYKLEQVSEKGKAYTNYFGRCNVAEHEKLILLAQLKPEKDSDEAVTYSLGKFGQRALDFYSIHVTKESTHPVKPLAQIAGNRYASGPVGKALSDACMGTIASFLSKYQDIIIEHQKVVKGNQKRLESLRELAGKENLEYPSVTLPPQPHTKEGVDAYNEVIARVRMWVNLNLWQKLKLSRDDAKPLLRLKGFPSFPLVERQANEVDWWDMVCNVKKLINEKKEDGKVFWQNLAGYKRQEALRPYLSSEEDRKKGKKFARYQLGDLLLHLEKKHGEDWGKVYDEAWERIDKKVEGLSKHIKLEEERRSEDAQSKAALTDWLRAKASFVIEGLKEADKDEFCRCELKLQKWYGDLRGKPFAIEAENSILDISGFSKQYNCAFIWQKDGVKKLNLYLIINYFKGGKLRFKKIKPEAFEANRFYTVINKKSGEIVPMEVNFNFDDPNLIILPLAFGKRQGREFIWNDLLSLETGSLKLANGRVIEKTLYNRRTRQDEPALFVALTFERREVLDSSNIKPVNLIGVDRGENIPAVIALTDPEGCPLSAFKDSLGNPTHILRIGEPYKEKQRTIQAKKEVEQRRAGGYSRKYASKAKNLADDMVRNTARDLLYYAVTQDAMLIFENLSRGFGRQGKRTFMAERQYTRMEDWLTAKLAYEGLPSKTYLSKTLAQYTSKTCSNCGFTITSADYDRVLEKLKKTATGWMTTINGKELKVEGQITYYNRYKRQNVVKDLSVELDRLSEESVNNDISSWTKGRSGEALSLLKKRFSHRPVQEKFVCLNCGFETHADEQAALNIARSWLFLRSQEYKKYQTNKTTGNTDKRAFVETWQSFYRKKLKEVWKPAV

SEQ ID NO: 25309 - protein, 978 aa, synthetic construct
  REGION 1..978: note = engineered CasX variant
QEIKRINKIRRRLVKDSNTKKAGKTGPMKTLLVRVMTPDLRERLENLRKKPENIPQPISNTSRANLNKLLTDYTEMKKAILHVYWEEFQKDPVGLMSRVAQPASKKIDQNKLKPEMDEKGNLTTAGFACSQCGQPLFVYKLEQVSEKGKAYTNYFGRCNVAEHEKLILLAQLKPEKDSDEAVTYSLGKFGQRALDFYSIHVTKESTHPVKPLAQIAGNRYASGPVGKALSDACMGTIASFLSKYQDIIIEHQKVVKGNQKRLESLRELAGKENLEYPSVTLPPQPHTKEGVDAYNEVIARVRMWVNLNLWQKLKLSRDDAKPLLRLKGFPSFPLVERQANEVDWWDMVCNVKKLINEKKEDGKVFWQNLAGYKRQEALRPYLSSEEDRKKGKKFARYQLGDLLLHLEKKHGEDWGKVYDEAWERIDKKVEGLSKHIKLEEERRSEDAQSKAALTDWLRAKASFVIEGLKEADKDEFCRCELKLQKWYGDLRGKPFAIEAENSILDISGFSKQYNCAFIWQKDGVKKLNLYLIINYFKGGKLRFKKIKPEAFEANRFYTVINKKSGEIVPMEVNFNFDDPNLIILPLAFGKRQGREFIWNDLLSLETGSLKLANGRVIEKTLYNRRTRQDEPALFVALTFERREVLDSSNIKPVNLIGVDRGENIPAVIALTDPEGCPLSAFKDKLGNPTHILRIGESYKEKQRTIQAKKEVEQRRAGGYSRKYASKAKNLADDMVRNTARDLLYYAVTQDAMLIFENLSRGFGRQGKRTFMAERQYTRMEDWLTAKLAYEGLPSKTYLSKTLAQYTSKTCSNCGFTITSADYDRVLEKLKKTATGWMTTINGKELKVEGQITYYNRYKRQNVVKDLSVELDRLSEESVNNDISSWTKGRSGEALSLLKKRFSHRPVQEKFVCLNCGFETHADEQAALNIARSWLFLRSQEYKKYQTNKTTGNTDKRAFVETWQSFYRKKLKEVWKPAV

SEQ ID NO: 25310 - protein, 978 aa, synthetic construct
  REGION 1..978: note = engineered CasX variant
QEIKRINKIRRRLVKDSNTKKAGKTGPMKTLLVRVMTPDLRERLENLRKKPENIPQPISNTSRANLNKLLTDYTEMKKAILHVYWEEFQKDPVGLMSRVAQPASKKIDQNKLKPEMDEKGNLTTAGFACSQCGQPLFVYKLEQVSEKGKAYTNYFGRCNVAEHEKLILLAQLKPEKDSDEAVTYSLGKFGQRALDFYSIHVTKESTHPVKPLAQIAGNRYASGPVGKALSDACMGTIASFLSKYQDIIIEHQKVVKGNQKRLESLRELAGKENLEYPSVTLPPQPHTKEGVDAYNEVIARVRMWVNLNLWQKLKLSRDDAKPLLRLKGFPSFPLVERQANEVDWWDMVCNVKKLINEKKEDGKVFWQNLAGYKRQEALRPYLSSEEDRKKGKKFARYQLGDLLLHLEKKHGEDWGKVYDEAWERIDKKVEGLSKHIKLEEERRSEDAQSKAALTDWLRAKASFVIEGLKEADKDEFCRCELKLQKWYGDLRGKPFAIEAENSILDISGFSKQYNCAFIWQKDGVKKLNLYLIINYFKGGKLRFKKIKPEAFEANRFYTVINKKSGEIVPMEVNFNFDDPNLIILPLAFGKRQGREFIWNDLLSLETGSLKLANGRVIEKTLYNRRTRQDEPALFVALTFERREVLDSSNIKPVALIGVDRGENIPAVIALTDPEGCPLSRFKDSLGNPTHILRIGESYKEKQRTIQAKKCVEQRRAGGYSRKYASKAKNLADDMVRNTARDLLYYAVTQDAMLIFENLSRGFGRQGKRTFMAERQYTRMEDWLTAKLAYEGLPSKTYLSKTLAQYTSKTCSNCGFTITSADYDRVLEKLKKTATGWMTTINGKELKVEGQITYYNRYKRQNVVKDLSVELDRLSEESVNNDISSWTKGRSGEALSLLKKRFSHRPVQEKFVCLNCGFETHADEQAALNIARSWLFLRSQEYKKYQTNKTTGNTDKRAFVETWQSFYRKKLKEVWKPAV

SEQ ID NO: 25311 - protein, 978 aa, synthetic construct
  REGION 1..978: note = engineered CasX variant
QEIKRINKIRRRLVKDSNTKKAGKTGPMKTLLVRVMTPDLRERLENLRKKPENIPQPISNTSRANLNKLLTDYTEMKKAILHVYWEEFQKDPVGLMSRVAQPASKKIDQNKLKPEMDEKGNLTTAGFACSQCGQPLFVYKLEQVSEKGKAYTNYFGRCNVAEHEKLILLAQLKPEKDSDEAVTYSLGKFGQRALDFYSIHVTKESTHPVKPLAQIAGNRYASGPVGKALSDACMGTIASFLSKYQDIIIEHQKVVKGNQKRLESLRELAGKENLEYPSVTLPPQPHTKEGVDAYNEVIARVRMWVNLNLWQKLKLSRDDAKPLLRLKGFPSFPLVERQANEVDWWDMVCNVKKLINEKKEDGKVFWQNLAGYKRQEALRPYLSSEEDRKKGKKFARYQLGDLLLHLEKKHGEDWGKVYDEAWERIDKKVEGLSKHIKLEEERRSEDAQSKAALTDWLRAKASFVIEGLKEADKDEFCRCELKLQKWYGDLRGKPFAIEAENSILDISGFSKQYNCAFIWQKDGVKKLNLYLIINYFKGGKLRFKKIKPEAFEANRFYTVINKKSGEIVPMEVNFNFDDPNLIILPLAFGKRQGREFIWNDLLSLETGSLKLANGRVIEKTLYNRRTRQDEPALFVALTFERREVLDSSNIKPTNLIGVDRGENIPAVIALTDPEGCPLSYFKDSLGNPTHILRIGESYKEKQRTIQAKKEVEQRRAGGYSRKYASKAKNLADDMVRNTARDLLYYAVTQDAMLIFENLSRGFGRQGKRTFMAERQYTRMEDWLTAKLAYEGLPSKTYLSKTLAQYTSKTCSNCGFTITSADYDRVLEKLKKTATGWMTTINGKELKVEGQITYYNRYKRQNVVKDLSVELDRLSEESVNNDISSWTKGRSGEALSLLKKRFSHRPVQEKFVCLNCGFETHADEQAALNIARSWLFLRSQEYKKYQTNKTTGNTDKRAFVETWQSFYRKKLKEVWKPAV

SEQ ID NO: 25312 - protein, 978 aa, synthetic construct
  REGION 1..978: note = engineered CasX variant
QEIKRINKIRRRLVKDSNTKKAGKTGPMKTLLVRVMTPDLRERLENLRKKPENIPQPISNTSRANLNKLLTDYTEMKKAILHVYWEEFQKDPVGLMSRVAQPASKKIDQNKLKPEMDEKGNLTTAGFACSQCGQPLFVYKLEQVSEKGKAYTNYFGRCNVAEHEKLILLAQLKPEKDSDEAVTYSLGKFGQRALDFYSIHVTKESTHPVKPLAQIAGNRYASGPVGKALSDACMGTIASFLSKYQDIIIEHQKVVKGNQKRLESLRELAGKENLEYPSVTLPPQPHTKEGVDAYNEVIARVRMWVNLNLWQKLKLSRDDAKPLLRLKGFPSFPLVERQANEVDWWDMVCNVKKLINEKKEDGKVFWQNLAGYKRQEALRPYLSSEEDRKKGKKFARYQLGDLLLHLEKKHGEDWGKVYDEAWERIDKKVEGLSKHIKLEEERRSEDAQSKAALTDWLRAKASFVIEGLKEADKDEFCRCELKLQKWYGDLRGKPFAIEAENSILDISGFSKQYNCAFIWQKDGVKKLNLYLIINYFKGGKLRFKKIKPEAFEANRFYTVINKKSGEIVPMEVNFNFDDPNLIILPLAFGKRQGREFIWNDLLSLETGSLKLANGRVIEKTLYNRRTRQDEPALFVALTFERREVLDSSNIKPTNLIGVDRGENIPAVIALTDPEGCPLSYFADSLGNPTHILRIGESYKEKQRTIQAKKEVEQRRAGGYSRKYASKAKNLADDMVRNTARDLLYYAVTQDAMLIFENLSRGFGRQGKRTFMAERQYTRMEDWLTAKLAYEGLPSKTYLSKTLAQYTSKTCSNCGFTITSADYDRVLEKLKKTATGWMTTINGKELKVEGQITYYNRYKRQNVVKDLSVELDRLSEESVNNDISSWTKGRSGEALSLLKKRFSHRPVQEKFVCLNCGFETHADEQAALNIARSWLFLRSQEYKKYQTNKTTGNTDKRAFVETWQSFYRKKLKEVWKPAV

SEQ ID NO: 25313 - protein, 978 aa, synthetic construct
  REGION 1..978: note = engineered CasX variant
QEIKRINKIRRRLVKDSNTKKAGKTGPMKTLLVRVMTPDLRERLENLRKKPENIPQPISNTSRANLNKLLTDYTEMKKAILHVYWEEFQKDPVGLMSRVAQPASKKIDQNKLKPEMDEKGNLTTAGFACSQCGQPLFVYKLEQVSEKGKAYTNYFGRCNVAEHEKLILLAQLKPEKDSDEAVTYSLGKFGQRALDFYSIHVTKESTHPVKPLAQIAGNRYASGPVGKALSDACMGTIASFLSKYQDIIIEHQKVVKGNQKRLESLRELAGKENLEYPSVTLPPQPHTKEGVDAYNEVIARVRMWVNLNLWQKLKLSRDDAKPLLRLKGFPSFPLVERQANEVDWWDMVCNVKKLINEKKEDGKVFWQNLAGYKRQEALRPYLSSEEDRKKGKKFARYQLGDLLLHLEKKHGEDWGKVYDEAWERIDKKVEGLSKHIKLEEERRSEDAQSKAALTDWLRAKASFVIEGLKEADKDEFCRCELKLQKWYGDLRGKPFAIEAENSILDISGFSKQYNCAFIWQKDGVKKLNLYLIINYFKGGKLRFKKIKPEAFEANRFYTVINKKSGEIVPMEVNFNFDDPNLIILPLAFGKRQGREFIWNDLLSLETGSLKLANGRVIEKTLYNRRTRQDEPALFVALTFERREVLDSSNIKPTNLIGVDRGENIPAVIALTDPEGCPLSRFKDSLGNPTHILRIGESYKEKQRTTQAKKEVEQRRAGGYSRKYASKAKNLADDMVRNTARDLLYYAVTQDAMLIFENLSRGFGRQGKRTFMAERQYTRMEDWLTAKLAYEGLPSKTYLSKTLAQYTSKTCSNCGFTITSADYDRVLEKLKKTATGWMTTINGKELKVEGQITYYNRYKRQNVVKDLSVELDRLSEESVNNDISSWTKGRSGEALSLLKKRFSHRPVQEKFVCLNCGFETHADEQAALNIARSWLFLRSQEYKKYQTNKTTGNTDKRAFVETWQSFYRKKLKEVWKPAV

SEQ ID NO: 25314 - protein, 978 aa, synthetic construct
  REGION 1..978: note = engineered CasX variant
QEIKRINKIRRRLVKDSNTKKAGKTGPMKTLLVRVMTPDLRERLENLRKKPENIPQPISNTSRANLNKLLTDYTEMKKAILHVYWEEFQKDPVGLMSRVAQPASKKIDQNKLKPEMDEKGNLTTAGFACSQCGQPLFVYKLEQVSEKGKAYTNYFGRCNVAEHEKLILLAQLKPEKDSDEAVTYSLGKFGQRALDFYSIHVTKESTHPVKPLAQIAGNRYASGPVGKALSDACMGTIASFLSKYQDIIIEHQKVVKGNQKRLESLRELAGKENLEYPSVTLPPQPHTKEGVDAYNEVIARVRMWVNLNLWQKLKLSRDDAKPLLRLKGFPSFPLVERQANEVDWWDMVCNVKKLINEKKEDGKVFWQNLAGYKRQEALRPYLSSEEDRKKGKKFARYQLGDLLLHLEKKHGEDWGKVYDEAWERIDKKVEGLSKHIKLEEERRSEDAQSKAALTDWLRAKASFVIEGLKEADKDEFCRCELKLQKWYGDLRGKPFAIEAENSILDISGFSKQYNCAFIWQKDGVKKLNLYLIINYFKGGKLRFKKIKPEAFEANRFYTVINKKSGEIVPMEVNFNFDDPNLIILPLAFGKRQGREFIWNDLLSLETGSLKLANGRVIEKTLYNRRTRQDEPALFVALTFERREVLDSSNIKPTNLIGVDRGENIPAVIALTDPEGCPLSRFKDSLGNPTHILRIGESYKEKQRTIQAKKEVKQRRAGGYSRKYASKAKNLADDMVRNTARDLLYYAVTQDAMLIFENLSRGFGRQGKRTFMAERQYTRMEDWLTAKLAYEGLPSKTYLSKTLAQYTSKTCSNCGFTITSADYDRVLEKLKKTATGWMTTINGKELKVEGQITYYNRYKRQNVVKDLSVELDRLSEESVNNDISSWTKGRSGEALSLLKKRFSHRPVQEKFVCLNCGFETHADEQAALNIARSWLFLRSQEYKKYQTNKTTGNTDKRAFVETWQSFYRKKLKEVWKPAV

SEQ ID NO: 25315 - protein, 978 aa, synthetic construct
  REGION 1..978: note = engineered CasX variant
QEIKRINKIRRRLVKDSNTKKAGKTGPMKTLLVRVMTPDLRERLENLRKKPENIPQPISNTSRANLNKLLTDYTEMKKAILHVYWEEFQKDPVGLMSRVAQPASKKIDQNKLKPEMDEKGNLTTAGFACSQCGQPLFVYKLEQVSEKGKAYTNYFGRCNVAEHEKLILLAQLKPEKDSDEAVTYSLGKFGQRALDFYSIHVTKESTHPVKPLAQIAGNRYASGPVGKALSDACMGTIASFLSKYQDIIIEHQKVVKGNQKRLESLRELAGKENLEYPSVTLPPQPHTKEGVDAYNEVIARVRMWVNLNLWQKLKLSRDDAKPLLRLKGFPSFPLVERQANEVDWWDMVCNVKKLINEKKEDGKVFWQNLAGYKRQEALRPYLSSEEDRKKGKKFARYQLGDLLLHLEKKHGEDWGKVYDEAWERIDKKVEGLSKHIKLEEERRSEDAQSKAALTDWLRAKASFVIEGLKEADKDEFCRCELKLQKWYGDLRGKPFAIEAENSILDISGFSKQYNCAFIWQKDGVKKLNLYLIINYFKGGKLRFKKIKPEAFEANRFYTVINKKSGEIVPMEVNFNFDDPNLIILPLAFGKRQGREFIWNDLLSLETGSLKLANGRVIEKTLYNRRTRQDEPALFVALTFERREVLDSSNIKPTNLIGVDRGENIPAVIALTDPEGCPLSRFKDSLGNPTHILRIGESYKEKQRTIQAKKEVEQRRAGGYSRKYASKAKNLADDMVRNTARDLLYYAVTQDAMLIFENLSRGFGRQGKRTFMAERQYTRMEDWLTAKLAYEGLPSKTYLSKTLAQYTSKTCSNCGFTITSADYDRVLEKLKKTATGWMTTINGKELKVEGQITYYNRYKRQNVVKDLSVELDRLSEESVNNDISSWTKGRSGEALSLLKKRFSHRPVQEKFVCLNCGFETHADEQAALNIARSWLFLRSQEYKKYQTNKTTGNTDKRAFVETWQSFYRKKLKEVWKPAV

SEQ ID NO: 25316 - protein, 978 aa, synthetic construct
  REGION 1..978: note = engineered CasX variant
QEIKRINKIRRRLVKDSNTKKAGKTGPMKTLLVRVMTPDLRERLENLRKKPENIPQPISNTSRANLNKLLTDYTEMKKAILHVYWEEFQKDPVGLMSRVAQPASKKIDQNKLKPEMDEKGNLTTAGFACSQCGQPLFVYKLEQVSEKGKAYTNYFGRCNVAEHEKLILLAQLKPEKDSDEAVTYSLGKFGQRALDFYSIHVTKESTHPVKPLAQIAGNRYASGPVGKALSDACMGTIASFLSKYQDIIIEHQKVVKGNQKRLESLRELAGKENLEYPSVTLPPQPHTKEGVDAYNEVIARVRMWVNLNLWQKLKLSRDDAKPLLRLKGFPSFPLVERQANEVDWWDMVCNVKKLINEKKEDGKVFWQNLAGYKRQEALRPYLSSEEDRKKGKKFARYQLGDLLLHLEKKHGEDWGKVYDEAWERIDKKVEGLSKHIKLEEERRSEDAQSKAALTDWLRAKASFVIEGLKEADKDEFCRCELKLQKWYGDLRGKPFAIEAENSILDISGFSKQYNCAFIWQKDGVKKLNLYLIINYFKGGKLRFKKIKPEAFEANRFYTVINKKSGEIVPMEVNFNFDDPNLIILPLAFGKRQGREFIWNDLLSLETGSLKLANGRVIEKTLYNRRTRQDEPALFVALTFERREVLDSSNIKPTNLIGVDRGENIPAVIALTDPEGCPLSRFKDSLGNPTHILRIGESYKEKQRTIQAKKEVEQDRAGGYSRKYASKAKNLADDMVRNTARDLLYYAVTQDAMLIFENLSRGFGRQGKRTFMAERQYTRMEDWLTAKLAYEGLPSKTYLSKTLAQYTSKTCSNCGFTITSADYDRVLEKLKKTATGWMTTINGKELKVEGQITYYNRYKRQNVVKDLSVELDRLSEESVNNDISSWTKGRSGEALSLLKKRFSHRPVQEKFVCLNCGFETHADEQAALNIARSWLFLRSQEYKKYQTNKTTGNTDKRAFVETWQSFYRKKLKEVWKPAV

SEQ ID NO: 25317 - protein, 978 aa, synthetic construct
  REGION 1..978: note = engineered CasX variant
QEIKRINKIRRRLVKDSNTKKAGKTGPMKTLLVRVMTPDLRERLENLRKKPENIPQPISNTSRANLNKLLTDYTEMKKAILHVYWEEFQKDPVGLMSRVAQPASKKIDQNKLKPEMDEKGNLTTAGFACSQCGQPLFVYKLEQVSEKGKAYTNYFGRCNVAEHEKLILLAQLKPEKDSDEAVTYSLGKFGQRALDFYSIHVTKESTHPVKPLAQIAGNRYASGPVGKALSDACMGTIASFLSKYQDIIIEHQKVVKGNQKRLESLRELAGKENLEYPSVTLPPQPHTKEGVDAYNEVIARVRMWVNLNLWQKLKLSRDDAKPLLRLKGFPSFPLVERQANEVDWWDMVCNVKKLINEKKEDGKVFWQNLAGYKRQEALRPYLSSEEDRKKGKKFARYQLGDLLLHLEKKHGEDWGKVYDEAWERIDKKVEGLSKHIKLEEERRSEDAQSKAALTDWLRAKASFVIEGLKEADKDEFCRCELKLQKWYGDLRGKPFAIEAENSILDISGFSKQYNCAFIWQKDGVKKLNLYLIINYFKGGKLRFKKIKPEAFEANRFYTVINKKSGEIVPMEVNFNFDDPNLIILPLAFGKRQGREFIWNDLLSLETGSLKLANGRVIEKTLYNRRTRQDEPALFVALTFERREVLDSSNIKPTNLIGVDRGENIPAVIALTDPEGCPLSRFADSLGNPTHILRIGESYKEKQRTIQAKKEVEQRRAGGYSRKYASKAKNLADDMVRNTARDLLYYAVTQDAMLIFENLSRGFGRQGKRTFMAERQYTRMEDWLTAKLAYEGLPSKTYLSKTLAQYTSKTCSNCGFTITSADYDRVLEKLKKTATGWMTTINGKELKVEGQITYYNRYKRQNVVKDLSVELDRLSEESVNNDISSWTKGRSGEALSLLKKRFSHRPVQEKFVCLNCGFETHADEQAALNIARSWLFLRSQEYKKYQTNKTTGNTDKRAFVETWQSFYRKKLKEVWKPAV

SEQ ID NO: 25318 - protein, 978 aa, synthetic construct
  REGION 1..978: note = engineered CasX variant
QEIKRINKIRRRLVKDSNTKKAGKTGPMKTLLVRVMTPDLRERLENLRKKPENIPQPISNTSRANLNKLLTDYTEMKKAILHVYWEEFQKDPVGLMSRVAQPASKKIDQNKLKPEMDEKGNLTTAGFACSQCGQPLFVYKLEQVSEKGKAYTNYFGRCNVAEHEKLILLAQLKPEKDSDEAVTYSLGKFGQRALDFYSIHVTKESTHPVKPLAQIAGNRYASGPVGKALSDACMGTIASFLSKYQDIIIEHQKVVKGNQKRLESLRELAGKENLEYPSVTLPPQPHTKEGVDAYNEVIARVRMWVNLNLWQKLKLSRDDAKPLLRLKGFPSFPLVERQANEVDWWDMVCNVKKLINEKKEDGKVFWQNLAGYKRQEALRPYLSSEEDRKKGKKFARYQLGDLLLHLEKKHGEDWGKVYDEAWERIDKKVEGLSKHIKLEEERRSEDAQSKAALTDWLRAKASFVIEGLKEADKDEFCRCELKLQKWYGDLRGKPFAIEAENSILDISGFSKQYNCAFIWQKDGVKKLNLYLIINYFKGGKLRFKKIKPEAFEANRFYTVINKKSGEIVPMEVNFNFDDPNLIILPLAFGKRQGREFIWNDLLSLETGSLKLANGRVIEKTLYNRRTRQDEPALFVALTFERREVLDSSNIKPTNLIGVDRGENIPAVIALLDPEGCPLSRFKDSLGNPTHILRIGESYKEKQRTTQAKKEVEQRRAGGYSRKYASKAKNLADDMVRNTARDLLYYAVTQDAMLIFENLSRGFGRQGKRTFMAERQYTRMEDWLTAKLAYEGLPSKTYLSKTLAQYTSKTCSNCGFTITSADYDRVLEKLKKTATGWMTTINGKELKVEGQITYYNRYKRQNVVKDLSVELDRLSEESVNNDISSWTKGRSGEALSLLKKRFSHRPVQEKFVCLNCGFETHADEQAALNIARSWLFLRSQEYKKYQTNKTTGNTDKRAFVETWQSFYRKKLKEVWKPAV

SEQ ID NO: 25319 - protein, 978 aa, synthetic construct
  REGION 1..978: note = engineered CasX variant
QEIKRINKIRRRLVKDSNTKKAGKTGPMKTLLVRVMTPDLRERLENLRKKPENIPQPISNTSRANLNKLLTDYTEMKKAILHVYWEEFQKDPVGLMSRVAQPASKKIDQNKLKPEMDEKGNLTTAGFACSQCGQPLFVYKLEQVSEKGKAYTNYFGRCNVAEHEKLILLAQLKPEKDSDEAVTYSLGKFGQRALDFYSIHVTKESTHPVKPLAQIAGNRYASGPVGKALSDACMGTIASFLSKYQDIIIEHQKVVKGNQKRLESLRELAGKENLEYPSVTLPPQPHTKEGVDAYNEVIARVRMWVNLNLWQKLKLSRDDAKPLLRLKGFPSFPLVERQANEVDWWDMVCNVKKLINEKKEDGKVFWQNLAGYKRQEALRPYLSSEEDRKKGKKFARYQLGDLLLHLEKKHGEDWGKVYDEAWERIDKKVEGLSKHIKLEEERRSEDAQSKAALTDWLRAKASFVIEGLKEADKDEFCRCELKLQKWYGDLRGKPFAIEAENSILDISGFSKQYNCAFIWQKDGVKKLNLYLIINYFKGGKLRFKKIKPEAFEANRFYTVINKKSGEIVPMEVNFNFDDPNLIILPLAFGKRQGREFIWNDLLSLETGSLKLANGRVIEKTLYNRRTRQDEPALFVALTFERREVLDSSNIKPTNLIGVDRGENIPAVIALLDPEGCPLSRFKDSLGNPTHILRIGESYKEKQRTIQAKKEVEQRRAGGYSRKYASKAKNLADDMVRNTARDLLYYAVTQDAMLIFENLSRGFGRQGKRTFMAERQYTRMEDWLTAKLAYEGLPSKTYLSKTLAQYTSKTCSNCGFTITSADYDRVLEKLKKTATGWMTTINGKELKVEGQITYYNRYKRQNVVKDLSVELDRLSEESVNNDISSWTKGRSGEALSLLKKRFSHRPVQEKFVCLNCGFETHADEQAALNIARSWLFLRSQEYKKYQTNKTTGNTDKRAFVETWQSFYRKKLKEVWKPAV

SEQ ID NO: 25320 - protein, 978 aa, synthetic construct
  REGION 1..978: note = engineered CasX variant
QEIKRINKIRRRLVKDSNTKKAGKTGPMKTLLVRVMTPDLRERLENLRKKPENIPQPISNTSRANLNKLLTDYTEMKKAILHVYWEEFQKDPVGLMSRVAQPASKKIDQNKLKPEMDEKGNLTTAGFACSQCGQPLFVYKLEQVSEKGKAYTNYFGRCNVAEHEKLILLAQLKPEKDSDEAVTYSLGKFGQRALDFYSIHVTKESTHPVKPLAQIAGNRYASGPVGKALSDACMGTIASFLSKYQDIIIEHQKVVKGNQKRLESLRELAGKENLEYPSVTLPPQPHTKEGVDAYNEVIARVRMWVNLNLWQKLKLSRDDAKPLLRLKGFPSFPLVERQANEVDWWDMVCNVKKLINEKKEDGKVFWQNLAGYKRQEALRPYLSSEEDRKKGKKFARYQLGDLLLHLEKKHGEDWGKVYDEAWERIDKKVEGLSKHIKLEEERRSEDAQSKAALTDWLRAKASFVIEGLKEADKDEFCRCELKLQKWYGDLRGKPFAIEAENSILDISGFSKQYNCAFIWQKDGVKKLNLYLIINYFKGGKLRFKKIKPEAFEANRFYTVINKKSGEIVPMEVNFNFDDPNLIILPLAFGKRQGREFIWNDLLSLETGSLKLANGRVIEKTLYNRRTRQDEPALFVALTFERREVLDSSNIKPSNLIGVDRGENIPAVIALTDPEGCPLSRFKDSLGNPTHILRIGESYKEKQRTIQAKKEVEQRRAGGYSRKYASKAKNLADDMVRNTARDLLYYAVTQDAMLIFENLSRGFGRQGKRTFMAERQYTRMEDWLTAKLAYEGLPSKTYLSKTLAQYTSKTCSNCGFTITSADYDRVLEKLKKTATGWMTTINGKELKVEGQITYYNRYKRQNVVKDLSVELDRLSEESVNNDISSWTKGRSGEALSLLKKRFSHRPVQEKFVCLNCGFETHADEQAALNIARSWLFLRSQEYKKYQTNKTTGNTDKRAFVETWQSFYRKKLKEVWKPAV

SEQ ID NO: 25321 - protein, 978 aa, synthetic construct
  REGION 1..978: note = engineered CasX variant
QEIKRINKIRRRLVKDSNTKKAGKTGPMKTLLVRVMTPDLRERLENLRKKPENIPQPISNTSRANLNKLLTDYTEMKKAILHVYWEEFQKDPVGLMSRVAQPASKKIDQNKLKPEMDEKGNLTTAGFACSQCGQPLFVYKLEQVSEKGKAYTNYFGRCNVAEHEKLILLAQLKPEKDSDEAVTYSLGKFGQRALDFYSIHVTKESTHPVKPLAQIAGNRYASGPVGKALSDACMGTIASFLSKYQDIIIEHQKVVKGNQKRLESLRELAGKENLEYPSVTLPPQPHTKEGVDAYNEVIARVRMWVNLNLWQKLKLSRDDAKPLLRLKGFPSFPLVERQANEVDWWDMVCNVKKLINEKKEDGKVFWQNLAGYKRQEALRPYLSSEEDRKKGKKFARYQLGDLLLHLEKKHGEDWGKVYDEAWERIDKKVEGLSKHIKLEEERRSEDAQSKAALTDWLRAKASFVIEGLKEADKDEFCRCELKLQKWYGDLRGKPFAIEAENSILDISGFSKQYNCAFIWQKDGVKKLNLYLIINYFKGGKLRFKKIKPEAFEANRFYTVINKKSGEIVPMEVNFNFDDPNLIILPLAFGKRQGREFIWNDLLSLETGSLKLANGRVIEKTLYNRRTRQDEPALFVALTFERREVLDSSNIKPRNLIGVDRGENIPAVIALTDPEGCPLSRFKDSLGNPTHILRIGESYKEKQRTIQAKKEVEQRRAGGYSRKYASKAKNLADDMVRNTARDLLYYAVTQDAMLIFENLSRGFGRQGKRTFMAERQYTRMEDWLTAKLAYEGLPSKTYLSKTLAQYTSKTCSNCGFTITSADYDRVLEKLKKTATGWMTTINGKELKVEGQITYYNRYKRQNVVKDLSVELDRLSEESVNNDISSWTKGRSGEALSLLKKRFSHRPVQEKFVCLNCGFETHADEQAALNIARSWLFLRSQEYKKYQTNKTTGNTDKRAFVETWQSFYRKKLKEVWKPAV

SEQ ID NO: 25322 - protein, 978 aa, synthetic construct
  REGION 1..978: note = engineered CasX variant
QEIKRINKIRRRLVKDSNTKKAGKTGPMKTLLVRVMTPDLRERLENLRKKPENIPQPISNTSRANLNKLLTDYTEMKKAILHVYWEEFQKDPVGLMSRVAQPASKKIDQNKLKPEMDEKGNLTTAGFACSQCGQPLFVYKLEQVSEKGKAYTNYFGRCNVAEHEKLILLAQLKPEKDSDEAVTYSLGKFGQRALDFYSIHVTKESTHPVKPLAQIAGNRYASGPVGKALSDACMGTIASFLSKYQDIIIEHQKVVKGNQKRLESLRELAGKENLEYPSVTLPPQPHTKEGVDAYNEVIARVRMWVNLNLWQKLKLSRDDAKPLLRLKGFPSFPLVERQANEVDWWDMVCNVKKLINEKKEDGKVFWQNLAGYKRQEALRPYLSSEEDRKKGKKFARYQLGDLLLHLEKKHGEDWGKVYDEAWERIDKKVEGLSKHIKLEEERRSEDAQSKAALTDWLRAKASFVIEGLKEADKDEFCRCELKLQKWYGDLRGKPFAIEAENSILDISGFSKQYNCAFIWQKDGVKKLNLYLIINYFKGGKLRFKKIKPEAFEANRFYTVINKKSGEIVPMEVNFNFDDPNLIILPLAFGKRQGREFIWNDLLSLETGSLKLANGRVIEKTLYNRRTRQDEPALFVALTFERREVLDSSNIKPQNLIGVDRGENIPAVICLTDPEGCPLSRFKDSLGNPTHILRIGESYKEKQRTIQAKKEVEQRRAGGYSRKYASKAKNLADDMVRNTARDLLYYAVTQDAMLIFENLSRGFGRQGKRTFMAERQYTRMEDWLTAKLAYEGLPSKTYLSKTLAQYTSKTCSNCGFTITSADYDRVLEKLKKTATGWMTTINGKELKVEGQITYYNRYKRQNVVKDLSVELDRLSEESVNNDISSWTKGRSGEALSLLKKRFSHRPVQEKFVCLNCGFETHADEQAALNIARSWLFLRSQEYKKYQTNKTTGNTDKRAFVETWQSFYRKKLKEVWKPAV

SEQ ID NO: 25323 - protein, 978 aa, synthetic construct
  REGION 1..978: note = engineered CasX variant
QEIKRINKIRRRLVKDSNTKKAGKTGPMKTLLVRVMTPDLRERLENLRKKPENIPQPISNTSRANLNKLLTDYTEMKKAILHVYWEEFQKDPVGLMSRVAQPASKKIDQNKLKPEMDEKGNLTTAGFACSQCGQPLFVYKLEQVSEKGKAYTNYFGRCNVAEHEKLILLAQLKPEKDSDEAVTYSLGKFGQRALDFYSIHVTKESTHPVKPLAQIAGNRYASGPVGKALSDACMGTIASFLSKYQDIIIEHQKVVKGNQKRLESLRELAGKENLEYPSVTLPPQPHTKEGVDAYNEVIARVRMWVNLNLWQKLKLSRDDAKPLLRLKGFPSFPLVERQANEVDWWDMVCNVKKLINEKKEDGKVFWQNLAGYKRQEALRPYLSSEEDRKKGKKFARYQLGDLLLHLEKKHGEDWGKVYDEAWERIDKKVEGLSKHIKLEEERRSEDAQSKAALTDWLRAKASFVIEGLKEADKDEFCRCELKLQKWYGDLRGKPFAIEAENSILDISGFSKQYNCAFIWQKDGVKKLNLYLIINYFKGGKLRFKKIKPEAFEANRFYTVINKKSGEIVPMEVNFNFDDPNLIILPLAFGKRQGREFIWNDLLSLETGSLKLANGRVIEKTLYNRRTRQDEPALFVALTFERREVLDSSNIKPQNLIGVDRGENIPAVIALTDPEGCPLSRFKDSLGNYTHILRIGESYKEKQRTIQAKKEVEQRRAGGYSRKYASKAKNLADDMVRNTARDLLYYAVTQDAMLIFENLSRGFGRQGKRTFMAERQYTRMEDWLTAKLAYEGLPSKTYLSKTLAQYTSKTCSNCGFTITSADYDRVLEKLKKTATGWMTTINGKELKVEGQITYYNRYKRQNVVKDLSVELDRLSEESVNNDISSWTKGRSGEALSLLKKRFSHRPVQEKFVCLNCGFETHADEQAALNIARSWLFLRSQEYKKYQTNKTTGNTDKRAFVETWQSFYRKKLKEVWKPAV

SEQ ID NO: 25324 - protein, 978 aa, synthetic construct
  REGION 1..978: note = engineered CasX variant
QEIKRINKIRRRLVKDSNTKKAGKTGPMKTLLVRVMTPDLRERLENLRKKPENIPQPISNTSRANLNKLLTDYTEMKKAILHVYWEEFQKDPVGLMSRVAQPASKKIDQNKLKPEMDEKGNLTTAGFACSQCGQPLFVYKLEQVSEKGKAYTNYFGRCNVAEHEKLILLAQLKPEKDSDEAVTYSLGKFGQRALDFYSIHVTKESTHPVKPLAQIAGNRYASGPVGKALSDACMGTIASFLSKYQDIIIEHQKVVKGNQKRLESLRELAGKENLEYPSVTLPPQPHTKEGVDAYNEVIARVRMWVNLNLWQKLKLSRDDAKPLLRLKGFPSFPLVERQANEVDWWDMVCNVKKLINEKKEDGKVFWQNLAGYKRQEALRPYLSSEEDRKKGKKFARYQLGDLLLHLEKKHGEDWGKVYDEAWERIDKKVEGLSKHIKLEEERRSEDAQSKAALTDWLRAKASFVIEGLKEADKDEFCRCELKLQKWYGDLRGKPFAIEAENSILDISGFSKQYNCAFIWQKDGVKKLNLYLIINYFKGGKLRFKKIKPEAFEANRFYTVINKKSGEIVPMEVNFNFDDPNLIILPLAFGKRQGREFIWNDLLSLETGSLKLANGRVIEKTLYNRRTRQDEPALFVALTFERREVLDSSNIKPQNLIGVDRGENIPAVIALTDPEGCPLSRFKDSLGNPTHILRIGESYKEKQRTIQAKKEVEQRRAGGYSRKYASKAKNLADDMVRNTARDLLYYAVTQDAMLIFENLSRGFGRQGKRTFMAERQYTRMEDWLTAKLAYEGLPSKTYLSKTLAQYTSKTCSNCGFTITSADYDRVLEKLKKTATGWMTTINGKELKVEGQITYYNRYKRQNVVKDLSVELDRLSEESVNNDISSWTKGRSGEALSLLKKRFSHRPVQEKFVCLNCGFETHADEQAALNIARSWLFLRSQEYKKYQTNKTTGNTDKRAFVETWQSFYRKKLKEVWKPAV

SEQ ID NO: 25325 - protein, 978 aa, synthetic construct
  REGION 1..978: note = engineered CasX variant
QEIKRINKIRRRLVKDSNTKKAGKTGPMKTLLVRVMTPDLRERLENLRKKPENIPQPISNTSRANLNKLLTDYTEMKKAILHVYWEEFQKDPVGLMSRVAQPASKKIDQNKLKPEMDEKGNLTTAGFACSQCGQPLFVYKLEQVSEKGKAYTNYFGRCNVAEHEKLILLAQLKPEKDSDEAVTYSLGKFGQRALDFYSIHVTKESTHPVKPLAQIAGNRYASGPVGKALSDACMGTIASFLSKYQDIIIEHQKVVKGNQKRLESLRELAGKENLEYPSVTLPPQPHTKEGVDAYNEVIARVRMWVNLNLWQKLKLSRDDAKPLLRLKGFPSFPLVERQANEVDWWDMVCNVKKLINEKKEDGKVFWQNLAGYKRQEALRPYLSSEEDRKKGKKFARYQLGDLLLHLEKKHGEDWGKVYDEAWERIDKKVEGLSKHIKLEEERRSEDAQSKAALTDWLRAKASFVIEGLKEADKDEFCRCELKLQKWYGDLRGKPFAIEAENSILDISGFSKQYNCAFIWQKDGVKKLNLYLIINYFKGGKLRFKKIKPEAFEANRFYTVINKKSGEIVPMEVNFNFDDPNLIILPLAFGKRQGREFIWNDLLSLETGSLKLANGRVIEKTLYNRRTRQDEPALFVALTFERREVLDSSNIKPQNLIGVDRGENIPAVIALTDPEGCPLSRFKDSLGNPTHILRIGESYKEKQRQIQAKKEVEQRRAGGYSRKYASKAKNLADDMVRNTARDLLYYAVTQDAMLIFENLSRGFGRQGKRTFMAERQYTRMEDWLTAKLAYEGLPSKTYLSKTLAQYTSKTCSNCGFTITSADYDRVLEKLKKTATGWMTTINGKELKVEGQITYYNRYKRQNVVKDLSVELDRLSEESVNNDISSWTKGRSGEALSLLKKRFSHRPVQEKFVCLNCGFETHADEQAALNIARSWLFLRSQEYKKYQTNKTTGNTDKRAFVETWQSFYRKKLKEVWKPAV

SEQ ID NO: 25326 - protein, 978 aa, synthetic construct
  REGION 1..978: note = engineered CasX variant
QEIKRINKIRRRLVKDSNTKKAGKTGPMKTLLVRVMTPDLRERLENLRKKPENIPQPISNTSRANLNKLLTDYTEMKKAILHVYWEEFQKDPVGLMSRVAQPASKKIDQNKLKPEMDEKGNLTTAGFACSQCGQPLFVYKLEQVSEKGKAYTNYFGRCNVAEHEKLILLAQLKPEKDSDEAVTYSLGKFGQRALDFYSIHVTKESTHPVKPLAQIAGNRYASGPVGKALSDACMGTIASFLSKYQDIIIEHQKVVKGNQKRLESLRELAGKENLEYPSVTLPPQPHTKEGVDAYNEVIARVRMWVNLNLWQKLKLSRDDAKPLLRLKGFPSFPLVERQANEVDWWDMVCNVKKLINEKKEDGKVFWQNLAGYKRQEALRPYLSSEEDRKKGKKFARYQLGDLLLHLEKKHGEDWGKVYDEAWERIDKKVEGLSKHIKLEEERRSEDAQSKAALTDWLRAKASFVIEGLKEADKDEFCRCELKLQKWYGDLRGKPFAIEAENSILDISGFSKQYNCAFIWQKDGVKKLNLYLIINYFKGGKLRFKKIKPEAFEANRFYTVINKKSGEIVPMEVNFNFDDPNLIILPLAFGKRQGREFIWNDLLSLETGSLKLANGRVIEKTLYNRRTRQDEPALFVALTFERREVLDSSNIKPQNLIGVDRGENIPAVIALTDMEGCPLSRFKDSLGNYTHILRIGESYKEKQRTIQAKKEVEQRRAGGYSRKYASKAKNLADDMVRNTARDLLYYAVTQDAMLIFENLSRGFGRQGKRTFMAERQYTRMEDWLTAKLAYEGLPSKTYLSKTLAQYTSKTCSNCGFTITSADYDRVLEKLKKTATGWMTTINGKELKVEGQITYYNRYKRQNVVKDLSVELDRLSEESVNNDISSWTKGRSGEALSLLKKRFSHRPVQEKFVCLNCGFETHADEQAALNIARSWLFLRSQEYKKYQTNKTTGNTDKRAFVETWQSFYRKKLKEVWKPAV

SEQ ID NO: 25327 - protein, 978 aa, synthetic construct
  REGION 1..978: note = engineered CasX variant
QEIKRINKIRRRLVKDSNTKKAGKTGPMKTLLVRVMTPDLRERLENLRKKPENIPQPISNTSRANLNKLLTDYTEMKKAILHVYWEEFQKDPVGLMSRVAQPASKKIDQNKLKPEMDEKGNLTTAGFACSQCGQPLFVYKLEQVSEKGKAYTNYFGRCNVAEHEKLILLAQLKPEKDSDEAVTYSLGKFGQRALDFYSIHVTKESTHPVKPLAQIAGNRYASGPVGKALSDACMGTIASFLSKYQDIIIEHQKVVKGNQKRLESLRELAGKENLEYPSVTLPPQPHTKEGVDAYNEVIARVRMWVNLNLWQKLKLSRDDAKPLLRLKGFPSFPLVERQANEVDWWDMVCNVKKLINEKKEDGKVFWQNLAGYKRQEALRPYLSSEEDRKKGKKFARYQLGDLLLHLEKKHGEDWGKVYDEAWERIDKKVEGLSKHIKLEEERRSEDAQSKAALTDWLRAKASFVIEGLKEADKDEFCRCELKLQKWYGDLRGKPFAIEAENSILDISGFSKQYNCAFIWQKDGVKKLNLYLIINYFKGGKLRFKKIKPEAFEANRFYTVINKKSGEIVPMEVNFNFDDPNLIILPLAFGKRQGREFIWNDLLSLETGSLKLANGRVIEKTLYNRRTRQDEPALFVALTFERREVLDSSNIKPQNLIGVDRGENIPAVIALTDMEGCPLSRFKDSLGNPTHILRIGESYKEKQRTIQAKKEVEQRRAGGYSRKYASKAKNLADDMVRNTARDLLYYAVTQDAMLIFENLSRGFGRQGKRTFMAERQYTRMEDWLTAKLAYEGLPSKTYLSKTLAQYTSKTCSNCGFTITSADYDRVLEKLKKTATGWMTTINGKELKVEGQITYYNRYKRQNVVKDLSVELDRLSEESVNNDISSWTKGRSGEALSLLKKRFSHRPVQEKFVCLNCGFETHADEQAALNIARSWLFLRSQEYKKYQTNKTTGNTDKRAFVETWQSFYRKKLKEVWKPAV

SEQ ID NO: 25328 - protein, 978 aa, synthetic construct
  REGION 1..978: note = engineered CasX variant
QEIKRINKIRRRLVKDSNTKKAGKTGPMKTLLVRVMTPDLRERLENLRKKPENIPQPISNTSRANLNKLLTDYTEMKKAILHVYWEEFQKDPVGLMSRVAQPASKKIDQNKLKPEMDEKGNLTTAGFACSQCGQPLFVYKLEQVSEKGKAYTNYFGRCNVAEHEKLILLAQLKPEKDSDEAVTYSLGKFGQRALDFYSIHVTKESTHPVKPLAQIAGNRYASGPVGKALSDACMGTIASFLSKYQDIIIEHQKVVKGNQKRLESLRELAGKENLEYPSVTLPPQPHTKEGVDAYNEVIARVRMWVNLNLWQKLKLSRDDAKPLLRLKGFPSFPLVERQANEVDWWDMVCNVKKLINEKKEDGKVFWQNLAGYKRQEALRPYLSSEEDRKKGKKFARYQLGDLLLHLEKKHGEDWGKVYDEAWERIDKKVEGLSKHIKLEEERRSEDAQSKAALTDWLRAKASFVIEGLKEADKDEFCRCELKLQKWYGDLRGKPFAIEAENSILDISGFSKQYNCAFIWQKDGVKKLNLYLIINYFKGGKLRFKKIKPEAFEANRFYTVINKKSGEIVPMEVNFNFDDPNLIILPLAFGKRQGREFIWNDLLSLETGSLKLANGRVIEKTLYNRRTRQDEPALFVALTFERREVLDSSNIKPQNLIGVDRGENIPAVFCLTDPEGCPLSRFKDSLGNPTHILRIGESYKEKQRTIQAKKEVEQRRAGGYSRKYASKAKNLADDMVRNTARDLLYYAVTQDAMLIFENLSRGFGRQGKRTFMAERQYTRMEDWLTAKLAYEGLPSKTYLSKTLAQYTSKTCSNCGFTITSADYDRVLEKLKKTATGWMTTINGKELKVEGQITYYNRYKRQNVVKDLSVELDRLSEESVNNDISSWTKGRSGEALSLLKKRFSHRPVQEKFVCLNCGFETHADEQAALNIARSWLFLRSQEYKKYQTNKTTGNTDKRAFVETWQSFYRKKLKEVWKPAV

SEQ ID NO: 25329 - protein, 978 aa, synthetic construct
  REGION 1..978: note = engineered CasX variant
QEIKRINKIRRRLVKDSNTKKAGKTGPMKTLLVRVMTPDLRERLENLRKKPENIPQPISNTSRANLNKLLTDYTEMKKAILHVYWEEFQKDPVGLMSRVAQPASKKIDQNKLKPEMDEKGNLTTAGFACSQCGQPLFVYKLEQVSEKGKAYTNYFGRCNVAEHEKLILLAQLKPEKDSDEAVTYSLGKFGQRALDFYSIHVTKESTHPVKPLAQIAGNRYASGPVGKALSDACMGTIASFLSKYQDIIIEHQKVVKGNQKRLESLRELAGKENLEYPSVTLPPQPHTKEGVDAYNEVIARVRMWVNLNLWQKLKLSRDDAKPLLRLKGFPSFPLVERQANEVDWWDMVCNVKKLINEKKEDGKVFWQNLAGYKRQEALRPYLSSEEDRKKGKKFARYQLGDLLLHLEKKHGEDWGKVYDEAWERIDKKVEGLSKHIKLEEERRSEDAQSKAALTDWLRAKASFVIEGLKEADKDEFCRCELKLQKWYGDLRGKPFAIEAENSILDISGFSKQYNCAFIWQKDGVKKLNLYLIINYFKGGKLRFKKIKPEAFEANRFYTVINKKSGEIVPMEVNFNFDDPNLIILPLAFGKRQGREFIWNDLLSLETGSLKLANGRVIEKTLYNRRTRQDEPALFVALTFERREVLDSSNIKPQNLIGVDRGENIPAVFALTDPEGCPLSRFKDSLGNPTHILRIGESYKEKQRTIQAKKEVEQRRAGGYSRKYASKAKNLADDMVRNTARDLLYYAVTQDAMLIFENLSRGFGRQGKRTFMAERQYTRMEDWLTAKLAYEGLPSKTYLSKTLAQYTSKTCSNCGFTITSADYDRVLEKLKKTATGWMTTINGKELKVEGQITYYNRYKRQNVVKDLSVELDRLSEESVNNDISSWTKGRSGEALSLLKKRFSHRPVQEKFVCLNCGFETHADEQAALNIARSWLFLRSQEYKKYQTNKTTGNTDKRAFVETWQSFYRKKLKEVWKPAV

SEQ ID NO: 25330 - protein, 978 aa, synthetic construct
  REGION 1..978: note = engineered CasX variant
QEIKRINKIRRRLVKDSNTKKAGKTGPMKTLLVRVMTPDLRERLENLRKKPENIPQPISNTSRANLNKLLTDYTEMKKAILHVYWEEFQKDPVGLMSRVAQPASKKIDQNKLKPEMDEKGNLTTAGFACSQCGQPLFVYKLEQVSEKGKAYTNYFGRCNVAEHEKLILLAQLKPEKDSDEAVTYSLGKFGQRALDFYSIHVTKESTHPVKPLAQIAGNRYASGPVGKALSDACMGTIASFLSKYQDIIIEHQKVVKGNQKRLESLRELAGKENLEYPSVTLPPQPHTKEGVDAYNEVIARVRMWVNLNLWQKLKLSRDDAKPLLRLKGFPSFPLVERQANEVDWWDMVCNVKKLINEKKEDGKVFWQNLAGYKRQEALRPYLSSEEDRKKGKKFARYQLGDLLLHLEKKHGEDWGKVYDEAWERIDKKVEGLSKHIKLEEERRSEDAQSKAALTDWLRAKASFVIEGLKEADKDEFCRCELKLQKWYGDLRGKPFAIEAENSILDISGFSKQYNCAFIWQKDGVKKLNLYLIINYFKGGKLRFKKIKPEAFEANRFYTVINKKSGEIVPMEVNFNFDDPNLIILPLAFGKRQGREFIWNDLLSLETGSLKLANGRVIEKTLYNRRTRQDEPALFVALTFERREVLDSSNIKPPNLIGVDRGENIPAVIALTDPEGCPLSRFKDSNGNPTHILRIGESYKEKQRTIQAKKEVEQRRAGGYSRKYASKAKNLADDMVRNTARDLLYYAVTQDAMLIFENLSRGFGRQGKRTFMAERQYTRMEDWLTAKLAYEGLPSKTYLSKTLAQYTSKTCSNCGFTITSADYDRVLEKLKKTATGWMTTINGKELKVEGQITYYNRYKRQNVVKDLSVELDRLSEESVNNDISSWTKGRSGEALSLLKKRFSHRPVQEKFVCLNCGFETHADEQAALNIARSWLFLRSQEYKKYQTNKTTGNTDKRAFVETWQSFYRKKLKEVWKPAV

SEQ ID NO: 25331 - protein, 978 aa, synthetic construct
  REGION 1..978: note = engineered CasX variant
QEIKRINKIRRRLVKDSNTKKAGKTGPMKTLLVRVMTPDLRERLENLRKKPENIPQPISNTSRANLNKLLTDYTEMKKAILHVYWEEFQKDPVGLMSRVAQPASKKIDQNKLKPEMDEKGNLTTAGFACSQCGQPLFVYKLEQVSEKGKAYTNYFGRCNVAEHEKLILLAQLKPEKDSDEAVTYSLGKFGQRALDFYSIHVTKESTHPVKPLAQIAGNRYASGPVGKALSDACMGTIASFLSKYQDIIIEHQKVVKGNQKRLESLRELAGKENLEYPSVTLPPQPHTKEGVDAYNEVIARVRMWVNLNLWQKLKLSRDDAKPLLRLKGFPSFPLVERQANEVDWWDMVCNVKKLINEKKEDGKVFWQNLAGYKRQEALRPYLSSEEDRKKGKKFARYQLGDLLLHLEKKHGEDWGKVYDEAWERIDKKVEGLSKHIKLEEERRSEDAQSKAALTDWLRAKASFVIEGLKEADKDEFCRCELKLQKWYGDLRGKPFAIEAENSILDISGFSKQYNCAFIWQKDGVKKLNLYLIINYFKGGKLRFKKIKPEAFEANRFYTVINKKSGEIVPMEVNFNFDDPNLIILPLAFGKRQGREFIWNDLLSLETGSLKLANGRVIEKTLYNRRTRQDEPALFVALTFERREVLDSSNIKPPNLIGVDRGENIPAVIALTDPEGCPLSRFKDSNGNPTFILRIGESYKEKQRTIQAKKEVEQRRAGGYSRKYASKAKNLADDMVRNTARDLLYYAVTQDAMLIFENLSRGFGRQGKRTFMAERQYTRMEDWLTAKLAYEGLPSKTYLSKTLAQYTSKTCSNCGFTITSADYDRVLEKLKKTATGWMTTINGKELKVEGQITYYNRYKRQNVVKDLSVELDRLSEESVNNDISSWTKGRSGEALSLLKKRFSHRPVQEKFVCLNCGFETHADEQAALNIARSWLFLRSQEYKKYQTNKTTGNTDKRAFVETWQSFYRKKLKEVWKPAV

SEQ ID NO: 25332 - protein, 978 aa, synthetic construct
  REGION 1..978: note = engineered CasX variant
QEIKRINKIRRRLVKDSNTKKAGKTGPMKTLLVRVMTPDLRERLENLRKKPENIPQPISNTSRANLNKLLTDYTEMKKAILHVYWEEFQKDPVGLMSRVAQPASKKIDQNKLKPEMDEKGNLTTAGFACSQCGQPLFVYKLEQVSEKGKAYTNYFGRCNVAEHEKLILLAQLKPEKDSDEAVTYSLGKFGQRALDFYSIHVTKESTHPVKPLAQIAGNRYASGPVGKALSDACMGTIASFLSKYQDIIIEHQKVVKGNQKRLESLRELAGKENLEYPSVTLPPQPHTKEGVDAYNEVIARVRMWVNLNLWQKLKLSRDDAKPLLRLKGFPSFPLVERQANEVDWWDMVCNVKKLINEKKEDGKVFWQNLAGYKRQEALRPYLSSEEDRKKGKKFARYQLGDLLLHLEKKHGEDWGKVYDEAWERIDKKVEGLSKHIKLEEERRSEDAQSKAALTDWLRAKASFVIEGLKEADKDEFCRCELKLQKWYGDLRGKPFAIEAENSILDISGFSKQYNCAFIWQKDGVKKLNLYLIINYFKGGKLRFKKIKPEAFEANRFYTVINKKSGEIVPMEVNFNFDDPNLIILPLAFGKRQGREFIWNDLLSLETGSLKLANGRVIEKTLYNRRTRQDEPALFVALTFERREVLDSSNIKPPNLIGVDRGENIPAVIALTDPEGCPLSRFKDSLGNPTHILRIGESYKEKQRTIQAKKEVEQRRAGGYSRKYASKAKNLADDMVRNTARDLLYYAVTQDAMLIFENLSRGFGRQGKRTFMAERQYTRMEDWLTAKLAYEGLPSKTYLSKTLAQYTSKTCSNCGFTITSADYDRVLEKLKKTATGWMTTINGKELKVEGQITYYNRYKRQNVVKDLSVELDRLSEESVNNDISSWTKGRSGEALSLLKKRFSHRPVQEKFVCLNCGFETHADEQAALNIARSWLFLRSQEYKKYQTNKTTGNTDKRAFVETWQSFYRKKLKEVWKPAV

SEQ ID NO: 25333 - protein, 978 aa, synthetic construct
  REGION 1..978: note = engineered CasX variant
QEIKRINKIRRRLVKDSNTKKAGKTGPMKTLLVRVMTPDLRERLENLRKKPENIPQPISNTSRANLNKLLTDYTEMKKAILHVYWEEFQKDPVGLMSRVAQPASKKIDQNKLKPEMDEKGNLTTAGFACSQCGQPLFVYKLEQVSEKGKAYTNYFGRCNVAEHEKLILLAQLKPEKDSDEAVTYSLGKFGQRALDFYSIHVTKESTHPVKPLAQIAGNRYASGPVGKALSDACMGTIASFLSKYQDIIIEHQKVVKGNQKRLESLRELAGKENLEYPSVTLPPQPHTKEGVDAYNEVIARVRMWVNLNLWQKLKLSRDDAKPLLRLKGFPSFPLVERQANEVDWWDMVCNVKKLINEKKEDGKVFWQNLAGYKRQEALRPYLSSEEDRKKGKKFARYQLGDLLLHLEKKHGEDWGKVYDEAWERIDKKVEGLSKHIKLEEERRSEDAQSKAALTDWLRAKASFVIEGLKEADKDEFCRCELKLQKWYGDLRGKPFAIEAENSILDISGFSKQYNCAFIWQKDGVKKLNLYLIINYFKGGKLRFKKIKPEAFEANRFYTVINKKSGEIVPMEVNFNFDDPNLIILPLAFGKRQGREFIWNDLLSLETGSLKLANGRVIEKTLYNRRTRQDEPALFVALTFERREVLDSSNIKPPNLIGVDRGENIPAVIALTDPEGCPLSRFKDSLGNPTHILRIGESYKEKQRTIQAFKEVEQRRAGGYSRKYASKAKNLADDMVRNTARDLLYYAVTQDAMLIFENLSRGFGRQGKRTFMAERQYTRMEDWLTAKLAYEGLPSKTYLSKTLAQYTSKTCSNCGFTITSADYDRVLEKLKKTATGWMTTINGKELKVEGQITYYNRYKRQNVVKDLSVELDRLSEESVNNDISSWTKGRSGEALSLLKKRFSHRPVQEKFVCLNCGFETHADEQAALNIARSWLFLRSQEYKKYQTNKTTGNTDKRAFVETWQSFYRKKLKEVWKPAV

SEQ ID NO: 25334 - protein, 978 aa, synthetic construct
  REGION 1..978: note = engineered CasX variant
QEIKRINKIRRRLVKDSNTKKAGKTGPMKTLLVRVMTPDLRERLENLRKKPENIPQPISNTSRANLNKLLTDYTEMKKAILHVYWEEFQKDPVGLMSRVAQPASKKIDQNKLKPEMDEKGNLTTAGFACSQCGQPLFVYKLEQVSEKGKAYTNYFGRCNVAEHEKLILLAQLKPEKDSDEAVTYSLGKFGQRALDFYSIHVTKESTHPVKPLAQIAGNRYASGPVGKALSDACMGTIASFLSKYQDIIIEHQKVVKGNQKRLESLRELAGKENLEYPSVTLPPQPHTKEGVDAYNEVIARVRMWVNLNLWQKLKLSRDDAKPLLRLKGFPSFPLVERQANEVDWWDMVCNVKKLINEKKEDGKVFWQNLAGYKRQEALRPYLSSEEDRKKGKKFARYQLGDLLLHLEKKHGEDWGKVYDEAWERIDKKVEGLSKHIKLEEERRSEDAQSKAALTDWLRAKASFVIEGLKEADKDEFCRCELKLQKWYGDLRGKPFAIEAENSILDISGFSKQYNCAFIWQKDGVKKLNLYLIINYFKGGKLRFKKIKPEAFEANRFYTVINKKSGEIVPMEVNFNFDDPNLIILPLAFGKRQGREFIWNDLLSLETGSLKLANGRVIEKTLYNRRTRQDEPALFVALTFERREVLDSSNIKPPNLIGVDRGENIPAVIALTDPEGCPLSRFKDSLGNPTFILRIGESYKEKQRTIQAKKEVEQRRAGGYSRKYASKAKNLADDMVRNTARDLLYYAVTQDAMLIFENLSRGFGRQGKRTFMAERQYTRMEDWLTAKLAYEGLPSKTYLSKTLAQYTSKTCSNCGFTITSADYDRVLEKLKKTATGWMTTINGKELKVEGQITYYNRYKRQNVVKDLSVELDRLSEESVNNDISSWTKGRSGEALSLLKKRFSHRPVQEKFVCLNCGFETHADEQAALNIARSWLFLRSQEYKKYQTNKTTGNTDKRAFVETWQSFYRKKLKEVWKPAV

SEQ ID NO: 25335 - protein, 978 aa, synthetic construct
  REGION 1..978: note = engineered CasX variant
QEIKRINKIRRRLVKDSNTKKAGKTGPMKTLLVRVMTPDLRERLENLRKKPENIPQPISNTSRANLNKLLTDYTEMKKAILHVYWEEFQKDPVGLMSRVAQPASKKIDQNKLKPEMDEKGNLTTAGFACSQCGQPLFVYKLEQVSEKGKAYTNYFGRCNVAEHEKLILLAQLKPEKDSDEAVTYSLGKFGQRALDFYSIHVTKESTHPVKPLAQIAGNRYASGPVGKALSDACMGTIASFLSKYQDIIIEHQKVVKGNQKRLESLRELAGKENLEYPSVTLPPQPHTKEGVDAYNEVIARVRMWVNLNLWQKLKLSRDDAKPLLRLKGFPSFPLVERQANEVDWWDMVCNVKKLINEKKEDGKVFWQNLAGYKRQEALRPYLSSEEDRKKGKKFARYQLGDLLLHLEKKHGEDWGKVYDEAWERIDKKVEGLSKHIKLEEERRSEDAQSKAALTDWLRAKASFVIEGLKEADKDEFCRCELKLQKWYGDLRGKPFAIEAENSILDISGFSKQYNCAFIWQKDGVKKLNLYLIINYFKGGKLRFKKIKPEAFEANRFYTVINKKSGEIVPMEVNFNFDDPNLIILPLAFGKRQGREFIWNDLLSLETGSLKLANGRVIEKTLYNRRTRQDEPALFVALTFERREVLDSSNIKPPNLIGVDRGENIPAVIALTDPEGCPLNRFKDSLGNPTHILRIGESYKEKQRTIQAKKEVEQRRAGGYSRKYASKAKNLADDMVRNTARDLLYYAVTQDAMLIFENLSRGFGRQGKRTFMAERQYTRMEDWLTAKLAYEGLPSKTYLSKTLAQYTSKTCSNCGFTITSADYDRVLEKLKKTATGWMTTINGKELKVEGQITYYNRYKRQNVVKDLSVELDRLSEESVNNDISSWTKGRSGEALSLLKKRFSHRPVQEKFVCLNCGFETHADEQAALNIARSWLFLRSQEYKKYQTNKTTGNTDKRAFVETWQSFYRKKLKEVWKPAV

SEQ ID NO: 25336 - protein, 978 aa, synthetic construct
  REGION 1..978: note = engineered CasX variant
QEIKRINKIRRRLVKDSNTKKAGKTGPMKTLLVRVMTPDLRERLENLRKKPENIPQPISNTSRANLNKLLTDYTEMKKAILHVYWEEFQKDPVGLMSRVAQPASKKIDQNKLKPEMDEKGNLTTAGFACSQCGQPLFVYKLEQVSEKGKAYTNYFGRCNVAEHEKLILLAQLKPEKDSDEAVTYSLGKFGQRALDFYSIHVTKESTHPVKPLAQIAGNRYASGPVGKALSDACMGTIASFLSKYQDIIIEHQKVVKGNQKRLESLRELAGKENLEYPSVTLPPQPHTKEGVDAYNEVIARVRMWVNLNLWQKLKLSRDDAKPLLRLKGFPSFPLVERQANEVDWWDMVCNVKKLINEKKEDGKVFWQNLAGYKRQEALRPYLSSEEDRKKGKKFARYQLGDLLLHLEKKHGEDWGKVYDEAWERIDKKVEGLSKHIKLEEERRSEDAQSKAALTDWLRAKASFVIEGLKEADKDEFCRCELKLQKWYGDLRGKPFAIEAENSILDISGFSKQYNCAFIWQKDGVKKLNLYLIINYFKGGKLRFKKIKPEAFEANRFYTVINKKSGEIVPMEVNFNFDDPNLIILPLAFGKRQGREFIWNDLLSLETGSLKLANGRVIEKTLYNRRTRQDEPALFVALTFERREVLDSSNIKPPNLIGVDRGENIPAVIALTDPEGCPLNRFKDSLGNHTHILRIGESYKEKQRTIQAKKEVEQRRAGGYSRKYASKAKNLADDMVRNTARDLLYYAVTQDAMLIFENLSRGFGRQGKRTFMAERQYTRMEDWLTAKLAYEGLPSKTYLSKTLAQYTSKTCSNCGFTITSADYDRVLEKLKKTATGWMTTINGKELKVEGQITYYNRYKRQNVVKDLSVELDRLSEESVNNDISSWTKGRSGEALSLLKKRFSHRPVQEKFVCLNCGFETHADEQAALNIARSWLFLRSQEYKKYQTNKTTGNTDKRAFVETWQSFYRKKLKEVWKPAV

SEQ ID NO: 25337 - protein, 978 aa, synthetic construct
  REGION 1..978: note = engineered CasX variant
QEIKRINKIRRRLVKDSNTKKAGKTGPMKTLLVRVMTPDLRERLENLRKKPENIPQPISNTSRANLNKLLTDYTEMKKAILHVYWEEFQKDPVGLMSRVAQPASKKIDQNKLKPEMDEKGNLTTAGFACSQCGQPLFVYKLEQVSEKGKAYTNYFGRCNVAEHEKLILLAQLKPEKDSDEAVTYSLGKFGQRALDFYSIHVTKESTHPVKPLAQIAGNRYASGPVGKALSDACMGTIASFLSKYQDIIIEHQKVVKGNQKRLESLRELAGKENLEYPSVTLPPQPHTKEGVDAYNEVIARVRMWVNLNLWQKLKLSRDDAKPLLRLKGFPSFPLVERQANEVDWWDMVCNVKKLINEKKEDGKVFWQNLAGYKRQEALRPYLSSEEDRKKGKKFARYQLGDLLLHLEKKHGEDWGKVYDEAWERIDKKVEGLSKHIKLEEERRSEDAQSKAALTDWLRAKASFVIEGLKEADKDEFCRCELKLQKWYGDLRGKPFAIEAENSILDISGFSKQYNCAFIWQKDGVKKLNLYLIINYFKGGKLRFKKIKPEAFEANRFYTVINKKSGEIVPMEVNFNFDDPNLIILPLAFGKRQGREFIWNDLLSLETGSLKLANGRVIEKTLYNRRTRQDEPALFVALTFERREVLDSSNIKPPNLIGVDRGENIPAVIALTDPEGCPLHRFKDSLGNPTHILRIGESYKEKQRTIQAKKEVEQRRAGGYSRKYASKAKNLADDMVRNTARDLLYYAVTQDAMLIFENLSRGFGRQGKRTFMAERQYTRMEDWLTAKLAYEGLPSKTYLSKTLAQYTSKTCSNCGFTITSADYDRVLEKLKKTATGWMTTINGKELKVEGQITYYNRYKRQNVVKDLSVELDRLSEESVNNDISSWTKGRSGEALSLLKKRFSHRPVQEKFVCLNCGFETHADEQAALNIARSWLFLRSQEYKKYQTNKTTGNTDKRAFVETWQSFYRKKLKEVWKPAV

SEQ ID NO: 25338 - protein, 978 aa, synthetic construct
  REGION 1..978: note = engineered CasX variant
QEIKRINKIRRRLVKDSNTKKAGKTGPMKTLLVRVMTPDLRERLENLRKKPENIPQPISNTSRANLNKLLTDYTEMKKAILHVYWEEFQKDPVGLMSRVAQPASKKIDQNKLKPEMDEKGNLTTAGFACSQCGQPLFVYKLEQVSEKGKAYTNYFGRCNVAEHEKLILLAQLKPEKDSDEAVTYSLGKFGQRALDFYSIHVTKESTHPVKPLAQIAGNRYASGPVGKALSDACMGTIASFLSKYQDIIIEHQKVVKGNQKRLESLRELAGKENLEYPSVTLPPQPHTKEGVDAYNEVIARVRMWVNLNLWQKLKLSRDDAKPLLRLKGFPSFPLVERQANEVDWWDMVCNVKKLINEKKEDGKVFWQNLAGYKRQEALRPYLSSEEDRKKGKKFARYQLGDLLLHLEKKHGEDWGKVYDEAWERIDKKVEGLSKHIKLEEERRSEDAQSKAALTDWLRAKASFVIEGLKEADKDEFCRCELKLQKWYGDLRGKPFAIEAENSILDISGFSKQYNCAFIWQKDGVKKLNLYLIINYFKGGKLRFKKIKPEAFEANRFYTVINKKSGEIVPMEVNFNFDDPNLIILPLAFGKRQGREFIWNDLLSLETGSLKLANGRVIEKTLYNRRTRQDEPALFVALTFERREVLDSSNIKPPNLIGVDRGENIPAVIALTDPEGCPLHRFKDSLGNPTHILRIGESYKEKQRTIQAFKEVEQRRAGGYSRKYASKAKNLADDMVRNTARDLLYYAVTQDAMLIFENLSRGFGRQGKRTFMAERQYTRMEDWLTAKLAYEGLPSKTYLSKTLAQYTSKTCSNCGFTITSADYDRVLEKLKKTATGWMTTINGKELKVEGQITYYNRYKRQNVVKDLSVELDRLSEESVNNDISSWTKGRSGEALSLLKKRFSHRPVQEKFVCLNCGFETHADEQAALNIARSWLFLRSQEYKKYQTNKTTGNTDKRAFVETWQSFYRKKLKEVWKPAV

SEQ ID NO: 25339 - protein, 978 aa, synthetic construct
  REGION 1..978: note = engineered CasX variant
QEIKRINKIRRRLVKDSNTKKAGKTGPMKTLLVRVMTPDLRERLENLRKKPENIPQPISNTSRANLNKLLTDYTEMKKAILHVYWEEFQKDPVGLMSRVAQPASKKIDQNKLKPEMDEKGNLTTAGFACSQCGQPLFVYKLEQVSEKGKAYTNYFGRCNVAEHEKLILLAQLKPEKDSDEAVTYSLGKFGQRALDFYSIHVTKESTHPVKPLAQIAGNRYASGPVGKALSDACMGTIASFLSKYQDIIIEHQKVVKGNQKRLESLRELAGKENLEYPSVTLPPQPHTKEGVDAYNEVIARVRMWVNLNLWQKLKLSRDDAKPLLRLKGFPSFPLVERQANEVDWWDMVCNVKKLINEKKEDGKVFWQNLAGYKRQEALRPYLSSEEDRKKGKKFARYQLGDLLLHLEKKHGEDWGKVYDEAWERIDKKVEGLSKHIKLEEERRSEDAQSKAALTDWLRAKASFVIEGLKEADKDEFCRCELKLQKWYGDLRGKPFAIEAENSILDISGFSKQYNCAFIWQKDGVKKLNLYLIINYFKGGKLRFKKIKPEAFEANRFYTVINKKSGEIVPMEVNFNFDDPNLIILPLAFGKRQGREFIWNDLLSLETGSLKLANGRVIEKTLYNRRTRQDEPALFVALTFERREVLDSSNIKPNNLIGVDRGENIQAVIALTDPEGCPLSRFKDSLGNPTHILRIGESYKEKQRTIQAKKEVEQRRAGGYSRKYASKAKNLADDMVRNTARDLLYYAVTQDAMLIFENLSRGFGRQGKRTFMAERQYTRMEDWLTAKLAYEGLPSKTYLSKTLAQYTSKTCSNCGFTITSADYDRVLEKLKKTATGWMTTINGKELKVEGQITYYNRYKRQNVVKDLSVELDRLSEESVNNDISSWTKGRSGEALSLLKKRFSHRPVQEKFVCLNCGFETHADEQAALNIARSWLFLRSQEYKKYQTNKTTGNTDKRAFVETWQSFYRKKLKEVWKPAV

SEQ ID NO: 25340 - protein, 978 aa, synthetic construct
  REGION 1..978: note = engineered CasX variant
QEIKRINKIRRRLVKDSNTKKAGKTGPMKTLLVRVMTPDLRERLENLRKKPENIPQPISNTSRANLNKLLTDYTEMKKAILHVYWEEFQKDPVGLMSRVAQPASKKIDQNKLKPEMDEKGNLTTAGFACSQCGQPLFVYKLEQVSEKGKAYTNYFGRCNVAEHEKLILLAQLKPEKDSDEAVTYSLGKFGQRALDFYSIHVTKESTHPVKPLAQIAGNRYASGPVGKALSDACMGTIASFLSKYQDIIIEHQKVVKGNQKRLESLRELAGKENLEYPSVTLPPQPHTKEGVDAYNEVIARVRMWVNLNLWQKLKLSRDDAKPLLRLKGFPSFPLVERQANEVDWWDMVCNVKKLINEKKEDGKVFWQNLAGYKRQEALRPYLSSEEDRKKGKKFARYQLGDLLLHLEKKHGEDWGKVYDEAWERIDKKVEGLSKHIKLEEERRSEDAQSKAALTDWLRAKASFVIEGLKEADKDEFCRCELKLQKWYGDLRGKPFAIEAENSILDISGFSKQYNCAFIWQKDGVKKLNLYLIINYFKGGKLRFKKIKPEAFEANRFYTVINKKSGEIVPMEVNFNFDDPNLIILPLAFGKRQGREFIWNDLLSLETGSLKLANGRVIEKTLYNRRTRQDEPALFVALTFERREVLDSSNIKPNNLIGVDRGENIPAVIALTDPEGCPLSRFKDSLGNPTHILRIGESYKEKQRTIQAKKEVEQRRAGGYSRKYASKAKNLADDMVRNTARDLLYYAVTQDAMLIFENLSRGFGRQGKRTFMAERQYTRMEDWLTAKLAYEGLPSKTYLSKTLAQYTSKTCSNCGFTITSADYDRVLEKLKKTATGWMTTINGKELKVEGQITYYNRYKRQNVVKDLSVELDRLSEESVNNDISSWTKGRSGEALSLLKKRFSHRPVQEKFVCLNCGFETHADEQAALNIARSWLFLRSQEYKKYQTNKTTGNTDKRAFVETWQSFYRKKLKEVWKPAV

SEQ ID NO: 25341 - protein, 978 aa, synthetic construct
  REGION 1..978: note = engineered CasX variant
QEIKRINKIRRRLVKDSNTKKAGKTGPMKTLLVRVMTPDLRERLENLRKKPENIPQPISNTSRANLNKLLTDYTEMKKAILHVYWEEFQKDPVGLMSRVAQPASKKIDQNKLKPEMDEKGNLTTAGFACSQCGQPLFVYKLEQVSEKGKAYTNYFGRCNVAEHEKLILLAQLKPEKDSDEAVTYSLGKFGQRALDFYSIHVTKESTHPVKPLAQIAGNRYASGPVGKALSDACMGTIASFLSKYQDIIIEHQKVVKGNQKRLESLRELAGKENLEYPSVTLPPQPHTKEGVDAYNEVIARVRMWVNLNLWQKLKLSRDDAKPLLRLKGFPSFPLVERQANEVDWWDMVCNVKKLINEKKEDGKVFWQNLAGYKRQEALRPYLSSEEDRKKGKKFARYQLGDLLLHLEKKHGEDWGKVYDEAWERIDKKVEGLSKHIKLEEERRSEDAQSKAALTDWLRAKASFVIEGLKEADKDEFCRCELKLQKWYGDLRGKPFAIEAENSILDISGFSKQYNCAFIWQKDGVKKLNLYLIINYFKGGKLRFKKIKPEAFEANRFYTVINKKSGEIVPMEVNFNFDDPNLIILPLAFGKRQGREFIWNDLLSLETGSLKLANGRVIEKTLYNRRTRQDEPALFVALTFERREVLDSSNIKPNNLIGVDRGENIPAVIALTDPEGCPLSRFKDSLGNPTHILRIGESYKEKQRTIQAKKEVEARRAGGYSRKYASKAKNLADDMVRNTARDLLYYAVTQDAMLIFENLSRGFGRQGKRTFMAERQYTRMEDWLTAKLAYEGLPSKTYLSKTLAQYTSKTCSNCGFTITSADYDRVLEKLKKTATGWMTTINGKELKVEGQITYYNRYKRQNVVKDLSVELDRLSEESVNNDISSWTKGRSGEALSLLKKRFSHRPVQEKFVCLNCGFETHADEQAALNIARSWLFLRSQEYKKYQTNKTTGNTDKRAFVETWQSFYRKKLKEVWKPAV

SEQ ID NO: 25342 - protein, 978 aa, synthetic construct
  REGION 1..978: note = engineered CasX variant
QEIKRINKIRRRLVKDSNTKKAGKTGPMKTLLVRVMTPDLRERLENLRKKPENIPQPISNTSRANLNKLLTDYTEMKKAILHVYWEEFQKDPVGLMSRVAQPASKKIDQNKLKPEMDEKGNLTTAGFACSQCGQPLFVYKLEQVSEKGKAYTNYFGRCNVAEHEKLILLAQLKPEKDSDEAVTYSLGKFGQRALDFYSIHVTKESTHPVKPLAQIAGNRYASGPVGKALSDACMGTIASFLSKYQDIIIEHQKVVKGNQKRLESLRELAGKENLEYPSVTLPPQPHTKEGVDAYNEVIARVRMWVNLNLWQKLKLSRDDAKPLLRLKGFPSFPLVERQANEVDWWDMVCNVKKLINEKKEDGKVFWQNLAGYKRQEALRPYLSSEEDRKKGKKFARYQLGDLLLHLEKKHGEDWGKVYDEAWERIDKKVEGLSKHIKLEEERRSEDAQSKAALTDWLRAKASFVIEGLKEADKDEFCRCELKLQKWYGDLRGKPFAIEAENSILDISGFSKQYNCAFIWQKDGVKKLNLYLIINYFKGGKLRFKKIKPEAFEANRFYTVINKKSGEIVPMEVNFNFDDPNLIILPLAFGKRQGREFIWNDLLSLETGSLKLANGRVIEKTLYNRRTRQDEPALFVALTFERREVLDSSNIKPMYLIGVDRGENIPAVIALTDPEGCPLSRFKDSLGNPTHILRIGESYKEKQRTIQAKKEVEQRRAGGYSRKYASKAKNLADDMVRNTARDLLYYAVTQDAMLIFENLSRGFGRQGKRTFMAERQYTRMEDWLTAKLAYEGLPSKTYLSKTLAQYTSKTCSNCGFTITSADYDRVLEKLKKTATGWMTTINGKELKVEGQITYYNRYKRQNVVKDLSVELDRLSEESVNNDISSWTKGRSGEALSLLKKRFSHRPVQEKFVCLNCGFETHADEQAALNIARSWLFLRSQEYKKYQTNKTTGNTDKRAFVETWQSFYRKKLKEVWKPAV

SEQ ID NO: 25343 - protein, 978 aa, synthetic construct
  REGION 1..978: note = engineered CasX variant
QEIKRINKIRRRLVKDSNTKKAGKTGPMKTLLVRVMTPDLRERLENLRKKPENIPQPISNTSRANLNKLLTDYTEMKKAILHVYWEEFQKDPVGLMSRVAQPASKKIDQNKLKPEMDEKGNLTTAGFACSQCGQPLFVYKLEQVSEKGKAYTNYFGRCNVAEHEKLILLAQLKPEKDSDEAVTYSLGKFGQRALDFYSIHVTKESTHPVKPLAQIAGNRYASGPVGKALSDACMGTIASFLSKYQDIIIEHQKVVKGNQKRLESLRELAGKENLEYPSVTLPPQPHTKEGVDAYNEVIARVRMWVNLNLWQKLKLSRDDAKPLLRLKGFPSFPLVERQANEVDWWDMVCNVKKLINEKKEDGKVFWQNLAGYKRQEALRPYLSSEEDRKKGKKFARYQLGDLLLHLEKKHGEDWGKVYDEAWERIDKKVEGLSKHIKLEEERRSEDAQSKAALTDWLRAKASFVIEGLKEADKDEFCRCELKLQKWYGDLRGKPFAIEAENSILDISGFSKQYNCAFIWQKDGVKKLNLYLIINYFKGGKLRFKKIKPEAFEANRFYTVINKKSGEIVPMEVNFNFDDPNLIILPLAFGKRQGREFIWNDLLSLETGSLKLANGRVIEKTLYNRRTRQDEPALFVALTFERREVLDSSNIKPMTLIGVDRGENIPAVIALTDPEGCPLSRFRDSLGNPTHILRIGESYKEKQRTIQAKKEVEQRRAGGYSRKYASKAKNLADDMVRNTARDLLYYAVTQDAMLIFENLSRGFGRQGKRTFMAERQYTRMEDWLTAKLAYEGLPSKTYLSKTLAQYTSKTCSNCGFTITSADYDRVLEKLKKTATGWMTTINGKELKVEGQITYYNRYKRQNVVKDLSVELDRLSEESVNNDISSWTKGRSGEALSLLKKRFSHRPVQEKFVCLNCGFETHADEQAALNIARSWLFLRSQEYKKYQTNKTTGNTDKRAFVETWQSFYRKKLKEVWKPAV

SEQ ID NO: 25344 - protein, 978 aa, synthetic construct
  REGION 1..978: note = engineered CasX variant
QEIKRINKIRRRLVKDSNTKKAGKTGPMKTLLVRVMTPDLRERLENLRKKPENIPQPISNTSRANLNKLLTDYTEMKKAILHVYWEEFQKDPVGLMSRVAQPASKKIDQNKLKPEMDEKGNLTTAGFACSQCGQPLFVYKLEQVSEKGKAYTNYFGRCNVAEHEKLILLAQLKPEKDSDEAVTYSLGKFGQRALDFYSIHVTKESTHPVKPLAQIAGNRYASGPVGKALSDACMGTIASFLSKYQDIIIEHQKVVKGNQKRLESLRELAGKENLEYPSVTLPPQPHTKEGVDAYNEVIARVRMWVNLNLWQKLKLSRDDAKPLLRLKGFPSFPLVERQANEVDWWDMVCNVKKLINEKKEDGKVFWQNLAGYKRQEALRPYLSSEEDRKKGKKFARYQLGDLLLHLEKKHGEDWGKVYDEAWERIDKKVEGLSKHIKLEEERRSEDAQSKAALTDWLRAKASFVIEGLKEADKDEFCRCELKLQKWYGDLRGKPFAIEAENSILDISGFSKQYNCAFIWQKDGVKKLNLYLIINYFKGGKLRFKKIKPEAFEANRFYTVINKKSGEIVPMEVNFNFDDPNLIILPLAFGKRQGREFIWNDLLSLETGSLKLANGRVIEKTLYNRRTRQDEPALFVALTFERREVLDSSNIKPMTLIGVDRGENIPAVIALTDPEGCPLSRFKDSLGNPTHILRIGESYKHKQRTIQAKKEVEQRRAGGYSRKYASKAKNLADDMVRNTARDLLYYAVTQDAMLIFENLSRGFGRQGKRTFMAERQYTRMEDWLTAKLAYEGLPSKTYLSKTLAQYTSKTCSNCGFTITSADYDRVLEKLKKTATGWMTTINGKELKVEGQITYYNRYKRQNVVKDLSVELDRLSEESVNNDISSWTKGRSGEALSLLKKRFSHRPVQEKFVCLNCGFETHADEQAALNIARSWLFLRSQEYKKYQTNKTTGNTDKRAFVETWQSFYRKKLKEVWKPAV

SEQ ID NO: 25345 - protein, 978 aa, synthetic construct
  REGION 1..978: note = engineered CasX variant
QEIKRINKIRRRLVKDSNTKKAGKTGPMKTLLVRVMTPDLRERLENLRKKPENIPQPISNTSRANLNKLLTDYTEMKKAILHVYWEEFQKDPVGLMSRVAQPASKKIDQNKLKPEMDEKGNLTTAGFACSQCGQPLFVYKLEQVSEKGKAYTNYFGRCNVAEHEKLILLAQLKPEKDSDEAVTYSLGKFGQRALDFYSIHVTKESTHPVKPLAQIAGNRYASGPVGKALSDACMGTIASFLSKYQDIIIEHQKVVKGNQKRLESLRELAGKENLEYPSVTLPPQPHTKEGVDAYNEVIARVRMWVNLNLWQKLKLSRDDAKPLLRLKGFPSFPLVERQANEVDWWDMVCNVKKLINEKKEDGKVFWQNLAGYKRQEALRPYLSSEEDRKKGKKFARYQLGDLLLHLEKKHGEDWGKVYDEAWERIDKKVEGLSKHIKLEEERRSEDAQSKAALTDWLRAKASFVIEGLKEADKDEFCRCELKLQKWYGDLRGKPFAIEAENSILDISGFSKQYNCAFIWQKDGVKKLNLYLIINYFKGGKLRFKKIKPEAFEANRFYTVINKKSGEIVPMEVNFNFDDPNLIILPLAFGKRQGREFIWNDLLSLETGSLKLANGRVIEKTLYNRRTRQDEPALFVALTFERREVLDSSNIKPMTLIGVDRGENIPAVIALTDPEGCPLSRFKDSLGNPTHILRIGESYKEKQRTIQAKKEVEQRRAGGYSRKYASKAKNLADDMVRNTARDLLYYAVTQDAMLIFENLSRGFGRQGKRTFMAERQYTRMEDWLTAKLAYEGLPSKTYLSKTLAQYTSKTCSNCGFTITSADYDRVLEKLKKTATGWMTTINGKELKVEGQITYYNRYKRQNVVKDLSVELDRLSEESVNNDISSWTKGRSGEALSLLKKRFSHRPVQEKFVCLNCGFETHADEQAALNIARSWLFLRSQEYKKYQTNKTTGNTDKRAFVETWQSFYRKKLKEVWKPAV

SEQ ID NO: 25346 - protein, 978 aa, synthetic construct
  REGION 1..978: note = engineered CasX variant
QEIKRINKIRRRLVKDSNTKKAGKTGPMKTLLVRVMTPDLRERLENLRKKPENIPQPISNTSRANLNKLLTDYTEMKKAILHVYWEEFQKDPVGLMSRVAQPASKKIDQNKLKPEMDEKGNLTTAGFACSQCGQPLFVYKLEQVSEKGKAYTNYFGRCNVAEHEKLILLAQLKPEKDSDEAVTYSLGKFGQRALDFYSIHVTKESTHPVKPLAQIAGNRYASGPVGKALSDACMGTIASFLSKYQDIIIEHQKVVKGNQKRLESLRELAGKENLEYPSVTLPPQPHTKEGVDAYNEVIARVRMWVNLNLWQKLKLSRDDAKPLLRLKGFPSFPLVERQANEVDWWDMVCNVKKLINEKKEDGKVFWQNLAGYKRQEALRPYLSSEEDRKKGKKFARYQLGDLLLHLEKKHGEDWGKVYDEAWERIDKKVEGLSKHIKLEEERRSEDAQSKAALTDWLRAKASFVIEGLKEADKDEFCRCELKLQKWYGDLRGKPFAIEAENSILDISGFSKQYNCAFIWQKDGVKKLNLYLIINYFKGGKLRFKKIKPEAFEANRFYTVINKKSGEIVPMEVNFNFDDPNLIILPLAFGKRQGREFIWNDLLSLETGSLKLANGRVIEKTLYNRRTRQDEPALFVALTFERREVLDSSNIKPMTLIGVDRGENIPAVIALTDPEGCPLSCFKDSLGNPTHILRIGESYKHKQRTIQAKKEVEQRRAGGYSRKYASKAKNLADDMVRNTARDLLYYAVTQDAMLIFENLSRGFGRQGKRTFMAERQYTRMEDWLTAKLAYEGLPSKTYLSKTLAQYTSKTCSNCGFTITSADYDRVLEKLKKTATGWMTTINGKELKVEGQITYYNRYKRQNVVKDLSVELDRLSEESVNNDISSWTKGRSGEALSLLKKRFSHRPVQEKFVCLNCGFETHADEQAALNIARSWLFLRSQEYKKYQTNKTTGNTDKRAFVETWQSFYRKKLKEVWKPAV

SEQ ID NO: 25347 - protein, 978 aa, synthetic construct
  REGION 1..978: note = engineered CasX variant
QEIKRINKIRRRLVKDSNTKKAGKTGPMKTLLVRVMTPDLRERLENLRKKPENIPQPISNTSRANLNKLLTDYTEMKKAILHVYWEEFQKDPVGLMSRVAQPASKKIDQNKLKPEMDEKGNLTTAGFACSQCGQPLFVYKLEQVSEKGKAYTNYFGRCNVAEHEKLILLAQLKPEKDSDEAVTYSLGKFGQRALDFYSIHVTKESTHPVKPLAQIAGNRYASGPVGKALSDACMGTIASFLSKYQDIIIEHQKVVKGNQKRLESLRELAGKENLEYPSVTLPPQPHTKEGVDAYNEVIARVRMWVNLNLWQKLKLSRDDAKPLLRLKGFPSFPLVERQANEVDWWDMVCNVKKLINEKKEDGKVFWQNLAGYKRQEALRPYLSSEEDRKKGKKFARYQLGDLLLHLEKKHGEDWGKVYDEAWERIDKKVEGLSKHIKLEEERRSEDAQSKAALTDWLRAKASFVIEGLKEADKDEFCRCELKLQKWYGDLRGKPFAIEAENSILDISGFSKQYNCAFIWQKDGVKKLNLYLIINYFKGGKLRFKKIKPEAFEANRFYTVINKKSGEIVPMEVNFNFDDPNLIILPLAFGKRQGREFIWNDLLSLETGSLKLANGRVIEKTLYNRRTRQDEPALFVALTFERREVLDSSNIKPMTLIGVDRGENIPAVIALTDPEGCPLSCFKDSLGNPTHILRIGESYKEKQRTIQAKKEVEQRRAGGYSRKYASKAKNLADDMVRNTARDLLYYAVTQDAMLIFENLSRGFGRQGKRTFMAERQYTRMEDWLTAKLAYEGLPSKTYLSKTLAQYTSKTCSNCGFTITSADYDRVLEKLKKTATGWMTTINGKELKVEGQITYYNRYKRQNVVKDLSVELDRLSEESVNNDISSWTKGRSGEALSLLKKRFSHRPVQEKFVCLNCGFETHADEQAALNIARSWLFLRSQEYKKYQTNKTTGNTDKRAFVETWQSFYRKKLKEVWKPAV

SEQ ID NO: 25348 - protein, 978 aa, synthetic construct
  REGION 1..978: note = engineered CasX variant
QEIKRINKIRRRLVKDSNTKKAGKTGPMKTLLVRVMTPDLRERLENLRKKPENIPQPISNTSRANLNKLLTDYTEMKKAILHVYWEEFQKDPVGLMSRVAQPASKKIDQNKLKPEMDEKGNLTTAGFACSQCGQPLFVYKLEQVSEKGKAYTNYFGRCNVAEHEKLILLAQLKPEKDSDEAVTYSLGKFGQRALDFYSIHVTKESTHPVKPLAQIAGNRYASGPVGKALSDACMGTIASFLSKYQDIIIEHQKVVKGNQKRLESLRELAGKENLEYPSVTLPPQPHTKEGVDAYNEVIARVRMWVNLNLWQKLKLSRDDAKPLLRLKGFPSFPLVERQANEVDWWDMVCNVKKLINEKKEDGKVFWQNLAGYKRQEALRPYLSSEEDRKKGKKFARYQLGDLLLHLEKKHGEDWGKVYDEAWERIDKKVEGLSKHIKLEEERRSEDAQSKAALTDWLRAKASFVIEGLKEADKDEFCRCELKLQKWYGDLRGKPFAIEAENSILDISGFSKQYNCAFIWQKDGVKKLNLYLIINYFKGGKLRFKKIKPEAFEANRFYTVINKKSGEIVPMEVNFNFDDPNLIILPLAFGKRQGREFIWNDLLSLETGSLKLANGRVIEKTLYNRRTRQDEPALFVALTFERREVLDSSNIKPMSLIGVDRGENIPAVIALTDPEGCPLSRFKDSLGNPTHILRIGESYKEKQRTIQVKKEVEQRRAGGYSRKYASKAKNLADDMVRNTARDLLYYAVTQDAMLIFENLSRGFGRQGKRTFMAERQYTRMEDWLTAKLAYEGLPSKTYLSKTLAQYTSKTCSNCGFTITSADYDRVLEKLKKTATGWMTTINGKELKVEGQITYYNRYKRQNVVKDLSVELDRLSEESVNNDISSWTKGRSGEALSLLKKRFSHRPVQEKFVCLNCGFETHADEQAALNIARSWLFLRSQEYKKYQTNKTTGNTDKRAFVETWQSFYRKKLKEVWKPAV

SEQ ID NO: 25349 - protein, 978 aa, synthetic construct
  REGION 1..978: note = engineered CasX variant
QEIKRINKIRRRLVKDSNTKKAGKTGPMKTLLVRVMTPDLRERLENLRKKPENIPQPISNTSRANLNKLLTDYTEMKKAILHVYWEEFQKDPVGLMSRVAQPASKKIDQNKLKPEMDEKGNLTTAGFACSQCGQPLFVYKLEQVSEKGKAYTNYFGRCNVAEHEKLILLAQLKPEKDSDEAVTYSLGKFGQRALDFYSIHVTKESTHPVKPLAQIAGNRYASGPVGKALSDACMGTIASFLSKYQDIIIEHQKVVKGNQKRLESLRELAGKENLEYPSVTLPPQPHTKEGVDAYNEVIARVRMWVNLNLWQKLKLSRDDAKPLLRLKGFPSFPLVERQANEVDWWDMVCNVKKLINEKKEDGKVFWQNLAGYKRQEALRPYLSSEEDRKKGKKFARYQLGDLLLHLEKKHGEDWGKVYDEAWERIDKKVEGLSKHIKLEEERRSEDAQSKAALTDWLRAKASFVIEGLKEADKDEFCRCELKLQKWYGDLRGKPFAIEAENSILDISGFSKQYNCAFIWQKDGVKKLNLYLIINYFKGGKLRFKKIKPEAFEANRFYTVINKKSGEIVPMEVNFNFDDPNLIILPLAFGKRQGREFIWNDLLSLETGSLKLANGRVIEKTLYNRRTRQDEPALFVALTFERREVLDSSNIKPMSLIGVDRGENIPAVIALTDPEGCPLSRFKDSLGNPTHILRIGESYKEKQRTIQAKKHVEQRRAGGYSRKYASKAKNLADDMVRNTARDLLYYAVTQDAMLIFENLSRGFGRQGKRTFMAERQYTRMEDWLTAKLAYEGLPSKTYLSKTLAQYTSKTCSNCGFTITSADYDRVLEKLKKTATGWMTTINGKELKVEGQITYYNRYKRQNVVKDLSVELDRLSEESVNNDISSWTKGRSGEALSLLKKRFSHRPVQEKFVCLNCGFETHADEQAALNIARSWLFLRSQEYKKYQTNKTTGNTDKRAFVETWQSFYRKKLKEVWKPAV

SEQ ID NO: 25350 - protein, 978 aa, synthetic construct
  REGION 1..978: note = engineered CasX variant
QEIKRINKIRRRLVKDSNTKKAGKTGPMKTLLVRVMTPDLRERLENLRKKPENIPQPISNTSRANLNKLLTDYTEMKKAILHVYWEEFQKDPVGLMSRVAQPASKKIDQNKLKPEMDEKGNLTTAGFACSQCGQPLFVYKLEQVSEKGKAYTNYFGRCNVAEHEKLILLAQLKPEKDSDEAVTYSLGKFGQRALDFYSIHVTKESTHPVKPLAQIAGNRYASGPVGKALSDACMGTIASFLSKYQDIIIEHQKVVKGNQKRLESLRELAGKENLEYPSVTLPPQPHTKEGVDAYNEVIARVRMWVNLNLWQKLKLSRDDAKPLLRLKGFPSFPLVERQANEVDWWDMVCNVKKLINEKKEDGKVFWQNLAGYKRQEALRPYLSSEEDRKKGKKFARYQLGDLLLHLEKKHGEDWGKVYDEAWERIDKKVEGLSKHIKLEEERRSEDAQSKAALTDWLRAKASFVIEGLKEADKDEFCRCELKLQKWYGDLRGKPFAIEAENSILDISGFSKQYNCAFIWQKDGVKKLNLYLIINYFKGGKLRFKKIKPEAFEANRFYTVINKKSGEIVPMEVNFNFDDPNLIILPLAFGKRQGREFIWNDLLSLETGSLKLANGRVIEKTLYNRRTRQDEPALFVALTFERREVLDSSNIKPMSLIGVDRGENIPAVIALTDPEGCPLSRFKDSLGNPTHILRIGESYKEKQRTIQAKKEVEQRRAGGYSRKYASKAKNLADDMVRNTARDLLYYAVTQDAMLIFENLSRGFGRQGKRTFMAERQYTRMEDWLTAKLAYEGLPSKTYLSKTLAQYTSKTCSNCGFTITSADYDRVLEKLKKTATGWMTTINGKELKVEGQITYYNRYKRQNVVKDLSVELDRLSEESVNNDISSWTKGRSGEALSLLKKRFSHRPVQEKFVCLNCGFETHADEQAALNIARSWLFLRSQEYKKYQTNKTTGNTDKRAFVETWQSFYRKKLKEVWKPAV

SEQ ID NO: 25351 - protein, 978 aa, synthetic construct
  REGION 1..978: note = engineered CasX variant
QEIKRINKIRRRLVKDSNTKKAGKTGPMKTLLVRVMTPDLRERLENLRKKPENIPQPISNTSRANLNKLLTDYTEMKKAILHVYWEEFQKDPVGLMSRVAQPASKKIDQNKLKPEMDEKGNLTTAGFACSQCGQPLFVYKLEQVSEKGKAYTNYFGRCNVAEHEKLILLAQLKPEKDSDEAVTYSLGKFGQRALDFYSIHVTKESTHPVKPLAQIAGNRYASGPVGKALSDACMGTIASFLSKYQDIIIEHQKVVKGNQKRLESLRELAGKENLEYPSVTLPPQPHTKEGVDAYNEVIARVRMWVNLNLWQKLKLSRDDAKPLLRLKGFPSFPLVERQANEVDWWDMVCNVKKLINEKKEDGKVFWQNLAGYKRQEALRPYLSSEEDRKKGKKFARYQLGDLLLHLEKKHGEDWGKVYDEAWERIDKKVEGLSKHIKLEEERRSEDAQSKAALTDWLRAKASFVIEGLKEADKDEFCRCELKLQKWYGDLRGKPFAIEAENSILDISGFSKQYNCAFIWQKDGVKKLNLYLIINYFKGGKLRFKKIKPEAFEANRFYTVINKKSGEIVPMEVNFNFDDPNLIILPLAFGKRQGREFIWNDLLSLETGSLKLANGRVIEKTLYNRRTRQDEPALFVALTFERREVLDSSNIKPMSLIGVDRGENIPAVIALTDPEGCPLSRFKDSDGNPTHILRIGESYKEKQRTIQAKKEVEQRRAGGYSRKYASKAKNLADDMVRNTARDLLYYAVTQDAMLIFENLSRGFGRQGKRTFMAERQYTRMEDWLTAKLAYEGLPSKTYLSKTLAQYTSKTCSNCGFTITSADYDRVLEKLKKTATGWMTTINGKELKVEGQITYYNRYKRQNVVKDLSVELDRLSEESVNNDISSWTKGRSGEALSLLKKRFSHRPVQEKFVCLNCGFETHADEQAALNIARSWLFLRSQEYKKYQTNKTTGNTDKRAFVETWQSFYRKKLKEVWKPAV

SEQ ID NO: 25352 - protein, 978 aa, synthetic construct
  REGION 1..978: note = engineered CasX variant
QEIKRINKIRRRLVKDSNTKKAGKTGPMKTLLVRVMTPDLRERLENLRKKPENIPQPISNTSRANLNKLLTDYTEMKKAILHVYWEEFQKDPVGLMSRVAQPASKKIDQNKLKPEMDEKGNLTTAGFACSQCGQPLFVYKLEQVSEKGKAYTNYFGRCNVAEHEKLILLAQLKPEKDSDEAVTYSLGKFGQRALDFYSIHVTKESTHPVKPLAQIAGNRYASGPVGKALSDACMGTIASFLSKYQDIIIEHQKVVKGNQKRLESLRELAGKENLEYPSVTLPPQPHTKEGVDAYNEVIARVRMWVNLNLWQKLKLSRDDAKPLLRLKGFPSFPLVERQANEVDWWDMVCNVKKLINEKKEDGKVFWQNLAGYKRQEALRPYLSSEEDRKKGKKFARYQLGDLLLHLEKKHGEDWGKVYDEAWERIDKKVEGLSKHIKLEEERRSEDAQSKAALTDWLRAKASFVIEGLKEADKDEFCRCELKLQKWYGDLRGKPFAIEAENSILDISGFSKQYNCAFIWQKDGVKKLNLYLIINYFKGGKLRFKKIKPEAFEANRFYTVINKKSGEIVPMEVNFNFDDPNLIILPLAFGKRQGREFIWNDLLSLETGSLKLANGRVIEKTLYNRRTRQDEPALFVALTFERREVLDSSNIKPMSLIGVDRGENIPAVIALTDPEGCPLSMFKDSLGNPTHILRIGESYKEKQRTIQAKKEVEQRRAGGYSRKYASKAKNLADDMVRNTARDLLYYAVTQDAMLIFENLSRGFGRQGKRTFMAERQYTRMEDWLTAKLAYEGLPSKTYLSKTLAQYTSKTCSNCGFTITSADYDRVLEKLKKTATGWMTTINGKELKVEGQITYYNRYKRQNVVKDLSVELDRLSEESVNNDISSWTKGRSGEALSLLKKRFSHRPVQEKFVCLNCGFETHADEQAALNIARSWLFLRSQEYKKYQTNKTTGNTDKRAFVETWQSFYRKKLKEVWKPAV

SEQ ID NO: 25353 - protein, 978 aa, synthetic construct
  REGION 1..978: note = engineered CasX variant
QEIKRINKIRRRLVKDSNTKKAGKTGPMKTLLVRVMTPDLRERLENLRKKPENIPQPISNTSRANLNKLLTDYTEMKKAILHVYWEEFQKDPVGLMSRVAQPASKKIDQNKLKPEMDEKGNLTTAGFACSQCGQPLFVYKLEQVSEKGKAYTNYFGRCNVAEHEKLILLAQLKPEKDSDEAVTYSLGKFGQRALDFYSIHVTKESTHPVKPLAQIAGNRYASGPVGKALSDACMGTIASFLSKYQDIIIEHQKVVKGNQKRLESLRELAGKENLEYPSVTLPPQPHTKEGVDAYNEVIARVRMWVNLNLWQKLKLSRDDAKPLLRLKGFPSFPLVERQANEVDWWDMVCNVKKLINEKKEDGKVFWQNLAGYKRQEALRPYLSSEEDRKKGKKFARYQLGDLLLHLEKKHGEDWGKVYDEAWERIDKKVEGLSKHIKLEEERRSEDAQSKAALTDWLRAKASFVIEGLKEADKDEFCRCELKLQKWYGDLRGKPFAIEAENSILDISGFSKQYNCAFIWQKDGVKKLNLYLIINYFKGGKLRFKKIKPEAFEANRFYTVINKKSGEIVPMEVNFNFDDPNLIILPLAFGKRQGREFIWNDLLSLETGSLKLANGRVIEKTLYNRRTRQDEPALFVALTFERREVLDSSNIKPMSLIGVDRGENIPAVIALTDPEGCPLSMFKDSDGNPTHILRIGESYKEKQRTIQAKKEVEQRRAGGYSRKYASKAKNLADDMVRNTARDLLYYAVTQDAMLIFENLSRGFGRQGKRTFMAERQYTRMEDWLTAKLAYEGLPSKTYLSKTLAQYTSKTCSNCGFTITSADYDRVLEKLKKTATGWMTTINGKELKVEGQITYYNRYKRQNVVKDLSVELDRLSEESVNNDISSWTKGRSGEALSLLKKRFSHRPVQEKFVCLNCGFETHADEQAALNIARSWLFLRSQEYKKYQTNKTTGNTDKRAFVETWQSFYRKKLKEVWKPAV

SEQ ID NO: 25354 - protein, 978 aa, synthetic construct
  REGION 1..978: note = engineered CasX variant
QEIKRINKIRRRLVKDSNTKKAGKTGPMKTLLVRVMTPDLRERLENLRKKPENIPQPISNTSRANLNKLLTDYTEMKKAILHVYWEEFQKDPVGLMSRVAQPASKKIDQNKLKPEMDEKGNLTTAGFACSQCGQPLFVYKLEQVSEKGKAYTNYFGRCNVAEHEKLILLAQLKPEKDSDEAVTYSLGKFGQRALDFYSIHVTKESTHPVKPLAQIAGNRYASGPVGKALSDACMGTIASFLSKYQDIIIEHQKVVKGNQKRLESLRELAGKENLEYPSVTLPPQPHTKEGVDAYNEVIARVRMWVNLNLWQKLKLSRDDAKPLLRLKGFPSFPLVERQANEVDWWDMVCNVKKLINEKKEDGKVFWQNLAGYKRQEALRPYLSSEEDRKKGKKFARYQLGDLLLHLEKKHGEDWGKVYDEAWERIDKKVEGLSKHIKLEEERRSEDAQSKAALTDWLRAKASFVIEGLKEADKDEFCRCELKLQKWYGDLRGKPFAIEAENSILDISGFSKQYNCAFIWQKDGVKKLNLYLIINYFKGGKLRFKKIKPEAFEANRFYTVINKKSGEIVPMEVNFNFDDPNLIILPLAFGKRQGREFIWNDLLSLETGSLKLANGRVIEKTLYNRRTRQDEPALFVALTFERREVLDSSNIKPMSLIGVDRGENIPAVIALTDPEGCPLSCFKDSLGNPTHILRIGESYKEKQRTIQAKKEVEQRRAGGYSRKYASKAKNLADDMVRNTARDLLYYAVTQDAMLIFENLSRGFGRQGKRTFMAERQYTRMEDWLTAKLAYEGLPSKTYLSKTLAQYTSKTCSNCGFTITSADYDRVLEKLKKTATGWMTTINGKELKVEGQITYYNRYKRQNVVKDLSVELDRLSEESVNNDISSWTKGRSGEALSLLKKRFSHRPVQEKFVCLNCGFETHADEQAALNIARSWLFLRSQEYKKYQTNKTTGNTDKRAFVETWQSFYRKKLKEVWKPAV

SEQ ID NO: 25355 - protein, 978 aa, synthetic construct
  REGION 1..978: note = engineered CasX variant
QEIKRINKIRRRLVKDSNTKKAGKTGPMKTLLVRVMTPDLRERLENLRKKPENIPQPISNTSRANLNKLLTDYTEMKKAILHVYWEEFQKDPVGLMSRVAQPASKKIDQNKLKPEMDEKGNLTTAGFACSQCGQPLFVYKLEQVSEKGKAYTNYFGRCNVAEHEKLILLAQLKPEKDSDEAVTYSLGKFGQRALDFYSIHVTKESTHPVKPLAQIAGNRYASGPVGKALSDACMGTIASFLSKYQDIIIEHQKVVKGNQKRLESLRELAGKENLEYPSVTLPPQPHTKEGVDAYNEVIARVRMWVNLNLWQKLKLSRDDAKPLLRLKGFPSFPLVERQANEVDWWDMVCNVKKLINEKKEDGKVFWQNLAGYKRQEALRPYLSSEEDRKKGKKFARYQLGDLLLHLEKKHGEDWGKVYDEAWERIDKKVEGLSKHIKLEEERRSEDAQSKAALTDWLRAKASFVIEGLKEADKDEFCRCELKLQKWYGDLRGKPFAIEAENSILDISGFSKQYNCAFIWQKDGVKKLNLYLIINYFKGGKLRFKKIKPEAFEANRFYTVINKKSGEIVPMEVNFNFDDPNLIILPLAFGKRQGREFIWNDLLSLETGSLKLANGRVIEKTLYNRRTRQDEPALFVALTFERREVLDSSNIKPMSLIGVDRGENIPAVIALTDPEGCPLSCFKDSDGNPTHILRIGESYKEKQRTIQAKKEVEQRRAGGYSRKYASKAKNLADDMVRNTARDLLYYAVTQDAMLIFENLSRGFGRQGKRTFMAERQYTRMEDWLTAKLAYEGLPSKTYLSKTLAQYTSKTCSNCGFTITSADYDRVLEKLKKTATGWMTTINGKELKVEGQITYYNRYKRQNVVKDLSVELDRLSEESVNNDISSWTKGRSGEALSLLKKRFSHRPVQEKFVCLNCGFETHADEQAALNIARSWLFLRSQEYKKYQTNKTTGNTDKRAFVETWQSFYRKKLKEVWKPAV

SEQ ID NO: 25356 - protein, 978 aa, synthetic construct
  REGION 1..978: note = engineered CasX variant
QEIKRINKIRRRLVKDSNTKKAGKTGPMKTLLVRVMTPDLRERLENLRKKPENIPQPISNTSRANLNKLLTDYTEMKKAILHVYWEEFQKDPVGLMSRVAQPASKKIDQNKLKPEMDEKGNLTTAGFACSQCGQPLFVYKLEQVSEKGKAYTNYFGRCNVAEHEKLILLAQLKPEKDSDEAVTYSLGKFGQRALDFYSIHVTKESTHPVKPLAQIAGNRYASGPVGKALSDACMGTIASFLSKYQDIIIEHQKVVKGNQKRLESLRELAGKENLEYPSVTLPPQPHTKEGVDAYNEVIARVRMWVNLNLWQKLKLSRDDAKPLLRLKGFPSFPLVERQANEVDWWDMVCNVKKLINEKKEDGKVFWQNLAGYKRQEALRPYLSSEEDRKKGKKFARYQLGDLLLHLEKKHGEDWGKVYDEAWERIDKKVEGLSKHIKLEEERRSEDAQSKAALTDWLRAKASFVIEGLKEADKDEFCRCELKLQKWYGDLRGKPFAIEAENSILDISGFSKQYNCAFIWQKDGVKKLNLYLIINYFKGGKLRFKKIKPEAFEANRFYTVINKKSGEIVPMEVNFNFDDPNLIILPLAFGKRQGREFIWNDLLSLETGSLKLANGRVIEKTLYNRRTRQDEPALFVALTFERREVLDSSNIKPMRLIGVDRGENIPAVIALTDPEGCPLSRFKDSLGNPTHILRIGESYKEKQRTIQAKKEVEQRRAGGYSRKYASKAKNLADDMVRNTARDLLYYAVTQDAMLIFENLSRGFGRQGKRTFMAERQYTRMEDWLTAKLAYEGLPSKTYLSKTLAQYTSKTCSNCGFTITSADYDRVLEKLKKTATGWMTTINGKELKVEGQITYYNRYKRQNVVKDLSVELDRLSEESVNNDISSWTKGRSGEALSLLKKRFSHRPVQEKFVCLNCGFETHADEQAALNIARSWLFLRSQEYKKYQTNKTTGNTDKRAFVETWQSFYRKKLKEVWKPAV

SEQ ID NO: 25357 - protein, 978 aa, synthetic construct
  REGION 1..978: note = engineered CasX variant
QEIKRINKIRRRLVKDSNTKKAGKTGPMKTLLVRVMTPDLRERLENLRKKPENIPQPISNTSRANLNKLLTDYTEMKKAILHVYWEEFQKDPVGLMSRVAQPASKKIDQNKLKPEMDEKGNLTTAGFACSQCGQPLFVYKLEQVSEKGKAYTNYFGRCNVAEHEKLILLAQLKPEKDSDEAVTYSLGKFGQRALDFYSIHVTKESTHPVKPLAQIAGNRYASGPVGKALSDACMGTIASFLSKYQDIIIEHQKVVKGNQKRLESLRELAGKENLEYPSVTLPPQPHTKEGVDAYNEVIARVRMWVNLNLWQKLKLSRDDAKPLLRLKGFPSFPLVERQANEVDWWDMVCNVKKLINEKKEDGKVFWQNLAGYKRQEALRPYLSSEEDRKKGKKFARYQLGDLLLHLEKKHGEDWGKVYDEAWERIDKKVEGLSKHIKLEEERRSEDAQSKAALTDWLRAKASFVIEGLKEADKDEFCRCELKLQKWYGDLRGKPFAIEAENSILDISGFSKQYNCAFIWQKDGVKKLNLYLIINYFKGGKLRFKKIKPEAFEANRFYTVINKKSGEIVPMEVNFNFDDPNLIILPLAFGKRQGREFIWNDLLSLETGSLKLANGRVIEKTLYNRRTRQDEPALFVALTFERREVLDSSNIKPMRLIGVDRGENIPAVIALTDPEGCPLSRFKDSLGNPTHILRIGESYKEKQRCIQAKKEVEQRRAGGYSRKYASKAKNLADDMVRNTARDLLYYAVTQDAMLIFENLSRGFGRQGKRTFMAERQYTRMEDWLTAKLAYEGLPSKTYLSKTLAQYTSKTCSNCGFTITSADYDRVLEKLKKTATGWMTTINGKELKVEGQITYYNRYKRQNVVKDLSVELDRLSEESVNNDISSWTKGRSGEALSLLKKRFSHRPVQEKFVCLNCGFETHADEQAALNIARSWLFLRSQEYKKYQTNKTTGNTDKRAFVETWQSFYRKKLKEVWKPAV

SEQ ID NO: 25358 - protein, 978 aa, synthetic construct
  REGION 1..978: note = engineered CasX variant
QEIKRINKIRRRLVKDSNTKKAGKTGPMKTLLVRVMTPDLRERLENLRKKPENIPQPISNTSRANLNKLLTDYTEMKKAILHVYWEEFQKDPVGLMSRVAQPASKKIDQNKLKPEMDEKGNLTTAGFACSQCGQPLFVYKLEQVSEKGKAYTNYFGRCNVAEHEKLILLAQLKPEKDSDEAVTYSLGKFGQRALDFYSIHVTKESTHPVKPLAQIAGNRYASGPVGKALSDACMGTIASFLSKYQDIIIEHQKVVKGNQKRLESLRELAGKENLEYPSVTLPPQPHTKEGVDAYNEVIARVRMWVNLNLWQKLKLSRDDAKPLLRLKGFPSFPLVERQANEVDWWDMVCNVKKLINEKKEDGKVFWQNLAGYKRQEALRPYLSSEEDRKKGKKFARYQLGDLLLHLEKKHGEDWGKVYDEAWERIDKKVEGLSKHIKLEEERRSEDAQSKAALTDWLRAKASFVIEGLKEADKDEFCRCELKLQKWYGDLRGKPFAIEAENSILDISGFSKQYNCAFIWQKDGVKKLNLYLIINYFKGGKLRFKKIKPEAFEANRFYTVINKKSGEIVPMEVNFNFDDPNLIILPLAFGKRQGREFIWNDLLSLETGSLKLANGRVIEKTLYNRRTRQDEPALFVALTFERREVLDSSNIKPMRLIGVDRGENIPAVIALTDPEGCPLSFFKDSLGNPTHILRIGESYKEKQRTIQAKKEVEQRRAGGYSRKYASKAKNLADDMVRNTARDLLYYAVTQDAMLIFENLSRGFGRQGKRTFMAERQYTRMEDWLTAKLAYEGLPSKTYLSKTLAQYTSKTCSNCGFTITSADYDRVLEKLKKTATGWMTTINGKELKVEGQITYYNRYKRQNVVKDLSVELDRLSEESVNNDISSWTKGRSGEALSLLKKRFSHRPVQEKFVCLNCGFETHADEQAALNIARSWLFLRSQEYKKYQTNKTTGNTDKRAFVETWQSFYRKKLKEVWKPAV

SEQ ID NO: 25359 - protein, 978 aa, synthetic construct
  REGION 1..978: note = engineered CasX variant
QEIKRINKIRRRLVKDSNTKKAGKTGPMKTLLVRVMTPDLRERLENLRKKPENIPQPISNTSRANLNKLLTDYTEMKKAILHVYWEEFQKDPVGLMSRVAQPASKKIDQNKLKPEMDEKGNLTTAGFACSQCGQPLFVYKLEQVSEKGKAYTNYFGRCNVAEHEKLILLAQLKPEKDSDEAVTYSLGKFGQRALDFYSIHVTKESTHPVKPLAQIAGNRYASGPVGKALSDACMGTIASFLSKYQDIIIEHQKVVKGNQKRLESLRELAGKENLEYPSVTLPPQPHTKEGVDAYNEVIARVRMWVNLNLWQKLKLSRDDAKPLLRLKGFPSFPLVERQANEVDWWDMVCNVKKLINEKKEDGKVFWQNLAGYKRQEALRPYLSSEEDRKKGKKFARYQLGDLLLHLEKKHGEDWGKVYDEAWERIDKKVEGLSKHIKLEEERRSEDAQSKAALTDWLRAKASFVIEGLKEADKDEFCRCELKLQKWYGDLRGKPFAIEAENSILDISGFSKQYNCAFIWQKDGVKKLNLYLIINYFKGGKLRFKKIKPEAFEANRFYTVINKKSGEIVPMEVNFNFDDPNLIILPLAFGKRQGREFIWNDLLSLETGSLKLANGRVIEKTLYNRRTRQDEPALFVALTFERREVLDSSNIKPMRLIGVDRGENIPAVIALTDPEGCPLSFFKDSLGNPTHILRIGESYKEKQRCIQAKKEVEQRRAGGYSRKYASKAKNLADDMVRNTARDLLYYAVTQDAMLIFENLSRGFGRQGKRTFMAERQYTRMEDWLTAKLAYEGLPSKTYLSKTLAQYTSKTCSNCGFTITSADYDRVLEKLKKTATGWMTTINGKELKVEGQITYYNRYKRQNVVKDLSVELDRLSEESVNNDISSWTKGRSGEALSLLKKRFSHRPVQEKFVCLNCGFETHADEQAALNIARSWLFLRSQEYKKYQTNKTTGNTDKRAFVETWQSFYRKKLKEVWKPAV

SEQ ID NO: 25360 - protein, 978 aa, synthetic construct
  REGION 1..978: note = engineered CasX variant
QEIKRINKIRRRLVKDSNTKKAGKTGPMKTLLVRVMTPDLRERLENLRKKPENIPQPISNTSRANLNKLLTDYTEMKKAILHVYWEEFQKDPVGLMSRVAQPASKKIDQNKLKPEMDEKGNLTTAGFACSQCGQPLFVYKLEQVSEKGKAYTNYFGRCNVAEHEKLILLAQLKPEKDSDEAVTYSLGKFGQRALDFYSIHVTKESTHPVKPLAQIAGNRYASGPVGKALSDACMGTIASFLSKYQDIIIEHQKVVKGNQKRLESLRELAGKENLEYPSVTLPPQPHTKEGVDAYNEVIARVRMWVNLNLWQKLKLSRDDAKPLLRLKGFPSFPLVERQANEVDWWDMVCNVKKLINEKKEDGKVFWQNLAGYKRQEALRPYLSSEEDRKKGKKFARYQLGDLLLHLEKKHGEDWGKVYDEAWERIDKKVEGLSKHIKLEEERRSEDAQSKAALTDWLRAKASFVIEGLKEADKDEFCRCELKLQKWYGDLRGKPFAIEAENSILDISGFSKQYNCAFIWQKDGVKKLNLYLIINYFKGGKLRFKKIKPEAFEANRFYTVINKKSGEIVPMEVNFNFDDPNLIILPLAFGKRQGREFIWNDLLSLETGSLKLANGRVIEKTLYNRRTRQDEPALFVALTFERREVLDSSNIKPMQLIGVDRGENIPAVIALTDPEGRPLSRFKDSLGNPTHILRIGESYKEKQRTIQAKKEVEQRRMGGYSRKYASKAKNLADDMVRNTARDLLYYAVTQDAMLIFENLSRGFGRQGKRTFMAERQYTRMEDWLTAKLAYEGLPSKTYLSKTLAQYTSKTCSNCGFTITSADYDRVLEKLKKTATGWMTTINGKELKVEGQITYYNRYKRQNVVKDLSVELDRLSEESVNNDISSWTKGRSGEALSLLKKRFSHRPVQEKFVCLNCGFETHADEQAALNIARSWLFLRSQEYKKYQTNKTTGNTDKRAFVETWQSFYRKKLKEVWKPAV

SEQ ID NO: 25361 - protein, 978 aa, synthetic construct
  REGION 1..978: note = engineered CasX variant
QEIKRINKIRRRLVKDSNTKKAGKTGPMKTLLVRVMTPDLRERLENLRKKPENIPQPISNTSRANLNKLLTDYTEMKKAILHVYWEEFQKDPVGLMSRVAQPASKKIDQNKLKPEMDEKGNLTTAGFACSQCGQPLFVYKLEQVSEKGKAYTNYFGRCNVAEHEKLILLAQLKPEKDSDEAVTYSLGKFGQRALDFYSIHVTKESTHPVKPLAQIAGNRYASGPVGKALSDACMGTIASFLSKYQDIIIEHQKVVKGNQKRLESLRELAGKENLEYPSVTLPPQPHTKEGVDAYNEVIARVRMWVNLNLWQKLKLSRDDAKPLLRLKGFPSFPLVERQANEVDWWDMVCNVKKLINEKKEDGKVFWQNLAGYKRQEALRPYLSSEEDRKKGKKFARYQLGDLLLHLEKKHGEDWGKVYDEAWERIDKKVEGLSKHIKLEEERRSEDAQSKAALTDWLRAKASFVIEGLKEADKDEFCRCELKLQKWYGDLRGKPFAIEAENSILDISGFSKQYNCAFIWQKDGVKKLNLYLIINYFKGGKLRFKKIKPEAFEANRFYTVINKKSGEIVPMEVNFNFDDPNLIILPLAFGKRQGREFIWNDLLSLETGSLKLANGRVIEKTLYNRRTRQDEPALFVALTFERREVLDSSNIKPMQLIGVDRGENIPAVIALTDPEGRPLSRFKDSLGNPTHILRIGESYKEKQRTIQAKKEVEQRRAGGYSRKYASKAKNLADDMVRNTARDLLYYAVTQDAMLIFENLSRGFGRQGKRTFMAERQYTRMEDWLTAKLAYEGLPSKTYLSKTLAQYTSKTCSNCGFTITSADYDRVLEKLKKTATGWMTTINGKELKVEGQITYYNRYKRQNVVKDLSVELDRLSEESVNNDISSWTKGRSGEALSLLKKRFSHRPVQEKFVCLNCGFETHADEQAALNIARSWLFLRSQEYKKYQTNKTTGNTDKRAFVETWQSFYRKKLKEVWKPAV

SEQ ID NO: 25362 - protein, 978 aa, synthetic construct
  REGION 1..978: note = engineered CasX variant
QEIKRINKIRRRLVKDSNTKKAGKTGPMKTLLVRVMTPDLRERLENLRKKPENIPQPISNTSRANLNKLLTDYTEMKKAILHVYWEEFQKDPVGLMSRVAQPASKKIDQNKLKPEMDEKGNLTTAGFACSQCGQPLFVYKLEQVSEKGKAYTNYFGRCNVAEHEKLILLAQLKPEKDSDEAVTYSLGKFGQRALDFYSIHVTKESTHPVKPLAQIAGNRYASGPVGKALSDACMGTIASFLSKYQDIIIEHQKVVKGNQKRLESLRELAGKENLEYPSVTLPPQPHTKEGVDAYNEVIARVRMWVNLNLWQKLKLSRDDAKPLLRLKGFPSFPLVERQANEVDWWDMVCNVKKLINEKKEDGKVFWQNLAGYKRQEALRPYLSSEEDRKKGKKFARYQLGDLLLHLEKKHGEDWGKVYDEAWERIDKKVEGLSKHIKLEEERRSEDAQSKAALTDWLRAKASFVIEGLKEADKDEFCRCELKLQKWYGDLRGKPFAIEAENSILDISGFSKQYNCAFIWQKDGVKKLNLYLIINYFKGGKLRFKKIKPEAFEANRFYTVINKKSGEIVPMEVNFNFDDPNLIILPLAFGKRQGREFIWNDLLSLETGSLKLANGRVIEKTLYNRRTRQDEPALFVALTFERREVLDSSNIKPMQLIGVDRGENIPAVIALTDPEGRPISRFKDSLGNPTHILRIGESYKEKQRTIQAKKEVEQRRAGGYSRKYASKAKNLADDMVRNTARDLLYYAVTQDAMLIFENLSRGFGRQGKRTFMAERQYTRMEDWLTAKLAYEGLPSKTYLSKTLAQYTSKTCSNCGFTITSADYDRVLEKLKKTATGWMTTINGKELKVEGQITYYNRYKRQNVVKDLSVELDRLSEESVNNDISSWTKGRSGEALSLLKKRFSHRPVQEKFVCLNCGFETHADEQAALNIARSWLFLRSQEYKKYQTNKTTGNTDKRAFVETWQSFYRKKLKEVWKPAV

SEQ ID NO: 25363 - protein, 978 aa, synthetic construct
  REGION 1..978: note = engineered CasX variant
QEIKRINKIRRRLVKDSNTKKAGKTGPMKTLLVRVMTPDLRERLENLRKKPENIPQPISNTSRANLNKLLTDYTEMKKAILHVYWEEFQKDPVGLMSRVAQPASKKIDQNKLKPEMDEKGNLTTAGFACSQCGQPLFVYKLEQVSEKGKAYTNYFGRCNVAEHEKLILLAQLKPEKDSDEAVTYSLGKFGQRALDFYSIHVTKESTHPVKPLAQIAGNRYASGPVGKALSDACMGTIASFLSKYQDIIIEHQKVVKGNQKRLESLRELAGKENLEYPSVTLPPQPHTKEGVDAYNEVIARVRMWVNLNLWQKLKLSRDDAKPLLRLKGFPSFPLVERQANEVDWWDMVCNVKKLINEKKEDGKVFWQNLAGYKRQEALRPYLSSEEDRKKGKKFARYQLGDLLLHLEKKHGEDWGKVYDEAWERIDKKVEGLSKHIKLEEERRSEDAQSKAALTDWLRAKASFVIEGLKEADKDEFCRCELKLQKWYGDLRGKPFAIEAENSILDISGFSKQYNCAFIWQKDGVKKLNLYLIINYFKGGKLRFKKIKPEAFEANRFYTVINKKSGEIVPMEVNFNFDDPNLIILPLAFGKRQGREFIWNDLLSLETGSLKLANGRVIEKTLYNRRTRQDEPALFVALTFERREVLDSSNIKPMQLIGVDRGENIPAVIALTDPEGCPLSRFTDSLGNPTHILRIGQSYKEKQRTIQAKKEVEQRRAGGYSRKYASKAKNLADDMVRNTARDLLYYAVTQDAMLIFENLSRGFGRQGKRTFMAERQYTRMEDWLTAKLAYEGLPSKTYLSKTLAQYTSKTCSNCGFTITSADYDRVLEKLKKTATGWMTTINGKELKVEGQITYYNRYKRQNVVKDLSVELDRLSEESVNNDISSWTKGRSGEALSLLKKRFSHRPVQEKFVCLNCGFETHADEQAALNIARSWLFLRSQEYKKYQTNKTTGNTDKRAFVETWQSFYRKKLKEVWKPAV

SEQ ID NO: 25364 - protein, 978 aa, synthetic construct
  REGION 1..978: note = engineered CasX variant
QEIKRINKIRRRLVKDSNTKKAGKTGPMKTLLVRVMTPDLRERLENLRKKPENIPQPISNTSRANLNKLLTDYTEMKKAILHVYWEEFQKDPVGLMSRVAQPASKKIDQNKLKPEMDEKGNLTTAGFACSQCGQPLFVYKLEQVSEKGKAYTNYFGRCNVAEHEKLILLAQLKPEKDSDEAVTYSLGKFGQRALDFYSIHVTKESTHPVKPLAQIAGNRYASGPVGKALSDACMGTIASFLSKYQDIIIEHQKVVKGNQKRLESLRELAGKENLEYPSVTLPPQPHTKEGVDAYNEVIARVRMWVNLNLWQKLKLSRDDAKPLLRLKGFPSFPLVERQANEVDWWDMVCNVKKLINEKKEDGKVFWQNLAGYKRQEALRPYLSSEEDRKKGKKFARYQLGDLLLHLEKKHGEDWGKVYDEAWERIDKKVEGLSKHIKLEEERRSEDAQSKAALTDWLRAKASFVIEGLKEADKDEFCRCELKLQKWYGDLRGKPFAIEAENSILDISGFSKQYNCAFIWQKDGVKKLNLYLIINYFKGGKLRFKKIKPEAFEANRFYTVINKKSGEIVPMEVNFNFDDPNLIILPLAFGKRQGREFIWNDLLSLETGSLKLANGRVIEKTLYNRRTRQDEPALFVALTFERREVLDSSNIKPMQLIGVDRGENIPAVIALTDPEGCPLSRFTDSLGNPTHILRIGESYKEKQRTIQAKKEVEQRRAGGYSRKYASKAKNLADDMVRNTARDLLYYAVTQDAMLIFENLSRGFGRQGKRTFMAERQYTRMEDWLTAKLAYEGLPSKTYLSKTLAQYTSKTCSNCGFTITSADYDRVLEKLKKTATGWMTTINGKELKVEGQITYYNRYKRQNVVKDLSVELDRLSEESVNNDISSWTKGRSGEALSLLKKRFSHRPVQEKFVCLNCGFETHADEQAALNIARSWLFLRSQEYKKYQTNKTTGNTDKRAFVETWQSFYRKKLKEVWKPAV

SEQ ID NO: 25365 - protein, 978 aa, synthetic construct
  REGION 1..978: note = engineered CasX variant
QEIKRINKIRRRLVKDSNTKKAGKTGPMKTLLVRVMTPDLRERLENLRKKPENIPQPISNTSRANLNKLLTDYTEMKKAILHVYWEEFQKDPVGLMSRVAQPASKKIDQNKLKPEMDEKGNLTTAGFACSQCGQPLFVYKLEQVSEKGKAYTNYFGRCNVAEHEKLILLAQLKPEKDSDEAVTYSLGKFGQRALDFYSIHVTKESTHPVKPLAQIAGNRYASGPVGKALSDACMGTIASFLSKYQDIIIEHQKVVKGNQKRLESLRELAGKENLEYPSVTLPPQPHTKEGVDAYNEVIARVRMWVNLNLWQKLKLSRDDAKPLLRLKGFPSFPLVERQANEVDWWDMVCNVKKLINEKKEDGKVFWQNLAGYKRQEALRPYLSSEEDRKKGKKFARYQLGDLLLHLEKKHGEDWGKVYDEAWERIDKKVEGLSKHIKLEEERRSEDAQSKAALTDWLRAKASFVIEGLKEADKDEFCRCELKLQKWYGDLRGKPFAIEAENSILDISGFSKQYNCAFIWQKDGVKKLNLYLIINYFKGGKLRFKKIKPEAFEANRFYTVINKKSGEIVPMEVNFNFDDPNLIILPLAFGKRQGREFIWNDLLSLETGSLKLANGRVIEKTLYNRRTRQDEPALFVALTFERREVLDSSNIKPMQLIGVDRGENIPAVIALTDPEGCPLSRFKDSLGNPTHILRIGQSYKEKQRTIQAKKEVEQRRAGGYSRKYASKAKNLADDMVRNTARDLLYYAVTQDAMLIFENLSRGFGRQGKRTFMAERQYTRMEDWLTAKLAYEGLPSKTYLSKTLAQYTSKTCSNCGFTITSADYDRVLEKLKKTATGWMTTINGKELKVEGQITYYNRYKRQNVVKDLSVELDRLSEESVNNDISSWTKGRSGEALSLLKKRFSHRPVQEKFVCLNCGFETHADEQAALNIARSWLFLRSQEYKKYQTNKTTGNTDKRAFVETWQSFYRKKLKEVWKPAV

SEQ ID NO: 25366 - protein, 978 aa, synthetic construct
  REGION 1..978: note = engineered CasX variant
QEIKRINKIRRRLVKDSNTKKAGKTGPMKTLLVRVMTPDLRERLENLRKKPENIPQPISNTSRANLNKLLTDYTEMKKAILHVYWEEFQKDPVGLMSRVAQPASKKIDQNKLKPEMDEKGNLTTAGFACSQCGQPLFVYKLEQVSEKGKAYTNYFGRCNVAEHEKLILLAQLKPEKDSDEAVTYSLGKFGQRALDFYSIHVTKESTHPVKPLAQIAGNRYASGPVGKALSDACMGTIASFLSKYQDIIIEHQKVVKGNQKRLESLRELAGKENLEYPSVTLPPQPHTKEGVDAYNEVIARVRMWVNLNLWQKLKLSRDDAKPLLRLKGFPSFPLVERQANEVDWWDMVCNVKKLINEKKEDGKVFWQNLAGYKRQEALRPYLSSEEDRKKGKKFARYQLGDLLLHLEKKHGEDWGKVYDEAWERIDKKVEGLSKHIKLEEERRSEDAQSKAALTDWLRAKASFVIEGLKEADKDEFCRCELKLQKWYGDLRGKPFAIEAENSILDISGFSKQYNCAFIWQKDGVKKLNLYLIINYFKGGKLRFKKIKPEAFEANRFYTVINKKSGEIVPMEVNFNFDDPNLIILPLAFGKRQGREFIWNDLLSLETGSLKLANGRVIEKTLYNRRTRQDEPALFVALTFERREVLDSSNIKPMQLIGVDRGENIPAVIALTDPEGCPLSRFKDSLGNPTHILRIGESYKEKQRTIQHKKEVEQRRAGGYSRKYASKAKNLADDMVRNTARDLLYYAVTQDAMLIFENLSRGFGRQGKRTFMAERQYTRMEDWLTAKLAYEGLPSKTYLSKTLAQYTSKTCSNCGFTITSADYDRVLEKLKKTATGWMTTINGKELKVEGQITYYNRYKRQNVVKDLSVELDRLSEESVNNDISSWTKGRSGEALSLLKKRFSHRPVQEKFVCLNCGFETHADEQAALNIARSWLFLRSQEYKKYQTNKTTGNTDKRAFVETWQSFYRKKLKEVWKPAV

SEQ ID NO: 25367 - protein, 978 aa, synthetic construct
  REGION 1..978: note = engineered CasX variant
QEIKRINKIRRRLVKDSNTKKAGKTGPMKTLLVRVMTPDLRERLENLRKKPENIPQPISNTSRANLNKLLTDYTEMKKAILHVYWEEFQKDPVGLMSRVAQPASKKIDQNKLKPEMDEKGNLTTAGFACSQCGQPLFVYKLEQVSEKGKAYTNYFGRCNVAEHEKLILLAQLKPEKDSDEAVTYSLGKFGQRALDFYSIHVTKESTHPVKPLAQIAGNRYASGPVGKALSDACMGTIASFLSKYQDIIIEHQKVVKGNQKRLESLRELAGKENLEYPSVTLPPQPHTKEGVDAYNEVIARVRMWVNLNLWQKLKLSRDDAKPLLRLKGFPSFPLVERQANEVDWWDMVCNVKKLINEKKEDGKVFWQNLAGYKRQEALRPYLSSEEDRKKGKKFARYQLGDLLLHLEKKHGEDWGKVYDEAWERIDKKVEGLSKHIKLEEERRSEDAQSKAALTDWLRAKASFVIEGLKEADKDEFCRCELKLQKWYGDLRGKPFAIEAENSILDISGFSKQYNCAFIWQKDGVKKLNLYLIINYFKGGKLRFKKIKPEAFEANRFYTVINKKSGEIVPMEVNFNFDDPNLIILPLAFGKRQGREFIWNDLLSLETGSLKLANGRVIEKTLYNRRTRQDEPALFVALTFERREVLDSSNIKPMQLIGVDRGENIPAVIALTDPEGCPLSRFKDSLGNPTHILRIGESYKEKQRTIQAKKEVEQRRMGGYSRKYASKAKNLADDMVRNTARDLLYYAVTQDAMLIFENLSRGFGRQGKRTFMAERQYTRMEDWLTAKLAYEGLPSKTYLSKTLAQYTSKTCSNCGFTITSADYDRVLEKLKKTATGWMTTINGKELKVEGQITYYNRYKRQNVVKDLSVELDRLSEESVNNDISSWTKGRSGEALSLLKKRFSHRPVQEKFVCLNCGFETHADEQAALNIARSWLFLRSQEYKKYQTNKTTGNTDKRAFVETWQSFYRKKLKEVWKPAV

SEQ ID NO: 25368 - protein, 978 aa, synthetic construct
  REGION 1..978: note = engineered CasX variant
QEIKRINKIRRRLVKDSNTKKAGKTGPMKTLLVRVMTPDLRERLENLRKKPENIPQPISNTSRANLNKLLTDYTEMKKAILHVYWEEFQKDPVGLMSRVAQPASKKIDQNKLKPEMDEKGNLTTAGFACSQCGQPLFVYKLEQVSEKGKAYTNYFGRCNVAEHEKLILLAQLKPEKDSDEAVTYSLGKFGQRALDFYSIHVTKESTHPVKPLAQIAGNRYASGPVGKALSDACMGTIASFLSKYQDIIIEHQKVVKGNQKRLESLRELAGKENLEYPSVTLPPQPHTKEGVDAYNEVIARVRMWVNLNLWQKLKLSRDDAKPLLRLKGFPSFPLVERQANEVDWWDMVCNVKKLINEKKEDGKVFWQNLAGYKRQEALRPYLSSEEDRKKGKKFARYQLGDLLLHLEKKHGEDWGKVYDEAWERIDKKVEGLSKHIKLEEERRSEDAQSKAALTDWLRAKASFVIEGLKEADKDEFCRCELKLQKWYGDLRGKPFAIEAENSILDISGFSKQYNCAFIWQKDGVKKLNLYLIINYFKGGKLRFKKIKPEAFEANRFYTVINKKSGEIVPMEVNFNFDDPNLIILPLAFGKRQGREFIWNDLLSLETGSLKLANGRVIEKTLYNRRTRQDEPALFVALTFERREVLDSSNIKPMQLIGVDRGENIPAVIALTDPEGCPLSRFKDSLGNPTHILRIGESYKEKQRTIQAKKEVEQRRAGGYSRKYASKAKNLADDMVRNTARDLLYYAVTQDAMLIFENLSRGFGRQGKRTFMAERQYTRMEDWLTAKLAYEGLPSKTYLSKTLAQYTSKTCSNCGFTITSADYDRVLEKLKKTATGWMTTINGKELKVEGQITYYNRYKRQNVVKDLSVELDRLSEESVNNDISSWTKGRSGEALSLLKKRFSHRPVQEKFVCLNCGFETHADEQAALNIARSWLFLRSQEYKKYQTNKTTGNTDKRAFVETWQSFYRKKLKEVWKPAV

SEQ ID NO: 25369 - protein, 978 aa, synthetic construct
  REGION 1..978: note = engineered CasX variant
QEIKRINKIRRRLVKDSNTKKAGKTGPMKTLLVRVMTPDLRERLENLRKKPENIPQPISNTSRANLNKLLTDYTEMKKAILHVYWEEFQKDPVGLMSRVAQPASKKIDQNKLKPEMDEKGNLTTAGFACSQCGQPLFVYKLEQVSEKGKAYTNYFGRCNVAEHEKLILLAQLKPEKDSDEAVTYSLGKFGQRALDFYSIHVTKESTHPVKPLAQIAGNRYASGPVGKALSDACMGTIASFLSKYQDIIIEHQKVVKGNQKRLESLRELAGKENLEYPSVTLPPQPHTKEGVDAYNEVIARVRMWVNLNLWQKLKLSRDDAKPLLRLKGFPSFPLVERQANEVDWWDMVCNVKKLINEKKEDGKVFWQNLAGYKRQEALRPYLSSEEDRKKGKKFARYQLGDLLLHLEKKHGEDWGKVYDEAWERIDKKVEGLSKHIKLEEERRSEDAQSKAALTDWLRAKASFVIEGLKEADKDEFCRCELKLQKWYGDLRGKPFAIEAENSILDISGFSKQYNCAFIWQKDGVKKLNLYLIINYFKGGKLRFKKIKPEAFEANRFYTVINKKSGEIVPMEVNFNFDDPNLIILPLAFGKRQGREFIWNDLLSLETGSLKLANGRVIEKTLYNRRTRQDEPALFVALTFERREVLDSSNIKPMQLIGVDRGENIPAVIALTDPEGCPLSRFKDSLGNPTHILRIGERYKEKQRTIQHKKEVEQRRAGGYSRKYASKAKNLADDMVRNTARDLLYYAVTQDAMLIFENLSRGFGRQGKRTFMAERQYTRMEDWLTAKLAYEGLPSKTYLSKTLAQYTSKTCSNCGFTITSADYDRVLEKLKKTATGWMTTINGKELKVEGQITYYNRYKRQNVVKDLSVELDRLSEESVNNDISSWTKGRSGEALSLLKKRFSHRPVQEKFVCLNCGFETHADEQAALNIARSWLFLRSQEYKKYQTNKTTGNTDKRAFVETWQSFYRKKLKEVWKPAV

SEQ ID NO: 25370 - protein, 978 aa, synthetic construct
  REGION 1..978: note = engineered CasX variant
QEIKRINKIRRRLVKDSNTKKAGKTGPMKTLLVRVMTPDLRERLENLRKKPENIPQPISNTSRANLNKLLTDYTEMKKAILHVYWEEFQKDPVGLMSRVAQPASKKIDQNKLKPEMDEKGNLTTAGFACSQCGQPLFVYKLEQVSEKGKAYTNYFGRCNVAEHEKLILLAQLKPEKDSDEAVTYSLGKFGQRALDFYSIHVTKESTHPVKPLAQIAGNRYASGPVGKALSDACMGTIASFLSKYQDIIIEHQKVVKGNQKRLESLRELAGKENLEYPSVTLPPQPHTKEGVDAYNEVIARVRMWVNLNLWQKLKLSRDDAKPLLRLKGFPSFPLVERQANEVDWWDMVCNVKKLINEKKEDGKVFWQNLAGYKRQEALRPYLSSEEDRKKGKKFARYQLGDLLLHLEKKHGEDWGKVYDEAWERIDKKVEGLSKHIKLEEERRSEDAQSKAALTDWLRAKASFVIEGLKEADKDEFCRCELKLQKWYGDLRGKPFAIEAENSILDISGFSKQYNCAFIWQKDGVKKLNLYLIINYFKGGKLRFKKIKPEAFEANRFYTVINKKSGEIVPMEVNFNFDDPNLIILPLAFGKRQGREFIWNDLLSLETGSLKLANGRVIEKTLYNRRTRQDEPALFVALTFERREVLDSSNIKPMQLIGVDRGENIPAVIALTDPEGCPLSRFKDSLGNPTHILRIGERYKEKQRTIQAKKEVEQRRAGGYSRKYASKAKNLADDMVRNTARDLLYYAVTQDAMLIFENLSRGFGRQGKRTFMAERQYTRMEDWLTAKLAYEGLPSKTYLSKTLAQYTSKTCSNCGFTITSADYDRVLEKLKKTATGWMTTINGKELKVEGQITYYNRYKRQNVVKDLSVELDRLSEESVNNDISSWTKGRSGEALSLLKKRFSHRPVQEKFVCLNCGFETHADEQAALNIARSWLFLRSQEYKKYQTNKTTGNTDKRAFVETWQSFYRKKLKEVWKPAV

SEQ ID NO: 25371 - protein, 978 aa, synthetic construct
  REGION 1..978: note = engineered CasX variant
QEIKRINKIRRRLVKDSNTKKAGKTGPMKTLLVRVMTPDLRERLENLRKKPENIPQPISNTSRANLNKLLTDYTEMKKAILHVYWEEFQKDPVGLMSRVAQPASKKIDQNKLKPEMDEKGNLTTAGFACSQCGQPLFVYKLEQVSEKGKAYTNYFGRCNVAEHEKLILLAQLKPEKDSDEAVTYSLGKFGQRALDFYSIHVTKESTHPVKPLAQIAGNRYASGPVGKALSDACMGTIASFLSKYQDIIIEHQKVVKGNQKRLESLRELAGKENLEYPSVTLPPQPHTKEGVDAYNEVIARVRMWVNLNLWQKLKLSRDDAKPLLRLKGFPSFPLVERQANEVDWWDMVCNVKKLINEKKEDGKVFWQNLAGYKRQEALRPYLSSEEDRKKGKKFARYQLGDLLLHLEKKHGEDWGKVYDEAWERIDKKVEGLSKHIKLEEERRSEDAQSKAALTDWLRAKASFVIEGLKEADKDEFCRCELKLQKWYGDLRGKPFAIEAENSILDISGFSKQYNCAFIWQKDGVKKLNLYLIINYFKGGKLRFKKIKPEAFEANRFYTVINKKSGEIVPMEVNFNFDDPNLIILPLAFGKRQGREFIWNDLLSLETGSLKLANGRVIEKTLYNRRTRQDEPALFVALTFERREVLDSSNIKPMQLIGVDRGENIPAVIALTDPEGCPISRFKDSLGNPTHILRIGESYKEKQRTIQAKKEVEQRRMGGYSRKYASKAKNLADDMVRNTARDLLYYAVTQDAMLIFENLSRGFGRQGKRTFMAERQYTRMEDWLTAKLAYEGLPSKTYLSKTLAQYTSKTCSNCGFTITSADYDRVLEKLKKTATGWMTTINGKELKVEGQITYYNRYKRQNVVKDLSVELDRLSEESVNNDISSWTKGRSGEALSLLKKRFSHRPVQEKFVCLNCGFETHADEQAALNIARSWLFLRSQEYKKYQTNKTTGNTDKRAFVETWQSFYRKKLKEVWKPAV

SEQ ID NO: 25372 - protein, 978 aa, synthetic construct
  REGION 1..978: note = engineered CasX variant
QEIKRINKIRRRLVKDSNTKKAGKTGPMKTLLVRVMTPDLRERLENLRKKPENIPQPISNTSRANLNKLLTDYTEMKKAILHVYWEEFQKDPVGLMSRVAQPASKKIDQNKLKPEMDEKGNLTTAGFACSQCGQPLFVYKLEQVSEKGKAYTNYFGRCNVAEHEKLILLAQLKPEKDSDEAVTYSLGKFGQRALDFYSIHVTKESTHPVKPLAQIAGNRYASGPVGKALSDACMGTIASFLSKYQDIIIEHQKVVKGNQKRLESLRELAGKENLEYPSVTLPPQPHTKEGVDAYNEVIARVRMWVNLNLWQKLKLSRDDAKPLLRLKGFPSFPLVERQANEVDWWDMVCNVKKLINEKKEDGKVFWQNLAGYKRQEALRPYLSSEEDRKKGKKFARYQLGDLLLHLEKKHGEDWGKVYDEAWERIDKKVEGLSKHIKLEEERRSEDAQSKAALTDWLRAKASFVIEGLKEADKDEFCRCELKLQKWYGDLRGKPFAIEAENSILDISGFSKQYNCAFIWQKDGVKKLNLYLIINYFKGGKLRFKKIKPEAFEANRFYTVINKKSGEIVPMEVNFNFDDPNLIILPLAFGKRQGREFIWNDLLSLETGSLKLANGRVIEKTLYNRRTRQDEPALFVALTFERREVLDSSNIKPMQLIGVDRGENIPAVIALTDPEGCPISRFKDSLGNPTHILRIGESYKEKQRTIQAKKEVEQRRAGGYSRKYASKAKNLADDMVRNTARDLLYYAVTQDAMLIFENLSRGFGRQGKRTFMAERQYTRMEDWLTAKLAYEGLPSKTYLSKTLAQYTSKTCSNCGFTITSADYDRVLEKLKKTATGWMTTINGKELKVEGQITYYNRYKRQNVVKDLSVELDRLSEESVNNDISSWTKGRSGEALSLLKKRFSHRPVQEKFVCLNCGFETHADEQAALNIARSWLFLRSQEYKKYQTNKTTGNTDKRAFVETWQSFYRKKLKEVWKPAV

SEQ ID NO: 25373 - protein, 978 aa, synthetic construct
  REGION 1..978: note = engineered CasX variant
QEIKRINKIRRRLVKDSNTKKAGKTGPMKTLLVRVMTPDLRERLENLRKKPENIPQPISNTSRANLNKLLTDYTEMKKAILHVYWEEFQKDPVGLMSRVAQPASKKIDQNKLKPEMDEKGNLTTAGFACSQCGQPLFVYKLEQVSEKGKAYTNYFGRCNVAEHEKLILLAQLKPEKDSDEAVTYSLGKFGQRALDFYSIHVTKESTHPVKPLAQIAGNRYASGPVGKALSDACMGTIASFLSKYQDIIIEHQKVVKGNQKRLESLRELAGKENLEYPSVTLPPQPHTKEGVDAYNEVIARVRMWVNLNLWQKLKLSRDDAKPLLRLKGFPSFPLVERQANEVDWWDMVCNVKKLINEKKEDGKVFWQNLAGYKRQEALRPYLSSEEDRKKGKKFARYQLGDLLLHLEKKHGEDWGKVYDEAWERIDKKVEGLSKHIKLEEERRSEDAQSKAALTDWLRAKASFVIEGLKEADKDEFCRCELKLQKWYGDLRGKPFAIEAENSILDISGFSKQYNCAFIWQKDGVKKLNLYLIINYFKGGKLRFKKIKPEAFEANRFYTVINKKSGEIVPMEVNFNFDDPNLIILPLAFGKRQGREFIWNDLLSLETGSLKLANGRVIEKTLYNRRTRQDEPALFVALTFERREVLDSSNIKPMPLIGVDRGENIPAVIALTDPEGCPLSRFKDSLGNPTHILRIGESYKEKQRTIQAKKEVEQRRAGGYSRKYASKAKNLADDMVRNTARDLLYYAVTQDAMLIFENLSRGFGRQGKRTFMAERQYTRMEDWLTAKLAYEGLPSKTYLSKTLAQYTSKTCSNCGFTITSADYDRVLEKLKKTATGWMTTINGKELKVEGQITYYNRYKRQNVVKDLSVELDRLSEESVNNDISSWTKGRSGEALSLLKKRFSHRPVQEKFVCLNCGFETHADEQAALNIARSWLFLRSQEYKKYQTNKTTGNTDKRAFVETWQSFYRKKLKEVWKPAV

SEQ ID NO: 25374 - protein, 978 aa, synthetic construct
  REGION 1..978: note = engineered CasX variant
QEIKRINKIRRRLVKDSNTKKAGKTGPMKTLLVRVMTPDLRERLENLRKKPENIPQPISNTSRANLNKLLTDYTEMKKAILHVYWEEFQKDPVGLMSRVAQPASKKIDQNKLKPEMDEKGNLTTAGFACSQCGQPLFVYKLEQVSEKGKAYTNYFGRCNVAEHEKLILLAQLKPEKDSDEAVTYSLGKFGQRALDFYSIHVTKESTHPVKPLAQIAGNRYASGPVGKALSDACMGTIASFLSKYQDIIIEHQKVVKGNQKRLESLRELAGKENLEYPSVTLPPQPHTKEGVDAYNEVIARVRMWVNLNLWQKLKLSRDDAKPLLRLKGFPSFPLVERQANEVDWWDMVCNVKKLINEKKEDGKVFWQNLAGYKRQEALRPYLSSEEDRKKGKKFARYQLGDLLLHLEKKHGEDWGKVYDEAWERIDKKVEGLSKHIKLEEERRSEDAQSKAALTDWLRAKASFVIEGLKEADKDEFCRCELKLQKWYGDLRGKPFAIEAENSILDISGFSKQYNCAFIWQKDGVKKLNLYLIINYFKGGKLRFKKIKPEAFEANRFYTVINKKSGEIVPMEVNFNFDDPNLIILPLAFGKRQGREFIWNDLLSLETGSLKLANGRVIEKTLYNRRTRQDEPALFVALTFERREVLDSSNIKPMNYIGVDRGENIPAVIALTDPEGCPLSRFKDSLGNPTHILRIGESYKEKQRTIQAKKEVEQRRAGGYSRKYASKAKNLADDMVRNTARDLLYYAVTQDAMLIFENLSRGFGRQGKRTFMAERQYTRMEDWLTAKLAYEGLPSKTYLSKTLAQYTSKTCSNCGFTITSADYDRVLEKLKKTATGWMTTINGKELKVEGQITYYNRYKRQNVVKDLSVELDRLSEESVNNDISSWTKGRSGEALSLLKKRFSHRPVQEKFVCLNCGFETHADEQAALNIARSWLFLRSQEYKKYQTNKTTGNTDKRAFVETWQSFYRKKLKEVWKPAV

SEQ ID NO: 25375 - protein, 978 aa, synthetic construct
  REGION 1..978: note = engineered CasX variant
QEIKRINKIRRRLVKDSNTKKAGKTGPMKTLLVRVMTPDLRERLENLRKKPENIPQPISNTSRANLNKLLTDYTEMKKAILHVYWEEFQKDPVGLMSRVAQPASKKIDQNKLKPEMDEKGNLTTAGFACSQCGQPLFVYKLEQVSEKGKAYTNYFGRCNVAEHEKLILLAQLKPEKDSDEAVTYSLGKFGQRALDFYSIHVTKESTHPVKPLAQIAGNRYASGPVGKALSDACMGTIASFLSKYQDIIIEHQKVVKGNQKRLESLRELAGKENLEYPSVTLPPQPHTKEGVDAYNEVIARVRMWVNLNLWQKLKLSRDDAKPLLRLKGFPSFPLVERQANEVDWWDMVCNVKKLINEKKEDGKVFWQNLAGYKRQEALRPYLSSEEDRKKGKKFARYQLGDLLLHLEKKHGEDWGKVYDEAWERIDKKVEGLSKHIKLEEERRSEDAQSKAALTDWLRAKASFVIEGLKEADKDEFCRCELKLQKWYGDLRGKPFAIEAENSILDISGFSKQYNCAFIWQKDGVKKLNLYLIINYFKGGKLRFKKIKPEAFEANRFYTVINKKSGEIVPMEVNFNFDDPNLIILPLAFGKRQGREFIWNDLLSLETGSLKLANGRVIEKTLYNRRTRQDEPALFVALTFERREVLDSSNIKPMNYIGVDRGENIPAVIALTDPEGCPLSRFKDSLGNPTHILRIGESYKEKQRTIQAKKEVEQRRAFGYSRKYASKAKNLADDMVRNTARDLLYYAVTQDAMLIFENLSRGFGRQGKRTFMAERQYTRMEDWLTAKLAYEGLPSKTYLSKTLAQYTSKTCSNCGFTITSADYDRVLEKLKKTATGWMTTINGKELKVEGQITYYNRYKRQNVVKDLSVELDRLSEESVNNDISSWTKGRSGEALSLLKKRFSHRPVQEKFVCLNCGFETHADEQAALNIARSWLFLRSQEYKKYQTNKTTGNTDKRAFVETWQSFYRKKLKEVWKPAV

SEQ ID NO: 25376 - protein, 978 aa, synthetic construct
  REGION 1..978: note = engineered CasX variant
QEIKRINKIRRRLVKDSNTKKAGKTGPMKTLLVRVMTPDLRERLENLRKKPENIPQPISNTSRANLNKLLTDYTEMKKAILHVYWEEFQKDPVGLMSRVAQPASKKIDQNKLKPEMDEKGNLTTAGFACSQCGQPLFVYKLEQVSEKGKAYTNYFGRCNVAEHEKLILLAQLKPEKDSDEAVTYSLGKFGQRALDFYSIHVTKESTHPVKPLAQIAGNRYASGPVGKALSDACMGTIASFLSKYQDIIIEHQKVVKGNQKRLESLRELAGKENLEYPSVTLPPQPHTKEGVDAYNEVIARVRMWVNLNLWQKLKLSRDDAKPLLRLKGFPSFPLVERQANEVDWWDMVCNVKKLINEKKEDGKVFWQNLAGYKRQEALRPYLSSEEDRKKGKKFARYQLGDLLLHLEKKHGEDWGKVYDEAWERIDKKVEGLSKHIKLEEERRSEDAQSKAALTDWLRAKASFVIEGLKEADKDEFCRCELKLQKWYGDLRGKPFAIEAENSILDISGFSKQYNCAFIWQKDGVKKLNLYLIINYFKGGKLRFKKIKPEAFEANRFYTVINKKSGEIVPMEVNFNFDDPNLIILPLAFGKRQGREFIWNDLLSLETGSLKLANGRVIEKTLYNRRTRQDEPALFVALTFERREVLDSSNIKPMNWIGVDRGENIPAVIALTDPYGCPLSRFKDSLGNPTHILRIGESYKEKQRTIQAKKEVEQRRAGGYSRKYASKAKNLADDMVRNTARDLLYYAVTQDAMLIFENLSRGFGRQGKRTFMAERQYTRMEDWLTAKLAYEGLPSKTYLSKTLAQYTSKTCSNCGFTITSADYDRVLEKLKKTATGWMTTINGKELKVEGQITYYNRYKRQNVVKDLSVELDRLSEESVNNDISSWTKGRSGEALSLLKKRFSHRPVQEKFVCLNCGFETHADEQAALNIARSWLFLRSQEYKKYQTNKTTGNTDKRAFVETWQSFYRKKLKEVWKPAV

SEQ ID NO: 25377 - protein, 978 aa, synthetic construct
  REGION 1..978: note = engineered CasX variant
QEIKRINKIRRRLVKDSNTKKAGKTGPMKTLLVRVMTPDLRERLENLRKKPENIPQPISNTSRANLNKLLTDYTEMKKAILHVYWEEFQKDPVGLMSRVAQPASKKIDQNKLKPEMDEKGNLTTAGFACSQCGQPLFVYKLEQVSEKGKAYTNYFGRCNVAEHEKLILLAQLKPEKDSDEAVTYSLGKFGQRALDFYSIHVTKESTHPVKPLAQIAGNRYASGPVGKALSDACMGTIASFLSKYQDIIIEHQKVVKGNQKRLESLRELAGKENLEYPSVTLPPQPHTKEGVDAYNEVIARVRMWVNLNLWQKLKLSRDDAKPLLRLKGFPSFPLVERQANEVDWWDMVCNVKKLINEKKEDGKVFWQNLAGYKRQEALRPYLSSEEDRKKGKKFARYQLGDLLLHLEKKHGEDWGKVYDEAWERIDKKVEGLSKHIKLEEERRSEDAQSKAALTDWLRAKASFVIEGLKEADKDEFCRCELKLQKWYGDLRGKPFAIEAENSILDISGFSKQYNCAFIWQKDGVKKLNLYLIINYFKGGKLRFKKIKPEAFEANRFYTVINKKSGEIVPMEVNFNFDDPNLIILPLAFGKRQGREFIWNDLLSLETGSLKLANGRVIEKTLYNRRTRQDEPALFVALTFERREVLDSSNIKPMNWIGVDRGENIPAVIALTDPEGCPLSRFKDSLGNPTHILRIGESYKEKQRTIQAKKEVEQRRAGGYSRKYASKAKNLADDMVRNTARDLLYYAVTQDAMLIFENLSRGFGRQGKRTFMAERQYTRMEDWLTAKLAYEGLPSKTYLSKTLAQYTSKTCSNCGFTITSADYDRVLEKLKKTATGWMTTINGKELKVEGQITYYNRYKRQNVVKDLSVELDRLSEESVNNDISSWTKGRSGEALSLLKKRFSHRPVQEKFVCLNCGFETHADEQAALNIARSWLFLRSQEYKKYQTNKTTGNTDKRAFVETWQSFYRKKLKEVWKPAV

SEQ ID NO: 25378 - protein, 978 aa, synthetic construct
  REGION 1..978: note = engineered CasX variant
QEIKRINKIRRRLVKDSNTKKAGKTGPMKTLLVRVMTPDLRERLENLRKKPENIPQPISNTSRANLNKLLTDYTEMKKAILHVYWEEFQKDPVGLMSRVAQPASKKIDQNKLKPEMDEKGNLTTAGFACSQCGQPLFVYKLEQVSEKGKAYTNYFGRCNVAEHEKLILLAQLKPEKDSDEAVTYSLGKFGQRALDFYSIHVTKESTHPVKPLAQIAGNRYASGPVGKALSDACMGTIASFLSKYQDIIIEHQKVVKGNQKRLESLRELAGKENLEYPSVTLPPQPHTKEGVDAYNEVIARVRMWVNLNLWQKLKLSRDDAKPLLRLKGFPSFPLVERQANEVDWWDMVCNVKKLINEKKEDGKVFWQNLAGYKRQEALRPYLSSEEDRKKGKKFARYQLGDLLLHLEKKHGEDWGKVYDEAWERIDKKVEGLSKHIKLEEERRSEDAQSKAALTDWLRAKASFVIEGLKEADKDEFCRCELKLQKWYGDLRGKPFAIEAENSILDISGFSKQYNCAFIWQKDGVKKLNLYLIINYFKGGKLRFKKIKPEAFEANRFYTVINKKSGEIVPMEVNFNFDDPNLIILPLAFGKRQGREFIWNDLLSLETGSLKLANGRVIEKTLYNRRTRQDEPALFVALTFERREVLDSSNIKPMNMIGVDRGENMPAVIALTDPEGCPLSRFKDSFGNPTHILRIGESYKEKQRTIQAKKEVEQRRAGGYSRKYASKAKNLADDMVRNTARDLLYYAVTQDAMLIFENLSRGFGRQGKRTFMAERQYTRMEDWLTAKLAYEGLPSKTYLSKTLAQYTSKTCSNCGFTITSADYDRVLEKLKKTATGWMTTINGKELKVEGQITYYNRYKRQNVVKDLSVELDRLSEESVNNDISSWTKGRSGEALSLLKKRFSHRPVQEKFVCLNCGFETHADEQAALNIARSWLFLRSQEYKKYQTNKTTGNTDKRAFVETWQSFYRKKLKEVWKPAV

SEQ ID NO: 25379 - protein, 978 aa, synthetic construct
  REGION 1..978: note = engineered CasX variant
QEIKRINKIRRRLVKDSNTKKAGKTGPMKTLLVRVMTPDLRERLENLRKKPENIPQPISNTSRANLNKLLTDYTEMKKAILHVYWEEFQKDPVGLMSRVAQPASKKIDQNKLKPEMDEKGNLTTAGFACSQCGQPLFVYKLEQVSEKGKAYTNYFGRCNVAEHEKLILLAQLKPEKDSDEAVTYSLGKFGQRALDFYSIHVTKESTHPVKPLAQIAGNRYASGPVGKALSDACMGTIASFLSKYQDIIIEHQKVVKGNQKRLESLRELAGKENLEYPSVTLPPQPHTKEGVDAYNEVIARVRMWVNLNLWQKLKLSRDDAKPLLRLKGFPSFPLVERQANEVDWWDMVCNVKKLINEKKEDGKVFWQNLAGYKRQEALRPYLSSEEDRKKGKKFARYQLGDLLLHLEKKHGEDWGKVYDEAWERIDKKVEGLSKHIKLEEERRSEDAQSKAALTDWLRAKASFVIEGLKEADKDEFCRCELKLQKWYGDLRGKPFAIEAENSILDISGFSKQYNCAFIWQKDGVKKLNLYLIINYFKGGKLRFKKIKPEAFEANRFYTVINKKSGEIVPMEVNFNFDDPNLIILPLAFGKRQGREFIWNDLLSLETGSLKLANGRVIEKTLYNRRTRQDEPALFVALTFERREVLDSSNIKPMNMIGVDRGENIPAVIALTDPFGCPLSRFKDSLGNPTHILRIGESYKEKQRTIQAKKEVEQRRAGGYSRKYASKAKNLADDMVRNTARDLLYYAVTQDAMLIFENLSRGFGRQGKRTFMAERQYTRMEDWLTAKLAYEGLPSKTYLSKTLAQYTSKTCSNCGFTITSADYDRVLEKLKKTATGWMTTINGKELKVEGQITYYNRYKRQNVVKDLSVELDRLSEESVNNDISSWTKGRSGEALSLLKKRFSHRPVQEKFVCLNCGFETHADEQAALNIARSWLFLRSQEYKKYQTNKTTGNTDKRAFVETWQSFYRKKLKEVWKPAV

SEQ ID NO: 25380 - protein, 978 aa, synthetic construct
  REGION 1..978: note = engineered CasX variant
QEIKRINKIRRRLVKDSNTKKAGKTGPMKTLLVRVMTPDLRERLENLRKKPENIPQPISNTSRANLNKLLTDYTEMKKAILHVYWEEFQKDPVGLMSRVAQPASKKIDQNKLKPEMDEKGNLTTAGFACSQCGQPLFVYKLEQVSEKGKAYTNYFGRCNVAEHEKLILLAQLKPEKDSDEAVTYSLGKFGQRALDFYSIHVTKESTHPVKPLAQIAGNRYASGPVGKALSDACMGTIASFLSKYQDIIIEHQKVVKGNQKRLESLRELAGKENLEYPSVTLPPQPHTKEGVDAYNEVIARVRMWVNLNLWQKLKLSRDDAKPLLRLKGFPSFPLVERQANEVDWWDMVCNVKKLINEKKEDGKVFWQNLAGYKRQEALRPYLSSEEDRKKGKKFARYQLGDLLLHLEKKHGEDWGKVYDEAWERIDKKVEGLSKHIKLEEERRSEDAQSKAALTDWLRAKASFVIEGLKEADKDEFCRCELKLQKWYGDLRGKPFAIEAENSILDISGFSKQYNCAFIWQKDGVKKLNLYLIINYFKGGKLRFKKIKPEAFEANRFYTVINKKSGEIVPMEVNFNFDDPNLIILPLAFGKRQGREFIWNDLLSLETGSLKLANGRVIEKTLYNRRTRQDEPALFVALTFERREVLDSSNIKPMNMIGVDRGENIPAVIALTDPEGCPLSSFKDSLGNPTHILRIGESYKEKQRTIQAKKEVEQRRAGGYSRKYASKAKNLADDMVRNTARDLLYYAVTQDAMLIFENLSRGFGRQGKRTFMAERQYTRMEDWLTAKLAYEGLPSKTYLSKTLAQYTSKTCSNCGFTITSADYDRVLEKLKKTATGWMTTINGKELKVEGQITYYNRYKRQNVVKDLSVELDRLSEESVNNDISSWTKGRSGEALSLLKKRFSHRPVQEKFVCLNCGFETHADEQAALNIARSWLFLRSQEYKKYQTNKTTGNTDKRAFVETWQSFYRKKLKEVWKPAV

SEQ ID NO: 25381 - protein, 978 aa, synthetic construct
  REGION 1..978: note = engineered CasX variant
QEIKRINKIRRRLVKDSNTKKAGKTGPMKTLLVRVMTPDLRERLENLRKKPENIPQPISNTSRANLNKLLTDYTEMKKAILHVYWEEFQKDPVGLMSRVAQPASKKIDQNKLKPEMDEKGNLTTAGFACSQCGQPLFVYKLEQVSEKGKAYTNYFGRCNVAEHEKLILLAQLKPEKDSDEAVTYSLGKFGQRALDFYSIHVTKESTHPVKPLAQIAGNRYASGPVGKALSDACMGTIASFLSKYQDIIIEHQKVVKGNQKRLESLRELAGKENLEYPSVTLPPQPHTKEGVDAYNEVIARVRMWVNLNLWQKLKLSRDDAKPLLRLKGFPSFPLVERQANEVDWWDMVCNVKKLINEKKEDGKVFWQNLAGYKRQEALRPYLSSEEDRKKGKKFARYQLGDLLLHLEKKHGEDWGKVYDEAWERIDKKVEGLSKHIKLEEERRSEDAQSKAALTDWLRAKASFVIEGLKEADKDEFCRCELKLQKWYGDLRGKPFAIEAENSILDISGFSKQYNCAFIWQKDGVKKLNLYLIINYFKGGKLRFKKIKPEAFEANRFYTVINKKSGEIVPMEVNFNFDDPNLIILPLAFGKRQGREFIWNDLLSLETGSLKLANGRVIEKTLYNRRTRQDEPALFVALTFERREVLDSSNIKPMNMIGVDRGENIPAVIALTDPEGCPLSSFKDSLGNPTHILRIGESYKEKQRGIQAKKEVEQRRAGGYSRKYASKAKNLADDMVRNTARDLLYYAVTQDAMLIFENLSRGFGRQGKRTFMAERQYTRMEDWLTAKLAYEGLPSKTYLSKTLAQYTSKTCSNCGFTITSADYDRVLEKLKKTATGWMTTINGKELKVEGQITYYNRYKRQNVVKDLSVELDRLSEESVNNDISSWTKGRSGEALSLLKKRFSHRPVQEKFVCLNCGFETHADEQAALNIARSWLFLRSQEYKKYQTNKTTGNTDKRAFVETWQSFYRKKLKEVWKPAV

SEQ ID NO: 25382 - protein, 978 aa, synthetic construct
  REGION 1..978: note = engineered CasX variant
QEIKRINKIRRRLVKDSNTKKAGKTGPMKTLLVRVMTPDLRERLENLRKKPENIPQPISNTSRANLNKLLTDYTEMKKAILHVYWEEFQKDPVGLMSRVAQPASKKIDQNKLKPEMDEKGNLTTAGFACSQCGQPLFVYKLEQVSEKGKAYTNYFGRCNVAEHEKLILLAQLKPEKDSDEAVTYSLGKFGQRALDFYSIHVTKESTHPVKPLAQIAGNRYASGPVGKALSDACMGTIASFLSKYQDIIIEHQKVVKGNQKRLESLRELAGKENLEYPSVTLPPQPHTKEGVDAYNEVIARVRMWVNLNLWQKLKLSRDDAKPLLRLKGFPSFPLVERQANEVDWWDMVCNVKKLINEKKEDGKVFWQNLAGYKRQEALRPYLSSEEDRKKGKKFARYQLGDLLLHLEKKHGEDWGKVYDEAWERIDKKVEGLSKHIKLEEERRSEDAQSKAALTDWLRAKASFVIEGLKEADKDEFCRCELKLQKWYGDLRGKPFAIEAENSILDISGFSKQYNCAFIWQKDGVKKLNLYLIINYFKGGKLRFKKIKPEAFEANRFYTVINKKSGEIVPMEVNFNFDDPNLIILPLAFGKRQGREFIWNDLLSLETGSLKLANGRVIEKTLYNRRTRQDEPALFVALTFERREVLDSSNIKPMNMIGVDRGENIPAVIALTDPEGCPLSRFKDSLGNPTHILRIGESYKEKQRTIQAKKEVSQRRAGGYSRKYASKAKNLADDMVRNTARDLLYYAVTQDAMLIFENLSRGFGRQGKRTFMAERQYTRMEDWLTAKLAYEGLPSKTYLSKTLAQYTSKTCSNCGFTITSADYDRVLEKLKKTATGWMTTINGKELKVEGQITYYNRYKRQNVVKDLSVELDRLSEESVNNDISSWTKGRSGEALSLLKKRFSHRPVQEKFVCLNCGFETHADEQAALNIARSWLFLRSQEYKKYQTNKTTGNTDKRAFVETWQSFYRKKLKEVWKPAV

SEQ ID NO: 25383 - protein, 978 aa, synthetic construct
  REGION 1..978: note = engineered CasX variant
QEIKRINKIRRRLVKDSNTKKAGKTGPMKTLLVRVMTPDLRERLENLRKKPENIPQPISNTSRANLNKLLTDYTEMKKAILHVYWEEFQKDPVGLMSRVAQPASKKIDQNKLKPEMDEKGNLTTAGFACSQCGQPLFVYKLEQVSEKGKAYTNYFGRCNVAEHEKLILLAQLKPEKDSDEAVTYSLGKFGQRALDFYSIHVTKESTHPVKPLAQIAGNRYASGPVGKALSDACMGTIASFLSKYQDIIIEHQKVVKGNQKRLESLRELAGKENLEYPSVTLPPQPHTKEGVDAYNEVIARVRMWVNLNLWQKLKLSRDDAKPLLRLKGFPSFPLVERQANEVDWWDMVCNVKKLINEKKEDGKVFWQNLAGYKRQEALRPYLSSEEDRKKGKKFARYQLGDLLLHLEKKHGEDWGKVYDEAWERIDKKVEGLSKHIKLEEERRSEDAQSKAALTDWLRAKASFVIEGLKEADKDEFCRCELKLQKWYGDLRGKPFAIEAENSILDISGFSKQYNCAFIWQKDGVKKLNLYLIINYFKGGKLRFKKIKPEAFEANRFYTVINKKSGEIVPMEVNFNFDDPNLIILPLAFGKRQGREFIWNDLLSLETGSLKLANGRVIEKTLYNRRTRQDEPALFVALTFERREVLDSSNIKPMNMIGVDRGENIPAVIALTDPEGCPLSRFKDSLGNPTHILRIGESYKEKQRTIQAKKEVEQRRAGGYSRKYASKAKNLADDMVRNTARDLLYYAVTQDAMLIFENLSRGFGRQGKRTFMAERQYTRMEDWLTAKLAYEGLPSKTYLSKTLAQYTSKTCSNCGFTITSADYDRVLEKLKKTATGWMTTINGKELKVEGQITYYNRYKRQNVVKDLSVELDRLSEESVNNDISSWTKGRSGEALSLLKKRFSHRPVQEKFVCLNCGFETHADEQAALNIARSWLFLRSQEYKKYQTNKTTGNTDKRAFVETWQSFYRKKLKEVWKPAV

SEQ ID NO: 25384 - protein, 978 aa, synthetic construct
  REGION 1..978: note = engineered CasX variant
QEIKRINKIRRRLVKDSNTKKAGKTGPMKTLLVRVMTPDLRERLENLRKKPENIPQPISNTSRANLNKLLTDYTEMKKAILHVYWEEFQKDPVGLMSRVAQPASKKIDQNKLKPEMDEKGNLTTAGFACSQCGQPLFVYKLEQVSEKGKAYTNYFGRCNVAEHEKLILLAQLKPEKDSDEAVTYSLGKFGQRALDFYSIHVTKESTHPVKPLAQIAGNRYASGPVGKALSDACMGTIASFLSKYQDIIIEHQKVVKGNQKRLESLRELAGKENLEYPSVTLPPQPHTKEGVDAYNEVIARVRMWVNLNLWQKLKLSRDDAKPLLRLKGFPSFPLVERQANEVDWWDMVCNVKKLINEKKEDGKVFWQNLAGYKRQEALRPYLSSEEDRKKGKKFARYQLGDLLLHLEKKHGEDWGKVYDEAWERIDKKVEGLSKHIKLEEERRSEDAQSKAALTDWLRAKASFVIEGLKEADKDEFCRCELKLQKWYGDLRGKPFAIEAENSILDISGFSKQYNCAFIWQKDGVKKLNLYLIINYFKGGKLRFKKIKPEAFEANRFYTVINKKSGEIVPMEVNFNFDDPNLIILPLAFGKRQGREFIWNDLLSLETGSLKLANGRVIEKTLYNRRTRQDEPALFVALTFERREVLDSSNIKPMNMIGVDRGENIPAVIALTDPEGCPLSRFKDSLGNPTHILRIGESYKEKQRTIQAKKEVEQQRAGGYSRKYASKAKNLADDMVRNTARDLLYYAVTQDAMLIFENLSRGFGRQGKRTFMAERQYTRMEDWLTAKLAYEGLPSKTYLSKTLAQYTSKTCSNCGFTITSADYDRVLEKLKKTATGWMTTINGKELKVEGQITYYNRYKRQNVVKDLSVELDRLSEESVNNDISSWTKGRSGEALSLLKKRFSHRPVQEKFVCLNCGFETHADEQAALNIARSWLFLRSQEYKKYQTNKTTGNTDKRAFVETWQSFYRKKLKEVWKPAV

SEQ ID NO: 25385 - protein, 978 aa, synthetic construct
  REGION 1..978: note = engineered CasX variant
QEIKRINKIRRRLVKDSNTKKAGKTGPMKTLLVRVMTPDLRERLENLRKKPENIPQPISNTSRANLNKLLTDYTEMKKAILHVYWEEFQKDPVGLMSRVAQPASKKIDQNKLKPEMDEKGNLTTAGFACSQCGQPLFVYKLEQVSEKGKAYTNYFGRCNVAEHEKLILLAQLKPEKDSDEAVTYSLGKFGQRALDFYSIHVTKESTHPVKPLAQIAGNRYASGPVGKALSDACMGTIASFLSKYQDIIIEHQKVVKGNQKRLESLRELAGKENLEYPSVTLPPQPHTKEGVDAYNEVIARVRMWVNLNLWQKLKLSRDDAKPLLRLKGFPSFPLVERQANEVDWWDMVCNVKKLINEKKEDGKVFWQNLAGYKRQEALRPYLSSEEDRKKGKKFARYQLGDLLLHLEKKHGEDWGKVYDEAWERIDKKVEGLSKHIKLEEERRSEDAQSKAALTDWLRAKASFVIEGLKEADKDEFCRCELKLQKWYGDLRGKPFAIEAENSILDISGFSKQYNCAFIWQKDGVKKLNLYLIINYFKGGKLRFKKIKPEAFEANRFYTVINKKSGEIVPMEVNFNFDDPNLIILPLAFGKRQGREFIWNDLLSLETGSLKLANGRVIEKTLYNRRTRQDEPALFVALTFERREVLDSSNIKPMNMIGVDRGENIPAVIALTDPEGCPLSRFKDSLGNPTHILRIGESYKEKQRGIQAKKEVEQRRAGGYSRKYASKAKNLADDMVRNTARDLLYYAVTQDAMLIFENLSRGFGRQGKRTFMAERQYTRMEDWLTAKLAYEGLPSKTYLSKTLAQYTSKTCSNCGFTITSADYDRVLEKLKKTATGWMTTINGKELKVEGQITYYNRYKRQNVVKDLSVELDRLSEESVNNDISSWTKGRSGEALSLLKKRFSHRPVQEKFVCLNCGFETHADEQAALNIARSWLFLRSQEYKKYQTNKTTGNTDKRAFVETWQSFYRKKLKEVWKPAV

SEQ ID NO: 25386 - protein, 978 aa, synthetic construct
  REGION 1..978: note = engineered CasX variant
QEIKRINKIRRRLVKDSNTKKAGKTGPMKTLLVRVMTPDLRERLENLRKKPENIPQPISNTSRANLNKLLTDYTEMKKAILHVYWEEFQKDPVGLMSRVAQPASKKIDQNKLKPEMDEKGNLTTAGFACSQCGQPLFVYKLEQVSEKGKAYTNYFGRCNVAEHEKLILLAQLKPEKDSDEAVTYSLGKFGQRALDFYSIHVTKESTHPVKPLAQIAGNRYASGPVGKALSDACMGTIASFLSKYQDIIIEHQKVVKGNQKRLESLRELAGKENLEYPSVTLPPQPHTKEGVDAYNEVIARVRMWVNLNLWQKLKLSRDDAKPLLRLKGFPSFPLVERQANEVDWWDMVCNVKKLINEKKEDGKVFWQNLAGYKRQEALRPYLSSEEDRKKGKKFARYQLGDLLLHLEKKHGEDWGKVYDEAWERIDKKVEGLSKHIKLEEERRSEDAQSKAALTDWLRAKASFVIEGLKEADKDEFCRCELKLQKWYGDLRGKPFAIEAENSILDISGFSKQYNCAFIWQKDGVKKLNLYLIINYFKGGKLRFKKIKPEAFEANRFYTVINKKSGEIVPMEVNFNFDDPNLIILPLAFGKRQGREFIWNDLLSLETGSLKLANGRVIEKTLYNRRTRQDEPALFVALTFERREVLDSSNIKPMNMIGVDRGENIPAVIALTDPEGCPLSRFKDSLGNPTHILRIGESQKEKQRTIQAKKEVEQRRAGGYSRKYASKAKNLADDMVRNTARDLLYYAVTQDAMLIFENLSRGFGRQGKRTFMAERQYTRMEDWLTAKLAYEGLPSKTYLSKTLAQYTSKTCSNCGFTITSADYDRVLEKLKKTATGWMTTINGKELKVEGQITYYNRYKRQNVVKDLSVELDRLSEESVNNDISSWTKGRSGEALSLLKKRFSHRPVQEKFVCLNCGFETHADEQAALNIARSWLFLRSQEYKKYQTNKTTGNTDKRAFVETWQSFYRKKLKEVWKPAV

SEQ ID NO: 25387 - protein, 978 aa, synthetic construct
  REGION 1..978: note = engineered CasX variant
QEIKRINKIRRRLVKDSNTKKAGKTGPMKTLLVRVMTPDLRERLENLRKKPENIPQPISNTSRANLNKLLTDYTEMKKAILHVYWEEFQKDPVGLMSRVAQPASKKIDQNKLKPEMDEKGNLTTAGFACSQCGQPLFVYKLEQVSEKGKAYTNYFGRCNVAEHEKLILLAQLKPEKDSDEAVTYSLGKFGQRALDFYSIHVTKESTHPVKPLAQIAGNRYASGPVGKALSDACMGTIASFLSKYQDIIIEHQKVVKGNQKRLESLRELAGKENLEYPSVTLPPQPHTKEGVDAYNEVIARVRMWVNLNLWQKLKLSRDDAKPLLRLKGFPSFPLVERQANEVDWWDMVCNVKKLINEKKEDGKVFWQNLAGYKRQEALRPYLSSEEDRKKGKKFARYQLGDLLLHLEKKHGEDWGKVYDEAWERIDKKVEGLSKHIKLEEERRSEDAQSKAALTDWLRAKASFVIEGLKEADKDEFCRCELKLQKWYGDLRGKPFAIEAENSILDISGFSKQYNCAFIWQKDGVKKLNLYLIINYFKGGKLRFKKIKPEAFEANRFYTVINKKSGEIVPMEVNFNFDDPNLIILPLAFGKRQGREFIWNDLLSLETGSLKLANGRVIEKTLYNRRTRQDEPALFVALTFERREVLDSSNIKPMNMIGVDRGENIPAVIALTDPEGCPLSRFKDSLGNPTHILRIDESYKEKQRTIQAKKEVEQRRAGGYSRKYASKAKNLADDMVRNTARDLLYYAVTQDAMLIFENLSRGFGRQGKRTFMAERQYTRMEDWLTAKLAYEGLPSKTYLSKTLAQYTSKTCSNCGFTITSADYDRVLEKLKKTATGWMTTINGKELKVEGQITYYNRYKRQNVVKDLSVELDRLSEESVNNDISSWTKGRSGEALSLLKKRFSHRPVQEKFVCLNCGFETHADEQAALNIARSWLFLRSQEYKKYQTNKTTGNTDKRAFVETWQSFYRKKLKEVWKPAV

SEQ ID NO: 25388 - protein, 978 aa, synthetic construct
  REGION 1..978: note = engineered CasX variant
QEIKRINKIRRRLVKDSNTKKAGKTGPMKTLLVRVMTPDLRERLENLRKKPENIPQPISNTSRANLNKLLTDYTEMKKAILHVYWEEFQKDPVGLMSRVAQPASKKIDQNKLKPEMDEKGNLTTAGFACSQCGQPLFVYKLEQVSEKGKAYTNYFGRCNVAEHEKLILLAQLKPEKDSDEAVTYSLGKFGQRALDFYSIHVTKESTHPVKPLAQIAGNRYASGPVGKALSDACMGTIASFLSKYQDIIIEHQKVVKGNQKRLESLRELAGKENLEYPSVTLPPQPHTKEGVDAYNEVIARVRMWVNLNLWQKLKLSRDDAKPLLRLKGFPSFPLVERQANEVDWWDMVCNVKKLINEKKEDGKVFWQNLAGYKRQEALRPYLSSEEDRKKGKKFARYQLGDLLLHLEKKHGEDWGKVYDEAWERIDKKVEGLSKHIKLEEERRSEDAQSKAALTDWLRAKASFVIEGLKEADKDEFCRCELKLQKWYGDLRGKPFAIEAENSILDISGFSKQYNCAFIWQKDGVKKLNLYLIINYFKGGKLRFKKIKPEAFEANRFYTVINKKSGEIVPMEVNFNFDDPNLIILPLAFGKRQGREFIWNDLLSLETGSLKLANGRVIEKTLYNRRTRQDEPALFVALTFERREVLDSSNIKPMNMIGVDRGENIPAVIALTDPEGCPLSRFKDSFGNPTHILRIGESYKEKQRTIQAKKEVEQRRAGGYSRKYASKAKNLADDMVRNTARDLLYYAVTQDAMLIFENLSRGFGRQGKRTFMAERQYTRMEDWLTAKLAYEGLPSKTYLSKTLAQYTSKTCSNCGFTITSADYDRVLEKLKKTATGWMTTINGKELKVEGQITYYNRYKRQNVVKDLSVELDRLSEESVNNDISSWTKGRSGEALSLLKKRFSHRPVQEKFVCLNCGFETHADEQAALNIARSWLFLRSQEYKKYQTNKTTGNTDKRAFVETWQSFYRKKLKEVWKPAV

SEQ ID NO: 25389 - protein, 978 aa, synthetic construct
  REGION 1..978: note = engineered CasX variant
QEIKRINKIRRRLVKDSNTKKAGKTGPMKTLLVRVMTPDLRERLENLRKKPENIPQPISNTSRANLNKLLTDYTEMKKAILHVYWEEFQKDPVGLMSRVAQPASKKIDQNKLKPEMDEKGNLTTAGFACSQCGQPLFVYKLEQVSEKGKAYTNYFGRCNVAEHEKLILLAQLKPEKDSDEAVTYSLGKFGQRALDFYSIHVTKESTHPVKPLAQIAGNRYASGPVGKALSDACMGTIASFLSKYQDIIIEHQKVVKGNQKRLESLRELAGKENLEYPSVTLPPQPHTKEGVDAYNEVIARVRMWVNLNLWQKLKLSRDDAKPLLRLKGFPSFPLVERQANEVDWWDMVCNVKKLINEKKEDGKVFWQNLAGYKRQEALRPYLSSEEDRKKGKKFARYQLGDLLLHLEKKHGEDWGKVYDEAWERIDKKVEGLSKHIKLEEERRSEDAQSKAALTDWLRAKASFVIEGLKEADKDEFCRCELKLQKWYGDLRGKPFAIEAENSILDISGFSKQYNCAFIWQKDGVKKLNLYLIINYFKGGKLRFKKIKPEAFEANRFYTVINKKSGEIVPMEVNFNFDDPNLIILPLAFGKRQGREFIWNDLLSLETGSLKLANGRVIEKTLYNRRTRQDEPALFVALTFERREVLDSSNIKPMNLWGVDRGENIPAVIALTDPEGCPLSRFKDSLGNPTHILRIGQTYKEKQRTIQAKKEVEQRRAGGYSRKYASKAKNLADDMVRNTARDLLYYAVTQDAMLIFENLSRGFGRQGKRTFMAERQYTRMEDWLTAKLAYEGLPSKTYLSKTLAQYTSKTCSNCGFTITSADYDRVLEKLKKTATGWMTTINGKELKVEGQITYYNRYKRQNVVKDLSVELDRLSEESVNNDISSWTKGRSGEALSLLKKRFSHRPVQEKFVCLNCGFETHADEQAALNIARSWLFLRSQEYKKYQTNKTTGNTDKRAFVETWQSFYRKKLKEVWKPAV

SEQ ID NO: 25390 - protein, 978 aa, synthetic construct
  REGION 1..978: note = engineered CasX variant
QEIKRINKIRRRLVKDSNTKKAGKTGPMKTLLVRVMTPDLRERLENLRKKPENIPQPISNTSRANLNKLLTDYTEMKKAILHVYWEEFQKDPVGLMSRVAQPASKKIDQNKLKPEMDEKGNLTTAGFACSQCGQPLFVYKLEQVSEKGKAYTNYFGRCNVAEHEKLILLAQLKPEKDSDEAVTYSLGKFGQRALDFYSIHVTKESTHPVKPLAQIAGNRYASGPVGKALSDACMGTIASFLSKYQDIIIEHQKVVKGNQKRLESLRELAGKENLEYPSVTLPPQPHTKEGVDAYNEVIARVRMWVNLNLWQKLKLSRDDAKPLLRLKGFPSFPLVERQANEVDWWDMVCNVKKLINEKKEDGKVFWQNLAGYKRQEALRPYLSSEEDRKKGKKFARYQLGDLLLHLEKKHGEDWGKVYDEAWERIDKKVEGLSKHIKLEEERRSEDAQSKAALTDWLRAKASFVIEGLKEADKDEFCRCELKLQKWYGDLRGKPFAIEAENSILDISGFSKQYNCAFIWQKDGVKKLNLYLIINYFKGGKLRFKKIKPEAFEANRFYTVINKKSGEIVPMEVNFNFDDPNLIILPLAFGKRQGREFIWNDLLSLETGSLKLANGRVIEKTLYNRRTRQDEPALFVALTFERREVLDSSNIKPMNLVGVDRGENIPAVIALTDPIGCPLSRFKDSLGNPTHILRIGESYKEKQRTIQAKKEVEQRRAGIYSRKYASKAKNLADDMVRNTARDLLYYAVTQDAMLIFENLSRGFGRQGKRTFMAERQYTRMEDWLTAKLAYEGLPSKTYLSKTLAQYTSKTCSNCGFTITSADYDRVLEKLKKTATGWMTTINGKELKVEGQITYYNRYKRQNVVKDLSVELDRLSEESVNNDISSWTKGRSGEALSLLKKRFSHRPVQEKFVCLNCGFETHADEQAALNIARSWLFLRSQEYKKYQTNKTTGNTDKRAFVETWQSFYRKKLKEVWKPAV

SEQ ID NO: 25391 - protein, 978 aa, synthetic construct
  REGION 1..978: note = engineered CasX variant
QEIKRINKIRRRLVKDSNTKKAGKTGPMKTLLVRVMTPDLRERLENLRKKPENIPQPISNTSRANLNKLLTDYTEMKKAILHVYWEEFQKDPVGLMSRVAQPASKKIDQNKLKPEMDEKGNLTTAGFACSQCGQPLFVYKLEQVSEKGKAYTNYFGRCNVAEHEKLILLAQLKPEKDSDEAVTYSLGKFGQRALDFYSIHVTKESTHPVKPLAQIAGNRYASGPVGKALSDACMGTIASFLSKYQDIIIEHQKVVKGNQKRLESLRELAGKENLEYPSVTLPPQPHTKEGVDAYNEVIARVRMWVNLNLWQKLKLSRDDAKPLLRLKGFPSFPLVERQANEVDWWDMVCNVKKLINEKKEDGKVFWQNLAGYKRQEALRPYLSSEEDRKKGKKFARYQLGDLLLHLEKKHGEDWGKVYDEAWERIDKKVEGLSKHIKLEEERRSEDAQSKAALTDWLRAKASFVIEGLKEADKDEFCRCELKLQKWYGDLRGKPFAIEAENSILDISGFSKQYNCAFIWQKDGVKKLNLYLIINYFKGGKLRFKKIKPEAFEANRFYTVINKKSGEIVPMEVNFNFDDPNLIILPLAFGKRQGREFIWNDLLSLETGSLKLANGRVIEKTLYNRRTRQDEPALFVALTFERREVLDSSNIKPMNLVGVDRGENIPAVIALTDPEGCTLSRFKDSLGNPTHILRIGESYKEKQRTIQAKKEVEQRRAGGYSRKYASKAKNLADDMVRNTARDLLYYAVTQDAMLIFENLSRGFGRQGKRTFMAERQYTRMEDWLTAKLAYEGLPSKTYLSKTLAQYTSKTCSNCGFTITSADYDRVLEKLKKTATGWMTTINGKELKVEGQITYYNRYKRQNVVKDLSVELDRLSEESVNNDISSWTKGRSGEALSLLKKRFSHRPVQEKFVCLNCGFETHADEQAALNIARSWLFLRSQEYKKYQTNKTTGNTDKRAFVETWQSFYRKKLKEVWKPAV

SEQ ID NO: 25392 - protein, 978 aa, synthetic construct
  REGION 1..978: note = engineered CasX variant
QEIKRINKIRRRLVKDSNTKKAGKTGPMKTLLVRVMTPDLRERLENLRKKPENIPQPISNTSRANLNKLLTDYTEMKKAILHVYWEEFQKDPVGLMSRVAQPASKKIDQNKLKPEMDEKGNLTTAGFACSQCGQPLFVYKLEQVSEKGKAYTNYFGRCNVAEHEKLILLAQLKPEKDSDEAVTYSLGKFGQRALDFYSIHVTKESTHPVKPLAQIAGNRYASGPVGKALSDACMGTIASFLSKYQDIIIEHQKVVKGNQKRLESLRELAGKENLEYPSVTLPPQPHTKEGVDAYNEVIARVRMWVNLNLWQKLKLSRDDAKPLLRLKGFPSFPLVERQANEVDWWDMVCNVKKLINEKKEDGKVFWQNLAGYKRQEALRPYLSSEEDRKKGKKFARYQLGDLLLHLEKKHGEDWGKVYDEAWERIDKKVEGLSKHIKLEEERRSEDAQSKAALTDWLRAKASFVIEGLKEADKDEFCRCELKLQKWYGDLRGKPFAIEAENSILDISGFSKQYNCAFIWQKDGVKKLNLYLIINYFKGGKLRFKKIKPEAFEANRFYTVINKKSGEIVPMEVNFNFDDPNLIILPLAFGKRQGREFIWNDLLSLETGSLKLANGRVIEKTLYNRRTRQDEPALFVALTFERREVLDSSNIKPMNLVGVDRGENIPAVIALTDPEGCTLSRFKDSLGNPTHILRIGESYKEKQRTICAKKEVEQRRAGGYSRKYASKAKNLADDMVRNTARDLLYYAVTQDAMLIFENLSRGFGRQGKRTFMAERQYTRMEDWLTAKLAYEGLPSKTYLSKTLAQYTSKTCSNCGFTITSADYDRVLEKLKKTATGWMTTINGKELKVEGQITYYNRYKRQNVVKDLSVELDRLSEESVNNDISSWTKGRSGEALSLLKKRFSHRPVQEKFVCLNCGFETHADEQAALNIARSWLFLRSQEYKKYQTNKTTGNTDKRAFVETWQSFYRKKLKEVWKPAV

SEQ ID NO: 25393 - protein, 978 aa, synthetic construct
  REGION 1..978: note = engineered CasX variant
QEIKRINKIRRRLVKDSNTKKAGKTGPMKTLLVRVMTPDLRERLENLRKKPENIPQPISNTSRANLNKLLTDYTEMKKAILHVYWEEFQKDPVGLMSRVAQPASKKIDQNKLKPEMDEKGNLTTAGFACSQCGQPLFVYKLEQVSEKGKAYTNYFGRCNVAEHEKLILLAQLKPEKDSDEAVTYSLGKFGQRALDFYSIHVTKESTHPVKPLAQIAGNRYASGPVGKALSDACMGTIASFLSKYQDIIIEHQKVVKGNQKRLESLRELAGKENLEYPSVTLPPQPHTKEGVDAYNEVIARVRMWVNLNLWQKLKLSRDDAKPLLRLKGFPSFPLVERQANEVDWWDMVCNVKKLINEKKEDGKVFWQNLAGYKRQEALRPYLSSEEDRKKGKKFARYQLGDLLLHLEKKHGEDWGKVYDEAWERIDKKVEGLSKHIKLEEERRSEDAQSKAALTDWLRAKASFVIEGLKEADKDEFCRCELKLQKWYGDLRGKPFAIEAENSILDISGFSKQYNCAFIWQKDGVKKLNLYLIINYFKGGKLRFKKIKPEAFEANRFYTVINKKSGEIVPMEVNFNFDDPNLIILPLAFGKRQGREFIWNDLLSLETGSLKLANGRVIEKTLYNRRTRQDEPALFVALTFERREVLDSSNIKPMNLVGVDRGENIPAVIALTDPEGCPLSRFKDSLGNPTHILRIGESYKEKQRTIQAKKEVEQRRAGIYSRKYASKAKNLADDMVRNTARDLLYYAVTQDAMLIFENLSRGFGRQGKRTFMAERQYTRMEDWLTAKLAYEGLPSKTYLSKTLAQYTSKTCSNCGFTITSADYDRVLEKLKKTATGWMTTINGKELKVEGQITYYNRYKRQNVVKDLSVELDRLSEESVNNDISSWTKGRSGEALSLLKKRFSHRPVQEKFVCLNCGFETHADEQAALNIARSWLFLRSQEYKKYQTNKTTGNTDKRAFVETWQSFYRKKLKEVWKPAV

SEQ ID NO: 25394 - protein, 978 aa, synthetic construct
  REGION 1..978: note = engineered CasX variant
QEIKRINKIRRRLVKDSNTKKAGKTGPMKTLLVRVMTPDLRERLENLRKKPENIPQPISNTSRANLNKLLTDYTEMKKAILHVYWEEFQKDPVGLMSRVAQPASKKIDQNKLKPEMDEKGNLTTAGFACSQCGQPLFVYKLEQVSEKGKAYTNYFGRCNVAEHEKLILLAQLKPEKDSDEAVTYSLGKFGQRALDFYSIHVTKESTHPVKPLAQIAGNRYASGPVGKALSDACMGTIASFLSKYQDIIIEHQKVVKGNQKRLESLRELAGKENLEYPSVTLPPQPHTKEGVDAYNEVIARVRMWVNLNLWQKLKLSRDDAKPLLRLKGFPSFPLVERQANEVDWWDMVCNVKKLINEKKEDGKVFWQNLAGYKRQEALRPYLSSEEDRKKGKKFARYQLGDLLLHLEKKHGEDWGKVYDEAWERIDKKVEGLSKHIKLEEERRSEDAQSKAALTDWLRAKASFVIEGLKEADKDEFCRCELKLQKWYGDLRGKPFAIEAENSILDISGFSKQYNCAFIWQKDGVKKLNLYLIINYFKGGKLRFKKIKPEAFEANRFYTVINKKSGEIVPMEVNFNFDDPNLIILPLAFGKRQGREFIWNDLLSLETGSLKLANGRVIEKTLYNRRTRQDEPALFVALTFERREVLDSSNIKPMNLVGVDRGENIPAVIALTDPEGCPLSRFKDSLGNPTHILRIGESYKEKQRTIQAKKEVEQRRAGGYSRKYASKAKNLADDMVRNTARDLLYYAVTQDAMLIFENLSRGFGRQGKRTFMAERQYTRMEDWLTAKLAYEGLPSKTYLSKTLAQYTSKTCSNCGFTITSADYDRVLEKLKKTATGWMTTINGKELKVEGQITYYNRYKRQNVVKDLSVELDRLSEESVNNDISSWTKGRSGEALSLLKKRFSHRPVQEKFVCLNCGFETHADEQAALNIARSWLFLRSQEYKKYQTNKTTGNTDKRAFVETWQSFYRKKLKEVWKPAV

SEQ ID NO: 25395 - protein, 978 aa, synthetic construct
  REGION 1..978: note = engineered CasX variant
QEIKRINKIRRRLVKDSNTKKAGKTGPMKTLLVRVMTPDLRERLENLRKKPENIPQPISNTSRANLNKLLTDYTEMKKAILHVYWEEFQKDPVGLMSRVAQPASKKIDQNKLKPEMDEKGNLTTAGFACSQCGQPLFVYKLEQVSEKGKAYTNYFGRCNVAEHEKLILLAQLKPEKDSDEAVTYSLGKFGQRALDFYSIHVTKESTHPVKPLAQIAGNRYASGPVGKALSDACMGTIASFLSKYQDIIIEHQKVVKGNQKRLESLRELAGKENLEYPSVTLPPQPHTKEGVDAYNEVIARVRMWVNLNLWQKLKLSRDDAKPLLRLKGFPSFPLVERQANEVDWWDMVCNVKKLINEKKEDGKVFWQNLAGYKRQEALRPYLSSEEDRKKGKKFARYQLGDLLLHLEKKHGEDWGKVYDEAWERIDKKVEGLSKHIKLEEERRSEDAQSKAALTDWLRAKASFVIEGLKEADKDEFCRCELKLQKWYGDLRGKPFAIEAENSILDISGFSKQYNCAFIWQKDGVKKLNLYLIINYFKGGKLRFKKIKPEAFEANRFYTVINKKSGEIVPMEVNFNFDDPNLIILPLAFGKRQGREFIWNDLLSLETGSLKLANGRVIEKTLYNRRTRQDEPALFVALTFERREVLDSSNIKPMNLVGVDRGENIPAVIALTDPEGCPLSRFKDSLGNPTHILRIGESYKEKQRTICAKKEVEQRRAGGYSRKYASKAKNLADDMVRNTARDLLYYAVTQDAMLIFENLSRGFGRQGKRTFMAERQYTRMEDWLTAKLAYEGLPSKTYLSKTLAQYTSKTCSNCGFTITSADYDRVLEKLKKTATGWMTTINGKELKVEGQITYYNRYKRQNVVKDLSVELDRLSEESVNNDISSWTKGRSGEALSLLKKRFSHRPVQEKFVCLNCGFETHADEQAALNIARSWLFLRSQEYKKYQTNKTTGNTDKRAFVETWQSFYRKKLKEVWKPAV

SEQ ID NO: 25396 - protein, 978 aa, synthetic construct
  REGION 1..978: note = engineered CasX variant
QEIKRINKIRRRLVKDSNTKKAGKTGPMKTLLVRVMTPDLRERLENLRKKPENIPQPISNTSRANLNKLLTDYTEMKKAILHVYWEEFQKDPVGLMSRVAQPASKKIDQNKLKPEMDEKGNLTTAGFACSQCGQPLFVYKLEQVSEKGKAYTNYFGRCNVAEHEKLILLAQLKPEKDSDEAVTYSLGKFGQRALDFYSIHVTKESTHPVKPLAQIAGNRYASGPVGKALSDACMGTIASFLSKYQDIIIEHQKVVKGNQKRLESLRELAGKENLEYPSVTLPPQPHTKEGVDAYNEVIARVRMWVNLNLWQKLKLSRDDAKPLLRLKGFPSFPLVERQANEVDWWDMVCNVKKLINEKKEDGKVFWQNLAGYKRQEALRPYLSSEEDRKKGKKFARYQLGDLLLHLEKKHGEDWGKVYDEAWERIDKKVEGLSKHIKLEEERRSEDAQSKAALTDWLRAKASFVIEGLKEADKDEFCRCELKLQKWYGDLRGKPFAIEAENSILDISGFSKQYNCAFIWQKDGVKKLNLYLIINYFKGGKLRFKKIKPEAFEANRFYTVINKKSGEIVPMEVNFNFDDPNLIILPLAFGKRQGREFIWNDLLSLETGSLKLANGRVIEKTLYNRRTRQDEPALFVALTFERREVLDSSNIKPMNLVGVDRGENIPAVIALTDPEGAPLSRFKDSLGNPTHILRIGESYKEKQRTIQAKKEVEQRRAGGYSRKYASKAKNLADDMVRNTARDLLYYAVTQDAMLIFENLSRGFGRQGKRTFMAERQYTRMEDWLTAKLAYEGLPSKTYLSKTLAQYTSKTCSNCGFTITSADYDRVLEKLKKTATGWMTTINGKELKVEGQITYYNRYKRQNVVKDLSVELDRLSEESVNNDISSWTKGRSGEALSLLKKRFSHRPVQEKFVCLNCGFETHADEQAALNIARSWLFLRSQEYKKYQTNKTTGNTDKRAFVETWQSFYRKKLKEVWKPAV

SEQ ID NO: 25397 - protein, 978 aa, synthetic construct
  REGION 1..978: note = engineered CasX variant
QEIKRINKIRRRLVKDSNTKKAGKTGPMKTLLVRVMTPDLRERLENLRKKPENIPQPISNTSRANLNKLLTDYTEMKKAILHVYWEEFQKDPVGLMSRVAQPASKKIDQNKLKPEMDEKGNLTTAGFACSQCGQPLFVYKLEQVSEKGKAYTNYFGRCNVAEHEKLILLAQLKPEKDSDEAVTYSLGKFGQRALDFYSIHVTKESTHPVKPLAQIAGNRYASGPVGKALSDACMGTIASFLSKYQDIIIEHQKVVKGNQKRLESLRELAGKENLEYPSVTLPPQPHTKEGVDAYNEVIARVRMWVNLNLWQKLKLSRDDAKPLLRLKGFPSFPLVERQANEVDWWDMVCNVKKLINEKKEDGKVFWQNLAGYKRQEALRPYLSSEEDRKKGKKFARYQLGDLLLHLEKKHGEDWGKVYDEAWERIDKKVEGLSKHIKLEEERRSEDAQSKAALTDWLRAKASFVIEGLKEADKDEFCRCELKLQKWYGDLRGKPFAIEAENSILDISGFSKQYNCAFIWQKDGVKKLNLYLIINYFKGGKLRFKKIKPEAFEANRFYTVINKKSGEIVPMEVNFNFDDPNLIILPLAFGKRQGREFIWNDLLSLETGSLKLANGRVIEKTLYNRRTRQDEPALFVALTFERREVLDSSNIKPMNLMGVDRGENIPAVIALTDPEGCPLSRFKDSLGNPTHIYRIGESYKEKQRTIQAKKEVEQRRAGMYSRKYASKAKNLADDMVRNTARDLLYYAVTQDAMLIFENLSRGFGRQGKRTFMAERQYTRMEDWLTAKLAYEGLPSKTYLSKTLAQYTSKTCSNCGFTITSADYDRVLEKLKKTATGWMTTINGKELKVEGQITYYNRYKRQNVVKDLSVELDRLSEESVNNDISSWTKGRSGEALSLLKKRFSHRPVQEKFVCLNCGFETHADEQAALNIARSWLFLRSQEYKKYQTNKTTGNTDKRAFVETWQSFYRKKLKEVWKPAV

SEQ ID NO: 25398 - protein, 978 aa, synthetic construct
  REGION 1..978: note = engineered CasX variant
QEIKRINKIRRRLVKDSNTKKAGKTGPMKTLLVRVMTPDLRERLENLRKKPENIPQPISNTSRANLNKLLTDYTEMKKAILHVYWEEFQKDPVGLMSRVAQPASKKIDQNKLKPEMDEKGNLTTAGFACSQCGQPLFVYKLEQVSEKGKAYTNYFGRCNVAEHEKLILLAQLKPEKDSDEAVTYSLGKFGQRALDFYSIHVTKESTHPVKPLAQIAGNRYASGPVGKALSDACMGTIASFLSKYQDIIIEHQKVVKGNQKRLESLRELAGKENLEYPSVTLPPQPHTKEGVDAYNEVIARVRMWVNLNLWQKLKLSRDDAKPLLRLKGFPSFPLVERQANEVDWWDMVCNVKKLINEKKEDGKVFWQNLAGYKRQEALRPYLSSEEDRKKGKKFARYQLGDLLLHLEKKHGEDWGKVYDEAWERIDKKVEGLSKHIKLEEERRSEDAQSKAALTDWLRAKASFVIEGLKEADKDEFCRCELKLQKWYGDLRGKPFAIEAENSILDISGFSKQYNCAFIWQKDGVKKLNLYLIINYFKGGKLRFKKIKPEAFEANRFYTVINKKSGEIVPMEVNFNFDDPNLIILPLAFGKRQGREFIWNDLLSLETGSLKLANGRVIEKTLYNRRTRQDEPALFVALTFERREVLDSSNIKPMNLMGVDRGENIPAVIALTDPEGCPLSRFKDSLGNPTHIYRIGESYKEKQRTIQAKKEVEQRRAGGYSRKYASKAKNLADDMVRNTARDLLYYAVTQDAMLIFENLSRGFGRQGKRTFMAERQYTRMEDWLTAKLAYEGLPSKTYLSKTLAQYTSKTCSNCGFTITSADYDRVLEKLKKTATGWMTTINGKELKVEGQITYYNRYKRQNVVKDLSVELDRLSEESVNNDISSWTKGRSGEALSLLKKRFSHRPVQEKFVCLNCGFETHADEQAALNIARSWLFLRSQEYKKYQTNKTTGNTDKRAFVETWQSFYRKKLKEVWKPAV

SEQ ID NO: 25399 - protein, 978 aa, synthetic construct
  REGION 1..978: note = engineered CasX variant
QEIKRINKIRRRLVKDSNTKKAGKTGPMKTLLVRVMTPDLRERLENLRKKPENIPQPISNTSRANLNKLLTDYTEMKKAILHVYWEEFQKDPVGLMSRVAQPASKKIDQNKLKPEMDEKGNLTTAGFACSQCGQPLFVYKLEQVSEKGKAYTNYFGRCNVAEHEKLILLAQLKPEKDSDEAVTYSLGKFGQRALDFYSIHVTKESTHPVKPLAQIAGNRYASGPVGKALSDACMGTIASFLSKYQDIIIEHQKVVKGNQKRLESLRELAGKENLEYPSVTLPPQPHTKEGVDAYNEVIARVRMWVNLNLWQKLKLSRDDAKPLLRLKGFPSFPLVERQANEVDWWDMVCNVKKLINEKKEDGKVFWQNLAGYKRQEALRPYLSSEEDRKKGKKFARYQLGDLLLHLEKKHGEDWGKVYDEAWERIDKKVEGLSKHIKLEEERRSEDAQSKAALTDWLRAKASFVIEGLKEADKDEFCRCELKLQKWYGDLRGKPFAIEAENSILDISGFSKQYNCAFIWQKDGVKKLNLYLIINYFKGGKLRFKKIKPEAFEANRFYTVINKKSGEIVPMEVNFNFDDPNLIILPLAFGKRQGREFIWNDLLSLETGSLKLANGRVIEKTLYNRRTRQDEPALFVALTFERREVLDSSNIKPMNLMGVDRGENIPAVIALTDPEGCPLSRFKDSLGNPTHILRIGESYKEKQRTIQAKKEVEQRRAGMYSRKYASKAKNLADDMVRNTARDLLYYAVTQDAMLIFENLSRGFGRQGKRTFMAERQYTRMEDWLTAKLAYEGLPSKTYLSKTLAQYTSKTCSNCGFTITSADYDRVLEKLKKTATGWMTTINGKELKVEGQITYYNRYKRQNVVKDLSVELDRLSEESVNNDISSWTKGRSGEALSLLKKRFSHRPVQEKFVCLNCGFETHADEQAALNIARSWLFLRSQEYKKYQTNKTTGNTDKRAFVETWQSFYRKKLKEVWKPAV

SEQ ID NO: 25400 - protein, 978 aa, synthetic construct
  REGION 1..978: note = engineered CasX variant
QEIKRINKIRRRLVKDSNTKKAGKTGPMKTLLVRVMTPDLRERLENLRKKPENIPQPISNTSRANLNKLLTDYTEMKKAILHVYWEEFQKDPVGLMSRVAQPASKKIDQNKLKPEMDEKGNLTTAGFACSQCGQPLFVYKLEQVSEKGKAYTNYFGRCNVAEHEKLILLAQLKPEKDSDEAVTYSLGKFGQRALDFYSIHVTKESTHPVKPLAQIAGNRYASGPVGKALSDACMGTIASFLSKYQDIIIEHQKVVKGNQKRLESLRELAGKENLEYPSVTLPPQPHTKEGVDAYNEVIARVRMWVNLNLWQKLKLSRDDAKPLLRLKGFPSFPLVERQANEVDWWDMVCNVKKLINEKKEDGKVFWQNLAGYKRQEALRPYLSSEEDRKKGKKFARYQLGDLLLHLEKKHGEDWGKVYDEAWERIDKKVEGLSKHIKLEEERRSEDAQSKAALTDWLRAKASFVIEGLKEADKDEFCRCELKLQKWYGDLRGKPFAIEAENSILDISGFSKQYNCAFIWQKDGVKKLNLYLIINYFKGGKLRFKKIKPEAFEANRFYTVINKKSGEIVPMEVNFNFDDPNLIILPLAFGKRQGREFIWNDLLSLETGSLKLANGRVIEKTLYNRRTRQDEPALFVALTFERREVLDSSNIKPMNLMGVDRGENIPAVIALTDPEGCPLSRFKDSLGNPTHILRIGESYKEKQRTIQAKKEVEQRRAGGYSRKYASKAKNLADDMVRNTARDLLYYAVTQDAMLIFENLSRGFGRQGKRTFMAERQYTRMEDWLTAKLAYEGLPSKTYLSKTLAQYTSKTCSNCGFTITSADYDRVLEKLKKTATGWMTTINGKELKVEGQITYYNRYKRQNVVKDLSVELDRLSEESVNNDISSWTKGRSGEALSLLKKRFSHRPVQEKFVCLNCGFETHADEQAALNIARSWLFLRSQEYKKYQTNKTTGNTDKRAFVETWQSFYRKKLKEVWKPAV

SEQ ID NO: 25401 - protein, 978 aa, synthetic construct
  REGION 1..978: note = engineered CasX variant
QEIKRINKIRRRLVKDSNTKKAGKTGPMKTLLVRVMTPDLRERLENLRKKPENIPQPISNTSRANLNKLLTDYTEMKKAILHVYWEEFQKDPVGLMSRVAQPASKKIDQNKLKPEMDEKGNLTTAGFACSQCGQPLFVYKLEQVSEKGKAYTNYFGRCNVAEHEKLILLAQLKPEKDSDEAVTYSLGKFGQRALDFYSIHVTKESTHPVKPLAQIAGNRYASGPVGKALSDACMGTIASFLSKYQDIIIEHQKVVKGNQKRLESLRELAGKENLEYPSVTLPPQPHTKEGVDAYNEVIARVRMWVNLNLWQKLKLSRDDAKPLLRLKGFPSFPLVERQANEVDWWDMVCNVKKLINEKKEDGKVFWQNLAGYKRQEALRPYLSSEEDRKKGKKFARYQLGDLLLHLEKKHGEDWGKVYDEAWERIDKKVEGLSKHIKLEEERRSEDAQSKAALTDWLRAKASFVIEGLKEADKDEFCRCELKLQKWYGDLRGKPFAIEAENSILDISGFSKQYNCAFIWQKDGVKKLNLYLIINYFKGGKLRFKKIKPEAFEANRFYTVINKKSGEIVPMEVNFNFDDPNLIILPLAFGKRQGREFIWNDLLSLETGSLKLANGRVIEKTLYNRRTRQDEPALFVALTFERREVLDSSNIKPMNLMGVDRGENIPAVIALTDPEGCPLSRFKDSLGNPTHILRIGESYKEKQRTIIAKKEVEQRRAGGYSRKYASKAKNLADDMVRNTARDLLYYAVTQDAMLIFENLSRGFGRQGKRTFMAERQYTRMEDWLTAKLAYEGLPSKTYLSKTLAQYTSKTCSNCGFTITSADYDRVLEKLKKTATGWMTTINGKELKVEGQITYYNRYKRQNVVKDLSVELDRLSEESVNNDISSWTKGRSGEALSLLKKRFSHRPVQEKFVCLNCGFETHADEQAALNIARSWLFLRSQEYKKYQTNKTTGNTDKRAFVETWQSFYRKKLKEVWKPAV

SEQ ID NO: 25402 - protein, 978 aa, synthetic construct
  REGION 1..978: note = engineered CasX variant
QEIKRINKIRRRLVKDSNTKKAGKTGPMKTLLVRVMTPDLRERLENLRKKPENIPQPISNTSRANLNKLLTDYTEMKKAILHVYWEEFQKDPVGLMSRVAQPASKKIDQNKLKPEMDEKGNLTTAGFACSQCGQPLFVYKLEQVSEKGKAYTNYFGRCNVAEHEKLILLAQLKPEKDSDEAVTYSLGKFGQRALDFYSIHVTKESTHPVKPLAQIAGNRYASGPVGKALSDACMGTIASFLSKYQDIIIEHQKVVKGNQKRLESLRELAGKENLEYPSVTLPPQPHTKEGVDAYNEVIARVRMWVNLNLWQKLKLSRDDAKPLLRLKGFPSFPLVERQANEVDWWDMVCNVKKLINEKKEDGKVFWQNLAGYKRQEALRPYLSSEEDRKKGKKFARYQLGDLLLHLEKKHGEDWGKVYDEAWERIDKKVEGLSKHIKLEEERRSEDAQSKAALTDWLRAKASFVIEGLKEADKDEFCRCELKLQKWYGDLRGKPFAIEAENSILDISGFSKQYNCAFIWQKDGVKKLNLYLIINYFKGGKLRFKKIKPEAFEANRFYTVINKKSGEIVPMEVNFNFDDPNLIILPLAFGKRQGREFIWNDLLSLETGSLKLANGRVIEKTLYNRRTRQDEPALFVALTFERREVLDSSNIKPMNLMGVDRGENIPAVIALTDPEGCPLSRFKDSLGNPTHIHRIGESYKEKQRTIQAKKEVEQRRAGGYSRKYASKAKNLADDMVRNTARDLLYYAVTQDAMLIFENLSRGFGRQGKRTFMAERQYTRMEDWLTAKLAYEGLPSKTYLSKTLAQYTSKTCSNCGFTITSADYDRVLEKLKKTATGWMTTINGKELKVEGQITYYNRYKRQNVVKDLSVELDRLSEESVNNDISSWTKGRSGEALSLLKKRFSHRPVQEKFVCLNCGFETHADEQAALNIARSWLFLRSQEYKKYQTNKTTGNTDKRAFVETWQSFYRKKLKEVWKPAV

SEQ ID NO: 25403 - protein, 978 aa, synthetic construct
  REGION 1..978: note = engineered CasX variant
QEIKRINKIRRRLVKDSNTKKAGKTGPMKTLLVRVMTPDLRERLENLRKKPENIPQPISNTSRANLNKLLTDYTEMKKAILHVYWEEFQKDPVGLMSRVAQPASKKIDQNKLKPEMDEKGNLTTAGFACSQCGQPLFVYKLEQVSEKGKAYTNYFGRCNVAEHEKLILLAQLKPEKDSDEAVTYSLGKFGQRALDFYSIHVTKESTHPVKPLAQIAGNRYASGPVGKALSDACMGTIASFLSKYQDIIIEHQKVVKGNQKRLESLRELAGKENLEYPSVTLPPQPHTKEGVDAYNEVIARVRMWVNLNLWQKLKLSRDDAKPLLRLKGFPSFPLVERQANEVDWWDMVCNVKKLINEKKEDGKVFWQNLAGYKRQEALRPYLSSEEDRKKGKKFARYQLGDLLLHLEKKHGEDWGKVYDEAWERIDKKVEGLSKHIKLEEERRSEDAQSKAALTDWLRAKASFVIEGLKEADKDEFCRCELKLQKWYGDLRGKPFAIEAENSILDISGFSKQYNCAFIWQKDGVKKLNLYLIINYFKGGKLRFKKIKPEAFEANRFYTVINKKSGEIVPMEVNFNFDDPNLIILPLAFGKRQGREFIWNDLLSLETGSLKLANGRVIEKTLYNRRTRQDEPALFVALTFERREVLDSSNIKPMNLLGVDRGENIPSVIALTDPEGCPLSRFKDSLGNPTHILRIGESYKEKQRTIQAKKEVEQRRAGGYSRKYASKAKNLADDMVRNTARDLLYYAVTQDAMLIFENLSRGFGRQGKRTFMAERQYTRMEDWLTAKLAYEGLPSKTYLSKTLAQYTSKTCSNCGFTITSADYDRVLEKLKKTATGWMTTINGKELKVEGQITYYNRYKRQNVVKDLSVELDRLSEESVNNDISSWTKGRSGEALSLLKKRFSHRPVQEKFVCLNCGFETHADEQAALNIARSWLFLRSQEYKKYQTNKTTGNTDKRAFVETWQSFYRKKLKEVWKPAV

SEQ ID NO: 25404 - protein, 978 aa, synthetic construct
  REGION 1..978: note = engineered CasX variant
QEIKRINKIRRRLVKDSNTKKAGKTGPMKTLLVRVMTPDLRERLENLRKKPENIPQPISNTSRANLNKLLTDYTEMKKAILHVYWEEFQKDPVGLMSRVAQPASKKIDQNKLKPEMDEKGNLTTAGFACSQCGQPLFVYKLEQVSEKGKAYTNYFGRCNVAEHEKLILLAQLKPEKDSDEAVTYSLGKFGQRALDFYSIHVTKESTHPVKPLAQIAGNRYASGPVGKALSDACMGTIASFLSKYQDIIIEHQKVVKGNQKRLESLRELAGKENLEYPSVTLPPQPHTKEGVDAYNEVIARVRMWVNLNLWQKLKLSRDDAKPLLRLKGFPSFPLVERQANEVDWWDMVCNVKKLINEKKEDGKVFWQNLAGYKRQEALRPYLSSEEDRKKGKKFARYQLGDLLLHLEKKHGEDWGKVYDEAWERIDKKVEGLSKHIKLEEERRSEDAQSKAALTDWLRAKASFVIEGLKEADKDEFCRCELKLQKWYGDLRGKPFAIEAENSILDISGFSKQYNCAFIWQKDGVKKLNLYLIINYFKGGKLRFKKIKPEAFEANRFYTVINKKSGEIVPMEVNFNFDDPNLIILPLAFGKRQGREFIWNDLLSLETGSLKLANGRVIEKTLYNRRTRQDEPALFVALTFERREVLDSSNIKPMNLLGVDRGENIPSVIALTDPEGCPLSRFKDSLGNPTHILRIGESYKEKQRTIQAKKEGEQRRAGGYSRKYASKAKNLADDMVRNTARDLLYYAVTQDAMLIFENLSRGFGRQGKRTFMAERQYTRMEDWLTAKLAYEGLPSKTYLSKTLAQYTSKTCSNCGFTITSADYDRVLEKLKKTATGWMTTINGKELKVEGQITYYNRYKRQNVVKDLSVELDRLSEESVNNDISSWTKGRSGEALSLLKKRFSHRPVQEKFVCLNCGFETHADEQAALNIARSWLFLRSQEYKKYQTNKTTGNTDKRAFVETWQSFYRKKLKEVWKPAV

SEQ ID NO: 25405 - protein, 978 aa, synthetic construct
  REGION 1..978: note = engineered CasX variant
QEIKRINKIRRRLVKDSNTKKAGKTGPMKTLLVRVMTPDLRERLENLRKKPENIPQPISNTSRANLNKLLTDYTEMKKAILHVYWEEFQKDPVGLMSRVAQPASKKIDQNKLKPEMDEKGNLTTAGFACSQCGQPLFVYKLEQVSEKGKAYTNYFGRCNVAEHEKLILLAQLKPEKDSDEAVTYSLGKFGQRALDFYSIHVTKESTHPVKPLAQIAGNRYASGPVGKALSDACMGTIASFLSKYQDIIIEHQKVVKGNQKRLESLRELAGKENLEYPSVTLPPQPHTKEGVDAYNEVIARVRMWVNLNLWQKLKLSRDDAKPLLRLKGFPSFPLVERQANEVDWWDMVCNVKKLINEKKEDGKVFWQNLAGYKRQEALRPYLSSEEDRKKGKKFARYQLGDLLLHLEKKHGEDWGKVYDEAWERIDKKVEGLSKHIKLEEERRSEDAQSKAALTDWLRAKASFVIEGLKEADKDEFCRCELKLQKWYGDLRGKPFAIEAENSILDISGFSKQYNCAFIWQKDGVKKLNLYLIINYFKGGKLRFKKIKPEAFEANRFYTVINKKSGEIVPMEVNFNFDDPNLIILPLAFGKRQGREFIWNDLLSLETGSLKLANGRVIEKTLYNRRTRQDEPALFVALTFERREVLDSSNIKPMNLLGVDRGENIPAVIALTDPEGCPLSRFKDSLGNPTHILRIGESYKEKQRTIQAKKEVEQRRAGGYSRKYASKAKNLADDMVRNTARDLLYYAVTQDAMLIFENLSRGFGRQGKRTFMAERQYTRMEDWLTAKLAYEGLPSKTYLSKTLAQYTSKTCSNCGFTITSADYDRVLEKLKKTATGWMTTINGKELKVEGQITYYNRYKRQNVVKDLSVELDRLSEESVNNDISSWTKGRSGEALSLLKKRFSHRPVQEKFVCLNCGFETHADEQAALNIARSWLFLRSQEYKKYQTNKTTGNTDKRAFVETWQSFYRKKLKEVWKPAV

SEQ ID NO: 25406 - protein, 978 aa, synthetic construct
  REGION 1..978: note = engineered CasX variant
QEIKRINKIRRRLVKDSNTKKAGKTGPMKTLLVRVMTPDLRERLENLRKKPENIPQPISNTSRANLNKLLTDYTEMKKAILHVYWEEFQKDPVGLMSRVAQPASKKIDQNKLKPEMDEKGNLTTAGFACSQCGQPLFVYKLEQVSEKGKAYTNYFGRCNVAEHEKLILLAQLKPEKDSDEAVTYSLGKFGQRALDFYSIHVTKESTHPVKPLAQIAGNRYASGPVGKALSDACMGTIASFLSKYQDIIIEHQKVVKGNQKRLESLRELAGKENLEYPSVTLPPQPHTKEGVDAYNEVIARVRMWVNLNLWQKLKLSRDDAKPLLRLKGFPSFPLVERQANEVDWWDMVCNVKKLINEKKEDGKVFWQNLAGYKRQEALRPYLSSEEDRKKGKKFARYQLGDLLLHLEKKHGEDWGKVYDEAWERIDKKVEGLSKHIKLEEERRSEDAQSKAALTDWLRAKASFVIEGLKEADKDEFCRCELKLQKWYGDLRGKPFAIEAENSILDISGFSKQYNCAFIWQKDGVKKLNLYLIINYFKGGKLRFKKIKPEAFEANRFYTVINKKSGEIVPMEVNFNFDDPNLIILPLAFGKRQGREFIWNDLLSLETGSLKLANGRVIEKTLYNRRTRQDEPALFVALTFERREVLDSSNIKPMNLLGVDRGENIPAVIALTDPEGCPLSRFKDSLGNPTHILRIGESYKEKQRTIQAKKEGEQRRAGGYSRKYASKAKNLADDMVRNTARDLLYYAVTQDAMLIFENLSRGFGRQGKRTFMAERQYTRMEDWLTAKLAYEGLPSKTYLSKTLAQYTSKTCSNCGFTITSADYDRVLEKLKKTATGWMTTINGKELKVEGQITYYNRYKRQNVVKDLSVELDRLSEESVNNDISSWTKGRSGEALSLLKKRFSHRPVQEKFVCLNCGFETHADEQAALNIARSWLFLRSQEYKKYQTNKTTGNTDKRAFVETWQSFYRKKLKEVWKPAV

SEQ ID NO: 25407 - protein, 978 aa, synthetic construct
  REGION 1..978: note = engineered CasX variant
QEIKRINKIRRRLVKDSNTKKAGKTGPMKTLLVRVMTPDLRERLENLRKKPENIPQPISNTSRANLNKLLTDYTEMKKAILHVYWEEFQKDPVGLMSRVAQPASKKIDQNKLKPEMDEKGNLTTAGFACSQCGQPLFVYKLEQVSEKGKAYTNYFGRCNVAEHEKLILLAQLKPEKDSDEAVTYSLGKFGQRALDFYSIHVTKESTHPVKPLAQIAGNRYASGPVGKALSDACMGTIASFLSKYQDIIIEHQKVVKGNQKRLESLRELAGKENLEYPSVTLPPQPHTKEGVDAYNEVIARVRMWVNLNLWQKLKLSRDDAKPLLRLKGFPSFPLVERQANEVDWWDMVCNVKKLINEKKEDGKVFWQNLAGYKRQEALRPYLSSEEDRKKGKKFARYQLGDLLLHLEKKHGEDWGKVYDEAWERIDKKVEGLSKHIKLEEERRSEDAQSKAALTDWLRAKASFVIEGLKEADKDEFCRCELKLQKWYGDLRGKPFAIEAENSILDISGFSKQYNCAFIWQKDGVKKLNLYLIINYFKGGKLRFKKIKPEAFEANRFYTVINKKSGEIVPMEVNFNFDDPNLIILPLAFGKRQGREFIWNDLLSLETGSLKLANGRVIEKTLYNRRTRQDEPALFVALTFERREVLDSSNIKPMNLISVDRGENIPAVIALTDPEGCPLSRFKDSLGNPTHILRIGESYKEKQRTIQAKKEVPQRRAGGYSRKYASKAKNLADDMVRNTARDLLYYAVTQDAMLIFENLSRGFGRQGKRTFMAERQYTRMEDWLTAKLAYEGLPSKTYLSKTLAQYTSKTCSNCGFTITSADYDRVLEKLKKTATGWMTTINGKELKVEGQITYYNRYKRQNVVKDLSVELDRLSEESVNNDISSWTKGRSGEALSLLKKRFSHRPVQEKFVCLNCGFETHADEQAALNIARSWLFLRSQEYKKYQTNKTTGNTDKRAFVETWQSFYRKKLKEVWKPAV

SEQ ID NO: 25408 - protein, 978 aa, synthetic construct
  REGION 1..978: note = engineered CasX variant
QEIKRINKIRRRLVKDSNTKKAGKTGPMKTLLVRVMTPDLRERLENLRKKPENIPQPISNTSRANLNKLLTDYTEMKKAILHVYWEEFQKDPVGLMSRVAQPASKKIDQNKLKPEMDEKGNLTTAGFACSQCGQPLFVYKLEQVSEKGKAYTNYFGRCNVAEHEKLILLAQLKPEKDSDEAVTYSLGKFGQRALDFYSIHVTKESTHPVKPLAQIAGNRYASGPVGKALSDACMGTIASFLSKYQDIIIEHQKVVKGNQKRLESLRELAGKENLEYPSVTLPPQPHTKEGVDAYNEVIARVRMWVNLNLWQKLKLSRDDAKPLLRLKGFPSFPLVERQANEVDWWDMVCNVKKLINEKKEDGKVFWQNLAGYKRQEALRPYLSSEEDRKKGKKFARYQLGDLLLHLEKKHGEDWGKVYDEAWERIDKKVEGLSKHIKLEEERRSEDAQSKAALTDWLRAKASFVIEGLKEADKDEFCRCELKLQKWYGDLRGKPFAIEAENSILDISGFSKQYNCAFIWQKDGVKKLNLYLIINYFKGGKLRFKKIKPEAFEANRFYTVINKKSGEIVPMEVNFNFDDPNLIILPLAFGKRQGREFIWNDLLSLETGSLKLANGRVIEKTLYNRRTRQDEPALFVALTFERREVLDSSNIKPMNLISVDRGENIPAVIALTDPEGCPLSRFKDSLGNPTHILRIGESYKEKQRTIQAKKEVEQRRAGGYSRKYASKAKNLADDMVRNTARDLLYYAVTQDAMLIFENLSRGFGRQGKRTFMAERQYTRMEDWLTAKLAYEGLPSKTYLSKTLAQYTSKTCSNCGFTITSADYDRVLEKLKKTATGWMTTINGKELKVEGQITYYNRYKRQNVVKDLSVELDRLSEESVNNDISSWTKGRSGEALSLLKKRFSHRPVQEKFVCLNCGFETHADEQAALNIARSWLFLRSQEYKKYQTNKTTGNTDKRAFVETWQSFYRKKLKEVWKPAV

SEQ ID NO: 25409 - protein, 978 aa, synthetic construct
  REGION 1..978: note = engineered CasX variant
QEIKRINKIRRRLVKDSNTKKAGKTGPMKTLLVRVMTPDLRERLENLRKKPENIPQPISNTSRANLNKLLTDYTEMKKAILHVYWEEFQKDPVGLMSRVAQPASKKIDQNKLKPEMDEKGNLTTAGFACSQCGQPLFVYKLEQVSEKGKAYTNYFGRCNVAEHEKLILLAQLKPEKDSDEAVTYSLGKFGQRALDFYSIHVTKESTHPVKPLAQIAGNRYASGPVGKALSDACMGTIASFLSKYQDIIIEHQKVVKGNQKRLESLRELAGKENLEYPSVTLPPQPHTKEGVDAYNEVIARVRMWVNLNLWQKLKLSRDDAKPLLRLKGFPSFPLVERQANEVDWWDMVCNVKKLINEKKEDGKVFWQNLAGYKRQEALRPYLSSEEDRKKGKKFARYQLGDLLLHLEKKHGEDWGKVYDEAWERIDKKVEGLSKHIKLEEERRSEDAQSKAALTDWLRAKASFVIEGLKEADKDEFCRCELKLQKWYGDLRGKPFAIEAENSILDISGFSKQYNCAFIWQKDGVKKLNLYLIINYFKGGKLRFKKIKPEAFEANRFYTVINKKSGEIVPMEVNFNFDDPNLIILPLAFGKRQGREFIWNDLLSLETGSLKLANGRVIEKTLYNRRTRQDEPALFVALTFERREVLDSSNIKPMNLISVDRGENIPAVIALTDPEGCPLSRFKDSLGNPTHILRIGESYKEKQRTIQAKKEVEQRRAGAYSRKYASKAKNLADDMVRNTARDLLYYAVTQDAMLIFENLSRGFGRQGKRTFMAERQYTRMEDWLTAKLAYEGLPSKTYLSKTLAQYTSKTCSNCGFTITSADYDRVLEKLKKTATGWMTTINGKELKVEGQITYYNRYKRQNVVKDLSVELDRLSEESVNNDISSWTKGRSGEALSLLKKRFSHRPVQEKFVCLNCGFETHADEQAALNIARSWLFLRSQEYKKYQTNKTTGNTDKRAFVETWQSFYRKKLKEVWKPAV

SEQ ID NO: 25410 - protein, 978 aa, synthetic construct
  REGION 1..978: note = engineered CasX variant
QEIKRINKIRRRLVKDSNTKKAGKTGPMKTLLVRVMTPDLRERLENLRKKPENIPQPISNTSRANLNKLLTDYTEMKKAILHVYWEEFQKDPVGLMSRVAQPASKKIDQNKLKPEMDEKGNLTTAGFACSQCGQPLFVYKLEQVSEKGKAYTNYFGRCNVAEHEKLILLAQLKPEKDSDEAVTYSLGKFGQRALDFYSIHVTKESTHPVKPLAQIAGNRYASGPVGKALSDACMGTIASFLSKYQDIIIEHQKVVKGNQKRLESLRELAGKENLEYPSVTLPPQPHTKEGVDAYNEVIARVRMWVNLNLWQKLKLSRDDAKPLLRLKGFPSFPLVERQANEVDWWDMVCNVKKLINEKKEDGKVFWQNLAGYKRQEALRPYLSSEEDRKKGKKFARYQLGDLLLHLEKKHGEDWGKVYDEAWERIDKKVEGLSKHIKLEEERRSEDAQSKAALTDWLRAKASFVIEGLKEADKDEFCRCELKLQKWYGDLRGKPFAIEAENSILDISGFSKQYNCAFIWQKDGVKKLNLYLIINYFKGGKLRFKKIKPEAFEANRFYTVINKKSGEIVPMEVNFNFDDPNLIILPLAFGKRQGREFIWNDLLSLETGSLKLANGRVIEKTLYNRRTRQDEPALFVALTFERREVLDSSNIKPMNLIGVDRGETIPAVIALTDPEGCPLSYFKDSLGNPTHILRIGESYKEKQRTIQAKKLVEQRRAGGYSRKYASKAKNLADDMVRNTARDLLYYAVTQDAMLIFENLSRGFGRQGKRTFMAERQYTRMEDWLTAKLAYEGLPSKTYLSKTLAQYTSKTCSNCGFTITSADYDRVLEKLKKTATGWMTTINGKELKVEGQITYYNRYKRQNVVKDLSVELDRLSEESVNNDISSWTKGRSGEALSLLKKRFSHRPVQEKFVCLNCGFETHADEQAALNIARSWLFLRSQEYKKYQTNKTTGNTDKRAFVETWQSFYRKKLKEVWKPAV

SEQ ID NO: 25411 - protein, 978 aa, synthetic construct
  REGION 1..978: note = engineered CasX variant
QEIKRINKIRRRLVKDSNTKKAGKTGPMKTLLVRVMTPDLRERLENLRKKPENIPQPISNTSRANLNKLLTDYTEMKKAILHVYWEEFQKDPVGLMSRVAQPASKKIDQNKLKPEMDEKGNLTTAGFACSQCGQPLFVYKLEQVSEKGKAYTNYFGRCNVAEHEKLILLAQLKPEKDSDEAVTYSLGKFGQRALDFYSIHVTKESTHPVKPLAQIAGNRYASGPVGKALSDACMGTIASFLSKYQDIIIEHQKVVKGNQKRLESLRELAGKENLEYPSVTLPPQPHTKEGVDAYNEVIARVRMWVNLNLWQKLKLSRDDAKPLLRLKGFPSFPLVERQANEVDWWDMVCNVKKLINEKKEDGKVFWQNLAGYKRQEALRPYLSSEEDRKKGKKFARYQLGDLLLHLEKKHGEDWGKVYDEAWERIDKKVEGLSKHIKLEEERRSEDAQSKAALTDWLRAKASFVIEGLKEADKDEFCRCELKLQKWYGDLRGKPFAIEAENSILDISGFSKQYNCAFIWQKDGVKKLNLYLIINYFKGGKLRFKKIKPEAFEANRFYTVINKKSGEIVPMEVNFNFDDPNLIILPLAFGKRQGREFIWNDLLSLETGSLKLANGRVIEKTLYNRRTRQDEPALFVALTFERREVLDSSNIKPMNLIGVDRGETIPAVIALTDPEGCPLSYFKDSLGNPTHILRIGESYKEKQRTIQAKKEVEQRRAGGYSRKYASKAKNLADDMVRNTARDLLYYAVTQDAMLIFENLSRGFGRQGKRTFMAERQYTRMEDWLTAKLAYEGLPSKTYLSKTLAQYTSKTCSNCGFTITSADYDRVLEKLKKTATGWMTTINGKELKVEGQITYYNRYKRQNVVKDLSVELDRLSEESVNNDISSWTKGRSGEALSLLKKRFSHRPVQEKFVCLNCGFETHADEQAALNIARSWLFLRSQEYKKYQTNKTTGNTDKRAFVETWQSFYRKKLKEVWKPAV

SEQ ID NO: 25412 - protein, 978 aa, synthetic construct
  REGION 1..978: note = engineered CasX variant
QEIKRINKIRRRLVKDSNTKKAGKTGPMKTLLVRVMTPDLRERLENLRKKPENIPQPISNTSRANLNKLLTDYTEMKKAILHVYWEEFQKDPVGLMSRVAQPASKKIDQNKLKPEMDEKGNLTTAGFACSQCGQPLFVYKLEQVSEKGKAYTNYFGRCNVAEHEKLILLAQLKPEKDSDEAVTYSLGKFGQRALDFYSIHVTKESTHPVKPLAQIAGNRYASGPVGKALSDACMGTIASFLSKYQDIIIEHQKVVKGNQKRLESLRELAGKENLEYPSVTLPPQPHTKEGVDAYNEVIARVRMWVNLNLWQKLKLSRDDAKPLLRLKGFPSFPLVERQANEVDWWDMVCNVKKLINEKKEDGKVFWQNLAGYKRQEALRPYLSSEEDRKKGKKFARYQLGDLLLHLEKKHGEDWGKVYDEAWERIDKKVEGLSKHIKLEEERRSEDAQSKAALTDWLRAKASFVIEGLKEADKDEFCRCELKLQKWYGDLRGKPFAIEAENSILDISGFSKQYNCAFIWQKDGVKKLNLYLIINYFKGGKLRFKKIKPEAFEANRFYTVINKKSGEIVPMEVNFNFDDPNLIILPLAFGKRQGREFIWNDLLSLETGSLKLANGRVIEKTLYNRRTRQDEPALFVALTFERREVLDSSNIKPMNLIGVDRGETIPAVIALTDPEGCPLSRFKDSLGNPTHILRIGESYKEKQRTIQAKKEVEQRRAGGYSRKYASKAKNLADDMVRNTARDLLYYAVTQDAMLIFENLSRGFGRQGKRTFMAERQYTRMEDWLTAKLAYEGLPSKTYLSKTLAQYTSKTCSNCGFTITSADYDRVLEKLKKTATGWMTTINGKELKVEGQITYYNRYKRQNVVKDLSVELDRLSEESVNNDISSWTKGRSGEALSLLKKRFSHRPVQEKFVCLNCGFETHADEQAALNIARSWLFLRSQEYKKYQTNKTTGNTDKRAFVETWQSFYRKKLKEVWKPAV

SEQ ID NO: 25413 - protein, 978 aa, synthetic construct
  REGION 1..978: note = engineered CasX variant
QEIKRINKIRRRLVKDSNTKKAGKTGPMKTLLVRVMTPDLRERLENLRKKPENIPQPISNTSRANLNKLLTDYTEMKKAILHVYWEEFQKDPVGLMSRVAQPASKKIDQNKLKPEMDEKGNLTTAGFACSQCGQPLFVYKLEQVSEKGKAYTNYFGRCNVAEHEKLILLAQLKPEKDSDEAVTYSLGKFGQRALDFYSIHVTKESTHPVKPLAQIAGNRYASGPVGKALSDACMGTIASFLSKYQDIIIEHQKVVKGNQKRLESLRELAGKENLEYPSVTLPPQPHTKEGVDAYNEVIARVRMWVNLNLWQKLKLSRDDAKPLLRLKGFPSFPLVERQANEVDWWDMVCNVKKLINEKKEDGKVFWQNLAGYKRQEALRPYLSSEEDRKKGKKFARYQLGDLLLHLEKKHGEDWGKVYDEAWERIDKKVEGLSKHIKLEEERRSEDAQSKAALTDWLRAKASFVIEGLKEADKDEFCRCELKLQKWYGDLRGKPFAIEAENSILDISGFSKQYNCAFIWQKDGVKKLNLYLIINYFKGGKLRFKKIKPEAFEANRFYTVINKKSGEIVPMEVNFNFDDPNLIILPLAFGKRQGREFIWNDLLSLETGSLKLANGRVIEKTLYNRRTRQDEPALFVALTFERREVLDSSNIKPMNLIGVDRGETIPAVIALTDPEGCPLSRFKDSLGNPTHILRIGESYKEKQRTIQAKKEVEQLRAGGYSRKYASKAKNLADDMVRNTARDLLYYAVTQDAMLIFENLSRGFGRQGKRTFMAERQYTRMEDWLTAKLAYEGLPSKTYLSKTLAQYTSKTCSNCGFTITSADYDRVLEKLKKTATGWMTTINGKELKVEGQITYYNRYKRQNVVKDLSVELDRLSEESVNNDISSWTKGRSGEALSLLKKRFSHRPVQEKFVCLNCGFETHADEQAALNIARSWLFLRSQEYKKYQTNKTTGNTDKRAFVETWQSFYRKKLKEVWKPAV

SEQ ID NO: 25414 - protein, 978 aa, synthetic construct
  REGION 1..978: note = engineered CasX variant
QEIKRINKIRRRLVKDSNTKKAGKTGPMKTLLVRVMTPDLRERLENLRKKPENIPQPISNTSRANLNKLLTDYTEMKKAILHVYWEEFQKDPVGLMSRVAQPASKKIDQNKLKPEMDEKGNLTTAGFACSQCGQPLFVYKLEQVSEKGKAYTNYFGRCNVAEHEKLILLAQLKPEKDSDEAVTYSLGKFGQRALDFYSIHVTKESTHPVKPLAQIAGNRYASGPVGKALSDACMGTIASFLSKYQDIIIEHQKVVKGNQKRLESLRELAGKENLEYPSVTLPPQPHTKEGVDAYNEVIARVRMWVNLNLWQKLKLSRDDAKPLLRLKGFPSFPLVERQANEVDWWDMVCNVKKLINEKKEDGKVFWQNLAGYKRQEALRPYLSSEEDRKKGKKFARYQLGDLLLHLEKKHGEDWGKVYDEAWERIDKKVEGLSKHIKLEEERRSEDAQSKAALTDWLRAKASFVIEGLKEADKDEFCRCELKLQKWYGDLRGKPFAIEAENSILDISGFSKQYNCAFIWQKDGVKKLNLYLIINYFKGGKLRFKKIKPEAFEANRFYTVINKKSGEIVPMEVNFNFDDPNLIILPLAFGKRQGREFIWNDLLSLETGSLKLANGRVIEKTLYNRRTRQDEPALFVALTFERREVLDSSNIKPMNLIGVDRGETIPAVIALTDPEGCPLSRFKDSLGNPTHILRIGELYKEKQRTIQAKKEVEQLRAGGYSRKYASKAKNLADDMVRNTARDLLYYAVTQDAMLIFENLSRGFGRQGKRTFMAERQYTRMEDWLTAKLAYEGLPSKTYLSKTLAQYTSKTCSNCGFTITSADYDRVLEKLKKTATGWMTTINGKELKVEGQITYYNRYKRQNVVKDLSVELDRLSEESVNNDISSWTKGRSGEALSLLKKRFSHRPVQEKFVCLNCGFETHADEQAALNIARSWLFLRSQEYKKYQTNKTTGNTDKRAFVETWQSFYRKKLKEVWKPAV

SEQ ID NO: 25415 - protein, 978 aa, synthetic construct
  REGION 1..978: note = engineered CasX variant
QEIKRINKIRRRLVKDSNTKKAGKTGPMKTLLVRVMTPDLRERLENLRKKPENIPQPISNTSRANLNKLLTDYTEMKKAILHVYWEEFQKDPVGLMSRVAQPASKKIDQNKLKPEMDEKGNLTTAGFACSQCGQPLFVYKLEQVSEKGKAYTNYFGRCNVAEHEKLILLAQLKPEKDSDEAVTYSLGKFGQRALDFYSIHVTKESTHPVKPLAQIAGNRYASGPVGKALSDACMGTIASFLSKYQDIIIEHQKVVKGNQKRLESLRELAGKENLEYPSVTLPPQPHTKEGVDAYNEVIARVRMWVNLNLWQKLKLSRDDAKPLLRLKGFPSFPLVERQANEVDWWDMVCNVKKLINEKKEDGKVFWQNLAGYKRQEALRPYLSSEEDRKKGKKFARYQLGDLLLHLEKKHGEDWGKVYDEAWERIDKKVEGLSKHIKLEEERRSEDAQSKAALTDWLRAKASFVIEGLKEADKDEFCRCELKLQKWYGDLRGKPFAIEAENSILDISGFSKQYNCAFIWQKDGVKKLNLYLIINYFKGGKLRFKKIKPEAFEANRFYTVINKKSGEIVPMEVNFNFDDPNLIILPLAFGKRQGREFIWNDLLSLETGSLKLANGRVIEKTLYNRRTRQDEPALFVALTFERREVLDSSNIKPMNLIGVDRGESIPAVIALTDPEGCPLSRFKDSLGNPTHILRIGENYKEKQRTIQAKKEVEQRRAGGYSRKYASKAKNLADDMVRNTARDLLYYAVTQDAMLIFENLSRGFGRQGKRTFMAERQYTRMEDWLTAKLAYEGLPSKTYLSKTLAQYTSKTCSNCGFTITSADYDRVLEKLKKTATGWMTTINGKELKVEGQITYYNRYKRQNVVKDLSVELDRLSEESVNNDISSWTKGRSGEALSLLKKRFSHRPVQEKFVCLNCGFETHADEQAALNIARSWLFLRSQEYKKYQTNKTTGNTDKRAFVETWQSFYRKKLKEVWKPAV

SEQ ID NO: 25416 - protein, 978 aa, synthetic construct
  REGION 1..978: note = engineered CasX variant
QEIKRINKIRRRLVKDSNTKKAGKTGPMKTLLVRVMTPDLRERLENLRKKPENIPQPISNTSRANLNKLLTDYTEMKKAILHVYWEEFQKDPVGLMSRVAQPASKKIDQNKLKPEMDEKGNLTTAGFACSQCGQPLFVYKLEQVSEKGKAYTNYFGRCNVAEHEKLILLAQLKPEKDSDEAVTYSLGKFGQRALDFYSIHVTKESTHPVKPLAQIAGNRYASGPVGKALSDACMGTIASFLSKYQDIIIEHQKVVKGNQKRLESLRELAGKENLEYPSVTLPPQPHTKEGVDAYNEVIARVRMWVNLNLWQKLKLSRDDAKPLLRLKGFPSFPLVERQANEVDWWDMVCNVKKLINEKKEDGKVFWQNLAGYKRQEALRPYLSSEEDRKKGKKFARYQLGDLLLHLEKKHGEDWGKVYDEAWERIDKKVEGLSKHIKLEEERRSEDAQSKAALTDWLRAKASFVIEGLKEADKDEFCRCELKLQKWYGDLRGKPFAIEAENSILDISGFSKQYNCAFIWQKDGVKKLNLYLIINYFKGGKLRFKKIKPEAFEANRFYTVINKKSGEIVPMEVNFNFDDPNLIILPLAFGKRQGREFIWNDLLSLETGSLKLANGRVIEKTLYNRRTRQDEPALFVALTFERREVLDSSNIKPMNLIGVDRGENVPAVIALTDPEGCPLSRFKDSLGNPTHILRIGESYKEKQRTIQAKKEVEQRRAGGYSRKYASKAKNLADDMVRNTARDLLYYAVTQDAMLIFENLSRGFGRQGKRTFMAERQYTRMEDWLTAKLAYEGLPSKTYLSKTLAQYTSKTCSNCGFTITSADYDRVLEKLKKTATGWMTTINGKELKVEGQITYYNRYKRQNVVKDLSVELDRLSEESVNNDISSWTKGRSGEALSLLKKRFSHRPVQEKFVCLNCGFETHADEQAALNIARSWLFLRSQEYKKYQTNKTTGNTDKRAFVETWQSFYRKKLKEVWKPAV

SEQ ID NO: 25417 - protein, 978 aa, synthetic construct
  REGION 1..978: note = engineered CasX variant
QEIKRINKIRRRLVKDSNTKKAGKTGPMKTLLVRVMTPDLRERLENLRKKPENIPQPISNTSRANLNKLLTDYTEMKKAILHVYWEEFQKDPVGLMSRVAQPASKKIDQNKLKPEMDEKGNLTTAGFACSQCGQPLFVYKLEQVSEKGKAYTNYFGRCNVAEHEKLILLAQLKPEKDSDEAVTYSLGKFGQRALDFYSIHVTKESTHPVKPLAQIAGNRYASGPVGKALSDACMGTIASFLSKYQDIIIEHQKVVKGNQKRLESLRELAGKENLEYPSVTLPPQPHTKEGVDAYNEVIARVRMWVNLNLWQKLKLSRDDAKPLLRLKGFPSFPLVERQANEVDWWDMVCNVKKLINEKKEDGKVFWQNLAGYKRQEALRPYLSSEEDRKKGKKFARYQLGDLLLHLEKKHGEDWGKVYDEAWERIDKKVEGLSKHIKLEEERRSEDAQSKAALTDWLRAKASFVIEGLKEADKDEFCRCELKLQKWYGDLRGKPFAIEAENSILDISGFSKQYNCAFIWQKDGVKKLNLYLIINYFKGGKLRFKKIKPEAFEANRFYTVINKKSGEIVPMEVNFNFDDPNLIILPLAFGKRQGREFIWNDLLSLETGSLKLANGRVIEKTLYNRRTRQDEPALFVALTFERREVLDSSNIKPMNLIGVDRGENTPAVIALTDPEGCPLSRFKDSLGNPTHILRIGESYKEKQRTIQAKKEVEQRRAGGYSRKYASKAKNLADDMVRNTARDLLYYAVTQDAMLIFENLSRGFGRQGKRTFMAERQYTRMEDWLTAKLAYEGLPSKTYLSKTLAQYTSKTCSNCGFTITSADYDRVLEKLKKTATGWMTTINGKELKVEGQITYYNRYKRQNVVKDLSVELDRLSEESVNNDISSWTKGRSGEALSLLKKRFSHRPVQEKFVCLNCGFETHADEQAALNIARSWLFLRSQEYKKYQTNKTTGNTDKRAFVETWQSFYRKKLKEVWKPAV

SEQ ID NO: 25418 - protein, 978 aa, synthetic construct
  REGION 1..978: note = engineered CasX variant
QEIKRINKIRRRLVKDSNTKKAGKTGPMKTLLVRVMTPDLRERLENLRKKPENIPQPISNTSRANLNKLLTDYTEMKKAILHVYWEEFQKDPVGLMSRVAQPASKKIDQNKLKPEMDEKGNLTTAGFACSQCGQPLFVYKLEQVSEKGKAYTNYFGRCNVAEHEKLILLAQLKPEKDSDEAVTYSLGKFGQRALDFYSIHVTKESTHPVKPLAQIAGNRYASGPVGKALSDACMGTIASFLSKYQDIIIEHQKVVKGNQKRLESLRELAGKENLEYPSVTLPPQPHTKEGVDAYNEVIARVRMWVNLNLWQKLKLSRDDAKPLLRLKGFPSFPLVERQANEVDWWDMVCNVKKLINEKKEDGKVFWQNLAGYKRQEALRPYLSSEEDRKKGKKFARYQLGDLLLHLEKKHGEDWGKVYDEAWERIDKKVEGLSKHIKLEEERRSEDAQSKAALTDWLRAKASFVIEGLKEADKDEFCRCELKLQKWYGDLRGKPFAIEAENSILDISGFSKQYNCAFIWQKDGVKKLNLYLIINYFKGGKLRFKKIKPEAFEANRFYTVINKKSGEIVPMEVNFNFDDPNLIILPLAFGKRQGREFIWNDLLSLETGSLKLANGRVIEKTLYNRRTRQDEPALFVALTFERREVLDSSNIKPMNLIGVDRGENRPAVIALTDPEGCPLSRFKDSLGNPTHILRIGESYKEKQRTIQAKKEVEQRRAGTYSRKYASKAKNLADDMVRNTARDLLYYAVTQDAMLIFENLSRGFGRQGKRTFMAERQYTRMEDWLTAKLAYEGLPSKTYLSKTLAQYTSKTCSNCGFTITSADYDRVLEKLKKTATGWMTTINGKELKVEGQITYYNRYKRQNVVKDLSVELDRLSEESVNNDISSWTKGRSGEALSLLKKRFSHRPVQEKFVCLNCGFETHADEQAALNIARSWLFLRSQEYKKYQTNKTTGNTDKRAFVETWQSFYRKKLKEVWKPAV

SEQ ID NO: 25419 - protein, 978 aa, synthetic construct
  REGION 1..978: note = engineered CasX variant
QEIKRINKIRRRLVKDSNTKKAGKTGPMKTLLVRVMTPDLRERLENLRKKPENIPQPISNTSRANLNKLLTDYTEMKKAILHVYWEEFQKDPVGLMSRVAQPASKKIDQNKLKPEMDEKGNLTTAGFACSQCGQPLFVYKLEQVSEKGKAYTNYFGRCNVAEHEKLILLAQLKPEKDSDEAVTYSLGKFGQRALDFYSIHVTKESTHPVKPLAQIAGNRYASGPVGKALSDACMGTIASFLSKYQDIIIEHQKVVKGNQKRLESLRELAGKENLEYPSVTLPPQPHTKEGVDAYNEVIARVRMWVNLNLWQKLKLSRDDAKPLLRLKGFPSFPLVERQANEVDWWDMVCNVKKLINEKKEDGKVFWQNLAGYKRQEALRPYLSSEEDRKKGKKFARYQLGDLLLHLEKKHGEDWGKVYDEAWERIDKKVEGLSKHIKLEEERRSEDAQSKAALTDWLRAKASFVIEGLKEADKDEFCRCELKLQKWYGDLRGKPFAIEAENSILDISGFSKQYNCAFIWQKDGVKKLNLYLIINYFKGGKLRFKKIKPEAFEANRFYTVINKKSGEIVPMEVNFNFDDPNLIILPLAFGKRQGREFIWNDLLSLETGSLKLANGRVIEKTLYNRRTRQDEPALFVALTFERREVLDSSNIKPMNLIGVDRGENRPAVIALTDPEGCPLSRFKDSLGNPTHILRIGESYKEKQRTIQAKKEVEQRRAGGYSRKYASKAKNLADDMVRNTARDLLYYAVTQDAMLIFENLSRGFGRQGKRTFMAERQYTRMEDWLTAKLAYEGLPSKTYLSKTLAQYTSKTCSNCGFTITSADYDRVLEKLKKTATGWMTTINGKELKVEGQITYYNRYKRQNVVKDLSVELDRLSEESVNNDISSWTKGRSGEALSLLKKRFSHRPVQEKFVCLNCGFETHADEQAALNIARSWLFLRSQEYKKYQTNKTTGNTDKRAFVETWQSFYRKKLKEVWKPAV

SEQ ID NO: 25420 - protein, 978 aa, synthetic construct
  REGION 1..978: note = engineered CasX variant
QEIKRINKIRRRLVKDSNTKKAGKTGPMKTLLVRVMTPDLRERLENLRKKPENIPQPISNTSRANLNKLLTDYTEMKKAILHVYWEEFQKDPVGLMSRVAQPASKKIDQNKLKPEMDEKGNLTTAGFACSQCGQPLFVYKLEQVSEKGKAYTNYFGRCNVAEHEKLILLAQLKPEKDSDEAVTYSLGKFGQRALDFYSIHVTKESTHPVKPLAQIAGNRYASGPVGKALSDACMGTIASFLSKYQDIIIEHQKVVKGNQKRLESLRELAGKENLEYPSVTLPPQPHTKEGVDAYNEVIARVRMWVNLNLWQKLKLSRDDAKPLLRLKGFPSFPLVERQANEVDWWDMVCNVKKLINEKKEDGKVFWQNLAGYKRQEALRPYLSSEEDRKKGKKFARYQLGDLLLHLEKKHGEDWGKVYDEAWERIDKKVEGLSKHIKLEEERRSEDAQSKAALTDWLRAKASFVIEGLKEADKDEFCRCELKLQKWYGDLRGKPFAIEAENSILDISGFSKQYNCAFIWQKDGVKKLNLYLIINYFKGGKLRFKKIKPEAFEANRFYTVINKKSGEIVPMEVNFNFDDPNLIILPLAFGKRQGREFIWNDLLSLETGSLKLANGRVIEKTLYNRRTRQDEPALFVALTFERREVLDSSNIKPMNLIGVDRGENRPAVIALTDPEGCPLSRFKDELGNPTHILRIGESYKEKQRTIQAKKEVEQRRAGGYSRKYASKAKNLADDMVRNTARDLLYYAVTQDAMLIFENLSRGFGRQGKRTFMAERQYTRMEDWLTAKLAYEGLPSKTYLSKTLAQYTSKTCSNCGFTITSADYDRVLEKLKKTATGWMTTINGKELKVEGQITYYNRYKRQNVVKDLSVELDRLSEESVNNDISSWTKGRSGEALSLLKKRFSHRPVQEKFVCLNCGFETHADEQAALNIARSWLFLRSQEYKKYQTNKTTGNTDKRAFVETWQSFYRKKLKEVWKPAV

SEQ ID NO: 25421 - protein, 978 aa, synthetic construct
  REGION 1..978: note = engineered CasX variant
QEIKRINKIRRRLVKDSNTKKAGKTGPMKTLLVRVMTPDLRERLENLRKKPENIPQPISNTSRANLNKLLTDYTEMKKAILHVYWEEFQKDPVGLMSRVAQPASKKIDQNKLKPEMDEKGNLTTAGFACSQCGQPLFVYKLEQVSEKGKAYTNYFGRCNVAEHEKLILLAQLKPEKDSDEAVTYSLGKFGQRALDFYSIHVTKESTHPVKPLAQIAGNRYASGPVGKALSDACMGTIASFLSKYQDIIIEHQKVVKGNQKRLESLRELAGKENLEYPSVTLPPQPHTKEGVDAYNEVIARVRMWVNLNLWQKLKLSRDDAKPLLRLKGFPSFPLVERQANEVDWWDMVCNVKKLINEKKEDGKVFWQNLAGYKRQEALRPYLSSEEDRKKGKKFARYQLGDLLLHLEKKHGEDWGKVYDEAWERIDKKVEGLSKHIKLEEERRSEDAQSKAALTDWLRAKASFVIEGLKEADKDEFCRCELKLQKWYGDLRGKPFAIEAENSILDISGFSKQYNCAFIWQKDGVKKLNLYLIINYFKGGKLRFKKIKPEAFEANRFYTVINKKSGEIVPMEVNFNFDDPNLIILPLAFGKRQGREFIWNDLLSLETGSLKLANGRVIEKTLYNRRTRQDEPALFVALTFERREVLDSSNIKPMNLIGVDRGENNPAVIALTDPEGCPLSRFKDSLGNPTHILRIGESYKEKQRTIQAKKEVEQRRAGGYSRKYASKAKNLADDMVRNTARDLLYYAVTQDAMLIFENLSRGFGRQGKRTFMAERQYTRMEDWLTAKLAYEGLPSKTYLSKTLAQYTSKTCSNCGFTITSADYDRVLEKLKKTATGWMTTINGKELKVEGQITYYNRYKRQNVVKDLSVELDRLSEESVNNDISSWTKGRSGEALSLLKKRFSHRPVQEKFVCLNCGFETHADEQAALNIARSWLFLRSQEYKKYQTNKTTGNTDKRAFVETWQSFYRKKLKEVWKPAV

SEQ ID NO: 25422 - protein, 978 aa, synthetic construct
  REGION 1..978: note = engineered CasX variant
QEIKRINKIRRRLVKDSNTKKAGKTGPMKTLLVRVMTPDLRERLENLRKKPENIPQPISNTSRANLNKLLTDYTEMKKAILHVYWEEFQKDPVGLMSRVAQPASKKIDQNKLKPEMDEKGNLTTAGFACSQCGQPLFVYKLEQVSEKGKAYTNYFGRCNVAEHEKLILLAQLKPEKDSDEAVTYSLGKFGQRALDFYSIHVTKESTHPVKPLAQIAGNRYASGPVGKALSDACMGTIASFLSKYQDIIIEHQKVVKGNQKRLESLRELAGKENLEYPSVTLPPQPHTKEGVDAYNEVIARVRMWVNLNLWQKLKLSRDDAKPLLRLKGFPSFPLVERQANEVDWWDMVCNVKKLINEKKEDGKVFWQNLAGYKRQEALRPYLSSEEDRKKGKKFARYQLGDLLLHLEKKHGEDWGKVYDEAWERIDKKVEGLSKHIKLEEERRSEDAQSKAALTDWLRAKASFVIEGLKEADKDEFCRCELKLQKWYGDLRGKPFAIEAENSILDISGFSKQYNCAFIWQKDGVKKLNLYLIINYFKGGKLRFKKIKPEAFEANRFYTVINKKSGEIVPMEVNFNFDDPNLIILPLAFGKRQGREFIWNDLLSLETGSLKLANGRVIEKTLYNRRTRQDEPALFVALTFERREVLDSSNIKPMNLIGVDRGENNPAVIALTDPEGCPLSRFKDSLGNPTHCLRIGESYKEKQRTIQAKKEVEQRRAGGYSRKYASKAKNLADDMVRNTARDLLYYAVTQDAMLIFENLSRGFGRQGKRTFMAERQYTRMEDWLTAKLAYEGLPSKTYLSKTLAQYTSKTCSNCGFTITSADYDRVLEKLKKTATGWMTTINGKELKVEGQITYYNRYKRQNVVKDLSVELDRLSEESVNNDISSWTKGRSGEALSLLKKRFSHRPVQEKFVCLNCGFETHADEQAALNIARSWLFLRSQEYKKYQTNKTTGNTDKRAFVETWQSFYRKKLKEVWKPAV

SEQ ID NO: 25423 - protein, 978 aa, synthetic construct
  REGION 1..978: note = engineered CasX variant
QEIKRINKIRRRLVKDSNTKKAGKTGPMKTLLVRVMTPDLRERLENLRKKPENIPQPISNTSRANLNKLLTDYTEMKKAILHVYWEEFQKDPVGLMSRVAQPASKKIDQNKLKPEMDEKGNLTTAGFACSQCGQPLFVYKLEQVSEKGKAYTNYFGRCNVAEHEKLILLAQLKPEKDSDEAVTYSLGKFGQRALDFYSIHVTKESTHPVKPLAQIAGNRYASGPVGKALSDACMGTIASFLSKYQDIIIEHQKVVKGNQKRLESLRELAGKENLEYPSVTLPPQPHTKEGVDAYNEVIARVRMWVNLNLWQKLKLSRDDAKPLLRLKGFPSFPLVERQANEVDWWDMVCNVKKLINEKKEDGKVFWQNLAGYKRQEALRPYLSSEEDRKKGKKFARYQLGDLLLHLEKKHGEDWGKVYDEAWERIDKKVEGLSKHIKLEEERRSEDAQSKAALTDWLRAKASFVIEGLKEADKDEFCRCELKLQKWYGDLRGKPFAIEAENSILDISGFSKQYNCAFIWQKDGVKKLNLYLIINYFKGGKLRFKKIKPEAFEANRFYTVINKKSGEIVPMEVNFNFDDPNLIILPLAFGKRQGREFIWNDLLSLETGSLKLANGRVIEKTLYNRRTRQDEPALFVALTFERREVLDSSNIKPMNLIGVDRGENNPAVIALTDPEGCPLKRFKDSLGNPTHILRIGESYKEKQRTIQAKKEVEQRRAGGYSRKYASKAKNLADDMVRNTARDLLYYAVTQDAMLIFENLSRGFGRQGKRTFMAERQYTRMEDWLTAKLAYEGLPSKTYLSKTLAQYTSKTCSNCGFTITSADYDRVLEKLKKTATGWMTTINGKELKVEGQITYYNRYKRQNVVKDLSVELDRLSEESVNNDISSWTKGRSGEALSLLKKRFSHRPVQEKFVCLNCGFETHADEQAALNIARSWLFLRSQEYKKYQTNKTTGNTDKRAFVETWQSFYRKKLKEVWKPAV

SEQ ID NO: 25424 - protein, 978 aa, synthetic construct
  REGION 1..978: note = engineered CasX variant
QEIKRINKIRRRLVKDSNTKKAGKTGPMKTLLVRVMTPDLRERLENLRKKPENIPQPISNTSRANLNKLLTDYTEMKKAILHVYWEEFQKDPVGLMSRVAQPASKKIDQNKLKPEMDEKGNLTTAGFACSQCGQPLFVYKLEQVSEKGKAYTNYFGRCNVAEHEKLILLAQLKPEKDSDEAVTYSLGKFGQRALDFYSIHVTKESTHPVKPLAQIAGNRYASGPVGKALSDACMGTIASFLSKYQDIIIEHQKVVKGNQKRLESLRELAGKENLEYPSVTLPPQPHTKEGVDAYNEVIARVRMWVNLNLWQKLKLSRDDAKPLLRLKGFPSFPLVERQANEVDWWDMVCNVKKLINEKKEDGKVFWQNLAGYKRQEALRPYLSSEEDRKKGKKFARYQLGDLLLHLEKKHGEDWGKVYDEAWERIDKKVEGLSKHIKLEEERRSEDAQSKAALTDWLRAKASFVIEGLKEADKDEFCRCELKLQKWYGDLRGKPFAIEAENSILDISGFSKQYNCAFIWQKDGVKKLNLYLIINYFKGGKLRFKKIKPEAFEANRFYTVINKKSGEIVPMEVNFNFDDPNLIILPLAFGKRQGREFIWNDLLSLETGSLKLANGRVIEKTLYNRRTRQDEPALFVALTFERREVLDSSNIKPMNLIGVDRGENMPAVIALTDPEGCPLSRFKDSLGNPTHILRIGESYKEKQRTIQAKKEVEQRRAGGYSRKYASKAKNLADDMVRNTARDLLYYAVTQDAMLIFENLSRGFGRQGKRTFMAERQYTRMEDWLTAKLAYEGLPSKTYLSKTLAQYTSKTCSNCGFTITSADYDRVLEKLKKTATGWMTTINGKELKVEGQITYYNRYKRQNVVKDLSVELDRLSEESVNNDISSWTKGRSGEALSLLKKRFSHRPVQEKFVCLNCGFETHADEQAALNIARSWLFLRSQEYKKYQTNKTTGNTDKRAFVETWQSFYRKKLKEVWKPAV

SEQ ID NO: 25425 - protein, 978 aa, synthetic construct
  REGION 1..978: note = engineered CasX variant
QEIKRINKIRRRLVKDSNTKKAGKTGPMKTLLVRVMTPDLRERLENLRKKPENIPQPISNTSRANLNKLLTDYTEMKKAILHVYWEEFQKDPVGLMSRVAQPASKKIDQNKLKPEMDEKGNLTTAGFACSQCGQPLFVYKLEQVSEKGKAYTNYFGRCNVAEHEKLILLAQLKPEKDSDEAVTYSLGKFGQRALDFYSIHVTKESTHPVKPLAQIAGNRYASGPVGKALSDACMGTIASFLSKYQDIIIEHQKVVKGNQKRLESLRELAGKENLEYPSVTLPPQPHTKEGVDAYNEVIARVRMWVNLNLWQKLKLSRDDAKPLLRLKGFPSFPLVERQANEVDWWDMVCNVKKLINEKKEDGKVFWQNLAGYKRQEALRPYLSSEEDRKKGKKFARYQLGDLLLHLEKKHGEDWGKVYDEAWERIDKKVEGLSKHIKLEEERRSEDAQSKAALTDWLRAKASFVIEGLKEADKDEFCRCELKLQKWYGDLRGKPFAIEAENSILDISGFSKQYNCAFIWQKDGVKKLNLYLIINYFKGGKLRFKKIKPEAFEANRFYTVINKKSGEIVPMEVNFNFDDPNLIILPLAFGKRQGREFIWNDLLSLETGSLKLANGRVIEKTLYNRRTRQDEPALFVALTFERREVLDSSNIKPMNLIGVDRGENMPAVIALTDPEGCPLSRFKDSFGNPTHILRIGESYKEKQRTIQAKKEVEQRRAGGYSRKYASKAKNLADDMVRNTARDLLYYAVTQDAMLIFENLSRGFGRQGKRTFMAERQYTRMEDWLTAKLAYEGLPSKTYLSKTLAQYTSKTCSNCGFTITSADYDRVLEKLKKTATGWMTTINGKELKVEGQITYYNRYKRQNVVKDLSVELDRLSEESVNNDISSWTKGRSGEALSLLKKRFSHRPVQEKFVCLNCGFETHADEQAALNIARSWLFLRSQEYKKYQTNKTTGNTDKRAFVETWQSFYRKKLKEVWKPAV

SEQ ID NO: 25426 - protein, 978 aa, synthetic construct
  REGION 1..978: note = engineered CasX variant
QEIKRINKIRRRLVKDSNTKKAGKTGPMKTLLVRVMTPDLRERLENLRKKPENIPQPISNTSRANLNKLLTDYTEMKKAILHVYWEEFQKDPVGLMSRVAQPASKKIDQNKLKPEMDEKGNLTTAGFACSQCGQPLFVYKLEQVSEKGKAYTNYFGRCNVAEHEKLILLAQLKPEKDSDEAVTYSLGKFGQRALDFYSIHVTKESTHPVKPLAQIAGNRYASGPVGKALSDACMGTIASFLSKYQDIIIEHQKVVKGNQKRLESLRELAGKENLEYPSVTLPPQPHTKEGVDAYNEVIARVRMWVNLNLWQKLKLSRDDAKPLLRLKGFPSFPLVERQANEVDWWDMVCNVKKLINEKKEDGKVFWQNLAGYKRQEALRPYLSSEEDRKKGKKFARYQLGDLLLHLEKKHGEDWGKVYDEAWERIDKKVEGLSKHIKLEEERRSEDAQSKAALTDWLRAKASFVIEGLKEADKDEFCRCELKLQKWYGDLRGKPFAIEAENSILDISGFSKQYNCAFIWQKDGVKKLNLYLIINYFKGGKLRFKKIKPEAFEANRFYTVINKKSGEIVPMEVNFNFDDPNLIILPLAFGKRQGREFIWNDLLSLETGSLKLANGRVIEKTLYNRRTRQDEPALFVALTFERREVLDSSNIKPMNLIGVDRGENLPAVIALTDPEGCPNSRFKDSLGNPTHILRIGESYKEKQRTIQAKKEVEQRRAGGYSRKYASKAKNLADDMVRNTARDLLYYAVTQDAMLIFENLSRGFGRQGKRTFMAERQYTRMEDWLTAKLAYEGLPSKTYLSKTLAQYTSKTCSNCGFTITSADYDRVLEKLKKTATGWMTTINGKELKVEGQITYYNRYKRQNVVKDLSVELDRLSEESVNNDISSWTKGRSGEALSLLKKRFSHRPVQEKFVCLNCGFETHADEQAALNIARSWLFLRSQEYKKYQTNKTTGNTDKRAFVETWQSFYRKKLKEVWKPAV

SEQ ID NO: 25427 - protein, 978 aa, synthetic construct
  REGION 1..978: note = engineered CasX variant
QEIKRINKIRRRLVKDSNTKKAGKTGPMKTLLVRVMTPDLRERLENLRKKPENIPQPISNTSRANLNKLLTDYTEMKKAILHVYWEEFQKDPVGLMSRVAQPASKKIDQNKLKPEMDEKGNLTTAGFACSQCGQPLFVYKLEQVSEKGKAYTNYFGRCNVAEHEKLILLAQLKPEKDSDEAVTYSLGKFGQRALDFYSIHVTKESTHPVKPLAQIAGNRYASGPVGKALSDACMGTIASFLSKYQDIIIEHQKVVKGNQKRLESLRELAGKENLEYPSVTLPPQPHTKEGVDAYNEVIARVRMWVNLNLWQKLKLSRDDAKPLLRLKGFPSFPLVERQANEVDWWDMVCNVKKLINEKKEDGKVFWQNLAGYKRQEALRPYLSSEEDRKKGKKFARYQLGDLLLHLEKKHGEDWGKVYDEAWERIDKKVEGLSKHIKLEEERRSEDAQSKAALTDWLRAKASFVIEGLKEADKDEFCRCELKLQKWYGDLRGKPFAIEAENSILDISGFSKQYNCAFIWQKDGVKKLNLYLIINYFKGGKLRFKKIKPEAFEANRFYTVINKKSGEIVPMEVNFNFDDPNLIILPLAFGKRQGREFIWNDLLSLETGSLKLANGRVIEKTLYNRRTRQDEPALFVALTFERREVLDSSNIKPMNLIGVDRGENLPAVIALTDPEGCPLSRFKDSLGNPTHILRIGESYKEKQRTIQAKKEVEQRRAGGYSRKYASKAKNLADDMVRNTARDLLYYAVTQDAMLIFENLSRGFGRQGKRTFMAERQYTRMEDWLTAKLAYEGLPSKTYLSKTLAQYTSKTCSNCGFTITSADYDRVLEKLKKTATGWMTTINGKELKVEGQITYYNRYKRQNVVKDLSVELDRLSEESVNNDISSWTKGRSGEALSLLKKRFSHRPVQEKFVCLNCGFETHADEQAALNIARSWLFLRSQEYKKYQTNKTTGNTDKRAFVETWQSFYRKKLKEVWKPAV

SEQ ID NO: 25428 - protein, 978 aa, synthetic construct
  REGION 1..978: note = engineered CasX variant
QEIKRINKIRRRLVKDSNTKKAGKTGPMKTLLVRVMTPDLRERLENLRKKPENIPQPISNTSRANLNKLLTDYTEMKKAILHVYWEEFQKDPVGLMSRVAQPASKKIDQNKLKPEMDEKGNLTTAGFACSQCGQPLFVYKLEQVSEKGKAYTNYFGRCNVAEHEKLILLAQLKPEKDSDEAVTYSLGKFGQRALDFYSIHVTKESTHPVKPLAQIAGNRYASGPVGKALSDACMGTIASFLSKYQDIIIEHQKVVKGNQKRLESLRELAGKENLEYPSVTLPPQPHTKEGVDAYNEVIARVRMWVNLNLWQKLKLSRDDAKPLLRLKGFPSFPLVERQANEVDWWDMVCNVKKLINEKKEDGKVFWQNLAGYKRQEALRPYLSSEEDRKKGKKFARYQLGDLLLHLEKKHGEDWGKVYDEAWERIDKKVEGLSKHIKLEEERRSEDAQSKAALTDWLRAKASFVIEGLKEADKDEFCRCELKLQKWYGDLRGKPFAIEAENSILDISGFSKQYNCAFIWQKDGVKKLNLYLIINYFKGGKLRFKKIKPEAFEANRFYTVINKKSGEIVPMEVNFNFDDPNLIILPLAFGKRQGREFIWNDLLSLETGSLKLANGRVIEKTLYNRRTRQDEPALFVALTFERREVLDSSNIKPMNLIGVDRGENKPAVIALTDPEGCPLSRFKDSLGNPTHILRIGESYKEKQRTIQAKKEVEQRRAGGYSRKYASKAKNLADDMVRNTARDLLYYAVTQDAMLIFENLSRGFGRQGKRTFMAERQYTRMEDWLTAKLAYEGLPSKTYLSKTLAQYTSKTCSNCGFTITSADYDRVLEKLKKTATGWMTTINGKELKVEGQITYYNRYKRQNVVKDLSVELDRLSEESVNNDISSWTKGRSGEALSLLKKRFSHRPVQEKFVCLNCGFETHADEQAALNIARSWLFLRSQEYKKYQTNKTTGNTDKRAFVETWQSFYRKKLKEVWKPAV

SEQ ID NO: 25429 - protein, 978 aa, synthetic construct
  REGION 1..978: note = engineered CasX variant
QEIKRINKIRRRLVKDSNTKKAGKTGPMKTLLVRVMTPDLRERLENLRKKPENIPQPISNTSRANLNKLLTDYTEMKKAILHVYWEEFQKDPVGLMSRVAQPASKKIDQNKLKPEMDEKGNLTTAGFACSQCGQPLFVYKLEQVSEKGKAYTNYFGRCNVAEHEKLILLAQLKPEKDSDEAVTYSLGKFGQRALDFYSIHVTKESTHPVKPLAQIAGNRYASGPVGKALSDACMGTIASFLSKYQDIIIEHQKVVKGNQKRLESLRELAGKENLEYPSVTLPPQPHTKEGVDAYNEVIARVRMWVNLNLWQKLKLSRDDAKPLLRLKGFPSFPLVERQANEVDWWDMVCNVKKLINEKKEDGKVFWQNLAGYKRQEALRPYLSSEEDRKKGKKFARYQLGDLLLHLEKKHGEDWGKVYDEAWERIDKKVEGLSKHIKLEEERRSEDAQSKAALTDWLRAKASFVIEGLKEADKDEFCRCELKLQKWYGDLRGKPFAIEAENSILDISGFSKQYNCAFIWQKDGVKKLNLYLIINYFKGGKLRFKKIKPEAFEANRFYTVINKKSGEIVPMEVNFNFDDPNLIILPLAFGKRQGREFIWNDLLSLETGSLKLANGRVIEKTLYNRRTRQDEPALFVALTFERREVLDSSNIKPMNLIGVDRGENITAVIALTDPEGCPLSRFKDSLGNPTHILRIGESYKEKQRTIQAKKEVEQRRAGGYSRKYASKAKNLADDMVRNTARDLLYYAVTQDAMLIFENLSRGFGRQGKRTFMAERQYTRMEDWLTAKLAYEGLPSKTYLSKTLAQYTSKTCSNCGFTITSADYDRVLEKLKKTATGWMTTINGKELKVEGQITYYNRYKRQNVVKDLSVELDRLSEESVNNDISSWTKGRSGEALSLLKKRFSHRPVQEKFVCLNCGFETHADEQAALNIARSWLFLRSQEYKKYQTNKTTGNTDKRAFVETWQSFYRKKLKEVWKPAV

SEQ ID NO: 25430 - protein, 978 aa, synthetic construct
  REGION 1..978: note = engineered CasX variant
QEIKRINKIRRRLVKDSNTKKAGKTGPMKTLLVRVMTPDLRERLENLRKKPENIPQPISNTSRANLNKLLTDYTEMKKAILHVYWEEFQKDPVGLMSRVAQPASKKIDQNKLKPEMDEKGNLTTAGFACSQCGQPLFVYKLEQVSEKGKAYTNYFGRCNVAEHEKLILLAQLKPEKDSDEAVTYSLGKFGQRALDFYSIHVTKESTHPVKPLAQIAGNRYASGPVGKALSDACMGTIASFLSKYQDIIIEHQKVVKGNQKRLESLRELAGKENLEYPSVTLPPQPHTKEGVDAYNEVIARVRMWVNLNLWQKLKLSRDDAKPLLRLKGFPSFPLVERQANEVDWWDMVCNVKKLINEKKEDGKVFWQNLAGYKRQEALRPYLSSEEDRKKGKKFARYQLGDLLLHLEKKHGEDWGKVYDEAWERIDKKVEGLSKHIKLEEERRSEDAQSKAALTDWLRAKASFVIEGLKEADKDEFCRCELKLQKWYGDLRGKPFAIEAENSILDISGFSKQYNCAFIWQKDGVKKLNLYLIINYFKGGKLRFKKIKPEAFEANRFYTVINKKSGEIVPMEVNFNFDDPNLIILPLAFGKRQGREFIWNDLLSLETGSLKLANGRVIEKTLYNRRTRQDEPALFVALTFERREVLDSSNIKPMNLIGVDRGENIQAVIALTDPEGCPLSRFKDSLGNPTHILRIGESYKEKQRTIQAKKEVEQRRAGGYSRKYASKAKNLADDMVRNTARDLLYYAVTQDAMLIFENLSRGFGRQGKRTFMAERQYTRMEDWLTAKLAYEGLPSKTYLSKTLAQYTSKTCSNCGFTITSADYDRVLEKLKKTATGWMTTINGKELKVEGQITYYNRYKRQNVVKDLSVELDRLSEESVNNDISSWTKGRSGEALSLLKKRFSHRPVQEKFVCLNCGFETHADEQAALNIARSWLFLRSQEYKKYQTNKTTGNTDKRAFVETWQSFYRKKLKEVWKPAV

SEQ ID NO: 25431 - protein, 978 aa, synthetic construct
  REGION 1..978: note = engineered CasX variant
QEIKRINKIRRRLVKDSNTKKAGKTGPMKTLLVRVMTPDLRERLENLRKKPENIPQPISNTSRANLNKLLTDYTEMKKAILHVYWEEFQKDPVGLMSRVAQPASKKIDQNKLKPEMDEKGNLTTAGFACSQCGQPLFVYKLEQVSEKGKAYTNYFGRCNVAEHEKLILLAQLKPEKDSDEAVTYSLGKFGQRALDFYSIHVTKESTHPVKPLAQIAGNRYASGPVGKALSDACMGTIASFLSKYQDIIIEHQKVVKGNQKRLESLRELAGKENLEYPSVTLPPQPHTKEGVDAYNEVIARVRMWVNLNLWQKLKLSRDDAKPLLRLKGFPSFPLVERQANEVDWWDMVCNVKKLINEKKEDGKVFWQNLAGYKRQEALRPYLSSEEDRKKGKKFARYQLGDLLLHLEKKHGEDWGKVYDEAWERIDKKVEGLSKHIKLEEERRSEDAQSKAALTDWLRAKASFVIEGLKEADKDEFCRCELKLQKWYGDLRGKPFAIEAENSILDISGFSKQYNCAFIWQKDGVKKLNLYLIINYFKGGKLRFKKIKPEAFEANRFYTVINKKSGEIVPMEVNFNFDDPNLIILPLAFGKRQGREFIWNDLLSLETGSLKLANGRVIEKTLYNRRTRQDEPALFVALTFERREVLDSSNIKPMNLIGVDRGENIPVVIALTDPEGCPLSRFKDSLGNPTHILRIGESYKEKQRTIQAKKEVEQRRAGGYSRKYASKAKNLADDMVRNTARDLLYYAVTQDAMLIFENLSRGFGRQGKRTFMAERQYTRMEDWLTAKLAYEGLPSKTYLSKTLAQYTSKTCSNCGFTITSADYDRVLEKLKKTATGWMTTINGKELKVEGQITYYNRYKRQNVVKDLSVELDRLSEESVNNDISSWTKGRSGEALSLLKKRFSHRPVQEKFVCLNCGFETHADEQAALNIARSWLFLRSQEYKKYQTNKTTGNTDKRAFVETWQSFYRKKLKEVWKPAV

SEQ ID NO: 25432 - protein, 978 aa, synthetic construct
  REGION 1..978: note = engineered CasX variant
QEIKRINKIRRRLVKDSNTKKAGKTGPMKTLLVRVMTPDLRERLENLRKKPENIPQPISNTSRANLNKLLTDYTEMKKAILHVYWEEFQKDPVGLMSRVAQPASKKIDQNKLKPEMDEKGNLTTAGFACSQCGQPLFVYKLEQVSEKGKAYTNYFGRCNVAEHEKLILLAQLKPEKDSDEAVTYSLGKFGQRALDFYSIHVTKESTHPVKPLAQIAGNRYASGPVGKALSDACMGTIASFLSKYQDIIIEHQKVVKGNQKRLESLRELAGKENLEYPSVTLPPQPHTKEGVDAYNEVIARVRMWVNLNLWQKLKLSRDDAKPLLRLKGFPSFPLVERQANEVDWWDMVCNVKKLINEKKEDGKVFWQNLAGYKRQEALRPYLSSEEDRKKGKKFARYQLGDLLLHLEKKHGEDWGKVYDEAWERIDKKVEGLSKHIKLEEERRSEDAQSKAALTDWLRAKASFVIEGLKEADKDEFCRCELKLQKWYGDLRGKPFAIEAENSILDISGFSKQYNCAFIWQKDGVKKLNLYLIINYFKGGKLRFKKIKPEAFEANRFYTVINKKSGEIVPMEVNFNFDDPNLIILPLAFGKRQGREFIWNDLLSLETGSLKLANGRVIEKTLYNRRTRQDEPALFVALTFERREVLDSSNIKPMNLIGVDRGENIPVVIALTDPEGCPLERFKDSLGNPTHILRIGESYKEKQRTIQAKKEVEQRRAGGYSRKYASKAKNLADDMVRNTARDLLYYAVTQDAMLIFENLSRGFGRQGKRTFMAERQYTRMEDWLTAKLAYEGLPSKTYLSKTLAQYTSKTCSNCGFTITSADYDRVLEKLKKTATGWMTTINGKELKVEGQITYYNRYKRQNVVKDLSVELDRLSEESVNNDISSWTKGRSGEALSLLKKRFSHRPVQEKFVCLNCGFETHADEQAALNIARSWLFLRSQEYKKYQTNKTTGNTDKRAFVETWQSFYRKKLKEVWKPAV

SEQ ID NO: 25433 - protein, 978 aa, synthetic construct
  REGION 1..978: note = engineered CasX variant
QEIKRINKIRRRLVKDSNTKKAGKTGPMKTLLVRVMTPDLRERLENLRKKPENIPQPISNTSRANLNKLLTDYTEMKKAILHVYWEEFQKDPVGLMSRVAQPASKKIDQNKLKPEMDEKGNLTTAGFACSQCGQPLFVYKLEQVSEKGKAYTNYFGRCNVAEHEKLILLAQLKPEKDSDEAVTYSLGKFGQRALDFYSIHVTKESTHPVKPLAQIAGNRYASGPVGKALSDACMGTIASFLSKYQDIIIEHQKVVKGNQKRLESLRELAGKENLEYPSVTLPPQPHTKEGVDAYNEVIARVRMWVNLNLWQKLKLSRDDAKPLLRLKGFPSFPLVERQANEVDWWDMVCNVKKLINEKKEDGKVFWQNLAGYKRQEALRPYLSSEEDRKKGKKFARYQLGDLLLHLEKKHGEDWGKVYDEAWERIDKKVEGLSKHIKLEEERRSEDAQSKAALTDWLRAKASFVIEGLKEADKDEFCRCELKLQKWYGDLRGKPFAIEAENSILDISGFSKQYNCAFIWQKDGVKKLNLYLIINYFKGGKLRFKKIKPEAFEANRFYTVINKKSGEIVPMEVNFNFDDPNLIILPLAFGKRQGREFIWNDLLSLETGSLKLANGRVIEKTLYNRRTRQDEPALFVALTFERREVLDSSNIKPMNLIGVDRGENIPTVIALTDPEGCPLSRFKDSLGNPTHILRIGESYKEKQRTIQAKKEVEQRRAGGYSRKYASKAKNLADDMVRNTARDLLYYAVTQDAMLIFENLSRGFGRQGKRTFMAERQYTRMEDWLTAKLAYEGLPSKTYLSKTLAQYTSKTCSNCGFTITSADYDRVLEKLKKTATGWMTTINGKELKVEGQITYYNRYKRQNVVKDLSVELDRLSEESVNNDISSWTKGRSGEALSLLKKRFSHRPVQEKFVCLNCGFETHADEQAALNIARSWLFLRSQEYKKYQTNKTTGNTDKRAFVETWQSFYRKKLKEVWKPAV

SEQ ID NO: 25434 - protein, 978 aa, synthetic construct
  REGION 1..978: note = engineered CasX variant
QEIKRINKIRRRLVKDSNTKKAGKTGPMKTLLVRVMTPDLRERLENLRKKPENIPQPISNTSRANLNKLLTDYTEMKKAILHVYWEEFQKDPVGLMSRVAQPASKKIDQNKLKPEMDEKGNLTTAGFACSQCGQPLFVYKLEQVSEKGKAYTNYFGRCNVAEHEKLILLAQLKPEKDSDEAVTYSLGKFGQRALDFYSIHVTKESTHPVKPLAQIAGNRYASGPVGKALSDACMGTIASFLSKYQDIIIEHQKVVKGNQKRLESLRELAGKENLEYPSVTLPPQPHTKEGVDAYNEVIARVRMWVNLNLWQKLKLSRDDAKPLLRLKGFPSFPLVERQANEVDWWDMVCNVKKLINEKKEDGKVFWQNLAGYKRQEALRPYLSSEEDRKKGKKFARYQLGDLLLHLEKKHGEDWGKVYDEAWERIDKKVEGLSKHIKLEEERRSEDAQSKAALTDWLRAKASFVIEGLKEADKDEFCRCELKLQKWYGDLRGKPFAIEAENSILDISGFSKQYNCAFIWQKDGVKKLNLYLIINYFKGGKLRFKKIKPEAFEANRFYTVINKKSGEIVPMEVNFNFDDPNLIILPLAFGKRQGREFIWNDLLSLETGSLKLANGRVIEKTLYNRRTRQDEPALFVALTFERREVLDSSNIKPMNLIGVDRGENIPTVIALTDGEGCPLSRFKDSLGNPTHILRIGESYKEKQRTIQAKKEVEQRRAGGYSRKYASKAKNLADDMVRNTARDLLYYAVTQDAMLIFENLSRGFGRQGKRTFMAERQYTRMEDWLTAKLAYEGLPSKTYLSKTLAQYTSKTCSNCGFTITSADYDRVLEKLKKTATGWMTTINGKELKVEGQITYYNRYKRQNVVKDLSVELDRLSEESVNNDISSWTKGRSGEALSLLKKRFSHRPVQEKFVCLNCGFETHADEQAALNIARSWLFLRSQEYKKYQTNKTTGNTDKRAFVETWQSFYRKKLKEVWKPAV

SEQ ID NO: 25435 - protein, 978 aa, synthetic construct
  REGION 1..978: note = engineered CasX variant
QEIKRINKIRRRLVKDSNTKKAGKTGPMKTLLVRVMTPDLRERLENLRKKPENIPQPISNTSRANLNKLLTDYTEMKKAILHVYWEEFQKDPVGLMSRVAQPASKKIDQNKLKPEMDEKGNLTTAGFACSQCGQPLFVYKLEQVSEKGKAYTNYFGRCNVAEHEKLILLAQLKPEKDSDEAVTYSLGKFGQRALDFYSIHVTKESTHPVKPLAQIAGNRYASGPVGKALSDACMGTIASFLSKYQDIIIEHQKVVKGNQKRLESLRELAGKENLEYPSVTLPPQPHTKEGVDAYNEVIARVRMWVNLNLWQKLKLSRDDAKPLLRLKGFPSFPLVERQANEVDWWDMVCNVKKLINEKKEDGKVFWQNLAGYKRQEALRPYLSSEEDRKKGKKFARYQLGDLLLHLEKKHGEDWGKVYDEAWERIDKKVEGLSKHIKLEEERRSEDAQSKAALTDWLRAKASFVIEGLKEADKDEFCRCELKLQKWYGDLRGKPFAIEAENSILDISGFSKQYNCAFIWQKDGVKKLNLYLIINYFKGGKLRFKKIKPEAFEANRFYTVINKKSGEIVPMEVNFNFDDPNLIILPLAFGKRQGREFIWNDLLSLETGSLKLANGRVIEKTLYNRRTRQDEPALFVALTFERREVLDSSNIKPMNLIGVDRGENIPTVIALTDGEGCPLSRFKDSLGNPTHILRIGESYKEKQRTIQAKKEVEQRRAFGYSRKYASKAKNLADDMVRNTARDLLYYAVTQDAMLIFENLSRGFGRQGKRTFMAERQYTRMEDWLTAKLAYEGLPSKTYLSKTLAQYTSKTCSNCGFTITSADYDRVLEKLKKTATGWMTTINGKELKVEGQITYYNRYKRQNVVKDLSVELDRLSEESVNNDISSWTKGRSGEALSLLKKRFSHRPVQEKFVCLNCGFETHADEQAALNIARSWLFLRSQEYKKYQTNKTTGNTDKRAFVETWQSFYRKKLKEVWKPAV

SEQ ID NO: 25436 - protein, 978 aa, synthetic construct
  REGION 1..978: note = engineered CasX variant
QEIKRINKIRRRLVKDSNTKKAGKTGPMKTLLVRVMTPDLRERLENLRKKPENIPQPISNTSRANLNKLLTDYTEMKKAILHVYWEEFQKDPVGLMSRVAQPASKKIDQNKLKPEMDEKGNLTTAGFACSQCGQPLFVYKLEQVSEKGKAYTNYFGRCNVAEHEKLILLAQLKPEKDSDEAVTYSLGKFGQRALDFYSIHVTKESTHPVKPLAQIAGNRYASGPVGKALSDACMGTIASFLSKYQDIIIEHQKVVKGNQKRLESLRELAGKENLEYPSVTLPPQPHTKEGVDAYNEVIARVRMWVNLNLWQKLKLSRDDAKPLLRLKGFPSFPLVERQANEVDWWDMVCNVKKLINEKKEDGKVFWQNLAGYKRQEALRPYLSSEEDRKKGKKFARYQLGDLLLHLEKKHGEDWGKVYDEAWERIDKKVEGLSKHIKLEEERRSEDAQSKAALTDWLRAKASFVIEGLKEADKDEFCRCELKLQKWYGDLRGKPFAIEAENSILDISGFSKQYNCAFIWQKDGVKKLNLYLIINYFKGGKLRFKKIKPEAFEANRFYTVINKKSGEIVPMEVNFNFDDPNLIILPLAFGKRQGREFIWNDLLSLETGSLKLANGRVIEKTLYNRRTRQDEPALFVALTFERREVLDSSNIKPMNLIGVDRGENIPSVIALTDPEGCPLSRFKDSLGYPTHILRIGESYKEKQRTIQAKKEVEQRRAGGYSRKYASKAKNLADDMVRNTARDLLYYAVTQDAMLIFENLSRGFGRQGKRTFMAERQYTRMEDWLTAKLAYEGLPSKTYLSKTLAQYTSKTCSNCGFTITSADYDRVLEKLKKTATGWMTTINGKELKVEGQITYYNRYKRQNVVKDLSVELDRLSEESVNNDISSWTKGRSGEALSLLKKRFSHRPVQEKFVCLNCGFETHADEQAALNIARSWLFLRSQEYKKYQTNKTTGNTDKRAFVETWQSFYRKKLKEVWKPAV

SEQ ID NO: 25437 - protein, 978 aa, synthetic construct
  REGION 1..978: note = engineered CasX variant
QEIKRINKIRRRLVKDSNTKKAGKTGPMKTLLVRVMTPDLRERLENLRKKPENIPQPISNTSRANLNKLLTDYTEMKKAILHVYWEEFQKDPVGLMSRVAQPASKKIDQNKLKPEMDEKGNLTTAGFACSQCGQPLFVYKLEQVSEKGKAYTNYFGRCNVAEHEKLILLAQLKPEKDSDEAVTYSLGKFGQRALDFYSIHVTKESTHPVKPLAQIAGNRYASGPVGKALSDACMGTIASFLSKYQDIIIEHQKVVKGNQKRLESLRELAGKENLEYPSVTLPPQPHTKEGVDAYNEVIARVRMWVNLNLWQKLKLSRDDAKPLLRLKGFPSFPLVERQANEVDWWDMVCNVKKLINEKKEDGKVFWQNLAGYKRQEALRPYLSSEEDRKKGKKFARYQLGDLLLHLEKKHGEDWGKVYDEAWERIDKKVEGLSKHIKLEEERRSEDAQSKAALTDWLRAKASFVIEGLKEADKDEFCRCELKLQKWYGDLRGKPFAIEAENSILDISGFSKQYNCAFIWQKDGVKKLNLYLIINYFKGGKLRFKKIKPEAFEANRFYTVINKKSGEIVPMEVNFNFDDPNLIILPLAFGKRQGREFIWNDLLSLETGSLKLANGRVIEKTLYNRRTRQDEPALFVALTFERREVLDSSNIKPMNLIGVDRGENIPSVIALTDPEGCPLSRFKDSLGNPTHILRIKESYKEKQRTIQAKKEVEQRRAGGYSRKYASKAKNLADDMVRNTARDLLYYAVTQDAMLIFENLSRGFGRQGKRTFMAERQYTRMEDWLTAKLAYEGLPSKTYLSKTLAQYTSKTCSNCGFTITSADYDRVLEKLKKTATGWMTTINGKELKVEGQITYYNRYKRQNVVKDLSVELDRLSEESVNNDISSWTKGRSGEALSLLKKRFSHRPVQEKFVCLNCGFETHADEQAALNIARSWLFLRSQEYKKYQTNKTTGNTDKRAFVETWQSFYRKKLKEVWKPAV

SEQ ID NO: 25438 - protein, 978 aa, synthetic construct
  REGION 1..978: note = engineered CasX variant
QEIKRINKIRRRLVKDSNTKKAGKTGPMKTLLVRVMTPDLRERLENLRKKPENIPQPISNTSRANLNKLLTDYTEMKKAILHVYWEEFQKDPVGLMSRVAQPASKKIDQNKLKPEMDEKGNLTTAGFACSQCGQPLFVYKLEQVSEKGKAYTNYFGRCNVAEHEKLILLAQLKPEKDSDEAVTYSLGKFGQRALDFYSIHVTKESTHPVKPLAQIAGNRYASGPVGKALSDACMGTIASFLSKYQDIIIEHQKVVKGNQKRLESLRELAGKENLEYPSVTLPPQPHTKEGVDAYNEVIARVRMWVNLNLWQKLKLSRDDAKPLLRLKGFPSFPLVERQANEVDWWDMVCNVKKLINEKKEDGKVFWQNLAGYKRQEALRPYLSSEEDRKKGKKFARYQLGDLLLHLEKKHGEDWGKVYDEAWERIDKKVEGLSKHIKLEEERRSEDAQSKAALTDWLRAKASFVIEGLKEADKDEFCRCELKLQKWYGDLRGKPFAIEAENSILDISGFSKQYNCAFIWQKDGVKKLNLYLIINYFKGGKLRFKKIKPEAFEANRFYTVINKKSGEIVPMEVNFNFDDPNLIILPLAFGKRQGREFIWNDLLSLETGSLKLANGRVIEKTLYNRRTRQDEPALFVALTFERREVLDSSNIKPMNLIGVDRGENIPSVIALTDPEGCPLSRFKDSLGNPTHILRIKESYKEKQQTIQAKKEVEQRRAGGYSRKYASKAKNLADDMVRNTARDLLYYAVTQDAMLIFENLSRGFGRQGKRTFMAERQYTRMEDWLTAKLAYEGLPSKTYLSKTLAQYTSKTCSNCGFTITSADYDRVLEKLKKTATGWMTTINGKELKVEGQITYYNRYKRQNVVKDLSVELDRLSEESVNNDISSWTKGRSGEALSLLKKRFSHRPVQEKFVCLNCGFETHADEQAALNIARSWLFLRSQEYKKYQTNKTTGNTDKRAFVETWQSFYRKKLKEVWKPAV

SEQ ID NO: 25439 - protein, 978 aa, synthetic construct
  REGION 1..978: note = engineered CasX variant
QEIKRINKIRRRLVKDSNTKKAGKTGPMKTLLVRVMTPDLRERLENLRKKPENIPQPISNTSRANLNKLLTDYTEMKKAILHVYWEEFQKDPVGLMSRVAQPASKKIDQNKLKPEMDEKGNLTTAGFACSQCGQPLFVYKLEQVSEKGKAYTNYFGRCNVAEHEKLILLAQLKPEKDSDEAVTYSLGKFGQRALDFYSIHVTKESTHPVKPLAQIAGNRYASGPVGKALSDACMGTIASFLSKYQDIIIEHQKVVKGNQKRLESLRELAGKENLEYPSVTLPPQPHTKEGVDAYNEVIARVRMWVNLNLWQKLKLSRDDAKPLLRLKGFPSFPLVERQANEVDWWDMVCNVKKLINEKKEDGKVFWQNLAGYKRQEALRPYLSSEEDRKKGKKFARYQLGDLLLHLEKKHGEDWGKVYDEAWERIDKKVEGLSKHIKLEEERRSEDAQSKAALTDWLRAKASFVIEGLKEADKDEFCRCELKLQKWYGDLRGKPFAIEAENSILDISGFSKQYNCAFIWQKDGVKKLNLYLIINYFKGGKLRFKKIKPEAFEANRFYTVINKKSGEIVPMEVNFNFDDPNLIILPLAFGKRQGREFIWNDLLSLETGSLKLANGRVIEKTLYNRRTRQDEPALFVALTFERREVLDSSNIKPMNLIGVDRGENIPSVIALTDPEGCPLSRFKDSLGNPTHILRIGNSYKEKQRTIQATKEVEQRRAGGYSRKYASKAKNLADDMVRNTARDLLYYAVTQDAMLIFENLSRGFGRQGKRTFMAERQYTRMEDWLTAKLAYEGLPSKTYLSKTLAQYTSKTCSNCGFTITSADYDRVLEKLKKTATGWMTTINGKELKVEGQITYYNRYKRQNVVKDLSVELDRLSEESVNNDISSWTKGRSGEALSLLKKRFSHRPVQEKFVCLNCGFETHADEQAALNIARSWLFLRSQEYKKYQTNKTTGNTDKRAFVETWQSFYRKKLKEVWKPAV

SEQ ID NO: 25440 - protein, 978 aa, synthetic construct
  REGION 1..978: note = engineered CasX variant
QEIKRINKIRRRLVKDSNTKKAGKTGPMKTLLVRVMTPDLRERLENLRKKPENIPQPISNTSRANLNKLLTDYTEMKKAILHVYWEEFQKDPVGLMSRVAQPASKKIDQNKLKPEMDEKGNLTTAGFACSQCGQPLFVYKLEQVSEKGKAYTNYFGRCNVAEHEKLILLAQLKPEKDSDEAVTYSLGKFGQRALDFYSIHVTKESTHPVKPLAQIAGNRYASGPVGKALSDACMGTIASFLSKYQDIIIEHQKVVKGNQKRLESLRELAGKENLEYPSVTLPPQPHTKEGVDAYNEVIARVRMWVNLNLWQKLKLSRDDAKPLLRLKGFPSFPLVERQANEVDWWDMVCNVKKLINEKKEDGKVFWQNLAGYKRQEALRPYLSSEEDRKKGKKFARYQLGDLLLHLEKKHGEDWGKVYDEAWERIDKKVEGLSKHIKLEEERRSEDAQSKAALTDWLRAKASFVIEGLKEADKDEFCRCELKLQKWYGDLRGKPFAIEAENSILDISGFSKQYNCAFIWQKDGVKKLNLYLIINYFKGGKLRFKKIKPEAFEANRFYTVINKKSGEIVPMEVNFNFDDPNLIILPLAFGKRQGREFIWNDLLSLETGSLKLANGRVIEKTLYNRRTRQDEPALFVALTFERREVLDSSNIKPMNLIGVDRGENIPSVIALTDPEGCPLSRFKDSLGNPTHILRIGNSYKEKQRTIQAKKEVEQRRAGGYSRKYASKAKNLADDMVRNTARDLLYYAVTQDAMLIFENLSRGFGRQGKRTFMAERQYTRMEDWLTAKLAYEGLPSKTYLSKTLAQYTSKTCSNCGFTITSADYDRVLEKLKKTATGWMTTINGKELKVEGQITYYNRYKRQNVVKDLSVELDRLSEESVNNDISSWTKGRSGEALSLLKKRFSHRPVQEKFVCLNCGFETHADEQAALNIARSWLFLRSQEYKKYQTNKTTGNTDKRAFVETWQSFYRKKLKEVWKPAV

SEQ ID NO: 25441 - protein, 978 aa, synthetic construct
  REGION 1..978: note = engineered CasX variant
QEIKRINKIRRRLVKDSNTKKAGKTGPMKTLLVRVMTPDLRERLENLRKKPENIPQPISNTSRANLNKLLTDYTEMKKAILHVYWEEFQKDPVGLMSRVAQPASKKIDQNKLKPEMDEKGNLTTAGFACSQCGQPLFVYKLEQVSEKGKAYTNYFGRCNVAEHEKLILLAQLKPEKDSDEAVTYSLGKFGQRALDFYSIHVTKESTHPVKPLAQIAGNRYASGPVGKALSDACMGTIASFLSKYQDIIIEHQKVVKGNQKRLESLRELAGKENLEYPSVTLPPQPHTKEGVDAYNEVIARVRMWVNLNLWQKLKLSRDDAKPLLRLKGFPSFPLVERQANEVDWWDMVCNVKKLINEKKEDGKVFWQNLAGYKRQEALRPYLSSEEDRKKGKKFARYQLGDLLLHLEKKHGEDWGKVYDEAWERIDKKVEGLSKHIKLEEERRSEDAQSKAALTDWLRAKASFVIEGLKEADKDEFCRCELKLQKWYGDLRGKPFAIEAENSILDISGFSKQYNCAFIWQKDGVKKLNLYLIINYFKGGKLRFKKIKPEAFEANRFYTVINKKSGEIVPMEVNFNFDDPNLIILPLAFGKRQGREFIWNDLLSLETGSLKLANGRVIEKTLYNRRTRQDEPALFVALTFERREVLDSSNIKPMNLIGVDRGENIPSVIALTDPEGCPLSRFKDSLGNPTHILRIGESYKEKQRTIQATKEVEQRRAGGYSRKYASKAKNLADDMVRNTARDLLYYAVTQDAMLIFENLSRGFGRQGKRTFMAERQYTRMEDWLTAKLAYEGLPSKTYLSKTLAQYTSKTCSNCGFTITSADYDRVLEKLKKTATGWMTTINGKELKVEGQITYYNRYKRQNVVKDLSVELDRLSEESVNNDISSWTKGRSGEALSLLKKRFSHRPVQEKFVCLNCGFETHADEQAALNIARSWLFLRSQEYKKYQTNKTTGNTDKRAFVETWQSFYRKKLKEVWKPAV

SEQ ID NO: 25442 - protein, 978 aa, synthetic construct
  REGION 1..978: note = engineered CasX variant
QEIKRINKIRRRLVKDSNTKKAGKTGPMKTLLVRVMTPDLRERLENLRKKPENIPQPISNTSRANLNKLLTDYTEMKKAILHVYWEEFQKDPVGLMSRVAQPASKKIDQNKLKPEMDEKGNLTTAGFACSQCGQPLFVYKLEQVSEKGKAYTNYFGRCNVAEHEKLILLAQLKPEKDSDEAVTYSLGKFGQRALDFYSIHVTKESTHPVKPLAQIAGNRYASGPVGKALSDACMGTIASFLSKYQDIIIEHQKVVKGNQKRLESLRELAGKENLEYPSVTLPPQPHTKEGVDAYNEVIARVRMWVNLNLWQKLKLSRDDAKPLLRLKGFPSFPLVERQANEVDWWDMVCNVKKLINEKKEDGKVFWQNLAGYKRQEALRPYLSSEEDRKKGKKFARYQLGDLLLHLEKKHGEDWGKVYDEAWERIDKKVEGLSKHIKLEEERRSEDAQSKAALTDWLRAKASFVIEGLKEADKDEFCRCELKLQKWYGDLRGKPFAIEAENSILDISGFSKQYNCAFIWQKDGVKKLNLYLIINYFKGGKLRFKKIKPEAFEANRFYTVINKKSGEIVPMEVNFNFDDPNLIILPLAFGKRQGREFIWNDLLSLETGSLKLANGRVIEKTLYNRRTRQDEPALFVALTFERREVLDSSNIKPMNLIGVDRGENIPSVIALTDPEGCPLSRFKDSLGNPTHILRIGESYKEKQRTIQAKKEVEQRRAGGYSRKYASKAKNLADDMVRNTARDLLYYAVTQDAMLIFENLSRGFGRQGKRTFMAERQYTRMEDWLTAKLAYEGLPSKTYLSKTLAQYTSKTCSNCGFTITSADYDRVLEKLKKTATGWMTTINGKELKVEGQITYYNRYKRQNVVKDLSVELDRLSEESVNNDISSWTKGRSGEALSLLKKRFSHRPVQEKFVCLNCGFETHADEQAALNIARSWLFLRSQEYKKYQTNKTTGNTDKRAFVETWQSFYRKKLKEVWKPAV

SEQ ID NO: 25443 - protein, 978 aa, synthetic construct
  REGION 1..978: note = engineered CasX variant
QEIKRINKIRRRLVKDSNTKKAGKTGPMKTLLVRVMTPDLRERLENLRKKPENIPQPISNTSRANLNKLLTDYTEMKKAILHVYWEEFQKDPVGLMSRVAQPASKKIDQNKLKPEMDEKGNLTTAGFACSQCGQPLFVYKLEQVSEKGKAYTNYFGRCNVAEHEKLILLAQLKPEKDSDEAVTYSLGKFGQRALDFYSIHVTKESTHPVKPLAQIAGNRYASGPVGKALSDACMGTIASFLSKYQDIIIEHQKVVKGNQKRLESLRELAGKENLEYPSVTLPPQPHTKEGVDAYNEVIARVRMWVNLNLWQKLKLSRDDAKPLLRLKGFPSFPLVERQANEVDWWDMVCNVKKLINEKKEDGKVFWQNLAGYKRQEALRPYLSSEEDRKKGKKFARYQLGDLLLHLEKKHGEDWGKVYDEAWERIDKKVEGLSKHIKLEEERRSEDAQSKAALTDWLRAKASFVIEGLKEADKDEFCRCELKLQKWYGDLRGKPFAIEAENSILDISGFSKQYNCAFIWQKDGVKKLNLYLIINYFKGGKLRFKKIKPEAFEANRFYTVINKKSGEIVPMEVNFNFDDPNLIILPLAFGKRQGREFIWNDLLSLETGSLKLANGRVIEKTLYNRRTRQDEPALFVALTFERREVLDSSNIKPMNLIGVDRGENIPSVIALTDPEGCPLSRFKDSLGNPTHILRIGESYKEKQRTIQAKKEGEQRRAGGYSRKYASKAKNLADDMVRNTARDLLYYAVTQDAMLIFENLSRGFGRQGKRTFMAERQYTRMEDWLTAKLAYEGLPSKTYLSKTLAQYTSKTCSNCGFTITSADYDRVLEKLKKTATGWMTTINGKELKVEGQITYYNRYKRQNVVKDLSVELDRLSEESVNNDISSWTKGRSGEALSLLKKRFSHRPVQEKFVCLNCGFETHADEQAALNIARSWLFLRSQEYKKYQTNKTTGNTDKRAFVETWQSFYRKKLKEVWKPAV

SEQ ID NO: 25444 - protein, 978 aa, synthetic construct
  REGION 1..978: note = engineered CasX variant
QEIKRINKIRRRLVKDSNTKKAGKTGPMKTLLVRVMTPDLRERLENLRKKPENIPQPISNTSRANLNKLLTDYTEMKKAILHVYWEEFQKDPVGLMSRVAQPASKKIDQNKLKPEMDEKGNLTTAGFACSQCGQPLFVYKLEQVSEKGKAYTNYFGRCNVAEHEKLILLAQLKPEKDSDEAVTYSLGKFGQRALDFYSIHVTKESTHPVKPLAQIAGNRYASGPVGKALSDACMGTIASFLSKYQDIIIEHQKVVKGNQKRLESLRELAGKENLEYPSVTLPPQPHTKEGVDAYNEVIARVRMWVNLNLWQKLKLSRDDAKPLLRLKGFPSFPLVERQANEVDWWDMVCNVKKLINEKKEDGKVFWQNLAGYKRQEALRPYLSSEEDRKKGKKFARYQLGDLLLHLEKKHGEDWGKVYDEAWERIDKKVEGLSKHIKLEEERRSEDAQSKAALTDWLRAKASFVIEGLKEADKDEFCRCELKLQKWYGDLRGKPFAIEAENSILDISGFSKQYNCAFIWQKDGVKKLNLYLIINYFKGGKLRFKKIKPEAFEANRFYTVINKKSGEIVPMEVNFNFDDPNLIILPLAFGKRQGREFIWNDLLSLETGSLKLANGRVIEKTLYNRRTRQDEPALFVALTFERREVLDSSNIKPMNLIGVDRGENIPSVIALTDPEGCPLSRFKDSLGNPTHILRIGESYKEKQQTIQAKKEVEQRRAGGYSRKYASKAKNLADDMVRNTARDLLYYAVTQDAMLIFENLSRGFGRQGKRTFMAERQYTRMEDWLTAKLAYEGLPSKTYLSKTLAQYTSKTCSNCGFTITSADYDRVLEKLKKTATGWMTTINGKELKVEGQITYYNRYKRQNVVKDLSVELDRLSEESVNNDISSWTKGRSGEALSLLKKRFSHRPVQEKFVCLNCGFETHADEQAALNIARSWLFLRSQEYKKYQTNKTTGNTDKRAFVETWQSFYRKKLKEVWKPAV

SEQ ID NO: 25445 - protein, 978 aa, synthetic construct
  REGION 1..978: note = engineered CasX variant
QEIKRINKIRRRLVKDSNTKKAGKTGPMKTLLVRVMTPDLRERLENLRKKPENIPQPISNTSRANLNKLLTDYTEMKKAILHVYWEEFQKDPVGLMSRVAQPASKKIDQNKLKPEMDEKGNLTTAGFACSQCGQPLFVYKLEQVSEKGKAYTNYFGRCNVAEHEKLILLAQLKPEKDSDEAVTYSLGKFGQRALDFYSIHVTKESTHPVKPLAQIAGNRYASGPVGKALSDACMGTIASFLSKYQDIIIEHQKVVKGNQKRLESLRELAGKENLEYPSVTLPPQPHTKEGVDAYNEVIARVRMWVNLNLWQKLKLSRDDAKPLLRLKGFPSFPLVERQANEVDWWDMVCNVKKLINEKKEDGKVFWQNLAGYKRQEALRPYLSSEEDRKKGKKFARYQLGDLLLHLEKKHGEDWGKVYDEAWERIDKKVEGLSKHIKLEEERRSEDAQSKAALTDWLRAKASFVIEGLKEADKDEFCRCELKLQKWYGDLRGKPFAIEAENSILDISGFSKQYNCAFIWQKDGVKKLNLYLIINYFKGGKLRFKKIKPEAFEANRFYTVINKKSGEIVPMEVNFNFDDPNLIILPLAFGKRQGREFIWNDLLSLETGSLKLANGRVIEKTLYNRRTRQDEPALFVALTFERREVLDSSNIKPMNLIGVDRGENIPQVIALTDQEGCPLSRFKDSLGNPTHILRIGESYKEKQRTIQAKKEVEQRRAGGYSRKYASKAKNLADDMVRNTARDLLYYAVTQDAMLIFENLSRGFGRQGKRTFMAERQYTRMEDWLTAKLAYEGLPSKTYLSKTLAQYTSKTCSNCGFTITSADYDRVLEKLKKTATGWMTTINGKELKVEGQITYYNRYKRQNVVKDLSVELDRLSEESVNNDISSWTKGRSGEALSLLKKRFSHRPVQEKFVCLNCGFETHADEQAALNIARSWLFLRSQEYKKYQTNKTTGNTDKRAFVETWQSFYRKKLKEVWKPAV

SEQ ID NO: 25446 - protein, 978 aa, synthetic construct
  REGION 1..978: note = engineered CasX variant
QEIKRINKIRRRLVKDSNTKKAGKTGPMKTLLVRVMTPDLRERLENLRKKPENIPQPISNTSRANLNKLLTDYTEMKKAILHVYWEEFQKDPVGLMSRVAQPASKKIDQNKLKPEMDEKGNLTTAGFACSQCGQPLFVYKLEQVSEKGKAYTNYFGRCNVAEHEKLILLAQLKPEKDSDEAVTYSLGKFGQRALDFYSIHVTKESTHPVKPLAQIAGNRYASGPVGKALSDACMGTIASFLSKYQDIIIEHQKVVKGNQKRLESLRELAGKENLEYPSVTLPPQPHTKEGVDAYNEVIARVRMWVNLNLWQKLKLSRDDAKPLLRLKGFPSFPLVERQANEVDWWDMVCNVKKLINEKKEDGKVFWQNLAGYKRQEALRPYLSSEEDRKKGKKFARYQLGDLLLHLEKKHGEDWGKVYDEAWERIDKKVEGLSKHIKLEEERRSEDAQSKAALTDWLRAKASFVIEGLKEADKDEFCRCELKLQKWYGDLRGKPFAIEAENSILDISGFSKQYNCAFIWQKDGVKKLNLYLIINYFKGGKLRFKKIKPEAFEANRFYTVINKKSGEIVPMEVNFNFDDPNLIILPLAFGKRQGREFIWNDLLSLETGSLKLANGRVIEKTLYNRRTRQDEPALFVALTFERREVLDSSNIKPMNLIGVDRGENIPQVIALTDPEGCPLSRFKDSLGNPTHILRIGESYKEKQRTIQAKKEVEQRRAGGYSRKYASKAKNLADDMVRNTARDLLYYAVTQDAMLIFENLSRGFGRQGKRTFMAERQYTRMEDWLTAKLAYEGLPSKTYLSKTLAQYTSKTCSNCGFTITSADYDRVLEKLKKTATGWMTTINGKELKVEGQITYYNRYKRQNVVKDLSVELDRLSEESVNNDISSWTKGRSGEALSLLKKRFSHRPVQEKFVCLNCGFETHADEQAALNIARSWLFLRSQEYKKYQTNKTTGNTDKRAFVETWQSFYRKKLKEVWKPAV

SEQ ID NO: 25447 - protein, 978 aa, synthetic construct
  REGION 1..978: note = engineered CasX variant
QEIKRINKIRRRLVKDSNTKKAGKTGPMKTLLVRVMTPDLRERLENLRKKPENIPQPISNTSRANLNKLLTDYTEMKKAILHVYWEEFQKDPVGLMSRVAQPASKKIDQNKLKPEMDEKGNLTTAGFACSQCGQPLFVYKLEQVSEKGKAYTNYFGRCNVAEHEKLILLAQLKPEKDSDEAVTYSLGKFGQRALDFYSIHVTKESTHPVKPLAQIAGNRYASGPVGKALSDACMGTIASFLSKYQDIIIEHQKVVKGNQKRLESLRELAGKENLEYPSVTLPPQPHTKEGVDAYNEVIARVRMWVNLNLWQKLKLSRDDAKPLLRLKGFPSFPLVERQANEVDWWDMVCNVKKLINEKKEDGKVFWQNLAGYKRQEALRPYLSSEEDRKKGKKFARYQLGDLLLHLEKKHGEDWGKVYDEAWERIDKKVEGLSKHIKLEEERRSEDAQSKAALTDWLRAKASFVIEGLKEADKDEFCRCELKLQKWYGDLRGKPFAIEAENSILDISGFSKQYNCAFIWQKDGVKKLNLYLIINYFKGGKLRFKKIKPEAFEANRFYTVINKKSGEIVPMEVNFNFDDPNLIILPLAFGKRQGREFIWNDLLSLETGSLKLANGRVIEKTLYNRRTRQDEPALFVALTFERREVLDSSNIKPMNLIGVDRGENIPNVIALTDPEGCPLSRFKDSLGNPTHILRIGESYKEKQRTIQAKKEVEQRRAGGYSRKYASKAKNLADDMVRNTARDLLYYAVTQDAMLIFENLSRGFGRQGKRTFMAERQYTRMEDWLTAKLAYEGLPSKTYLSKTLAQYTSKTCSNCGFTITSADYDRVLEKLKKTATGWMTTINGKELKVEGQITYYNRYKRQNVVKDLSVELDRLSEESVNNDISSWTKGRSGEALSLLKKRFSHRPVQEKFVCLNCGFETHADEQAALNIARSWLFLRSQEYKKYQTNKTTGNTDKRAFVETWQSFYRKKLKEVWKPAV

SEQ ID NO: 25448 - protein, 978 aa, synthetic construct
  REGION 1..978: note = engineered CasX variant
QEIKRINKIRRRLVKDSNTKKAGKTGPMKTLLVRVMTPDLRERLENLRKKPENIPQPISNTSRANLNKLLTDYTEMKKAILHVYWEEFQKDPVGLMSRVAQPASKKIDQNKLKPEMDEKGNLTTAGFACSQCGQPLFVYKLEQVSEKGKAYTNYFGRCNVAEHEKLILLAQLKPEKDSDEAVTYSLGKFGQRALDFYSIHVTKESTHPVKPLAQIAGNRYASGPVGKALSDACMGTIASFLSKYQDIIIEHQKVVKGNQKRLESLRELAGKENLEYPSVTLPPQPHTKEGVDAYNEVIARVRMWVNLNLWQKLKLSRDDAKPLLRLKGFPSFPLVERQANEVDWWDMVCNVKKLINEKKEDGKVFWQNLAGYKRQEALRPYLSSEEDRKKGKKFARYQLGDLLLHLEKKHGEDWGKVYDEAWERIDKKVEGLSKHIKLEEERRSEDAQSKAALTDWLRAKASFVIEGLKEADKDEFCRCELKLQKWYGDLRGKPFAIEAENSILDISGFSKQYNCAFIWQKDGVKKLNLYLIINYFKGGKLRFKKIKPEAFEANRFYTVINKKSGEIVPMEVNFNFDDPNLIILPLAFGKRQGREFIWNDLLSLETGSLKLANGRVIEKTLYNRRTRQDEPALFVALTFERREVLDSSNIKPMNLIGVDRGENIPMVIALTDPEGCPLSRFKDSLGNPTHILRIGESYKEKQRTIQAKKEVEQRRAGGYSRKYASKAKNLADDMVRNTARDLLYYAVTQDAMLIFENLSRGFGRQGKRTFMAERQYTRMEDWLTAKLAYEGLPSKTYLSKTLAQYTSKTCSNCGFTITSADYDRVLEKLKKTATGWMTTINGKELKVEGQITYYNRYKRQNVVKDLSVELDRLSEESVNNDISSWTKGRSGEALSLLKKRFSHRPVQEKFVCLNCGFETHADEQAALNIARSWLFLRSQEYKKYQTNKTTGNTDKRAFVETWQSFYRKKLKEVWKPAV

SEQ ID NO: 25449 - protein, 978 aa, synthetic construct
  REGION 1..978: note = engineered CasX variant
QEIKRINKIRRRLVKDSNTKKAGKTGPMKTLLVRVMTPDLRERLENLRKKPENIPQPISNTSRANLNKLLTDYTEMKKAILHVYWEEFQKDPVGLMSRVAQPASKKIDQNKLKPEMDEKGNLTTAGFACSQCGQPLFVYKLEQVSEKGKAYTNYFGRCNVAEHEKLILLAQLKPEKDSDEAVTYSLGKFGQRALDFYSIHVTKESTHPVKPLAQIAGNRYASGPVGKALSDACMGTIASFLSKYQDIIIEHQKVVKGNQKRLESLRELAGKENLEYPSVTLPPQPHTKEGVDAYNEVIARVRMWVNLNLWQKLKLSRDDAKPLLRLKGFPSFPLVERQANEVDWWDMVCNVKKLINEKKEDGKVFWQNLAGYKRQEALRPYLSSEEDRKKGKKFARYQLGDLLLHLEKKHGEDWGKVYDEAWERIDKKVEGLSKHIKLEEERRSEDAQSKAALTDWLRAKASFVIEGLKEADKDEFCRCELKLQKWYGDLRGKPFAIEAENSILDISGFSKQYNCAFIWQKDGVKKLNLYLIINYFKGGKLRFKKIKPEAFEANRFYTVINKKSGEIVPMEVNFNFDDPNLIILPLAFGKRQGREFIWNDLLSLETGSLKLANGRVIEKTLYNRRTRQDEPALFVALTFERREVLDSSNIKPMNLIGVDRGENIPMVIALTDPEGCPLSRFKDSLGNPTHICRIGESYKEKQRTIQAKKEVEQRRAGGYSRKYASKAKNLADDMVRNTARDLLYYAVTQDAMLIFENLSRGFGRQGKRTFMAERQYTRMEDWLTAKLAYEGLPSKTYLSKTLAQYTSKTCSNCGFTITSADYDRVLEKLKKTATGWMTTINGKELKVEGQITYYNRYKRQNVVKDLSVELDRLSEESVNNDISSWTKGRSGEALSLLKKRFSHRPVQEKFVCLNCGFETHADEQAALNIARSWLFLRSQEYKKYQTNKTTGNTDKRAFVETWQSFYRKKLKEVWKPAV

SEQ ID NO: 25450 - protein, 978 aa, synthetic construct
  REGION 1..978: note = engineered CasX variant
QEIKRINKIRRRLVKDSNTKKAGKTGPMKTLLVRVMTPDLRERLENLRKKPENIPQPISNTSRANLNKLLTDYTEMKKAILHVYWEEFQKDPVGLMSRVAQPASKKIDQNKLKPEMDEKGNLTTAGFACSQCGQPLFVYKLEQVSEKGKAYTNYFGRCNVAEHEKLILLAQLKPEKDSDEAVTYSLGKFGQRALDFYSIHVTKESTHPVKPLAQIAGNRYASGPVGKALSDACMGTIASFLSKYQDIIIEHQKVVKGNQKRLESLRELAGKENLEYPSVTLPPQPHTKEGVDAYNEVIARVRMWVNLNLWQKLKLSRDDAKPLLRLKGFPSFPLVERQANEVDWWDMVCNVKKLINEKKEDGKVFWQNLAGYKRQEALRPYLSSEEDRKKGKKFARYQLGDLLLHLEKKHGEDWGKVYDEAWERIDKKVEGLSKHIKLEEERRSEDAQSKAALTDWLRAKASFVIEGLKEADKDEFCRCELKLQKWYGDLRGKPFAIEAENSILDISGFSKQYNCAFIWQKDGVKKLNLYLIINYFKGGKLRFKKIKPEAFEANRFYTVINKKSGEIVPMEVNFNFDDPNLIILPLAFGKRQGREFIWNDLLSLETGSLKLANGRVIEKTLYNRRTRQDEPALFVALTFERREVLDSSNIKPMNLIGVDRGENIPMVIALTDPEGCPLSRFKDSLGNPTCILRIGESYKEKQRTIQAKKEVEQRRAGGYSRKYASKAKNLADDMVRNTARDLLYYAVTQDAMLIFENLSRGFGRQGKRTFMAERQYTRMEDWLTAKLAYEGLPSKTYLSKTLAQYTSKTCSNCGFTITSADYDRVLEKLKKTATGWMTTINGKELKVEGQITYYNRYKRQNVVKDLSVELDRLSEESVNNDISSWTKGRSGEALSLLKKRFSHRPVQEKFVCLNCGFETHADEQAALNIARSWLFLRSQEYKKYQTNKTTGNTDKRAFVETWQSFYRKKLKEVWKPAV

SEQ ID NO: 25451 - protein, 978 aa, synthetic construct
  REGION 1..978: note = engineered CasX variant
QEIKRINKIRRRLVKDSNTKKAGKTGPMKTLLVRVMTPDLRERLENLRKKPENIPQPISNTSRANLNKLLTDYTEMKKAILHVYWEEFQKDPVGLMSRVAQPASKKIDQNKLKPEMDEKGNLTTAGFACSQCGQPLFVYKLEQVSEKGKAYTNYFGRCNVAEHEKLILLAQLKPEKDSDEAVTYSLGKFGQRALDFYSIHVTKESTHPVKPLAQIAGNRYASGPVGKALSDACMGTIASFLSKYQDIIIEHQKVVKGNQKRLESLRELAGKENLEYPSVTLPPQPHTKEGVDAYNEVIARVRMWVNLNLWQKLKLSRDDAKPLLRLKGFPSFPLVERQANEVDWWDMVCNVKKLINEKKEDGKVFWQNLAGYKRQEALRPYLSSEEDRKKGKKFARYQLGDLLLHLEKKHGEDWGKVYDEAWERIDKKVEGLSKHIKLEEERRSEDAQSKAALTDWLRAKASFVIEGLKEADKDEFCRCELKLQKWYGDLRGKPFAIEAENSILDISGFSKQYNCAFIWQKDGVKKLNLYLIINYFKGGKLRFKKIKPEAFEANRFYTVINKKSGEIVPMEVNFNFDDPNLIILPLAFGKRQGREFIWNDLLSLETGSLKLANGRVIEKTLYNRRTRQDEPALFVALTFERREVLDSSNIKPMNLIGVDRGENIPLVIALTDPEGCPLSRFKDSLGNPTHILRIGESYKEKQRTIQAKKETEQRRAGGYSRKYASKAKNLADDMVRNTARDLLYYAVTQDAMLIFENLSRGFGRQGKRTFMAERQYTRMEDWLTAKLAYEGLPSKTYLSKTLAQYTSKTCSNCGFTITSADYDRVLEKLKKTATGWMTTINGKELKVEGQITYYNRYKRQNVVKDLSVELDRLSEESVNNDISSWTKGRSGEALSLLKKRFSHRPVQEKFVCLNCGFETHADEQAALNIARSWLFLRSQEYKKYQTNKTTGNTDKRAFVETWQSFYRKKLKEVWKPAV

SEQ ID NO: 25452 - protein, 978 aa, synthetic construct
  REGION 1..978: note = engineered CasX variant
QEIKRINKIRRRLVKDSNTKKAGKTGPMKTLLVRVMTPDLRERLENLRKKPENIPQPISNTSRANLNKLLTDYTEMKKAILHVYWEEFQKDPVGLMSRVAQPASKKIDQNKLKPEMDEKGNLTTAGFACSQCGQPLFVYKLEQVSEKGKAYTNYFGRCNVAEHEKLILLAQLKPEKDSDEAVTYSLGKFGQRALDFYSIHVTKESTHPVKPLAQIAGNRYASGPVGKALSDACMGTIASFLSKYQDIIIEHQKVVKGNQKRLESLRELAGKENLEYPSVTLPPQPHTKEGVDAYNEVIARVRMWVNLNLWQKLKLSRDDAKPLLRLKGFPSFPLVERQANEVDWWDMVCNVKKLINEKKEDGKVFWQNLAGYKRQEALRPYLSSEEDRKKGKKFARYQLGDLLLHLEKKHGEDWGKVYDEAWERIDKKVEGLSKHIKLEEERRSEDAQSKAALTDWLRAKASFVIEGLKEADKDEFCRCELKLQKWYGDLRGKPFAIEAENSILDISGFSKQYNCAFIWQKDGVKKLNLYLIINYFKGGKLRFKKIKPEAFEANRFYTVINKKSGEIVPMEVNFNFDDPNLIILPLAFGKRQGREFIWNDLLSLETGSLKLANGRVIEKTLYNRRTRQDEPALFVALTFERREVLDSSNIKPMNLIGVDRGENIPGVIALTDPEGCPLSRFKDSLGNPTHILRIGESYKEKQRTIQAKKEVTQRRAGGYSRKYASKAKNLADDMVRNTARDLLYYAVTQDAMLIFENLSRGFGRQGKRTFMAERQYTRMEDWLTAKLAYEGLPSKTYLSKTLAQYTSKTCSNCGFTITSADYDRVLEKLKKTATGWMTTINGKELKVEGQITYYNRYKRQNVVKDLSVELDRLSEESVNNDISSWTKGRSGEALSLLKKRFSHRPVQEKFVCLNCGFETHADEQAALNIARSWLFLRSQEYKKYQTNKTTGNTDKRAFVETWQSFYRKKLKEVWKPAV

SEQ ID NO: 25453 - protein, 978 aa, synthetic construct
  REGION 1..978: note = engineered CasX variant
QEIKRINKIRRRLVKDSNTKKAGKTGPMKTLLVRVMTPDLRERLENLRKKPENIPQPISNTSRANLNKLLTDYTEMKKAILHVYWEEFQKDPVGLMSRVAQPASKKIDQNKLKPEMDEKGNLTTAGFACSQCGQPLFVYKLEQVSEKGKAYTNYFGRCNVAEHEKLILLAQLKPEKDSDEAVTYSLGKFGQRALDFYSIHVTKESTHPVKPLAQIAGNRYASGPVGKALSDACMGTIASFLSKYQDIIIEHQKVVKGNQKRLESLRELAGKENLEYPSVTLPPQPHTKEGVDAYNEVIARVRMWVNLNLWQKLKLSRDDAKPLLRLKGFPSFPLVERQANEVDWWDMVCNVKKLINEKKEDGKVFWQNLAGYKRQEALRPYLSSEEDRKKGKKFARYQLGDLLLHLEKKHGEDWGKVYDEAWERIDKKVEGLSKHIKLEEERRSEDAQSKAALTDWLRAKASFVIEGLKEADKDEFCRCELKLQKWYGDLRGKPFAIEAENSILDISGFSKQYNCAFIWQKDGVKKLNLYLIINYFKGGKLRFKKIKPEAFEANRFYTVINKKSGEIVPMEVNFNFDDPNLIILPLAFGKRQGREFIWNDLLSLETGSLKLANGRVIEKTLYNRRTRQDEPALFVALTFERREVLDSSNIKPMNLIGVDRGENIPGVIALTDPEGCPLSRFKDSLGNPTHILRIGESYKEKQRTIQAKKEVTQGRAGGYSRKYASKAKNLADDMVRNTARDLLYYAVTQDAMLIFENLSRGFGRQGKRTFMAERQYTRMEDWLTAKLAYEGLPSKTYLSKTLAQYTSKTCSNCGFTITSADYDRVLEKLKKTATGWMTTINGKELKVEGQITYYNRYKRQNVVKDLSVELDRLSEESVNNDISSWTKGRSGEALSLLKKRFSHRPVQEKFVCLNCGFETHADEQAALNIARSWLFLRSQEYKKYQTNKTTGNTDKRAFVETWQSFYRKKLKEVWKPAV

SEQ ID NO: 25454 - protein, 978 aa, synthetic construct
  REGION 1..978: note = engineered CasX variant
QEIKRINKIRRRLVKDSNTKKAGKTGPMKTLLVRVMTPDLRERLENLRKKPENIPQPISNTSRANLNKLLTDYTEMKKAILHVYWEEFQKDPVGLMSRVAQPASKKIDQNKLKPEMDEKGNLTTAGFACSQCGQPLFVYKLEQVSEKGKAYTNYFGRCNVAEHEKLILLAQLKPEKDSDEAVTYSLGKFGQRALDFYSIHVTKESTHPVKPLAQIAGNRYASGPVGKALSDACMGTIASFLSKYQDIIIEHQKVVKGNQKRLESLRELAGKENLEYPSVTLPPQPHTKEGVDAYNEVIARVRMWVNLNLWQKLKLSRDDAKPLLRLKGFPSFPLVERQANEVDWWDMVCNVKKLINEKKEDGKVFWQNLAGYKRQEALRPYLSSEEDRKKGKKFARYQLGDLLLHLEKKHGEDWGKVYDEAWERIDKKVEGLSKHIKLEEERRSEDAQSKAALTDWLRAKASFVIEGLKEADKDEFCRCELKLQKWYGDLRGKPFAIEAENSILDISGFSKQYNCAFIWQKDGVKKLNLYLIINYFKGGKLRFKKIKPEAFEANRFYTVINKKSGEIVPMEVNFNFDDPNLIILPLAFGKRQGREFIWNDLLSLETGSLKLANGRVIEKTLYNRRTRQDEPALFVALTFERREVLDSSNIKPMNLIGVDRGENIPGVIALTDPEGCPLSRFKDSLGNPTHILRIGESYKEKQRTIQAKKEVEQRRAGGYSRKYASKAKNLADDMVRNTARDLLYYAVTQDAMLIFENLSRGFGRQGKRTFMAERQYTRMEDWLTAKLAYEGLPSKTYLSKTLAQYTSKTCSNCGFTITSADYDRVLEKLKKTATGWMTTINGKELKVEGQITYYNRYKRQNVVKDLSVELDRLSEESVNNDISSWTKGRSGEALSLLKKRFSHRPVQEKFVCLNCGFETHADEQAALNIARSWLFLRSQEYKKYQTNKTTGNTDKRAFVETWQSFYRKKLKEVWKPAV

SEQ ID NO: 25455 - protein, 978 aa, synthetic construct
  REGION 1..978: note = engineered CasX variant
QEIKRINKIRRRLVKDSNTKKAGKTGPMKTLLVRVMTPDLRERLENLRKKPENIPQPISNTSRANLNKLLTDYTEMKKAILHVYWEEFQKDPVGLMSRVAQPASKKIDQNKLKPEMDEKGNLTTAGFACSQCGQPLFVYKLEQVSEKGKAYTNYFGRCNVAEHEKLILLAQLKPEKDSDEAVTYSLGKFGQRALDFYSIHVTKESTHPVKPLAQIAGNRYASGPVGKALSDACMGTIASFLSKYQDIIIEHQKVVKGNQKRLESLRELAGKENLEYPSVTLPPQPHTKEGVDAYNEVIARVRMWVNLNLWQKLKLSRDDAKPLLRLKGFPSFPLVERQANEVDWWDMVCNVKKLINEKKEDGKVFWQNLAGYKRQEALRPYLSSEEDRKKGKKFARYQLGDLLLHLEKKHGEDWGKVYDEAWERIDKKVEGLSKHIKLEEERRSEDAQSKAALTDWLRAKASFVIEGLKEADKDEFCRCELKLQKWYGDLRGKPFAIEAENSILDISGFSKQYNCAFIWQKDGVKKLNLYLIINYFKGGKLRFKKIKPEAFEANRFYTVINKKSGEIVPMEVNFNFDDPNLIILPLAFGKRQGREFIWNDLLSLETGSLKLANGRVIEKTLYNRRTRQDEPALFVALTFERREVLDSSNIKPMNLIGVDRGENIPGVIALTDPEGCPLSRFKDSLGNPTHILRIGESYKEKQRTIQAKKEVEQGRAGGYSRKYASKAKNLADDMVRNTARDLLYYAVTQDAMLIFENLSRGFGRQGKRTFMAERQYTRMEDWLTAKLAYEGLPSKTYLSKTLAQYTSKTCSNCGFTITSADYDRVLEKLKKTATGWMTTINGKELKVEGQITYYNRYKRQNVVKDLSVELDRLSEESVNNDISSWTKGRSGEALSLLKKRFSHRPVQEKFVCLNCGFETHADEQAALNIARSWLFLRSQEYKKYQTNKTTGNTDKRAFVETWQSFYRKKLKEVWKPAV

SEQ ID NO: 25456 - protein, 978 aa, synthetic construct
  REGION 1..978: note = engineered CasX variant
QEIKRINKIRRRLVKDSNTKKAGKTGPMKTLLVRVMTPDLRERLENLRKKPENIPQPISNTSRANLNKLLTDYTEMKKAILHVYWEEFQKDPVGLMSRVAQPASKKIDQNKLKPEMDEKGNLTTAGFACSQCGQPLFVYKLEQVSEKGKAYTNYFGRCNVAEHEKLILLAQLKPEKDSDEAVTYSLGKFGQRALDFYSIHVTKESTHPVKPLAQIAGNRYASGPVGKALSDACMGTIASFLSKYQDIIIEHQKVVKGNQKRLESLRELAGKENLEYPSVTLPPQPHTKEGVDAYNEVIARVRMWVNLNLWQKLKLSRDDAKPLLRLKGFPSFPLVERQANEVDWWDMVCNVKKLINEKKEDGKVFWQNLAGYKRQEALRPYLSSEEDRKKGKKFARYQLGDLLLHLEKKHGEDWGKVYDEAWERIDKKVEGLSKHIKLEEERRSEDAQSKAALTDWLRAKASFVIEGLKEADKDEFCRCELKLQKWYGDLRGKPFAIEAENSILDISGFSKQYNCAFIWQKDGVKKLNLYLIINYFKGGKLRFKKIKPEAFEANRFYTVINKKSGEIVPMEVNFNFDDPNLIILPLAFGKRQGREFIWNDLLSLETGSLKLANGRVIEKTLYNRRTRQDEPALFVALTFERREVLDSSNIKPMNLIGVDRGENIPCVIALTDPEGCPLSRFKDSLGNPTHILRIGESYKEKQRTIQAKKEVEQRRAGGYSRKYASKAKNLADDMVRNTARDLLYYAVTQDAMLIFENLSRGFGRQGKRTFMAERQYTRMEDWLTAKLAYEGLPSKTYLSKTLAQYTSKTCSNCGFTITSADYDRVLEKLKKTATGWMTTINGKELKVEGQITYYNRYKRQNVVKDLSVELDRLSEESVNNDISSWTKGRSGEALSLLKKRFSHRPVQEKFVCLNCGFETHADEQAALNIARSWLFLRSQEYKKYQTNKTTGNTDKRAFVETWQSFYRKKLKEVWKPAV

SEQ ID NO: 25457 - protein, 978 aa, synthetic construct
  REGION 1..978: note = engineered CasX variant
QEIKRINKIRRRLVKDSNTKKAGKTGPMKTLLVRVMTPDLRERLENLRKKPENIPQPISNTSRANLNKLLTDYTEMKKAILHVYWEEFQKDPVGLMSRVAQPASKKIDQNKLKPEMDEKGNLTTAGFACSQCGQPLFVYKLEQVSEKGKAYTNYFGRCNVAEHEKLILLAQLKPEKDSDEAVTYSLGKFGQRALDFYSIHVTKESTHPVKPLAQIAGNRYASGPVGKALSDACMGTIASFLSKYQDIIIEHQKVVKGNQKRLESLRELAGKENLEYPSVTLPPQPHTKEGVDAYNEVIARVRMWVNLNLWQKLKLSRDDAKPLLRLKGFPSFPLVERQANEVDWWDMVCNVKKLINEKKEDGKVFWQNLAGYKRQEALRPYLSSEEDRKKGKKFARYQLGDLLLHLEKKHGEDWGKVYDEAWERIDKKVEGLSKHIKLEEERRSEDAQSKAALTDWLRAKASFVIEGLKEADKDEFCRCELKLQKWYGDLRGKPFAIEAENSILDISGFSKQYNCAFIWQKDGVKKLNLYLIINYFKGGKLRFKKIKPEAFEANRFYTVINKKSGEIVPMEVNFNFDDPNLIILPLAFGKRQGREFIWNDLLSLETGSLKLANGRVIEKTLYNRRTRQDEPALFVALTFERREVLDSSNIKPMNLIGVDRGENIPCVIALTDPEGCPLSFFKDSWGNPTHILRIGESYKEKQRTIQAKKEVEQRRAGGYSRKYASKAKNLADDMVRNTARDLLYYAVTQDAMLIFENLSRGFGRQGKRTFMAERQYTRMEDWLTAKLAYEGLPSKTYLSKTLAQYTSKTCSNCGFTITSADYDRVLEKLKKTATGWMTTINGKELKVEGQITYYNRYKRQNVVKDLSVELDRLSEESVNNDISSWTKGRSGEALSLLKKRFSHRPVQEKFVCLNCGFETHADEQAALNIARSWLFLRSQEYKKYQTNKTTGNTDKRAFVETWQSFYRKKLKEVWKPAV

SEQ ID NO: 25458 - protein, 978 aa, synthetic construct
  REGION 1..978: note = engineered CasX variant
QEIKRINKIRRRLVKDSNTKKAGKTGPMKTLLVRVMTPDLRERLENLRKKPENIPQPISNTSRANLNKLLTDYTEMKKAILHVYWEEFQKDPVGLMSRVAQPASKKIDQNKLKPEMDEKGNLTTAGFACSQCGQPLFVYKLEQVSEKGKAYTNYFGRCNVAEHEKLILLAQLKPEKDSDEAVTYSLGKFGQRALDFYSIHVTKESTHPVKPLAQIAGNRYASGPVGKALSDACMGTIASFLSKYQDIIIEHQKVVKGNQKRLESLRELAGKENLEYPSVTLPPQPHTKEGVDAYNEVIARVRMWVNLNLWQKLKLSRDDAKPLLRLKGFPSFPLVERQANEVDWWDMVCNVKKLINEKKEDGKVFWQNLAGYKRQEALRPYLSSEEDRKKGKKFARYQLGDLLLHLEKKHGEDWGKVYDEAWERIDKKVEGLSKHIKLEEERRSEDAQSKAALTDWLRAKASFVIEGLKEADKDEFCRCELKLQKWYGDLRGKPFAIEAENSILDISGFSKQYNCAFIWQKDGVKKLNLYLIINYFKGGKLRFKKIKPEAFEANRFYTVINKKSGEIVPMEVNFNFDDPNLIILPLAFGKRQGREFIWNDLLSLETGSLKLANGRVIEKTLYNRRTRQDEPALFVALTFERREVLDSSNIKPMNLIGVDRGENIPCVIALTDPEGCPLSFFKDSLGNPTHILRIGESYKEKQRTIQAKKEVEQRRAGGYSRKYASKAKNLADDMVRNTARDLLYYAVTQDAMLIFENLSRGFGRQGKRTFMAERQYTRMEDWLTAKLAYEGLPSKTYLSKTLAQYTSKTCSNCGFTITSADYDRVLEKLKKTATGWMTTINGKELKVEGQITYYNRYKRQNVVKDLSVELDRLSEESVNNDISSWTKGRSGEALSLLKKRFSHRPVQEKFVCLNCGFETHADEQAALNIARSWLFLRSQEYKKYQTNKTTGNTDKRAFVETWQSFYRKKLKEVWKPAV

SEQ ID NO: 25459 - protein, 978 aa, synthetic construct
  REGION 1..978: note = engineered CasX variant
QEIKRINKIRRRLVKDSNTKKAGKTGPMKTLLVRVMTPDLRERLENLRKKPENIPQPISNTSRANLNKLLTDYTEMKKAILHVYWEEFQKDPVGLMSRVAQPASKKIDQNKLKPEMDEKGNLTTAGFACSQCGQPLFVYKLEQVSEKGKAYTNYFGRCNVAEHEKLILLAQLKPEKDSDEAVTYSLGKFGQRALDFYSIHVTKESTHPVKPLAQIAGNRYASGPVGKALSDACMGTIASFLSKYQDIIIEHQKVVKGNQKRLESLRELAGKENLEYPSVTLPPQPHTKEGVDAYNEVIARVRMWVNLNLWQKLKLSRDDAKPLLRLKGFPSFPLVERQANEVDWWDMVCNVKKLINEKKEDGKVFWQNLAGYKRQEALRPYLSSEEDRKKGKKFARYQLGDLLLHLEKKHGEDWGKVYDEAWERIDKKVEGLSKHIKLEEERRSEDAQSKAALTDWLRAKASFVIEGLKEADKDEFCRCELKLQKWYGDLRGKPFAIEAENSILDISGFSKQYNCAFIWQKDGVKKLNLYLIINYFKGGKLRFKKIKPEAFEANRFYTVINKKSGEIVPMEVNFNFDDPNLIILPLAFGKRQGREFIWNDLLSLETGSLKLANGRVIEKTLYNRRTRQDEPALFVALTFERREVLDSSNIKPMNLIGVDRGENIPAVYALTDPEGRPLSRFKDSLGNPTHILRIGESYKEKQRTIQAKKEVEQRRMGGYSRKYASKAKNLADDMVRNTARDLLYYAVTQDAMLIFENLSRGFGRQGKRTFMAERQYTRMEDWLTAKLAYEGLPSKTYLSKTLAQYTSKTCSNCGFTITSADYDRVLEKLKKTATGWMTTINGKELKVEGQITYYNRYKRQNVVKDLSVELDRLSEESVNNDISSWTKGRSGEALSLLKKRFSHRPVQEKFVCLNCGFETHADEQAALNIARSWLFLRSQEYKKYQTNKTTGNTDKRAFVETWQSFYRKKLKEVWKPAV

SEQ ID NO: 25460 - protein, 978 aa, synthetic construct
  REGION 1..978: note = engineered CasX variant
QEIKRINKIRRRLVKDSNTKKAGKTGPMKTLLVRVMTPDLRERLENLRKKPENIPQPISNTSRANLNKLLTDYTEMKKAILHVYWEEFQKDPVGLMSRVAQPASKKIDQNKLKPEMDEKGNLTTAGFACSQCGQPLFVYKLEQVSEKGKAYTNYFGRCNVAEHEKLILLAQLKPEKDSDEAVTYSLGKFGQRALDFYSIHVTKESTHPVKPLAQIAGNRYASGPVGKALSDACMGTIASFLSKYQDIIIEHQKVVKGNQKRLESLRELAGKENLEYPSVTLPPQPHTKEGVDAYNEVIARVRMWVNLNLWQKLKLSRDDAKPLLRLKGFPSFPLVERQANEVDWWDMVCNVKKLINEKKEDGKVFWQNLAGYKRQEALRPYLSSEEDRKKGKKFARYQLGDLLLHLEKKHGEDWGKVYDEAWERIDKKVEGLSKHIKLEEERRSEDAQSKAALTDWLRAKASFVIEGLKEADKDEFCRCELKLQKWYGDLRGKPFAIEAENSILDISGFSKQYNCAFIWQKDGVKKLNLYLIINYFKGGKLRFKKIKPEAFEANRFYTVINKKSGEIVPMEVNFNFDDPNLIILPLAFGKRQGREFIWNDLLSLETGSLKLANGRVIEKTLYNRRTRQDEPALFVALTFERREVLDSSNIKPMNLIGVDRGENIPAVYALTDPEGRPLSRFKDSLGNPTHILRIGESYKEKQRTIQAKKEVEQRRAGGYSRKYASKAKNLADDMVRNTARDLLYYAVTQDAMLIFENLSRGFGRQGKRTFMAERQYTRMEDWLTAKLAYEGLPSKTYLSKTLAQYTSKTCSNCGFTITSADYDRVLEKLKKTATGWMTTINGKELKVEGQITYYNRYKRQNVVKDLSVELDRLSEESVNNDISSWTKGRSGEALSLLKKRFSHRPVQEKFVCLNCGFETHADEQAALNIARSWLFLRSQEYKKYQTNKTTGNTDKRAFVETWQSFYRKKLKEVWKPAV

SEQ ID NO: 25461 - protein, 978 aa, synthetic construct
  REGION 1..978: note = engineered CasX variant
QEIKRINKIRRRLVKDSNTKKAGKTGPMKTLLVRVMTPDLRERLENLRKKPENIPQPISNTSRANLNKLLTDYTEMKKAILHVYWEEFQKDPVGLMSRVAQPASKKIDQNKLKPEMDEKGNLTTAGFACSQCGQPLFVYKLEQVSEKGKAYTNYFGRCNVAEHEKLILLAQLKPEKDSDEAVTYSLGKFGQRALDFYSIHVTKESTHPVKPLAQIAGNRYASGPVGKALSDACMGTIASFLSKYQDIIIEHQKVVKGNQKRLESLRELAGKENLEYPSVTLPPQPHTKEGVDAYNEVIARVRMWVNLNLWQKLKLSRDDAKPLLRLKGFPSFPLVERQANEVDWWDMVCNVKKLINEKKEDGKVFWQNLAGYKRQEALRPYLSSEEDRKKGKKFARYQLGDLLLHLEKKHGEDWGKVYDEAWERIDKKVEGLSKHIKLEEERRSEDAQSKAALTDWLRAKASFVIEGLKEADKDEFCRCELKLQKWYGDLRGKPFAIEAENSILDISGFSKQYNCAFIWQKDGVKKLNLYLIINYFKGGKLRFKKIKPEAFEANRFYTVINKKSGEIVPMEVNFNFDDPNLIILPLAFGKRQGREFIWNDLLSLETGSLKLANGRVIEKTLYNRRTRQDEPALFVALTFERREVLDSSNIKPMNLIGVDRGENIPAVYALTDPEGRPISRFKDSLGNPTHILRIGESYKEKQRTIQAKKEVEQRRAGGYSRKYASKAKNLADDMVRNTARDLLYYAVTQDAMLIFENLSRGFGRQGKRTFMAERQYTRMEDWLTAKLAYEGLPSKTYLSKTLAQYTSKTCSNCGFTITSADYDRVLEKLKKTATGWMTTINGKELKVEGQITYYNRYKRQNVVKDLSVELDRLSEESVNNDISSWTKGRSGEALSLLKKRFSHRPVQEKFVCLNCGFETHADEQAALNIARSWLFLRSQEYKKYQTNKTTGNTDKRAFVETWQSFYRKKLKEVWKPAV

SEQ ID NO: 25462 - protein, 978 aa, synthetic construct
  REGION 1..978: note = engineered CasX variant
QEIKRINKIRRRLVKDSNTKKAGKTGPMKTLLVRVMTPDLRERLENLRKKPENIPQPISNTSRANLNKLLTDYTEMKKAILHVYWEEFQKDPVGLMSRVAQPASKKIDQNKLKPEMDEKGNLTTAGFACSQCGQPLFVYKLEQVSEKGKAYTNYFGRCNVAEHEKLILLAQLKPEKDSDEAVTYSLGKFGQRALDFYSIHVTKESTHPVKPLAQIAGNRYASGPVGKALSDACMGTIASFLSKYQDIIIEHQKVVKGNQKRLESLRELAGKENLEYPSVTLPPQPHTKEGVDAYNEVIARVRMWVNLNLWQKLKLSRDDAKPLLRLKGFPSFPLVERQANEVDWWDMVCNVKKLINEKKEDGKVFWQNLAGYKRQEALRPYLSSEEDRKKGKKFARYQLGDLLLHLEKKHGEDWGKVYDEAWERIDKKVEGLSKHIKLEEERRSEDAQSKAALTDWLRAKASFVIEGLKEADKDEFCRCELKLQKWYGDLRGKPFAIEAENSILDISGFSKQYNCAFIWQKDGVKKLNLYLIINYFKGGKLRFKKIKPEAFEANRFYTVINKKSGEIVPMEVNFNFDDPNLIILPLAFGKRQGREFIWNDLLSLETGSLKLANGRVIEKTLYNRRTRQDEPALFVALTFERREVLDSSNIKPMNLIGVDRGENIPAVYALTDPEGCPLSRFKDSLGNPTHILRIGESYKEKQRQIQAKKEVEQRRAGGYSRKYASKAKNLADDMVRNTARDLLYYAVTQDAMLIFENLSRGFGRQGKRTFMAERQYTRMEDWLTAKLAYEGLPSKTYLSKTLAQYTSKTCSNCGFTITSADYDRVLEKLKKTATGWMTTINGKELKVEGQITYYNRYKRQNVVKDLSVELDRLSEESVNNDISSWTKGRSGEALSLLKKRFSHRPVQEKFVCLNCGFETHADEQAALNIARSWLFLRSQEYKKYQTNKTTGNTDKRAFVETWQSFYRKKLKEVWKPAV

SEQ ID NO: 25463 - protein, 978 aa, synthetic construct
  REGION 1..978: note = engineered CasX variant
QEIKRINKIRRRLVKDSNTKKAGKTGPMKTLLVRVMTPDLRERLENLRKKPENIPQPISNTSRANLNKLLTDYTEMKKAILHVYWEEFQKDPVGLMSRVAQPASKKIDQNKLKPEMDEKGNLTTAGFACSQCGQPLFVYKLEQVSEKGKAYTNYFGRCNVAEHEKLILLAQLKPEKDSDEAVTYSLGKFGQRALDFYSIHVTKESTHPVKPLAQIAGNRYASGPVGKALSDACMGTIASFLSKYQDIIIEHQKVVKGNQKRLESLRELAGKENLEYPSVTLPPQPHTKEGVDAYNEVIARVRMWVNLNLWQKLKLSRDDAKPLLRLKGFPSFPLVERQANEVDWWDMVCNVKKLINEKKEDGKVFWQNLAGYKRQEALRPYLSSEEDRKKGKKFARYQLGDLLLHLEKKHGEDWGKVYDEAWERIDKKVEGLSKHIKLEEERRSEDAQSKAALTDWLRAKASFVIEGLKEADKDEFCRCELKLQKWYGDLRGKPFAIEAENSILDISGFSKQYNCAFIWQKDGVKKLNLYLIINYFKGGKLRFKKIKPEAFEANRFYTVINKKSGEIVPMEVNFNFDDPNLIILPLAFGKRQGREFIWNDLLSLETGSLKLANGRVIEKTLYNRRTRQDEPALFVALTFERREVLDSSNIKPMNLIGVDRGENIPAVMALTDPEGCPLSRFKDSLGNPTHILRIGESYKEKQRWIQAKKEVEQRRAQGYSRKYASKAKNLADDMVRNTARDLLYYAVTQDAMLIFENLSRGFGRQGKRTFMAERQYTRMEDWLTAKLAYEGLPSKTYLSKTLAQYTSKTCSNCGFTITSADYDRVLEKLKKTATGWMTTINGKELKVEGQITYYNRYKRQNVVKDLSVELDRLSEESVNNDISSWTKGRSGEALSLLKKRFSHRPVQEKFVCLNCGFETHADEQAALNIARSWLFLRSQEYKKYQTNKTTGNTDKRAFVETWQSFYRKKLKEVWKPAV

SEQ ID NO: 25464 - protein, 978 aa, synthetic construct
  REGION 1..978: note = engineered CasX variant
QEIKRINKIRRRLVKDSNTKKAGKTGPMKTLLVRVMTPDLRERLENLRKKPENIPQPISNTSRANLNKLLTDYTEMKKAILHVYWEEFQKDPVGLMSRVAQPASKKIDQNKLKPEMDEKGNLTTAGFACSQCGQPLFVYKLEQVSEKGKAYTNYFGRCNVAEHEKLILLAQLKPEKDSDEAVTYSLGKFGQRALDFYSIHVTKESTHPVKPLAQIAGNRYASGPVGKALSDACMGTIASFLSKYQDIIIEHQKVVKGNQKRLESLRELAGKENLEYPSVTLPPQPHTKEGVDAYNEVIARVRMWVNLNLWQKLKLSRDDAKPLLRLKGFPSFPLVERQANEVDWWDMVCNVKKLINEKKEDGKVFWQNLAGYKRQEALRPYLSSEEDRKKGKKFARYQLGDLLLHLEKKHGEDWGKVYDEAWERIDKKVEGLSKHIKLEEERRSEDAQSKAALTDWLRAKASFVIEGLKEADKDEFCRCELKLQKWYGDLRGKPFAIEAENSILDISGFSKQYNCAFIWQKDGVKKLNLYLIINYFKGGKLRFKKIKPEAFEANRFYTVINKKSGEIVPMEVNFNFDDPNLIILPLAFGKRQGREFIWNDLLSLETGSLKLANGRVIEKTLYNRRTRQDEPALFVALTFERREVLDSSNIKPMNLIGVDRGENIPAVMALTDPEGCPLSRFKDSLGNPTHILRIGESYKEKQRWIQAKKEVEQRRAGGYSRKYASKAKNLADDMVRNTARDLLYYAVTQDAMLIFENLSRGFGRQGKRTFMAERQYTRMEDWLTAKLAYEGLPSKTYLSKTLAQYTSKTCSNCGFTITSADYDRVLEKLKKTATGWMTTINGKELKVEGQITYYNRYKRQNVVKDLSVELDRLSEESVNNDISSWTKGRSGEALSLLKKRFSHRPVQEKFVCLNCGFETHADEQAALNIARSWLFLRSQEYKKYQTNKTTGNTDKRAFVETWQSFYRKKLKEVWKPAV

SEQ ID NO: 25465 - protein, 978 aa, synthetic construct
  REGION 1..978: note = engineered CasX variant
QEIKRINKIRRRLVKDSNTKKAGKTGPMKTLLVRVMTPDLRERLENLRKKPENIPQPISNTSRANLNKLLTDYTEMKKAILHVYWEEFQKDPVGLMSRVAQPASKKIDQNKLKPEMDEKGNLTTAGFACSQCGQPLFVYKLEQVSEKGKAYTNYFGRCNVAEHEKLILLAQLKPEKDSDEAVTYSLGKFGQRALDFYSIHVTKESTHPVKPLAQIAGNRYASGPVGKALSDACMGTIASFLSKYQDIIIEHQKVVKGNQKRLESLRELAGKENLEYPSVTLPPQPHTKEGVDAYNEVIARVRMWVNLNLWQKLKLSRDDAKPLLRLKGFPSFPLVERQANEVDWWDMVCNVKKLINEKKEDGKVFWQNLAGYKRQEALRPYLSSEEDRKKGKKFARYQLGDLLLHLEKKHGEDWGKVYDEAWERIDKKVEGLSKHIKLEEERRSEDAQSKAALTDWLRAKASFVIEGLKEADKDEFCRCELKLQKWYGDLRGKPFAIEAENSILDISGFSKQYNCAFIWQKDGVKKLNLYLIINYFKGGKLRFKKIKPEAFEANRFYTVINKKSGEIVPMEVNFNFDDPNLIILPLAFGKRQGREFIWNDLLSLETGSLKLANGRVIEKTLYNRRTRQDEPALFVALTFERREVLDSSNIKPMNLIGVDRGENIPAVMALTDPEGCPLSRFKDSLGNPTHILRIGESYKEKQRTIQAKKEVEQRRAQGYSRKYASKAKNLADDMVRNTARDLLYYAVTQDAMLIFENLSRGFGRQGKRTFMAERQYTRMEDWLTAKLAYEGLPSKTYLSKTLAQYTSKTCSNCGFTITSADYDRVLEKLKKTATGWMTTINGKELKVEGQITYYNRYKRQNVVKDLSVELDRLSEESVNNDISSWTKGRSGEALSLLKKRFSHRPVQEKFVCLNCGFETHADEQAALNIARSWLFLRSQEYKKYQTNKTTGNTDKRAFVETWQSFYRKKLKEVWKPAV

SEQ ID NO: 25466 - protein, 978 aa, synthetic construct
  REGION 1..978: note = engineered CasX variant
QEIKRINKIRRRLVKDSNTKKAGKTGPMKTLLVRVMTPDLRERLENLRKKPENIPQPISNTSRANLNKLLTDYTEMKKAILHVYWEEFQKDPVGLMSRVAQPASKKIDQNKLKPEMDEKGNLTTAGFACSQCGQPLFVYKLEQVSEKGKAYTNYFGRCNVAEHEKLILLAQLKPEKDSDEAVTYSLGKFGQRALDFYSIHVTKESTHPVKPLAQIAGNRYASGPVGKALSDACMGTIASFLSKYQDIIIEHQKVVKGNQKRLESLRELAGKENLEYPSVTLPPQPHTKEGVDAYNEVIARVRMWVNLNLWQKLKLSRDDAKPLLRLKGFPSFPLVERQANEVDWWDMVCNVKKLINEKKEDGKVFWQNLAGYKRQEALRPYLSSEEDRKKGKKFARYQLGDLLLHLEKKHGEDWGKVYDEAWERIDKKVEGLSKHIKLEEERRSEDAQSKAALTDWLRAKASFVIEGLKEADKDEFCRCELKLQKWYGDLRGKPFAIEAENSILDISGFSKQYNCAFIWQKDGVKKLNLYLIINYFKGGKLRFKKIKPEAFEANRFYTVINKKSGEIVPMEVNFNFDDPNLIILPLAFGKRQGREFIWNDLLSLETGSLKLANGRVIEKTLYNRRTRQDEPALFVALTFERREVLDSSNIKPMNLIGVDRGENIPAVMALTDPEGCPLSRFKDSLGNPTHILRIGESYKEKQRTIQAKKEVEQRRAGGYSRKYASKAKNLADDMVRNTARDLLYYAVTQDAMLIFENLSRGFGRQGKRTFMAERQYTRMEDWLTAKLAYEGLPSKTYLSKTLAQYTSKTCSNCGFTITSADYDRVLEKLKKTATGWMTTINGKELKVEGQITYYNRYKRQNVVKDLSVELDRLSEESVNNDISSWTKGRSGEALSLLKKRFSHRPVQEKFVCLNCGFETHADEQAALNIARSWLFLRSQEYKKYQTNKTTGNTDKRAFVETWQSFYRKKLKEVWKPAV

SEQ ID NO: 25467 - protein, 978 aa, synthetic construct
  REGION 1..978: note = engineered CasX variant
QEIKRINKIRRRLVKDSNTKKAGKTGPMKTLLVRVMTPDLRERLENLRKKPENIPQPISNTSRANLNKLLTDYTEMKKAILHVYWEEFQKDPVGLMSRVAQPASKKIDQNKLKPEMDEKGNLTTAGFACSQCGQPLFVYKLEQVSEKGKAYTNYFGRCNVAEHEKLILLAQLKPEKDSDEAVTYSLGKFGQRALDFYSIHVTKESTHPVKPLAQIAGNRYASGPVGKALSDACMGTIASFLSKYQDIIIEHQKVVKGNQKRLESLRELAGKENLEYPSVTLPPQPHTKEGVDAYNEVIARVRMWVNLNLWQKLKLSRDDAKPLLRLKGFPSFPLVERQANEVDWWDMVCNVKKLINEKKEDGKVFWQNLAGYKRQEALRPYLSSEEDRKKGKKFARYQLGDLLLHLEKKHGEDWGKVYDEAWERIDKKVEGLSKHIKLEEERRSEDAQSKAALTDWLRAKASFVIEGLKEADKDEFCRCELKLQKWYGDLRGKPFAIEAENSILDISGFSKQYNCAFIWQKDGVKKLNLYLIINYFKGGKLRFKKIKPEAFEANRFYTVINKKSGEIVPMEVNFNFDDPNLIILPLAFGKRQGREFIWNDLLSLETGSLKLANGRVIEKTLYNRRTRQDEPALFVALTFERREVLDSSNIKPMNLIGVDRGENIPAVMALTDPEGCPLSRFKDSLGNPTHILRIGESYKEKQRTIQAKKEVEQRHAGGYSRKYASKAKNLADDMVRNTARDLLYYAVTQDAMLIFENLSRGFGRQGKRTFMAERQYTRMEDWLTAKLAYEGLPSKTYLSKTLAQYTSKTCSNCGFTITSADYDRVLEKLKKTATGWMTTINGKELKVEGQITYYNRYKRQNVVKDLSVELDRLSEESVNNDISSWTKGRSGEALSLLKKRFSHRPVQEKFVCLNCGFETHADEQAALNIARSWLFLRSQEYKKYQTNKTTGNTDKRAFVETWQSFYRKKLKEVWKPAV

SEQ ID NO: 25468 - protein, 978 aa, synthetic construct
  REGION 1..978: note = engineered CasX variant
QEIKRINKIRRRLVKDSNTKKAGKTGPMKTLLVRVMTPDLRERLENLRKKPENIPQPISNTSRANLNKLLTDYTEMKKAILHVYWEEFQKDPVGLMSRVAQPASKKIDQNKLKPEMDEKGNLTTAGFACSQCGQPLFVYKLEQVSEKGKAYTNYFGRCNVAEHEKLILLAQLKPEKDSDEAVTYSLGKFGQRALDFYSIHVTKESTHPVKPLAQIAGNRYASGPVGKALSDACMGTIASFLSKYQDIIIEHQKVVKGNQKRLESLRELAGKENLEYPSVTLPPQPHTKEGVDAYNEVIARVRMWVNLNLWQKLKLSRDDAKPLLRLKGFPSFPLVERQANEVDWWDMVCNVKKLINEKKEDGKVFWQNLAGYKRQEALRPYLSSEEDRKKGKKFARYQLGDLLLHLEKKHGEDWGKVYDEAWERIDKKVEGLSKHIKLEEERRSEDAQSKAALTDWLRAKASFVIEGLKEADKDEFCRCELKLQKWYGDLRGKPFAIEAENSILDISGFSKQYNCAFIWQKDGVKKLNLYLIINYFKGGKLRFKKIKPEAFEANRFYTVINKKSGEIVPMEVNFNFDDPNLIILPLAFGKRQGREFIWNDLLSLETGSLKLANGRVIEKTLYNRRTRQDEPALFVALTFERREVLDSSNIKPMNLIGVDRGENIPAVMALTDPEGCPLSRFKDSLGNPTHILRIGESYKEKQRTIQAKKEVEQHRAGGYSRKYASKAKNLADDMVRNTARDLLYYAVTQDAMLIFENLSRGFGRQGKRTFMAERQYTRMEDWLTAKLAYEGLPSKTYLSKTLAQYTSKTCSNCGFTITSADYDRVLEKLKKTATGWMTTINGKELKVEGQITYYNRYKRQNVVKDLSVELDRLSEESVNNDISSWTKGRSGEALSLLKKRFSHRPVQEKFVCLNCGFETHADEQAALNIARSWLFLRSQEYKKYQTNKTTGNTDKRAFVETWQSFYRKKLKEVWKPAV

SEQ ID NO: 25469 - protein, 978 aa, synthetic construct
  REGION 1..978: note = engineered CasX variant
QEIKRINKIRRRLVKDSNTKKAGKTGPMKTLLVRVMTPDLRERLENLRKKPENIPQPISNTSRANLNKLLTDYTEMKKAILHVYWEEFQKDPVGLMSRVAQPASKKIDQNKLKPEMDEKGNLTTAGFACSQCGQPLFVYKLEQVSEKGKAYTNYFGRCNVAEHEKLILLAQLKPEKDSDEAVTYSLGKFGQRALDFYSIHVTKESTHPVKPLAQIAGNRYASGPVGKALSDACMGTIASFLSKYQDIIIEHQKVVKGNQKRLESLRELAGKENLEYPSVTLPPQPHTKEGVDAYNEVIARVRMWVNLNLWQKLKLSRDDAKPLLRLKGFPSFPLVERQANEVDWWDMVCNVKKLINEKKEDGKVFWQNLAGYKRQEALRPYLSSEEDRKKGKKFARYQLGDLLLHLEKKHGEDWGKVYDEAWERIDKKVEGLSKHIKLEEERRSEDAQSKAALTDWLRAKASFVIEGLKEADKDEFCRCELKLQKWYGDLRGKPFAIEAENSILDISGFSKQYNCAFIWQKDGVKKLNLYLIINYFKGGKLRFKKIKPEAFEANRFYTVINKKSGEIVPMEVNFNFDDPNLIILPLAFGKRQGREFIWNDLLSLETGSLKLANGRVIEKTLYNRRTRQDEPALFVALTFERREVLDSSNIKPMNLIGVDRGENIPAVMALTDPEGCPLSRFKDSLGNPTHILRIGESYKEKQRTIQAKKEVEQHHAGGYSRKYASKAKNLADDMVRNTARDLLYYAVTQDAMLIFENLSRGFGRQGKRTFMAERQYTRMEDWLTAKLAYEGLPSKTYLSKTLAQYTSKTCSNCGFTITSADYDRVLEKLKKTATGWMTTINGKELKVEGQITYYNRYKRQNVVKDLSVELDRLSEESVNNDISSWTKGRSGEALSLLKKRFSHRPVQEKFVCLNCGFETHADEQAALNIARSWLFLRSQEYKKYQTNKTTGNTDKRAFVETWQSFYRKKLKEVWKPAV

SEQ ID NO: 25470 - protein, 978 aa, synthetic construct
  REGION 1..978: note = engineered CasX variant
QEIKRINKIRRRLVKDSNTKKAGKTGPMKTLLVRVMTPDLRERLENLRKKPENIPQPISNTSRANLNKLLTDYTEMKKAILHVYWEEFQKDPVGLMSRVAQPASKKIDQNKLKPEMDEKGNLTTAGFACSQCGQPLFVYKLEQVSEKGKAYTNYFGRCNVAEHEKLILLAQLKPEKDSDEAVTYSLGKFGQRALDFYSIHVTKESTHPVKPLAQIAGNRYASGPVGKALSDACMGTIASFLSKYQDIIIEHQKVVKGNQKRLESLRELAGKENLEYPSVTLPPQPHTKEGVDAYNEVIARVRMWVNLNLWQKLKLSRDDAKPLLRLKGFPSFPLVERQANEVDWWDMVCNVKKLINEKKEDGKVFWQNLAGYKRQEALRPYLSSEEDRKKGKKFARYQLGDLLLHLEKKHGEDWGKVYDEAWERIDKKVEGLSKHIKLEEERRSEDAQSKAALTDWLRAKASFVIEGLKEADKDEFCRCELKLQKWYGDLRGKPFAIEAENSILDISGFSKQYNCAFIWQKDGVKKLNLYLIINYFKGGKLRFKKIKPEAFEANRFYTVINKKSGEIVPMEVNFNFDDPNLIILPLAFGKRQGREFIWNDLLSLETGSLKLANGRVIEKTLYNRRTRQDEPALFVALTFERREVLDSSNIKPMNLIGVDRGENIPAVLALTDPEGCPLSRFKDSLGNPTHILRIGESYKEKQRTQQALKEVEQRRAGGYSRKYASKAKNLADDMVRNTARDLLYYAVTQDAMLIFENLSRGFGRQGKRTFMAERQYTRMEDWLTAKLAYEGLPSKTYLSKTLAQYTSKTCSNCGFTITSADYDRVLEKLKKTATGWMTTINGKELKVEGQITYYNRYKRQNVVKDLSVELDRLSEESVNNDISSWTKGRSGEALSLLKKRFSHRPVQEKFVCLNCGFETHADEQAALNIARSWLFLRSQEYKKYQTNKTTGNTDKRAFVETWQSFYRKKLKEVWKPAV

SEQ ID NO: 25471 - protein, 978 aa, synthetic construct
  REGION 1..978: note = engineered CasX variant
QEIKRINKIRRRLVKDSNTKKAGKTGPMKTLLVRVMTPDLRERLENLRKKPENIPQPISNTSRANLNKLLTDYTEMKKAILHVYWEEFQKDPVGLMSRVAQPASKKIDQNKLKPEMDEKGNLTTAGFACSQCGQPLFVYKLEQVSEKGKAYTNYFGRCNVAEHEKLILLAQLKPEKDSDEAVTYSLGKFGQRALDFYSIHVTKESTHPVKPLAQIAGNRYASGPVGKALSDACMGTIASFLSKYQDIIIEHQKVVKGNQKRLESLRELAGKENLEYPSVTLPPQPHTKEGVDAYNEVIARVRMWVNLNLWQKLKLSRDDAKPLLRLKGFPSFPLVERQANEVDWWDMVCNVKKLINEKKEDGKVFWQNLAGYKRQEALRPYLSSEEDRKKGKKFARYQLGDLLLHLEKKHGEDWGKVYDEAWERIDKKVEGLSKHIKLEEERRSEDAQSKAALTDWLRAKASFVIEGLKEADKDEFCRCELKLQKWYGDLRGKPFAIEAENSILDISGFSKQYNCAFIWQKDGVKKLNLYLIINYFKGGKLRFKKIKPEAFEANRFYTVINKKSGEIVPMEVNFNFDDPNLIILPLAFGKRQGREFIWNDLLSLETGSLKLANGRVIEKTLYNRRTRQDEPALFVALTFERREVLDSSNIKPMNLIGVDRGENIPAVLALTDPEGCPLSRFKDSLGNPTHILRIGESYKEKQRTQQAKKEVEQRRAGGYSRKYASKAKNLADDMVRNTARDLLYYAVTQDAMLIFENLSRGFGRQGKRTFMAERQYTRMEDWLTAKLAYEGLPSKTYLSKTLAQYTSKTCSNCGFTITSADYDRVLEKLKKTATGWMTTINGKELKVEGQITYYNRYKRQNVVKDLSVELDRLSEESVNNDISSWTKGRSGEALSLLKKRFSHRPVQEKFVCLNCGFETHADEQAALNIARSWLFLRSQEYKKYQTNKTTGNTDKRAFVETWQSFYRKKLKEVWKPAV

SEQ ID NO: 25472 - protein, 978 aa, synthetic construct
  REGION 1..978: note = engineered CasX variant
QEIKRINKIRRRLVKDSNTKKAGKTGPMKTLLVRVMTPDLRERLENLRKKPENIPQPISNTSRANLNKLLTDYTEMKKAILHVYWEEFQKDPVGLMSRVAQPASKKIDQNKLKPEMDEKGNLTTAGFACSQCGQPLFVYKLEQVSEKGKAYTNYFGRCNVAEHEKLILLAQLKPEKDSDEAVTYSLGKFGQRALDFYSIHVTKESTHPVKPLAQIAGNRYASGPVGKALSDACMGTIASFLSKYQDIIIEHQKVVKGNQKRLESLRELAGKENLEYPSVTLPPQPHTKEGVDAYNEVIARVRMWVNLNLWQKLKLSRDDAKPLLRLKGFPSFPLVERQANEVDWWDMVCNVKKLINEKKEDGKVFWQNLAGYKRQEALRPYLSSEEDRKKGKKFARYQLGDLLLHLEKKHGEDWGKVYDEAWERIDKKVEGLSKHIKLEEERRSEDAQSKAALTDWLRAKASFVIEGLKEADKDEFCRCELKLQKWYGDLRGKPFAIEAENSILDISGFSKQYNCAFIWQKDGVKKLNLYLIINYFKGGKLRFKKIKPEAFEANRFYTVINKKSGEIVPMEVNFNFDDPNLIILPLAFGKRQGREFIWNDLLSLETGSLKLANGRVIEKTLYNRRTRQDEPALFVALTFERREVLDSSNIKPMNLIGVDRGENIPAVLALTDPEGCPLSRFKDSLGNPTHILRIGESYKEKQRTIQALKEVEQRRAGGYSRKYASKAKNLADDMVRNTARDLLYYAVTQDAMLIFENLSRGFGRQGKRTFMAERQYTRMEDWLTAKLAYEGLPSKTYLSKTLAQYTSKTCSNCGFTITSADYDRVLEKLKKTATGWMTTINGKELKVEGQITYYNRYKRQNVVKDLSVELDRLSEESVNNDISSWTKGRSGEALSLLKKRFSHRPVQEKFVCLNCGFETHADEQAALNIARSWLFLRSQEYKKYQTNKTTGNTDKRAFVETWQSFYRKKLKEVWKPAV

SEQ ID NO: 25473 - protein, 978 aa, synthetic construct
  REGION 1..978: note = engineered CasX variant
QEIKRINKIRRRLVKDSNTKKAGKTGPMKTLLVRVMTPDLRERLENLRKKPENIPQPISNTSRANLNKLLTDYTEMKKAILHVYWEEFQKDPVGLMSRVAQPASKKIDQNKLKPEMDEKGNLTTAGFACSQCGQPLFVYKLEQVSEKGKAYTNYFGRCNVAEHEKLILLAQLKPEKDSDEAVTYSLGKFGQRALDFYSIHVTKESTHPVKPLAQIAGNRYASGPVGKALSDACMGTIASFLSKYQDIIIEHQKVVKGNQKRLESLRELAGKENLEYPSVTLPPQPHTKEGVDAYNEVIARVRMWVNLNLWQKLKLSRDDAKPLLRLKGFPSFPLVERQANEVDWWDMVCNVKKLINEKKEDGKVFWQNLAGYKRQEALRPYLSSEEDRKKGKKFARYQLGDLLLHLEKKHGEDWGKVYDEAWERIDKKVEGLSKHIKLEEERRSEDAQSKAALTDWLRAKASFVIEGLKEADKDEFCRCELKLQKWYGDLRGKPFAIEAENSILDISGFSKQYNCAFIWQKDGVKKLNLYLIINYFKGGKLRFKKIKPEAFEANRFYTVINKKSGEIVPMEVNFNFDDPNLIILPLAFGKRQGREFIWNDLLSLETGSLKLANGRVIEKTLYNRRTRQDEPALFVALTFERREVLDSSNIKPMNLIGVDRGENIPAVLALTDPEGCPLSRFKDSLGNPTHILRIGESYKEKQRTIQAKKEVEQRRAGGYSRKYASKAKNLADDMVRNTARDLLYYAVTQDAMLIFENLSRGFGRQGKRTFMAERQYTRMEDWLTAKLAYEGLPSKTYLSKTLAQYTSKTCSNCGFTITSADYDRVLEKLKKTATGWMTTINGKELKVEGQITYYNRYKRQNVVKDLSVELDRLSEESVNNDISSWTKGRSGEALSLLKKRFSHRPVQEKFVCLNCGFETHADEQAALNIARSWLFLRSQEYKKYQTNKTTGNTDKRAFVETWQSFYRKKLKEVWKPAV

SEQ ID NO: 25474 - protein, 978 aa, synthetic construct
  REGION 1..978: note = engineered CasX variant
QEIKRINKIRRRLVKDSNTKKAGKTGPMKTLLVRVMTPDLRERLENLRKKPENIPQPISNTSRANLNKLLTDYTEMKKAILHVYWEEFQKDPVGLMSRVAQPASKKIDQNKLKPEMDEKGNLTTAGFACSQCGQPLFVYKLEQVSEKGKAYTNYFGRCNVAEHEKLILLAQLKPEKDSDEAVTYSLGKFGQRALDFYSIHVTKESTHPVKPLAQIAGNRYASGPVGKALSDACMGTIASFLSKYQDIIIEHQKVVKGNQKRLESLRELAGKENLEYPSVTLPPQPHTKEGVDAYNEVIARVRMWVNLNLWQKLKLSRDDAKPLLRLKGFPSFPLVERQANEVDWWDMVCNVKKLINEKKEDGKVFWQNLAGYKRQEALRPYLSSEEDRKKGKKFARYQLGDLLLHLEKKHGEDWGKVYDEAWERIDKKVEGLSKHIKLEEERRSEDAQSKAALTDWLRAKASFVIEGLKEADKDEFCRCELKLQKWYGDLRGKPFAIEAENSILDISGFSKQYNCAFIWQKDGVKKLNLYLIINYFKGGKLRFKKIKPEAFEANRFYTVINKKSGEIVPMEVNFNFDDPNLIILPLAFGKRQGREFIWNDLLSLETGSLKLANGRVIEKTLYNRRTRQDEPALFVALTFERREVLDSSNIKPMNLIGVDRGENIPAVLALTDPEGCPLSRFKDSLGNPTHILRIGESYKEKQRTIQAFKEVEQRRAGGYSRKYASKAKNLADDMVRNTARDLLYYAVTQDAMLIFENLSRGFGRQGKRTFMAERQYTRMEDWLTAKLAYEGLPSKTYLSKTLAQYTSKTCSNCGFTITSADYDRVLEKLKKTATGWMTTINGKELKVEGQITYYNRYKRQNVVKDLSVELDRLSEESVNNDISSWTKGRSGEALSLLKKRFSHRPVQEKFVCLNCGFETHADEQAALNIARSWLFLRSQEYKKYQTNKTTGNTDKRAFVETWQSFYRKKLKEVWKPAV

SEQ ID NO: 25475 - protein, 978 aa, synthetic construct
  REGION 1..978: note = engineered CasX variant
QEIKRINKIRRRLVKDSNTKKAGKTGPMKTLLVRVMTPDLRERLENLRKKPENIPQPISNTSRANLNKLLTDYTEMKKAILHVYWEEFQKDPVGLMSRVAQPASKKIDQNKLKPEMDEKGNLTTAGFACSQCGQPLFVYKLEQVSEKGKAYTNYFGRCNVAEHEKLILLAQLKPEKDSDEAVTYSLGKFGQRALDFYSIHVTKESTHPVKPLAQIAGNRYASGPVGKALSDACMGTIASFLSKYQDIIIEHQKVVKGNQKRLESLRELAGKENLEYPSVTLPPQPHTKEGVDAYNEVIARVRMWVNLNLWQKLKLSRDDAKPLLRLKGFPSFPLVERQANEVDWWDMVCNVKKLINEKKEDGKVFWQNLAGYKRQEALRPYLSSEEDRKKGKKFARYQLGDLLLHLEKKHGEDWGKVYDEAWERIDKKVEGLSKHIKLEEERRSEDAQSKAALTDWLRAKASFVIEGLKEADKDEFCRCELKLQKWYGDLRGKPFAIEAENSILDISGFSKQYNCAFIWQKDGVKKLNLYLIINYFKGGKLRFKKIKPEAFEANRFYTVINKKSGEIVPMEVNFNFDDPNLIILPLAFGKRQGREFIWNDLLSLETGSLKLANGRVIEKTLYNRRTRQDEPALFVALTFERREVLDSSNIKPMNLIGVDRGENIPAVLALTDPEGCPLSRFKDSLGNPTHILRIGESYKEKQRTIHAKKEVEQRRAGGYSRKYASKAKNLADDMVRNTARDLLYYAVTQDAMLIFENLSRGFGRQGKRTFMAERQYTRMEDWLTAKLAYEGLPSKTYLSKTLAQYTSKTCSNCGFTITSADYDRVLEKLKKTATGWMTTINGKELKVEGQITYYNRYKRQNVVKDLSVELDRLSEESVNNDISSWTKGRSGEALSLLKKRFSHRPVQEKFVCLNCGFETHADEQAALNIARSWLFLRSQEYKKYQTNKTTGNTDKRAFVETWQSFYRKKLKEVWKPAV

SEQ ID NO: 25476 - protein, 978 aa, synthetic construct
  REGION 1..978: note = engineered CasX variant
QEIKRINKIRRRLVKDSNTKKAGKTGPMKTLLVRVMTPDLRERLENLRKKPENIPQPISNTSRANLNKLLTDYTEMKKAILHVYWEEFQKDPVGLMSRVAQPASKKIDQNKLKPEMDEKGNLTTAGFACSQCGQPLFVYKLEQVSEKGKAYTNYFGRCNVAEHEKLILLAQLKPEKDSDEAVTYSLGKFGQRALDFYSIHVTKESTHPVKPLAQIAGNRYASGPVGKALSDACMGTIASFLSKYQDIIIEHQKVVKGNQKRLESLRELAGKENLEYPSVTLPPQPHTKEGVDAYNEVIARVRMWVNLNLWQKLKLSRDDAKPLLRLKGFPSFPLVERQANEVDWWDMVCNVKKLINEKKEDGKVFWQNLAGYKRQEALRPYLSSEEDRKKGKKFARYQLGDLLLHLEKKHGEDWGKVYDEAWERIDKKVEGLSKHIKLEEERRSEDAQSKAALTDWLRAKASFVIEGLKEADKDEFCRCELKLQKWYGDLRGKPFAIEAENSILDISGFSKQYNCAFIWQKDGVKKLNLYLIINYFKGGKLRFKKIKPEAFEANRFYTVINKKSGEIVPMEVNFNFDDPNLIILPLAFGKRQGREFIWNDLLSLETGSLKLANGRVIEKTLYNRRTRQDEPALFVALTFERREVLDSSNIKPMNLIGVDRGENIPAVLALTDCEGCPLSRFKDSLGNPTHILRIGESYKEKQRTIQAKKEVEQRRAGGYSRKYASKAKNLADDMVRNTARDLLYYAVTQDAMLIFENLSRGFGRQGKRTFMAERQYTRMEDWLTAKLAYEGLPSKTYLSKTLAQYTSKTCSNCGFTITSADYDRVLEKLKKTATGWMTTINGKELKVEGQITYYNRYKRQNVVKDLSVELDRLSEESVNNDISSWTKGRSGEALSLLKKRFSHRPVQEKFVCLNCGFETHADEQAALNIARSWLFLRSQEYKKYQTNKTTGNTDKRAFVETWQSFYRKKLKEVWKPAV

SEQ ID NO: 25477 - protein, 978 aa, synthetic construct
  REGION 1..978: note = engineered CasX variant
QEIKRINKIRRRLVKDSNTKKAGKTGPMKTLLVRVMTPDLRERLENLRKKPENIPQPISNTSRANLNKLLTDYTEMKKAILHVYWEEFQKDPVGLMSRVAQPASKKIDQNKLKPEMDEKGNLTTAGFACSQCGQPLFVYKLEQVSEKGKAYTNYFGRCNVAEHEKLILLAQLKPEKDSDEAVTYSLGKFGQRALDFYSIHVTKESTHPVKPLAQIAGNRYASGPVGKALSDACMGTIASFLSKYQDIIIEHQKVVKGNQKRLESLRELAGKENLEYPSVTLPPQPHTKEGVDAYNEVIARVRMWVNLNLWQKLKLSRDDAKPLLRLKGFPSFPLVERQANEVDWWDMVCNVKKLINEKKEDGKVFWQNLAGYKRQEALRPYLSSEEDRKKGKKFARYQLGDLLLHLEKKHGEDWGKVYDEAWERIDKKVEGLSKHIKLEEERRSEDAQSKAALTDWLRAKASFVIEGLKEADKDEFCRCELKLQKWYGDLRGKPFAIEAENSILDISGFSKQYNCAFIWQKDGVKKLNLYLIINYFKGGKLRFKKIKPEAFEANRFYTVINKKSGEIVPMEVNFNFDDPNLIILPLAFGKRQGREFIWNDLLSLETGSLKLANGRVIEKTLYNRRTRQDEPALFVALTFERREVLDSSNIKPMNLIGVDRGENIPAVISLTDPEGCPLSRFKDSLGNPTHILRIGESYKEKQRTIQAKKEVEQRRAGGYSRKYASKAKNLADDMVRNTARDLLYYAVTQDAMLIFENLSRGFGRQGKRTFMAERQYTRMEDWLTAKLAYEGLPSKTYLSKTLAQYTSKTCSNCGFTITSADYDRVLEKLKKTATGWMTTINGKELKVEGQITYYNRYKRQNVVKDLSVELDRLSEESVNNDISSWTKGRSGEALSLLKKRFSHRPVQEKFVCLNCGFETHADEQAALNIARSWLFLRSQEYKKYQTNKTTGNTDKRAFVETWQSFYRKKLKEVWKPAV

SEQ ID NO: 25478 - protein, 978 aa, synthetic construct
  REGION 1..978: note = engineered CasX variant
QEIKRINKIRRRLVKDSNTKKAGKTGPMKTLLVRVMTPDLRERLENLRKKPENIPQPISNTSRANLNKLLTDYTEMKKAILHVYWEEFQKDPVGLMSRVAQPASKKIDQNKLKPEMDEKGNLTTAGFACSQCGQPLFVYKLEQVSEKGKAYTNYFGRCNVAEHEKLILLAQLKPEKDSDEAVTYSLGKFGQRALDFYSIHVTKESTHPVKPLAQIAGNRYASGPVGKALSDACMGTIASFLSKYQDIIIEHQKVVKGNQKRLESLRELAGKENLEYPSVTLPPQPHTKEGVDAYNEVIARVRMWVNLNLWQKLKLSRDDAKPLLRLKGFPSFPLVERQANEVDWWDMVCNVKKLINEKKEDGKVFWQNLAGYKRQEALRPYLSSEEDRKKGKKFARYQLGDLLLHLEKKHGEDWGKVYDEAWERIDKKVEGLSKHIKLEEERRSEDAQSKAALTDWLRAKASFVIEGLKEADKDEFCRCELKLQKWYGDLRGKPFAIEAENSILDISGFSKQYNCAFIWQKDGVKKLNLYLIINYFKGGKLRFKKIKPEAFEANRFYTVINKKSGEIVPMEVNFNFDDPNLIILPLAFGKRQGREFIWNDLLSLETGSLKLANGRVIEKTLYNRRTRQDEPALFVALTFERREVLDSSNIKPMNLIGVDRGENIPAVISLTDPEGCPLSRFKDSLGNPTHILRIGESYKEKQRTIQAKKEEEQRRAGGYSRKYASKAKNLADDMVRNTARDLLYYAVTQDAMLIFENLSRGFGRQGKRTFMAERQYTRMEDWLTAKLAYEGLPSKTYLSKTLAQYTSKTCSNCGFTITSADYDRVLEKLKKTATGWMTTINGKELKVEGQITYYNRYKRQNVVKDLSVELDRLSEESVNNDISSWTKGRSGEALSLLKKRFSHRPVQEKFVCLNCGFETHADEQAALNIARSWLFLRSQEYKKYQTNKTTGNTDKRAFVETWQSFYRKKLKEVWKPAV

SEQ ID NO: 25479 - protein, 978 aa, synthetic construct
  REGION 1..978: note = engineered CasX variant
QEIKRINKIRRRLVKDSNTKKAGKTGPMKTLLVRVMTPDLRERLENLRKKPENIPQPISNTSRANLNKLLTDYTEMKKAILHVYWEEFQKDPVGLMSRVAQPASKKIDQNKLKPEMDEKGNLTTAGFACSQCGQPLFVYKLEQVSEKGKAYTNYFGRCNVAEHEKLILLAQLKPEKDSDEAVTYSLGKFGQRALDFYSIHVTKESTHPVKPLAQIAGNRYASGPVGKALSDACMGTIASFLSKYQDIIIEHQKVVKGNQKRLESLRELAGKENLEYPSVTLPPQPHTKEGVDAYNEVIARVRMWVNLNLWQKLKLSRDDAKPLLRLKGFPSFPLVERQANEVDWWDMVCNVKKLINEKKEDGKVFWQNLAGYKRQEALRPYLSSEEDRKKGKKFARYQLGDLLLHLEKKHGEDWGKVYDEAWERIDKKVEGLSKHIKLEEERRSEDAQSKAALTDWLRAKASFVIEGLKEADKDEFCRCELKLQKWYGDLRGKPFAIEAENSILDISGFSKQYNCAFIWQKDGVKKLNLYLIINYFKGGKLRFKKIKPEAFEANRFYTVINKKSGEIVPMEVNFNFDDPNLIILPLAFGKRQGREFIWNDLLSLETGSLKLANGRVIEKTLYNRRTRQDEPALFVALTFERREVLDSSNIKPMNLIGVDRGENIPAVISLTDPEGCPLSRFKDSLGNPTHILRIGESYKEKQRHIQAKKEVEQRRAGGYSRKYASKAKNLADDMVRNTARDLLYYAVTQDAMLIFENLSRGFGRQGKRTFMAERQYTRMEDWLTAKLAYEGLPSKTYLSKTLAQYTSKTCSNCGFTITSADYDRVLEKLKKTATGWMTTINGKELKVEGQITYYNRYKRQNVVKDLSVELDRLSEESVNNDISSWTKGRSGEALSLLKKRFSHRPVQEKFVCLNCGFETHADEQAALNIARSWLFLRSQEYKKYQTNKTTGNTDKRAFVETWQSFYRKKLKEVWKPAV

SEQ ID NO: 25480 - protein, 978 aa, synthetic construct
  REGION 1..978: note = engineered CasX variant
QEIKRINKIRRRLVKDSNTKKAGKTGPMKTLLVRVMTPDLRERLENLRKKPENIPQPISNTSRANLNKLLTDYTEMKKAILHVYWEEFQKDPVGLMSRVAQPASKKIDQNKLKPEMDEKGNLTTAGFACSQCGQPLFVYKLEQVSEKGKAYTNYFGRCNVAEHEKLILLAQLKPEKDSDEAVTYSLGKFGQRALDFYSIHVTKESTHPVKPLAQIAGNRYASGPVGKALSDACMGTIASFLSKYQDIIIEHQKVVKGNQKRLESLRELAGKENLEYPSVTLPPQPHTKEGVDAYNEVIARVRMWVNLNLWQKLKLSRDDAKPLLRLKGFPSFPLVERQANEVDWWDMVCNVKKLINEKKEDGKVFWQNLAGYKRQEALRPYLSSEEDRKKGKKFARYQLGDLLLHLEKKHGEDWGKVYDEAWERIDKKVEGLSKHIKLEEERRSEDAQSKAALTDWLRAKASFVIEGLKEADKDEFCRCELKLQKWYGDLRGKPFAIEAENSILDISGFSKQYNCAFIWQKDGVKKLNLYLIINYFKGGKLRFKKIKPEAFEANRFYTVINKKSGEIVPMEVNFNFDDPNLIILPLAFGKRQGREFIWNDLLSLETGSLKLANGRVIEKTLYNRRTRQDEPALFVALTFERREVLDSSNIKPMNLIGVDRGENIPAVICLTDPLGCPLSRFKDSLGNPTHILRIGESYKNKQRTIQAKKEVEQRRAGGYSRKYASKAKNLADDMVRNTARDLLYYAVTQDAMLIFENLSRGFGRQGKRTFMAERQYTRMEDWLTAKLAYEGLPSKTYLSKTLAQYTSKTCSNCGFTITSADYDRVLEKLKKTATGWMTTINGKELKVEGQITYYNRYKRQNVVKDLSVELDRLSEESVNNDISSWTKGRSGEALSLLKKRFSHRPVQEKFVCLNCGFETHADEQAALNIARSWLFLRSQEYKKYQTNKTTGNTDKRAFVETWQSFYRKKLKEVWKPAV

SEQ ID NO: 25481 - protein, 978 aa, synthetic construct
  REGION 1..978: note = engineered CasX variant
QEIKRINKIRRRLVKDSNTKKAGKTGPMKTLLVRVMTPDLRERLENLRKKPENIPQPISNTSRANLNKLLTDYTEMKKAILHVYWEEFQKDPVGLMSRVAQPASKKIDQNKLKPEMDEKGNLTTAGFACSQCGQPLFVYKLEQVSEKGKAYTNYFGRCNVAEHEKLILLAQLKPEKDSDEAVTYSLGKFGQRALDFYSIHVTKESTHPVKPLAQIAGNRYASGPVGKALSDACMGTIASFLSKYQDIIIEHQKVVKGNQKRLESLRELAGKENLEYPSVTLPPQPHTKEGVDAYNEVIARVRMWVNLNLWQKLKLSRDDAKPLLRLKGFPSFPLVERQANEVDWWDMVCNVKKLINEKKEDGKVFWQNLAGYKRQEALRPYLSSEEDRKKGKKFARYQLGDLLLHLEKKHGEDWGKVYDEAWERIDKKVEGLSKHIKLEEERRSEDAQSKAALTDWLRAKASFVIEGLKEADKDEFCRCELKLQKWYGDLRGKPFAIEAENSILDISGFSKQYNCAFIWQKDGVKKLNLYLIINYFKGGKLRFKKIKPEAFEANRFYTVINKKSGEIVPMEVNFNFDDPNLIILPLAFGKRQGREFIWNDLLSLETGSLKLANGRVIEKTLYNRRTRQDEPALFVALTFERREVLDSSNIKPMNLIGVDRGENIPAVICLTDPLGCPLSRFKDSLGNPTHILRIGESYKEKQRTIQAKKEVEQRRAGGYSRKYASKAKNLADDMVRNTARDLLYYAVTQDAMLIFENLSRGFGRQGKRTFMAERQYTRMEDWLTAKLAYEGLPSKTYLSKTLAQYTSKTCSNCGFTITSADYDRVLEKLKKTATGWMTTINGKELKVEGQITYYNRYKRQNVVKDLSVELDRLSEESVNNDISSWTKGRSGEALSLLKKRFSHRPVQEKFVCLNCGFETHADEQAALNIARSWLFLRSQEYKKYQTNKTTGNTDKRAFVETWQSFYRKKLKEVWKPAV

SEQ ID NO: 25482 - protein, 978 aa, synthetic construct
  REGION 1..978: note = engineered CasX variant
QEIKRINKIRRRLVKDSNTKKAGKTGPMKTLLVRVMTPDLRERLENLRKKPENIPQPISNTSRANLNKLLTDYTEMKKAILHVYWEEFQKDPVGLMSRVAQPASKKIDQNKLKPEMDEKGNLTTAGFACSQCGQPLFVYKLEQVSEKGKAYTNYFGRCNVAEHEKLILLAQLKPEKDSDEAVTYSLGKFGQRALDFYSIHVTKESTHPVKPLAQIAGNRYASGPVGKALSDACMGTIASFLSKYQDIIIEHQKVVKGNQKRLESLRELAGKENLEYPSVTLPPQPHTKEGVDAYNEVIARVRMWVNLNLWQKLKLSRDDAKPLLRLKGFPSFPLVERQANEVDWWDMVCNVKKLINEKKEDGKVFWQNLAGYKRQEALRPYLSSEEDRKKGKKFARYQLGDLLLHLEKKHGEDWGKVYDEAWERIDKKVEGLSKHIKLEEERRSEDAQSKAALTDWLRAKASFVIEGLKEADKDEFCRCELKLQKWYGDLRGKPFAIEAENSILDISGFSKQYNCAFIWQKDGVKKLNLYLIINYFKGGKLRFKKIKPEAFEANRFYTVINKKSGEIVPMEVNFNFDDPNLIILPLAFGKRQGREFIWNDLLSLETGSLKLANGRVIEKTLYNRRTRQDEPALFVALTFERREVLDSSNIKPMNLIGVDRGENIPAVICLTDPEGCPLSRFKDSLGNPTHILRIGESYKNKQRTIQAKKEVEQRRAGGYSRKYASKAKNLADDMVRNTARDLLYYAVTQDAMLIFENLSRGFGRQGKRTFMAERQYTRMEDWLTAKLAYEGLPSKTYLSKTLAQYTSKTCSNCGFTITSADYDRVLEKLKKTATGWMTTINGKELKVEGQITYYNRYKRQNVVKDLSVELDRLSEESVNNDISSWTKGRSGEALSLLKKRFSHRPVQEKFVCLNCGFETHADEQAALNIARSWLFLRSQEYKKYQTNKTTGNTDKRAFVETWQSFYRKKLKEVWKPAV

SEQ ID NO: 25483 - protein, 978 aa, synthetic construct
  REGION 1..978: note = engineered CasX variant
QEIKRINKIRRRLVKDSNTKKAGKTGPMKTLLVRVMTPDLRERLENLRKKPENIPQPISNTSRANLNKLLTDYTEMKKAILHVYWEEFQKDPVGLMSRVAQPASKKIDQNKLKPEMDEKGNLTTAGFACSQCGQPLFVYKLEQVSEKGKAYTNYFGRCNVAEHEKLILLAQLKPEKDSDEAVTYSLGKFGQRALDFYSIHVTKESTHPVKPLAQIAGNRYASGPVGKALSDACMGTIASFLSKYQDIIIEHQKVVKGNQKRLESLRELAGKENLEYPSVTLPPQPHTKEGVDAYNEVIARVRMWVNLNLWQKLKLSRDDAKPLLRLKGFPSFPLVERQANEVDWWDMVCNVKKLINEKKEDGKVFWQNLAGYKRQEALRPYLSSEEDRKKGKKFARYQLGDLLLHLEKKHGEDWGKVYDEAWERIDKKVEGLSKHIKLEEERRSEDAQSKAALTDWLRAKASFVIEGLKEADKDEFCRCELKLQKWYGDLRGKPFAIEAENSILDISGFSKQYNCAFIWQKDGVKKLNLYLIINYFKGGKLRFKKIKPEAFEANRFYTVINKKSGEIVPMEVNFNFDDPNLIILPLAFGKRQGREFIWNDLLSLETGSLKLANGRVIEKTLYNRRTRQDEPALFVALTFERREVLDSSNIKPMNLIGVDRGENIPAVICLTDPEGCPLSRFKDSLGNPTHILRIGESYKEKQRTYQAKKEVEQRRAGGYSRKYASKAKNLADDMVRNTARDLLYYAVTQDAMLIFENLSRGFGRQGKRTFMAERQYTRMEDWLTAKLAYEGLPSKTYLSKTLAQYTSKTCSNCGFTITSADYDRVLEKLKKTATGWMTTINGKELKVEGQITYYNRYKRQNVVKDLSVELDRLSEESVNNDISSWTKGRSGEALSLLKKRFSHRPVQEKFVCLNCGFETHADEQAALNIARSWLFLRSQEYKKYQTNKTTGNTDKRAFVETWQSFYRKKLKEVWKPAV

SEQ ID NO: 25484 - protein, 978 aa, synthetic construct
  REGION 1..978: note = engineered CasX variant
QEIKRINKIRRRLVKDSNTKKAGKTGPMKTLLVRVMTPDLRERLENLRKKPENIPQPISNTSRANLNKLLTDYTEMKKAILHVYWEEFQKDPVGLMSRVAQPASKKIDQNKLKPEMDEKGNLTTAGFACSQCGQPLFVYKLEQVSEKGKAYTNYFGRCNVAEHEKLILLAQLKPEKDSDEAVTYSLGKFGQRALDFYSIHVTKESTHPVKPLAQIAGNRYASGPVGKALSDACMGTIASFLSKYQDIIIEHQKVVKGNQKRLESLRELAGKENLEYPSVTLPPQPHTKEGVDAYNEVIARVRMWVNLNLWQKLKLSRDDAKPLLRLKGFPSFPLVERQANEVDWWDMVCNVKKLINEKKEDGKVFWQNLAGYKRQEALRPYLSSEEDRKKGKKFARYQLGDLLLHLEKKHGEDWGKVYDEAWERIDKKVEGLSKHIKLEEERRSEDAQSKAALTDWLRAKASFVIEGLKEADKDEFCRCELKLQKWYGDLRGKPFAIEAENSILDISGFSKQYNCAFIWQKDGVKKLNLYLIINYFKGGKLRFKKIKPEAFEANRFYTVINKKSGEIVPMEVNFNFDDPNLIILPLAFGKRQGREFIWNDLLSLETGSLKLANGRVIEKTLYNRRTRQDEPALFVALTFERREVLDSSNIKPMNLIGVDRGENIPAVICLTDPEGCPLSRFKDSLGNPTHILRIGESYKEKQRTIQAKKNVEQYRAGGYSRKYASKAKNLADDMVRNTARDLLYYAVTQDAMLIFENLSRGFGRQGKRTFMAERQYTRMEDWLTAKLAYEGLPSKTYLSKTLAQYTSKTCSNCGFTITSADYDRVLEKLKKTATGWMTTINGKELKVEGQITYYNRYKRQNVVKDLSVELDRLSEESVNNDISSWTKGRSGEALSLLKKRFSHRPVQEKFVCLNCGFETHADEQAALNIARSWLFLRSQEYKKYQTNKTTGNTDKRAFVETWQSFYRKKLKEVWKPAV

SEQ ID NO: 25485 - protein, 978 aa, synthetic construct
  REGION 1..978: note = engineered CasX variant
QEIKRINKIRRRLVKDSNTKKAGKTGPMKTLLVRVMTPDLRERLENLRKKPENIPQPISNTSRANLNKLLTDYTEMKKAILHVYWEEFQKDPVGLMSRVAQPASKKIDQNKLKPEMDEKGNLTTAGFACSQCGQPLFVYKLEQVSEKGKAYTNYFGRCNVAEHEKLILLAQLKPEKDSDEAVTYSLGKFGQRALDFYSIHVTKESTHPVKPLAQIAGNRYASGPVGKALSDACMGTIASFLSKYQDIIIEHQKVVKGNQKRLESLRELAGKENLEYPSVTLPPQPHTKEGVDAYNEVIARVRMWVNLNLWQKLKLSRDDAKPLLRLKGFPSFPLVERQANEVDWWDMVCNVKKLINEKKEDGKVFWQNLAGYKRQEALRPYLSSEEDRKKGKKFARYQLGDLLLHLEKKHGEDWGKVYDEAWERIDKKVEGLSKHIKLEEERRSEDAQSKAALTDWLRAKASFVIEGLKEADKDEFCRCELKLQKWYGDLRGKPFAIEAENSILDISGFSKQYNCAFIWQKDGVKKLNLYLIINYFKGGKLRFKKIKPEAFEANRFYTVINKKSGEIVPMEVNFNFDDPNLIILPLAFGKRQGREFIWNDLLSLETGSLKLANGRVIEKTLYNRRTRQDEPALFVALTFERREVLDSSNIKPMNLIGVDRGENIPAVICLTDPEGCPLSRFKDSLGNPTHILRIGESYKEKQRTIQAKKNVEQRRAGGYSRKYASKAKNLADDMVRNTARDLLYYAVTQDAMLIFENLSRGFGRQGKRTFMAERQYTRMEDWLTAKLAYEGLPSKTYLSKTLAQYTSKTCSNCGFTITSADYDRVLEKLKKTATGWMTTINGKELKVEGQITYYNRYKRQNVVKDLSVELDRLSEESVNNDISSWTKGRSGEALSLLKKRFSHRPVQEKFVCLNCGFETHADEQAALNIARSWLFLRSQEYKKYQTNKTTGNTDKRAFVETWQSFYRKKLKEVWKPAV

SEQ ID NO: 25486 - protein, 978 aa, synthetic construct
  REGION 1..978: note = engineered CasX variant
QEIKRINKIRRRLVKDSNTKKAGKTGPMKTLLVRVMTPDLRERLENLRKKPENIPQPISNTSRANLNKLLTDYTEMKKAILHVYWEEFQKDPVGLMSRVAQPASKKIDQNKLKPEMDEKGNLTTAGFACSQCGQPLFVYKLEQVSEKGKAYTNYFGRCNVAEHEKLILLAQLKPEKDSDEAVTYSLGKFGQRALDFYSIHVTKESTHPVKPLAQIAGNRYASGPVGKALSDACMGTIASFLSKYQDIIIEHQKVVKGNQKRLESLRELAGKENLEYPSVTLPPQPHTKEGVDAYNEVIARVRMWVNLNLWQKLKLSRDDAKPLLRLKGFPSFPLVERQANEVDWWDMVCNVKKLINEKKEDGKVFWQNLAGYKRQEALRPYLSSEEDRKKGKKFARYQLGDLLLHLEKKHGEDWGKVYDEAWERIDKKVEGLSKHIKLEEERRSEDAQSKAALTDWLRAKASFVIEGLKEADKDEFCRCELKLQKWYGDLRGKPFAIEAENSILDISGFSKQYNCAFIWQKDGVKKLNLYLIINYFKGGKLRFKKIKPEAFEANRFYTVINKKSGEIVPMEVNFNFDDPNLIILPLAFGKRQGREFIWNDLLSLETGSLKLANGRVIEKTLYNRRTRQDEPALFVALTFERREVLDSSNIKPMNLIGVDRGENIPAVICLTDPEGCPLSRFKDSLGNPTHILRIGESYKEKQRTIQAKKEVEQYRAGGYSRKYASKAKNLADDMVRNTARDLLYYAVTQDAMLIFENLSRGFGRQGKRTFMAERQYTRMEDWLTAKLAYEGLPSKTYLSKTLAQYTSKTCSNCGFTITSADYDRVLEKLKKTATGWMTTINGKELKVEGQITYYNRYKRQNVVKDLSVELDRLSEESVNNDISSWTKGRSGEALSLLKKRFSHRPVQEKFVCLNCGFETHADEQAALNIARSWLFLRSQEYKKYQTNKTTGNTDKRAFVETWQSFYRKKLKEVWKPAV

SEQ ID NO: 25487 - protein, 978 aa, synthetic construct
  REGION 1..978: note = engineered CasX variant
QEIKRINKIRRRLVKDSNTKKAGKTGPMKTLLVRVMTPDLRERLENLRKKPENIPQPISNTSRANLNKLLTDYTEMKKAILHVYWEEFQKDPVGLMSRVAQPASKKIDQNKLKPEMDEKGNLTTAGFACSQCGQPLFVYKLEQVSEKGKAYTNYFGRCNVAEHEKLILLAQLKPEKDSDEAVTYSLGKFGQRALDFYSIHVTKESTHPVKPLAQIAGNRYASGPVGKALSDACMGTIASFLSKYQDIIIEHQKVVKGNQKRLESLRELAGKENLEYPSVTLPPQPHTKEGVDAYNEVIARVRMWVNLNLWQKLKLSRDDAKPLLRLKGFPSFPLVERQANEVDWWDMVCNVKKLINEKKEDGKVFWQNLAGYKRQEALRPYLSSEEDRKKGKKFARYQLGDLLLHLEKKHGEDWGKVYDEAWERIDKKVEGLSKHIKLEEERRSEDAQSKAALTDWLRAKASFVIEGLKEADKDEFCRCELKLQKWYGDLRGKPFAIEAENSILDISGFSKQYNCAFIWQKDGVKKLNLYLIINYFKGGKLRFKKIKPEAFEANRFYTVINKKSGEIVPMEVNFNFDDPNLIILPLAFGKRQGREFIWNDLLSLETGSLKLANGRVIEKTLYNRRTRQDEPALFVALTFERREVLDSSNIKPMNLIGVDRGENIPAVICLTDPEGCPLSRFKDSLGNPTHILRIGESYKEKQRTIQAKKEVEQRRAGGYSRKYASKAKNLADDMVRNTARDLLYYAVTQDAMLIFENLSRGFGRQGKRTFMAERQYTRMEDWLTAKLAYEGLPSKTYLSKTLAQYTSKTCSNCGFTITSADYDRVLEKLKKTATGWMTTINGKELKVEGQITYYNRYKRQNVVKDLSVELDRLSEESVNNDISSWTKGRSGEALSLLKKRFSHRPVQEKFVCLNCGFETHADEQAALNIARSWLFLRSQEYKKYQTNKTTGNTDKRAFVETWQSFYRKKLKEVWKPAV

SEQ ID NO: 25488 - protein, 978 aa, synthetic construct
  REGION 1..978: note = engineered CasX variant
QEIKRINKIRRRLVKDSNTKKAGKTGPMKTLLVRVMTPDLRERLENLRKKPENIPQPISNTSRANLNKLLTDYTEMKKAILHVYWEEFQKDPVGLMSRVAQPASKKIDQNKLKPEMDEKGNLTTAGFACSQCGQPLFVYKLEQVSEKGKAYTNYFGRCNVAEHEKLILLAQLKPEKDSDEAVTYSLGKFGQRALDFYSIHVTKESTHPVKPLAQIAGNRYASGPVGKALSDACMGTIASFLSKYQDIIIEHQKVVKGNQKRLESLRELAGKENLEYPSVTLPPQPHTKEGVDAYNEVIARVRMWVNLNLWQKLKLSRDDAKPLLRLKGFPSFPLVERQANEVDWWDMVCNVKKLINEKKEDGKVFWQNLAGYKRQEALRPYLSSEEDRKKGKKFARYQLGDLLLHLEKKHGEDWGKVYDEAWERIDKKVEGLSKHIKLEEERRSEDAQSKAALTDWLRAKASFVIEGLKEADKDEFCRCELKLQKWYGDLRGKPFAIEAENSILDISGFSKQYNCAFIWQKDGVKKLNLYLIINYFKGGKLRFKKIKPEAFEANRFYTVINKKSGEIVPMEVNFNFDDPNLIILPLAFGKRQGREFIWNDLLSLETGSLKLANGRVIEKTLYNRRTRQDEPALFVALTFERREVLDSSNIKPMNLIGVDRGENIPAVICLTDPEGCPLSRFKDSLGNPTHILRIGESYKEKQRTIQAKKEVAQRRAGGYSRKYASKAKNLADDMVRNTARDLLYYAVTQDAMLIFENLSRGFGRQGKRTFMAERQYTRMEDWLTAKLAYEGLPSKTYLSKTLAQYTSKTCSNCGFTITSADYDRVLEKLKKTATGWMTTINGKELKVEGQITYYNRYKRQNVVKDLSVELDRLSEESVNNDISSWTKGRSGEALSLLKKRFSHRPVQEKFVCLNCGFETHADEQAALNIARSWLFLRSQEYKKYQTNKTTGNTDKRAFVETWQSFYRKKLKEVWKPAV

SEQ ID NO: 25489 - protein, 978 aa, synthetic construct
  REGION 1..978: note = engineered CasX variant
QEIKRINKIRRRLVKDSNTKKAGKTGPMKTLLVRVMTPDLRERLENLRKKPENIPQPISNTSRANLNKLLTDYTEMKKAILHVYWEEFQKDPVGLMSRVAQPASKKIDQNKLKPEMDEKGNLTTAGFACSQCGQPLFVYKLEQVSEKGKAYTNYFGRCNVAEHEKLILLAQLKPEKDSDEAVTYSLGKFGQRALDFYSIHVTKESTHPVKPLAQIAGNRYASGPVGKALSDACMGTIASFLSKYQDIIIEHQKVVKGNQKRLESLRELAGKENLEYPSVTLPPQPHTKEGVDAYNEVIARVRMWVNLNLWQKLKLSRDDAKPLLRLKGFPSFPLVERQANEVDWWDMVCNVKKLINEKKEDGKVFWQNLAGYKRQEALRPYLSSEEDRKKGKKFARYQLGDLLLHLEKKHGEDWGKVYDEAWERIDKKVEGLSKHIKLEEERRSEDAQSKAALTDWLRAKASFVIEGLKEADKDEFCRCELKLQKWYGDLRGKPFAIEAENSILDISGFSKQYNCAFIWQKDGVKKLNLYLIINYFKGGKLRFKKIKPEAFEANRFYTVINKKSGEIVPMEVNFNFDDPNLIILPLAFGKRQGREFIWNDLLSLETGSLKLANGRVIEKTLYNRRTRQDEPALFVALTFERREVLDSSNIKPMNLIGVDRGENIPAVICLTDPEGCPLSRFKDSLGNPTHILRIGESYKEKQRTFQAKKEVEQRRAGGYSRKYASKAKNLADDMVRNTARDLLYYAVTQDAMLIFENLSRGFGRQGKRTFMAERQYTRMEDWLTAKLAYEGLPSKTYLSKTLAQYTSKTCSNCGFTITSADYDRVLEKLKKTATGWMTTINGKELKVEGQITYYNRYKRQNVVKDLSVELDRLSEESVNNDISSWTKGRSGEALSLLKKRFSHRPVQEKFVCLNCGFETHADEQAALNIARSWLFLRSQEYKKYQTNKTTGNTDKRAFVETWQSFYRKKLKEVWKPAV

SEQ ID NO: 25490 - protein, 978 aa, synthetic construct
  REGION 1..978: note = engineered CasX variant
QEIKRINKIRRRLVKDSNTKKAGKTGPMKTLLVRVMTPDLRERLENLRKKPENIPQPISNTSRANLNKLLTDYTEMKKAILHVYWEEFQKDPVGLMSRVAQPASKKIDQNKLKPEMDEKGNLTTAGFACSQCGQPLFVYKLEQVSEKGKAYTNYFGRCNVAEHEKLILLAQLKPEKDSDEAVTYSLGKFGQRALDFYSIHVTKESTHPVKPLAQIAGNRYASGPVGKALSDACMGTIASFLSKYQDIIIEHQKVVKGNQKRLESLRELAGKENLEYPSVTLPPQPHTKEGVDAYNEVIARVRMWVNLNLWQKLKLSRDDAKPLLRLKGFPSFPLVERQANEVDWWDMVCNVKKLINEKKEDGKVFWQNLAGYKRQEALRPYLSSEEDRKKGKKFARYQLGDLLLHLEKKHGEDWGKVYDEAWERIDKKVEGLSKHIKLEEERRSEDAQSKAALTDWLRAKASFVIEGLKEADKDEFCRCELKLQKWYGDLRGKPFAIEAENSILDISGFSKQYNCAFIWQKDGVKKLNLYLIINYFKGGKLRFKKIKPEAFEANRFYTVINKKSGEIVPMEVNFNFDDPNLIILPLAFGKRQGREFIWNDLLSLETGSLKLANGRVIEKTLYNRRTRQDEPALFVALTFERREVLDSSNIKPMNLIGVDRGENIPAVICLTDPEGCPLSRFKDSLGNNTHILRIGESYKEKQRTIQAKKEVEQRRAGGYSRKYASKAKNLADDMVRNTARDLLYYAVTQDAMLIFENLSRGFGRQGKRTFMAERQYTRMEDWLTAKLAYEGLPSKTYLSKTLAQYTSKTCSNCGFTITSADYDRVLEKLKKTATGWMTTINGKELKVEGQITYYNRYKRQNVVKDLSVELDRLSEESVNNDISSWTKGRSGEALSLLKKRFSHRPVQEKFVCLNCGFETHADEQAALNIARSWLFLRSQEYKKYQTNKTTGNTDKRAFVETWQSFYRKKLKEVWKPAV

SEQ ID NO: 25491 - protein, 978 aa, synthetic construct
  REGION 1..978: note = engineered CasX variant
QEIKRINKIRRRLVKDSNTKKAGKTGPMKTLLVRVMTPDLRERLENLRKKPENIPQPISNTSRANLNKLLTDYTEMKKAILHVYWEEFQKDPVGLMSRVAQPASKKIDQNKLKPEMDEKGNLTTAGFACSQCGQPLFVYKLEQVSEKGKAYTNYFGRCNVAEHEKLILLAQLKPEKDSDEAVTYSLGKFGQRALDFYSIHVTKESTHPVKPLAQIAGNRYASGPVGKALSDACMGTIASFLSKYQDIIIEHQKVVKGNQKRLESLRELAGKENLEYPSVTLPPQPHTKEGVDAYNEVIARVRMWVNLNLWQKLKLSRDDAKPLLRLKGFPSFPLVERQANEVDWWDMVCNVKKLINEKKEDGKVFWQNLAGYKRQEALRPYLSSEEDRKKGKKFARYQLGDLLLHLEKKHGEDWGKVYDEAWERIDKKVEGLSKHIKLEEERRSEDAQSKAALTDWLRAKASFVIEGLKEADKDEFCRCELKLQKWYGDLRGKPFAIEAENSILDISGFSKQYNCAFIWQKDGVKKLNLYLIINYFKGGKLRFKKIKPEAFEANRFYTVINKKSGEIVPMEVNFNFDDPNLIILPLAFGKRQGREFIWNDLLSLETGSLKLANGRVIEKTLYNRRTRQDEPALFVALTFERREVLDSSNIKPMNLIGVDRGENIPAVICLTDPEGCPLSCFKDSLGNPTHILRIGESYKEKQRTYQAKKEVEQRRAGGYSRKYASKAKNLADDMVRNTARDLLYYAVTQDAMLIFENLSRGFGRQGKRTFMAERQYTRMEDWLTAKLAYEGLPSKTYLSKTLAQYTSKTCSNCGFTITSADYDRVLEKLKKTATGWMTTINGKELKVEGQITYYNRYKRQNVVKDLSVELDRLSEESVNNDISSWTKGRSGEALSLLKKRFSHRPVQEKFVCLNCGFETHADEQAALNIARSWLFLRSQEYKKYQTNKTTGNTDKRAFVETWQSFYRKKLKEVWKPAV

SEQ ID NO: 25492 - protein, 978 aa, synthetic construct
  REGION 1..978: note = engineered CasX variant
QEIKRINKIRRRLVKDSNTKKAGKTGPMKTLLVRVMTPDLRERLENLRKKPENIPQPISNTSRANLNKLLTDYTEMKKAILHVYWEEFQKDPVGLMSRVAQPASKKIDQNKLKPEMDEKGNLTTAGFACSQCGQPLFVYKLEQVSEKGKAYTNYFGRCNVAEHEKLILLAQLKPEKDSDEAVTYSLGKFGQRALDFYSIHVTKESTHPVKPLAQIAGNRYASGPVGKALSDACMGTIASFLSKYQDIIIEHQKVVKGNQKRLESLRELAGKENLEYPSVTLPPQPHTKEGVDAYNEVIARVRMWVNLNLWQKLKLSRDDAKPLLRLKGFPSFPLVERQANEVDWWDMVCNVKKLINEKKEDGKVFWQNLAGYKRQEALRPYLSSEEDRKKGKKFARYQLGDLLLHLEKKHGEDWGKVYDEAWERIDKKVEGLSKHIKLEEERRSEDAQSKAALTDWLRAKASFVIEGLKEADKDEFCRCELKLQKWYGDLRGKPFAIEAENSILDISGFSKQYNCAFIWQKDGVKKLNLYLIINYFKGGKLRFKKIKPEAFEANRFYTVINKKSGEIVPMEVNFNFDDPNLIILPLAFGKRQGREFIWNDLLSLETGSLKLANGRVIEKTLYNRRTRQDEPALFVALTFERREVLDSSNIKPMNLIGVDRGENIPAVICLTDPEGCPLSCFKDSLGNPTHILRIGESYKEKQRTIQAKKEVEQRRAGGYSRKYASKAKNLADDMVRNTARDLLYYAVTQDAMLIFENLSRGFGRQGKRTFMAERQYTRMEDWLTAKLAYEGLPSKTYLSKTLAQYTSKTCSNCGFTITSADYDRVLEKLKKTATGWMTTINGKELKVEGQITYYNRYKRQNVVKDLSVELDRLSEESVNNDISSWTKGRSGEALSLLKKRFSHRPVQEKFVCLNCGFETHADEQAALNIARSWLFLRSQEYKKYQTNKTTGNTDKRAFVETWQSFYRKKLKEVWKPAV

SEQ ID NO: 25493 - protein, 978 aa, synthetic construct
  REGION 1..978: note = engineered CasX variant
QEIKRINKIRRRLVKDSNTKKAGKTGPMKTLLVRVMTPDLRERLENLRKKPENIPQPISNTSRANLNKLLTDYTEMKKAILHVYWEEFQKDPVGLMSRVAQPASKKIDQNKLKPEMDEKGNLTTAGFACSQCGQPLFVYKLEQVSEKGKAYTNYFGRCNVAEHEKLILLAQLKPEKDSDEAVTYSLGKFGQRALDFYSIHVTKESTHPVKPLAQIAGNRYASGPVGKALSDACMGTIASFLSKYQDIIIEHQKVVKGNQKRLESLRELAGKENLEYPSVTLPPQPHTKEGVDAYNEVIARVRMWVNLNLWQKLKLSRDDAKPLLRLKGFPSFPLVERQANEVDWWDMVCNVKKLINEKKEDGKVFWQNLAGYKRQEALRPYLSSEEDRKKGKKFARYQLGDLLLHLEKKHGEDWGKVYDEAWERIDKKVEGLSKHIKLEEERRSEDAQSKAALTDWLRAKASFVIEGLKEADKDEFCRCELKLQKWYGDLRGKPFAIEAENSILDISGFSKQYNCAFIWQKDGVKKLNLYLIINYFKGGKLRFKKIKPEAFEANRFYTVINKKSGEIVPMEVNFNFDDPNLIILPLAFGKRQGREFIWNDLLSLETGSLKLANGRVIEKTLYNRRTRQDEPALFVALTFERREVLDSSNIKPMNLIGVDRGENIPAVICLTDPDGCPLSRFKDSLGNPTHILRIGESYKEKQRTIQAKKEVEQRRAGGYSRKYASKAKNLADDMVRNTARDLLYYAVTQDAMLIFENLSRGFGRQGKRTFMAERQYTRMEDWLTAKLAYEGLPSKTYLSKTLAQYTSKTCSNCGFTITSADYDRVLEKLKKTATGWMTTINGKELKVEGQITYYNRYKRQNVVKDLSVELDRLSEESVNNDISSWTKGRSGEALSLLKKRFSHRPVQEKFVCLNCGFETHADEQAALNIARSWLFLRSQEYKKYQTNKTTGNTDKRAFVETWQSFYRKKLKEVWKPAV

SEQ ID NO: 25494 - protein, 978 aa, synthetic construct
  REGION 1..978: note = engineered CasX variant
QEIKRINKIRRRLVKDSNTKKAGKTGPMKTLLVRVMTPDLRERLENLRKKPENIPQPISNTSRANLNKLLTDYTEMKKAILHVYWEEFQKDPVGLMSRVAQPASKKIDQNKLKPEMDEKGNLTTAGFACSQCGQPLFVYKLEQVSEKGKAYTNYFGRCNVAEHEKLILLAQLKPEKDSDEAVTYSLGKFGQRALDFYSIHVTKESTHPVKPLAQIAGNRYASGPVGKALSDACMGTIASFLSKYQDIIIEHQKVVKGNQKRLESLRELAGKENLEYPSVTLPPQPHTKEGVDAYNEVIARVRMWVNLNLWQKLKLSRDDAKPLLRLKGFPSFPLVERQANEVDWWDMVCNVKKLINEKKEDGKVFWQNLAGYKRQEALRPYLSSEEDRKKGKKFARYQLGDLLLHLEKKHGEDWGKVYDEAWERIDKKVEGLSKHIKLEEERRSEDAQSKAALTDWLRAKASFVIEGLKEADKDEFCRCELKLQKWYGDLRGKPFAIEAENSILDISGFSKQYNCAFIWQKDGVKKLNLYLIINYFKGGKLRFKKIKPEAFEANRFYTVINKKSGEIVPMEVNFNFDDPNLIILPLAFGKRQGREFIWNDLLSLETGSLKLANGRVIEKTLYNRRTRQDEPALFVALTFERREVLDSSNIKPMNLIGVDRGENIPAVICLTDPDGCPLSRFKDSLGNPTHILRIGESYKEKQRTFQAKKEVEQRRAGGYSRKYASKAKNLADDMVRNTARDLLYYAVTQDAMLIFENLSRGFGRQGKRTFMAERQYTRMEDWLTAKLAYEGLPSKTYLSKTLAQYTSKTCSNCGFTITSADYDRVLEKLKKTATGWMTTINGKELKVEGQITYYNRYKRQNVVKDLSVELDRLSEESVNNDISSWTKGRSGEALSLLKKRFSHRPVQEKFVCLNCGFETHADEQAALNIARSWLFLRSQEYKKYQTNKTTGNTDKRAFVETWQSFYRKKLKEVWKPAV

SEQ ID NO: 25495 - protein, 978 aa, synthetic construct
  REGION 1..978: note = engineered CasX variant
QEIKRINKIRRRLVKDSNTKKAGKTGPMKTLLVRVMTPDLRERLENLRKKPENIPQPISNTSRANLNKLLTDYTEMKKAILHVYWEEFQKDPVGLMSRVAQPASKKIDQNKLKPEMDEKGNLTTAGFACSQCGQPLFVYKLEQVSEKGKAYTNYFGRCNVAEHEKLILLAQLKPEKDSDEAVTYSLGKFGQRALDFYSIHVTKESTHPVKPLAQIAGNRYASGPVGKALSDACMGTIASFLSKYQDIIIEHQKVVKGNQKRLESLRELAGKENLEYPSVTLPPQPHTKEGVDAYNEVIARVRMWVNLNLWQKLKLSRDDAKPLLRLKGFPSFPLVERQANEVDWWDMVCNVKKLINEKKEDGKVFWQNLAGYKRQEALRPYLSSEEDRKKGKKFARYQLGDLLLHLEKKHGEDWGKVYDEAWERIDKKVEGLSKHIKLEEERRSEDAQSKAALTDWLRAKASFVIEGLKEADKDEFCRCELKLQKWYGDLRGKPFAIEAENSILDISGFSKQYNCAFIWQKDGVKKLNLYLIINYFKGGKLRFKKIKPEAFEANRFYTVINKKSGEIVPMEVNFNFDDPNLIILPLAFGKRQGREFIWNDLLSLETGSLKLANGRVIEKTLYNRRTRQDEPALFVALTFERREVLDSSNIKPMNLIGVDRGENIPAVIAMTDPEGMPLSRFKDSLGNPTHILRIGESYKEKQRTIQAKKEVEQRRAGGYSRKYASKAKNLADDMVRNTARDLLYYAVTQDAMLIFENLSRGFGRQGKRTFMAERQYTRMEDWLTAKLAYEGLPSKTYLSKTLAQYTSKTCSNCGFTITSADYDRVLEKLKKTATGWMTTINGKELKVEGQITYYNRYKRQNVVKDLSVELDRLSEESVNNDISSWTKGRSGEALSLLKKRFSHRPVQEKFVCLNCGFETHADEQAALNIARSWLFLRSQEYKKYQTNKTTGNTDKRAFVETWQSFYRKKLKEVWKPAV

SEQ ID NO: 25496 - protein, 978 aa, synthetic construct
  REGION 1..978: note = engineered CasX variant
QEIKRINKIRRRLVKDSNTKKAGKTGPMKTLLVRVMTPDLRERLENLRKKPENIPQPISNTSRANLNKLLTDYTEMKKAILHVYWEEFQKDPVGLMSRVAQPASKKIDQNKLKPEMDEKGNLTTAGFACSQCGQPLFVYKLEQVSEKGKAYTNYFGRCNVAEHEKLILLAQLKPEKDSDEAVTYSLGKFGQRALDFYSIHVTKESTHPVKPLAQIAGNRYASGPVGKALSDACMGTIASFLSKYQDIIIEHQKVVKGNQKRLESLRELAGKENLEYPSVTLPPQPHTKEGVDAYNEVIARVRMWVNLNLWQKLKLSRDDAKPLLRLKGFPSFPLVERQANEVDWWDMVCNVKKLINEKKEDGKVFWQNLAGYKRQEALRPYLSSEEDRKKGKKFARYQLGDLLLHLEKKHGEDWGKVYDEAWERIDKKVEGLSKHIKLEEERRSEDAQSKAALTDWLRAKASFVIEGLKEADKDEFCRCELKLQKWYGDLRGKPFAIEAENSILDISGFSKQYNCAFIWQKDGVKKLNLYLIINYFKGGKLRFKKIKPEAFEANRFYTVINKKSGEIVPMEVNFNFDDPNLIILPLAFGKRQGREFIWNDLLSLETGSLKLANGRVIEKTLYNRRTRQDEPALFVALTFERREVLDSSNIKPMNLIGVDRGENIPAVIAMTDPEGCPLSRFKDSNGNPTHILRIGESYKEKQRTIQAKKEVEQRRAGGYSRKYASKAKNLADDMVRNTARDLLYYAVTQDAMLIFENLSRGFGRQGKRTFMAERQYTRMEDWLTAKLAYEGLPSKTYLSKTLAQYTSKTCSNCGFTITSADYDRVLEKLKKTATGWMTTINGKELKVEGQITYYNRYKRQNVVKDLSVELDRLSEESVNNDISSWTKGRSGEALSLLKKRFSHRPVQEKFVCLNCGFETHADEQAALNIARSWLFLRSQEYKKYQTNKTTGNTDKRAFVETWQSFYRKKLKEVWKPAV

SEQ ID NO: 25497 - protein, 978 aa, synthetic construct
  REGION 1..978: note = engineered CasX variant
QEIKRINKIRRRLVKDSNTKKAGKTGPMKTLLVRVMTPDLRERLENLRKKPENIPQPISNTSRANLNKLLTDYTEMKKAILHVYWEEFQKDPVGLMSRVAQPASKKIDQNKLKPEMDEKGNLTTAGFACSQCGQPLFVYKLEQVSEKGKAYTNYFGRCNVAEHEKLILLAQLKPEKDSDEAVTYSLGKFGQRALDFYSIHVTKESTHPVKPLAQIAGNRYASGPVGKALSDACMGTIASFLSKYQDIIIEHQKVVKGNQKRLESLRELAGKENLEYPSVTLPPQPHTKEGVDAYNEVIARVRMWVNLNLWQKLKLSRDDAKPLLRLKGFPSFPLVERQANEVDWWDMVCNVKKLINEKKEDGKVFWQNLAGYKRQEALRPYLSSEEDRKKGKKFARYQLGDLLLHLEKKHGEDWGKVYDEAWERIDKKVEGLSKHIKLEEERRSEDAQSKAALTDWLRAKASFVIEGLKEADKDEFCRCELKLQKWYGDLRGKPFAIEAENSILDISGFSKQYNCAFIWQKDGVKKLNLYLIINYFKGGKLRFKKIKPEAFEANRFYTVINKKSGEIVPMEVNFNFDDPNLIILPLAFGKRQGREFIWNDLLSLETGSLKLANGRVIEKTLYNRRTRQDEPALFVALTFERREVLDSSNIKPMNLIGVDRGENIPAVIAMTDPEGCPLSRFKDSLGNPTHILRIGESYKEKQRTIQAKKEVEQRRRGGYSRKYASKAKNLADDMVRNTARDLLYYAVTQDAMLIFENLSRGFGRQGKRTFMAERQYTRMEDWLTAKLAYEGLPSKTYLSKTLAQYTSKTCSNCGFTITSADYDRVLEKLKKTATGWMTTINGKELKVEGQITYYNRYKRQNVVKDLSVELDRLSEESVNNDISSWTKGRSGEALSLLKKRFSHRPVQEKFVCLNCGFETHADEQAALNIARSWLFLRSQEYKKYQTNKTTGNTDKRAFVETWQSFYRKKLKEVWKPAV

SEQ ID NO: 25498 - protein, 978 aa, synthetic construct
  REGION 1..978: note = engineered CasX variant
QEIKRINKIRRRLVKDSNTKKAGKTGPMKTLLVRVMTPDLRERLENLRKKPENIPQPISNTSRANLNKLLTDYTEMKKAILHVYWEEFQKDPVGLMSRVAQPASKKIDQNKLKPEMDEKGNLTTAGFACSQCGQPLFVYKLEQVSEKGKAYTNYFGRCNVAEHEKLILLAQLKPEKDSDEAVTYSLGKFGQRALDFYSIHVTKESTHPVKPLAQIAGNRYASGPVGKALSDACMGTIASFLSKYQDIIIEHQKVVKGNQKRLESLRELAGKENLEYPSVTLPPQPHTKEGVDAYNEVIARVRMWVNLNLWQKLKLSRDDAKPLLRLKGFPSFPLVERQANEVDWWDMVCNVKKLINEKKEDGKVFWQNLAGYKRQEALRPYLSSEEDRKKGKKFARYQLGDLLLHLEKKHGEDWGKVYDEAWERIDKKVEGLSKHIKLEEERRSEDAQSKAALTDWLRAKASFVIEGLKEADKDEFCRCELKLQKWYGDLRGKPFAIEAENSILDISGFSKQYNCAFIWQKDGVKKLNLYLIINYFKGGKLRFKKIKPEAFEANRFYTVINKKSGEIVPMEVNFNFDDPNLIILPLAFGKRQGREFIWNDLLSLETGSLKLANGRVIEKTLYNRRTRQDEPALFVALTFERREVLDSSNIKPMNLIGVDRGENIPAVIAMTDPEGCPLSRFKDSLGNPTHILRIGESYKEKQRTIQAKKEVEQRRAGGYSRKYASKAKNLADDMVRNTARDLLYYAVTQDAMLIFENLSRGFGRQGKRTFMAERQYTRMEDWLTAKLAYEGLPSKTYLSKTLAQYTSKTCSNCGFTITSADYDRVLEKLKKTATGWMTTINGKELKVEGQITYYNRYKRQNVVKDLSVELDRLSEESVNNDISSWTKGRSGEALSLLKKRFSHRPVQEKFVCLNCGFETHADEQAALNIARSWLFLRSQEYKKYQTNKTTGNTDKRAFVETWQSFYRKKLKEVWKPAV

SEQ ID NO: 25499 - protein, 978 aa, synthetic construct
  REGION 1..978: note = engineered CasX variant
QEIKRINKIRRRLVKDSNTKKAGKTGPMKTLLVRVMTPDLRERLENLRKKPENIPQPISNTSRANLNKLLTDYTEMKKAILHVYWEEFQKDPVGLMSRVAQPASKKIDQNKLKPEMDEKGNLTTAGFACSQCGQPLFVYKLEQVSEKGKAYTNYFGRCNVAEHEKLILLAQLKPEKDSDEAVTYSLGKFGQRALDFYSIHVTKESTHPVKPLAQIAGNRYASGPVGKALSDACMGTIASFLSKYQDIIIEHQKVVKGNQKRLESLRELAGKENLEYPSVTLPPQPHTKEGVDAYNEVIARVRMWVNLNLWQKLKLSRDDAKPLLRLKGFPSFPLVERQANEVDWWDMVCNVKKLINEKKEDGKVFWQNLAGYKRQEALRPYLSSEEDRKKGKKFARYQLGDLLLHLEKKHGEDWGKVYDEAWERIDKKVEGLSKHIKLEEERRSEDAQSKAALTDWLRAKASFVIEGLKEADKDEFCRCELKLQKWYGDLRGKPFAIEAENSILDISGFSKQYNCAFIWQKDGVKKLNLYLIINYFKGGKLRFKKIKPEAFEANRFYTVINKKSGEIVPMEVNFNFDDPNLIILPLAFGKRQGREFIWNDLLSLETGSLKLANGRVIEKTLYNRRTRQDEPALFVALTFERREVLDSSNIKPMNLIGVDRGENIPAVIAMTDPEGCPLSRFKDSLGNPTHILRIGESYKEKQRTIQAKKEVEQRRAFGYSRKYASKAKNLADDMVRNTARDLLYYAVTQDAMLIFENLSRGFGRQGKRTFMAERQYTRMEDWLTAKLAYEGLPSKTYLSKTLAQYTSKTCSNCGFTITSADYDRVLEKLKKTATGWMTTINGKELKVEGQITYYNRYKRQNVVKDLSVELDRLSEESVNNDISSWTKGRSGEALSLLKKRFSHRPVQEKFVCLNCGFETHADEQAALNIARSWLFLRSQEYKKYQTNKTTGNTDKRAFVETWQSFYRKKLKEVWKPAV

SEQ ID NO: 25500 - protein, 978 aa, synthetic construct
  REGION 1..978: note = engineered CasX variant
QEIKRINKIRRRLVKDSNTKKAGKTGPMKTLLVRVMTPDLRERLENLRKKPENIPQPISNTSRANLNKLLTDYTEMKKAILHVYWEEFQKDPVGLMSRVAQPASKKIDQNKLKPEMDEKGNLTTAGFACSQCGQPLFVYKLEQVSEKGKAYTNYFGRCNVAEHEKLILLAQLKPEKDSDEAVTYSLGKFGQRALDFYSIHVTKESTHPVKPLAQIAGNRYASGPVGKALSDACMGTIASFLSKYQDIIIEHQKVVKGNQKRLESLRELAGKENLEYPSVTLPPQPHTKEGVDAYNEVIARVRMWVNLNLWQKLKLSRDDAKPLLRLKGFPSFPLVERQANEVDWWDMVCNVKKLINEKKEDGKVFWQNLAGYKRQEALRPYLSSEEDRKKGKKFARYQLGDLLLHLEKKHGEDWGKVYDEAWERIDKKVEGLSKHIKLEEERRSEDAQSKAALTDWLRAKASFVIEGLKEADKDEFCRCELKLQKWYGDLRGKPFAIEAENSILDISGFSKQYNCAFIWQKDGVKKLNLYLIINYFKGGKLRFKKIKPEAFEANRFYTVINKKSGEIVPMEVNFNFDDPNLIILPLAFGKRQGREFIWNDLLSLETGSLKLANGRVIEKTLYNRRTRQDEPALFVALTFERREVLDSSNIKPMNLIGVDRGENIPAVIAMTDPEGCPLSRFKDSLGNPTHILRIGESYKEKQRTIQAKKEVECRRAGGYSRKYASKAKNLADDMVRNTARDLLYYAVTQDAMLIFENLSRGFGRQGKRTFMAERQYTRMEDWLTAKLAYEGLPSKTYLSKTLAQYTSKTCSNCGFTITSADYDRVLEKLKKTATGWMTTINGKELKVEGQITYYNRYKRQNVVKDLSVELDRLSEESVNNDISSWTKGRSGEALSLLKKRFSHRPVQEKFVCLNCGFETHADEQAALNIARSWLFLRSQEYKKYQTNKTTGNTDKRAFVETWQSFYRKKLKEVWKPAV

SEQ ID NO: 25501 - protein, 978 aa, synthetic construct
  REGION 1..978: note = engineered CasX variant
QEIKRINKIRRRLVKDSNTKKAGKTGPMKTLLVRVMTPDLRERLENLRKKPENIPQPISNTSRANLNKLLTDYTEMKKAILHVYWEEFQKDPVGLMSRVAQPASKKIDQNKLKPEMDEKGNLTTAGFACSQCGQPLFVYKLEQVSEKGKAYTNYFGRCNVAEHEKLILLAQLKPEKDSDEAVTYSLGKFGQRALDFYSIHVTKESTHPVKPLAQIAGNRYASGPVGKALSDACMGTIASFLSKYQDIIIEHQKVVKGNQKRLESLRELAGKENLEYPSVTLPPQPHTKEGVDAYNEVIARVRMWVNLNLWQKLKLSRDDAKPLLRLKGFPSFPLVERQANEVDWWDMVCNVKKLINEKKEDGKVFWQNLAGYKRQEALRPYLSSEEDRKKGKKFARYQLGDLLLHLEKKHGEDWGKVYDEAWERIDKKVEGLSKHIKLEEERRSEDAQSKAALTDWLRAKASFVIEGLKEADKDEFCRCELKLQKWYGDLRGKPFAIEAENSILDISGFSKQYNCAFIWQKDGVKKLNLYLIINYFKGGKLRFKKIKPEAFEANRFYTVINKKSGEIVPMEVNFNFDDPNLIILPLAFGKRQGREFIWNDLLSLETGSLKLANGRVIEKTLYNRRTRQDEPALFVALTFERREVLDSSNIKPMNLIGVDRGENIPAVIAMTDPEGCPLSRFCDSNGNPTHILRIGESYKEKQRTIQAKKEVEQRRAGGYSRKYASKAKNLADDMVRNTARDLLYYAVTQDAMLIFENLSRGFGRQGKRTFMAERQYTRMEDWLTAKLAYEGLPSKTYLSKTLAQYTSKTCSNCGFTITSADYDRVLEKLKKTATGWMTTINGKELKVEGQITYYNRYKRQNVVKDLSVELDRLSEESVNNDISSWTKGRSGEALSLLKKRFSHRPVQEKFVCLNCGFETHADEQAALNIARSWLFLRSQEYKKYQTNKTTGNTDKRAFVETWQSFYRKKLKEVWKPAV

SEQ ID NO: 25502 - protein, 978 aa, synthetic construct
  REGION 1..978: note = engineered CasX variant
QEIKRINKIRRRLVKDSNTKKAGKTGPMKTLLVRVMTPDLRERLENLRKKPENIPQPISNTSRANLNKLLTDYTEMKKAILHVYWEEFQKDPVGLMSRVAQPASKKIDQNKLKPEMDEKGNLTTAGFACSQCGQPLFVYKLEQVSEKGKAYTNYFGRCNVAEHEKLILLAQLKPEKDSDEAVTYSLGKFGQRALDFYSIHVTKESTHPVKPLAQIAGNRYASGPVGKALSDACMGTIASFLSKYQDIIIEHQKVVKGNQKRLESLRELAGKENLEYPSVTLPPQPHTKEGVDAYNEVIARVRMWVNLNLWQKLKLSRDDAKPLLRLKGFPSFPLVERQANEVDWWDMVCNVKKLINEKKEDGKVFWQNLAGYKRQEALRPYLSSEEDRKKGKKFARYQLGDLLLHLEKKHGEDWGKVYDEAWERIDKKVEGLSKHIKLEEERRSEDAQSKAALTDWLRAKASFVIEGLKEADKDEFCRCELKLQKWYGDLRGKPFAIEAENSILDISGFSKQYNCAFIWQKDGVKKLNLYLIINYFKGGKLRFKKIKPEAFEANRFYTVINKKSGEIVPMEVNFNFDDPNLIILPLAFGKRQGREFIWNDLLSLETGSLKLANGRVIEKTLYNRRTRQDEPALFVALTFERREVLDSSNIKPMNLIGVDRGENIPAVIAMTDPEGCPLSRFCDSLGNPTHILRIGESYKEKQRTIQAKKEVEQRRAGGYSRKYASKAKNLADDMVRNTARDLLYYAVTQDAMLIFENLSRGFGRQGKRTFMAERQYTRMEDWLTAKLAYEGLPSKTYLSKTLAQYTSKTCSNCGFTITSADYDRVLEKLKKTATGWMTTINGKELKVEGQITYYNRYKRQNVVKDLSVELDRLSEESVNNDISSWTKGRSGEALSLLKKRFSHRPVQEKFVCLNCGFETHADEQAALNIARSWLFLRSQEYKKYQTNKTTGNTDKRAFVETWQSFYRKKLKEVWKPAV

SEQ ID NO: 25503 - protein, 978 aa, synthetic construct
  REGION 1..978: note = engineered CasX variant
QEIKRINKIRRRLVKDSNTKKAGKTGPMKTLLVRVMTPDLRERLENLRKKPENIPQPISNTSRANLNKLLTDYTEMKKAILHVYWEEFQKDPVGLMSRVAQPASKKIDQNKLKPEMDEKGNLTTAGFACSQCGQPLFVYKLEQVSEKGKAYTNYFGRCNVAEHEKLILLAQLKPEKDSDEAVTYSLGKFGQRALDFYSIHVTKESTHPVKPLAQIAGNRYASGPVGKALSDACMGTIASFLSKYQDIIIEHQKVVKGNQKRLESLRELAGKENLEYPSVTLPPQPHTKEGVDAYNEVIARVRMWVNLNLWQKLKLSRDDAKPLLRLKGFPSFPLVERQANEVDWWDMVCNVKKLINEKKEDGKVFWQNLAGYKRQEALRPYLSSEEDRKKGKKFARYQLGDLLLHLEKKHGEDWGKVYDEAWERIDKKVEGLSKHIKLEEERRSEDAQSKAALTDWLRAKASFVIEGLKEADKDEFCRCELKLQKWYGDLRGKPFAIEAENSILDISGFSKQYNCAFIWQKDGVKKLNLYLIINYFKGGKLRFKKIKPEAFEANRFYTVINKKSGEIVPMEVNFNFDDPNLIILPLAFGKRQGREFIWNDLLSLETGSLKLANGRVIEKTLYNRRTRQDEPALFVALTFERREVLDSSNIKPMNLIGVDRGENIPAVIAMTDPEGCPLSCFKDSLGNPTHILRIGESYKEKQRTIQAKKEVEQRRAGGYSRKYASKAKNLADDMVRNTARDLLYYAVTQDAMLIFENLSRGFGRQGKRTFMAERQYTRMEDWLTAKLAYEGLPSKTYLSKTLAQYTSKTCSNCGFTITSADYDRVLEKLKKTATGWMTTINGKELKVEGQITYYNRYKRQNVVKDLSVELDRLSEESVNNDISSWTKGRSGEALSLLKKRFSHRPVQEKFVCLNCGFETHADEQAALNIARSWLFLRSQEYKKYQTNKTTGNTDKRAFVETWQSFYRKKLKEVWKPAV

SEQ ID NO: 25504 - protein, 978 aa, synthetic construct
  REGION 1..978: note = engineered CasX variant
QEIKRINKIRRRLVKDSNTKKAGKTGPMKTLLVRVMTPDLRERLENLRKKPENIPQPISNTSRANLNKLLTDYTEMKKAILHVYWEEFQKDPVGLMSRVAQPASKKIDQNKLKPEMDEKGNLTTAGFACSQCGQPLFVYKLEQVSEKGKAYTNYFGRCNVAEHEKLILLAQLKPEKDSDEAVTYSLGKFGQRALDFYSIHVTKESTHPVKPLAQIAGNRYASGPVGKALSDACMGTIASFLSKYQDIIIEHQKVVKGNQKRLESLRELAGKENLEYPSVTLPPQPHTKEGVDAYNEVIARVRMWVNLNLWQKLKLSRDDAKPLLRLKGFPSFPLVERQANEVDWWDMVCNVKKLINEKKEDGKVFWQNLAGYKRQEALRPYLSSEEDRKKGKKFARYQLGDLLLHLEKKHGEDWGKVYDEAWERIDKKVEGLSKHIKLEEERRSEDAQSKAALTDWLRAKASFVIEGLKEADKDEFCRCELKLQKWYGDLRGKPFAIEAENSILDISGFSKQYNCAFIWQKDGVKKLNLYLIINYFKGGKLRFKKIKPEAFEANRFYTVINKKSGEIVPMEVNFNFDDPNLIILPLAFGKRQGREFIWNDLLSLETGSLKLANGRVIEKTLYNRRTRQDEPALFVALTFERREVLDSSNIKPMNLIGVDRGENIPAVIALTTPEGCPLSRFKDSLGNPTHILRIGESYKEKQRTIQAVKEVEQRRAGGYSRKYASKAKNLADDMVRNTARDLLYYAVTQDAMLIFENLSRGFGRQGKRTFMAERQYTRMEDWLTAKLAYEGLPSKTYLSKTLAQYTSKTCSNCGFTITSADYDRVLEKLKKTATGWMTTINGKELKVEGQITYYNRYKRQNVVKDLSVELDRLSEESVNNDISSWTKGRSGEALSLLKKRFSHRPVQEKFVCLNCGFETHADEQAALNIARSWLFLRSQEYKKYQTNKTTGNTDKRAFVETWQSFYRKKLKEVWKPAV

SEQ ID NO: 25505 - protein, 978 aa, synthetic construct
  REGION 1..978: note = engineered CasX variant
QEIKRINKIRRRLVKDSNTKKAGKTGPMKTLLVRVMTPDLRERLENLRKKPENIPQPISNTSRANLNKLLTDYTEMKKAILHVYWEEFQKDPVGLMSRVAQPASKKIDQNKLKPEMDEKGNLTTAGFACSQCGQPLFVYKLEQVSEKGKAYTNYFGRCNVAEHEKLILLAQLKPEKDSDEAVTYSLGKFGQRALDFYSIHVTKESTHPVKPLAQIAGNRYASGPVGKALSDACMGTIASFLSKYQDIIIEHQKVVKGNQKRLESLRELAGKENLEYPSVTLPPQPHTKEGVDAYNEVIARVRMWVNLNLWQKLKLSRDDAKPLLRLKGFPSFPLVERQANEVDWWDMVCNVKKLINEKKEDGKVFWQNLAGYKRQEALRPYLSSEEDRKKGKKFARYQLGDLLLHLEKKHGEDWGKVYDEAWERIDKKVEGLSKHIKLEEERRSEDAQSKAALTDWLRAKASFVIEGLKEADKDEFCRCELKLQKWYGDLRGKPFAIEAENSILDISGFSKQYNCAFIWQKDGVKKLNLYLIINYFKGGKLRFKKIKPEAFEANRFYTVINKKSGEIVPMEVNFNFDDPNLIILPLAFGKRQGREFIWNDLLSLETGSLKLANGRVIEKTLYNRRTRQDEPALFVALTFERREVLDSSNIKPMNLIGVDRGENIPAVIALTTPEGCPLSRFKDSLGNPTHILRIGESYKEKQRTIQAKKEVEQRRAGGYSRKYASKAKNLADDMVRNTARDLLYYAVTQDAMLIFENLSRGFGRQGKRTFMAERQYTRMEDWLTAKLAYEGLPSKTYLSKTLAQYTSKTCSNCGFTITSADYDRVLEKLKKTATGWMTTINGKELKVEGQITYYNRYKRQNVVKDLSVELDRLSEESVNNDISSWTKGRSGEALSLLKKRFSHRPVQEKFVCLNCGFETHADEQAALNIARSWLFLRSQEYKKYQTNKTTGNTDKRAFVETWQSFYRKKLKEVWKPAV

SEQ ID NO: 25506 - protein, 978 aa, synthetic construct
  REGION 1..978: note = engineered CasX variant
QEIKRINKIRRRLVKDSNTKKAGKTGPMKTLLVRVMTPDLRERLENLRKKPENIPQPISNTSRANLNKLLTDYTEMKKAILHVYWEEFQKDPVGLMSRVAQPASKKIDQNKLKPEMDEKGNLTTAGFACSQCGQPLFVYKLEQVSEKGKAYTNYFGRCNVAEHEKLILLAQLKPEKDSDEAVTYSLGKFGQRALDFYSIHVTKESTHPVKPLAQIAGNRYASGPVGKALSDACMGTIASFLSKYQDIIIEHQKVVKGNQKRLESLRELAGKENLEYPSVTLPPQPHTKEGVDAYNEVIARVRMWVNLNLWQKLKLSRDDAKPLLRLKGFPSFPLVERQANEVDWWDMVCNVKKLINEKKEDGKVFWQNLAGYKRQEALRPYLSSEEDRKKGKKFARYQLGDLLLHLEKKHGEDWGKVYDEAWERIDKKVEGLSKHIKLEEERRSEDAQSKAALTDWLRAKASFVIEGLKEADKDEFCRCELKLQKWYGDLRGKPFAIEAENSILDISGFSKQYNCAFIWQKDGVKKLNLYLIINYFKGGKLRFKKIKPEAFEANRFYTVINKKSGEIVPMEVNFNFDDPNLIILPLAFGKRQGREFIWNDLLSLETGSLKLANGRVIEKTLYNRRTRQDEPALFVALTFERREVLDSSNIKPMNLIGVDRGENIPAVIALTTPEGCPLSRFKDSLGNPTHILRIGEHYKEKQRTIQAKKEVEQRRAGGYSRKYASKAKNLADDMVRNTARDLLYYAVTQDAMLIFENLSRGFGRQGKRTFMAERQYTRMEDWLTAKLAYEGLPSKTYLSKTLAQYTSKTCSNCGFTITSADYDRVLEKLKKTATGWMTTINGKELKVEGQITYYNRYKRQNVVKDLSVELDRLSEESVNNDISSWTKGRSGEALSLLKKRFSHRPVQEKFVCLNCGFETHADEQAALNIARSWLFLRSQEYKKYQTNKTTGNTDKRAFVETWQSFYRKKLKEVWKPAV

SEQ ID NO: 25507 - protein, 978 aa, synthetic construct
  REGION 1..978: note = engineered CasX variant
QEIKRINKIRRRLVKDSNTKKAGKTGPMKTLLVRVMTPDLRERLENLRKKPENIPQPISNTSRANLNKLLTDYTEMKKAILHVYWEEFQKDPVGLMSRVAQPASKKIDQNKLKPEMDEKGNLTTAGFACSQCGQPLFVYKLEQVSEKGKAYTNYFGRCNVAEHEKLILLAQLKPEKDSDEAVTYSLGKFGQRALDFYSIHVTKESTHPVKPLAQIAGNRYASGPVGKALSDACMGTIASFLSKYQDIIIEHQKVVKGNQKRLESLRELAGKENLEYPSVTLPPQPHTKEGVDAYNEVIARVRMWVNLNLWQKLKLSRDDAKPLLRLKGFPSFPLVERQANEVDWWDMVCNVKKLINEKKEDGKVFWQNLAGYKRQEALRPYLSSEEDRKKGKKFARYQLGDLLLHLEKKHGEDWGKVYDEAWERIDKKVEGLSKHIKLEEERRSEDAQSKAALTDWLRAKASFVIEGLKEADKDEFCRCELKLQKWYGDLRGKPFAIEAENSILDISGFSKQYNCAFIWQKDGVKKLNLYLIINYFKGGKLRFKKIKPEAFEANRFYTVINKKSGEIVPMEVNFNFDDPNLIILPLAFGKRQGREFIWNDLLSLETGSLKLANGRVIEKTLYNRRTRQDEPALFVALTFERREVLDSSNIKPMNLIGVDRGENIPAVIALTTPEGCPLSRFKDSLGHPTHILRIGESYKEKQRTIQAVKEVEQRRAGGYSRKYASKAKNLADDMVRNTARDLLYYAVTQDAMLIFENLSRGFGRQGKRTFMAERQYTRMEDWLTAKLAYEGLPSKTYLSKTLAQYTSKTCSNCGFTITSADYDRVLEKLKKTATGWMTTINGKELKVEGQITYYNRYKRQNVVKDLSVELDRLSEESVNNDISSWTKGRSGEALSLLKKRFSHRPVQEKFVCLNCGFETHADEQAALNIARSWLFLRSQEYKKYQTNKTTGNTDKRAFVETWQSFYRKKLKEVWKPAV

SEQ ID NO: 25508 - protein, 978 aa, synthetic construct
  REGION 1..978: note = engineered CasX variant
QEIKRINKIRRRLVKDSNTKKAGKTGPMKTLLVRVMTPDLRERLENLRKKPENIPQPISNTSRANLNKLLTDYTEMKKAILHVYWEEFQKDPVGLMSRVAQPASKKIDQNKLKPEMDEKGNLTTAGFACSQCGQPLFVYKLEQVSEKGKAYTNYFGRCNVAEHEKLILLAQLKPEKDSDEAVTYSLGKFGQRALDFYSIHVTKESTHPVKPLAQIAGNRYASGPVGKALSDACMGTIASFLSKYQDIIIEHQKVVKGNQKRLESLRELAGKENLEYPSVTLPPQPHTKEGVDAYNEVIARVRMWVNLNLWQKLKLSRDDAKPLLRLKGFPSFPLVERQANEVDWWDMVCNVKKLINEKKEDGKVFWQNLAGYKRQEALRPYLSSEEDRKKGKKFARYQLGDLLLHLEKKHGEDWGKVYDEAWERIDKKVEGLSKHIKLEEERRSEDAQSKAALTDWLRAKASFVIEGLKEADKDEFCRCELKLQKWYGDLRGKPFAIEAENSILDISGFSKQYNCAFIWQKDGVKKLNLYLIINYFKGGKLRFKKIKPEAFEANRFYTVINKKSGEIVPMEVNFNFDDPNLIILPLAFGKRQGREFIWNDLLSLETGSLKLANGRVIEKTLYNRRTRQDEPALFVALTFERREVLDSSNIKPMNLIGVDRGENIPAVIALTTPEGCPLSRFKDSGGNPTHILRIGESYKEKQRTIQAKKEVEQRRAGGYSRKYASKAKNLADDMVRNTARDLLYYAVTQDAMLIFENLSRGFGRQGKRTFMAERQYTRMEDWLTAKLAYEGLPSKTYLSKTLAQYTSKTCSNCGFTITSADYDRVLEKLKKTATGWMTTINGKELKVEGQITYYNRYKRQNVVKDLSVELDRLSEESVNNDISSWTKGRSGEALSLLKKRFSHRPVQEKFVCLNCGFETHADEQAALNIARSWLFLRSQEYKKYQTNKTTGNTDKRAFVETWQSFYRKKLKEVWKPAV

SEQ ID NO: 25509 - protein, 978 aa, synthetic construct
  REGION 1..978: note = engineered CasX variant
QEIKRINKIRRRLVKDSNTKKAGKTGPMKTLLVRVMTPDLRERLENLRKKPENIPQPISNTSRANLNKLLTDYTEMKKAILHVYWEEFQKDPVGLMSRVAQPASKKIDQNKLKPEMDEKGNLTTAGFACSQCGQPLFVYKLEQVSEKGKAYTNYFGRCNVAEHEKLILLAQLKPEKDSDEAVTYSLGKFGQRALDFYSIHVTKESTHPVKPLAQIAGNRYASGPVGKALSDACMGTIASFLSKYQDIIIEHQKVVKGNQKRLESLRELAGKENLEYPSVTLPPQPHTKEGVDAYNEVIARVRMWVNLNLWQKLKLSRDDAKPLLRLKGFPSFPLVERQANEVDWWDMVCNVKKLINEKKEDGKVFWQNLAGYKRQEALRPYLSSEEDRKKGKKFARYQLGDLLLHLEKKHGEDWGKVYDEAWERIDKKVEGLSKHIKLEEERRSEDAQSKAALTDWLRAKASFVIEGLKEADKDEFCRCELKLQKWYGDLRGKPFAIEAENSILDISGFSKQYNCAFIWQKDGVKKLNLYLIINYFKGGKLRFKKIKPEAFEANRFYTVINKKSGEIVPMEVNFNFDDPNLIILPLAFGKRQGREFIWNDLLSLETGSLKLANGRVIEKTLYNRRTRQDEPALFVALTFERREVLDSSNIKPMNLIGVDRGENIPAVIALTTPEGCPLSRFKDSGGNPTHILRIGEHYKEKQRTIQAKKEVEQRRAGGYSRKYASKAKNLADDMVRNTARDLLYYAVTQDAMLIFENLSRGFGRQGKRTFMAERQYTRMEDWLTAKLAYEGLPSKTYLSKTLAQYTSKTCSNCGFTITSADYDRVLEKLKKTATGWMTTINGKELKVEGQITYYNRYKRQNVVKDLSVELDRLSEESVNNDISSWTKGRSGEALSLLKKRFSHRPVQEKFVCLNCGFETHADEQAALNIARSWLFLRSQEYKKYQTNKTTGNTDKRAFVETWQSFYRKKLKEVWKPAV

SEQ ID NO: 25510 - protein, 978 aa, synthetic construct
  REGION 1..978: note = engineered CasX variant
QEIKRINKIRRRLVKDSNTKKAGKTGPMKTLLVRVMTPDLRERLENLRKKPENIPQPISNTSRANLNKLLTDYTEMKKAILHVYWEEFQKDPVGLMSRVAQPASKKIDQNKLKPEMDEKGNLTTAGFACSQCGQPLFVYKLEQVSEKGKAYTNYFGRCNVAEHEKLILLAQLKPEKDSDEAVTYSLGKFGQRALDFYSIHVTKESTHPVKPLAQIAGNRYASGPVGKALSDACMGTIASFLSKYQDIIIEHQKVVKGNQKRLESLRELAGKENLEYPSVTLPPQPHTKEGVDAYNEVIARVRMWVNLNLWQKLKLSRDDAKPLLRLKGFPSFPLVERQANEVDWWDMVCNVKKLINEKKEDGKVFWQNLAGYKRQEALRPYLSSEEDRKKGKKFARYQLGDLLLHLEKKHGEDWGKVYDEAWERIDKKVEGLSKHIKLEEERRSEDAQSKAALTDWLRAKASFVIEGLKEADKDEFCRCELKLQKWYGDLRGKPFAIEAENSILDISGFSKQYNCAFIWQKDGVKKLNLYLIINYFKGGKLRFKKIKPEAFEANRFYTVINKKSGEIVPMEVNFNFDDPNLIILPLAFGKRQGREFIWNDLLSLETGSLKLANGRVIEKTLYNRRTRQDEPALFVALTFERREVLDSSNIKPMNLIGVDRGENIPAVIALTSPEGCPLSRFKDSLGNPTHILRIGESYKEKQRTIQAKKEVEQRRAGGYSRKYASKAKNLADDMVRNTARDLLYYAVTQDAMLIFENLSRGFGRQGKRTFMAERQYTRMEDWLTAKLAYEGLPSKTYLSKTLAQYTSKTCSNCGFTITSADYDRVLEKLKKTATGWMTTINGKELKVEGQITYYNRYKRQNVVKDLSVELDRLSEESVNNDISSWTKGRSGEALSLLKKRFSHRPVQEKFVCLNCGFETHADEQAALNIARSWLFLRSQEYKKYQTNKTTGNTDKRAFVETWQSFYRKKLKEVWKPAV

SEQ ID NO: 25511 - protein, 978 aa, synthetic construct
  REGION 1..978: note = engineered CasX variant
QEIKRINKIRRRLVKDSNTKKAGKTGPMKTLLVRVMTPDLRERLENLRKKPENIPQPISNTSRANLNKLLTDYTEMKKAILHVYWEEFQKDPVGLMSRVAQPASKKIDQNKLKPEMDEKGNLTTAGFACSQCGQPLFVYKLEQVSEKGKAYTNYFGRCNVAEHEKLILLAQLKPEKDSDEAVTYSLGKFGQRALDFYSIHVTKESTHPVKPLAQIAGNRYASGPVGKALSDACMGTIASFLSKYQDIIIEHQKVVKGNQKRLESLRELAGKENLEYPSVTLPPQPHTKEGVDAYNEVIARVRMWVNLNLWQKLKLSRDDAKPLLRLKGFPSFPLVERQANEVDWWDMVCNVKKLINEKKEDGKVFWQNLAGYKRQEALRPYLSSEEDRKKGKKFARYQLGDLLLHLEKKHGEDWGKVYDEAWERIDKKVEGLSKHIKLEEERRSEDAQSKAALTDWLRAKASFVIEGLKEADKDEFCRCELKLQKWYGDLRGKPFAIEAENSILDISGFSKQYNCAFIWQKDGVKKLNLYLIINYFKGGKLRFKKIKPEAFEANRFYTVINKKSGEIVPMEVNFNFDDPNLIILPLAFGKRQGREFIWNDLLSLETGSLKLANGRVIEKTLYNRRTRQDEPALFVALTFERREVLDSSNIKPMNLIGVDRGENIPAVIALTSPEGCPLSRFKDSLGNPTHILRIGESYKEKQRTIQAFKEVEQRRAGGYSRKYASKAKNLADDMVRNTARDLLYYAVTQDAMLIFENLSRGFGRQGKRTFMAERQYTRMEDWLTAKLAYEGLPSKTYLSKTLAQYTSKTCSNCGFTITSADYDRVLEKLKKTATGWMTTINGKELKVEGQITYYNRYKRQNVVKDLSVELDRLSEESVNNDISSWTKGRSGEALSLLKKRFSHRPVQEKFVCLNCGFETHADEQAALNIARSWLFLRSQEYKKYQTNKTTGNTDKRAFVETWQSFYRKKLKEVWKPAV

SEQ ID NO: 25512 - protein, 978 aa, synthetic construct
  REGION 1..978: note = engineered CasX variant
QEIKRINKIRRRLVKDSNTKKAGKTGPMKTLLVRVMTPDLRERLENLRKKPENIPQPISNTSRANLNKLLTDYTEMKKAILHVYWEEFQKDPVGLMSRVAQPASKKIDQNKLKPEMDEKGNLTTAGFACSQCGQPLFVYKLEQVSEKGKAYTNYFGRCNVAEHEKLILLAQLKPEKDSDEAVTYSLGKFGQRALDFYSIHVTKESTHPVKPLAQIAGNRYASGPVGKALSDACMGTIASFLSKYQDIIIEHQKVVKGNQKRLESLRELAGKENLEYPSVTLPPQPHTKEGVDAYNEVIARVRMWVNLNLWQKLKLSRDDAKPLLRLKGFPSFPLVERQANEVDWWDMVCNVKKLINEKKEDGKVFWQNLAGYKRQEALRPYLSSEEDRKKGKKFARYQLGDLLLHLEKKHGEDWGKVYDEAWERIDKKVEGLSKHIKLEEERRSEDAQSKAALTDWLRAKASFVIEGLKEADKDEFCRCELKLQKWYGDLRGKPFAIEAENSILDISGFSKQYNCAFIWQKDGVKKLNLYLIINYFKGGKLRFKKIKPEAFEANRFYTVINKKSGEIVPMEVNFNFDDPNLIILPLAFGKRQGREFIWNDLLSLETGSLKLANGRVIEKTLYNRRTRQDEPALFVALTFERREVLDSSNIKPMNLIGVDRGENIPAVIALTSPEGCPLSRFKDSLGNPTHILRIGESYKEKQRRIQAKKEVEQRRAGGYSRKYASKAKNLADDMVRNTARDLLYYAVTQDAMLIFENLSRGFGRQGKRTFMAERQYTRMEDWLTAKLAYEGLPSKTYLSKTLAQYTSKTCSNCGFTITSADYDRVLEKLKKTATGWMTTINGKELKVEGQITYYNRYKRQNVVKDLSVELDRLSEESVNNDISSWTKGRSGEALSLLKKRFSHRPVQEKFVCLNCGFETHADEQAALNIARSWLFLRSQEYKKYQTNKTTGNTDKRAFVETWQSFYRKKLKEVWKPAV

SEQ ID NO: 25513 - protein, 978 aa, synthetic construct
  REGION 1..978: note = engineered CasX variant
QEIKRINKIRRRLVKDSNTKKAGKTGPMKTLLVRVMTPDLRERLENLRKKPENIPQPISNTSRANLNKLLTDYTEMKKAILHVYWEEFQKDPVGLMSRVAQPASKKIDQNKLKPEMDEKGNLTTAGFACSQCGQPLFVYKLEQVSEKGKAYTNYFGRCNVAEHEKLILLAQLKPEKDSDEAVTYSLGKFGQRALDFYSIHVTKESTHPVKPLAQIAGNRYASGPVGKALSDACMGTIASFLSKYQDIIIEHQKVVKGNQKRLESLRELAGKENLEYPSVTLPPQPHTKEGVDAYNEVIARVRMWVNLNLWQKLKLSRDDAKPLLRLKGFPSFPLVERQANEVDWWDMVCNVKKLINEKKEDGKVFWQNLAGYKRQEALRPYLSSEEDRKKGKKFARYQLGDLLLHLEKKHGEDWGKVYDEAWERIDKKVEGLSKHIKLEEERRSEDAQSKAALTDWLRAKASFVIEGLKEADKDEFCRCELKLQKWYGDLRGKPFAIEAENSILDISGFSKQYNCAFIWQKDGVKKLNLYLIINYFKGGKLRFKKIKPEAFEANRFYTVINKKSGEIVPMEVNFNFDDPNLIILPLAFGKRQGREFIWNDLLSLETGSLKLANGRVIEKTLYNRRTRQDEPALFVALTFERREVLDSSNIKPMNLIGVDRGENIPAVIALTSPEGCPLSRFKDSLGNPTHILRIGECYKEKQRTIQAKKEVEQRRAGGYSRKYASKAKNLADDMVRNTARDLLYYAVTQDAMLIFENLSRGFGRQGKRTFMAERQYTRMEDWLTAKLAYEGLPSKTYLSKTLAQYTSKTCSNCGFTITSADYDRVLEKLKKTATGWMTTINGKELKVEGQITYYNRYKRQNVVKDLSVELDRLSEESVNNDISSWTKGRSGEALSLLKKRFSHRPVQEKFVCLNCGFETHADEQAALNIARSWLFLRSQEYKKYQTNKTTGNTDKRAFVETWQSFYRKKLKEVWKPAV

SEQ ID NO: 25514 - protein, 978 aa, synthetic construct
  REGION 1..978: note = engineered CasX variant
QEIKRINKIRRRLVKDSNTKKAGKTGPMKTLLVRVMTPDLRERLENLRKKPENIPQPISNTSRANLNKLLTDYTEMKKAILHVYWEEFQKDPVGLMSRVAQPASKKIDQNKLKPEMDEKGNLTTAGFACSQCGQPLFVYKLEQVSEKGKAYTNYFGRCNVAEHEKLILLAQLKPEKDSDEAVTYSLGKFGQRALDFYSIHVTKESTHPVKPLAQIAGNRYASGPVGKALSDACMGTIASFLSKYQDIIIEHQKVVKGNQKRLESLRELAGKENLEYPSVTLPPQPHTKEGVDAYNEVIARVRMWVNLNLWQKLKLSRDDAKPLLRLKGFPSFPLVERQANEVDWWDMVCNVKKLINEKKEDGKVFWQNLAGYKRQEALRPYLSSEEDRKKGKKFARYQLGDLLLHLEKKHGEDWGKVYDEAWERIDKKVEGLSKHIKLEEERRSEDAQSKAALTDWLRAKASFVIEGLKEADKDEFCRCELKLQKWYGDLRGKPFAIEAENSILDISGFSKQYNCAFIWQKDGVKKLNLYLIINYFKGGKLRFKKIKPEAFEANRFYTVINKKSGEIVPMEVNFNFDDPNLIILPLAFGKRQGREFIWNDLLSLETGSLKLANGRVIEKTLYNRRTRQDEPALFVALTFERREVLDSSNIKPMNLIGVDRGENIPAVIALTSPEGCPLSAFKDSLGNPTHILRIGESYKEKQRTIQAKKEVEQRRAGGYSRKYASKAKNLADDMVRNTARDLLYYAVTQDAMLIFENLSRGFGRQGKRTFMAERQYTRMEDWLTAKLAYEGLPSKTYLSKTLAQYTSKTCSNCGFTITSADYDRVLEKLKKTATGWMTTINGKELKVEGQITYYNRYKRQNVVKDLSVELDRLSEESVNNDISSWTKGRSGEALSLLKKRFSHRPVQEKFVCLNCGFETHADEQAALNIARSWLFLRSQEYKKYQTNKTTGNTDKRAFVETWQSFYRKKLKEVWKPAV

SEQ ID NO: 25515 - protein, 978 aa, synthetic construct
  REGION 1..978: note = engineered CasX variant
QEIKRINKIRRRLVKDSNTKKAGKTGPMKTLLVRVMTPDLRERLENLRKKPENIPQPISNTSRANLNKLLTDYTEMKKAILHVYWEEFQKDPVGLMSRVAQPASKKIDQNKLKPEMDEKGNLTTAGFACSQCGQPLFVYKLEQVSEKGKAYTNYFGRCNVAEHEKLILLAQLKPEKDSDEAVTYSLGKFGQRALDFYSIHVTKESTHPVKPLAQIAGNRYASGPVGKALSDACMGTIASFLSKYQDIIIEHQKVVKGNQKRLESLRELAGKENLEYPSVTLPPQPHTKEGVDAYNEVIARVRMWVNLNLWQKLKLSRDDAKPLLRLKGFPSFPLVERQANEVDWWDMVCNVKKLINEKKEDGKVFWQNLAGYKRQEALRPYLSSEEDRKKGKKFARYQLGDLLLHLEKKHGEDWGKVYDEAWERIDKKVEGLSKHIKLEEERRSEDAQSKAALTDWLRAKASFVIEGLKEADKDEFCRCELKLQKWYGDLRGKPFAIEAENSILDISGFSKQYNCAFIWQKDGVKKLNLYLIINYFKGGKLRFKKIKPEAFEANRFYTVINKKSGEIVPMEVNFNFDDPNLIILPLAFGKRQGREFIWNDLLSLETGSLKLANGRVIEKTLYNRRTRQDEPALFVALTFERREVLDSSNIKPMNLIGVDRGENIPAVIALTSPEGCPLSAFKDSLGNPTHILRIGECYKEKQRTIQAKKEVEQRRAGGYSRKYASKAKNLADDMVRNTARDLLYYAVTQDAMLIFENLSRGFGRQGKRTFMAERQYTRMEDWLTAKLAYEGLPSKTYLSKTLAQYTSKTCSNCGFTITSADYDRVLEKLKKTATGWMTTINGKELKVEGQITYYNRYKRQNVVKDLSVELDRLSEESVNNDISSWTKGRSGEALSLLKKRFSHRPVQEKFVCLNCGFETHADEQAALNIARSWLFLRSQEYKKYQTNKTTGNTDKRAFVETWQSFYRKKLKEVWKPAV

SEQ ID NO: 25516 - protein, 978 aa, synthetic construct
  REGION 1..978: note = engineered CasX variant
QEIKRINKIRRRLVKDSNTKKAGKTGPMKTLLVRVMTPDLRERLENLRKKPENIPQPISNTSRANLNKLLTDYTEMKKAILHVYWEEFQKDPVGLMSRVAQPASKKIDQNKLKPEMDEKGNLTTAGFACSQCGQPLFVYKLEQVSEKGKAYTNYFGRCNVAEHEKLILLAQLKPEKDSDEAVTYSLGKFGQRALDFYSIHVTKESTHPVKPLAQIAGNRYASGPVGKALSDACMGTIASFLSKYQDIIIEHQKVVKGNQKRLESLRELAGKENLEYPSVTLPPQPHTKEGVDAYNEVIARVRMWVNLNLWQKLKLSRDDAKPLLRLKGFPSFPLVERQANEVDWWDMVCNVKKLINEKKEDGKVFWQNLAGYKRQEALRPYLSSEEDRKKGKKFARYQLGDLLLHLEKKHGEDWGKVYDEAWERIDKKVEGLSKHIKLEEERRSEDAQSKAALTDWLRAKASFVIEGLKEADKDEFCRCELKLQKWYGDLRGKPFAIEAENSILDISGFSKQYNCAFIWQKDGVKKLNLYLIINYFKGGKLRFKKIKPEAFEANRFYTVINKKSGEIVPMEVNFNFDDPNLIILPLAFGKRQGREFIWNDLLSLETGSLKLANGRVIEKTLYNRRTRQDEPALFVALTFERREVLDSSNIKPMNLIGVDRGENIPAVIALTNPEGCPLSRFKDSLGNPTHILRIGESYKHKQRTIQAKKEVEQRRAGGYSRKYASKAKNLADDMVRNTARDLLYYAVTQDAMLIFENLSRGFGRQGKRTFMAERQYTRMEDWLTAKLAYEGLPSKTYLSKTLAQYTSKTCSNCGFTITSADYDRVLEKLKKTATGWMTTINGKELKVEGQITYYNRYKRQNVVKDLSVELDRLSEESVNNDISSWTKGRSGEALSLLKKRFSHRPVQEKFVCLNCGFETHADEQAALNIARSWLFLRSQEYKKYQTNKTTGNTDKRAFVETWQSFYRKKLKEVWKPAV

SEQ ID NO: 25517 - protein, 978 aa, synthetic construct
  REGION 1..978: note = engineered CasX variant
QEIKRINKIRRRLVKDSNTKKAGKTGPMKTLLVRVMTPDLRERLENLRKKPENIPQPISNTSRANLNKLLTDYTEMKKAILHVYWEEFQKDPVGLMSRVAQPASKKIDQNKLKPEMDEKGNLTTAGFACSQCGQPLFVYKLEQVSEKGKAYTNYFGRCNVAEHEKLILLAQLKPEKDSDEAVTYSLGKFGQRALDFYSIHVTKESTHPVKPLAQIAGNRYASGPVGKALSDACMGTIASFLSKYQDIIIEHQKVVKGNQKRLESLRELAGKENLEYPSVTLPPQPHTKEGVDAYNEVIARVRMWVNLNLWQKLKLSRDDAKPLLRLKGFPSFPLVERQANEVDWWDMVCNVKKLINEKKEDGKVFWQNLAGYKRQEALRPYLSSEEDRKKGKKFARYQLGDLLLHLEKKHGEDWGKVYDEAWERIDKKVEGLSKHIKLEEERRSEDAQSKAALTDWLRAKASFVIEGLKEADKDEFCRCELKLQKWYGDLRGKPFAIEAENSILDISGFSKQYNCAFIWQKDGVKKLNLYLIINYFKGGKLRFKKIKPEAFEANRFYTVINKKSGEIVPMEVNFNFDDPNLIILPLAFGKRQGREFIWNDLLSLETGSLKLANGRVIEKTLYNRRTRQDEPALFVALTFERREVLDSSNIKPMNLIGVDRGENIPAVIALTNPEGCPLSRFKDSLGNPTHILRIGESYKEKQRTIQAKKEVEQRRAGGYSRKYASKAKNLADDMVRNTARDLLYYAVTQDAMLIFENLSRGFGRQGKRTFMAERQYTRMEDWLTAKLAYEGLPSKTYLSKTLAQYTSKTCSNCGFTITSADYDRVLEKLKKTATGWMTTINGKELKVEGQITYYNRYKRQNVVKDLSVELDRLSEESVNNDISSWTKGRSGEALSLLKKRFSHRPVQEKFVCLNCGFETHADEQAALNIARSWLFLRSQEYKKYQTNKTTGNTDKRAFVETWQSFYRKKLKEVWKPAV

SEQ ID NO: 25518 - protein, 978 aa, synthetic construct
  REGION 1..978: note = engineered CasX variant
QEIKRINKIRRRLVKDSNTKKAGKTGPMKTLLVRVMTPDLRERLENLRKKPENIPQPISNTSRANLNKLLTDYTEMKKAILHVYWEEFQKDPVGLMSRVAQPASKKIDQNKLKPEMDEKGNLTTAGFACSQCGQPLFVYKLEQVSEKGKAYTNYFGRCNVAEHEKLILLAQLKPEKDSDEAVTYSLGKFGQRALDFYSIHVTKESTHPVKPLAQIAGNRYASGPVGKALSDACMGTIASFLSKYQDIIIEHQKVVKGNQKRLESLRELAGKENLEYPSVTLPPQPHTKEGVDAYNEVIARVRMWVNLNLWQKLKLSRDDAKPLLRLKGFPSFPLVERQANEVDWWDMVCNVKKLINEKKEDGKVFWQNLAGYKRQEALRPYLSSEEDRKKGKKFARYQLGDLLLHLEKKHGEDWGKVYDEAWERIDKKVEGLSKHIKLEEERRSEDAQSKAALTDWLRAKASFVIEGLKEADKDEFCRCELKLQKWYGDLRGKPFAIEAENSILDISGFSKQYNCAFIWQKDGVKKLNLYLIINYFKGGKLRFKKIKPEAFEANRFYTVINKKSGEIVPMEVNFNFDDPNLIILPLAFGKRQGREFIWNDLLSLETGSLKLANGRVIEKTLYNRRTRQDEPALFVALTFERREVLDSSNIKPMNLIGVDRGENIPAVIALTNPEGCPLSRFKDSLGNPTHILRIGESYKEKQRFIQAKKEVEQRRAGGYSRKYASKAKNLADDMVRNTARDLLYYAVTQDAMLIFENLSRGFGRQGKRTFMAERQYTRMEDWLTAKLAYEGLPSKTYLSKTLAQYTSKTCSNCGFTITSADYDRVLEKLKKTATGWMTTINGKELKVEGQITYYNRYKRQNVVKDLSVELDRLSEESVNNDISSWTKGRSGEALSLLKKRFSHRPVQEKFVCLNCGFETHADEQAALNIARSWLFLRSQEYKKYQTNKTTGNTDKRAFVETWQSFYRKKLKEVWKPAV

SEQ ID NO: 25519 - protein, 978 aa, synthetic construct
  REGION 1..978: note = engineered CasX variant
QEIKRINKIRRRLVKDSNTKKAGKTGPMKTLLVRVMTPDLRERLENLRKKPENIPQPISNTSRANLNKLLTDYTEMKKAILHVYWEEFQKDPVGLMSRVAQPASKKIDQNKLKPEMDEKGNLTTAGFACSQCGQPLFVYKLEQVSEKGKAYTNYFGRCNVAEHEKLILLAQLKPEKDSDEAVTYSLGKFGQRALDFYSIHVTKESTHPVKPLAQIAGNRYASGPVGKALSDACMGTIASFLSKYQDIIIEHQKVVKGNQKRLESLRELAGKENLEYPSVTLPPQPHTKEGVDAYNEVIARVRMWVNLNLWQKLKLSRDDAKPLLRLKGFPSFPLVERQANEVDWWDMVCNVKKLINEKKEDGKVFWQNLAGYKRQEALRPYLSSEEDRKKGKKFARYQLGDLLLHLEKKHGEDWGKVYDEAWERIDKKVEGLSKHIKLEEERRSEDAQSKAALTDWLRAKASFVIEGLKEADKDEFCRCELKLQKWYGDLRGKPFAIEAENSILDISGFSKQYNCAFIWQKDGVKKLNLYLIINYFKGGKLRFKKIKPEAFEANRFYTVINKKSGEIVPMEVNFNFDDPNLIILPLAFGKRQGREFIWNDLLSLETGSLKLANGRVIEKTLYNRRTRQDEPALFVALTFERREVLDSSNIKPMNLIGVDRGENIPAVIALTNPEGCPLSRFKDSHGNPTHILRIGESYKHKQRTIQAKKEVEQRRAGGYSRKYASKAKNLADDMVRNTARDLLYYAVTQDAMLIFENLSRGFGRQGKRTFMAERQYTRMEDWLTAKLAYEGLPSKTYLSKTLAQYTSKTCSNCGFTITSADYDRVLEKLKKTATGWMTTINGKELKVEGQITYYNRYKRQNVVKDLSVELDRLSEESVNNDISSWTKGRSGEALSLLKKRFSHRPVQEKFVCLNCGFETHADEQAALNIARSWLFLRSQEYKKYQTNKTTGNTDKRAFVETWQSFYRKKLKEVWKPAV

SEQ ID NO: 25520 - protein, 978 aa, synthetic construct
  REGION 1..978: note = engineered CasX variant
QEIKRINKIRRRLVKDSNTKKAGKTGPMKTLLVRVMTPDLRERLENLRKKPENIPQPISNTSRANLNKLLTDYTEMKKAILHVYWEEFQKDPVGLMSRVAQPASKKIDQNKLKPEMDEKGNLTTAGFACSQCGQPLFVYKLEQVSEKGKAYTNYFGRCNVAEHEKLILLAQLKPEKDSDEAVTYSLGKFGQRALDFYSIHVTKESTHPVKPLAQIAGNRYASGPVGKALSDACMGTIASFLSKYQDIIIEHQKVVKGNQKRLESLRELAGKENLEYPSVTLPPQPHTKEGVDAYNEVIARVRMWVNLNLWQKLKLSRDDAKPLLRLKGFPSFPLVERQANEVDWWDMVCNVKKLINEKKEDGKVFWQNLAGYKRQEALRPYLSSEEDRKKGKKFARYQLGDLLLHLEKKHGEDWGKVYDEAWERIDKKVEGLSKHIKLEEERRSEDAQSKAALTDWLRAKASFVIEGLKEADKDEFCRCELKLQKWYGDLRGKPFAIEAENSILDISGFSKQYNCAFIWQKDGVKKLNLYLIINYFKGGKLRFKKIKPEAFEANRFYTVINKKSGEIVPMEVNFNFDDPNLIILPLAFGKRQGREFIWNDLLSLETGSLKLANGRVIEKTLYNRRTRQDEPALFVALTFERREVLDSSNIKPMNLIGVDRGENIPAVIALTNPEGCPLSRFKDSHGNPTHILRIGESYKEKQRTIQAKKEVEQRRAGGYSRKYASKAKNLADDMVRNTARDLLYYAVTQDAMLIFENLSRGFGRQGKRTFMAERQYTRMEDWLTAKLAYEGLPSKTYLSKTLAQYTSKTCSNCGFTITSADYDRVLEKLKKTATGWMTTINGKELKVEGQITYYNRYKRQNVVKDLSVELDRLSEESVNNDISSWTKGRSGEALSLLKKRFSHRPVQEKFVCLNCGFETHADEQAALNIARSWLFLRSQEYKKYQTNKTTGNTDKRAFVETWQSFYRKKLKEVWKPAV

SEQ ID NO: 25521 - protein, 978 aa, synthetic construct
  REGION 1..978: note = engineered CasX variant
QEIKRINKIRRRLVKDSNTKKAGKTGPMKTLLVRVMTPDLRERLENLRKKPENIPQPISNTSRANLNKLLTDYTEMKKAILHVYWEEFQKDPVGLMSRVAQPASKKIDQNKLKPEMDEKGNLTTAGFACSQCGQPLFVYKLEQVSEKGKAYTNYFGRCNVAEHEKLILLAQLKPEKDSDEAVTYSLGKFGQRALDFYSIHVTKESTHPVKPLAQIAGNRYASGPVGKALSDACMGTIASFLSKYQDIIIEHQKVVKGNQKRLESLRELAGKENLEYPSVTLPPQPHTKEGVDAYNEVIARVRMWVNLNLWQKLKLSRDDAKPLLRLKGFPSFPLVERQANEVDWWDMVCNVKKLINEKKEDGKVFWQNLAGYKRQEALRPYLSSEEDRKKGKKFARYQLGDLLLHLEKKHGEDWGKVYDEAWERIDKKVEGLSKHIKLEEERRSEDAQSKAALTDWLRAKASFVIEGLKEADKDEFCRCELKLQKWYGDLRGKPFAIEAENSILDISGFSKQYNCAFIWQKDGVKKLNLYLIINYFKGGKLRFKKIKPEAFEANRFYTVINKKSGEIVPMEVNFNFDDPNLIILPLAFGKRQGREFIWNDLLSLETGSLKLANGRVIEKTLYNRRTRQDEPALFVALTFERREVLDSSNIKPMNLIGVDRGENIPAVIALTDYEGCPLSRFKDSLGNPTHILRIGESYKEKQRTIQAKKEVEQRRLGGYSRKYASKAKNLADDMVRNTARDLLYYAVTQDAMLIFENLSRGFGRQGKRTFMAERQYTRMEDWLTAKLAYEGLPSKTYLSKTLAQYTSKTCSNCGFTITSADYDRVLEKLKKTATGWMTTINGKELKVEGQITYYNRYKRQNVVKDLSVELDRLSEESVNNDISSWTKGRSGEALSLLKKRFSHRPVQEKFVCLNCGFETHADEQAALNIARSWLFLRSQEYKKYQTNKTTGNTDKRAFVETWQSFYRKKLKEVWKPAV

SEQ ID NO: 25522 - protein, 978 aa, synthetic construct
  REGION 1..978: note = engineered CasX variant
QEIKRINKIRRRLVKDSNTKKAGKTGPMKTLLVRVMTPDLRERLENLRKKPENIPQPISNTSRANLNKLLTDYTEMKKAILHVYWEEFQKDPVGLMSRVAQPASKKIDQNKLKPEMDEKGNLTTAGFACSQCGQPLFVYKLEQVSEKGKAYTNYFGRCNVAEHEKLILLAQLKPEKDSDEAVTYSLGKFGQRALDFYSIHVTKESTHPVKPLAQIAGNRYASGPVGKALSDACMGTIASFLSKYQDIIIEHQKVVKGNQKRLESLRELAGKENLEYPSVTLPPQPHTKEGVDAYNEVIARVRMWVNLNLWQKLKLSRDDAKPLLRLKGFPSFPLVERQANEVDWWDMVCNVKKLINEKKEDGKVFWQNLAGYKRQEALRPYLSSEEDRKKGKKFARYQLGDLLLHLEKKHGEDWGKVYDEAWERIDKKVEGLSKHIKLEEERRSEDAQSKAALTDWLRAKASFVIEGLKEADKDEFCRCELKLQKWYGDLRGKPFAIEAENSILDISGFSKQYNCAFIWQKDGVKKLNLYLIINYFKGGKLRFKKIKPEAFEANRFYTVINKKSGEIVPMEVNFNFDDPNLIILPLAFGKRQGREFIWNDLLSLETGSLKLANGRVIEKTLYNRRTRQDEPALFVALTFERREVLDSSNIKPMNLIGVDRGENIPAVIALTDYEGCPLSRFKDSLGNPTHILRIGESYKEKQRTIQAKKEVEQRRAGGYSRKYASKAKNLADDMVRNTARDLLYYAVTQDAMLIFENLSRGFGRQGKRTFMAERQYTRMEDWLTAKLAYEGLPSKTYLSKTLAQYTSKTCSNCGFTITSADYDRVLEKLKKTATGWMTTINGKELKVEGQITYYNRYKRQNVVKDLSVELDRLSEESVNNDISSWTKGRSGEALSLLKKRFSHRPVQEKFVCLNCGFETHADEQAALNIARSWLFLRSQEYKKYQTNKTTGNTDKRAFVETWQSFYRKKLKEVWKPAV

SEQ ID NO: 25523 - protein, 978 aa, synthetic construct
  REGION 1..978: note = engineered CasX variant
QEIKRINKIRRRLVKDSNTKKAGKTGPMKTLLVRVMTPDLRERLENLRKKPENIPQPISNTSRANLNKLLTDYTEMKKAILHVYWEEFQKDPVGLMSRVAQPASKKIDQNKLKPEMDEKGNLTTAGFACSQCGQPLFVYKLEQVSEKGKAYTNYFGRCNVAEHEKLILLAQLKPEKDSDEAVTYSLGKFGQRALDFYSIHVTKESTHPVKPLAQIAGNRYASGPVGKALSDACMGTIASFLSKYQDIIIEHQKVVKGNQKRLESLRELAGKENLEYPSVTLPPQPHTKEGVDAYNEVIARVRMWVNLNLWQKLKLSRDDAKPLLRLKGFPSFPLVERQANEVDWWDMVCNVKKLINEKKEDGKVFWQNLAGYKRQEALRPYLSSEEDRKKGKKFARYQLGDLLLHLEKKHGEDWGKVYDEAWERIDKKVEGLSKHIKLEEERRSEDAQSKAALTDWLRAKASFVIEGLKEADKDEFCRCELKLQKWYGDLRGKPFAIEAENSILDISGFSKQYNCAFIWQKDGVKKLNLYLIINYFKGGKLRFKKIKPEAFEANRFYTVINKKSGEIVPMEVNFNFDDPNLIILPLAFGKRQGREFIWNDLLSLETGSLKLANGRVIEKTLYNRRTRQDEPALFVALTFERREVLDSSNIKPMNLIGVDRGENIPAVIALTDYEGCPLSRFKDSLGNPTHILRIGESYKEKQRTIQAKKEVEQRRAAGYSRKYASKAKNLADDMVRNTARDLLYYAVTQDAMLIFENLSRGFGRQGKRTFMAERQYTRMEDWLTAKLAYEGLPSKTYLSKTLAQYTSKTCSNCGFTITSADYDRVLEKLKKTATGWMTTINGKELKVEGQITYYNRYKRQNVVKDLSVELDRLSEESVNNDISSWTKGRSGEALSLLKKRFSHRPVQEKFVCLNCGFETHADEQAALNIARSWLFLRSQEYKKYQTNKTTGNTDKRAFVETWQSFYRKKLKEVWKPAV

SEQ ID NO: 25524 - protein, 978 aa, synthetic construct
  REGION 1..978: note = engineered CasX variant
QEIKRINKIRRRLVKDSNTKKAGKTGPMKTLLVRVMTPDLRERLENLRKKPENIPQPISNTSRANLNKLLTDYTEMKKAILHVYWEEFQKDPVGLMSRVAQPASKKIDQNKLKPEMDEKGNLTTAGFACSQCGQPLFVYKLEQVSEKGKAYTNYFGRCNVAEHEKLILLAQLKPEKDSDEAVTYSLGKFGQRALDFYSIHVTKESTHPVKPLAQIAGNRYASGPVGKALSDACMGTIASFLSKYQDIIIEHQKVVKGNQKRLESLRELAGKENLEYPSVTLPPQPHTKEGVDAYNEVIARVRMWVNLNLWQKLKLSRDDAKPLLRLKGFPSFPLVERQANEVDWWDMVCNVKKLINEKKEDGKVFWQNLAGYKRQEALRPYLSSEEDRKKGKKFARYQLGDLLLHLEKKHGEDWGKVYDEAWERIDKKVEGLSKHIKLEEERRSEDAQSKAALTDWLRAKASFVIEGLKEADKDEFCRCELKLQKWYGDLRGKPFAIEAENSILDISGFSKQYNCAFIWQKDGVKKLNLYLIINYFKGGKLRFKKIKPEAFEANRFYTVINKKSGEIVPMEVNFNFDDPNLIILPLAFGKRQGREFIWNDLLSLETGSLKLANGRVIEKTLYNRRTRQDEPALFVALTFERREVLDSSNIKPMNLIGVDRGENIPAVIALTDYEGCPLSRFKDSLGNPTHILRIGESYKEKQRTIQAKKEVEQRAAGGYSRKYASKAKNLADDMVRNTARDLLYYAVTQDAMLIFENLSRGFGRQGKRTFMAERQYTRMEDWLTAKLAYEGLPSKTYLSKTLAQYTSKTCSNCGFTITSADYDRVLEKLKKTATGWMTTINGKELKVEGQITYYNRYKRQNVVKDLSVELDRLSEESVNNDISSWTKGRSGEALSLLKKRFSHRPVQEKFVCLNCGFETHADEQAALNIARSWLFLRSQEYKKYQTNKTTGNTDKRAFVETWQSFYRKKLKEVWKPAV

SEQ ID NO: 25525 - protein, 978 aa, synthetic construct
  REGION 1..978: note = engineered CasX variant
QEIKRINKIRRRLVKDSNTKKAGKTGPMKTLLVRVMTPDLRERLENLRKKPENIPQPISNTSRANLNKLLTDYTEMKKAILHVYWEEFQKDPVGLMSRVAQPASKKIDQNKLKPEMDEKGNLTTAGFACSQCGQPLFVYKLEQVSEKGKAYTNYFGRCNVAEHEKLILLAQLKPEKDSDEAVTYSLGKFGQRALDFYSIHVTKESTHPVKPLAQIAGNRYASGPVGKALSDACMGTIASFLSKYQDIIIEHQKVVKGNQKRLESLRELAGKENLEYPSVTLPPQPHTKEGVDAYNEVIARVRMWVNLNLWQKLKLSRDDAKPLLRLKGFPSFPLVERQANEVDWWDMVCNVKKLINEKKEDGKVFWQNLAGYKRQEALRPYLSSEEDRKKGKKFARYQLGDLLLHLEKKHGEDWGKVYDEAWERIDKKVEGLSKHIKLEEERRSEDAQSKAALTDWLRAKASFVIEGLKEADKDEFCRCELKLQKWYGDLRGKPFAIEAENSILDISGFSKQYNCAFIWQKDGVKKLNLYLIINYFKGGKLRFKKIKPEAFEANRFYTVINKKSGEIVPMEVNFNFDDPNLIILPLAFGKRQGREFIWNDLLSLETGSLKLANGRVIEKTLYNRRTRQDEPALFVALTFERREVLDSSNIKPMNLIGVDRGENIPAVIALTDYEGCPLSRFKDSHGNPTHILRIGESYKEKQRTIQAKKEVEQRRAGGYSRKYASKAKNLADDMVRNTARDLLYYAVTQDAMLIFENLSRGFGRQGKRTFMAERQYTRMEDWLTAKLAYEGLPSKTYLSKTLAQYTSKTCSNCGFTITSADYDRVLEKLKKTATGWMTTINGKELKVEGQITYYNRYKRQNVVKDLSVELDRLSEESVNNDISSWTKGRSGEALSLLKKRFSHRPVQEKFVCLNCGFETHADEQAALNIARSWLFLRSQEYKKYQTNKTTGNTDKRAFVETWQSFYRKKLKEVWKPAV

SEQ ID NO: 25526 - protein, 978 aa, synthetic construct
  REGION 1..978: note = engineered CasX variant
QEIKRINKIRRRLVKDSNTKKAGKTGPMKTLLVRVMTPDLRERLENLRKKPENIPQPISNTSRANLNKLLTDYTEMKKAILHVYWEEFQKDPVGLMSRVAQPASKKIDQNKLKPEMDEKGNLTTAGFACSQCGQPLFVYKLEQVSEKGKAYTNYFGRCNVAEHEKLILLAQLKPEKDSDEAVTYSLGKFGQRALDFYSIHVTKESTHPVKPLAQIAGNRYASGPVGKALSDACMGTIASFLSKYQDIIIEHQKVVKGNQKRLESLRELAGKENLEYPSVTLPPQPHTKEGVDAYNEVIARVRMWVNLNLWQKLKLSRDDAKPLLRLKGFPSFPLVERQANEVDWWDMVCNVKKLINEKKEDGKVFWQNLAGYKRQEALRPYLSSEEDRKKGKKFARYQLGDLLLHLEKKHGEDWGKVYDEAWERIDKKVEGLSKHIKLEEERRSEDAQSKAALTDWLRAKASFVIEGLKEADKDEFCRCELKLQKWYGDLRGKPFAIEAENSILDISGFSKQYNCAFIWQKDGVKKLNLYLIINYFKGGKLRFKKIKPEAFEANRFYTVINKKSGEIVPMEVNFNFDDPNLIILPLAFGKRQGREFIWNDLLSLETGSLKLANGRVIEKTLYNRRTRQDEPALFVALTFERREVLDSSNIKPMNLIGVDRGENIPAVIALTDYEGCPLSRFFDSLGNPTHILRIGESYKEKQRTIQAKKEVEQRRLGGYSRKYASKAKNLADDMVRNTARDLLYYAVTQDAMLIFENLSRGFGRQGKRTFMAERQYTRMEDWLTAKLAYEGLPSKTYLSKTLAQYTSKTCSNCGFTITSADYDRVLEKLKKTATGWMTTINGKELKVEGQITYYNRYKRQNVVKDLSVELDRLSEESVNNDISSWTKGRSGEALSLLKKRFSHRPVQEKFVCLNCGFETHADEQAALNIARSWLFLRSQEYKKYQTNKTTGNTDKRAFVETWQSFYRKKLKEVWKPAV

SEQ ID NO: 25527 - protein, 978 aa, synthetic construct
  REGION 1..978: note = engineered CasX variant
QEIKRINKIRRRLVKDSNTKKAGKTGPMKTLLVRVMTPDLRERLENLRKKPENIPQPISNTSRANLNKLLTDYTEMKKAILHVYWEEFQKDPVGLMSRVAQPASKKIDQNKLKPEMDEKGNLTTAGFACSQCGQPLFVYKLEQVSEKGKAYTNYFGRCNVAEHEKLILLAQLKPEKDSDEAVTYSLGKFGQRALDFYSIHVTKESTHPVKPLAQIAGNRYASGPVGKALSDACMGTIASFLSKYQDIIIEHQKVVKGNQKRLESLRELAGKENLEYPSVTLPPQPHTKEGVDAYNEVIARVRMWVNLNLWQKLKLSRDDAKPLLRLKGFPSFPLVERQANEVDWWDMVCNVKKLINEKKEDGKVFWQNLAGYKRQEALRPYLSSEEDRKKGKKFARYQLGDLLLHLEKKHGEDWGKVYDEAWERIDKKVEGLSKHIKLEEERRSEDAQSKAALTDWLRAKASFVIEGLKEADKDEFCRCELKLQKWYGDLRGKPFAIEAENSILDISGFSKQYNCAFIWQKDGVKKLNLYLIINYFKGGKLRFKKIKPEAFEANRFYTVINKKSGEIVPMEVNFNFDDPNLIILPLAFGKRQGREFIWNDLLSLETGSLKLANGRVIEKTLYNRRTRQDEPALFVALTFERREVLDSSNIKPMNLIGVDRGENIPAVIALTDYEGCPLSRFADSLGNPTHILRIGESYKEKQRTIQAKKEVEQRRAGGYSRKYASKAKNLADDMVRNTARDLLYYAVTQDAMLIFENLSRGFGRQGKRTFMAERQYTRMEDWLTAKLAYEGLPSKTYLSKTLAQYTSKTCSNCGFTITSADYDRVLEKLKKTATGWMTTINGKELKVEGQITYYNRYKRQNVVKDLSVELDRLSEESVNNDISSWTKGRSGEALSLLKKRFSHRPVQEKFVCLNCGFETHADEQAALNIARSWLFLRSQEYKKYQTNKTTGNTDKRAFVETWQSFYRKKLKEVWKPAV

SEQ ID NO: 25528 - protein, 978 aa, synthetic construct
  REGION 1..978: note = engineered CasX variant
QEIKRINKIRRRLVKDSNTKKAGKTGPMKTLLVRVMTPDLRERLENLRKKPENIPQPISNTSRANLNKLLTDYTEMKKAILHVYWEEFQKDPVGLMSRVAQPASKKIDQNKLKPEMDEKGNLTTAGFACSQCGQPLFVYKLEQVSEKGKAYTNYFGRCNVAEHEKLILLAQLKPEKDSDEAVTYSLGKFGQRALDFYSIHVTKESTHPVKPLAQIAGNRYASGPVGKALSDACMGTIASFLSKYQDIIIEHQKVVKGNQKRLESLRELAGKENLEYPSVTLPPQPHTKEGVDAYNEVIARVRMWVNLNLWQKLKLSRDDAKPLLRLKGFPSFPLVERQANEVDWWDMVCNVKKLINEKKEDGKVFWQNLAGYKRQEALRPYLSSEEDRKKGKKFARYQLGDLLLHLEKKHGEDWGKVYDEAWERIDKKVEGLSKHIKLEEERRSEDAQSKAALTDWLRAKASFVIEGLKEADKDEFCRCELKLQKWYGDLRGKPFAIEAENSILDISGFSKQYNCAFIWQKDGVKKLNLYLIINYFKGGKLRFKKIKPEAFEANRFYTVINKKSGEIVPMEVNFNFDDPNLIILPLAFGKRQGREFIWNDLLSLETGSLKLANGRVIEKTLYNRRTRQDEPALFVALTFERREVLDSSNIKPMNLIGVDRGENIPAVIALTDYEGCPLSRFADSHGNPTHILRIGESYKEKQRTIQAKKEVEQRRAGGYSRKYASKAKNLADDMVRNTARDLLYYAVTQDAMLIFENLSRGFGRQGKRTFMAERQYTRMEDWLTAKLAYEGLPSKTYLSKTLAQYTSKTCSNCGFTITSADYDRVLEKLKKTATGWMTTINGKELKVEGQITYYNRYKRQNVVKDLSVELDRLSEESVNNDISSWTKGRSGEALSLLKKRFSHRPVQEKFVCLNCGFETHADEQAALNIARSWLFLRSQEYKKYQTNKTTGNTDKRAFVETWQSFYRKKLKEVWKPAV

SEQ ID NO: 25529 - protein, 978 aa, synthetic construct
  REGION 1..978: note = engineered CasX variant
QEIKRINKIRRRLVKDSNTKKAGKTGPMKTLLVRVMTPDLRERLENLRKKPENIPQPISNTSRANLNKLLTDYTEMKKAILHVYWEEFQKDPVGLMSRVAQPASKKIDQNKLKPEMDEKGNLTTAGFACSQCGQPLFVYKLEQVSEKGKAYTNYFGRCNVAEHEKLILLAQLKPEKDSDEAVTYSLGKFGQRALDFYSIHVTKESTHPVKPLAQIAGNRYASGPVGKALSDACMGTIASFLSKYQDIIIEHQKVVKGNQKRLESLRELAGKENLEYPSVTLPPQPHTKEGVDAYNEVIARVRMWVNLNLWQKLKLSRDDAKPLLRLKGFPSFPLVERQANEVDWWDMVCNVKKLINEKKEDGKVFWQNLAGYKRQEALRPYLSSEEDRKKGKKFARYQLGDLLLHLEKKHGEDWGKVYDEAWERIDKKVEGLSKHIKLEEERRSEDAQSKAALTDWLRAKASFVIEGLKEADKDEFCRCELKLQKWYGDLRGKPFAIEAENSILDISGFSKQYNCAFIWQKDGVKKLNLYLIINYFKGGKLRFKKIKPEAFEANRFYTVINKKSGEIVPMEVNFNFDDPNLIILPLAFGKRQGREFIWNDLLSLETGSLKLANGRVIEKTLYNRRTRQDEPALFVALTFERREVLDSSNIKPMNLIGVDRGENIPAVIALTDYEGCPLPRFKDSLGNPTHILRIGESYKEKQRTIQAKKEVEQRRAGGYSRKYASKAKNLADDMVRNTARDLLYYAVTQDAMLIFENLSRGFGRQGKRTFMAERQYTRMEDWLTAKLAYEGLPSKTYLSKTLAQYTSKTCSNCGFTITSADYDRVLEKLKKTATGWMTTINGKELKVEGQITYYNRYKRQNVVKDLSVELDRLSEESVNNDISSWTKGRSGEALSLLKKRFSHRPVQEKFVCLNCGFETHADEQAALNIARSWLFLRSQEYKKYQTNKTTGNTDKRAFVETWQSFYRKKLKEVWKPAV

SEQ ID NO: 25530 - protein, 978 aa, synthetic construct
  REGION 1..978: note = engineered CasX variant
QEIKRINKIRRRLVKDSNTKKAGKTGPMKTLLVRVMTPDLRERLENLRKKPENIPQPISNTSRANLNKLLTDYTEMKKAILHVYWEEFQKDPVGLMSRVAQPASKKIDQNKLKPEMDEKGNLTTAGFACSQCGQPLFVYKLEQVSEKGKAYTNYFGRCNVAEHEKLILLAQLKPEKDSDEAVTYSLGKFGQRALDFYSIHVTKESTHPVKPLAQIAGNRYASGPVGKALSDACMGTIASFLSKYQDIIIEHQKVVKGNQKRLESLRELAGKENLEYPSVTLPPQPHTKEGVDAYNEVIARVRMWVNLNLWQKLKLSRDDAKPLLRLKGFPSFPLVERQANEVDWWDMVCNVKKLINEKKEDGKVFWQNLAGYKRQEALRPYLSSEEDRKKGKKFARYQLGDLLLHLEKKHGEDWGKVYDEAWERIDKKVEGLSKHIKLEEERRSEDAQSKAALTDWLRAKASFVIEGLKEADKDEFCRCELKLQKWYGDLRGKPFAIEAENSILDISGFSKQYNCAFIWQKDGVKKLNLYLIINYFKGGKLRFKKIKPEAFEANRFYTVINKKSGEIVPMEVNFNFDDPNLIILPLAFGKRQGREFIWNDLLSLETGSLKLANGRVIEKTLYNRRTRQDEPALFVALTFERREVLDSSNIKPMNLIGVDRGENIPAVIALTDYEGCPLPRFKDSLGNPTHILRIGESYKEKQRTIQAKKEVEQRAAGGYSRKYASKAKNLADDMVRNTARDLLYYAVTQDAMLIFENLSRGFGRQGKRTFMAERQYTRMEDWLTAKLAYEGLPSKTYLSKTLAQYTSKTCSNCGFTITSADYDRVLEKLKKTATGWMTTINGKELKVEGQITYYNRYKRQNVVKDLSVELDRLSEESVNNDISSWTKGRSGEALSLLKKRFSHRPVQEKFVCLNCGFETHADEQAALNIARSWLFLRSQEYKKYQTNKTTGNTDKRAFVETWQSFYRKKLKEVWKPAV

SEQ ID NO: 25531 - protein, 978 aa, synthetic construct
  REGION 1..978: note = engineered CasX variant
QEIKRINKIRRRLVKDSNTKKAGKTGPMKTLLVRVMTPDLRERLENLRKKPENIPQPISNTSRANLNKLLTDYTEMKKAILHVYWEEFQKDPVGLMSRVAQPASKKIDQNKLKPEMDEKGNLTTAGFACSQCGQPLFVYKLEQVSEKGKAYTNYFGRCNVAEHEKLILLAQLKPEKDSDEAVTYSLGKFGQRALDFYSIHVTKESTHPVKPLAQIAGNRYASGPVGKALSDACMGTIASFLSKYQDIIIEHQKVVKGNQKRLESLRELAGKENLEYPSVTLPPQPHTKEGVDAYNEVIARVRMWVNLNLWQKLKLSRDDAKPLLRLKGFPSFPLVERQANEVDWWDMVCNVKKLINEKKEDGKVFWQNLAGYKRQEALRPYLSSEEDRKKGKKFARYQLGDLLLHLEKKHGEDWGKVYDEAWERIDKKVEGLSKHIKLEEERRSEDAQSKAALTDWLRAKASFVIEGLKEADKDEFCRCELKLQKWYGDLRGKPFAIEAENSILDISGFSKQYNCAFIWQKDGVKKLNLYLIINYFKGGKLRFKKIKPEAFEANRFYTVINKKSGEIVPMEVNFNFDDPNLIILPLAFGKRQGREFIWNDLLSLETGSLKLANGRVIEKTLYNRRTRQDEPALFVALTFERREVLDSSNIKPMNLIGVDRGENIPAVIALTDWEGCPLSRFKDSLGNPTHILRIGESYKEKQRTIQAKKEVEQRRAGGYSRKYASKAKNLADDMVRNTARDLLYYAVTQDAMLIFENLSRGFGRQGKRTFMAERQYTRMEDWLTAKLAYEGLPSKTYLSKTLAQYTSKTCSNCGFTITSADYDRVLEKLKKTATGWMTTINGKELKVEGQITYYNRYKRQNVVKDLSVELDRLSEESVNNDISSWTKGRSGEALSLLKKRFSHRPVQEKFVCLNCGFETHADEQAALNIARSWLFLRSQEYKKYQTNKTTGNTDKRAFVETWQSFYRKKLKEVWKPAV

SEQ ID NO: 25532 - protein, 978 aa, synthetic construct
  REGION 1..978: note = engineered CasX variant
QEIKRINKIRRRLVKDSNTKKAGKTGPMKTLLVRVMTPDLRERLENLRKKPENIPQPISNTSRANLNKLLTDYTEMKKAILHVYWEEFQKDPVGLMSRVAQPASKKIDQNKLKPEMDEKGNLTTAGFACSQCGQPLFVYKLEQVSEKGKAYTNYFGRCNVAEHEKLILLAQLKPEKDSDEAVTYSLGKFGQRALDFYSIHVTKESTHPVKPLAQIAGNRYASGPVGKALSDACMGTIASFLSKYQDIIIEHQKVVKGNQKRLESLRELAGKENLEYPSVTLPPQPHTKEGVDAYNEVIARVRMWVNLNLWQKLKLSRDDAKPLLRLKGFPSFPLVERQANEVDWWDMVCNVKKLINEKKEDGKVFWQNLAGYKRQEALRPYLSSEEDRKKGKKFARYQLGDLLLHLEKKHGEDWGKVYDEAWERIDKKVEGLSKHIKLEEERRSEDAQSKAALTDWLRAKASFVIEGLKEADKDEFCRCELKLQKWYGDLRGKPFAIEAENSILDISGFSKQYNCAFIWQKDGVKKLNLYLIINYFKGGKLRFKKIKPEAFEANRFYTVINKKSGEIVPMEVNFNFDDPNLIILPLAFGKRQGREFIWNDLLSLETGSLKLANGRVIEKTLYNRRTRQDEPALFVALTFERREVLDSSNIKPMNLIGVDRGENIPAVIALTDWEGCPLSRFKDSKGNPTHILRIGESYKEKQRTIQAKKEVEQRRAGGYSRKYASKAKNLADDMVRNTARDLLYYAVTQDAMLIFENLSRGFGRQGKRTFMAERQYTRMEDWLTAKLAYEGLPSKTYLSKTLAQYTSKTCSNCGFTITSADYDRVLEKLKKTATGWMTTINGKELKVEGQITYYNRYKRQNVVKDLSVELDRLSEESVNNDISSWTKGRSGEALSLLKKRFSHRPVQEKFVCLNCGFETHADEQAALNIARSWLFLRSQEYKKYQTNKTTGNTDKRAFVETWQSFYRKKLKEVWKPAV

SEQ ID NO: 25533 - protein, 978 aa, synthetic construct
  REGION 1..978: note = engineered CasX variant
QEIKRINKIRRRLVKDSNTKKAGKTGPMKTLLVRVMTPDLRERLENLRKKPENIPQPISNTSRANLNKLLTDYTEMKKAILHVYWEEFQKDPVGLMSRVAQPASKKIDQNKLKPEMDEKGNLTTAGFACSQCGQPLFVYKLEQVSEKGKAYTNYFGRCNVAEHEKLILLAQLKPEKDSDEAVTYSLGKFGQRALDFYSIHVTKESTHPVKPLAQIAGNRYASGPVGKALSDACMGTIASFLSKYQDIIIEHQKVVKGNQKRLESLRELAGKENLEYPSVTLPPQPHTKEGVDAYNEVIARVRMWVNLNLWQKLKLSRDDAKPLLRLKGFPSFPLVERQANEVDWWDMVCNVKKLINEKKEDGKVFWQNLAGYKRQEALRPYLSSEEDRKKGKKFARYQLGDLLLHLEKKHGEDWGKVYDEAWERIDKKVEGLSKHIKLEEERRSEDAQSKAALTDWLRAKASFVIEGLKEADKDEFCRCELKLQKWYGDLRGKPFAIEAENSILDISGFSKQYNCAFIWQKDGVKKLNLYLIINYFKGGKLRFKKIKPEAFEANRFYTVINKKSGEIVPMEVNFNFDDPNLIILPLAFGKRQGREFIWNDLLSLETGSLKLANGRVIEKTLYNRRTRQDEPALFVALTFERREVLDSSNIKPMNLIGVDRGENIPAVIALTDVEGCPLSRFKDSLGNPTHILRIGESYKEKQRTIQAKKEVEQRRAGGYSRKYASKAKNLADDMVRNTARDLLYYAVTQDAMLIFENLSRGFGRQGKRTFMAERQYTRMEDWLTAKLAYEGLPSKTYLSKTLAQYTSKTCSNCGFTITSADYDRVLEKLKKTATGWMTTINGKELKVEGQITYYNRYKRQNVVKDLSVELDRLSEESVNNDISSWTKGRSGEALSLLKKRFSHRPVQEKFVCLNCGFETHADEQAALNIARSWLFLRSQEYKKYQTNKTTGNTDKRAFVETWQSFYRKKLKEVWKPAV

SEQ ID NO: 25534 - protein, 978 aa, synthetic construct
  REGION 1..978: note = engineered CasX variant
QEIKRINKIRRRLVKDSNTKKAGKTGPMKTLLVRVMTPDLRERLENLRKKPENIPQPISNTSRANLNKLLTDYTEMKKAILHVYWEEFQKDPVGLMSRVAQPASKKIDQNKLKPEMDEKGNLTTAGFACSQCGQPLFVYKLEQVSEKGKAYTNYFGRCNVAEHEKLILLAQLKPEKDSDEAVTYSLGKFGQRALDFYSIHVTKESTHPVKPLAQIAGNRYASGPVGKALSDACMGTIASFLSKYQDIIIEHQKVVKGNQKRLESLRELAGKENLEYPSVTLPPQPHTKEGVDAYNEVIARVRMWVNLNLWQKLKLSRDDAKPLLRLKGFPSFPLVERQANEVDWWDMVCNVKKLINEKKEDGKVFWQNLAGYKRQEALRPYLSSEEDRKKGKKFARYQLGDLLLHLEKKHGEDWGKVYDEAWERIDKKVEGLSKHIKLEEERRSEDAQSKAALTDWLRAKASFVIEGLKEADKDEFCRCELKLQKWYGDLRGKPFAIEAENSILDISGFSKQYNCAFIWQKDGVKKLNLYLIINYFKGGKLRFKKIKPEAFEANRFYTVINKKSGEIVPMEVNFNFDDPNLIILPLAFGKRQGREFIWNDLLSLETGSLKLANGRVIEKTLYNRRTRQDEPALFVALTFERREVLDSSNIKPMNLIGVDRGENIPAVIALTDVEGCPLSRFKDSLGNPTHILRIGESYKEKQRTFQAKKEVEQRRAGGYSRKYASKAKNLADDMVRNTARDLLYYAVTQDAMLIFENLSRGFGRQGKRTFMAERQYTRMEDWLTAKLAYEGLPSKTYLSKTLAQYTSKTCSNCGFTITSADYDRVLEKLKKTATGWMTTINGKELKVEGQITYYNRYKRQNVVKDLSVELDRLSEESVNNDISSWTKGRSGEALSLLKKRFSHRPVQEKFVCLNCGFETHADEQAALNIARSWLFLRSQEYKKYQTNKTTGNTDKRAFVETWQSFYRKKLKEVWKPAV

SEQ ID NO: 25535 - protein, 978 aa, synthetic construct
  REGION 1..978: note = engineered CasX variant
QEIKRINKIRRRLVKDSNTKKAGKTGPMKTLLVRVMTPDLRERLENLRKKPENIPQPISNTSRANLNKLLTDYTEMKKAILHVYWEEFQKDPVGLMSRVAQPASKKIDQNKLKPEMDEKGNLTTAGFACSQCGQPLFVYKLEQVSEKGKAYTNYFGRCNVAEHEKLILLAQLKPEKDSDEAVTYSLGKFGQRALDFYSIHVTKESTHPVKPLAQIAGNRYASGPVGKALSDACMGTIASFLSKYQDIIIEHQKVVKGNQKRLESLRELAGKENLEYPSVTLPPQPHTKEGVDAYNEVIARVRMWVNLNLWQKLKLSRDDAKPLLRLKGFPSFPLVERQANEVDWWDMVCNVKKLINEKKEDGKVFWQNLAGYKRQEALRPYLSSEEDRKKGKKFARYQLGDLLLHLEKKHGEDWGKVYDEAWERIDKKVEGLSKHIKLEEERRSEDAQSKAALTDWLRAKASFVIEGLKEADKDEFCRCELKLQKWYGDLRGKPFAIEAENSILDISGFSKQYNCAFIWQKDGVKKLNLYLIINYFKGGKLRFKKIKPEAFEANRFYTVINKKSGEIVPMEVNFNFDDPNLIILPLAFGKRQGREFIWNDLLSLETGSLKLANGRVIEKTLYNRRTRQDEPALFVALTFERREVLDSSNIKPMNLIGVDRGENIPAVIALTDVEGCPLSMFKDSLGNPTHILRIGESYKEKQRTFQAKKEVEQRRAGGYSRKYASKAKNLADDMVRNTARDLLYYAVTQDAMLIFENLSRGFGRQGKRTFMAERQYTRMEDWLTAKLAYEGLPSKTYLSKTLAQYTSKTCSNCGFTITSADYDRVLEKLKKTATGWMTTINGKELKVEGQITYYNRYKRQNVVKDLSVELDRLSEESVNNDISSWTKGRSGEALSLLKKRFSHRPVQEKFVCLNCGFETHADEQAALNIARSWLFLRSQEYKKYQTNKTTGNTDKRAFVETWQSFYRKKLKEVWKPAV

SEQ ID NO: 25536 - protein, 978 aa, synthetic construct
  REGION 1..978: note = engineered CasX variant
QEIKRINKIRRRLVKDSNTKKAGKTGPMKTLLVRVMTPDLRERLENLRKKPENIPQPISNTSRANLNKLLTDYTEMKKAILHVYWEEFQKDPVGLMSRVAQPASKKIDQNKLKPEMDEKGNLTTAGFACSQCGQPLFVYKLEQVSEKGKAYTNYFGRCNVAEHEKLILLAQLKPEKDSDEAVTYSLGKFGQRALDFYSIHVTKESTHPVKPLAQIAGNRYASGPVGKALSDACMGTIASFLSKYQDIIIEHQKVVKGNQKRLESLRELAGKENLEYPSVTLPPQPHTKEGVDAYNEVIARVRMWVNLNLWQKLKLSRDDAKPLLRLKGFPSFPLVERQANEVDWWDMVCNVKKLINEKKEDGKVFWQNLAGYKRQEALRPYLSSEEDRKKGKKFARYQLGDLLLHLEKKHGEDWGKVYDEAWERIDKKVEGLSKHIKLEEERRSEDAQSKAALTDWLRAKASFVIEGLKEADKDEFCRCELKLQKWYGDLRGKPFAIEAENSILDISGFSKQYNCAFIWQKDGVKKLNLYLIINYFKGGKLRFKKIKPEAFEANRFYTVINKKSGEIVPMEVNFNFDDPNLIILPLAFGKRQGREFIWNDLLSLETGSLKLANGRVIEKTLYNRRTRQDEPALFVALTFERREVLDSSNIKPMNLIGVDRGENIPAVIALTDTEGCPLSRFKDSTGNPTHILRIGESYKEKQRTIQAKKEVEQRRRGGYSRKYASKAKNLADDMVRNTARDLLYYAVTQDAMLIFENLSRGFGRQGKRTFMAERQYTRMEDWLTAKLAYEGLPSKTYLSKTLAQYTSKTCSNCGFTITSADYDRVLEKLKKTATGWMTTINGKELKVEGQITYYNRYKRQNVVKDLSVELDRLSEESVNNDISSWTKGRSGEALSLLKKRFSHRPVQEKFVCLNCGFETHADEQAALNIARSWLFLRSQEYKKYQTNKTTGNTDKRAFVETWQSFYRKKLKEVWKPAV

SEQ ID NO: 25537 - protein, 978 aa, synthetic construct
  REGION 1..978: note = engineered CasX variant
QEIKRINKIRRRLVKDSNTKKAGKTGPMKTLLVRVMTPDLRERLENLRKKPENIPQPISNTSRANLNKLLTDYTEMKKAILHVYWEEFQKDPVGLMSRVAQPASKKIDQNKLKPEMDEKGNLTTAGFACSQCGQPLFVYKLEQVSEKGKAYTNYFGRCNVAEHEKLILLAQLKPEKDSDEAVTYSLGKFGQRALDFYSIHVTKESTHPVKPLAQIAGNRYASGPVGKALSDACMGTIASFLSKYQDIIIEHQKVVKGNQKRLESLRELAGKENLEYPSVTLPPQPHTKEGVDAYNEVIARVRMWVNLNLWQKLKLSRDDAKPLLRLKGFPSFPLVERQANEVDWWDMVCNVKKLINEKKEDGKVFWQNLAGYKRQEALRPYLSSEEDRKKGKKFARYQLGDLLLHLEKKHGEDWGKVYDEAWERIDKKVEGLSKHIKLEEERRSEDAQSKAALTDWLRAKASFVIEGLKEADKDEFCRCELKLQKWYGDLRGKPFAIEAENSILDISGFSKQYNCAFIWQKDGVKKLNLYLIINYFKGGKLRFKKIKPEAFEANRFYTVINKKSGEIVPMEVNFNFDDPNLIILPLAFGKRQGREFIWNDLLSLETGSLKLANGRVIEKTLYNRRTRQDEPALFVALTFERREVLDSSNIKPMNLIGVDRGENIPAVIALTDTEGCPLSRFKDSTGNPTHILRIGESYKEKQRTIQAKKEVEQRRAGGYSRKYASKAKNLADDMVRNTARDLLYYAVTQDAMLIFENLSRGFGRQGKRTFMAERQYTRMEDWLTAKLAYEGLPSKTYLSKTLAQYTSKTCSNCGFTITSADYDRVLEKLKKTATGWMTTINGKELKVEGQITYYNRYKRQNVVKDLSVELDRLSEESVNNDISSWTKGRSGEALSLLKKRFSHRPVQEKFVCLNCGFETHADEQAALNIARSWLFLRSQEYKKYQTNKTTGNTDKRAFVETWQSFYRKKLKEVWKPAV

SEQ ID NO: 25538 - protein, 978 aa, synthetic construct
  REGION 1..978: note = engineered CasX variant
QEIKRINKIRRRLVKDSNTKKAGKTGPMKTLLVRVMTPDLRERLENLRKKPENIPQPISNTSRANLNKLLTDYTEMKKAILHVYWEEFQKDPVGLMSRVAQPASKKIDQNKLKPEMDEKGNLTTAGFACSQCGQPLFVYKLEQVSEKGKAYTNYFGRCNVAEHEKLILLAQLKPEKDSDEAVTYSLGKFGQRALDFYSIHVTKESTHPVKPLAQIAGNRYASGPVGKALSDACMGTIASFLSKYQDIIIEHQKVVKGNQKRLESLRELAGKENLEYPSVTLPPQPHTKEGVDAYNEVIARVRMWVNLNLWQKLKLSRDDAKPLLRLKGFPSFPLVERQANEVDWWDMVCNVKKLINEKKEDGKVFWQNLAGYKRQEALRPYLSSEEDRKKGKKFARYQLGDLLLHLEKKHGEDWGKVYDEAWERIDKKVEGLSKHIKLEEERRSEDAQSKAALTDWLRAKASFVIEGLKEADKDEFCRCELKLQKWYGDLRGKPFAIEAENSILDISGFSKQYNCAFIWQKDGVKKLNLYLIINYFKGGKLRFKKIKPEAFEANRFYTVINKKSGEIVPMEVNFNFDDPNLIILPLAFGKRQGREFIWNDLLSLETGSLKLANGRVIEKTLYNRRTRQDEPALFVALTFERREVLDSSNIKPMNLIGVDRGENIPAVIALTDTEGCPLSRFKDSLGNPTHILRIGESYKEKQRTIQAKKEVEQRRRGGYSRKYASKAKNLADDMVRNTARDLLYYAVTQDAMLIFENLSRGFGRQGKRTFMAERQYTRMEDWLTAKLAYEGLPSKTYLSKTLAQYTSKTCSNCGFTITSADYDRVLEKLKKTATGWMTTINGKELKVEGQITYYNRYKRQNVVKDLSVELDRLSEESVNNDISSWTKGRSGEALSLLKKRFSHRPVQEKFVCLNCGFETHADEQAALNIARSWLFLRSQEYKKYQTNKTTGNTDKRAFVETWQSFYRKKLKEVWKPAV

SEQ ID NO: 25539 - protein, 978 aa, synthetic construct
  REGION 1..978: note = engineered CasX variant
QEIKRINKIRRRLVKDSNTKKAGKTGPMKTLLVRVMTPDLRERLENLRKKPENIPQPISNTSRANLNKLLTDYTEMKKAILHVYWEEFQKDPVGLMSRVAQPASKKIDQNKLKPEMDEKGNLTTAGFACSQCGQPLFVYKLEQVSEKGKAYTNYFGRCNVAEHEKLILLAQLKPEKDSDEAVTYSLGKFGQRALDFYSIHVTKESTHPVKPLAQIAGNRYASGPVGKALSDACMGTIASFLSKYQDIIIEHQKVVKGNQKRLESLRELAGKENLEYPSVTLPPQPHTKEGVDAYNEVIARVRMWVNLNLWQKLKLSRDDAKPLLRLKGFPSFPLVERQANEVDWWDMVCNVKKLINEKKEDGKVFWQNLAGYKRQEALRPYLSSEEDRKKGKKFARYQLGDLLLHLEKKHGEDWGKVYDEAWERIDKKVEGLSKHIKLEEERRSEDAQSKAALTDWLRAKASFVIEGLKEADKDEFCRCELKLQKWYGDLRGKPFAIEAENSILDISGFSKQYNCAFIWQKDGVKKLNLYLIINYFKGGKLRFKKIKPEAFEANRFYTVINKKSGEIVPMEVNFNFDDPNLIILPLAFGKRQGREFIWNDLLSLETGSLKLANGRVIEKTLYNRRTRQDEPALFVALTFERREVLDSSNIKPMNLIGVDRGENIPAVIALTDTEGCPLSRFKDSLGNPTHILRIGESYKEKQRTIQAKKEVEQRRAGGYSRKYASKAKNLADDMVRNTARDLLYYAVTQDAMLIFENLSRGFGRQGKRTFMAERQYTRMEDWLTAKLAYEGLPSKTYLSKTLAQYTSKTCSNCGFTITSADYDRVLEKLKKTATGWMTTINGKELKVEGQITYYNRYKRQNVVKDLSVELDRLSEESVNNDISSWTKGRSGEALSLLKKRFSHRPVQEKFVCLNCGFETHADEQAALNIARSWLFLRSQEYKKYQTNKTTGNTDKRAFVETWQSFYRKKLKEVWKPAV

SEQ ID NO: 25540 - protein, 978 aa, synthetic construct
  REGION 1..978: note = engineered CasX variant
QEIKRINKIRRRLVKDSNTKKAGKTGPMKTLLVRVMTPDLRERLENLRKKPENIPQPISNTSRANLNKLLTDYTEMKKAILHVYWEEFQKDPVGLMSRVAQPASKKIDQNKLKPEMDEKGNLTTAGFACSQCGQPLFVYKLEQVSEKGKAYTNYFGRCNVAEHEKLILLAQLKPEKDSDEAVTYSLGKFGQRALDFYSIHVTKESTHPVKPLAQIAGNRYASGPVGKALSDACMGTIASFLSKYQDIIIEHQKVVKGNQKRLESLRELAGKENLEYPSVTLPPQPHTKEGVDAYNEVIARVRMWVNLNLWQKLKLSRDDAKPLLRLKGFPSFPLVERQANEVDWWDMVCNVKKLINEKKEDGKVFWQNLAGYKRQEALRPYLSSEEDRKKGKKFARYQLGDLLLHLEKKHGEDWGKVYDEAWERIDKKVEGLSKHIKLEEERRSEDAQSKAALTDWLRAKASFVIEGLKEADKDEFCRCELKLQKWYGDLRGKPFAIEAENSILDISGFSKQYNCAFIWQKDGVKKLNLYLIINYFKGGKLRFKKIKPEAFEANRFYTVINKKSGEIVPMEVNFNFDDPNLIILPLAFGKRQGREFIWNDLLSLETGSLKLANGRVIEKTLYNRRTRQDEPALFVALTFERREVLDSSNIKPMNLIGVDRGENIPAVIALTDSEGCPLSRFKDSLGNPTHILRIGESYKEKQRTIQAKKEVEQRRAGGYSRKYASKAKNLADDMVRNTARDLLYYAVTQDAMLIFENLSRGFGRQGKRTFMAERQYTRMEDWLTAKLAYEGLPSKTYLSKTLAQYTSKTCSNCGFTITSADYDRVLEKLKKTATGWMTTINGKELKVEGQITYYNRYKRQNVVKDLSVELDRLSEESVNNDISSWTKGRSGEALSLLKKRFSHRPVQEKFVCLNCGFETHADEQAALNIARSWLFLRSQEYKKYQTNKTTGNTDKRAFVETWQSFYRKKLKEVWKPAV

SEQ ID NO: 25541 - protein, 978 aa, synthetic construct
  REGION 1..978: note = engineered CasX variant
QEIKRINKIRRRLVKDSNTKKAGKTGPMKTLLVRVMTPDLRERLENLRKKPENIPQPISNTSRANLNKLLTDYTEMKKAILHVYWEEFQKDPVGLMSRVAQPASKKIDQNKLKPEMDEKGNLTTAGFACSQCGQPLFVYKLEQVSEKGKAYTNYFGRCNVAEHEKLILLAQLKPEKDSDEAVTYSLGKFGQRALDFYSIHVTKESTHPVKPLAQIAGNRYASGPVGKALSDACMGTIASFLSKYQDIIIEHQKVVKGNQKRLESLRELAGKENLEYPSVTLPPQPHTKEGVDAYNEVIARVRMWVNLNLWQKLKLSRDDAKPLLRLKGFPSFPLVERQANEVDWWDMVCNVKKLINEKKEDGKVFWQNLAGYKRQEALRPYLSSEEDRKKGKKFARYQLGDLLLHLEKKHGEDWGKVYDEAWERIDKKVEGLSKHIKLEEERRSEDAQSKAALTDWLRAKASFVIEGLKEADKDEFCRCELKLQKWYGDLRGKPFAIEAENSILDISGFSKQYNCAFIWQKDGVKKLNLYLIINYFKGGKLRFKKIKPEAFEANRFYTVINKKSGEIVPMEVNFNFDDPNLIILPLAFGKRQGREFIWNDLLSLETGSLKLANGRVIEKTLYNRRTRQDEPALFVALTFERREVLDSSNIKPMNLIGVDRGENIPAVIALTDREGCPLSRFKDSLGNPTHILRIGESYKEKQRTIQAKKEVEQRRAGGYSRKYASKAKNLADDMVRNTARDLLYYAVTQDAMLIFENLSRGFGRQGKRTFMAERQYTRMEDWLTAKLAYEGLPSKTYLSKTLAQYTSKTCSNCGFTITSADYDRVLEKLKKTATGWMTTINGKELKVEGQITYYNRYKRQNVVKDLSVELDRLSEESVNNDISSWTKGRSGEALSLLKKRFSHRPVQEKFVCLNCGFETHADEQAALNIARSWLFLRSQEYKKYQTNKTTGNTDKRAFVETWQSFYRKKLKEVWKPAV

SEQ ID NO: 25542 - protein, 978 aa, synthetic construct
  REGION 1..978: note = engineered CasX variant
QEIKRINKIRRRLVKDSNTKKAGKTGPMKTLLVRVMTPDLRERLENLRKKPENIPQPISNTSRANLNKLLTDYTEMKKAILHVYWEEFQKDPVGLMSRVAQPASKKIDQNKLKPEMDEKGNLTTAGFACSQCGQPLFVYKLEQVSEKGKAYTNYFGRCNVAEHEKLILLAQLKPEKDSDEAVTYSLGKFGQRALDFYSIHVTKESTHPVKPLAQIAGNRYASGPVGKALSDACMGTIASFLSKYQDIIIEHQKVVKGNQKRLESLRELAGKENLEYPSVTLPPQPHTKEGVDAYNEVIARVRMWVNLNLWQKLKLSRDDAKPLLRLKGFPSFPLVERQANEVDWWDMVCNVKKLINEKKEDGKVFWQNLAGYKRQEALRPYLSSEEDRKKGKKFARYQLGDLLLHLEKKHGEDWGKVYDEAWERIDKKVEGLSKHIKLEEERRSEDAQSKAALTDWLRAKASFVIEGLKEADKDEFCRCELKLQKWYGDLRGKPFAIEAENSILDISGFSKQYNCAFIWQKDGVKKLNLYLIINYFKGGKLRFKKIKPEAFEANRFYTVINKKSGEIVPMEVNFNFDDPNLIILPLAFGKRQGREFIWNDLLSLETGSLKLANGRVIEKTLYNRRTRQDEPALFVALTFERREVLDSSNIKPMNLIGVDRGENIPAVIALTDQEGCPLSRFKDSLGNPTHILRIGESYKEKQRTIQAKKEVEQRRAGGYSRKYASKAKNLADDMVRNTARDLLYYAVTQDAMLIFENLSRGFGRQGKRTFMAERQYTRMEDWLTAKLAYEGLPSKTYLSKTLAQYTSKTCSNCGFTITSADYDRVLEKLKKTATGWMTTINGKELKVEGQITYYNRYKRQNVVKDLSVELDRLSEESVNNDISSWTKGRSGEALSLLKKRFSHRPVQEKFVCLNCGFETHADEQAALNIARSWLFLRSQEYKKYQTNKTTGNTDKRAFVETWQSFYRKKLKEVWKPAV

SEQ ID NO: 25543 - protein, 978 aa, synthetic construct
  REGION 1..978: note = engineered CasX variant
QEIKRINKIRRRLVKDSNTKKAGKTGPMKTLLVRVMTPDLRERLENLRKKPENIPQPISNTSRANLNKLLTDYTEMKKAILHVYWEEFQKDPVGLMSRVAQPASKKIDQNKLKPEMDEKGNLTTAGFACSQCGQPLFVYKLEQVSEKGKAYTNYFGRCNVAEHEKLILLAQLKPEKDSDEAVTYSLGKFGQRALDFYSIHVTKESTHPVKPLAQIAGNRYASGPVGKALSDACMGTIASFLSKYQDIIIEHQKVVKGNQKRLESLRELAGKENLEYPSVTLPPQPHTKEGVDAYNEVIARVRMWVNLNLWQKLKLSRDDAKPLLRLKGFPSFPLVERQANEVDWWDMVCNVKKLINEKKEDGKVFWQNLAGYKRQEALRPYLSSEEDRKKGKKFARYQLGDLLLHLEKKHGEDWGKVYDEAWERIDKKVEGLSKHIKLEEERRSEDAQSKAALTDWLRAKASFVIEGLKEADKDEFCRCELKLQKWYGDLRGKPFAIEAENSILDISGFSKQYNCAFIWQKDGVKKLNLYLIINYFKGGKLRFKKIKPEAFEANRFYTVINKKSGEIVPMEVNFNFDDPNLIILPLAFGKRQGREFIWNDLLSLETGSLKLANGRVIEKTLYNRRTRQDEPALFVALTFERREVLDSSNIKPMNLIGVDRGENIPAVIALTDPYGCPLSRFKDSLGNPTHIYRIGESYKEKQRTIQAKKEVEQRRAGGYSRKYASKAKNLADDMVRNTARDLLYYAVTQDAMLIFENLSRGFGRQGKRTFMAERQYTRMEDWLTAKLAYEGLPSKTYLSKTLAQYTSKTCSNCGFTITSADYDRVLEKLKKTATGWMTTINGKELKVEGQITYYNRYKRQNVVKDLSVELDRLSEESVNNDISSWTKGRSGEALSLLKKRFSHRPVQEKFVCLNCGFETHADEQAALNIARSWLFLRSQEYKKYQTNKTTGNTDKRAFVETWQSFYRKKLKEVWKPAV

SEQ ID NO: 25544 - protein, 978 aa, synthetic construct
  REGION 1..978: note = engineered CasX variant
QEIKRINKIRRRLVKDSNTKKAGKTGPMKTLLVRVMTPDLRERLENLRKKPENIPQPISNTSRANLNKLLTDYTEMKKAILHVYWEEFQKDPVGLMSRVAQPASKKIDQNKLKPEMDEKGNLTTAGFACSQCGQPLFVYKLEQVSEKGKAYTNYFGRCNVAEHEKLILLAQLKPEKDSDEAVTYSLGKFGQRALDFYSIHVTKESTHPVKPLAQIAGNRYASGPVGKALSDACMGTIASFLSKYQDIIIEHQKVVKGNQKRLESLRELAGKENLEYPSVTLPPQPHTKEGVDAYNEVIARVRMWVNLNLWQKLKLSRDDAKPLLRLKGFPSFPLVERQANEVDWWDMVCNVKKLINEKKEDGKVFWQNLAGYKRQEALRPYLSSEEDRKKGKKFARYQLGDLLLHLEKKHGEDWGKVYDEAWERIDKKVEGLSKHIKLEEERRSEDAQSKAALTDWLRAKASFVIEGLKEADKDEFCRCELKLQKWYGDLRGKPFAIEAENSILDISGFSKQYNCAFIWQKDGVKKLNLYLIINYFKGGKLRFKKIKPEAFEANRFYTVINKKSGEIVPMEVNFNFDDPNLIILPLAFGKRQGREFIWNDLLSLETGSLKLANGRVIEKTLYNRRTRQDEPALFVALTFERREVLDSSNIKPMNLIGVDRGENIPAVIALTDPYGCPLSRFKDSLGNPTHILRIGESYKEKQRTIQAKKEVQQRRAGGYSRKYASKAKNLADDMVRNTARDLLYYAVTQDAMLIFENLSRGFGRQGKRTFMAERQYTRMEDWLTAKLAYEGLPSKTYLSKTLAQYTSKTCSNCGFTITSADYDRVLEKLKKTATGWMTTINGKELKVEGQITYYNRYKRQNVVKDLSVELDRLSEESVNNDISSWTKGRSGEALSLLKKRFSHRPVQEKFVCLNCGFETHADEQAALNIARSWLFLRSQEYKKYQTNKTTGNTDKRAFVETWQSFYRKKLKEVWKPAV

SEQ ID NO: 25545 - protein, 978 aa, synthetic construct
  REGION 1..978: note = engineered CasX variant
QEIKRINKIRRRLVKDSNTKKAGKTGPMKTLLVRVMTPDLRERLENLRKKPENIPQPISNTSRANLNKLLTDYTEMKKAILHVYWEEFQKDPVGLMSRVAQPASKKIDQNKLKPEMDEKGNLTTAGFACSQCGQPLFVYKLEQVSEKGKAYTNYFGRCNVAEHEKLILLAQLKPEKDSDEAVTYSLGKFGQRALDFYSIHVTKESTHPVKPLAQIAGNRYASGPVGKALSDACMGTIASFLSKYQDIIIEHQKVVKGNQKRLESLRELAGKENLEYPSVTLPPQPHTKEGVDAYNEVIARVRMWVNLNLWQKLKLSRDDAKPLLRLKGFPSFPLVERQANEVDWWDMVCNVKKLINEKKEDGKVFWQNLAGYKRQEALRPYLSSEEDRKKGKKFARYQLGDLLLHLEKKHGEDWGKVYDEAWERIDKKVEGLSKHIKLEEERRSEDAQSKAALTDWLRAKASFVIEGLKEADKDEFCRCELKLQKWYGDLRGKPFAIEAENSILDISGFSKQYNCAFIWQKDGVKKLNLYLIINYFKGGKLRFKKIKPEAFEANRFYTVINKKSGEIVPMEVNFNFDDPNLIILPLAFGKRQGREFIWNDLLSLETGSLKLANGRVIEKTLYNRRTRQDEPALFVALTFERREVLDSSNIKPMNLIGVDRGENIPAVIALTDPYGCPLSRFKDSLGNPTHILRIGESYKEKQRTIQAKKEVEQRRAGGYSRKYASKAKNLADDMVRNTARDLLYYAVTQDAMLIFENLSRGFGRQGKRTFMAERQYTRMEDWLTAKLAYEGLPSKTYLSKTLAQYTSKTCSNCGFTITSADYDRVLEKLKKTATGWMTTINGKELKVEGQITYYNRYKRQNVVKDLSVELDRLSEESVNNDISSWTKGRSGEALSLLKKRFSHRPVQEKFVCLNCGFETHADEQAALNIARSWLFLRSQEYKKYQTNKTTGNTDKRAFVETWQSFYRKKLKEVWKPAV

SEQ ID NO: 25546 - protein, 978 aa, synthetic construct
  REGION 1..978: note = engineered CasX variant
QEIKRINKIRRRLVKDSNTKKAGKTGPMKTLLVRVMTPDLRERLENLRKKPENIPQPISNTSRANLNKLLTDYTEMKKAILHVYWEEFQKDPVGLMSRVAQPASKKIDQNKLKPEMDEKGNLTTAGFACSQCGQPLFVYKLEQVSEKGKAYTNYFGRCNVAEHEKLILLAQLKPEKDSDEAVTYSLGKFGQRALDFYSIHVTKESTHPVKPLAQIAGNRYASGPVGKALSDACMGTIASFLSKYQDIIIEHQKVVKGNQKRLESLRELAGKENLEYPSVTLPPQPHTKEGVDAYNEVIARVRMWVNLNLWQKLKLSRDDAKPLLRLKGFPSFPLVERQANEVDWWDMVCNVKKLINEKKEDGKVFWQNLAGYKRQEALRPYLSSEEDRKKGKKFARYQLGDLLLHLEKKHGEDWGKVYDEAWERIDKKVEGLSKHIKLEEERRSEDAQSKAALTDWLRAKASFVIEGLKEADKDEFCRCELKLQKWYGDLRGKPFAIEAENSILDISGFSKQYNCAFIWQKDGVKKLNLYLIINYFKGGKLRFKKIKPEAFEANRFYTVINKKSGEIVPMEVNFNFDDPNLIILPLAFGKRQGREFIWNDLLSLETGSLKLANGRVIEKTLYNRRTRQDEPALFVALTFERREVLDSSNIKPMNLIGVDRGENIPAVIALTDPYGCPLSRFKDSLGNPTAILRIGESYKEKQRTIQAKKEVEQRRAGGYSRKYASKAKNLADDMVRNTARDLLYYAVTQDAMLIFENLSRGFGRQGKRTFMAERQYTRMEDWLTAKLAYEGLPSKTYLSKTLAQYTSKTCSNCGFTITSADYDRVLEKLKKTATGWMTTINGKELKVEGQITYYNRYKRQNVVKDLSVELDRLSEESVNNDISSWTKGRSGEALSLLKKRFSHRPVQEKFVCLNCGFETHADEQAALNIARSWLFLRSQEYKKYQTNKTTGNTDKRAFVETWQSFYRKKLKEVWKPAV

SEQ ID NO: 25547 - protein, 978 aa, synthetic construct
  REGION 1..978: note = engineered CasX variant
QEIKRINKIRRRLVKDSNTKKAGKTGPMKTLLVRVMTPDLRERLENLRKKPENIPQPISNTSRANLNKLLTDYTEMKKAILHVYWEEFQKDPVGLMSRVAQPASKKIDQNKLKPEMDEKGNLTTAGFACSQCGQPLFVYKLEQVSEKGKAYTNYFGRCNVAEHEKLILLAQLKPEKDSDEAVTYSLGKFGQRALDFYSIHVTKESTHPVKPLAQIAGNRYASGPVGKALSDACMGTIASFLSKYQDIIIEHQKVVKGNQKRLESLRELAGKENLEYPSVTLPPQPHTKEGVDAYNEVIARVRMWVNLNLWQKLKLSRDDAKPLLRLKGFPSFPLVERQANEVDWWDMVCNVKKLINEKKEDGKVFWQNLAGYKRQEALRPYLSSEEDRKKGKKFARYQLGDLLLHLEKKHGEDWGKVYDEAWERIDKKVEGLSKHIKLEEERRSEDAQSKAALTDWLRAKASFVIEGLKEADKDEFCRCELKLQKWYGDLRGKPFAIEAENSILDISGFSKQYNCAFIWQKDGVKKLNLYLIINYFKGGKLRFKKIKPEAFEANRFYTVINKKSGEIVPMEVNFNFDDPNLIILPLAFGKRQGREFIWNDLLSLETGSLKLANGRVIEKTLYNRRTRQDEPALFVALTFERREVLDSSNIKPMNLIGVDRGENIPAVIALTDPWGCPLSRFKDSLGNPTYILRIGESYKEKQRTIQAKKEVEQRRAGGYSRKYASKAKNLADDMVRNTARDLLYYAVTQDAMLIFENLSRGFGRQGKRTFMAERQYTRMEDWLTAKLAYEGLPSKTYLSKTLAQYTSKTCSNCGFTITSADYDRVLEKLKKTATGWMTTINGKELKVEGQITYYNRYKRQNVVKDLSVELDRLSEESVNNDISSWTKGRSGEALSLLKKRFSHRPVQEKFVCLNCGFETHADEQAALNIARSWLFLRSQEYKKYQTNKTTGNTDKRAFVETWQSFYRKKLKEVWKPAV

SEQ ID NO: 25548 - protein, 978 aa, synthetic construct
  REGION 1..978: note = engineered CasX variant
QEIKRINKIRRRLVKDSNTKKAGKTGPMKTLLVRVMTPDLRERLENLRKKPENIPQPISNTSRANLNKLLTDYTEMKKAILHVYWEEFQKDPVGLMSRVAQPASKKIDQNKLKPEMDEKGNLTTAGFACSQCGQPLFVYKLEQVSEKGKAYTNYFGRCNVAEHEKLILLAQLKPEKDSDEAVTYSLGKFGQRALDFYSIHVTKESTHPVKPLAQIAGNRYASGPVGKALSDACMGTIASFLSKYQDIIIEHQKVVKGNQKRLESLRELAGKENLEYPSVTLPPQPHTKEGVDAYNEVIARVRMWVNLNLWQKLKLSRDDAKPLLRLKGFPSFPLVERQANEVDWWDMVCNVKKLINEKKEDGKVFWQNLAGYKRQEALRPYLSSEEDRKKGKKFARYQLGDLLLHLEKKHGEDWGKVYDEAWERIDKKVEGLSKHIKLEEERRSEDAQSKAALTDWLRAKASFVIEGLKEADKDEFCRCELKLQKWYGDLRGKPFAIEAENSILDISGFSKQYNCAFIWQKDGVKKLNLYLIINYFKGGKLRFKKIKPEAFEANRFYTVINKKSGEIVPMEVNFNFDDPNLIILPLAFGKRQGREFIWNDLLSLETGSLKLANGRVIEKTLYNRRTRQDEPALFVALTFERREVLDSSNIKPMNLIGVDRGENIPAVIALTDPWGCPLSRFKDSLGNPTHILRIGESYKEKQRTIQAKKEVEQRRAGGYSRKYASKAKNLADDMVRNTARDLLYYAVTQDAMLIFENLSRGFGRQGKRTFMAERQYTRMEDWLTAKLAYEGLPSKTYLSKTLAQYTSKTCSNCGFTITSADYDRVLEKLKKTATGWMTTINGKELKVEGQITYYNRYKRQNVVKDLSVELDRLSEESVNNDISSWTKGRSGEALSLLKKRFSHRPVQEKFVCLNCGFETHADEQAALNIARSWLFLRSQEYKKYQTNKTTGNTDKRAFVETWQSFYRKKLKEVWKPAV

SEQ ID NO: 25549 - protein, 978 aa, synthetic construct
  REGION 1..978: note = engineered CasX variant
QEIKRINKIRRRLVKDSNTKKAGKTGPMKTLLVRVMTPDLRERLENLRKKPENIPQPISNTSRANLNKLLTDYTEMKKAILHVYWEEFQKDPVGLMSRVAQPASKKIDQNKLKPEMDEKGNLTTAGFACSQCGQPLFVYKLEQVSEKGKAYTNYFGRCNVAEHEKLILLAQLKPEKDSDEAVTYSLGKFGQRALDFYSIHVTKESTHPVKPLAQIAGNRYASGPVGKALSDACMGTIASFLSKYQDIIIEHQKVVKGNQKRLESLRELAGKENLEYPSVTLPPQPHTKEGVDAYNEVIARVRMWVNLNLWQKLKLSRDDAKPLLRLKGFPSFPLVERQANEVDWWDMVCNVKKLINEKKEDGKVFWQNLAGYKRQEALRPYLSSEEDRKKGKKFARYQLGDLLLHLEKKHGEDWGKVYDEAWERIDKKVEGLSKHIKLEEERRSEDAQSKAALTDWLRAKASFVIEGLKEADKDEFCRCELKLQKWYGDLRGKPFAIEAENSILDISGFSKQYNCAFIWQKDGVKKLNLYLIINYFKGGKLRFKKIKPEAFEANRFYTVINKKSGEIVPMEVNFNFDDPNLIILPLAFGKRQGREFIWNDLLSLETGSLKLANGRVIEKTLYNRRTRQDEPALFVALTFERREVLDSSNIKPMNLIGVDRGENIPAVIALTDPWGCPLSCFKDSLGNPTHILRIGESYKEKQRTIQAKKEVEQRRAGGYSRKYASKAKNLADDMVRNTARDLLYYAVTQDAMLIFENLSRGFGRQGKRTFMAERQYTRMEDWLTAKLAYEGLPSKTYLSKTLAQYTSKTCSNCGFTITSADYDRVLEKLKKTATGWMTTINGKELKVEGQITYYNRYKRQNVVKDLSVELDRLSEESVNNDISSWTKGRSGEALSLLKKRFSHRPVQEKFVCLNCGFETHADEQAALNIARSWLFLRSQEYKKYQTNKTTGNTDKRAFVETWQSFYRKKLKEVWKPAV

SEQ ID NO: 25550 - protein, 978 aa, synthetic construct
  REGION 1..978: note = engineered CasX variant
QEIKRINKIRRRLVKDSNTKKAGKTGPMKTLLVRVMTPDLRERLENLRKKPENIPQPISNTSRANLNKLLTDYTEMKKAILHVYWEEFQKDPVGLMSRVAQPASKKIDQNKLKPEMDEKGNLTTAGFACSQCGQPLFVYKLEQVSEKGKAYTNYFGRCNVAEHEKLILLAQLKPEKDSDEAVTYSLGKFGQRALDFYSIHVTKESTHPVKPLAQIAGNRYASGPVGKALSDACMGTIASFLSKYQDIIIEHQKVVKGNQKRLESLRELAGKENLEYPSVTLPPQPHTKEGVDAYNEVIARVRMWVNLNLWQKLKLSRDDAKPLLRLKGFPSFPLVERQANEVDWWDMVCNVKKLINEKKEDGKVFWQNLAGYKRQEALRPYLSSEEDRKKGKKFARYQLGDLLLHLEKKHGEDWGKVYDEAWERIDKKVEGLSKHIKLEEERRSEDAQSKAALTDWLRAKASFVIEGLKEADKDEFCRCELKLQKWYGDLRGKPFAIEAENSILDISGFSKQYNCAFIWQKDGVKKLNLYLIINYFKGGKLRFKKIKPEAFEANRFYTVINKKSGEIVPMEVNFNFDDPNLIILPLAFGKRQGREFIWNDLLSLETGSLKLANGRVIEKTLYNRRTRQDEPALFVALTFERREVLDSSNIKPMNLIGVDRGENIPAVIALTDPVGCPLSRFKDSLGNPTHILRIGESYKEKQRTIQAKKEVEQRRAGGYSRKYASKAKNLADDMVRNTARDLLYYAVTQDAMLIFENLSRGFGRQGKRTFMAERQYTRMEDWLTAKLAYEGLPSKTYLSKTLAQYTSKTCSNCGFTITSADYDRVLEKLKKTATGWMTTINGKELKVEGQITYYNRYKRQNVVKDLSVELDRLSEESVNNDISSWTKGRSGEALSLLKKRFSHRPVQEKFVCLNCGFETHADEQAALNIARSWLFLRSQEYKKYQTNKTTGNTDKRAFVETWQSFYRKKLKEVWKPAV

SEQ ID NO: 25551 - protein, 978 aa, synthetic construct
  REGION 1..978: note = engineered CasX variant
QEIKRINKIRRRLVKDSNTKKAGKTGPMKTLLVRVMTPDLRERLENLRKKPENIPQPISNTSRANLNKLLTDYTEMKKAILHVYWEEFQKDPVGLMSRVAQPASKKIDQNKLKPEMDEKGNLTTAGFACSQCGQPLFVYKLEQVSEKGKAYTNYFGRCNVAEHEKLILLAQLKPEKDSDEAVTYSLGKFGQRALDFYSIHVTKESTHPVKPLAQIAGNRYASGPVGKALSDACMGTIASFLSKYQDIIIEHQKVVKGNQKRLESLRELAGKENLEYPSVTLPPQPHTKEGVDAYNEVIARVRMWVNLNLWQKLKLSRDDAKPLLRLKGFPSFPLVERQANEVDWWDMVCNVKKLINEKKEDGKVFWQNLAGYKRQEALRPYLSSEEDRKKGKKFARYQLGDLLLHLEKKHGEDWGKVYDEAWERIDKKVEGLSKHIKLEEERRSEDAQSKAALTDWLRAKASFVIEGLKEADKDEFCRCELKLQKWYGDLRGKPFAIEAENSILDISGFSKQYNCAFIWQKDGVKKLNLYLIINYFKGGKLRFKKIKPEAFEANRFYTVINKKSGEIVPMEVNFNFDDPNLIILPLAFGKRQGREFIWNDLLSLETGSLKLANGRVIEKTLYNRRTRQDEPALFVALTFERREVLDSSNIKPMNLIGVDRGENIPAVIALTDPVGCPLSRFKDSLGNPTHILRIGESYKEAQRTIQAKKEVEQRRAGGYSRKYASKAKNLADDMVRNTARDLLYYAVTQDAMLIFENLSRGFGRQGKRTFMAERQYTRMEDWLTAKLAYEGLPSKTYLSKTLAQYTSKTCSNCGFTITSADYDRVLEKLKKTATGWMTTINGKELKVEGQITYYNRYKRQNVVKDLSVELDRLSEESVNNDISSWTKGRSGEALSLLKKRFSHRPVQEKFVCLNCGFETHADEQAALNIARSWLFLRSQEYKKYQTNKTTGNTDKRAFVETWQSFYRKKLKEVWKPAV

SEQ ID NO: 25552 - protein, 978 aa, synthetic construct
  REGION 1..978: note = engineered CasX variant
QEIKRINKIRRRLVKDSNTKKAGKTGPMKTLLVRVMTPDLRERLENLRKKPENIPQPISNTSRANLNKLLTDYTEMKKAILHVYWEEFQKDPVGLMSRVAQPASKKIDQNKLKPEMDEKGNLTTAGFACSQCGQPLFVYKLEQVSEKGKAYTNYFGRCNVAEHEKLILLAQLKPEKDSDEAVTYSLGKFGQRALDFYSIHVTKESTHPVKPLAQIAGNRYASGPVGKALSDACMGTIASFLSKYQDIIIEHQKVVKGNQKRLESLRELAGKENLEYPSVTLPPQPHTKEGVDAYNEVIARVRMWVNLNLWQKLKLSRDDAKPLLRLKGFPSFPLVERQANEVDWWDMVCNVKKLINEKKEDGKVFWQNLAGYKRQEALRPYLSSEEDRKKGKKFARYQLGDLLLHLEKKHGEDWGKVYDEAWERIDKKVEGLSKHIKLEEERRSEDAQSKAALTDWLRAKASFVIEGLKEADKDEFCRCELKLQKWYGDLRGKPFAIEAENSILDISGFSKQYNCAFIWQKDGVKKLNLYLIINYFKGGKLRFKKIKPEAFEANRFYTVINKKSGEIVPMEVNFNFDDPNLIILPLAFGKRQGREFIWNDLLSLETGSLKLANGRVIEKTLYNRRTRQDEPALFVALTFERREVLDSSNIKPMNLIGVDRGENIPAVIALTDPTGCPLSRFKNSLGNPTHILRIGESYKEKQRTIQACKEVEQRRAGGYSRKYASKAKNLADDMVRNTARDLLYYAVTQDAMLIFENLSRGFGRQGKRTFMAERQYTRMEDWLTAKLAYEGLPSKTYLSKTLAQYTSKTCSNCGFTITSADYDRVLEKLKKTATGWMTTINGKELKVEGQITYYNRYKRQNVVKDLSVELDRLSEESVNNDISSWTKGRSGEALSLLKKRFSHRPVQEKFVCLNCGFETHADEQAALNIARSWLFLRSQEYKKYQTNKTTGNTDKRAFVETWQSFYRKKLKEVWKPAV

SEQ ID NO: 25553 - protein, 978 aa, synthetic construct
  REGION 1..978: note = engineered CasX variant
QEIKRINKIRRRLVKDSNTKKAGKTGPMKTLLVRVMTPDLRERLENLRKKPENIPQPISNTSRANLNKLLTDYTEMKKAILHVYWEEFQKDPVGLMSRVAQPASKKIDQNKLKPEMDEKGNLTTAGFACSQCGQPLFVYKLEQVSEKGKAYTNYFGRCNVAEHEKLILLAQLKPEKDSDEAVTYSLGKFGQRALDFYSIHVTKESTHPVKPLAQIAGNRYASGPVGKALSDACMGTIASFLSKYQDIIIEHQKVVKGNQKRLESLRELAGKENLEYPSVTLPPQPHTKEGVDAYNEVIARVRMWVNLNLWQKLKLSRDDAKPLLRLKGFPSFPLVERQANEVDWWDMVCNVKKLINEKKEDGKVFWQNLAGYKRQEALRPYLSSEEDRKKGKKFARYQLGDLLLHLEKKHGEDWGKVYDEAWERIDKKVEGLSKHIKLEEERRSEDAQSKAALTDWLRAKASFVIEGLKEADKDEFCRCELKLQKWYGDLRGKPFAIEAENSILDISGFSKQYNCAFIWQKDGVKKLNLYLIINYFKGGKLRFKKIKPEAFEANRFYTVINKKSGEIVPMEVNFNFDDPNLIILPLAFGKRQGREFIWNDLLSLETGSLKLANGRVIEKTLYNRRTRQDEPALFVALTFERREVLDSSNIKPMNLIGVDRGENIPAVIALTDPTGCPLSRFKDSLGNPTHILRIGESYKEKQTTIQAKKEVEQRRAGGYSRKYASKAKNLADDMVRNTARDLLYYAVTQDAMLIFENLSRGFGRQGKRTFMAERQYTRMEDWLTAKLAYEGLPSKTYLSKTLAQYTSKTCSNCGFTITSADYDRVLEKLKKTATGWMTTINGKELKVEGQITYYNRYKRQNVVKDLSVELDRLSEESVNNDISSWTKGRSGEALSLLKKRFSHRPVQEKFVCLNCGFETHADEQAALNIARSWLFLRSQEYKKYQTNKTTGNTDKRAFVETWQSFYRKKLKEVWKPAV

SEQ ID NO: 25554 - protein, 978 aa, synthetic construct
  REGION 1..978: note = engineered CasX variant
QEIKRINKIRRRLVKDSNTKKAGKTGPMKTLLVRVMTPDLRERLENLRKKPENIPQPISNTSRANLNKLLTDYTEMKKAILHVYWEEFQKDPVGLMSRVAQPASKKIDQNKLKPEMDEKGNLTTAGFACSQCGQPLFVYKLEQVSEKGKAYTNYFGRCNVAEHEKLILLAQLKPEKDSDEAVTYSLGKFGQRALDFYSIHVTKESTHPVKPLAQIAGNRYASGPVGKALSDACMGTIASFLSKYQDIIIEHQKVVKGNQKRLESLRELAGKENLEYPSVTLPPQPHTKEGVDAYNEVIARVRMWVNLNLWQKLKLSRDDAKPLLRLKGFPSFPLVERQANEVDWWDMVCNVKKLINEKKEDGKVFWQNLAGYKRQEALRPYLSSEEDRKKGKKFARYQLGDLLLHLEKKHGEDWGKVYDEAWERIDKKVEGLSKHIKLEEERRSEDAQSKAALTDWLRAKASFVIEGLKEADKDEFCRCELKLQKWYGDLRGKPFAIEAENSILDISGFSKQYNCAFIWQKDGVKKLNLYLIINYFKGGKLRFKKIKPEAFEANRFYTVINKKSGEIVPMEVNFNFDDPNLIILPLAFGKRQGREFIWNDLLSLETGSLKLANGRVIEKTLYNRRTRQDEPALFVALTFERREVLDSSNIKPMNLIGVDRGENIPAVIALTDPTGCPLSRFKDSLGNPTHILRIGESYKEKQRTIQAKKEVEQRRAGGYSRKYASKAKNLADDMVRNTARDLLYYAVTQDAMLIFENLSRGFGRQGKRTFMAERQYTRMEDWLTAKLAYEGLPSKTYLSKTLAQYTSKTCSNCGFTITSADYDRVLEKLKKTATGWMTTINGKELKVEGQITYYNRYKRQNVVKDLSVELDRLSEESVNNDISSWTKGRSGEALSLLKKRFSHRPVQEKFVCLNCGFETHADEQAALNIARSWLFLRSQEYKKYQTNKTTGNTDKRAFVETWQSFYRKKLKEVWKPAV

SEQ ID NO: 25555 - protein, 978 aa, synthetic construct
  REGION 1..978: note = engineered CasX variant
QEIKRINKIRRRLVKDSNTKKAGKTGPMKTLLVRVMTPDLRERLENLRKKPENIPQPISNTSRANLNKLLTDYTEMKKAILHVYWEEFQKDPVGLMSRVAQPASKKIDQNKLKPEMDEKGNLTTAGFACSQCGQPLFVYKLEQVSEKGKAYTNYFGRCNVAEHEKLILLAQLKPEKDSDEAVTYSLGKFGQRALDFYSIHVTKESTHPVKPLAQIAGNRYASGPVGKALSDACMGTIASFLSKYQDIIIEHQKVVKGNQKRLESLRELAGKENLEYPSVTLPPQPHTKEGVDAYNEVIARVRMWVNLNLWQKLKLSRDDAKPLLRLKGFPSFPLVERQANEVDWWDMVCNVKKLINEKKEDGKVFWQNLAGYKRQEALRPYLSSEEDRKKGKKFARYQLGDLLLHLEKKHGEDWGKVYDEAWERIDKKVEGLSKHIKLEEERRSEDAQSKAALTDWLRAKASFVIEGLKEADKDEFCRCELKLQKWYGDLRGKPFAIEAENSILDISGFSKQYNCAFIWQKDGVKKLNLYLIINYFKGGKLRFKKIKPEAFEANRFYTVINKKSGEIVPMEVNFNFDDPNLIILPLAFGKRQGREFIWNDLLSLETGSLKLANGRVIEKTLYNRRTRQDEPALFVALTFERREVLDSSNIKPMNLIGVDRGENIPAVIALTDPTGCPLSRFKDSLGNPTHILRIGESYKEKQRTIQAKKCVEQRRAGGYSRKYASKAKNLADDMVRNTARDLLYYAVTQDAMLIFENLSRGFGRQGKRTFMAERQYTRMEDWLTAKLAYEGLPSKTYLSKTLAQYTSKTCSNCGFTITSADYDRVLEKLKKTATGWMTTINGKELKVEGQITYYNRYKRQNVVKDLSVELDRLSEESVNNDISSWTKGRSGEALSLLKKRFSHRPVQEKFVCLNCGFETHADEQAALNIARSWLFLRSQEYKKYQTNKTTGNTDKRAFVETWQSFYRKKLKEVWKPAV

SEQ ID NO: 25556 - protein, 978 aa, synthetic construct
  REGION 1..978: note = engineered CasX variant
QEIKRINKIRRRLVKDSNTKKAGKTGPMKTLLVRVMTPDLRERLENLRKKPENIPQPISNTSRANLNKLLTDYTEMKKAILHVYWEEFQKDPVGLMSRVAQPASKKIDQNKLKPEMDEKGNLTTAGFACSQCGQPLFVYKLEQVSEKGKAYTNYFGRCNVAEHEKLILLAQLKPEKDSDEAVTYSLGKFGQRALDFYSIHVTKESTHPVKPLAQIAGNRYASGPVGKALSDACMGTIASFLSKYQDIIIEHQKVVKGNQKRLESLRELAGKENLEYPSVTLPPQPHTKEGVDAYNEVIARVRMWVNLNLWQKLKLSRDDAKPLLRLKGFPSFPLVERQANEVDWWDMVCNVKKLINEKKEDGKVFWQNLAGYKRQEALRPYLSSEEDRKKGKKFARYQLGDLLLHLEKKHGEDWGKVYDEAWERIDKKVEGLSKHIKLEEERRSEDAQSKAALTDWLRAKASFVIEGLKEADKDEFCRCELKLQKWYGDLRGKPFAIEAENSILDISGFSKQYNCAFIWQKDGVKKLNLYLIINYFKGGKLRFKKIKPEAFEANRFYTVINKKSGEIVPMEVNFNFDDPNLIILPLAFGKRQGREFIWNDLLSLETGSLKLANGRVIEKTLYNRRTRQDEPALFVALTFERREVLDSSNIKPMNLIGVDRGENIPAVIALTDPTGCPLSRFKDSLGNPTHILRIGESYKEKQRTIQACKEVEQRRAGGYSRKYASKAKNLADDMVRNTARDLLYYAVTQDAMLIFENLSRGFGRQGKRTFMAERQYTRMEDWLTAKLAYEGLPSKTYLSKTLAQYTSKTCSNCGFTITSADYDRVLEKLKKTATGWMTTINGKELKVEGQITYYNRYKRQNVVKDLSVELDRLSEESVNNDISSWTKGRSGEALSLLKKRFSHRPVQEKFVCLNCGFETHADEQAALNIARSWLFLRSQEYKKYQTNKTTGNTDKRAFVETWQSFYRKKLKEVWKPAV

SEQ ID NO: 25557 - protein, 978 aa, synthetic construct
  REGION 1..978: note = engineered CasX variant
QEIKRINKIRRRLVKDSNTKKAGKTGPMKTLLVRVMTPDLRERLENLRKKPENIPQPISNTSRANLNKLLTDYTEMKKAILHVYWEEFQKDPVGLMSRVAQPASKKIDQNKLKPEMDEKGNLTTAGFACSQCGQPLFVYKLEQVSEKGKAYTNYFGRCNVAEHEKLILLAQLKPEKDSDEAVTYSLGKFGQRALDFYSIHVTKESTHPVKPLAQIAGNRYASGPVGKALSDACMGTIASFLSKYQDIIIEHQKVVKGNQKRLESLRELAGKENLEYPSVTLPPQPHTKEGVDAYNEVIARVRMWVNLNLWQKLKLSRDDAKPLLRLKGFPSFPLVERQANEVDWWDMVCNVKKLINEKKEDGKVFWQNLAGYKRQEALRPYLSSEEDRKKGKKFARYQLGDLLLHLEKKHGEDWGKVYDEAWERIDKKVEGLSKHIKLEEERRSEDAQSKAALTDWLRAKASFVIEGLKEADKDEFCRCELKLQKWYGDLRGKPFAIEAENSILDISGFSKQYNCAFIWQKDGVKKLNLYLIINYFKGGKLRFKKIKPEAFEANRFYTVINKKSGEIVPMEVNFNFDDPNLIILPLAFGKRQGREFIWNDLLSLETGSLKLANGRVIEKTLYNRRTRQDEPALFVALTFERREVLDSSNIKPMNLIGVDRGENIPAVIALTDPTGCPLSRFKDSLGNPTHILRIGESYKEKQRTIAAKKEVEQRRAGGYSRKYASKAKNLADDMVRNTARDLLYYAVTQDAMLIFENLSRGFGRQGKRTFMAERQYTRMEDWLTAKLAYEGLPSKTYLSKTLAQYTSKTCSNCGFTITSADYDRVLEKLKKTATGWMTTINGKELKVEGQITYYNRYKRQNVVKDLSVELDRLSEESVNNDISSWTKGRSGEALSLLKKRFSHRPVQEKFVCLNCGFETHADEQAALNIARSWLFLRSQEYKKYQTNKTTGNTDKRAFVETWQSFYRKKLKEVWKPAV

SEQ ID NO: 25558 - protein, 978 aa, synthetic construct
  REGION 1..978: note = engineered CasX variant
QEIKRINKIRRRLVKDSNTKKAGKTGPMKTLLVRVMTPDLRERLENLRKKPENIPQPISNTSRANLNKLLTDYTEMKKAILHVYWEEFQKDPVGLMSRVAQPASKKIDQNKLKPEMDEKGNLTTAGFACSQCGQPLFVYKLEQVSEKGKAYTNYFGRCNVAEHEKLILLAQLKPEKDSDEAVTYSLGKFGQRALDFYSIHVTKESTHPVKPLAQIAGNRYASGPVGKALSDACMGTIASFLSKYQDIIIEHQKVVKGNQKRLESLRELAGKENLEYPSVTLPPQPHTKEGVDAYNEVIARVRMWVNLNLWQKLKLSRDDAKPLLRLKGFPSFPLVERQANEVDWWDMVCNVKKLINEKKEDGKVFWQNLAGYKRQEALRPYLSSEEDRKKGKKFARYQLGDLLLHLEKKHGEDWGKVYDEAWERIDKKVEGLSKHIKLEEERRSEDAQSKAALTDWLRAKASFVIEGLKEADKDEFCRCELKLQKWYGDLRGKPFAIEAENSILDISGFSKQYNCAFIWQKDGVKKLNLYLIINYFKGGKLRFKKIKPEAFEANRFYTVINKKSGEIVPMEVNFNFDDPNLIILPLAFGKRQGREFIWNDLLSLETGSLKLANGRVIEKTLYNRRTRQDEPALFVALTFERREVLDSSNIKPMNLIGVDRGENIPAVIALTDPSGCPLSRFKDSLGNPTHLLRIGESYKEKQRTIQAKKEVEQRRAGGYSRKYASKAKNLADDMVRNTARDLLYYAVTQDAMLIFENLSRGFGRQGKRTFMAERQYTRMEDWLTAKLAYEGLPSKTYLSKTLAQYTSKTCSNCGFTITSADYDRVLEKLKKTATGWMTTINGKELKVEGQITYYNRYKRQNVVKDLSVELDRLSEESVNNDISSWTKGRSGEALSLLKKRFSHRPVQEKFVCLNCGFETHADEQAALNIARSWLFLRSQEYKKYQTNKTTGNTDKRAFVETWQSFYRKKLKEVWKPAV

SEQ ID NO: 25559 - protein, 978 aa, synthetic construct
  REGION 1..978: note = engineered CasX variant
QEIKRINKIRRRLVKDSNTKKAGKTGPMKTLLVRVMTPDLRERLENLRKKPENIPQPISNTSRANLNKLLTDYTEMKKAILHVYWEEFQKDPVGLMSRVAQPASKKIDQNKLKPEMDEKGNLTTAGFACSQCGQPLFVYKLEQVSEKGKAYTNYFGRCNVAEHEKLILLAQLKPEKDSDEAVTYSLGKFGQRALDFYSIHVTKESTHPVKPLAQIAGNRYASGPVGKALSDACMGTIASFLSKYQDIIIEHQKVVKGNQKRLESLRELAGKENLEYPSVTLPPQPHTKEGVDAYNEVIARVRMWVNLNLWQKLKLSRDDAKPLLRLKGFPSFPLVERQANEVDWWDMVCNVKKLINEKKEDGKVFWQNLAGYKRQEALRPYLSSEEDRKKGKKFARYQLGDLLLHLEKKHGEDWGKVYDEAWERIDKKVEGLSKHIKLEEERRSEDAQSKAALTDWLRAKASFVIEGLKEADKDEFCRCELKLQKWYGDLRGKPFAIEAENSILDISGFSKQYNCAFIWQKDGVKKLNLYLIINYFKGGKLRFKKIKPEAFEANRFYTVINKKSGEIVPMEVNFNFDDPNLIILPLAFGKRQGREFIWNDLLSLETGSLKLANGRVIEKTLYNRRTRQDEPALFVALTFERREVLDSSNIKPMNLIGVDRGENIPAVIALTDPSGCPLSRFKDSLGNPTHLLRIGESYKEKQRTIQAKKAVEQRRAGGYSRKYASKAKNLADDMVRNTARDLLYYAVTQDAMLIFENLSRGFGRQGKRTFMAERQYTRMEDWLTAKLAYEGLPSKTYLSKTLAQYTSKTCSNCGFTITSADYDRVLEKLKKTATGWMTTINGKELKVEGQITYYNRYKRQNVVKDLSVELDRLSEESVNNDISSWTKGRSGEALSLLKKRFSHRPVQEKFVCLNCGFETHADEQAALNIARSWLFLRSQEYKKYQTNKTTGNTDKRAFVETWQSFYRKKLKEVWKPAV

SEQ ID NO: 25560 - protein, 978 aa, synthetic construct
  REGION 1..978: note = engineered CasX variant
QEIKRINKIRRRLVKDSNTKKAGKTGPMKTLLVRVMTPDLRERLENLRKKPENIPQPISNTSRANLNKLLTDYTEMKKAILHVYWEEFQKDPVGLMSRVAQPASKKIDQNKLKPEMDEKGNLTTAGFACSQCGQPLFVYKLEQVSEKGKAYTNYFGRCNVAEHEKLILLAQLKPEKDSDEAVTYSLGKFGQRALDFYSIHVTKESTHPVKPLAQIAGNRYASGPVGKALSDACMGTIASFLSKYQDIIIEHQKVVKGNQKRLESLRELAGKENLEYPSVTLPPQPHTKEGVDAYNEVIARVRMWVNLNLWQKLKLSRDDAKPLLRLKGFPSFPLVERQANEVDWWDMVCNVKKLINEKKEDGKVFWQNLAGYKRQEALRPYLSSEEDRKKGKKFARYQLGDLLLHLEKKHGEDWGKVYDEAWERIDKKVEGLSKHIKLEEERRSEDAQSKAALTDWLRAKASFVIEGLKEADKDEFCRCELKLQKWYGDLRGKPFAIEAENSILDISGFSKQYNCAFIWQKDGVKKLNLYLIINYFKGGKLRFKKIKPEAFEANRFYTVINKKSGEIVPMEVNFNFDDPNLIILPLAFGKRQGREFIWNDLLSLETGSLKLANGRVIEKTLYNRRTRQDEPALFVALTFERREVLDSSNIKPMNLIGVDRGENIPAVIALTDPSGCPLSRFKDSLGNPTHILRIGETYKNKQRTIQAKKEVEQRRAGGYSRKYASKAKNLADDMVRNTARDLLYYAVTQDAMLIFENLSRGFGRQGKRTFMAERQYTRMEDWLTAKLAYEGLPSKTYLSKTLAQYTSKTCSNCGFTITSADYDRVLEKLKKTATGWMTTINGKELKVEGQITYYNRYKRQNVVKDLSVELDRLSEESVNNDISSWTKGRSGEALSLLKKRFSHRPVQEKFVCLNCGFETHADEQAALNIARSWLFLRSQEYKKYQTNKTTGNTDKRAFVETWQSFYRKKLKEVWKPAV

SEQ ID NO: 25561 - protein, 978 aa, synthetic construct
  REGION 1..978: note = engineered CasX variant
QEIKRINKIRRRLVKDSNTKKAGKTGPMKTLLVRVMTPDLRERLENLRKKPENIPQPISNTSRANLNKLLTDYTEMKKAILHVYWEEFQKDPVGLMSRVAQPASKKIDQNKLKPEMDEKGNLTTAGFACSQCGQPLFVYKLEQVSEKGKAYTNYFGRCNVAEHEKLILLAQLKPEKDSDEAVTYSLGKFGQRALDFYSIHVTKESTHPVKPLAQIAGNRYASGPVGKALSDACMGTIASFLSKYQDIIIEHQKVVKGNQKRLESLRELAGKENLEYPSVTLPPQPHTKEGVDAYNEVIARVRMWVNLNLWQKLKLSRDDAKPLLRLKGFPSFPLVERQANEVDWWDMVCNVKKLINEKKEDGKVFWQNLAGYKRQEALRPYLSSEEDRKKGKKFARYQLGDLLLHLEKKHGEDWGKVYDEAWERIDKKVEGLSKHIKLEEERRSEDAQSKAALTDWLRAKASFVIEGLKEADKDEFCRCELKLQKWYGDLRGKPFAIEAENSILDISGFSKQYNCAFIWQKDGVKKLNLYLIINYFKGGKLRFKKIKPEAFEANRFYTVINKKSGEIVPMEVNFNFDDPNLIILPLAFGKRQGREFIWNDLLSLETGSLKLANGRVIEKTLYNRRTRQDEPALFVALTFERREVLDSSNIKPMNLIGVDRGENIPAVIALTDPSGCPLSRFKDSLGNPTHILRIGETYKEKQRTIQAKKEVEQRRAGGYSRKYASKAKNLADDMVRNTARDLLYYAVTQDAMLIFENLSRGFGRQGKRTFMAERQYTRMEDWLTAKLAYEGLPSKTYLSKTLAQYTSKTCSNCGFTITSADYDRVLEKLKKTATGWMTTINGKELKVEGQITYYNRYKRQNVVKDLSVELDRLSEESVNNDISSWTKGRSGEALSLLKKRFSHRPVQEKFVCLNCGFETHADEQAALNIARSWLFLRSQEYKKYQTNKTTGNTDKRAFVETWQSFYRKKLKEVWKPAV

SEQ ID NO: 25562 - protein, 978 aa, synthetic construct
  REGION 1..978: note = engineered CasX variant
QEIKRINKIRRRLVKDSNTKKAGKTGPMKTLLVRVMTPDLRERLENLRKKPENIPQPISNTSRANLNKLLTDYTEMKKAILHVYWEEFQKDPVGLMSRVAQPASKKIDQNKLKPEMDEKGNLTTAGFACSQCGQPLFVYKLEQVSEKGKAYTNYFGRCNVAEHEKLILLAQLKPEKDSDEAVTYSLGKFGQRALDFYSIHVTKESTHPVKPLAQIAGNRYASGPVGKALSDACMGTIASFLSKYQDIIIEHQKVVKGNQKRLESLRELAGKENLEYPSVTLPPQPHTKEGVDAYNEVIARVRMWVNLNLWQKLKLSRDDAKPLLRLKGFPSFPLVERQANEVDWWDMVCNVKKLINEKKEDGKVFWQNLAGYKRQEALRPYLSSEEDRKKGKKFARYQLGDLLLHLEKKHGEDWGKVYDEAWERIDKKVEGLSKHIKLEEERRSEDAQSKAALTDWLRAKASFVIEGLKEADKDEFCRCELKLQKWYGDLRGKPFAIEAENSILDISGFSKQYNCAFIWQKDGVKKLNLYLIINYFKGGKLRFKKIKPEAFEANRFYTVINKKSGEIVPMEVNFNFDDPNLIILPLAFGKRQGREFIWNDLLSLETGSLKLANGRVIEKTLYNRRTRQDEPALFVALTFERREVLDSSNIKPMNLIGVDRGENIPAVIALTDPSGCPLSRFKDSLGNPTHILRIGESYKNKQRTIQAKKEVEQRRAGGYSRKYASKAKNLADDMVRNTARDLLYYAVTQDAMLIFENLSRGFGRQGKRTFMAERQYTRMEDWLTAKLAYEGLPSKTYLSKTLAQYTSKTCSNCGFTITSADYDRVLEKLKKTATGWMTTINGKELKVEGQITYYNRYKRQNVVKDLSVELDRLSEESVNNDISSWTKGRSGEALSLLKKRFSHRPVQEKFVCLNCGFETHADEQAALNIARSWLFLRSQEYKKYQTNKTTGNTDKRAFVETWQSFYRKKLKEVWKPAV

SEQ ID NO: 25563 - protein, 978 aa, synthetic construct
  REGION 1..978: note = engineered CasX variant
QEIKRINKIRRRLVKDSNTKKAGKTGPMKTLLVRVMTPDLRERLENLRKKPENIPQPISNTSRANLNKLLTDYTEMKKAILHVYWEEFQKDPVGLMSRVAQPASKKIDQNKLKPEMDEKGNLTTAGFACSQCGQPLFVYKLEQVSEKGKAYTNYFGRCNVAEHEKLILLAQLKPEKDSDEAVTYSLGKFGQRALDFYSIHVTKESTHPVKPLAQIAGNRYASGPVGKALSDACMGTIASFLSKYQDIIIEHQKVVKGNQKRLESLRELAGKENLEYPSVTLPPQPHTKEGVDAYNEVIARVRMWVNLNLWQKLKLSRDDAKPLLRLKGFPSFPLVERQANEVDWWDMVCNVKKLINEKKEDGKVFWQNLAGYKRQEALRPYLSSEEDRKKGKKFARYQLGDLLLHLEKKHGEDWGKVYDEAWERIDKKVEGLSKHIKLEEERRSEDAQSKAALTDWLRAKASFVIEGLKEADKDEFCRCELKLQKWYGDLRGKPFAIEAENSILDISGFSKQYNCAFIWQKDGVKKLNLYLIINYFKGGKLRFKKIKPEAFEANRFYTVINKKSGEIVPMEVNFNFDDPNLIILPLAFGKRQGREFIWNDLLSLETGSLKLANGRVIEKTLYNRRTRQDEPALFVALTFERREVLDSSNIKPMNLIGVDRGENIPAVIALTDPSGCPLSRFKDSLGNPTHILRIGESYKEKQRTIQAKKEVEQRRAGGYSRKYASKAKNLADDMVRNTARDLLYYAVTQDAMLIFENLSRGFGRQGKRTFMAERQYTRMEDWLTAKLAYEGLPSKTYLSKTLAQYTSKTCSNCGFTITSADYDRVLEKLKKTATGWMTTINGKELKVEGQITYYNRYKRQNVVKDLSVELDRLSEESVNNDISSWTKGRSGEALSLLKKRFSHRPVQEKFVCLNCGFETHADEQAALNIARSWLFLRSQEYKKYQTNKTTGNTDKRAFVETWQSFYRKKLKEVWKPAV

SEQ ID NO: 25564 - protein, 978 aa, synthetic construct
  REGION 1..978: note = engineered CasX variant
QEIKRINKIRRRLVKDSNTKKAGKTGPMKTLLVRVMTPDLRERLENLRKKPENIPQPISNTSRANLNKLLTDYTEMKKAILHVYWEEFQKDPVGLMSRVAQPASKKIDQNKLKPEMDEKGNLTTAGFACSQCGQPLFVYKLEQVSEKGKAYTNYFGRCNVAEHEKLILLAQLKPEKDSDEAVTYSLGKFGQRALDFYSIHVTKESTHPVKPLAQIAGNRYASGPVGKALSDACMGTIASFLSKYQDIIIEHQKVVKGNQKRLESLRELAGKENLEYPSVTLPPQPHTKEGVDAYNEVIARVRMWVNLNLWQKLKLSRDDAKPLLRLKGFPSFPLVERQANEVDWWDMVCNVKKLINEKKEDGKVFWQNLAGYKRQEALRPYLSSEEDRKKGKKFARYQLGDLLLHLEKKHGEDWGKVYDEAWERIDKKVEGLSKHIKLEEERRSEDAQSKAALTDWLRAKASFVIEGLKEADKDEFCRCELKLQKWYGDLRGKPFAIEAENSILDISGFSKQYNCAFIWQKDGVKKLNLYLIINYFKGGKLRFKKIKPEAFEANRFYTVINKKSGEIVPMEVNFNFDDPNLIILPLAFGKRQGREFIWNDLLSLETGSLKLANGRVIEKTLYNRRTRQDEPALFVALTFERREVLDSSNIKPMNLIGVDRGENIPAVIALTDPSGCPLSRFKDSLGNPTHILRIGESYKEKQRTIQAKKEVEQRCAGGYSRKYASKAKNLADDMVRNTARDLLYYAVTQDAMLIFENLSRGFGRQGKRTFMAERQYTRMEDWLTAKLAYEGLPSKTYLSKTLAQYTSKTCSNCGFTITSADYDRVLEKLKKTATGWMTTINGKELKVEGQITYYNRYKRQNVVKDLSVELDRLSEESVNNDISSWTKGRSGEALSLLKKRFSHRPVQEKFVCLNCGFETHADEQAALNIARSWLFLRSQEYKKYQTNKTTGNTDKRAFVETWQSFYRKKLKEVWKPAV

SEQ ID NO: 25565 - protein, 978 aa, synthetic construct
  REGION 1..978: note = engineered CasX variant
QEIKRINKIRRRLVKDSNTKKAGKTGPMKTLLVRVMTPDLRERLENLRKKPENIPQPISNTSRANLNKLLTDYTEMKKAILHVYWEEFQKDPVGLMSRVAQPASKKIDQNKLKPEMDEKGNLTTAGFACSQCGQPLFVYKLEQVSEKGKAYTNYFGRCNVAEHEKLILLAQLKPEKDSDEAVTYSLGKFGQRALDFYSIHVTKESTHPVKPLAQIAGNRYASGPVGKALSDACMGTIASFLSKYQDIIIEHQKVVKGNQKRLESLRELAGKENLEYPSVTLPPQPHTKEGVDAYNEVIARVRMWVNLNLWQKLKLSRDDAKPLLRLKGFPSFPLVERQANEVDWWDMVCNVKKLINEKKEDGKVFWQNLAGYKRQEALRPYLSSEEDRKKGKKFARYQLGDLLLHLEKKHGEDWGKVYDEAWERIDKKVEGLSKHIKLEEERRSEDAQSKAALTDWLRAKASFVIEGLKEADKDEFCRCELKLQKWYGDLRGKPFAIEAENSILDISGFSKQYNCAFIWQKDGVKKLNLYLIINYFKGGKLRFKKIKPEAFEANRFYTVINKKSGEIVPMEVNFNFDDPNLIILPLAFGKRQGREFIWNDLLSLETGSLKLANGRVIEKTLYNRRTRQDEPALFVALTFERREVLDSSNIKPMNLIGVDRGENIPAVIALTDPSGCPLSRFKDSLGNPTHILRIGESYKEKQRTIQAKKAVEQRRAGGYSRKYASKAKNLADDMVRNTARDLLYYAVTQDAMLIFENLSRGFGRQGKRTFMAERQYTRMEDWLTAKLAYEGLPSKTYLSKTLAQYTSKTCSNCGFTITSADYDRVLEKLKKTATGWMTTINGKELKVEGQITYYNRYKRQNVVKDLSVELDRLSEESVNNDISSWTKGRSGEALSLLKKRFSHRPVQEKFVCLNCGFETHADEQAALNIARSWLFLRSQEYKKYQTNKTTGNTDKRAFVETWQSFYRKKLKEVWKPAV

SEQ ID NO: 25566 - protein, 978 aa, synthetic construct
  REGION 1..978: note = engineered CasX variant
QEIKRINKIRRRLVKDSNTKKAGKTGPMKTLLVRVMTPDLRERLENLRKKPENIPQPISNTSRANLNKLLTDYTEMKKAILHVYWEEFQKDPVGLMSRVAQPASKKIDQNKLKPEMDEKGNLTTAGFACSQCGQPLFVYKLEQVSEKGKAYTNYFGRCNVAEHEKLILLAQLKPEKDSDEAVTYSLGKFGQRALDFYSIHVTKESTHPVKPLAQIAGNRYASGPVGKALSDACMGTIASFLSKYQDIIIEHQKVVKGNQKRLESLRELAGKENLEYPSVTLPPQPHTKEGVDAYNEVIARVRMWVNLNLWQKLKLSRDDAKPLLRLKGFPSFPLVERQANEVDWWDMVCNVKKLINEKKEDGKVFWQNLAGYKRQEALRPYLSSEEDRKKGKKFARYQLGDLLLHLEKKHGEDWGKVYDEAWERIDKKVEGLSKHIKLEEERRSEDAQSKAALTDWLRAKASFVIEGLKEADKDEFCRCELKLQKWYGDLRGKPFAIEAENSILDISGFSKQYNCAFIWQKDGVKKLNLYLIINYFKGGKLRFKKIKPEAFEANRFYTVINKKSGEIVPMEVNFNFDDPNLIILPLAFGKRQGREFIWNDLLSLETGSLKLANGRVIEKTLYNRRTRQDEPALFVALTFERREVLDSSNIKPMNLIGVDRGENIPAVIALTDPSGCPLSRFKDSLGNPTHILRICESYKEKQRTIQAKKEVEQRRAGGYSRKYASKAKNLADDMVRNTARDLLYYAVTQDAMLIFENLSRGFGRQGKRTFMAERQYTRMEDWLTAKLAYEGLPSKTYLSKTLAQYTSKTCSNCGFTITSADYDRVLEKLKKTATGWMTTINGKELKVEGQITYYNRYKRQNVVKDLSVELDRLSEESVNNDISSWTKGRSGEALSLLKKRFSHRPVQEKFVCLNCGFETHADEQAALNIARSWLFLRSQEYKKYQTNKTTGNTDKRAFVETWQSFYRKKLKEVWKPAV

SEQ ID NO: 25567 - protein, 978 aa, synthetic construct
  REGION 1..978: note = engineered CasX variant
QEIKRINKIRRRLVKDSNTKKAGKTGPMKTLLVRVMTPDLRERLENLRKKPENIPQPISNTSRANLNKLLTDYTEMKKAILHVYWEEFQKDPVGLMSRVAQPASKKIDQNKLKPEMDEKGNLTTAGFACSQCGQPLFVYKLEQVSEKGKAYTNYFGRCNVAEHEKLILLAQLKPEKDSDEAVTYSLGKFGQRALDFYSIHVTKESTHPVKPLAQIAGNRYASGPVGKALSDACMGTIASFLSKYQDIIIEHQKVVKGNQKRLESLRELAGKENLEYPSVTLPPQPHTKEGVDAYNEVIARVRMWVNLNLWQKLKLSRDDAKPLLRLKGFPSFPLVERQANEVDWWDMVCNVKKLINEKKEDGKVFWQNLAGYKRQEALRPYLSSEEDRKKGKKFARYQLGDLLLHLEKKHGEDWGKVYDEAWERIDKKVEGLSKHIKLEEERRSEDAQSKAALTDWLRAKASFVIEGLKEADKDEFCRCELKLQKWYGDLRGKPFAIEAENSILDISGFSKQYNCAFIWQKDGVKKLNLYLIINYFKGGKLRFKKIKPEAFEANRFYTVINKKSGEIVPMEVNFNFDDPNLIILPLAFGKRQGREFIWNDLLSLETGSLKLANGRVIEKTLYNRRTRQDEPALFVALTFERREVLDSSNIKPMNLIGVDRGENIPAVIALTDPRGCPLSRFKDSLGNYTHILRIGESYKEKQRTIQAKKHVEQRRAGGYSRKYASKAKNLADDMVRNTARDLLYYAVTQDAMLIFENLSRGFGRQGKRTFMAERQYTRMEDWLTAKLAYEGLPSKTYLSKTLAQYTSKTCSNCGFTITSADYDRVLEKLKKTATGWMTTINGKELKVEGQITYYNRYKRQNVVKDLSVELDRLSEESVNNDISSWTKGRSGEALSLLKKRFSHRPVQEKFVCLNCGFETHADEQAALNIARSWLFLRSQEYKKYQTNKTTGNTDKRAFVETWQSFYRKKLKEVWKPAV

SEQ ID NO: 25568 - protein, 978 aa, synthetic construct
  REGION 1..978: note = engineered CasX variant
QEIKRINKIRRRLVKDSNTKKAGKTGPMKTLLVRVMTPDLRERLENLRKKPENIPQPISNTSRANLNKLLTDYTEMKKAILHVYWEEFQKDPVGLMSRVAQPASKKIDQNKLKPEMDEKGNLTTAGFACSQCGQPLFVYKLEQVSEKGKAYTNYFGRCNVAEHEKLILLAQLKPEKDSDEAVTYSLGKFGQRALDFYSIHVTKESTHPVKPLAQIAGNRYASGPVGKALSDACMGTIASFLSKYQDIIIEHQKVVKGNQKRLESLRELAGKENLEYPSVTLPPQPHTKEGVDAYNEVIARVRMWVNLNLWQKLKLSRDDAKPLLRLKGFPSFPLVERQANEVDWWDMVCNVKKLINEKKEDGKVFWQNLAGYKRQEALRPYLSSEEDRKKGKKFARYQLGDLLLHLEKKHGEDWGKVYDEAWERIDKKVEGLSKHIKLEEERRSEDAQSKAALTDWLRAKASFVIEGLKEADKDEFCRCELKLQKWYGDLRGKPFAIEAENSILDISGFSKQYNCAFIWQKDGVKKLNLYLIINYFKGGKLRFKKIKPEAFEANRFYTVINKKSGEIVPMEVNFNFDDPNLIILPLAFGKRQGREFIWNDLLSLETGSLKLANGRVIEKTLYNRRTRQDEPALFVALTFERREVLDSSNIKPMNLIGVDRGENIPAVIALTDPRGCPLSRFKDSLGNYTHILRIGESYKEKQRTIQAKKEVEQRRAGGYSRKYASKAKNLADDMVRNTARDLLYYAVTQDAMLIFENLSRGFGRQGKRTFMAERQYTRMEDWLTAKLAYEGLPSKTYLSKTLAQYTSKTCSNCGFTITSADYDRVLEKLKKTATGWMTTINGKELKVEGQITYYNRYKRQNVVKDLSVELDRLSEESVNNDISSWTKGRSGEALSLLKKRFSHRPVQEKFVCLNCGFETHADEQAALNIARSWLFLRSQEYKKYQTNKTTGNTDKRAFVETWQSFYRKKLKEVWKPAV

SEQ ID NO: 25569 - protein, 978 aa, synthetic construct
  REGION 1..978: note = engineered CasX variant
QEIKRINKIRRRLVKDSNTKKAGKTGPMKTLLVRVMTPDLRERLENLRKKPENIPQPISNTSRANLNKLLTDYTEMKKAILHVYWEEFQKDPVGLMSRVAQPASKKIDQNKLKPEMDEKGNLTTAGFACSQCGQPLFVYKLEQVSEKGKAYTNYFGRCNVAEHEKLILLAQLKPEKDSDEAVTYSLGKFGQRALDFYSIHVTKESTHPVKPLAQIAGNRYASGPVGKALSDACMGTIASFLSKYQDIIIEHQKVVKGNQKRLESLRELAGKENLEYPSVTLPPQPHTKEGVDAYNEVIARVRMWVNLNLWQKLKLSRDDAKPLLRLKGFPSFPLVERQANEVDWWDMVCNVKKLINEKKEDGKVFWQNLAGYKRQEALRPYLSSEEDRKKGKKFARYQLGDLLLHLEKKHGEDWGKVYDEAWERIDKKVEGLSKHIKLEEERRSEDAQSKAALTDWLRAKASFVIEGLKEADKDEFCRCELKLQKWYGDLRGKPFAIEAENSILDISGFSKQYNCAFIWQKDGVKKLNLYLIINYFKGGKLRFKKIKPEAFEANRFYTVINKKSGEIVPMEVNFNFDDPNLIILPLAFGKRQGREFIWNDLLSLETGSLKLANGRVIEKTLYNRRTRQDEPALFVALTFERREVLDSSNIKPMNLIGVDRGENIPAVIALTDPRGCPLSRFKDSLGNPTHILRIGESYKWKQRTIQAKKEVEQRRAGGYSRKYASKAKNLADDMVRNTARDLLYYAVTQDAMLIFENLSRGFGRQGKRTFMAERQYTRMEDWLTAKLAYEGLPSKTYLSKTLAQYTSKTCSNCGFTITSADYDRVLEKLKKTATGWMTTINGKELKVEGQITYYNRYKRQNVVKDLSVELDRLSEESVNNDISSWTKGRSGEALSLLKKRFSHRPVQEKFVCLNCGFETHADEQAALNIARSWLFLRSQEYKKYQTNKTTGNTDKRAFVETWQSFYRKKLKEVWKPAV

SEQ ID NO: 25570 - protein, 978 aa, synthetic construct
  REGION 1..978: note = engineered CasX variant
QEIKRINKIRRRLVKDSNTKKAGKTGPMKTLLVRVMTPDLRERLENLRKKPENIPQPISNTSRANLNKLLTDYTEMKKAILHVYWEEFQKDPVGLMSRVAQPASKKIDQNKLKPEMDEKGNLTTAGFACSQCGQPLFVYKLEQVSEKGKAYTNYFGRCNVAEHEKLILLAQLKPEKDSDEAVTYSLGKFGQRALDFYSIHVTKESTHPVKPLAQIAGNRYASGPVGKALSDACMGTIASFLSKYQDIIIEHQKVVKGNQKRLESLRELAGKENLEYPSVTLPPQPHTKEGVDAYNEVIARVRMWVNLNLWQKLKLSRDDAKPLLRLKGFPSFPLVERQANEVDWWDMVCNVKKLINEKKEDGKVFWQNLAGYKRQEALRPYLSSEEDRKKGKKFARYQLGDLLLHLEKKHGEDWGKVYDEAWERIDKKVEGLSKHIKLEEERRSEDAQSKAALTDWLRAKASFVIEGLKEADKDEFCRCELKLQKWYGDLRGKPFAIEAENSILDISGFSKQYNCAFIWQKDGVKKLNLYLIINYFKGGKLRFKKIKPEAFEANRFYTVINKKSGEIVPMEVNFNFDDPNLIILPLAFGKRQGREFIWNDLLSLETGSLKLANGRVIEKTLYNRRTRQDEPALFVALTFERREVLDSSNIKPMNLIGVDRGENIPAVIALTDPRGCPLSRFKDSLGNPTHILRIGESYKWKQRTIQAKKEVCQRRAGGYSRKYASKAKNLADDMVRNTARDLLYYAVTQDAMLIFENLSRGFGRQGKRTFMAERQYTRMEDWLTAKLAYEGLPSKTYLSKTLAQYTSKTCSNCGFTITSADYDRVLEKLKKTATGWMTTINGKELKVEGQITYYNRYKRQNVVKDLSVELDRLSEESVNNDISSWTKGRSGEALSLLKKRFSHRPVQEKFVCLNCGFETHADEQAALNIARSWLFLRSQEYKKYQTNKTTGNTDKRAFVETWQSFYRKKLKEVWKPAV

SEQ ID NO: 25571 - protein, 978 aa, synthetic construct
  REGION 1..978: note = engineered CasX variant
QEIKRINKIRRRLVKDSNTKKAGKTGPMKTLLVRVMTPDLRERLENLRKKPENIPQPISNTSRANLNKLLTDYTEMKKAILHVYWEEFQKDPVGLMSRVAQPASKKIDQNKLKPEMDEKGNLTTAGFACSQCGQPLFVYKLEQVSEKGKAYTNYFGRCNVAEHEKLILLAQLKPEKDSDEAVTYSLGKFGQRALDFYSIHVTKESTHPVKPLAQIAGNRYASGPVGKALSDACMGTIASFLSKYQDIIIEHQKVVKGNQKRLESLRELAGKENLEYPSVTLPPQPHTKEGVDAYNEVIARVRMWVNLNLWQKLKLSRDDAKPLLRLKGFPSFPLVERQANEVDWWDMVCNVKKLINEKKEDGKVFWQNLAGYKRQEALRPYLSSEEDRKKGKKFARYQLGDLLLHLEKKHGEDWGKVYDEAWERIDKKVEGLSKHIKLEEERRSEDAQSKAALTDWLRAKASFVIEGLKEADKDEFCRCELKLQKWYGDLRGKPFAIEAENSILDISGFSKQYNCAFIWQKDGVKKLNLYLIINYFKGGKLRFKKIKPEAFEANRFYTVINKKSGEIVPMEVNFNFDDPNLIILPLAFGKRQGREFIWNDLLSLETGSLKLANGRVIEKTLYNRRTRQDEPALFVALTFERREVLDSSNIKPMNLIGVDRGENIPAVIALTDPRGCPLSRFKDSLGNPTHILRIGESYKHKQRTIQAKKEVEQRRAGGYSRKYASKAKNLADDMVRNTARDLLYYAVTQDAMLIFENLSRGFGRQGKRTFMAERQYTRMEDWLTAKLAYEGLPSKTYLSKTLAQYTSKTCSNCGFTITSADYDRVLEKLKKTATGWMTTINGKELKVEGQITYYNRYKRQNVVKDLSVELDRLSEESVNNDISSWTKGRSGEALSLLKKRFSHRPVQEKFVCLNCGFETHADEQAALNIARSWLFLRSQEYKKYQTNKTTGNTDKRAFVETWQSFYRKKLKEVWKPAV

SEQ ID NO: 25572 - protein, 978 aa, synthetic construct
  REGION 1..978: note = engineered CasX variant
QEIKRINKIRRRLVKDSNTKKAGKTGPMKTLLVRVMTPDLRERLENLRKKPENIPQPISNTSRANLNKLLTDYTEMKKAILHVYWEEFQKDPVGLMSRVAQPASKKIDQNKLKPEMDEKGNLTTAGFACSQCGQPLFVYKLEQVSEKGKAYTNYFGRCNVAEHEKLILLAQLKPEKDSDEAVTYSLGKFGQRALDFYSIHVTKESTHPVKPLAQIAGNRYASGPVGKALSDACMGTIASFLSKYQDIIIEHQKVVKGNQKRLESLRELAGKENLEYPSVTLPPQPHTKEGVDAYNEVIARVRMWVNLNLWQKLKLSRDDAKPLLRLKGFPSFPLVERQANEVDWWDMVCNVKKLINEKKEDGKVFWQNLAGYKRQEALRPYLSSEEDRKKGKKFARYQLGDLLLHLEKKHGEDWGKVYDEAWERIDKKVEGLSKHIKLEEERRSEDAQSKAALTDWLRAKASFVIEGLKEADKDEFCRCELKLQKWYGDLRGKPFAIEAENSILDISGFSKQYNCAFIWQKDGVKKLNLYLIINYFKGGKLRFKKIKPEAFEANRFYTVINKKSGEIVPMEVNFNFDDPNLIILPLAFGKRQGREFIWNDLLSLETGSLKLANGRVIEKTLYNRRTRQDEPALFVALTFERREVLDSSNIKPMNLIGVDRGENIPAVIALTDPRGCPLSRFKDSLGNPTHILRIGESYKEKQRTIQAKKHVEQRRAGGYSRKYASKAKNLADDMVRNTARDLLYYAVTQDAMLIFENLSRGFGRQGKRTFMAERQYTRMEDWLTAKLAYEGLPSKTYLSKTLAQYTSKTCSNCGFTITSADYDRVLEKLKKTATGWMTTINGKELKVEGQITYYNRYKRQNVVKDLSVELDRLSEESVNNDISSWTKGRSGEALSLLKKRFSHRPVQEKFVCLNCGFETHADEQAALNIARSWLFLRSQEYKKYQTNKTTGNTDKRAFVETWQSFYRKKLKEVWKPAV

SEQ ID NO: 25573 - protein, 978 aa, synthetic construct
  REGION 1..978: note = engineered CasX variant
QEIKRINKIRRRLVKDSNTKKAGKTGPMKTLLVRVMTPDLRERLENLRKKPENIPQPISNTSRANLNKLLTDYTEMKKAILHVYWEEFQKDPVGLMSRVAQPASKKIDQNKLKPEMDEKGNLTTAGFACSQCGQPLFVYKLEQVSEKGKAYTNYFGRCNVAEHEKLILLAQLKPEKDSDEAVTYSLGKFGQRALDFYSIHVTKESTHPVKPLAQIAGNRYASGPVGKALSDACMGTIASFLSKYQDIIIEHQKVVKGNQKRLESLRELAGKENLEYPSVTLPPQPHTKEGVDAYNEVIARVRMWVNLNLWQKLKLSRDDAKPLLRLKGFPSFPLVERQANEVDWWDMVCNVKKLINEKKEDGKVFWQNLAGYKRQEALRPYLSSEEDRKKGKKFARYQLGDLLLHLEKKHGEDWGKVYDEAWERIDKKVEGLSKHIKLEEERRSEDAQSKAALTDWLRAKASFVIEGLKEADKDEFCRCELKLQKWYGDLRGKPFAIEAENSILDISGFSKQYNCAFIWQKDGVKKLNLYLIINYFKGGKLRFKKIKPEAFEANRFYTVINKKSGEIVPMEVNFNFDDPNLIILPLAFGKRQGREFIWNDLLSLETGSLKLANGRVIEKTLYNRRTRQDEPALFVALTFERREVLDSSNIKPMNLIGVDRGENIPAVIALTDPRGCPLSRFKDSLGNPTHILRIGESYKEKQRTIQAKKEVEQRRAGGYSRKYASKAKNLADDMVRNTARDLLYYAVTQDAMLIFENLSRGFGRQGKRTFMAERQYTRMEDWLTAKLAYEGLPSKTYLSKTLAQYTSKTCSNCGFTITSADYDRVLEKLKKTATGWMTTINGKELKVEGQITYYNRYKRQNVVKDLSVELDRLSEESVNNDISSWTKGRSGEALSLLKKRFSHRPVQEKFVCLNCGFETHADEQAALNIARSWLFLRSQEYKKYQTNKTTGNTDKRAFVETWQSFYRKKLKEVWKPAV

SEQ ID NO: 25574 - protein, 978 aa, synthetic construct
  REGION 1..978: note = engineered CasX variant
QEIKRINKIRRRLVKDSNTKKAGKTGPMKTLLVRVMTPDLRERLENLRKKPENIPQPISNTSRANLNKLLTDYTEMKKAILHVYWEEFQKDPVGLMSRVAQPASKKIDQNKLKPEMDEKGNLTTAGFACSQCGQPLFVYKLEQVSEKGKAYTNYFGRCNVAEHEKLILLAQLKPEKDSDEAVTYSLGKFGQRALDFYSIHVTKESTHPVKPLAQIAGNRYASGPVGKALSDACMGTIASFLSKYQDIIIEHQKVVKGNQKRLESLRELAGKENLEYPSVTLPPQPHTKEGVDAYNEVIARVRMWVNLNLWQKLKLSRDDAKPLLRLKGFPSFPLVERQANEVDWWDMVCNVKKLINEKKEDGKVFWQNLAGYKRQEALRPYLSSEEDRKKGKKFARYQLGDLLLHLEKKHGEDWGKVYDEAWERIDKKVEGLSKHIKLEEERRSEDAQSKAALTDWLRAKASFVIEGLKEADKDEFCRCELKLQKWYGDLRGKPFAIEAENSILDISGFSKQYNCAFIWQKDGVKKLNLYLIINYFKGGKLRFKKIKPEAFEANRFYTVINKKSGEIVPMEVNFNFDDPNLIILPLAFGKRQGREFIWNDLLSLETGSLKLANGRVIEKTLYNRRTRQDEPALFVALTFERREVLDSSNIKPMNLIGVDRGENIPAVIALTDPRGCPLSRFKDSLGNPTHILRIGESYKEKQRTIQAKKEVEQNRAGGYSRKYASKAKNLADDMVRNTARDLLYYAVTQDAMLIFENLSRGFGRQGKRTFMAERQYTRMEDWLTAKLAYEGLPSKTYLSKTLAQYTSKTCSNCGFTITSADYDRVLEKLKKTATGWMTTINGKELKVEGQITYYNRYKRQNVVKDLSVELDRLSEESVNNDISSWTKGRSGEALSLLKKRFSHRPVQEKFVCLNCGFETHADEQAALNIARSWLFLRSQEYKKYQTNKTTGNTDKRAFVETWQSFYRKKLKEVWKPAV

SEQ ID NO: 25575 - protein, 978 aa, synthetic construct
  REGION 1..978: note = engineered CasX variant
QEIKRINKIRRRLVKDSNTKKAGKTGPMKTLLVRVMTPDLRERLENLRKKPENIPQPISNTSRANLNKLLTDYTEMKKAILHVYWEEFQKDPVGLMSRVAQPASKKIDQNKLKPEMDEKGNLTTAGFACSQCGQPLFVYKLEQVSEKGKAYTNYFGRCNVAEHEKLILLAQLKPEKDSDEAVTYSLGKFGQRALDFYSIHVTKESTHPVKPLAQIAGNRYASGPVGKALSDACMGTIASFLSKYQDIIIEHQKVVKGNQKRLESLRELAGKENLEYPSVTLPPQPHTKEGVDAYNEVIARVRMWVNLNLWQKLKLSRDDAKPLLRLKGFPSFPLVERQANEVDWWDMVCNVKKLINEKKEDGKVFWQNLAGYKRQEALRPYLSSEEDRKKGKKFARYQLGDLLLHLEKKHGEDWGKVYDEAWERIDKKVEGLSKHIKLEEERRSEDAQSKAALTDWLRAKASFVIEGLKEADKDEFCRCELKLQKWYGDLRGKPFAIEAENSILDISGFSKQYNCAFIWQKDGVKKLNLYLIINYFKGGKLRFKKIKPEAFEANRFYTVINKKSGEIVPMEVNFNFDDPNLIILPLAFGKRQGREFIWNDLLSLETGSLKLANGRVIEKTLYNRRTRQDEPALFVALTFERREVLDSSNIKPMNLIGVDRGENIPAVIALTDPRGCPLSRFKDSLGNPTHILRIGESYKEKQRTIQAKKEVCQRRAGGYSRKYASKAKNLADDMVRNTARDLLYYAVTQDAMLIFENLSRGFGRQGKRTFMAERQYTRMEDWLTAKLAYEGLPSKTYLSKTLAQYTSKTCSNCGFTITSADYDRVLEKLKKTATGWMTTINGKELKVEGQITYYNRYKRQNVVKDLSVELDRLSEESVNNDISSWTKGRSGEALSLLKKRFSHRPVQEKFVCLNCGFETHADEQAALNIARSWLFLRSQEYKKYQTNKTTGNTDKRAFVETWQSFYRKKLKEVWKPAV

SEQ ID NO: 25576 - protein, 978 aa, synthetic construct
  REGION 1..978: note = engineered CasX variant
QEIKRINKIRRRLVKDSNTKKAGKTGPMKTLLVRVMTPDLRERLENLRKKPENIPQPISNTSRANLNKLLTDYTEMKKAILHVYWEEFQKDPVGLMSRVAQPASKKIDQNKLKPEMDEKGNLTTAGFACSQCGQPLFVYKLEQVSEKGKAYTNYFGRCNVAEHEKLILLAQLKPEKDSDEAVTYSLGKFGQRALDFYSIHVTKESTHPVKPLAQIAGNRYASGPVGKALSDACMGTIASFLSKYQDIIIEHQKVVKGNQKRLESLRELAGKENLEYPSVTLPPQPHTKEGVDAYNEVIARVRMWVNLNLWQKLKLSRDDAKPLLRLKGFPSFPLVERQANEVDWWDMVCNVKKLINEKKEDGKVFWQNLAGYKRQEALRPYLSSEEDRKKGKKFARYQLGDLLLHLEKKHGEDWGKVYDEAWERIDKKVEGLSKHIKLEEERRSEDAQSKAALTDWLRAKASFVIEGLKEADKDEFCRCELKLQKWYGDLRGKPFAIEAENSILDISGFSKQYNCAFIWQKDGVKKLNLYLIINYFKGGKLRFKKIKPEAFEANRFYTVINKKSGEIVPMEVNFNFDDPNLIILPLAFGKRQGREFIWNDLLSLETGSLKLANGRVIEKTLYNRRTRQDEPALFVALTFERREVLDSSNIKPMNLIGVDRGENIPAVIALTDPRGCPLSRFKDSLGNPTFILRIGESYKEKQRTIQAKKEVEQRRAGGYSRKYASKAKNLADDMVRNTARDLLYYAVTQDAMLIFENLSRGFGRQGKRTFMAERQYTRMEDWLTAKLAYEGLPSKTYLSKTLAQYTSKTCSNCGFTITSADYDRVLEKLKKTATGWMTTINGKELKVEGQITYYNRYKRQNVVKDLSVELDRLSEESVNNDISSWTKGRSGEALSLLKKRFSHRPVQEKFVCLNCGFETHADEQAALNIARSWLFLRSQEYKKYQTNKTTGNTDKRAFVETWQSFYRKKLKEVWKPAV

SEQ ID NO: 25577 - protein, 978 aa, synthetic construct
  REGION 1..978: note = engineered CasX variant
QEIKRINKIRRRLVKDSNTKKAGKTGPMKTLLVRVMTPDLRERLENLRKKPENIPQPISNTSRANLNKLLTDYTEMKKAILHVYWEEFQKDPVGLMSRVAQPASKKIDQNKLKPEMDEKGNLTTAGFACSQCGQPLFVYKLEQVSEKGKAYTNYFGRCNVAEHEKLILLAQLKPEKDSDEAVTYSLGKFGQRALDFYSIHVTKESTHPVKPLAQIAGNRYASGPVGKALSDACMGTIASFLSKYQDIIIEHQKVVKGNQKRLESLRELAGKENLEYPSVTLPPQPHTKEGVDAYNEVIARVRMWVNLNLWQKLKLSRDDAKPLLRLKGFPSFPLVERQANEVDWWDMVCNVKKLINEKKEDGKVFWQNLAGYKRQEALRPYLSSEEDRKKGKKFARYQLGDLLLHLEKKHGEDWGKVYDEAWERIDKKVEGLSKHIKLEEERRSEDAQSKAALTDWLRAKASFVIEGLKEADKDEFCRCELKLQKWYGDLRGKPFAIEAENSILDISGFSKQYNCAFIWQKDGVKKLNLYLIINYFKGGKLRFKKIKPEAFEANRFYTVINKKSGEIVPMEVNFNFDDPNLIILPLAFGKRQGREFIWNDLLSLETGSLKLANGRVIEKTLYNRRTRQDEPALFVALTFERREVLDSSNIKPMNLIGVDRGENIPAVIALTDPQGCPLSRLKDSLGNPTHILRIGESYKEKQRTIQAKKEVEQRRAGGYSRKYASKAKNLADDMVRNTARDLLYYAVTQDAMLIFENLSRGFGRQGKRTFMAERQYTRMEDWLTAKLAYEGLPSKTYLSKTLAQYTSKTCSNCGFTITSADYDRVLEKLKKTATGWMTTINGKELKVEGQITYYNRYKRQNVVKDLSVELDRLSEESVNNDISSWTKGRSGEALSLLKKRFSHRPVQEKFVCLNCGFETHADEQAALNIARSWLFLRSQEYKKYQTNKTTGNTDKRAFVETWQSFYRKKLKEVWKPAV

SEQ ID NO: 25578 - protein, 978 aa, synthetic construct
  REGION 1..978: note = engineered CasX variant
QEIKRINKIRRRLVKDSNTKKAGKTGPMKTLLVRVMTPDLRERLENLRKKPENIPQPISNTSRANLNKLLTDYTEMKKAILHVYWEEFQKDPVGLMSRVAQPASKKIDQNKLKPEMDEKGNLTTAGFACSQCGQPLFVYKLEQVSEKGKAYTNYFGRCNVAEHEKLILLAQLKPEKDSDEAVTYSLGKFGQRALDFYSIHVTKESTHPVKPLAQIAGNRYASGPVGKALSDACMGTIASFLSKYQDIIIEHQKVVKGNQKRLESLRELAGKENLEYPSVTLPPQPHTKEGVDAYNEVIARVRMWVNLNLWQKLKLSRDDAKPLLRLKGFPSFPLVERQANEVDWWDMVCNVKKLINEKKEDGKVFWQNLAGYKRQEALRPYLSSEEDRKKGKKFARYQLGDLLLHLEKKHGEDWGKVYDEAWERIDKKVEGLSKHIKLEEERRSEDAQSKAALTDWLRAKASFVIEGLKEADKDEFCRCELKLQKWYGDLRGKPFAIEAENSILDISGFSKQYNCAFIWQKDGVKKLNLYLIINYFKGGKLRFKKIKPEAFEANRFYTVINKKSGEIVPMEVNFNFDDPNLIILPLAFGKRQGREFIWNDLLSLETGSLKLANGRVIEKTLYNRRTRQDEPALFVALTFERREVLDSSNIKPMNLIGVDRGENIPAVIALTDPQGCPLSRFKDSLGNSTHILRIGESYKEKQRTIQAKKEVEQRRQGGYSRKYASKAKNLADDMVRNTARDLLYYAVTQDAMLIFENLSRGFGRQGKRTFMAERQYTRMEDWLTAKLAYEGLPSKTYLSKTLAQYTSKTCSNCGFTITSADYDRVLEKLKKTATGWMTTINGKELKVEGQITYYNRYKRQNVVKDLSVELDRLSEESVNNDISSWTKGRSGEALSLLKKRFSHRPVQEKFVCLNCGFETHADEQAALNIARSWLFLRSQEYKKYQTNKTTGNTDKRAFVETWQSFYRKKLKEVWKPAV

SEQ ID NO: 25579 - protein, 978 aa, synthetic construct
  REGION 1..978: note = engineered CasX variant
QEIKRINKIRRRLVKDSNTKKAGKTGPMKTLLVRVMTPDLRERLENLRKKPENIPQPISNTSRANLNKLLTDYTEMKKAILHVYWEEFQKDPVGLMSRVAQPASKKIDQNKLKPEMDEKGNLTTAGFACSQCGQPLFVYKLEQVSEKGKAYTNYFGRCNVAEHEKLILLAQLKPEKDSDEAVTYSLGKFGQRALDFYSIHVTKESTHPVKPLAQIAGNRYASGPVGKALSDACMGTIASFLSKYQDIIIEHQKVVKGNQKRLESLRELAGKENLEYPSVTLPPQPHTKEGVDAYNEVIARVRMWVNLNLWQKLKLSRDDAKPLLRLKGFPSFPLVERQANEVDWWDMVCNVKKLINEKKEDGKVFWQNLAGYKRQEALRPYLSSEEDRKKGKKFARYQLGDLLLHLEKKHGEDWGKVYDEAWERIDKKVEGLSKHIKLEEERRSEDAQSKAALTDWLRAKASFVIEGLKEADKDEFCRCELKLQKWYGDLRGKPFAIEAENSILDISGFSKQYNCAFIWQKDGVKKLNLYLIINYFKGGKLRFKKIKPEAFEANRFYTVINKKSGEIVPMEVNFNFDDPNLIILPLAFGKRQGREFIWNDLLSLETGSLKLANGRVIEKTLYNRRTRQDEPALFVALTFERREVLDSSNIKPMNLIGVDRGENIPAVIALTDPQGCPLSRFKDSLGNSTHILRIGESYKEKQRTIQAKKEVEQRRAGGYSRKYASKAKNLADDMVRNTARDLLYYAVTQDAMLIFENLSRGFGRQGKRTFMAERQYTRMEDWLTAKLAYEGLPSKTYLSKTLAQYTSKTCSNCGFTITSADYDRVLEKLKKTATGWMTTINGKELKVEGQITYYNRYKRQNVVKDLSVELDRLSEESVNNDISSWTKGRSGEALSLLKKRFSHRPVQEKFVCLNCGFETHADEQAALNIARSWLFLRSQEYKKYQTNKTTGNTDKRAFVETWQSFYRKKLKEVWKPAV

SEQ ID NO: 25580 - protein, 978 aa, synthetic construct
  REGION 1..978: note = engineered CasX variant
QEIKRINKIRRRLVKDSNTKKAGKTGPMKTLLVRVMTPDLRERLENLRKKPENIPQPISNTSRANLNKLLTDYTEMKKAILHVYWEEFQKDPVGLMSRVAQPASKKIDQNKLKPEMDEKGNLTTAGFACSQCGQPLFVYKLEQVSEKGKAYTNYFGRCNVAEHEKLILLAQLKPEKDSDEAVTYSLGKFGQRALDFYSIHVTKESTHPVKPLAQIAGNRYASGPVGKALSDACMGTIASFLSKYQDIIIEHQKVVKGNQKRLESLRELAGKENLEYPSVTLPPQPHTKEGVDAYNEVIARVRMWVNLNLWQKLKLSRDDAKPLLRLKGFPSFPLVERQANEVDWWDMVCNVKKLINEKKEDGKVFWQNLAGYKRQEALRPYLSSEEDRKKGKKFARYQLGDLLLHLEKKHGEDWGKVYDEAWERIDKKVEGLSKHIKLEEERRSEDAQSKAALTDWLRAKASFVIEGLKEADKDEFCRCELKLQKWYGDLRGKPFAIEAENSILDISGFSKQYNCAFIWQKDGVKKLNLYLIINYFKGGKLRFKKIKPEAFEANRFYTVINKKSGEIVPMEVNFNFDDPNLIILPLAFGKRQGREFIWNDLLSLETGSLKLANGRVIEKTLYNRRTRQDEPALFVALTFERREVLDSSNIKPMNLIGVDRGENIPAVIALTDPQGCPLSRFKDSLGNPTHILRIGESYKEKQRTIQAKKTVEQRRAGGYSRKYASKAKNLADDMVRNTARDLLYYAVTQDAMLIFENLSRGFGRQGKRTFMAERQYTRMEDWLTAKLAYEGLPSKTYLSKTLAQYTSKTCSNCGFTITSADYDRVLEKLKKTATGWMTTINGKELKVEGQITYYNRYKRQNVVKDLSVELDRLSEESVNNDISSWTKGRSGEALSLLKKRFSHRPVQEKFVCLNCGFETHADEQAALNIARSWLFLRSQEYKKYQTNKTTGNTDKRAFVETWQSFYRKKLKEVWKPAV

SEQ ID NO: 25581 - protein, 978 aa, synthetic construct
  REGION 1..978: note = engineered CasX variant
QEIKRINKIRRRLVKDSNTKKAGKTGPMKTLLVRVMTPDLRERLENLRKKPENIPQPISNTSRANLNKLLTDYTEMKKAILHVYWEEFQKDPVGLMSRVAQPASKKIDQNKLKPEMDEKGNLTTAGFACSQCGQPLFVYKLEQVSEKGKAYTNYFGRCNVAEHEKLILLAQLKPEKDSDEAVTYSLGKFGQRALDFYSIHVTKESTHPVKPLAQIAGNRYASGPVGKALSDACMGTIASFLSKYQDIIIEHQKVVKGNQKRLESLRELAGKENLEYPSVTLPPQPHTKEGVDAYNEVIARVRMWVNLNLWQKLKLSRDDAKPLLRLKGFPSFPLVERQANEVDWWDMVCNVKKLINEKKEDGKVFWQNLAGYKRQEALRPYLSSEEDRKKGKKFARYQLGDLLLHLEKKHGEDWGKVYDEAWERIDKKVEGLSKHIKLEEERRSEDAQSKAALTDWLRAKASFVIEGLKEADKDEFCRCELKLQKWYGDLRGKPFAIEAENSILDISGFSKQYNCAFIWQKDGVKKLNLYLIINYFKGGKLRFKKIKPEAFEANRFYTVINKKSGEIVPMEVNFNFDDPNLIILPLAFGKRQGREFIWNDLLSLETGSLKLANGRVIEKTLYNRRTRQDEPALFVALTFERREVLDSSNIKPMNLIGVDRGENIPAVIALTDPQGCPLSRFKDSLGNPTHILRIGESYKEKQRTIQAKKEVEQRRQGGYSRKYASKAKNLADDMVRNTARDLLYYAVTQDAMLIFENLSRGFGRQGKRTFMAERQYTRMEDWLTAKLAYEGLPSKTYLSKTLAQYTSKTCSNCGFTITSADYDRVLEKLKKTATGWMTTINGKELKVEGQITYYNRYKRQNVVKDLSVELDRLSEESVNNDISSWTKGRSGEALSLLKKRFSHRPVQEKFVCLNCGFETHADEQAALNIARSWLFLRSQEYKKYQTNKTTGNTDKRAFVETWQSFYRKKLKEVWKPAV

SEQ ID NO: 25582 - protein, 978 aa, synthetic construct
  REGION 1..978: note = engineered CasX variant
QEIKRINKIRRRLVKDSNTKKAGKTGPMKTLLVRVMTPDLRERLENLRKKPENIPQPISNTSRANLNKLLTDYTEMKKAILHVYWEEFQKDPVGLMSRVAQPASKKIDQNKLKPEMDEKGNLTTAGFACSQCGQPLFVYKLEQVSEKGKAYTNYFGRCNVAEHEKLILLAQLKPEKDSDEAVTYSLGKFGQRALDFYSIHVTKESTHPVKPLAQIAGNRYASGPVGKALSDACMGTIASFLSKYQDIIIEHQKVVKGNQKRLESLRELAGKENLEYPSVTLPPQPHTKEGVDAYNEVIARVRMWVNLNLWQKLKLSRDDAKPLLRLKGFPSFPLVERQANEVDWWDMVCNVKKLINEKKEDGKVFWQNLAGYKRQEALRPYLSSEEDRKKGKKFARYQLGDLLLHLEKKHGEDWGKVYDEAWERIDKKVEGLSKHIKLEEERRSEDAQSKAALTDWLRAKASFVIEGLKEADKDEFCRCELKLQKWYGDLRGKPFAIEAENSILDISGFSKQYNCAFIWQKDGVKKLNLYLIINYFKGGKLRFKKIKPEAFEANRFYTVINKKSGEIVPMEVNFNFDDPNLIILPLAFGKRQGREFIWNDLLSLETGSLKLANGRVIEKTLYNRRTRQDEPALFVALTFERREVLDSSNIKPMNLIGVDRGENIPAVIALTDPQGCPLSRFKDSLGNPTHILRIGESYKEKQRTIQAKKEVEQRRAGGYSRKYASKAKNLADDMVRNTARDLLYYAVTQDAMLIFENLSRGFGRQGKRTFMAERQYTRMEDWLTAKLAYEGLPSKTYLSKTLAQYTSKTCSNCGFTITSADYDRVLEKLKKTATGWMTTINGKELKVEGQITYYNRYKRQNVVKDLSVELDRLSEESVNNDISSWTKGRSGEALSLLKKRFSHRPVQEKFVCLNCGFETHADEQAALNIARSWLFLRSQEYKKYQTNKTTGNTDKRAFVETWQSFYRKKLKEVWKPAV

SEQ ID NO: 25583 - protein, 978 aa, synthetic construct
  REGION 1..978: note = engineered CasX variant
QEIKRINKIRRRLVKDSNTKKAGKTGPMKTLLVRVMTPDLRERLENLRKKPENIPQPISNTSRANLNKLLTDYTEMKKAILHVYWEEFQKDPVGLMSRVAQPASKKIDQNKLKPEMDEKGNLTTAGFACSQCGQPLFVYKLEQVSEKGKAYTNYFGRCNVAEHEKLILLAQLKPEKDSDEAVTYSLGKFGQRALDFYSIHVTKESTHPVKPLAQIAGNRYASGPVGKALSDACMGTIASFLSKYQDIIIEHQKVVKGNQKRLESLRELAGKENLEYPSVTLPPQPHTKEGVDAYNEVIARVRMWVNLNLWQKLKLSRDDAKPLLRLKGFPSFPLVERQANEVDWWDMVCNVKKLINEKKEDGKVFWQNLAGYKRQEALRPYLSSEEDRKKGKKFARYQLGDLLLHLEKKHGEDWGKVYDEAWERIDKKVEGLSKHIKLEEERRSEDAQSKAALTDWLRAKASFVIEGLKEADKDEFCRCELKLQKWYGDLRGKPFAIEAENSILDISGFSKQYNCAFIWQKDGVKKLNLYLIINYFKGGKLRFKKIKPEAFEANRFYTVINKKSGEIVPMEVNFNFDDPNLIILPLAFGKRQGREFIWNDLLSLETGSLKLANGRVIEKTLYNRRTRQDEPALFVALTFERREVLDSSNIKPMNLIGVDRGENIPAVIALTDPQGCPLSRFKDSLGNCTHILRIGESYKEKQRTIQAKKEVEQRRAGGYSRKYASKAKNLADDMVRNTARDLLYYAVTQDAMLIFENLSRGFGRQGKRTFMAERQYTRMEDWLTAKLAYEGLPSKTYLSKTLAQYTSKTCSNCGFTITSADYDRVLEKLKKTATGWMTTINGKELKVEGQITYYNRYKRQNVVKDLSVELDRLSEESVNNDISSWTKGRSGEALSLLKKRFSHRPVQEKFVCLNCGFETHADEQAALNIARSWLFLRSQEYKKYQTNKTTGNTDKRAFVETWQSFYRKKLKEVWKPAV

SEQ ID NO: 25584 - protein, 978 aa, synthetic construct
  REGION 1..978: note = engineered CasX variant
QEIKRINKIRRRLVKDSNTKKAGKTGPMKTLLVRVMTPDLRERLENLRKKPENIPQPISNTSRANLNKLLTDYTEMKKAILHVYWEEFQKDPVGLMSRVAQPASKKIDQNKLKPEMDEKGNLTTAGFACSQCGQPLFVYKLEQVSEKGKAYTNYFGRCNVAEHEKLILLAQLKPEKDSDEAVTYSLGKFGQRALDFYSIHVTKESTHPVKPLAQIAGNRYASGPVGKALSDACMGTIASFLSKYQDIIIEHQKVVKGNQKRLESLRELAGKENLEYPSVTLPPQPHTKEGVDAYNEVIARVRMWVNLNLWQKLKLSRDDAKPLLRLKGFPSFPLVERQANEVDWWDMVCNVKKLINEKKEDGKVFWQNLAGYKRQEALRPYLSSEEDRKKGKKFARYQLGDLLLHLEKKHGEDWGKVYDEAWERIDKKVEGLSKHIKLEEERRSEDAQSKAALTDWLRAKASFVIEGLKEADKDEFCRCELKLQKWYGDLRGKPFAIEAENSILDISGFSKQYNCAFIWQKDGVKKLNLYLIINYFKGGKLRFKKIKPEAFEANRFYTVINKKSGEIVPMEVNFNFDDPNLIILPLAFGKRQGREFIWNDLLSLETGSLKLANGRVIEKTLYNRRTRQDEPALFVALTFERREVLDSSNIKPMNLIGVDRGENIPAVIALTDPQGCPLSCFKDSLGNPTHILRIGESYKEKQRTIQAKKEVEQRRAGGYSRKYASKAKNLADDMVRNTARDLLYYAVTQDAMLIFENLSRGFGRQGKRTFMAERQYTRMEDWLTAKLAYEGLPSKTYLSKTLAQYTSKTCSNCGFTITSADYDRVLEKLKKTATGWMTTINGKELKVEGQITYYNRYKRQNVVKDLSVELDRLSEESVNNDISSWTKGRSGEALSLLKKRFSHRPVQEKFVCLNCGFETHADEQAALNIARSWLFLRSQEYKKYQTNKTTGNTDKRAFVETWQSFYRKKLKEVWKPAV

SEQ ID NO: 25585 - protein, 978 aa, synthetic construct
  REGION 1..978: note = engineered CasX variant
QEIKRINKIRRRLVKDSNTKKAGKTGPMKTLLVRVMTPDLRERLENLRKKPENIPQPISNTSRANLNKLLTDYTEMKKAILHVYWEEFQKDPVGLMSRVAQPASKKIDQNKLKPEMDEKGNLTTAGFACSQCGQPLFVYKLEQVSEKGKAYTNYFGRCNVAEHEKLILLAQLKPEKDSDEAVTYSLGKFGQRALDFYSIHVTKESTHPVKPLAQIAGNRYASGPVGKALSDACMGTIASFLSKYQDIIIEHQKVVKGNQKRLESLRELAGKENLEYPSVTLPPQPHTKEGVDAYNEVIARVRMWVNLNLWQKLKLSRDDAKPLLRLKGFPSFPLVERQANEVDWWDMVCNVKKLINEKKEDGKVFWQNLAGYKRQEALRPYLSSEEDRKKGKKFARYQLGDLLLHLEKKHGEDWGKVYDEAWERIDKKVEGLSKHIKLEEERRSEDAQSKAALTDWLRAKASFVIEGLKEADKDEFCRCELKLQKWYGDLRGKPFAIEAENSILDISGFSKQYNCAFIWQKDGVKKLNLYLIINYFKGGKLRFKKIKPEAFEANRFYTVINKKSGEIVPMEVNFNFDDPNLIILPLAFGKRQGREFIWNDLLSLETGSLKLANGRVIEKTLYNRRTRQDEPALFVALTFERREVLDSSNIKPMNLIGVDRGENIPAVIALTDPQGCPLSCFKDSLGNCTHILRIGESYKEKQRTIQAKKEVEQRRAGGYSRKYASKAKNLADDMVRNTARDLLYYAVTQDAMLIFENLSRGFGRQGKRTFMAERQYTRMEDWLTAKLAYEGLPSKTYLSKTLAQYTSKTCSNCGFTITSADYDRVLEKLKKTATGWMTTINGKELKVEGQITYYNRYKRQNVVKDLSVELDRLSEESVNNDISSWTKGRSGEALSLLKKRFSHRPVQEKFVCLNCGFETHADEQAALNIARSWLFLRSQEYKKYQTNKTTGNTDKRAFVETWQSFYRKKLKEVWKPAV

SEQ ID NO: 25586 - protein, 978 aa, synthetic construct
  REGION 1..978: note = engineered CasX variant
QEIKRINKIRRRLVKDSNTKKAGKTGPMKTLLVRVMTPDLRERLENLRKKPENIPQPISNTSRANLNKLLTDYTEMKKAILHVYWEEFQKDPVGLMSRVAQPASKKIDQNKLKPEMDEKGNLTTAGFACSQCGQPLFVYKLEQVSEKGKAYTNYFGRCNVAEHEKLILLAQLKPEKDSDEAVTYSLGKFGQRALDFYSIHVTKESTHPVKPLAQIAGNRYASGPVGKALSDACMGTIASFLSKYQDIIIEHQKVVKGNQKRLESLRELAGKENLEYPSVTLPPQPHTKEGVDAYNEVIARVRMWVNLNLWQKLKLSRDDAKPLLRLKGFPSFPLVERQANEVDWWDMVCNVKKLINEKKEDGKVFWQNLAGYKRQEALRPYLSSEEDRKKGKKFARYQLGDLLLHLEKKHGEDWGKVYDEAWERIDKKVEGLSKHIKLEEERRSEDAQSKAALTDWLRAKASFVIEGLKEADKDEFCRCELKLQKWYGDLRGKPFAIEAENSILDISGFSKQYNCAFIWQKDGVKKLNLYLIINYFKGGKLRFKKIKPEAFEANRFYTVINKKSGEIVPMEVNFNFDDPNLIILPLAFGKRQGREFIWNDLLSLETGSLKLANGRVIEKTLYNRRTRQDEPALFVALTFERREVLDSSNIKPMNLIGVDRGENIPAVIALTDPNGCPLSRFKDSQGNPTHILRIGESYKEKQRTIQAKKEVEQRRAGGYSRKYASKAKNLADDMVRNTARDLLYYAVTQDAMLIFENLSRGFGRQGKRTFMAERQYTRMEDWLTAKLAYEGLPSKTYLSKTLAQYTSKTCSNCGFTITSADYDRVLEKLKKTATGWMTTINGKELKVEGQITYYNRYKRQNVVKDLSVELDRLSEESVNNDISSWTKGRSGEALSLLKKRFSHRPVQEKFVCLNCGFETHADEQAALNIARSWLFLRSQEYKKYQTNKTTGNTDKRAFVETWQSFYRKKLKEVWKPAV

SEQ ID NO: 25587 - protein, 978 aa, synthetic construct
  REGION 1..978: note = engineered CasX variant
QEIKRINKIRRRLVKDSNTKKAGKTGPMKTLLVRVMTPDLRERLENLRKKPENIPQPISNTSRANLNKLLTDYTEMKKAILHVYWEEFQKDPVGLMSRVAQPASKKIDQNKLKPEMDEKGNLTTAGFACSQCGQPLFVYKLEQVSEKGKAYTNYFGRCNVAEHEKLILLAQLKPEKDSDEAVTYSLGKFGQRALDFYSIHVTKESTHPVKPLAQIAGNRYASGPVGKALSDACMGTIASFLSKYQDIIIEHQKVVKGNQKRLESLRELAGKENLEYPSVTLPPQPHTKEGVDAYNEVIARVRMWVNLNLWQKLKLSRDDAKPLLRLKGFPSFPLVERQANEVDWWDMVCNVKKLINEKKEDGKVFWQNLAGYKRQEALRPYLSSEEDRKKGKKFARYQLGDLLLHLEKKHGEDWGKVYDEAWERIDKKVEGLSKHIKLEEERRSEDAQSKAALTDWLRAKASFVIEGLKEADKDEFCRCELKLQKWYGDLRGKPFAIEAENSILDISGFSKQYNCAFIWQKDGVKKLNLYLIINYFKGGKLRFKKIKPEAFEANRFYTVINKKSGEIVPMEVNFNFDDPNLIILPLAFGKRQGREFIWNDLLSLETGSLKLANGRVIEKTLYNRRTRQDEPALFVALTFERREVLDSSNIKPMNLIGVDRGENIPAVIALTDPNGCPLSRFKDSLGNPTHILRIGESYKEKQRTIQAKKEVEQRRAGGYSRKYASKAKNLADDMVRNTARDLLYYAVTQDAMLIFENLSRGFGRQGKRTFMAERQYTRMEDWLTAKLAYEGLPSKTYLSKTLAQYTSKTCSNCGFTITSADYDRVLEKLKKTATGWMTTINGKELKVEGQITYYNRYKRQNVVKDLSVELDRLSEESVNNDISSWTKGRSGEALSLLKKRFSHRPVQEKFVCLNCGFETHADEQAALNIARSWLFLRSQEYKKYQTNKTTGNTDKRAFVETWQSFYRKKLKEVWKPAV

SEQ ID NO: 25588 - protein, 978 aa, synthetic construct
  REGION 1..978: note = engineered CasX variant
QEIKRINKIRRRLVKDSNTKKAGKTGPMKTLLVRVMTPDLRERLENLRKKPENIPQPISNTSRANLNKLLTDYTEMKKAILHVYWEEFQKDPVGLMSRVAQPASKKIDQNKLKPEMDEKGNLTTAGFACSQCGQPLFVYKLEQVSEKGKAYTNYFGRCNVAEHEKLILLAQLKPEKDSDEAVTYSLGKFGQRALDFYSIHVTKESTHPVKPLAQIAGNRYASGPVGKALSDACMGTIASFLSKYQDIIIEHQKVVKGNQKRLESLRELAGKENLEYPSVTLPPQPHTKEGVDAYNEVIARVRMWVNLNLWQKLKLSRDDAKPLLRLKGFPSFPLVERQANEVDWWDMVCNVKKLINEKKEDGKVFWQNLAGYKRQEALRPYLSSEEDRKKGKKFARYQLGDLLLHLEKKHGEDWGKVYDEAWERIDKKVEGLSKHIKLEEERRSEDAQSKAALTDWLRAKASFVIEGLKEADKDEFCRCELKLQKWYGDLRGKPFAIEAENSILDISGFSKQYNCAFIWQKDGVKKLNLYLIINYFKGGKLRFKKIKPEAFEANRFYTVINKKSGEIVPMEVNFNFDDPNLIILPLAFGKRQGREFIWNDLLSLETGSLKLANGRVIEKTLYNRRTRQDEPALFVALTFERREVLDSSNIKPMNLIGVDRGENIPAVIALTDPMGCPLSRFKDSLGNPTHILRIGESYKEKQRTIQAKKEVEQRRAGGYSRKYASKAKNLADDMVRNTARDLLYYAVTQDAMLIFENLSRGFGRQGKRTFMAERQYTRMEDWLTAKLAYEGLPSKTYLSKTLAQYTSKTCSNCGFTITSADYDRVLEKLKKTATGWMTTINGKELKVEGQITYYNRYKRQNVVKDLSVELDRLSEESVNNDISSWTKGRSGEALSLLKKRFSHRPVQEKFVCLNCGFETHADEQAALNIARSWLFLRSQEYKKYQTNKTTGNTDKRAFVETWQSFYRKKLKEVWKPAV

SEQ ID NO: 25589 - protein, 978 aa, synthetic construct
  REGION 1..978: note = engineered CasX variant
QEIKRINKIRRRLVKDSNTKKAGKTGPMKTLLVRVMTPDLRERLENLRKKPENIPQPISNTSRANLNKLLTDYTEMKKAILHVYWEEFQKDPVGLMSRVAQPASKKIDQNKLKPEMDEKGNLTTAGFACSQCGQPLFVYKLEQVSEKGKAYTNYFGRCNVAEHEKLILLAQLKPEKDSDEAVTYSLGKFGQRALDFYSIHVTKESTHPVKPLAQIAGNRYASGPVGKALSDACMGTIASFLSKYQDIIIEHQKVVKGNQKRLESLRELAGKENLEYPSVTLPPQPHTKEGVDAYNEVIARVRMWVNLNLWQKLKLSRDDAKPLLRLKGFPSFPLVERQANEVDWWDMVCNVKKLINEKKEDGKVFWQNLAGYKRQEALRPYLSSEEDRKKGKKFARYQLGDLLLHLEKKHGEDWGKVYDEAWERIDKKVEGLSKHIKLEEERRSEDAQSKAALTDWLRAKASFVIEGLKEADKDEFCRCELKLQKWYGDLRGKPFAIEAENSILDISGFSKQYNCAFIWQKDGVKKLNLYLIINYFKGGKLRFKKIKPEAFEANRFYTVINKKSGEIVPMEVNFNFDDPNLIILPLAFGKRQGREFIWNDLLSLETGSLKLANGRVIEKTLYNRRTRQDEPALFVALTFERREVLDSSNIKPMNLIGVDRGENIPAVIALTDPMGCPLSGFKDSLGNPTHILRIGESYKEKQRTIQAKKEVEQRRAGGYSRKYASKAKNLADDMVRNTARDLLYYAVTQDAMLIFENLSRGFGRQGKRTFMAERQYTRMEDWLTAKLAYEGLPSKTYLSKTLAQYTSKTCSNCGFTITSADYDRVLEKLKKTATGWMTTINGKELKVEGQITYYNRYKRQNVVKDLSVELDRLSEESVNNDISSWTKGRSGEALSLLKKRFSHRPVQEKFVCLNCGFETHADEQAALNIARSWLFLRSQEYKKYQTNKTTGNTDKRAFVETWQSFYRKKLKEVWKPAV

SEQ ID NO: 25590 - protein, 978 aa, synthetic construct
  REGION 1..978: note = engineered CasX variant
QEIKRINKIRRRLVKDSNTKKAGKTGPMKTLLVRVMTPDLRERLENLRKKPENIPQPISNTSRANLNKLLTDYTEMKKAILHVYWEEFQKDPVGLMSRVAQPASKKIDQNKLKPEMDEKGNLTTAGFACSQCGQPLFVYKLEQVSEKGKAYTNYFGRCNVAEHEKLILLAQLKPEKDSDEAVTYSLGKFGQRALDFYSIHVTKESTHPVKPLAQIAGNRYASGPVGKALSDACMGTIASFLSKYQDIIIEHQKVVKGNQKRLESLRELAGKENLEYPSVTLPPQPHTKEGVDAYNEVIARVRMWVNLNLWQKLKLSRDDAKPLLRLKGFPSFPLVERQANEVDWWDMVCNVKKLINEKKEDGKVFWQNLAGYKRQEALRPYLSSEEDRKKGKKFARYQLGDLLLHLEKKHGEDWGKVYDEAWERIDKKVEGLSKHIKLEEERRSEDAQSKAALTDWLRAKASFVIEGLKEADKDEFCRCELKLQKWYGDLRGKPFAIEAENSILDISGFSKQYNCAFIWQKDGVKKLNLYLIINYFKGGKLRFKKIKPEAFEANRFYTVINKKSGEIVPMEVNFNFDDPNLIILPLAFGKRQGREFIWNDLLSLETGSLKLANGRVIEKTLYNRRTRQDEPALFVALTFERREVLDSSNIKPMNLIGVDRGENIPAVIALTDPLGCPLSRFKDSLGNPTHILRIGESYKNKQRTIQAKKEVEQRRAGGYSRKYASKAKNLADDMVRNTARDLLYYAVTQDAMLIFENLSRGFGRQGKRTFMAERQYTRMEDWLTAKLAYEGLPSKTYLSKTLAQYTSKTCSNCGFTITSADYDRVLEKLKKTATGWMTTINGKELKVEGQITYYNRYKRQNVVKDLSVELDRLSEESVNNDISSWTKGRSGEALSLLKKRFSHRPVQEKFVCLNCGFETHADEQAALNIARSWLFLRSQEYKKYQTNKTTGNTDKRAFVETWQSFYRKKLKEVWKPAV

SEQ ID NO: 25591 - protein, 978 aa, synthetic construct
  REGION 1..978: note = engineered CasX variant
QEIKRINKIRRRLVKDSNTKKAGKTGPMKTLLVRVMTPDLRERLENLRKKPENIPQPISNTSRANLNKLLTDYTEMKKAILHVYWEEFQKDPVGLMSRVAQPASKKIDQNKLKPEMDEKGNLTTAGFACSQCGQPLFVYKLEQVSEKGKAYTNYFGRCNVAEHEKLILLAQLKPEKDSDEAVTYSLGKFGQRALDFYSIHVTKESTHPVKPLAQIAGNRYASGPVGKALSDACMGTIASFLSKYQDIIIEHQKVVKGNQKRLESLRELAGKENLEYPSVTLPPQPHTKEGVDAYNEVIARVRMWVNLNLWQKLKLSRDDAKPLLRLKGFPSFPLVERQANEVDWWDMVCNVKKLINEKKEDGKVFWQNLAGYKRQEALRPYLSSEEDRKKGKKFARYQLGDLLLHLEKKHGEDWGKVYDEAWERIDKKVEGLSKHIKLEEERRSEDAQSKAALTDWLRAKASFVIEGLKEADKDEFCRCELKLQKWYGDLRGKPFAIEAENSILDISGFSKQYNCAFIWQKDGVKKLNLYLIINYFKGGKLRFKKIKPEAFEANRFYTVINKKSGEIVPMEVNFNFDDPNLIILPLAFGKRQGREFIWNDLLSLETGSLKLANGRVIEKTLYNRRTRQDEPALFVALTFERREVLDSSNIKPMNLIGVDRGENIPAVIALTDPLGCPLSRFKDSLGNPTHILRIGESYKEKQRTIQAKKEVEQRRAGGYSRKYASKAKNLADDMVRNTARDLLYYAVTQDAMLIFENLSRGFGRQGKRTFMAERQYTRMEDWLTAKLAYEGLPSKTYLSKTLAQYTSKTCSNCGFTITSADYDRVLEKLKKTATGWMTTINGKELKVEGQITYYNRYKRQNVVKDLSVELDRLSEESVNNDISSWTKGRSGEALSLLKKRFSHRPVQEKFVCLNCGFETHADEQAALNIARSWLFLRSQEYKKYQTNKTTGNTDKRAFVETWQSFYRKKLKEVWKPAV

SEQ ID NO: 25592 - protein, 978 aa, synthetic construct
  REGION 1..978: note = engineered CasX variant
QEIKRINKIRRRLVKDSNTKKAGKTGPMKTLLVRVMTPDLRERLENLRKKPENIPQPISNTSRANLNKLLTDYTEMKKAILHVYWEEFQKDPVGLMSRVAQPASKKIDQNKLKPEMDEKGNLTTAGFACSQCGQPLFVYKLEQVSEKGKAYTNYFGRCNVAEHEKLILLAQLKPEKDSDEAVTYSLGKFGQRALDFYSIHVTKESTHPVKPLAQIAGNRYASGPVGKALSDACMGTIASFLSKYQDIIIEHQKVVKGNQKRLESLRELAGKENLEYPSVTLPPQPHTKEGVDAYNEVIARVRMWVNLNLWQKLKLSRDDAKPLLRLKGFPSFPLVERQANEVDWWDMVCNVKKLINEKKEDGKVFWQNLAGYKRQEALRPYLSSEEDRKKGKKFARYQLGDLLLHLEKKHGEDWGKVYDEAWERIDKKVEGLSKHIKLEEERRSEDAQSKAALTDWLRAKASFVIEGLKEADKDEFCRCELKLQKWYGDLRGKPFAIEAENSILDISGFSKQYNCAFIWQKDGVKKLNLYLIINYFKGGKLRFKKIKPEAFEANRFYTVINKKSGEIVPMEVNFNFDDPNLIILPLAFGKRQGREFIWNDLLSLETGSLKLANGRVIEKTLYNRRTRQDEPALFVALTFERREVLDSSNIKPMNLIGVDRGENIPAVIALTDPLGCPLSGFKDSLGNPTHILRIGESYKEKQRTIQAKKEVEQRRAGGYSRKYASKAKNLADDMVRNTARDLLYYAVTQDAMLIFENLSRGFGRQGKRTFMAERQYTRMEDWLTAKLAYEGLPSKTYLSKTLAQYTSKTCSNCGFTITSADYDRVLEKLKKTATGWMTTINGKELKVEGQITYYNRYKRQNVVKDLSVELDRLSEESVNNDISSWTKGRSGEALSLLKKRFSHRPVQEKFVCLNCGFETHADEQAALNIARSWLFLRSQEYKKYQTNKTTGNTDKRAFVETWQSFYRKKLKEVWKPAV

SEQ ID NO: 25593 - protein, 978 aa, synthetic construct
  REGION 1..978: note = engineered CasX variant
QEIKRINKIRRRLVKDSNTKKAGKTGPMKTLLVRVMTPDLRERLENLRKKPENIPQPISNTSRANLNKLLTDYTEMKKAILHVYWEEFQKDPVGLMSRVAQPASKKIDQNKLKPEMDEKGNLTTAGFACSQCGQPLFVYKLEQVSEKGKAYTNYFGRCNVAEHEKLILLAQLKPEKDSDEAVTYSLGKFGQRALDFYSIHVTKESTHPVKPLAQIAGNRYASGPVGKALSDACMGTIASFLSKYQDIIIEHQKVVKGNQKRLESLRELAGKENLEYPSVTLPPQPHTKEGVDAYNEVIARVRMWVNLNLWQKLKLSRDDAKPLLRLKGFPSFPLVERQANEVDWWDMVCNVKKLINEKKEDGKVFWQNLAGYKRQEALRPYLSSEEDRKKGKKFARYQLGDLLLHLEKKHGEDWGKVYDEAWERIDKKVEGLSKHIKLEEERRSEDAQSKAALTDWLRAKASFVIEGLKEADKDEFCRCELKLQKWYGDLRGKPFAIEAENSILDISGFSKQYNCAFIWQKDGVKKLNLYLIINYFKGGKLRFKKIKPEAFEANRFYTVINKKSGEIVPMEVNFNFDDPNLIILPLAFGKRQGREFIWNDLLSLETGSLKLANGRVIEKTLYNRRTRQDEPALFVALTFERREVLDSSNIKPMNLIGVDRGENIPAVIALTDPKGCPLSRFKDSLGNPTHILRIGESYKEKQRTIQANKEVEQRRAGGYSRKYASKAKNLADDMVRNTARDLLYYAVTQDAMLIFENLSRGFGRQGKRTFMAERQYTRMEDWLTAKLAYEGLPSKTYLSKTLAQYTSKTCSNCGFTITSADYDRVLEKLKKTATGWMTTINGKELKVEGQITYYNRYKRQNVVKDLSVELDRLSEESVNNDISSWTKGRSGEALSLLKKRFSHRPVQEKFVCLNCGFETHADEQAALNIARSWLFLRSQEYKKYQTNKTTGNTDKRAFVETWQSFYRKKLKEVWKPAV

SEQ ID NO: 25594 - protein, 978 aa, synthetic construct
  REGION 1..978: note = engineered CasX variant
QEIKRINKIRRRLVKDSNTKKAGKTGPMKTLLVRVMTPDLRERLENLRKKPENIPQPISNTSRANLNKLLTDYTEMKKAILHVYWEEFQKDPVGLMSRVAQPASKKIDQNKLKPEMDEKGNLTTAGFACSQCGQPLFVYKLEQVSEKGKAYTNYFGRCNVAEHEKLILLAQLKPEKDSDEAVTYSLGKFGQRALDFYSIHVTKESTHPVKPLAQIAGNRYASGPVGKALSDACMGTIASFLSKYQDIIIEHQKVVKGNQKRLESLRELAGKENLEYPSVTLPPQPHTKEGVDAYNEVIARVRMWVNLNLWQKLKLSRDDAKPLLRLKGFPSFPLVERQANEVDWWDMVCNVKKLINEKKEDGKVFWQNLAGYKRQEALRPYLSSEEDRKKGKKFARYQLGDLLLHLEKKHGEDWGKVYDEAWERIDKKVEGLSKHIKLEEERRSEDAQSKAALTDWLRAKASFVIEGLKEADKDEFCRCELKLQKWYGDLRGKPFAIEAENSILDISGFSKQYNCAFIWQKDGVKKLNLYLIINYFKGGKLRFKKIKPEAFEANRFYTVINKKSGEIVPMEVNFNFDDPNLIILPLAFGKRQGREFIWNDLLSLETGSLKLANGRVIEKTLYNRRTRQDEPALFVALTFERREVLDSSNIKPMNLIGVDRGENIPAVIALTDPKGCPLSRFKDSLGNPTHILRIGESYKEKQRTIQAKKEVEQRRAGGYSRKYASKAKNLADDMVRNTARDLLYYAVTQDAMLIFENLSRGFGRQGKRTFMAERQYTRMEDWLTAKLAYEGLPSKTYLSKTLAQYTSKTCSNCGFTITSADYDRVLEKLKKTATGWMTTINGKELKVEGQITYYNRYKRQNVVKDLSVELDRLSEESVNNDISSWTKGRSGEALSLLKKRFSHRPVQEKFVCLNCGFETHADEQAALNIARSWLFLRSQEYKKYQTNKTTGNTDKRAFVETWQSFYRKKLKEVWKPAV

SEQ ID NO: 25595 - protein, 978 aa, synthetic construct
  REGION 1..978: note = engineered CasX variant
QEIKRINKIRRRLVKDSNTKKAGKTGPMKTLLVRVMTPDLRERLENLRKKPENIPQPISNTSRANLNKLLTDYTEMKKAILHVYWEEFQKDPVGLMSRVAQPASKKIDQNKLKPEMDEKGNLTTAGFACSQCGQPLFVYKLEQVSEKGKAYTNYFGRCNVAEHEKLILLAQLKPEKDSDEAVTYSLGKFGQRALDFYSIHVTKESTHPVKPLAQIAGNRYASGPVGKALSDACMGTIASFLSKYQDIIIEHQKVVKGNQKRLESLRELAGKENLEYPSVTLPPQPHTKEGVDAYNEVIARVRMWVNLNLWQKLKLSRDDAKPLLRLKGFPSFPLVERQANEVDWWDMVCNVKKLINEKKEDGKVFWQNLAGYKRQEALRPYLSSEEDRKKGKKFARYQLGDLLLHLEKKHGEDWGKVYDEAWERIDKKVEGLSKHIKLEEERRSEDAQSKAALTDWLRAKASFVIEGLKEADKDEFCRCELKLQKWYGDLRGKPFAIEAENSILDISGFSKQYNCAFIWQKDGVKKLNLYLIINYFKGGKLRFKKIKPEAFEANRFYTVINKKSGEIVPMEVNFNFDDPNLIILPLAFGKRQGREFIWNDLLSLETGSLKLANGRVIEKTLYNRRTRQDEPALFVALTFERREVLDSSNIKPMNLIGVDRGENIPAVIALTDPIGCPLSRFKDSLGNPTHILRIGESYKEKQRTIQAKKEVEQRRAGIYSRKYASKAKNLADDMVRNTARDLLYYAVTQDAMLIFENLSRGFGRQGKRTFMAERQYTRMEDWLTAKLAYEGLPSKTYLSKTLAQYTSKTCSNCGFTITSADYDRVLEKLKKTATGWMTTINGKELKVEGQITYYNRYKRQNVVKDLSVELDRLSEESVNNDISSWTKGRSGEALSLLKKRFSHRPVQEKFVCLNCGFETHADEQAALNIARSWLFLRSQEYKKYQTNKTTGNTDKRAFVETWQSFYRKKLKEVWKPAV

SEQ ID NO: 25596 - protein, 978 aa, synthetic construct
  REGION 1..978: note = engineered CasX variant
QEIKRINKIRRRLVKDSNTKKAGKTGPMKTLLVRVMTPDLRERLENLRKKPENIPQPISNTSRANLNKLLTDYTEMKKAILHVYWEEFQKDPVGLMSRVAQPASKKIDQNKLKPEMDEKGNLTTAGFACSQCGQPLFVYKLEQVSEKGKAYTNYFGRCNVAEHEKLILLAQLKPEKDSDEAVTYSLGKFGQRALDFYSIHVTKESTHPVKPLAQIAGNRYASGPVGKALSDACMGTIASFLSKYQDIIIEHQKVVKGNQKRLESLRELAGKENLEYPSVTLPPQPHTKEGVDAYNEVIARVRMWVNLNLWQKLKLSRDDAKPLLRLKGFPSFPLVERQANEVDWWDMVCNVKKLINEKKEDGKVFWQNLAGYKRQEALRPYLSSEEDRKKGKKFARYQLGDLLLHLEKKHGEDWGKVYDEAWERIDKKVEGLSKHIKLEEERRSEDAQSKAALTDWLRAKASFVIEGLKEADKDEFCRCELKLQKWYGDLRGKPFAIEAENSILDISGFSKQYNCAFIWQKDGVKKLNLYLIINYFKGGKLRFKKIKPEAFEANRFYTVINKKSGEIVPMEVNFNFDDPNLIILPLAFGKRQGREFIWNDLLSLETGSLKLANGRVIEKTLYNRRTRQDEPALFVALTFERREVLDSSNIKPMNLIGVDRGENIPAVIALTDPHGCPLSRFKDSLGNPTHILRIGESYKEKQRTIQAKKEVEQRRAGGYSRKYASKAKNLADDMVRNTARDLLYYAVTQDAMLIFENLSRGFGRQGKRTFMAERQYTRMEDWLTAKLAYEGLPSKTYLSKTLAQYTSKTCSNCGFTITSADYDRVLEKLKKTATGWMTTINGKELKVEGQITYYNRYKRQNVVKDLSVELDRLSEESVNNDISSWTKGRSGEALSLLKKRFSHRPVQEKFVCLNCGFETHADEQAALNIARSWLFLRSQEYKKYQTNKTTGNTDKRAFVETWQSFYRKKLKEVWKPAV

SEQ ID NO: 25597 - protein, 978 aa, synthetic construct
  REGION 1..978: note = engineered CasX variant
QEIKRINKIRRRLVKDSNTKKAGKTGPMKTLLVRVMTPDLRERLENLRKKPENIPQPISNTSRANLNKLLTDYTEMKKAILHVYWEEFQKDPVGLMSRVAQPASKKIDQNKLKPEMDEKGNLTTAGFACSQCGQPLFVYKLEQVSEKGKAYTNYFGRCNVAEHEKLILLAQLKPEKDSDEAVTYSLGKFGQRALDFYSIHVTKESTHPVKPLAQIAGNRYASGPVGKALSDACMGTIASFLSKYQDIIIEHQKVVKGNQKRLESLRELAGKENLEYPSVTLPPQPHTKEGVDAYNEVIARVRMWVNLNLWQKLKLSRDDAKPLLRLKGFPSFPLVERQANEVDWWDMVCNVKKLINEKKEDGKVFWQNLAGYKRQEALRPYLSSEEDRKKGKKFARYQLGDLLLHLEKKHGEDWGKVYDEAWERIDKKVEGLSKHIKLEEERRSEDAQSKAALTDWLRAKASFVIEGLKEADKDEFCRCELKLQKWYGDLRGKPFAIEAENSILDISGFSKQYNCAFIWQKDGVKKLNLYLIINYFKGGKLRFKKIKPEAFEANRFYTVINKKSGEIVPMEVNFNFDDPNLIILPLAFGKRQGREFIWNDLLSLETGSLKLANGRVIEKTLYNRRTRQDEPALFVALTFERREVLDSSNIKPMNLIGVDRGENIPAVIALTDPHGCPLSRFKDSLGNPTHILRIEESYKEKQRTIQAKKEVEQRRAGGYSRKYASKAKNLADDMVRNTARDLLYYAVTQDAMLIFENLSRGFGRQGKRTFMAERQYTRMEDWLTAKLAYEGLPSKTYLSKTLAQYTSKTCSNCGFTITSADYDRVLEKLKKTATGWMTTINGKELKVEGQITYYNRYKRQNVVKDLSVELDRLSEESVNNDISSWTKGRSGEALSLLKKRFSHRPVQEKFVCLNCGFETHADEQAALNIARSWLFLRSQEYKKYQTNKTTGNTDKRAFVETWQSFYRKKLKEVWKPAV

SEQ ID NO: 25598 - protein, 978 aa, synthetic construct
  REGION 1..978: note = engineered CasX variant
QEIKRINKIRRRLVKDSNTKKAGKTGPMKTLLVRVMTPDLRERLENLRKKPENIPQPISNTSRANLNKLLTDYTEMKKAILHVYWEEFQKDPVGLMSRVAQPASKKIDQNKLKPEMDEKGNLTTAGFACSQCGQPLFVYKLEQVSEKGKAYTNYFGRCNVAEHEKLILLAQLKPEKDSDEAVTYSLGKFGQRALDFYSIHVTKESTHPVKPLAQIAGNRYASGPVGKALSDACMGTIASFLSKYQDIIIEHQKVVKGNQKRLESLRELAGKENLEYPSVTLPPQPHTKEGVDAYNEVIARVRMWVNLNLWQKLKLSRDDAKPLLRLKGFPSFPLVERQANEVDWWDMVCNVKKLINEKKEDGKVFWQNLAGYKRQEALRPYLSSEEDRKKGKKFARYQLGDLLLHLEKKHGEDWGKVYDEAWERIDKKVEGLSKHIKLEEERRSEDAQSKAALTDWLRAKASFVIEGLKEADKDEFCRCELKLQKWYGDLRGKPFAIEAENSILDISGFSKQYNCAFIWQKDGVKKLNLYLIINYFKGGKLRFKKIKPEAFEANRFYTVINKKSGEIVPMEVNFNFDDPNLIILPLAFGKRQGREFIWNDLLSLETGSLKLANGRVIEKTLYNRRTRQDEPALFVALTFERREVLDSSNIKPMNLIGVDRGENIPAVIALTDPHGCPLSRFKDSLGNNTHILRIGESYKEKQRTIQAKKEVEQRRAGGYSRKYASKAKNLADDMVRNTARDLLYYAVTQDAMLIFENLSRGFGRQGKRTFMAERQYTRMEDWLTAKLAYEGLPSKTYLSKTLAQYTSKTCSNCGFTITSADYDRVLEKLKKTATGWMTTINGKELKVEGQITYYNRYKRQNVVKDLSVELDRLSEESVNNDISSWTKGRSGEALSLLKKRFSHRPVQEKFVCLNCGFETHADEQAALNIARSWLFLRSQEYKKYQTNKTTGNTDKRAFVETWQSFYRKKLKEVWKPAV

SEQ ID NO: 25599 - protein, 978 aa, synthetic construct
  REGION 1..978: note = engineered CasX variant
QEIKRINKIRRRLVKDSNTKKAGKTGPMKTLLVRVMTPDLRERLENLRKKPENIPQPISNTSRANLNKLLTDYTEMKKAILHVYWEEFQKDPVGLMSRVAQPASKKIDQNKLKPEMDEKGNLTTAGFACSQCGQPLFVYKLEQVSEKGKAYTNYFGRCNVAEHEKLILLAQLKPEKDSDEAVTYSLGKFGQRALDFYSIHVTKESTHPVKPLAQIAGNRYASGPVGKALSDACMGTIASFLSKYQDIIIEHQKVVKGNQKRLESLRELAGKENLEYPSVTLPPQPHTKEGVDAYNEVIARVRMWVNLNLWQKLKLSRDDAKPLLRLKGFPSFPLVERQANEVDWWDMVCNVKKLINEKKEDGKVFWQNLAGYKRQEALRPYLSSEEDRKKGKKFARYQLGDLLLHLEKKHGEDWGKVYDEAWERIDKKVEGLSKHIKLEEERRSEDAQSKAALTDWLRAKASFVIEGLKEADKDEFCRCELKLQKWYGDLRGKPFAIEAENSILDISGFSKQYNCAFIWQKDGVKKLNLYLIINYFKGGKLRFKKIKPEAFEANRFYTVINKKSGEIVPMEVNFNFDDPNLIILPLAFGKRQGREFIWNDLLSLETGSLKLANGRVIEKTLYNRRTRQDEPALFVALTFERREVLDSSNIKPMNLIGVDRGENIPAVIALTDPGGCPLSRFKDSLGNPTHILRIGESYKEKFRTIQAKKEVEQRRAGGYSRKYASKAKNLADDMVRNTARDLLYYAVTQDAMLIFENLSRGFGRQGKRTFMAERQYTRMEDWLTAKLAYEGLPSKTYLSKTLAQYTSKTCSNCGFTITSADYDRVLEKLKKTATGWMTTINGKELKVEGQITYYNRYKRQNVVKDLSVELDRLSEESVNNDISSWTKGRSGEALSLLKKRFSHRPVQEKFVCLNCGFETHADEQAALNIARSWLFLRSQEYKKYQTNKTTGNTDKRAFVETWQSFYRKKLKEVWKPAV

SEQ ID NO: 25600 - protein, 978 aa, synthetic construct
  REGION 1..978: note = engineered CasX variant
QEIKRINKIRRRLVKDSNTKKAGKTGPMKTLLVRVMTPDLRERLENLRKKPENIPQPISNTSRANLNKLLTDYTEMKKAILHVYWEEFQKDPVGLMSRVAQPASKKIDQNKLKPEMDEKGNLTTAGFACSQCGQPLFVYKLEQVSEKGKAYTNYFGRCNVAEHEKLILLAQLKPEKDSDEAVTYSLGKFGQRALDFYSIHVTKESTHPVKPLAQIAGNRYASGPVGKALSDACMGTIASFLSKYQDIIIEHQKVVKGNQKRLESLRELAGKENLEYPSVTLPPQPHTKEGVDAYNEVIARVRMWVNLNLWQKLKLSRDDAKPLLRLKGFPSFPLVERQANEVDWWDMVCNVKKLINEKKEDGKVFWQNLAGYKRQEALRPYLSSEEDRKKGKKFARYQLGDLLLHLEKKHGEDWGKVYDEAWERIDKKVEGLSKHIKLEEERRSEDAQSKAALTDWLRAKASFVIEGLKEADKDEFCRCELKLQKWYGDLRGKPFAIEAENSILDISGFSKQYNCAFIWQKDGVKKLNLYLIINYFKGGKLRFKKIKPEAFEANRFYTVINKKSGEIVPMEVNFNFDDPNLIILPLAFGKRQGREFIWNDLLSLETGSLKLANGRVIEKTLYNRRTRQDEPALFVALTFERREVLDSSNIKPMNLIGVDRGENIPAVIALTDPFGCPLSTFKDSLGNPTHILRIGESYKNKQRTIQAKKEVEQRRAGGYSRKYASKAKNLADDMVRNTARDLLYYAVTQDAMLIFENLSRGFGRQGKRTFMAERQYTRMEDWLTAKLAYEGLPSKTYLSKTLAQYTSKTCSNCGFTITSADYDRVLEKLKKTATGWMTTINGKELKVEGQITYYNRYKRQNVVKDLSVELDRLSEESVNNDISSWTKGRSGEALSLLKKRFSHRPVQEKFVCLNCGFETHADEQAALNIARSWLFLRSQEYKKYQTNKTTGNTDKRAFVETWQSFYRKKLKEVWKPAV

SEQ ID NO: 25601 - protein, 978 aa, synthetic construct
  REGION 1..978: note = engineered CasX variant
QEIKRINKIRRRLVKDSNTKKAGKTGPMKTLLVRVMTPDLRERLENLRKKPENIPQPISNTSRANLNKLLTDYTEMKKAILHVYWEEFQKDPVGLMSRVAQPASKKIDQNKLKPEMDEKGNLTTAGFACSQCGQPLFVYKLEQVSEKGKAYTNYFGRCNVAEHEKLILLAQLKPEKDSDEAVTYSLGKFGQRALDFYSIHVTKESTHPVKPLAQIAGNRYASGPVGKALSDACMGTIASFLSKYQDIIIEHQKVVKGNQKRLESLRELAGKENLEYPSVTLPPQPHTKEGVDAYNEVIARVRMWVNLNLWQKLKLSRDDAKPLLRLKGFPSFPLVERQANEVDWWDMVCNVKKLINEKKEDGKVFWQNLAGYKRQEALRPYLSSEEDRKKGKKFARYQLGDLLLHLEKKHGEDWGKVYDEAWERIDKKVEGLSKHIKLEEERRSEDAQSKAALTDWLRAKASFVIEGLKEADKDEFCRCELKLQKWYGDLRGKPFAIEAENSILDISGFSKQYNCAFIWQKDGVKKLNLYLIINYFKGGKLRFKKIKPEAFEANRFYTVINKKSGEIVPMEVNFNFDDPNLIILPLAFGKRQGREFIWNDLLSLETGSLKLANGRVIEKTLYNRRTRQDEPALFVALTFERREVLDSSNIKPMNLIGVDRGENIPAVIALTDPFGCPLSTFKDSLGNPTHILRIGESYKEKQRTIQAKKEVEQRRAGGYSRKYASKAKNLADDMVRNTARDLLYYAVTQDAMLIFENLSRGFGRQGKRTFMAERQYTRMEDWLTAKLAYEGLPSKTYLSKTLAQYTSKTCSNCGFTITSADYDRVLEKLKKTATGWMTTINGKELKVEGQITYYNRYKRQNVVKDLSVELDRLSEESVNNDISSWTKGRSGEALSLLKKRFSHRPVQEKFVCLNCGFETHADEQAALNIARSWLFLRSQEYKKYQTNKTTGNTDKRAFVETWQSFYRKKLKEVWKPAV

SEQ ID NO: 25602 - protein, 978 aa, synthetic construct
  REGION 1..978: note = engineered CasX variant
QEIKRINKIRRRLVKDSNTKKAGKTGPMKTLLVRVMTPDLRERLENLRKKPENIPQPISNTSRANLNKLLTDYTEMKKAILHVYWEEFQKDPVGLMSRVAQPASKKIDQNKLKPEMDEKGNLTTAGFACSQCGQPLFVYKLEQVSEKGKAYTNYFGRCNVAEHEKLILLAQLKPEKDSDEAVTYSLGKFGQRALDFYSIHVTKESTHPVKPLAQIAGNRYASGPVGKALSDACMGTIASFLSKYQDIIIEHQKVVKGNQKRLESLRELAGKENLEYPSVTLPPQPHTKEGVDAYNEVIARVRMWVNLNLWQKLKLSRDDAKPLLRLKGFPSFPLVERQANEVDWWDMVCNVKKLINEKKEDGKVFWQNLAGYKRQEALRPYLSSEEDRKKGKKFARYQLGDLLLHLEKKHGEDWGKVYDEAWERIDKKVEGLSKHIKLEEERRSEDAQSKAALTDWLRAKASFVIEGLKEADKDEFCRCELKLQKWYGDLRGKPFAIEAENSILDISGFSKQYNCAFIWQKDGVKKLNLYLIINYFKGGKLRFKKIKPEAFEANRFYTVINKKSGEIVPMEVNFNFDDPNLIILPLAFGKRQGREFIWNDLLSLETGSLKLANGRVIEKTLYNRRTRQDEPALFVALTFERREVLDSSNIKPMNLIGVDRGENIPAVIALTDPFGCPLSRFYDSLGNPTHILRIGESYKLKQRTIQAKKEVEQRRAGGYSRKYASKAKNLADDMVRNTARDLLYYAVTQDAMLIFENLSRGFGRQGKRTFMAERQYTRMEDWLTAKLAYEGLPSKTYLSKTLAQYTSKTCSNCGFTITSADYDRVLEKLKKTATGWMTTINGKELKVEGQITYYNRYKRQNVVKDLSVELDRLSEESVNNDISSWTKGRSGEALSLLKKRFSHRPVQEKFVCLNCGFETHADEQAALNIARSWLFLRSQEYKKYQTNKTTGNTDKRAFVETWQSFYRKKLKEVWKPAV

SEQ ID NO: 25603 - protein, 978 aa, synthetic construct
  REGION 1..978: note = engineered CasX variant
QEIKRINKIRRRLVKDSNTKKAGKTGPMKTLLVRVMTPDLRERLENLRKKPENIPQPISNTSRANLNKLLTDYTEMKKAILHVYWEEFQKDPVGLMSRVAQPASKKIDQNKLKPEMDEKGNLTTAGFACSQCGQPLFVYKLEQVSEKGKAYTNYFGRCNVAEHEKLILLAQLKPEKDSDEAVTYSLGKFGQRALDFYSIHVTKESTHPVKPLAQIAGNRYASGPVGKALSDACMGTIASFLSKYQDIIIEHQKVVKGNQKRLESLRELAGKENLEYPSVTLPPQPHTKEGVDAYNEVIARVRMWVNLNLWQKLKLSRDDAKPLLRLKGFPSFPLVERQANEVDWWDMVCNVKKLINEKKEDGKVFWQNLAGYKRQEALRPYLSSEEDRKKGKKFARYQLGDLLLHLEKKHGEDWGKVYDEAWERIDKKVEGLSKHIKLEEERRSEDAQSKAALTDWLRAKASFVIEGLKEADKDEFCRCELKLQKWYGDLRGKPFAIEAENSILDISGFSKQYNCAFIWQKDGVKKLNLYLIINYFKGGKLRFKKIKPEAFEANRFYTVINKKSGEIVPMEVNFNFDDPNLIILPLAFGKRQGREFIWNDLLSLETGSLKLANGRVIEKTLYNRRTRQDEPALFVALTFERREVLDSSNIKPMNLIGVDRGENIPAVIALTDPFGCPLSRFYDSLGNPTHILRIGESYKEKQRTIQAKKEVEQRRAGGYSRKYASKAKNLADDMVRNTARDLLYYAVTQDAMLIFENLSRGFGRQGKRTFMAERQYTRMEDWLTAKLAYEGLPSKTYLSKTLAQYTSKTCSNCGFTITSADYDRVLEKLKKTATGWMTTINGKELKVEGQITYYNRYKRQNVVKDLSVELDRLSEESVNNDISSWTKGRSGEALSLLKKRFSHRPVQEKFVCLNCGFETHADEQAALNIARSWLFLRSQEYKKYQTNKTTGNTDKRAFVETWQSFYRKKLKEVWKPAV

SEQ ID NO: 25604 - protein, 978 aa, synthetic construct
  REGION 1..978: note = engineered CasX variant
QEIKRINKIRRRLVKDSNTKKAGKTGPMKTLLVRVMTPDLRERLENLRKKPENIPQPISNTSRANLNKLLTDYTEMKKAILHVYWEEFQKDPVGLMSRVAQPASKKIDQNKLKPEMDEKGNLTTAGFACSQCGQPLFVYKLEQVSEKGKAYTNYFGRCNVAEHEKLILLAQLKPEKDSDEAVTYSLGKFGQRALDFYSIHVTKESTHPVKPLAQIAGNRYASGPVGKALSDACMGTIASFLSKYQDIIIEHQKVVKGNQKRLESLRELAGKENLEYPSVTLPPQPHTKEGVDAYNEVIARVRMWVNLNLWQKLKLSRDDAKPLLRLKGFPSFPLVERQANEVDWWDMVCNVKKLINEKKEDGKVFWQNLAGYKRQEALRPYLSSEEDRKKGKKFARYQLGDLLLHLEKKHGEDWGKVYDEAWERIDKKVEGLSKHIKLEEERRSEDAQSKAALTDWLRAKASFVIEGLKEADKDEFCRCELKLQKWYGDLRGKPFAIEAENSILDISGFSKQYNCAFIWQKDGVKKLNLYLIINYFKGGKLRFKKIKPEAFEANRFYTVINKKSGEIVPMEVNFNFDDPNLIILPLAFGKRQGREFIWNDLLSLETGSLKLANGRVIEKTLYNRRTRQDEPALFVALTFERREVLDSSNIKPMNLIGVDRGENIPAVIALTDPFGCPLSRFKDSLGNPTHILRIGESYKNKQRTIQAKKEVEQRRAGGYSRKYASKAKNLADDMVRNTARDLLYYAVTQDAMLIFENLSRGFGRQGKRTFMAERQYTRMEDWLTAKLAYEGLPSKTYLSKTLAQYTSKTCSNCGFTITSADYDRVLEKLKKTATGWMTTINGKELKVEGQITYYNRYKRQNVVKDLSVELDRLSEESVNNDISSWTKGRSGEALSLLKKRFSHRPVQEKFVCLNCGFETHADEQAALNIARSWLFLRSQEYKKYQTNKTTGNTDKRAFVETWQSFYRKKLKEVWKPAV

SEQ ID NO: 25605 - protein, 978 aa, synthetic construct
  REGION 1..978: note = engineered CasX variant
QEIKRINKIRRRLVKDSNTKKAGKTGPMKTLLVRVMTPDLRERLENLRKKPENIPQPISNTSRANLNKLLTDYTEMKKAILHVYWEEFQKDPVGLMSRVAQPASKKIDQNKLKPEMDEKGNLTTAGFACSQCGQPLFVYKLEQVSEKGKAYTNYFGRCNVAEHEKLILLAQLKPEKDSDEAVTYSLGKFGQRALDFYSIHVTKESTHPVKPLAQIAGNRYASGPVGKALSDACMGTIASFLSKYQDIIIEHQKVVKGNQKRLESLRELAGKENLEYPSVTLPPQPHTKEGVDAYNEVIARVRMWVNLNLWQKLKLSRDDAKPLLRLKGFPSFPLVERQANEVDWWDMVCNVKKLINEKKEDGKVFWQNLAGYKRQEALRPYLSSEEDRKKGKKFARYQLGDLLLHLEKKHGEDWGKVYDEAWERIDKKVEGLSKHIKLEEERRSEDAQSKAALTDWLRAKASFVIEGLKEADKDEFCRCELKLQKWYGDLRGKPFAIEAENSILDISGFSKQYNCAFIWQKDGVKKLNLYLIINYFKGGKLRFKKIKPEAFEANRFYTVINKKSGEIVPMEVNFNFDDPNLIILPLAFGKRQGREFIWNDLLSLETGSLKLANGRVIEKTLYNRRTRQDEPALFVALTFERREVLDSSNIKPMNLIGVDRGENIPAVIALTDPFGCPLSRFKDSLGNPTHILRIGESYKLKQRTIQAKKEVEQRRAGGYSRKYASKAKNLADDMVRNTARDLLYYAVTQDAMLIFENLSRGFGRQGKRTFMAERQYTRMEDWLTAKLAYEGLPSKTYLSKTLAQYTSKTCSNCGFTITSADYDRVLEKLKKTATGWMTTINGKELKVEGQITYYNRYKRQNVVKDLSVELDRLSEESVNNDISSWTKGRSGEALSLLKKRFSHRPVQEKFVCLNCGFETHADEQAALNIARSWLFLRSQEYKKYQTNKTTGNTDKRAFVETWQSFYRKKLKEVWKPAV

SEQ ID NO: 25606 - protein, 978 aa, synthetic construct
  REGION 1..978: note = engineered CasX variant
QEIKRINKIRRRLVKDSNTKKAGKTGPMKTLLVRVMTPDLRERLENLRKKPENIPQPISNTSRANLNKLLTDYTEMKKAILHVYWEEFQKDPVGLMSRVAQPASKKIDQNKLKPEMDEKGNLTTAGFACSQCGQPLFVYKLEQVSEKGKAYTNYFGRCNVAEHEKLILLAQLKPEKDSDEAVTYSLGKFGQRALDFYSIHVTKESTHPVKPLAQIAGNRYASGPVGKALSDACMGTIASFLSKYQDIIIEHQKVVKGNQKRLESLRELAGKENLEYPSVTLPPQPHTKEGVDAYNEVIARVRMWVNLNLWQKLKLSRDDAKPLLRLKGFPSFPLVERQANEVDWWDMVCNVKKLINEKKEDGKVFWQNLAGYKRQEALRPYLSSEEDRKKGKKFARYQLGDLLLHLEKKHGEDWGKVYDEAWERIDKKVEGLSKHIKLEEERRSEDAQSKAALTDWLRAKASFVIEGLKEADKDEFCRCELKLQKWYGDLRGKPFAIEAENSILDISGFSKQYNCAFIWQKDGVKKLNLYLIINYFKGGKLRFKKIKPEAFEANRFYTVINKKSGEIVPMEVNFNFDDPNLIILPLAFGKRQGREFIWNDLLSLETGSLKLANGRVIEKTLYNRRTRQDEPALFVALTFERREVLDSSNIKPMNLIGVDRGENIPAVIALTDPFGCPLSRFKDSLGNPTHILRIGESYKEKQRTIQAKKEVQQRRAGGYSRKYASKAKNLADDMVRNTARDLLYYAVTQDAMLIFENLSRGFGRQGKRTFMAERQYTRMEDWLTAKLAYEGLPSKTYLSKTLAQYTSKTCSNCGFTITSADYDRVLEKLKKTATGWMTTINGKELKVEGQITYYNRYKRQNVVKDLSVELDRLSEESVNNDISSWTKGRSGEALSLLKKRFSHRPVQEKFVCLNCGFETHADEQAALNIARSWLFLRSQEYKKYQTNKTTGNTDKRAFVETWQSFYRKKLKEVWKPAV

SEQ ID NO: 25607 - protein, 978 aa, synthetic construct
  REGION 1..978: note = engineered CasX variant
QEIKRINKIRRRLVKDSNTKKAGKTGPMKTLLVRVMTPDLRERLENLRKKPENIPQPISNTSRANLNKLLTDYTEMKKAILHVYWEEFQKDPVGLMSRVAQPASKKIDQNKLKPEMDEKGNLTTAGFACSQCGQPLFVYKLEQVSEKGKAYTNYFGRCNVAEHEKLILLAQLKPEKDSDEAVTYSLGKFGQRALDFYSIHVTKESTHPVKPLAQIAGNRYASGPVGKALSDACMGTIASFLSKYQDIIIEHQKVVKGNQKRLESLRELAGKENLEYPSVTLPPQPHTKEGVDAYNEVIARVRMWVNLNLWQKLKLSRDDAKPLLRLKGFPSFPLVERQANEVDWWDMVCNVKKLINEKKEDGKVFWQNLAGYKRQEALRPYLSSEEDRKKGKKFARYQLGDLLLHLEKKHGEDWGKVYDEAWERIDKKVEGLSKHIKLEEERRSEDAQSKAALTDWLRAKASFVIEGLKEADKDEFCRCELKLQKWYGDLRGKPFAIEAENSILDISGFSKQYNCAFIWQKDGVKKLNLYLIINYFKGGKLRFKKIKPEAFEANRFYTVINKKSGEIVPMEVNFNFDDPNLIILPLAFGKRQGREFIWNDLLSLETGSLKLANGRVIEKTLYNRRTRQDEPALFVALTFERREVLDSSNIKPMNLIGVDRGENIPAVIALTDPFGCPLSRFKDSLGNPTHILRIGESYKEKQRTIQAKKEVQQNRAGGYSRKYASKAKNLADDMVRNTARDLLYYAVTQDAMLIFENLSRGFGRQGKRTFMAERQYTRMEDWLTAKLAYEGLPSKTYLSKTLAQYTSKTCSNCGFTITSADYDRVLEKLKKTATGWMTTINGKELKVEGQITYYNRYKRQNVVKDLSVELDRLSEESVNNDISSWTKGRSGEALSLLKKRFSHRPVQEKFVCLNCGFETHADEQAALNIARSWLFLRSQEYKKYQTNKTTGNTDKRAFVETWQSFYRKKLKEVWKPAV

SEQ ID NO: 25608 - protein, 978 aa, synthetic construct
  REGION 1..978: note = engineered CasX variant
QEIKRINKIRRRLVKDSNTKKAGKTGPMKTLLVRVMTPDLRERLENLRKKPENIPQPISNTSRANLNKLLTDYTEMKKAILHVYWEEFQKDPVGLMSRVAQPASKKIDQNKLKPEMDEKGNLTTAGFACSQCGQPLFVYKLEQVSEKGKAYTNYFGRCNVAEHEKLILLAQLKPEKDSDEAVTYSLGKFGQRALDFYSIHVTKESTHPVKPLAQIAGNRYASGPVGKALSDACMGTIASFLSKYQDIIIEHQKVVKGNQKRLESLRELAGKENLEYPSVTLPPQPHTKEGVDAYNEVIARVRMWVNLNLWQKLKLSRDDAKPLLRLKGFPSFPLVERQANEVDWWDMVCNVKKLINEKKEDGKVFWQNLAGYKRQEALRPYLSSEEDRKKGKKFARYQLGDLLLHLEKKHGEDWGKVYDEAWERIDKKVEGLSKHIKLEEERRSEDAQSKAALTDWLRAKASFVIEGLKEADKDEFCRCELKLQKWYGDLRGKPFAIEAENSILDISGFSKQYNCAFIWQKDGVKKLNLYLIINYFKGGKLRFKKIKPEAFEANRFYTVINKKSGEIVPMEVNFNFDDPNLIILPLAFGKRQGREFIWNDLLSLETGSLKLANGRVIEKTLYNRRTRQDEPALFVALTFERREVLDSSNIKPMNLIGVDRGENIPAVIALTDPFGCPLSRFKDSLGNPTHILRIGESYKEKQRTIQAKKEVEQRRAGGYSRKYASKAKNLADDMVRNTARDLLYYAVTQDAMLIFENLSRGFGRQGKRTFMAERQYTRMEDWLTAKLAYEGLPSKTYLSKTLAQYTSKTCSNCGFTITSADYDRVLEKLKKTATGWMTTINGKELKVEGQITYYNRYKRQNVVKDLSVELDRLSEESVNNDISSWTKGRSGEALSLLKKRFSHRPVQEKFVCLNCGFETHADEQAALNIARSWLFLRSQEYKKYQTNKTTGNTDKRAFVETWQSFYRKKLKEVWKPAV

SEQ ID NO: 25609 - protein, 978 aa, synthetic construct
  REGION 1..978: note = engineered CasX variant
QEIKRINKIRRRLVKDSNTKKAGKTGPMKTLLVRVMTPDLRERLENLRKKPENIPQPISNTSRANLNKLLTDYTEMKKAILHVYWEEFQKDPVGLMSRVAQPASKKIDQNKLKPEMDEKGNLTTAGFACSQCGQPLFVYKLEQVSEKGKAYTNYFGRCNVAEHEKLILLAQLKPEKDSDEAVTYSLGKFGQRALDFYSIHVTKESTHPVKPLAQIAGNRYASGPVGKALSDACMGTIASFLSKYQDIIIEHQKVVKGNQKRLESLRELAGKENLEYPSVTLPPQPHTKEGVDAYNEVIARVRMWVNLNLWQKLKLSRDDAKPLLRLKGFPSFPLVERQANEVDWWDMVCNVKKLINEKKEDGKVFWQNLAGYKRQEALRPYLSSEEDRKKGKKFARYQLGDLLLHLEKKHGEDWGKVYDEAWERIDKKVEGLSKHIKLEEERRSEDAQSKAALTDWLRAKASFVIEGLKEADKDEFCRCELKLQKWYGDLRGKPFAIEAENSILDISGFSKQYNCAFIWQKDGVKKLNLYLIINYFKGGKLRFKKIKPEAFEANRFYTVINKKSGEIVPMEVNFNFDDPNLIILPLAFGKRQGREFIWNDLLSLETGSLKLANGRVIEKTLYNRRTRQDEPALFVALTFERREVLDSSNIKPMNLIGVDRGENIPAVIALTDPFGCPLSRFKDSLGNPTHILRIGESYKEKQRTIQAKKEVEQNRAGGYSRKYASKAKNLADDMVRNTARDLLYYAVTQDAMLIFENLSRGFGRQGKRTFMAERQYTRMEDWLTAKLAYEGLPSKTYLSKTLAQYTSKTCSNCGFTITSADYDRVLEKLKKTATGWMTTINGKELKVEGQITYYNRYKRQNVVKDLSVELDRLSEESVNNDISSWTKGRSGEALSLLKKRFSHRPVQEKFVCLNCGFETHADEQAALNIARSWLFLRSQEYKKYQTNKTTGNTDKRAFVETWQSFYRKKLKEVWKPAV

SEQ ID NO: 25610 - protein, 978 aa, synthetic construct
  REGION 1..978: note = engineered CasX variant
QEIKRINKIRRRLVKDSNTKKAGKTGPMKTLLVRVMTPDLRERLENLRKKPENIPQPISNTSRANLNKLLTDYTEMKKAILHVYWEEFQKDPVGLMSRVAQPASKKIDQNKLKPEMDEKGNLTTAGFACSQCGQPLFVYKLEQVSEKGKAYTNYFGRCNVAEHEKLILLAQLKPEKDSDEAVTYSLGKFGQRALDFYSIHVTKESTHPVKPLAQIAGNRYASGPVGKALSDACMGTIASFLSKYQDIIIEHQKVVKGNQKRLESLRELAGKENLEYPSVTLPPQPHTKEGVDAYNEVIARVRMWVNLNLWQKLKLSRDDAKPLLRLKGFPSFPLVERQANEVDWWDMVCNVKKLINEKKEDGKVFWQNLAGYKRQEALRPYLSSEEDRKKGKKFARYQLGDLLLHLEKKHGEDWGKVYDEAWERIDKKVEGLSKHIKLEEERRSEDAQSKAALTDWLRAKASFVIEGLKEADKDEFCRCELKLQKWYGDLRGKPFAIEAENSILDISGFSKQYNCAFIWQKDGVKKLNLYLIINYFKGGKLRFKKIKPEAFEANRFYTVINKKSGEIVPMEVNFNFDDPNLIILPLAFGKRQGREFIWNDLLSLETGSLKLANGRVIEKTLYNRRTRQDEPALFVALTFERREVLDSSNIKPMNLIGVDRGENIPAVIALTDPEGYPLSRFKDSLGNPTHILRIGESYKEKTRTIQAKKEVEQRRAGGYSRKYASKAKNLADDMVRNTARDLLYYAVTQDAMLIFENLSRGFGRQGKRTFMAERQYTRMEDWLTAKLAYEGLPSKTYLSKTLAQYTSKTCSNCGFTITSADYDRVLEKLKKTATGWMTTINGKELKVEGQITYYNRYKRQNVVKDLSVELDRLSEESVNNDISSWTKGRSGEALSLLKKRFSHRPVQEKFVCLNCGFETHADEQAALNIARSWLFLRSQEYKKYQTNKTTGNTDKRAFVETWQSFYRKKLKEVWKPAV

SEQ ID NO: 25611 - protein, 978 aa, synthetic construct
  REGION 1..978: note = engineered CasX variant
QEIKRINKIRRRLVKDSNTKKAGKTGPMKTLLVRVMTPDLRERLENLRKKPENIPQPISNTSRANLNKLLTDYTEMKKAILHVYWEEFQKDPVGLMSRVAQPASKKIDQNKLKPEMDEKGNLTTAGFACSQCGQPLFVYKLEQVSEKGKAYTNYFGRCNVAEHEKLILLAQLKPEKDSDEAVTYSLGKFGQRALDFYSIHVTKESTHPVKPLAQIAGNRYASGPVGKALSDACMGTIASFLSKYQDIIIEHQKVVKGNQKRLESLRELAGKENLEYPSVTLPPQPHTKEGVDAYNEVIARVRMWVNLNLWQKLKLSRDDAKPLLRLKGFPSFPLVERQANEVDWWDMVCNVKKLINEKKEDGKVFWQNLAGYKRQEALRPYLSSEEDRKKGKKFARYQLGDLLLHLEKKHGEDWGKVYDEAWERIDKKVEGLSKHIKLEEERRSEDAQSKAALTDWLRAKASFVIEGLKEADKDEFCRCELKLQKWYGDLRGKPFAIEAENSILDISGFSKQYNCAFIWQKDGVKKLNLYLIINYFKGGKLRFKKIKPEAFEANRFYTVINKKSGEIVPMEVNFNFDDPNLIILPLAFGKRQGREFIWNDLLSLETGSLKLANGRVIEKTLYNRRTRQDEPALFVALTFERREVLDSSNIKPMNLIGVDRGENIPAVIALTDPEGYPLSRFKDSLGNPTHILRIGESYKEKQRTIQAKKEVEVRRAGGYSRKYASKAKNLADDMVRNTARDLLYYAVTQDAMLIFENLSRGFGRQGKRTFMAERQYTRMEDWLTAKLAYEGLPSKTYLSKTLAQYTSKTCSNCGFTITSADYDRVLEKLKKTATGWMTTINGKELKVEGQITYYNRYKRQNVVKDLSVELDRLSEESVNNDISSWTKGRSGEALSLLKKRFSHRPVQEKFVCLNCGFETHADEQAALNIARSWLFLRSQEYKKYQTNKTTGNTDKRAFVETWQSFYRKKLKEVWKPAV

SEQ ID NO: 25612 - protein, 978 aa, synthetic construct
  REGION 1..978: note = engineered CasX variant
QEIKRINKIRRRLVKDSNTKKAGKTGPMKTLLVRVMTPDLRERLENLRKKPENIPQPISNTSRANLNKLLTDYTEMKKAILHVYWEEFQKDPVGLMSRVAQPASKKIDQNKLKPEMDEKGNLTTAGFACSQCGQPLFVYKLEQVSEKGKAYTNYFGRCNVAEHEKLILLAQLKPEKDSDEAVTYSLGKFGQRALDFYSIHVTKESTHPVKPLAQIAGNRYASGPVGKALSDACMGTIASFLSKYQDIIIEHQKVVKGNQKRLESLRELAGKENLEYPSVTLPPQPHTKEGVDAYNEVIARVRMWVNLNLWQKLKLSRDDAKPLLRLKGFPSFPLVERQANEVDWWDMVCNVKKLINEKKEDGKVFWQNLAGYKRQEALRPYLSSEEDRKKGKKFARYQLGDLLLHLEKKHGEDWGKVYDEAWERIDKKVEGLSKHIKLEEERRSEDAQSKAALTDWLRAKASFVIEGLKEADKDEFCRCELKLQKWYGDLRGKPFAIEAENSILDISGFSKQYNCAFIWQKDGVKKLNLYLIINYFKGGKLRFKKIKPEAFEANRFYTVINKKSGEIVPMEVNFNFDDPNLIILPLAFGKRQGREFIWNDLLSLETGSLKLANGRVIEKTLYNRRTRQDEPALFVALTFERREVLDSSNIKPMNLIGVDRGENIPAVIALTDPEGYPLSRFKDSLGNPTHILRIGESYKEKQRTIQAKKEVEQRRAGGYSRKYASKAKNLADDMVRNTARDLLYYAVTQDAMLIFENLSRGFGRQGKRTFMAERQYTRMEDWLTAKLAYEGLPSKTYLSKTLAQYTSKTCSNCGFTITSADYDRVLEKLKKTATGWMTTINGKELKVEGQITYYNRYKRQNVVKDLSVELDRLSEESVNNDISSWTKGRSGEALSLLKKRFSHRPVQEKFVCLNCGFETHADEQAALNIARSWLFLRSQEYKKYQTNKTTGNTDKRAFVETWQSFYRKKLKEVWKPAV

SEQ ID NO: 25613 - protein, 978 aa, synthetic construct
  REGION 1..978: note = engineered CasX variant
QEIKRINKIRRRLVKDSNTKKAGKTGPMKTLLVRVMTPDLRERLENLRKKPENIPQPISNTSRANLNKLLTDYTEMKKAILHVYWEEFQKDPVGLMSRVAQPASKKIDQNKLKPEMDEKGNLTTAGFACSQCGQPLFVYKLEQVSEKGKAYTNYFGRCNVAEHEKLILLAQLKPEKDSDEAVTYSLGKFGQRALDFYSIHVTKESTHPVKPLAQIAGNRYASGPVGKALSDACMGTIASFLSKYQDIIIEHQKVVKGNQKRLESLRELAGKENLEYPSVTLPPQPHTKEGVDAYNEVIARVRMWVNLNLWQKLKLSRDDAKPLLRLKGFPSFPLVERQANEVDWWDMVCNVKKLINEKKEDGKVFWQNLAGYKRQEALRPYLSSEEDRKKGKKFARYQLGDLLLHLEKKHGEDWGKVYDEAWERIDKKVEGLSKHIKLEEERRSEDAQSKAALTDWLRAKASFVIEGLKEADKDEFCRCELKLQKWYGDLRGKPFAIEAENSILDISGFSKQYNCAFIWQKDGVKKLNLYLIINYFKGGKLRFKKIKPEAFEANRFYTVINKKSGEIVPMEVNFNFDDPNLIILPLAFGKRQGREFIWNDLLSLETGSLKLANGRVIEKTLYNRRTRQDEPALFVALTFERREVLDSSNIKPMNLIGVDRGENIPAVIALTDPEGYPLSRFKDSLGNPTHILRIGESYKEKQRTIFAKKEVEQRRAGGYSRKYASKAKNLADDMVRNTARDLLYYAVTQDAMLIFENLSRGFGRQGKRTFMAERQYTRMEDWLTAKLAYEGLPSKTYLSKTLAQYTSKTCSNCGFTITSADYDRVLEKLKKTATGWMTTINGKELKVEGQITYYNRYKRQNVVKDLSVELDRLSEESVNNDISSWTKGRSGEALSLLKKRFSHRPVQEKFVCLNCGFETHADEQAALNIARSWLFLRSQEYKKYQTNKTTGNTDKRAFVETWQSFYRKKLKEVWKPAV

SEQ ID NO: 25614 - protein, 978 aa, synthetic construct
  REGION 1..978: note = engineered CasX variant
QEIKRINKIRRRLVKDSNTKKAGKTGPMKTLLVRVMTPDLRERLENLRKKPENIPQPISNTSRANLNKLLTDYTEMKKAILHVYWEEFQKDPVGLMSRVAQPASKKIDQNKLKPEMDEKGNLTTAGFACSQCGQPLFVYKLEQVSEKGKAYTNYFGRCNVAEHEKLILLAQLKPEKDSDEAVTYSLGKFGQRALDFYSIHVTKESTHPVKPLAQIAGNRYASGPVGKALSDACMGTIASFLSKYQDIIIEHQKVVKGNQKRLESLRELAGKENLEYPSVTLPPQPHTKEGVDAYNEVIARVRMWVNLNLWQKLKLSRDDAKPLLRLKGFPSFPLVERQANEVDWWDMVCNVKKLINEKKEDGKVFWQNLAGYKRQEALRPYLSSEEDRKKGKKFARYQLGDLLLHLEKKHGEDWGKVYDEAWERIDKKVEGLSKHIKLEEERRSEDAQSKAALTDWLRAKASFVIEGLKEADKDEFCRCELKLQKWYGDLRGKPFAIEAENSILDISGFSKQYNCAFIWQKDGVKKLNLYLIINYFKGGKLRFKKIKPEAFEANRFYTVINKKSGEIVPMEVNFNFDDPNLIILPLAFGKRQGREFIWNDLLSLETGSLKLANGRVIEKTLYNRRTRQDEPALFVALTFERREVLDSSNIKPMNLIGVDRGENIPAVIALTDPEGYPLSRFKDNLGNPTHILRIGESYKEKQRTIQAKKEVEQRRAGGYSRKYASKAKNLADDMVRNTARDLLYYAVTQDAMLIFENLSRGFGRQGKRTFMAERQYTRMEDWLTAKLAYEGLPSKTYLSKTLAQYTSKTCSNCGFTITSADYDRVLEKLKKTATGWMTTINGKELKVEGQITYYNRYKRQNVVKDLSVELDRLSEESVNNDISSWTKGRSGEALSLLKKRFSHRPVQEKFVCLNCGFETHADEQAALNIARSWLFLRSQEYKKYQTNKTTGNTDKRAFVETWQSFYRKKLKEVWKPAV

SEQ ID NO: 25615 - protein, 978 aa, synthetic construct
  REGION 1..978: note = engineered CasX variant
QEIKRINKIRRRLVKDSNTKKAGKTGPMKTLLVRVMTPDLRERLENLRKKPENIPQPISNTSRANLNKLLTDYTEMKKAILHVYWEEFQKDPVGLMSRVAQPASKKIDQNKLKPEMDEKGNLTTAGFACSQCGQPLFVYKLEQVSEKGKAYTNYFGRCNVAEHEKLILLAQLKPEKDSDEAVTYSLGKFGQRALDFYSIHVTKESTHPVKPLAQIAGNRYASGPVGKALSDACMGTIASFLSKYQDIIIEHQKVVKGNQKRLESLRELAGKENLEYPSVTLPPQPHTKEGVDAYNEVIARVRMWVNLNLWQKLKLSRDDAKPLLRLKGFPSFPLVERQANEVDWWDMVCNVKKLINEKKEDGKVFWQNLAGYKRQEALRPYLSSEEDRKKGKKFARYQLGDLLLHLEKKHGEDWGKVYDEAWERIDKKVEGLSKHIKLEEERRSEDAQSKAALTDWLRAKASFVIEGLKEADKDEFCRCELKLQKWYGDLRGKPFAIEAENSILDISGFSKQYNCAFIWQKDGVKKLNLYLIINYFKGGKLRFKKIKPEAFEANRFYTVINKKSGEIVPMEVNFNFDDPNLIILPLAFGKRQGREFIWNDLLSLETGSLKLANGRVIEKTLYNRRTRQDEPALFVALTFERREVLDSSNIKPMNLIGVDRGENIPAVIALTDPEGYPLSQFKDSLGNPTHILRIGESYKEKQRTIQAKKEVEQRRAGGYSRKYASKAKNLADDMVRNTARDLLYYAVTQDAMLIFENLSRGFGRQGKRTFMAERQYTRMEDWLTAKLAYEGLPSKTYLSKTLAQYTSKTCSNCGFTITSADYDRVLEKLKKTATGWMTTINGKELKVEGQITYYNRYKRQNVVKDLSVELDRLSEESVNNDISSWTKGRSGEALSLLKKRFSHRPVQEKFVCLNCGFETHADEQAALNIARSWLFLRSQEYKKYQTNKTTGNTDKRAFVETWQSFYRKKLKEVWKPAV

SEQ ID NO: 25616 - protein, 978 aa, synthetic construct
  REGION 1..978: note = engineered CasX variant
QEIKRINKIRRRLVKDSNTKKAGKTGPMKTLLVRVMTPDLRERLENLRKKPENIPQPISNTSRANLNKLLTDYTEMKKAILHVYWEEFQKDPVGLMSRVAQPASKKIDQNKLKPEMDEKGNLTTAGFACSQCGQPLFVYKLEQVSEKGKAYTNYFGRCNVAEHEKLILLAQLKPEKDSDEAVTYSLGKFGQRALDFYSIHVTKESTHPVKPLAQIAGNRYASGPVGKALSDACMGTIASFLSKYQDIIIEHQKVVKGNQKRLESLRELAGKENLEYPSVTLPPQPHTKEGVDAYNEVIARVRMWVNLNLWQKLKLSRDDAKPLLRLKGFPSFPLVERQANEVDWWDMVCNVKKLINEKKEDGKVFWQNLAGYKRQEALRPYLSSEEDRKKGKKFARYQLGDLLLHLEKKHGEDWGKVYDEAWERIDKKVEGLSKHIKLEEERRSEDAQSKAALTDWLRAKASFVIEGLKEADKDEFCRCELKLQKWYGDLRGKPFAIEAENSILDISGFSKQYNCAFIWQKDGVKKLNLYLIINYFKGGKLRFKKIKPEAFEANRFYTVINKKSGEIVPMEVNFNFDDPNLIILPLAFGKRQGREFIWNDLLSLETGSLKLANGRVIEKTLYNRRTRQDEPALFVALTFERREVLDSSNIKPMNLIGVDRGENIPAVIALTDPEGYPLSQFKDSLGNPTHILRIGESYKEKQRTIFAKKEVEQRRAGGYSRKYASKAKNLADDMVRNTARDLLYYAVTQDAMLIFENLSRGFGRQGKRTFMAERQYTRMEDWLTAKLAYEGLPSKTYLSKTLAQYTSKTCSNCGFTITSADYDRVLEKLKKTATGWMTTINGKELKVEGQITYYNRYKRQNVVKDLSVELDRLSEESVNNDISSWTKGRSGEALSLLKKRFSHRPVQEKFVCLNCGFETHADEQAALNIARSWLFLRSQEYKKYQTNKTTGNTDKRAFVETWQSFYRKKLKEVWKPAV

SEQ ID NO: 25617 - protein, 978 aa, synthetic construct
  REGION 1..978: note = engineered CasX variant
QEIKRINKIRRRLVKDSNTKKAGKTGPMKTLLVRVMTPDLRERLENLRKKPENIPQPISNTSRANLNKLLTDYTEMKKAILHVYWEEFQKDPVGLMSRVAQPASKKIDQNKLKPEMDEKGNLTTAGFACSQCGQPLFVYKLEQVSEKGKAYTNYFGRCNVAEHEKLILLAQLKPEKDSDEAVTYSLGKFGQRALDFYSIHVTKESTHPVKPLAQIAGNRYASGPVGKALSDACMGTIASFLSKYQDIIIEHQKVVKGNQKRLESLRELAGKENLEYPSVTLPPQPHTKEGVDAYNEVIARVRMWVNLNLWQKLKLSRDDAKPLLRLKGFPSFPLVERQANEVDWWDMVCNVKKLINEKKEDGKVFWQNLAGYKRQEALRPYLSSEEDRKKGKKFARYQLGDLLLHLEKKHGEDWGKVYDEAWERIDKKVEGLSKHIKLEEERRSEDAQSKAALTDWLRAKASFVIEGLKEADKDEFCRCELKLQKWYGDLRGKPFAIEAENSILDISGFSKQYNCAFIWQKDGVKKLNLYLIINYFKGGKLRFKKIKPEAFEANRFYTVINKKSGEIVPMEVNFNFDDPNLIILPLAFGKRQGREFIWNDLLSLETGSLKLANGRVIEKTLYNRRTRQDEPALFVALTFERREVLDSSNIKPMNLIGVDRGENIPAVIALTDPEGYPLKRFKDSLGNPTHILRIGESYKEKQRTIQAKKEVEQRRAGGYSRKYASKAKNLADDMVRNTARDLLYYAVTQDAMLIFENLSRGFGRQGKRTFMAERQYTRMEDWLTAKLAYEGLPSKTYLSKTLAQYTSKTCSNCGFTITSADYDRVLEKLKKTATGWMTTINGKELKVEGQITYYNRYKRQNVVKDLSVELDRLSEESVNNDISSWTKGRSGEALSLLKKRFSHRPVQEKFVCLNCGFETHADEQAALNIARSWLFLRSQEYKKYQTNKTTGNTDKRAFVETWQSFYRKKLKEVWKPAV

SEQ ID NO: 25618 - protein, 978 aa, synthetic construct
  REGION 1..978: note = engineered CasX variant
QEIKRINKIRRRLVKDSNTKKAGKTGPMKTLLVRVMTPDLRERLENLRKKPENIPQPISNTSRANLNKLLTDYTEMKKAILHVYWEEFQKDPVGLMSRVAQPASKKIDQNKLKPEMDEKGNLTTAGFACSQCGQPLFVYKLEQVSEKGKAYTNYFGRCNVAEHEKLILLAQLKPEKDSDEAVTYSLGKFGQRALDFYSIHVTKESTHPVKPLAQIAGNRYASGPVGKALSDACMGTIASFLSKYQDIIIEHQKVVKGNQKRLESLRELAGKENLEYPSVTLPPQPHTKEGVDAYNEVIARVRMWVNLNLWQKLKLSRDDAKPLLRLKGFPSFPLVERQANEVDWWDMVCNVKKLINEKKEDGKVFWQNLAGYKRQEALRPYLSSEEDRKKGKKFARYQLGDLLLHLEKKHGEDWGKVYDEAWERIDKKVEGLSKHIKLEEERRSEDAQSKAALTDWLRAKASFVIEGLKEADKDEFCRCELKLQKWYGDLRGKPFAIEAENSILDISGFSKQYNCAFIWQKDGVKKLNLYLIINYFKGGKLRFKKIKPEAFEANRFYTVINKKSGEIVPMEVNFNFDDPNLIILPLAFGKRQGREFIWNDLLSLETGSLKLANGRVIEKTLYNRRTRQDEPALFVALTFERREVLDSSNIKPMNLIGVDRGENIPAVIALTDPEGYPLKRFKDNLGNPTHILRIGESYKEKQRTIQAKKEVEQRRAGGYSRKYASKAKNLADDMVRNTARDLLYYAVTQDAMLIFENLSRGFGRQGKRTFMAERQYTRMEDWLTAKLAYEGLPSKTYLSKTLAQYTSKTCSNCGFTITSADYDRVLEKLKKTATGWMTTINGKELKVEGQITYYNRYKRQNVVKDLSVELDRLSEESVNNDISSWTKGRSGEALSLLKKRFSHRPVQEKFVCLNCGFETHADEQAALNIARSWLFLRSQEYKKYQTNKTTGNTDKRAFVETWQSFYRKKLKEVWKPAV

SEQ ID NO: 25619 - protein, 978 aa, synthetic construct
  REGION 1..978: note = engineered CasX variant
QEIKRINKIRRRLVKDSNTKKAGKTGPMKTLLVRVMTPDLRERLENLRKKPENIPQPISNTSRANLNKLLTDYTEMKKAILHVYWEEFQKDPVGLMSRVAQPASKKIDQNKLKPEMDEKGNLTTAGFACSQCGQPLFVYKLEQVSEKGKAYTNYFGRCNVAEHEKLILLAQLKPEKDSDEAVTYSLGKFGQRALDFYSIHVTKESTHPVKPLAQIAGNRYASGPVGKALSDACMGTIASFLSKYQDIIIEHQKVVKGNQKRLESLRELAGKENLEYPSVTLPPQPHTKEGVDAYNEVIARVRMWVNLNLWQKLKLSRDDAKPLLRLKGFPSFPLVERQANEVDWWDMVCNVKKLINEKKEDGKVFWQNLAGYKRQEALRPYLSSEEDRKKGKKFARYQLGDLLLHLEKKHGEDWGKVYDEAWERIDKKVEGLSKHIKLEEERRSEDAQSKAALTDWLRAKASFVIEGLKEADKDEFCRCELKLQKWYGDLRGKPFAIEAENSILDISGFSKQYNCAFIWQKDGVKKLNLYLIINYFKGGKLRFKKIKPEAFEANRFYTVINKKSGEIVPMEVNFNFDDPNLIILPLAFGKRQGREFIWNDLLSLETGSLKLANGRVIEKTLYNRRTRQDEPALFVALTFERREVLDSSNIKPMNLIGVDRGENIPAVIALTDPEGTPLSRFKDSLGNPTHILRIGESYKEKQRTSQAKKEVEQRRAGNYSRKYASKAKNLADDMVRNTARDLLYYAVTQDAMLIFENLSRGFGRQGKRTFMAERQYTRMEDWLTAKLAYEGLPSKTYLSKTLAQYTSKTCSNCGFTITSADYDRVLEKLKKTATGWMTTINGKELKVEGQITYYNRYKRQNVVKDLSVELDRLSEESVNNDISSWTKGRSGEALSLLKKRFSHRPVQEKFVCLNCGFETHADEQAALNIARSWLFLRSQEYKKYQTNKTTGNTDKRAFVETWQSFYRKKLKEVWKPAV

SEQ ID NO: 25620 - protein, 978 aa, synthetic construct
  REGION 1..978: note = engineered CasX variant
QEIKRINKIRRRLVKDSNTKKAGKTGPMKTLLVRVMTPDLRERLENLRKKPENIPQPISNTSRANLNKLLTDYTEMKKAILHVYWEEFQKDPVGLMSRVAQPASKKIDQNKLKPEMDEKGNLTTAGFACSQCGQPLFVYKLEQVSEKGKAYTNYFGRCNVAEHEKLILLAQLKPEKDSDEAVTYSLGKFGQRALDFYSIHVTKESTHPVKPLAQIAGNRYASGPVGKALSDACMGTIASFLSKYQDIIIEHQKVVKGNQKRLESLRELAGKENLEYPSVTLPPQPHTKEGVDAYNEVIARVRMWVNLNLWQKLKLSRDDAKPLLRLKGFPSFPLVERQANEVDWWDMVCNVKKLINEKKEDGKVFWQNLAGYKRQEALRPYLSSEEDRKKGKKFARYQLGDLLLHLEKKHGEDWGKVYDEAWERIDKKVEGLSKHIKLEEERRSEDAQSKAALTDWLRAKASFVIEGLKEADKDEFCRCELKLQKWYGDLRGKPFAIEAENSILDISGFSKQYNCAFIWQKDGVKKLNLYLIINYFKGGKLRFKKIKPEAFEANRFYTVINKKSGEIVPMEVNFNFDDPNLIILPLAFGKRQGREFIWNDLLSLETGSLKLANGRVIEKTLYNRRTRQDEPALFVALTFERREVLDSSNIKPMNLIGVDRGENIPAVIALTDPEGTPLSRFKDSLGNPTHILRIGESYKEKQRTSQAKKEVEQRRAGGYSRKYASKAKNLADDMVRNTARDLLYYAVTQDAMLIFENLSRGFGRQGKRTFMAERQYTRMEDWLTAKLAYEGLPSKTYLSKTLAQYTSKTCSNCGFTITSADYDRVLEKLKKTATGWMTTINGKELKVEGQITYYNRYKRQNVVKDLSVELDRLSEESVNNDISSWTKGRSGEALSLLKKRFSHRPVQEKFVCLNCGFETHADEQAALNIARSWLFLRSQEYKKYQTNKTTGNTDKRAFVETWQSFYRKKLKEVWKPAV

SEQ ID NO: 25621 - protein, 978 aa, synthetic construct
  REGION 1..978: note = engineered CasX variant
QEIKRINKIRRRLVKDSNTKKAGKTGPMKTLLVRVMTPDLRERLENLRKKPENIPQPISNTSRANLNKLLTDYTEMKKAILHVYWEEFQKDPVGLMSRVAQPASKKIDQNKLKPEMDEKGNLTTAGFACSQCGQPLFVYKLEQVSEKGKAYTNYFGRCNVAEHEKLILLAQLKPEKDSDEAVTYSLGKFGQRALDFYSIHVTKESTHPVKPLAQIAGNRYASGPVGKALSDACMGTIASFLSKYQDIIIEHQKVVKGNQKRLESLRELAGKENLEYPSVTLPPQPHTKEGVDAYNEVIARVRMWVNLNLWQKLKLSRDDAKPLLRLKGFPSFPLVERQANEVDWWDMVCNVKKLINEKKEDGKVFWQNLAGYKRQEALRPYLSSEEDRKKGKKFARYQLGDLLLHLEKKHGEDWGKVYDEAWERIDKKVEGLSKHIKLEEERRSEDAQSKAALTDWLRAKASFVIEGLKEADKDEFCRCELKLQKWYGDLRGKPFAIEAENSILDISGFSKQYNCAFIWQKDGVKKLNLYLIINYFKGGKLRFKKIKPEAFEANRFYTVINKKSGEIVPMEVNFNFDDPNLIILPLAFGKRQGREFIWNDLLSLETGSLKLANGRVIEKTLYNRRTRQDEPALFVALTFERREVLDSSNIKPMNLIGVDRGENIPAVIALTDPEGTPLSRFKDSLGNPTHILRIGESYKEKQRTIQAKKEVEQTRAGGYSRKYASKAKNLADDMVRNTARDLLYYAVTQDAMLIFENLSRGFGRQGKRTFMAERQYTRMEDWLTAKLAYEGLPSKTYLSKTLAQYTSKTCSNCGFTITSADYDRVLEKLKKTATGWMTTINGKELKVEGQITYYNRYKRQNVVKDLSVELDRLSEESVNNDISSWTKGRSGEALSLLKKRFSHRPVQEKFVCLNCGFETHADEQAALNIARSWLFLRSQEYKKYQTNKTTGNTDKRAFVETWQSFYRKKLKEVWKPAV

SEQ ID NO: 25622 - protein, 978 aa, synthetic construct
  REGION 1..978: note = engineered CasX variant
QEIKRINKIRRRLVKDSNTKKAGKTGPMKTLLVRVMTPDLRERLENLRKKPENIPQPISNTSRANLNKLLTDYTEMKKAILHVYWEEFQKDPVGLMSRVAQPASKKIDQNKLKPEMDEKGNLTTAGFACSQCGQPLFVYKLEQVSEKGKAYTNYFGRCNVAEHEKLILLAQLKPEKDSDEAVTYSLGKFGQRALDFYSIHVTKESTHPVKPLAQIAGNRYASGPVGKALSDACMGTIASFLSKYQDIIIEHQKVVKGNQKRLESLRELAGKENLEYPSVTLPPQPHTKEGVDAYNEVIARVRMWVNLNLWQKLKLSRDDAKPLLRLKGFPSFPLVERQANEVDWWDMVCNVKKLINEKKEDGKVFWQNLAGYKRQEALRPYLSSEEDRKKGKKFARYQLGDLLLHLEKKHGEDWGKVYDEAWERIDKKVEGLSKHIKLEEERRSEDAQSKAALTDWLRAKASFVIEGLKEADKDEFCRCELKLQKWYGDLRGKPFAIEAENSILDISGFSKQYNCAFIWQKDGVKKLNLYLIINYFKGGKLRFKKIKPEAFEANRFYTVINKKSGEIVPMEVNFNFDDPNLIILPLAFGKRQGREFIWNDLLSLETGSLKLANGRVIEKTLYNRRTRQDEPALFVALTFERREVLDSSNIKPMNLIGVDRGENIPAVIALTDPEGTPLSRFKDSLGNPTHILRIGESYKEKQRTIQAKKEVEQRRAGNYSRKYASKAKNLADDMVRNTARDLLYYAVTQDAMLIFENLSRGFGRQGKRTFMAERQYTRMEDWLTAKLAYEGLPSKTYLSKTLAQYTSKTCSNCGFTITSADYDRVLEKLKKTATGWMTTINGKELKVEGQITYYNRYKRQNVVKDLSVELDRLSEESVNNDISSWTKGRSGEALSLLKKRFSHRPVQEKFVCLNCGFETHADEQAALNIARSWLFLRSQEYKKYQTNKTTGNTDKRAFVETWQSFYRKKLKEVWKPAV

SEQ ID NO: 25623 - protein, 978 aa, synthetic construct
  REGION 1..978: note = engineered CasX variant
QEIKRINKIRRRLVKDSNTKKAGKTGPMKTLLVRVMTPDLRERLENLRKKPENIPQPISNTSRANLNKLLTDYTEMKKAILHVYWEEFQKDPVGLMSRVAQPASKKIDQNKLKPEMDEKGNLTTAGFACSQCGQPLFVYKLEQVSEKGKAYTNYFGRCNVAEHEKLILLAQLKPEKDSDEAVTYSLGKFGQRALDFYSIHVTKESTHPVKPLAQIAGNRYASGPVGKALSDACMGTIASFLSKYQDIIIEHQKVVKGNQKRLESLRELAGKENLEYPSVTLPPQPHTKEGVDAYNEVIARVRMWVNLNLWQKLKLSRDDAKPLLRLKGFPSFPLVERQANEVDWWDMVCNVKKLINEKKEDGKVFWQNLAGYKRQEALRPYLSSEEDRKKGKKFARYQLGDLLLHLEKKHGEDWGKVYDEAWERIDKKVEGLSKHIKLEEERRSEDAQSKAALTDWLRAKASFVIEGLKEADKDEFCRCELKLQKWYGDLRGKPFAIEAENSILDISGFSKQYNCAFIWQKDGVKKLNLYLIINYFKGGKLRFKKIKPEAFEANRFYTVINKKSGEIVPMEVNFNFDDPNLIILPLAFGKRQGREFIWNDLLSLETGSLKLANGRVIEKTLYNRRTRQDEPALFVALTFERREVLDSSNIKPMNLIGVDRGENIPAVIALTDPEGTPLSRFKDSLGNPTHILRIGESYKEKQRTIQAKKEVEQRRAGGYSRKYASKAKNLADDMVRNTARDLLYYAVTQDAMLIFENLSRGFGRQGKRTFMAERQYTRMEDWLTAKLAYEGLPSKTYLSKTLAQYTSKTCSNCGFTITSADYDRVLEKLKKTATGWMTTINGKELKVEGQITYYNRYKRQNVVKDLSVELDRLSEESVNNDISSWTKGRSGEALSLLKKRFSHRPVQEKFVCLNCGFETHADEQAALNIARSWLFLRSQEYKKYQTNKTTGNTDKRAFVETWQSFYRKKLKEVWKPAV

SEQ ID NO: 25624 - protein, 978 aa, synthetic construct
  REGION 1..978: note = engineered CasX variant
QEIKRINKIRRRLVKDSNTKKAGKTGPMKTLLVRVMTPDLRERLENLRKKPENIPQPISNTSRANLNKLLTDYTEMKKAILHVYWEEFQKDPVGLMSRVAQPASKKIDQNKLKPEMDEKGNLTTAGFACSQCGQPLFVYKLEQVSEKGKAYTNYFGRCNVAEHEKLILLAQLKPEKDSDEAVTYSLGKFGQRALDFYSIHVTKESTHPVKPLAQIAGNRYASGPVGKALSDACMGTIASFLSKYQDIIIEHQKVVKGNQKRLESLRELAGKENLEYPSVTLPPQPHTKEGVDAYNEVIARVRMWVNLNLWQKLKLSRDDAKPLLRLKGFPSFPLVERQANEVDWWDMVCNVKKLINEKKEDGKVFWQNLAGYKRQEALRPYLSSEEDRKKGKKFARYQLGDLLLHLEKKHGEDWGKVYDEAWERIDKKVEGLSKHIKLEEERRSEDAQSKAALTDWLRAKASFVIEGLKEADKDEFCRCELKLQKWYGDLRGKPFAIEAENSILDISGFSKQYNCAFIWQKDGVKKLNLYLIINYFKGGKLRFKKIKPEAFEANRFYTVINKKSGEIVPMEVNFNFDDPNLIILPLAFGKRQGREFIWNDLLSLETGSLKLANGRVIEKTLYNRRTRQDEPALFVALTFERREVLDSSNIKPMNLIGVDRGENIPAVIALTDPEGTPLSRFKDSAGNPTHILRIGESYKEKQRTIQAKKEVEQRRAGGYSRKYASKAKNLADDMVRNTARDLLYYAVTQDAMLIFENLSRGFGRQGKRTFMAERQYTRMEDWLTAKLAYEGLPSKTYLSKTLAQYTSKTCSNCGFTITSADYDRVLEKLKKTATGWMTTINGKELKVEGQITYYNRYKRQNVVKDLSVELDRLSEESVNNDISSWTKGRSGEALSLLKKRFSHRPVQEKFVCLNCGFETHADEQAALNIARSWLFLRSQEYKKYQTNKTTGNTDKRAFVETWQSFYRKKLKEVWKPAV

SEQ ID NO: 25625 - protein, 978 aa, synthetic construct
  REGION 1..978: note = engineered CasX variant
QEIKRINKIRRRLVKDSNTKKAGKTGPMKTLLVRVMTPDLRERLENLRKKPENIPQPISNTSRANLNKLLTDYTEMKKAILHVYWEEFQKDPVGLMSRVAQPASKKIDQNKLKPEMDEKGNLTTAGFACSQCGQPLFVYKLEQVSEKGKAYTNYFGRCNVAEHEKLILLAQLKPEKDSDEAVTYSLGKFGQRALDFYSIHVTKESTHPVKPLAQIAGNRYASGPVGKALSDACMGTIASFLSKYQDIIIEHQKVVKGNQKRLESLRELAGKENLEYPSVTLPPQPHTKEGVDAYNEVIARVRMWVNLNLWQKLKLSRDDAKPLLRLKGFPSFPLVERQANEVDWWDMVCNVKKLINEKKEDGKVFWQNLAGYKRQEALRPYLSSEEDRKKGKKFARYQLGDLLLHLEKKHGEDWGKVYDEAWERIDKKVEGLSKHIKLEEERRSEDAQSKAALTDWLRAKASFVIEGLKEADKDEFCRCELKLQKWYGDLRGKPFAIEAENSILDISGFSKQYNCAFIWQKDGVKKLNLYLIINYFKGGKLRFKKIKPEAFEANRFYTVINKKSGEIVPMEVNFNFDDPNLIILPLAFGKRQGREFIWNDLLSLETGSLKLANGRVIEKTLYNRRTRQDEPALFVALTFERREVLDSSNIKPMNLIGVDRGENIPAVIALTDPEGSPLSRFKDTLGNPTHILRIGESYKEKQRTIQAKKEVEQRRAGGYSRKYASKAKNLADDMVRNTARDLLYYAVTQDAMLIFENLSRGFGRQGKRTFMAERQYTRMEDWLTAKLAYEGLPSKTYLSKTLAQYTSKTCSNCGFTITSADYDRVLEKLKKTATGWMTTINGKELKVEGQITYYNRYKRQNVVKDLSVELDRLSEESVNNDISSWTKGRSGEALSLLKKRFSHRPVQEKFVCLNCGFETHADEQAALNIARSWLFLRSQEYKKYQTNKTTGNTDKRAFVETWQSFYRKKLKEVWKPAV

SEQ ID NO: 25626 - protein, 978 aa, synthetic construct
  REGION 1..978: note = engineered CasX variant
QEIKRINKIRRRLVKDSNTKKAGKTGPMKTLLVRVMTPDLRERLENLRKKPENIPQPISNTSRANLNKLLTDYTEMKKAILHVYWEEFQKDPVGLMSRVAQPASKKIDQNKLKPEMDEKGNLTTAGFACSQCGQPLFVYKLEQVSEKGKAYTNYFGRCNVAEHEKLILLAQLKPEKDSDEAVTYSLGKFGQRALDFYSIHVTKESTHPVKPLAQIAGNRYASGPVGKALSDACMGTIASFLSKYQDIIIEHQKVVKGNQKRLESLRELAGKENLEYPSVTLPPQPHTKEGVDAYNEVIARVRMWVNLNLWQKLKLSRDDAKPLLRLKGFPSFPLVERQANEVDWWDMVCNVKKLINEKKEDGKVFWQNLAGYKRQEALRPYLSSEEDRKKGKKFARYQLGDLLLHLEKKHGEDWGKVYDEAWERIDKKVEGLSKHIKLEEERRSEDAQSKAALTDWLRAKASFVIEGLKEADKDEFCRCELKLQKWYGDLRGKPFAIEAENSILDISGFSKQYNCAFIWQKDGVKKLNLYLIINYFKGGKLRFKKIKPEAFEANRFYTVINKKSGEIVPMEVNFNFDDPNLIILPLAFGKRQGREFIWNDLLSLETGSLKLANGRVIEKTLYNRRTRQDEPALFVALTFERREVLDSSNIKPMNLIGVDRGENIPAVIALTDPEGSPLSRFKDTLGNPTHILRIGESYKEKQRAIQAKKEVEQRRAGGYSRKYASKAKNLADDMVRNTARDLLYYAVTQDAMLIFENLSRGFGRQGKRTFMAERQYTRMEDWLTAKLAYEGLPSKTYLSKTLAQYTSKTCSNCGFTITSADYDRVLEKLKKTATGWMTTINGKELKVEGQITYYNRYKRQNVVKDLSVELDRLSEESVNNDISSWTKGRSGEALSLLKKRFSHRPVQEKFVCLNCGFETHADEQAALNIARSWLFLRSQEYKKYQTNKTTGNTDKRAFVETWQSFYRKKLKEVWKPAV

SEQ ID NO: 25627 - protein, 978 aa, synthetic construct
  REGION 1..978: note = engineered CasX variant
QEIKRINKIRRRLVKDSNTKKAGKTGPMKTLLVRVMTPDLRERLENLRKKPENIPQPISNTSRANLNKLLTDYTEMKKAILHVYWEEFQKDPVGLMSRVAQPASKKIDQNKLKPEMDEKGNLTTAGFACSQCGQPLFVYKLEQVSEKGKAYTNYFGRCNVAEHEKLILLAQLKPEKDSDEAVTYSLGKFGQRALDFYSIHVTKESTHPVKPLAQIAGNRYASGPVGKALSDACMGTIASFLSKYQDIIIEHQKVVKGNQKRLESLRELAGKENLEYPSVTLPPQPHTKEGVDAYNEVIARVRMWVNLNLWQKLKLSRDDAKPLLRLKGFPSFPLVERQANEVDWWDMVCNVKKLINEKKEDGKVFWQNLAGYKRQEALRPYLSSEEDRKKGKKFARYQLGDLLLHLEKKHGEDWGKVYDEAWERIDKKVEGLSKHIKLEEERRSEDAQSKAALTDWLRAKASFVIEGLKEADKDEFCRCELKLQKWYGDLRGKPFAIEAENSILDISGFSKQYNCAFIWQKDGVKKLNLYLIINYFKGGKLRFKKIKPEAFEANRFYTVINKKSGEIVPMEVNFNFDDPNLIILPLAFGKRQGREFIWNDLLSLETGSLKLANGRVIEKTLYNRRTRQDEPALFVALTFERREVLDSSNIKPMNLIGVDRGENIPAVIALTDPEGSPLSRFKDSLGNPTHILRIGESYKEKQRTLQAKKEVESRRAGGYSRKYASKAKNLADDMVRNTARDLLYYAVTQDAMLIFENLSRGFGRQGKRTFMAERQYTRMEDWLTAKLAYEGLPSKTYLSKTLAQYTSKTCSNCGFTITSADYDRVLEKLKKTATGWMTTINGKELKVEGQITYYNRYKRQNVVKDLSVELDRLSEESVNNDISSWTKGRSGEALSLLKKRFSHRPVQEKFVCLNCGFETHADEQAALNIARSWLFLRSQEYKKYQTNKTTGNTDKRAFVETWQSFYRKKLKEVWKPAV

SEQ ID NO: 25628 - protein, 978 aa, synthetic construct
  REGION 1..978: note = engineered CasX variant
QEIKRINKIRRRLVKDSNTKKAGKTGPMKTLLVRVMTPDLRERLENLRKKPENIPQPISNTSRANLNKLLTDYTEMKKAILHVYWEEFQKDPVGLMSRVAQPASKKIDQNKLKPEMDEKGNLTTAGFACSQCGQPLFVYKLEQVSEKGKAYTNYFGRCNVAEHEKLILLAQLKPEKDSDEAVTYSLGKFGQRALDFYSIHVTKESTHPVKPLAQIAGNRYASGPVGKALSDACMGTIASFLSKYQDIIIEHQKVVKGNQKRLESLRELAGKENLEYPSVTLPPQPHTKEGVDAYNEVIARVRMWVNLNLWQKLKLSRDDAKPLLRLKGFPSFPLVERQANEVDWWDMVCNVKKLINEKKEDGKVFWQNLAGYKRQEALRPYLSSEEDRKKGKKFARYQLGDLLLHLEKKHGEDWGKVYDEAWERIDKKVEGLSKHIKLEEERRSEDAQSKAALTDWLRAKASFVIEGLKEADKDEFCRCELKLQKWYGDLRGKPFAIEAENSILDISGFSKQYNCAFIWQKDGVKKLNLYLIINYFKGGKLRFKKIKPEAFEANRFYTVINKKSGEIVPMEVNFNFDDPNLIILPLAFGKRQGREFIWNDLLSLETGSLKLANGRVIEKTLYNRRTRQDEPALFVALTFERREVLDSSNIKPMNLIGVDRGENIPAVIALTDPEGSPLSRFKDSLGNPTHILRIGESYKEKQRTLQAKKEVEQRRAGGYSRKYASKAKNLADDMVRNTARDLLYYAVTQDAMLIFENLSRGFGRQGKRTFMAERQYTRMEDWLTAKLAYEGLPSKTYLSKTLAQYTSKTCSNCGFTITSADYDRVLEKLKKTATGWMTTINGKELKVEGQITYYNRYKRQNVVKDLSVELDRLSEESVNNDISSWTKGRSGEALSLLKKRFSHRPVQEKFVCLNCGFETHADEQAALNIARSWLFLRSQEYKKYQTNKTTGNTDKRAFVETWQSFYRKKLKEVWKPAV

SEQ ID NO: 25629 - protein, 978 aa, synthetic construct
  REGION 1..978: note = engineered CasX variant
QEIKRINKIRRRLVKDSNTKKAGKTGPMKTLLVRVMTPDLRERLENLRKKPENIPQPISNTSRANLNKLLTDYTEMKKAILHVYWEEFQKDPVGLMSRVAQPASKKIDQNKLKPEMDEKGNLTTAGFACSQCGQPLFVYKLEQVSEKGKAYTNYFGRCNVAEHEKLILLAQLKPEKDSDEAVTYSLGKFGQRALDFYSIHVTKESTHPVKPLAQIAGNRYASGPVGKALSDACMGTIASFLSKYQDIIIEHQKVVKGNQKRLESLRELAGKENLEYPSVTLPPQPHTKEGVDAYNEVIARVRMWVNLNLWQKLKLSRDDAKPLLRLKGFPSFPLVERQANEVDWWDMVCNVKKLINEKKEDGKVFWQNLAGYKRQEALRPYLSSEEDRKKGKKFARYQLGDLLLHLEKKHGEDWGKVYDEAWERIDKKVEGLSKHIKLEEERRSEDAQSKAALTDWLRAKASFVIEGLKEADKDEFCRCELKLQKWYGDLRGKPFAIEAENSILDISGFSKQYNCAFIWQKDGVKKLNLYLIINYFKGGKLRFKKIKPEAFEANRFYTVINKKSGEIVPMEVNFNFDDPNLIILPLAFGKRQGREFIWNDLLSLETGSLKLANGRVIEKTLYNRRTRQDEPALFVALTFERREVLDSSNIKPMNLIGVDRGENIPAVIALTDPEGSPLSRFKDSLGNPTHILRIGESYKEKQRTIQAKKEVESRRAGGYSRKYASKAKNLADDMVRNTARDLLYYAVTQDAMLIFENLSRGFGRQGKRTFMAERQYTRMEDWLTAKLAYEGLPSKTYLSKTLAQYTSKTCSNCGFTITSADYDRVLEKLKKTATGWMTTINGKELKVEGQITYYNRYKRQNVVKDLSVELDRLSEESVNNDISSWTKGRSGEALSLLKKRFSHRPVQEKFVCLNCGFETHADEQAALNIARSWLFLRSQEYKKYQTNKTTGNTDKRAFVETWQSFYRKKLKEVWKPAV

SEQ ID NO: 25630 - protein, 978 aa, synthetic construct
  REGION 1..978: note = engineered CasX variant
QEIKRINKIRRRLVKDSNTKKAGKTGPMKTLLVRVMTPDLRERLENLRKKPENIPQPISNTSRANLNKLLTDYTEMKKAILHVYWEEFQKDPVGLMSRVAQPASKKIDQNKLKPEMDEKGNLTTAGFACSQCGQPLFVYKLEQVSEKGKAYTNYFGRCNVAEHEKLILLAQLKPEKDSDEAVTYSLGKFGQRALDFYSIHVTKESTHPVKPLAQIAGNRYASGPVGKALSDACMGTIASFLSKYQDIIIEHQKVVKGNQKRLESLRELAGKENLEYPSVTLPPQPHTKEGVDAYNEVIARVRMWVNLNLWQKLKLSRDDAKPLLRLKGFPSFPLVERQANEVDWWDMVCNVKKLINEKKEDGKVFWQNLAGYKRQEALRPYLSSEEDRKKGKKFARYQLGDLLLHLEKKHGEDWGKVYDEAWERIDKKVEGLSKHIKLEEERRSEDAQSKAALTDWLRAKASFVIEGLKEADKDEFCRCELKLQKWYGDLRGKPFAIEAENSILDISGFSKQYNCAFIWQKDGVKKLNLYLIINYFKGGKLRFKKIKPEAFEANRFYTVINKKSGEIVPMEVNFNFDDPNLIILPLAFGKRQGREFIWNDLLSLETGSLKLANGRVIEKTLYNRRTRQDEPALFVALTFERREVLDSSNIKPMNLIGVDRGENIPAVIALTDPEGSPLSRFKDSLGNPTHILRIGESYKEKQRTIQAKKEVEQRRAGGYSRKYASKAKNLADDMVRNTARDLLYYAVTQDAMLIFENLSRGFGRQGKRTFMAERQYTRMEDWLTAKLAYEGLPSKTYLSKTLAQYTSKTCSNCGFTITSADYDRVLEKLKKTATGWMTTINGKELKVEGQITYYNRYKRQNVVKDLSVELDRLSEESVNNDISSWTKGRSGEALSLLKKRFSHRPVQEKFVCLNCGFETHADEQAALNIARSWLFLRSQEYKKYQTNKTTGNTDKRAFVETWQSFYRKKLKEVWKPAV

SEQ ID NO: 25631 - protein, 978 aa, synthetic construct
  REGION 1..978: note = engineered CasX variant
QEIKRINKIRRRLVKDSNTKKAGKTGPMKTLLVRVMTPDLRERLENLRKKPENIPQPISNTSRANLNKLLTDYTEMKKAILHVYWEEFQKDPVGLMSRVAQPASKKIDQNKLKPEMDEKGNLTTAGFACSQCGQPLFVYKLEQVSEKGKAYTNYFGRCNVAEHEKLILLAQLKPEKDSDEAVTYSLGKFGQRALDFYSIHVTKESTHPVKPLAQIAGNRYASGPVGKALSDACMGTIASFLSKYQDIIIEHQKVVKGNQKRLESLRELAGKENLEYPSVTLPPQPHTKEGVDAYNEVIARVRMWVNLNLWQKLKLSRDDAKPLLRLKGFPSFPLVERQANEVDWWDMVCNVKKLINEKKEDGKVFWQNLAGYKRQEALRPYLSSEEDRKKGKKFARYQLGDLLLHLEKKHGEDWGKVYDEAWERIDKKVEGLSKHIKLEEERRSEDAQSKAALTDWLRAKASFVIEGLKEADKDEFCRCELKLQKWYGDLRGKPFAIEAENSILDISGFSKQYNCAFIWQKDGVKKLNLYLIINYFKGGKLRFKKIKPEAFEANRFYTVINKKSGEIVPMEVNFNFDDPNLIILPLAFGKRQGREFIWNDLLSLETGSLKLANGRVIEKTLYNRRTRQDEPALFVALTFERREVLDSSNIKPMNLIGVDRGENIPAVIALTDPEGSPLSRFKDSLGNPTHILRIGESYKEKQRAIQAKKEVEQRRAGGYSRKYASKAKNLADDMVRNTARDLLYYAVTQDAMLIFENLSRGFGRQGKRTFMAERQYTRMEDWLTAKLAYEGLPSKTYLSKTLAQYTSKTCSNCGFTITSADYDRVLEKLKKTATGWMTTINGKELKVEGQITYYNRYKRQNVVKDLSVELDRLSEESVNNDISSWTKGRSGEALSLLKKRFSHRPVQEKFVCLNCGFETHADEQAALNIARSWLFLRSQEYKKYQTNKTTGNTDKRAFVETWQSFYRKKLKEVWKPAV

SEQ ID NO: 25632 - protein, 978 aa, synthetic construct
  REGION 1..978: note = engineered CasX variant
QEIKRINKIRRRLVKDSNTKKAGKTGPMKTLLVRVMTPDLRERLENLRKKPENIPQPISNTSRANLNKLLTDYTEMKKAILHVYWEEFQKDPVGLMSRVAQPASKKIDQNKLKPEMDEKGNLTTAGFACSQCGQPLFVYKLEQVSEKGKAYTNYFGRCNVAEHEKLILLAQLKPEKDSDEAVTYSLGKFGQRALDFYSIHVTKESTHPVKPLAQIAGNRYASGPVGKALSDACMGTIASFLSKYQDIIIEHQKVVKGNQKRLESLRELAGKENLEYPSVTLPPQPHTKEGVDAYNEVIARVRMWVNLNLWQKLKLSRDDAKPLLRLKGFPSFPLVERQANEVDWWDMVCNVKKLINEKKEDGKVFWQNLAGYKRQEALRPYLSSEEDRKKGKKFARYQLGDLLLHLEKKHGEDWGKVYDEAWERIDKKVEGLSKHIKLEEERRSEDAQSKAALTDWLRAKASFVIEGLKEADKDEFCRCELKLQKWYGDLRGKPFAIEAENSILDISGFSKQYNCAFIWQKDGVKKLNLYLIINYFKGGKLRFKKIKPEAFEANRFYTVINKKSGEIVPMEVNFNFDDPNLIILPLAFGKRQGREFIWNDLLSLETGSLKLANGRVIEKTLYNRRTRQDEPALFVALTFERREVLDSSNIKPMNLIGVDRGENIPAVIALTDPEGRPLSRYKDSLGNPTHILRIGESYKEKQRTIQAKKEVEQRRMGGYSRKYASKAKNLADDMVRNTARDLLYYAVTQDAMLIFENLSRGFGRQGKRTFMAERQYTRMEDWLTAKLAYEGLPSKTYLSKTLAQYTSKTCSNCGFTITSADYDRVLEKLKKTATGWMTTINGKELKVEGQITYYNRYKRQNVVKDLSVELDRLSEESVNNDISSWTKGRSGEALSLLKKRFSHRPVQEKFVCLNCGFETHADEQAALNIARSWLFLRSQEYKKYQTNKTTGNTDKRAFVETWQSFYRKKLKEVWKPAV

SEQ ID NO: 25633 - protein, 978 aa, synthetic construct
  REGION 1..978: note = engineered CasX variant
QEIKRINKIRRRLVKDSNTKKAGKTGPMKTLLVRVMTPDLRERLENLRKKPENIPQPISNTSRANLNKLLTDYTEMKKAILHVYWEEFQKDPVGLMSRVAQPASKKIDQNKLKPEMDEKGNLTTAGFACSQCGQPLFVYKLEQVSEKGKAYTNYFGRCNVAEHEKLILLAQLKPEKDSDEAVTYSLGKFGQRALDFYSIHVTKESTHPVKPLAQIAGNRYASGPVGKALSDACMGTIASFLSKYQDIIIEHQKVVKGNQKRLESLRELAGKENLEYPSVTLPPQPHTKEGVDAYNEVIARVRMWVNLNLWQKLKLSRDDAKPLLRLKGFPSFPLVERQANEVDWWDMVCNVKKLINEKKEDGKVFWQNLAGYKRQEALRPYLSSEEDRKKGKKFARYQLGDLLLHLEKKHGEDWGKVYDEAWERIDKKVEGLSKHIKLEEERRSEDAQSKAALTDWLRAKASFVIEGLKEADKDEFCRCELKLQKWYGDLRGKPFAIEAENSILDISGFSKQYNCAFIWQKDGVKKLNLYLIINYFKGGKLRFKKIKPEAFEANRFYTVINKKSGEIVPMEVNFNFDDPNLIILPLAFGKRQGREFIWNDLLSLETGSLKLANGRVIEKTLYNRRTRQDEPALFVALTFERREVLDSSNIKPMNLIGVDRGENIPAVIALTDPEGRPLSRYKDSLGNPTHILRIGESYKEKQRTIQAKKEVEQRRAGGYSRKYASKAKNLADDMVRNTARDLLYYAVTQDAMLIFENLSRGFGRQGKRTFMAERQYTRMEDWLTAKLAYEGLPSKTYLSKTLAQYTSKTCSNCGFTITSADYDRVLEKLKKTATGWMTTINGKELKVEGQITYYNRYKRQNVVKDLSVELDRLSEESVNNDISSWTKGRSGEALSLLKKRFSHRPVQEKFVCLNCGFETHADEQAALNIARSWLFLRSQEYKKYQTNKTTGNTDKRAFVETWQSFYRKKLKEVWKPAV

SEQ ID NO: 25634 - protein, 978 aa, synthetic construct
  REGION 1..978: note = engineered CasX variant
QEIKRINKIRRRLVKDSNTKKAGKTGPMKTLLVRVMTPDLRERLENLRKKPENIPQPISNTSRANLNKLLTDYTEMKKAILHVYWEEFQKDPVGLMSRVAQPASKKIDQNKLKPEMDEKGNLTTAGFACSQCGQPLFVYKLEQVSEKGKAYTNYFGRCNVAEHEKLILLAQLKPEKDSDEAVTYSLGKFGQRALDFYSIHVTKESTHPVKPLAQIAGNRYASGPVGKALSDACMGTIASFLSKYQDIIIEHQKVVKGNQKRLESLRELAGKENLEYPSVTLPPQPHTKEGVDAYNEVIARVRMWVNLNLWQKLKLSRDDAKPLLRLKGFPSFPLVERQANEVDWWDMVCNVKKLINEKKEDGKVFWQNLAGYKRQEALRPYLSSEEDRKKGKKFARYQLGDLLLHLEKKHGEDWGKVYDEAWERIDKKVEGLSKHIKLEEERRSEDAQSKAALTDWLRAKASFVIEGLKEADKDEFCRCELKLQKWYGDLRGKPFAIEAENSILDISGFSKQYNCAFIWQKDGVKKLNLYLIINYFKGGKLRFKKIKPEAFEANRFYTVINKKSGEIVPMEVNFNFDDPNLIILPLAFGKRQGREFIWNDLLSLETGSLKLANGRVIEKTLYNRRTRQDEPALFVALTFERREVLDSSNIKPMNLIGVDRGENIPAVIALTDPEGRPLSRFKDSLGNPTHILRQGESYKEKQRTIQAKKEVEQRRAGGYSRKYASKAKNLADDMVRNTARDLLYYAVTQDAMLIFENLSRGFGRQGKRTFMAERQYTRMEDWLTAKLAYEGLPSKTYLSKTLAQYTSKTCSNCGFTITSADYDRVLEKLKKTATGWMTTINGKELKVEGQITYYNRYKRQNVVKDLSVELDRLSEESVNNDISSWTKGRSGEALSLLKKRFSHRPVQEKFVCLNCGFETHADEQAALNIARSWLFLRSQEYKKYQTNKTTGNTDKRAFVETWQSFYRKKLKEVWKPAV

SEQ ID NO: 25635 - protein, 978 aa, synthetic construct
  REGION 1..978: note = engineered CasX variant
QEIKRINKIRRRLVKDSNTKKAGKTGPMKTLLVRVMTPDLRERLENLRKKPENIPQPISNTSRANLNKLLTDYTEMKKAILHVYWEEFQKDPVGLMSRVAQPASKKIDQNKLKPEMDEKGNLTTAGFACSQCGQPLFVYKLEQVSEKGKAYTNYFGRCNVAEHEKLILLAQLKPEKDSDEAVTYSLGKFGQRALDFYSIHVTKESTHPVKPLAQIAGNRYASGPVGKALSDACMGTIASFLSKYQDIIIEHQKVVKGNQKRLESLRELAGKENLEYPSVTLPPQPHTKEGVDAYNEVIARVRMWVNLNLWQKLKLSRDDAKPLLRLKGFPSFPLVERQANEVDWWDMVCNVKKLINEKKEDGKVFWQNLAGYKRQEALRPYLSSEEDRKKGKKFARYQLGDLLLHLEKKHGEDWGKVYDEAWERIDKKVEGLSKHIKLEEERRSEDAQSKAALTDWLRAKASFVIEGLKEADKDEFCRCELKLQKWYGDLRGKPFAIEAENSILDISGFSKQYNCAFIWQKDGVKKLNLYLIINYFKGGKLRFKKIKPEAFEANRFYTVINKKSGEIVPMEVNFNFDDPNLIILPLAFGKRQGREFIWNDLLSLETGSLKLANGRVIEKTLYNRRTRQDEPALFVALTFERREVLDSSNIKPMNLIGVDRGENIPAVIALTDPEGRPLSRFKDSLGNPTHILRIGESYKHKTRTIQAKKEVEQRRAGGYSRKYASKAKNLADDMVRNTARDLLYYAVTQDAMLIFENLSRGFGRQGKRTFMAERQYTRMEDWLTAKLAYEGLPSKTYLSKTLAQYTSKTCSNCGFTITSADYDRVLEKLKKTATGWMTTINGKELKVEGQITYYNRYKRQNVVKDLSVELDRLSEESVNNDISSWTKGRSGEALSLLKKRFSHRPVQEKFVCLNCGFETHADEQAALNIARSWLFLRSQEYKKYQTNKTTGNTDKRAFVETWQSFYRKKLKEVWKPAV

SEQ ID NO: 25636 - protein, 978 aa, synthetic construct
  REGION 1..978: note = engineered CasX variant
QEIKRINKIRRRLVKDSNTKKAGKTGPMKTLLVRVMTPDLRERLENLRKKPENIPQPISNTSRANLNKLLTDYTEMKKAILHVYWEEFQKDPVGLMSRVAQPASKKIDQNKLKPEMDEKGNLTTAGFACSQCGQPLFVYKLEQVSEKGKAYTNYFGRCNVAEHEKLILLAQLKPEKDSDEAVTYSLGKFGQRALDFYSIHVTKESTHPVKPLAQIAGNRYASGPVGKALSDACMGTIASFLSKYQDIIIEHQKVVKGNQKRLESLRELAGKENLEYPSVTLPPQPHTKEGVDAYNEVIARVRMWVNLNLWQKLKLSRDDAKPLLRLKGFPSFPLVERQANEVDWWDMVCNVKKLINEKKEDGKVFWQNLAGYKRQEALRPYLSSEEDRKKGKKFARYQLGDLLLHLEKKHGEDWGKVYDEAWERIDKKVEGLSKHIKLEEERRSEDAQSKAALTDWLRAKASFVIEGLKEADKDEFCRCELKLQKWYGDLRGKPFAIEAENSILDISGFSKQYNCAFIWQKDGVKKLNLYLIINYFKGGKLRFKKIKPEAFEANRFYTVINKKSGEIVPMEVNFNFDDPNLIILPLAFGKRQGREFIWNDLLSLETGSLKLANGRVIEKTLYNRRTRQDEPALFVALTFERREVLDSSNIKPMNLIGVDRGENIPAVIALTDPEGRPLSRFKDSLGNPTHILRIGESYKHKQRTIQAKKEVEQRRAGGYSRKYASKAKNLADDMVRNTARDLLYYAVTQDAMLIFENLSRGFGRQGKRTFMAERQYTRMEDWLTAKLAYEGLPSKTYLSKTLAQYTSKTCSNCGFTITSADYDRVLEKLKKTATGWMTTINGKELKVEGQITYYNRYKRQNVVKDLSVELDRLSEESVNNDISSWTKGRSGEALSLLKKRFSHRPVQEKFVCLNCGFETHADEQAALNIARSWLFLRSQEYKKYQTNKTTGNTDKRAFVETWQSFYRKKLKEVWKPAV

SEQ ID NO: 25637 - protein, 978 aa, synthetic construct
  REGION 1..978: note = engineered CasX variant
QEIKRINKIRRRLVKDSNTKKAGKTGPMKTLLVRVMTPDLRERLENLRKKPENIPQPISNTSRANLNKLLTDYTEMKKAILHVYWEEFQKDPVGLMSRVAQPASKKIDQNKLKPEMDEKGNLTTAGFACSQCGQPLFVYKLEQVSEKGKAYTNYFGRCNVAEHEKLILLAQLKPEKDSDEAVTYSLGKFGQRALDFYSIHVTKESTHPVKPLAQIAGNRYASGPVGKALSDACMGTIASFLSKYQDIIIEHQKVVKGNQKRLESLRELAGKENLEYPSVTLPPQPHTKEGVDAYNEVIARVRMWVNLNLWQKLKLSRDDAKPLLRLKGFPSFPLVERQANEVDWWDMVCNVKKLINEKKEDGKVFWQNLAGYKRQEALRPYLSSEEDRKKGKKFARYQLGDLLLHLEKKHGEDWGKVYDEAWERIDKKVEGLSKHIKLEEERRSEDAQSKAALTDWLRAKASFVIEGLKEADKDEFCRCELKLQKWYGDLRGKPFAIEAENSILDISGFSKQYNCAFIWQKDGVKKLNLYLIINYFKGGKLRFKKIKPEAFEANRFYTVINKKSGEIVPMEVNFNFDDPNLIILPLAFGKRQGREFIWNDLLSLETGSLKLANGRVIEKTLYNRRTRQDEPALFVALTFERREVLDSSNIKPMNLIGVDRGENIPAVIALTDPEGRPLSRFKDSLGNPTHILRIGESYKEKTRTIQAKKEVEQRRMGGYSRKYASKAKNLADDMVRNTARDLLYYAVTQDAMLIFENLSRGFGRQGKRTFMAERQYTRMEDWLTAKLAYEGLPSKTYLSKTLAQYTSKTCSNCGFTITSADYDRVLEKLKKTATGWMTTINGKELKVEGQITYYNRYKRQNVVKDLSVELDRLSEESVNNDISSWTKGRSGEALSLLKKRFSHRPVQEKFVCLNCGFETHADEQAALNIARSWLFLRSQEYKKYQTNKTTGNTDKRAFVETWQSFYRKKLKEVWKPAV

SEQ ID NO: 25638 - protein, 978 aa, synthetic construct
  REGION 1..978: note = engineered CasX variant
QEIKRINKIRRRLVKDSNTKKAGKTGPMKTLLVRVMTPDLRERLENLRKKPENIPQPISNTSRANLNKLLTDYTEMKKAILHVYWEEFQKDPVGLMSRVAQPASKKIDQNKLKPEMDEKGNLTTAGFACSQCGQPLFVYKLEQVSEKGKAYTNYFGRCNVAEHEKLILLAQLKPEKDSDEAVTYSLGKFGQRALDFYSIHVTKESTHPVKPLAQIAGNRYASGPVGKALSDACMGTIASFLSKYQDIIIEHQKVVKGNQKRLESLRELAGKENLEYPSVTLPPQPHTKEGVDAYNEVIARVRMWVNLNLWQKLKLSRDDAKPLLRLKGFPSFPLVERQANEVDWWDMVCNVKKLINEKKEDGKVFWQNLAGYKRQEALRPYLSSEEDRKKGKKFARYQLGDLLLHLEKKHGEDWGKVYDEAWERIDKKVEGLSKHIKLEEERRSEDAQSKAALTDWLRAKASFVIEGLKEADKDEFCRCELKLQKWYGDLRGKPFAIEAENSILDISGFSKQYNCAFIWQKDGVKKLNLYLIINYFKGGKLRFKKIKPEAFEANRFYTVINKKSGEIVPMEVNFNFDDPNLIILPLAFGKRQGREFIWNDLLSLETGSLKLANGRVIEKTLYNRRTRQDEPALFVALTFERREVLDSSNIKPMNLIGVDRGENIPAVIALTDPEGRPLSRFKDSLGNPTHILRIGESYKEKTRTIQAKKEVEQRRAGGYSRKYASKAKNLADDMVRNTARDLLYYAVTQDAMLIFENLSRGFGRQGKRTFMAERQYTRMEDWLTAKLAYEGLPSKTYLSKTLAQYTSKTCSNCGFTITSADYDRVLEKLKKTATGWMTTINGKELKVEGQITYYNRYKRQNVVKDLSVELDRLSEESVNNDISSWTKGRSGEALSLLKKRFSHRPVQEKFVCLNCGFETHADEQAALNIARSWLFLRSQEYKKYQTNKTTGNTDKRAFVETWQSFYRKKLKEVWKPAV

SEQ ID NO: 25639 - protein, 978 aa, synthetic construct
  REGION 1..978: note = engineered CasX variant
QEIKRINKIRRRLVKDSNTKKAGKTGPMKTLLVRVMTPDLRERLENLRKKPENIPQPISNTSRANLNKLLTDYTEMKKAILHVYWEEFQKDPVGLMSRVAQPASKKIDQNKLKPEMDEKGNLTTAGFACSQCGQPLFVYKLEQVSEKGKAYTNYFGRCNVAEHEKLILLAQLKPEKDSDEAVTYSLGKFGQRALDFYSIHVTKESTHPVKPLAQIAGNRYASGPVGKALSDACMGTIASFLSKYQDIIIEHQKVVKGNQKRLESLRELAGKENLEYPSVTLPPQPHTKEGVDAYNEVIARVRMWVNLNLWQKLKLSRDDAKPLLRLKGFPSFPLVERQANEVDWWDMVCNVKKLINEKKEDGKVFWQNLAGYKRQEALRPYLSSEEDRKKGKKFARYQLGDLLLHLEKKHGEDWGKVYDEAWERIDKKVEGLSKHIKLEEERRSEDAQSKAALTDWLRAKASFVIEGLKEADKDEFCRCELKLQKWYGDLRGKPFAIEAENSILDISGFSKQYNCAFIWQKDGVKKLNLYLIINYFKGGKLRFKKIKPEAFEANRFYTVINKKSGEIVPMEVNFNFDDPNLIILPLAFGKRQGREFIWNDLLSLETGSLKLANGRVIEKTLYNRRTRQDEPALFVALTFERREVLDSSNIKPMNLIGVDRGENIPAVIALTDPEGRPLSRFKDSLGNPTHILRIGESYKEKTRTIQAKKCVEQRRAGGYSRKYASKAKNLADDMVRNTARDLLYYAVTQDAMLIFENLSRGFGRQGKRTFMAERQYTRMEDWLTAKLAYEGLPSKTYLSKTLAQYTSKTCSNCGFTITSADYDRVLEKLKKTATGWMTTINGKELKVEGQITYYNRYKRQNVVKDLSVELDRLSEESVNNDISSWTKGRSGEALSLLKKRFSHRPVQEKFVCLNCGFETHADEQAALNIARSWLFLRSQEYKKYQTNKTTGNTDKRAFVETWQSFYRKKLKEVWKPAV

SEQ ID NO: 25640 - protein, 978 aa, synthetic construct
  REGION 1..978: note = engineered CasX variant
QEIKRINKIRRRLVKDSNTKKAGKTGPMKTLLVRVMTPDLRERLENLRKKPENIPQPISNTSRANLNKLLTDYTEMKKAILHVYWEEFQKDPVGLMSRVAQPASKKIDQNKLKPEMDEKGNLTTAGFACSQCGQPLFVYKLEQVSEKGKAYTNYFGRCNVAEHEKLILLAQLKPEKDSDEAVTYSLGKFGQRALDFYSIHVTKESTHPVKPLAQIAGNRYASGPVGKALSDACMGTIASFLSKYQDIIIEHQKVVKGNQKRLESLRELAGKENLEYPSVTLPPQPHTKEGVDAYNEVIARVRMWVNLNLWQKLKLSRDDAKPLLRLKGFPSFPLVERQANEVDWWDMVCNVKKLINEKKEDGKVFWQNLAGYKRQEALRPYLSSEEDRKKGKKFARYQLGDLLLHLEKKHGEDWGKVYDEAWERIDKKVEGLSKHIKLEEERRSEDAQSKAALTDWLRAKASFVIEGLKEADKDEFCRCELKLQKWYGDLRGKPFAIEAENSILDISGFSKQYNCAFIWQKDGVKKLNLYLIINYFKGGKLRFKKIKPEAFEANRFYTVINKKSGEIVPMEVNFNFDDPNLIILPLAFGKRQGREFIWNDLLSLETGSLKLANGRVIEKTLYNRRTRQDEPALFVALTFERREVLDSSNIKPMNLIGVDRGENIPAVIALTDPEGRPLSRFKDSLGNPTHILRIGESYKEKQRTIQAKKEVNQRRAGGYSRKYASKAKNLADDMVRNTARDLLYYAVTQDAMLIFENLSRGFGRQGKRTFMAERQYTRMEDWLTAKLAYEGLPSKTYLSKTLAQYTSKTCSNCGFTITSADYDRVLEKLKKTATGWMTTINGKELKVEGQITYYNRYKRQNVVKDLSVELDRLSEESVNNDISSWTKGRSGEALSLLKKRFSHRPVQEKFVCLNCGFETHADEQAALNIARSWLFLRSQEYKKYQTNKTTGNTDKRAFVETWQSFYRKKLKEVWKPAV

SEQ ID NO: 25641 - protein, 978 aa, synthetic construct
  REGION 1..978: note = engineered CasX variant
QEIKRINKIRRRLVKDSNTKKAGKTGPMKTLLVRVMTPDLRERLENLRKKPENIPQPISNTSRANLNKLLTDYTEMKKAILHVYWEEFQKDPVGLMSRVAQPASKKIDQNKLKPEMDEKGNLTTAGFACSQCGQPLFVYKLEQVSEKGKAYTNYFGRCNVAEHEKLILLAQLKPEKDSDEAVTYSLGKFGQRALDFYSIHVTKESTHPVKPLAQIAGNRYASGPVGKALSDACMGTIASFLSKYQDIIIEHQKVVKGNQKRLESLRELAGKENLEYPSVTLPPQPHTKEGVDAYNEVIARVRMWVNLNLWQKLKLSRDDAKPLLRLKGFPSFPLVERQANEVDWWDMVCNVKKLINEKKEDGKVFWQNLAGYKRQEALRPYLSSEEDRKKGKKFARYQLGDLLLHLEKKHGEDWGKVYDEAWERIDKKVEGLSKHIKLEEERRSEDAQSKAALTDWLRAKASFVIEGLKEADKDEFCRCELKLQKWYGDLRGKPFAIEAENSILDISGFSKQYNCAFIWQKDGVKKLNLYLIINYFKGGKLRFKKIKPEAFEANRFYTVINKKSGEIVPMEVNFNFDDPNLIILPLAFGKRQGREFIWNDLLSLETGSLKLANGRVIEKTLYNRRTRQDEPALFVALTFERREVLDSSNIKPMNLIGVDRGENIPAVIALTDPEGRPLSRFKDSLGNPTHILRIGESYKEKQRTIQAKKEVEQRRMGGYSRKYASKAKNLADDMVRNTARDLLYYAVTQDAMLIFENLSRGFGRQGKRTFMAERQYTRMEDWLTAKLAYEGLPSKTYLSKTLAQYTSKTCSNCGFTITSADYDRVLEKLKKTATGWMTTINGKELKVEGQITYYNRYKRQNVVKDLSVELDRLSEESVNNDISSWTKGRSGEALSLLKKRFSHRPVQEKFVCLNCGFETHADEQAALNIARSWLFLRSQEYKKYQTNKTTGNTDKRAFVETWQSFYRKKLKEVWKPAV

SEQ ID NO: 25642 - protein, 978 aa, synthetic construct
  REGION 1..978: note = engineered CasX variant
QEIKRINKIRRRLVKDSNTKKAGKTGPMKTLLVRVMTPDLRERLENLRKKPENIPQPISNTSRANLNKLLTDYTEMKKAILHVYWEEFQKDPVGLMSRVAQPASKKIDQNKLKPEMDEKGNLTTAGFACSQCGQPLFVYKLEQVSEKGKAYTNYFGRCNVAEHEKLILLAQLKPEKDSDEAVTYSLGKFGQRALDFYSIHVTKESTHPVKPLAQIAGNRYASGPVGKALSDACMGTIASFLSKYQDIIIEHQKVVKGNQKRLESLRELAGKENLEYPSVTLPPQPHTKEGVDAYNEVIARVRMWVNLNLWQKLKLSRDDAKPLLRLKGFPSFPLVERQANEVDWWDMVCNVKKLINEKKEDGKVFWQNLAGYKRQEALRPYLSSEEDRKKGKKFARYQLGDLLLHLEKKHGEDWGKVYDEAWERIDKKVEGLSKHIKLEEERRSEDAQSKAALTDWLRAKASFVIEGLKEADKDEFCRCELKLQKWYGDLRGKPFAIEAENSILDISGFSKQYNCAFIWQKDGVKKLNLYLIINYFKGGKLRFKKIKPEAFEANRFYTVINKKSGEIVPMEVNFNFDDPNLIILPLAFGKRQGREFIWNDLLSLETGSLKLANGRVIEKTLYNRRTRQDEPALFVALTFERREVLDSSNIKPMNLIGVDRGENIPAVIALTDPEGRPLSRFKDSLGNPTHILRIGESYKEKQRTIQAKKEVEQRRFGGYSRKYASKAKNLADDMVRNTARDLLYYAVTQDAMLIFENLSRGFGRQGKRTFMAERQYTRMEDWLTAKLAYEGLPSKTYLSKTLAQYTSKTCSNCGFTITSADYDRVLEKLKKTATGWMTTINGKELKVEGQITYYNRYKRQNVVKDLSVELDRLSEESVNNDISSWTKGRSGEALSLLKKRFSHRPVQEKFVCLNCGFETHADEQAALNIARSWLFLRSQEYKKYQTNKTTGNTDKRAFVETWQSFYRKKLKEVWKPAV

SEQ ID NO: 25643 - protein, 978 aa, synthetic construct
  REGION 1..978: note = engineered CasX variant
QEIKRINKIRRRLVKDSNTKKAGKTGPMKTLLVRVMTPDLRERLENLRKKPENIPQPISNTSRANLNKLLTDYTEMKKAILHVYWEEFQKDPVGLMSRVAQPASKKIDQNKLKPEMDEKGNLTTAGFACSQCGQPLFVYKLEQVSEKGKAYTNYFGRCNVAEHEKLILLAQLKPEKDSDEAVTYSLGKFGQRALDFYSIHVTKESTHPVKPLAQIAGNRYASGPVGKALSDACMGTIASFLSKYQDIIIEHQKVVKGNQKRLESLRELAGKENLEYPSVTLPPQPHTKEGVDAYNEVIARVRMWVNLNLWQKLKLSRDDAKPLLRLKGFPSFPLVERQANEVDWWDMVCNVKKLINEKKEDGKVFWQNLAGYKRQEALRPYLSSEEDRKKGKKFARYQLGDLLLHLEKKHGEDWGKVYDEAWERIDKKVEGLSKHIKLEEERRSEDAQSKAALTDWLRAKASFVIEGLKEADKDEFCRCELKLQKWYGDLRGKPFAIEAENSILDISGFSKQYNCAFIWQKDGVKKLNLYLIINYFKGGKLRFKKIKPEAFEANRFYTVINKKSGEIVPMEVNFNFDDPNLIILPLAFGKRQGREFIWNDLLSLETGSLKLANGRVIEKTLYNRRTRQDEPALFVALTFERREVLDSSNIKPMNLIGVDRGENIPAVIALTDPEGRPLSRFKDSLGNPTHILRIGESYKEKQRTIQAKKEVEQRRAGGYSRKYASKAKNLADDMVRNTARDLLYYAVTQDAMLIFENLSRGFGRQGKRTFMAERQYTRMEDWLTAKLAYEGLPSKTYLSKTLAQYTSKTCSNCGFTITSADYDRVLEKLKKTATGWMTTINGKELKVEGQITYYNRYKRQNVVKDLSVELDRLSEESVNNDISSWTKGRSGEALSLLKKRFSHRPVQEKFVCLNCGFETHADEQAALNIARSWLFLRSQEYKKYQTNKTTGNTDKRAFVETWQSFYRKKLKEVWKPAV

SEQ ID NO: 25644 - protein, 978 aa, synthetic construct
  REGION 1..978: note = engineered CasX variant
QEIKRINKIRRRLVKDSNTKKAGKTGPMKTLLVRVMTPDLRERLENLRKKPENIPQPISNTSRANLNKLLTDYTEMKKAILHVYWEEFQKDPVGLMSRVAQPASKKIDQNKLKPEMDEKGNLTTAGFACSQCGQPLFVYKLEQVSEKGKAYTNYFGRCNVAEHEKLILLAQLKPEKDSDEAVTYSLGKFGQRALDFYSIHVTKESTHPVKPLAQIAGNRYASGPVGKALSDACMGTIASFLSKYQDIIIEHQKVVKGNQKRLESLRELAGKENLEYPSVTLPPQPHTKEGVDAYNEVIARVRMWVNLNLWQKLKLSRDDAKPLLRLKGFPSFPLVERQANEVDWWDMVCNVKKLINEKKEDGKVFWQNLAGYKRQEALRPYLSSEEDRKKGKKFARYQLGDLLLHLEKKHGEDWGKVYDEAWERIDKKVEGLSKHIKLEEERRSEDAQSKAALTDWLRAKASFVIEGLKEADKDEFCRCELKLQKWYGDLRGKPFAIEAENSILDISGFSKQYNCAFIWQKDGVKKLNLYLIINYFKGGKLRFKKIKPEAFEANRFYTVINKKSGEIVPMEVNFNFDDPNLIILPLAFGKRQGREFIWNDLLSLETGSLKLANGRVIEKTLYNRRTRQDEPALFVALTFERREVLDSSNIKPMNLIGVDRGENIPAVIALTDPEGRPLSRFKDSLGNPTHILRIGESYKEKQRTIQAKKEVEQRNAGGYSRKYASKAKNLADDMVRNTARDLLYYAVTQDAMLIFENLSRGFGRQGKRTFMAERQYTRMEDWLTAKLAYEGLPSKTYLSKTLAQYTSKTCSNCGFTITSADYDRVLEKLKKTATGWMTTINGKELKVEGQITYYNRYKRQNVVKDLSVELDRLSEESVNNDISSWTKGRSGEALSLLKKRFSHRPVQEKFVCLNCGFETHADEQAALNIARSWLFLRSQEYKKYQTNKTTGNTDKRAFVETWQSFYRKKLKEVWKPAV

SEQ ID NO: 25645 - protein, 978 aa, synthetic construct
  REGION 1..978: note = engineered CasX variant
QEIKRINKIRRRLVKDSNTKKAGKTGPMKTLLVRVMTPDLRERLENLRKKPENIPQPISNTSRANLNKLLTDYTEMKKAILHVYWEEFQKDPVGLMSRVAQPASKKIDQNKLKPEMDEKGNLTTAGFACSQCGQPLFVYKLEQVSEKGKAYTNYFGRCNVAEHEKLILLAQLKPEKDSDEAVTYSLGKFGQRALDFYSIHVTKESTHPVKPLAQIAGNRYASGPVGKALSDACMGTIASFLSKYQDIIIEHQKVVKGNQKRLESLRELAGKENLEYPSVTLPPQPHTKEGVDAYNEVIARVRMWVNLNLWQKLKLSRDDAKPLLRLKGFPSFPLVERQANEVDWWDMVCNVKKLINEKKEDGKVFWQNLAGYKRQEALRPYLSSEEDRKKGKKFARYQLGDLLLHLEKKHGEDWGKVYDEAWERIDKKVEGLSKHIKLEEERRSEDAQSKAALTDWLRAKASFVIEGLKEADKDEFCRCELKLQKWYGDLRGKPFAIEAENSILDISGFSKQYNCAFIWQKDGVKKLNLYLIINYFKGGKLRFKKIKPEAFEANRFYTVINKKSGEIVPMEVNFNFDDPNLIILPLAFGKRQGREFIWNDLLSLETGSLKLANGRVIEKTLYNRRTRQDEPALFVALTFERREVLDSSNIKPMNLIGVDRGENIPAVIALTDPEGRPLSRFKDSLGNPTHILRIGESYKEKQRTIQAKKCVEQRRAGGYSRKYASKAKNLADDMVRNTARDLLYYAVTQDAMLIFENLSRGFGRQGKRTFMAERQYTRMEDWLTAKLAYEGLPSKTYLSKTLAQYTSKTCSNCGFTITSADYDRVLEKLKKTATGWMTTINGKELKVEGQITYYNRYKRQNVVKDLSVELDRLSEESVNNDISSWTKGRSGEALSLLKKRFSHRPVQEKFVCLNCGFETHADEQAALNIARSWLFLRSQEYKKYQTNKTTGNTDKRAFVETWQSFYRKKLKEVWKPAV

SEQ ID NO: 25646 - protein, 978 aa, synthetic construct
  REGION 1..978: note = engineered CasX variant
QEIKRINKIRRRLVKDSNTKKAGKTGPMKTLLVRVMTPDLRERLENLRKKPENIPQPISNTSRANLNKLLTDYTEMKKAILHVYWEEFQKDPVGLMSRVAQPASKKIDQNKLKPEMDEKGNLTTAGFACSQCGQPLFVYKLEQVSEKGKAYTNYFGRCNVAEHEKLILLAQLKPEKDSDEAVTYSLGKFGQRALDFYSIHVTKESTHPVKPLAQIAGNRYASGPVGKALSDACMGTIASFLSKYQDIIIEHQKVVKGNQKRLESLRELAGKENLEYPSVTLPPQPHTKEGVDAYNEVIARVRMWVNLNLWQKLKLSRDDAKPLLRLKGFPSFPLVERQANEVDWWDMVCNVKKLINEKKEDGKVFWQNLAGYKRQEALRPYLSSEEDRKKGKKFARYQLGDLLLHLEKKHGEDWGKVYDEAWERIDKKVEGLSKHIKLEEERRSEDAQSKAALTDWLRAKASFVIEGLKEADKDEFCRCELKLQKWYGDLRGKPFAIEAENSILDISGFSKQYNCAFIWQKDGVKKLNLYLIINYFKGGKLRFKKIKPEAFEANRFYTVINKKSGEIVPMEVNFNFDDPNLIILPLAFGKRQGREFIWNDLLSLETGSLKLANGRVIEKTLYNRRTRQDEPALFVALTFERREVLDSSNIKPMNLIGVDRGENIPAVIALTDPEGRPLSRFKDSLGNPTHILRIDESYKEKTRTIQAKKEVEQRRAGGYSRKYASKAKNLADDMVRNTARDLLYYAVTQDAMLIFENLSRGFGRQGKRTFMAERQYTRMEDWLTAKLAYEGLPSKTYLSKTLAQYTSKTCSNCGFTITSADYDRVLEKLKKTATGWMTTINGKELKVEGQITYYNRYKRQNVVKDLSVELDRLSEESVNNDISSWTKGRSGEALSLLKKRFSHRPVQEKFVCLNCGFETHADEQAALNIARSWLFLRSQEYKKYQTNKTTGNTDKRAFVETWQSFYRKKLKEVWKPAV

SEQ ID NO: 25647 - protein, 978 aa, synthetic construct
  REGION 1..978: note = engineered CasX variant
QEIKRINKIRRRLVKDSNTKKAGKTGPMKTLLVRVMTPDLRERLENLRKKPENIPQPISNTSRANLNKLLTDYTEMKKAILHVYWEEFQKDPVGLMSRVAQPASKKIDQNKLKPEMDEKGNLTTAGFACSQCGQPLFVYKLEQVSEKGKAYTNYFGRCNVAEHEKLILLAQLKPEKDSDEAVTYSLGKFGQRALDFYSIHVTKESTHPVKPLAQIAGNRYASGPVGKALSDACMGTIASFLSKYQDIIIEHQKVVKGNQKRLESLRELAGKENLEYPSVTLPPQPHTKEGVDAYNEVIARVRMWVNLNLWQKLKLSRDDAKPLLRLKGFPSFPLVERQANEVDWWDMVCNVKKLINEKKEDGKVFWQNLAGYKRQEALRPYLSSEEDRKKGKKFARYQLGDLLLHLEKKHGEDWGKVYDEAWERIDKKVEGLSKHIKLEEERRSEDAQSKAALTDWLRAKASFVIEGLKEADKDEFCRCELKLQKWYGDLRGKPFAIEAENSILDISGFSKQYNCAFIWQKDGVKKLNLYLIINYFKGGKLRFKKIKPEAFEANRFYTVINKKSGEIVPMEVNFNFDDPNLIILPLAFGKRQGREFIWNDLLSLETGSLKLANGRVIEKTLYNRRTRQDEPALFVALTFERREVLDSSNIKPMNLIGVDRGENIPAVIALTDPEGRPLSRFKDSLGNPTHILRIDESYKEKQRTIQAKKEVEQRRAGGYSRKYASKAKNLADDMVRNTARDLLYYAVTQDAMLIFENLSRGFGRQGKRTFMAERQYTRMEDWLTAKLAYEGLPSKTYLSKTLAQYTSKTCSNCGFTITSADYDRVLEKLKKTATGWMTTINGKELKVEGQITYYNRYKRQNVVKDLSVELDRLSEESVNNDISSWTKGRSGEALSLLKKRFSHRPVQEKFVCLNCGFETHADEQAALNIARSWLFLRSQEYKKYQTNKTTGNTDKRAFVETWQSFYRKKLKEVWKPAV

SEQ ID NO: 25648 - protein, 978 aa, synthetic construct
  REGION 1..978: note = engineered CasX variant
QEIKRINKIRRRLVKDSNTKKAGKTGPMKTLLVRVMTPDLRERLENLRKKPENIPQPISNTSRANLNKLLTDYTEMKKAILHVYWEEFQKDPVGLMSRVAQPASKKIDQNKLKPEMDEKGNLTTAGFACSQCGQPLFVYKLEQVSEKGKAYTNYFGRCNVAEHEKLILLAQLKPEKDSDEAVTYSLGKFGQRALDFYSIHVTKESTHPVKPLAQIAGNRYASGPVGKALSDACMGTIASFLSKYQDIIIEHQKVVKGNQKRLESLRELAGKENLEYPSVTLPPQPHTKEGVDAYNEVIARVRMWVNLNLWQKLKLSRDDAKPLLRLKGFPSFPLVERQANEVDWWDMVCNVKKLINEKKEDGKVFWQNLAGYKRQEALRPYLSSEEDRKKGKKFARYQLGDLLLHLEKKHGEDWGKVYDEAWERIDKKVEGLSKHIKLEEERRSEDAQSKAALTDWLRAKASFVIEGLKEADKDEFCRCELKLQKWYGDLRGKPFAIEAENSILDISGFSKQYNCAFIWQKDGVKKLNLYLIINYFKGGKLRFKKIKPEAFEANRFYTVINKKSGEIVPMEVNFNFDDPNLIILPLAFGKRQGREFIWNDLLSLETGSLKLANGRVIEKTLYNRRTRQDEPALFVALTFERREVLDSSNIKPMNLIGVDRGENIPAVIALTDPEGRPLSRFKDSLGNPTHILRIDESYKEKQRTIQAKKCVEQRRAGGYSRKYASKAKNLADDMVRNTARDLLYYAVTQDAMLIFENLSRGFGRQGKRTFMAERQYTRMEDWLTAKLAYEGLPSKTYLSKTLAQYTSKTCSNCGFTITSADYDRVLEKLKKTATGWMTTINGKELKVEGQITYYNRYKRQNVVKDLSVELDRLSEESVNNDISSWTKGRSGEALSLLKKRFSHRPVQEKFVCLNCGFETHADEQAALNIARSWLFLRSQEYKKYQTNKTTGNTDKRAFVETWQSFYRKKLKEVWKPAV

SEQ ID NO: 25649 - protein, 978 aa, synthetic construct
  REGION 1..978: note = engineered CasX variant
QEIKRINKIRRRLVKDSNTKKAGKTGPMKTLLVRVMTPDLRERLENLRKKPENIPQPISNTSRANLNKLLTDYTEMKKAILHVYWEEFQKDPVGLMSRVAQPASKKIDQNKLKPEMDEKGNLTTAGFACSQCGQPLFVYKLEQVSEKGKAYTNYFGRCNVAEHEKLILLAQLKPEKDSDEAVTYSLGKFGQRALDFYSIHVTKESTHPVKPLAQIAGNRYASGPVGKALSDACMGTIASFLSKYQDIIIEHQKVVKGNQKRLESLRELAGKENLEYPSVTLPPQPHTKEGVDAYNEVIARVRMWVNLNLWQKLKLSRDDAKPLLRLKGFPSFPLVERQANEVDWWDMVCNVKKLINEKKEDGKVFWQNLAGYKRQEALRPYLSSEEDRKKGKKFARYQLGDLLLHLEKKHGEDWGKVYDEAWERIDKKVEGLSKHIKLEEERRSEDAQSKAALTDWLRAKASFVIEGLKEADKDEFCRCELKLQKWYGDLRGKPFAIEAENSILDISGFSKQYNCAFIWQKDGVKKLNLYLIINYFKGGKLRFKKIKPEAFEANRFYTVINKKSGEIVPMEVNFNFDDPNLIILPLAFGKRQGREFIWNDLLSLETGSLKLANGRVIEKTLYNRRTRQDEPALFVALTFERREVLDSSNIKPMNLIGVDRGENIPAVIALTDPEGRPLSRFKDSHGNPTHILRIGESYKEKQRTIQAKKEVNQRRAGGYSRKYASKAKNLADDMVRNTARDLLYYAVTQDAMLIFENLSRGFGRQGKRTFMAERQYTRMEDWLTAKLAYEGLPSKTYLSKTLAQYTSKTCSNCGFTITSADYDRVLEKLKKTATGWMTTINGKELKVEGQITYYNRYKRQNVVKDLSVELDRLSEESVNNDISSWTKGRSGEALSLLKKRFSHRPVQEKFVCLNCGFETHADEQAALNIARSWLFLRSQEYKKYQTNKTTGNTDKRAFVETWQSFYRKKLKEVWKPAV

SEQ ID NO: 25650 - protein, 978 aa, synthetic construct
  REGION 1..978: note = engineered CasX variant
QEIKRINKIRRRLVKDSNTKKAGKTGPMKTLLVRVMTPDLRERLENLRKKPENIPQPISNTSRANLNKLLTDYTEMKKAILHVYWEEFQKDPVGLMSRVAQPASKKIDQNKLKPEMDEKGNLTTAGFACSQCGQPLFVYKLEQVSEKGKAYTNYFGRCNVAEHEKLILLAQLKPEKDSDEAVTYSLGKFGQRALDFYSIHVTKESTHPVKPLAQIAGNRYASGPVGKALSDACMGTIASFLSKYQDIIIEHQKVVKGNQKRLESLRELAGKENLEYPSVTLPPQPHTKEGVDAYNEVIARVRMWVNLNLWQKLKLSRDDAKPLLRLKGFPSFPLVERQANEVDWWDMVCNVKKLINEKKEDGKVFWQNLAGYKRQEALRPYLSSEEDRKKGKKFARYQLGDLLLHLEKKHGEDWGKVYDEAWERIDKKVEGLSKHIKLEEERRSEDAQSKAALTDWLRAKASFVIEGLKEADKDEFCRCELKLQKWYGDLRGKPFAIEAENSILDISGFSKQYNCAFIWQKDGVKKLNLYLIINYFKGGKLRFKKIKPEAFEANRFYTVINKKSGEIVPMEVNFNFDDPNLIILPLAFGKRQGREFIWNDLLSLETGSLKLANGRVIEKTLYNRRTRQDEPALFVALTFERREVLDSSNIKPMNLIGVDRGENIPAVIALTDPEGRPLSRFKDSHGNPTHILRIGESYKEKQRTIQAKKEVEQRRAGGYSRKYASKAKNLADDMVRNTARDLLYYAVTQDAMLIFENLSRGFGRQGKRTFMAERQYTRMEDWLTAKLAYEGLPSKTYLSKTLAQYTSKTCSNCGFTITSADYDRVLEKLKKTATGWMTTINGKELKVEGQITYYNRYKRQNVVKDLSVELDRLSEESVNNDISSWTKGRSGEALSLLKKRFSHRPVQEKFVCLNCGFETHADEQAALNIARSWLFLRSQEYKKYQTNKTTGNTDKRAFVETWQSFYRKKLKEVWKPAV

SEQ ID NO: 25651 - protein, 978 aa, synthetic construct
  REGION 1..978: note = engineered CasX variant
QEIKRINKIRRRLVKDSNTKKAGKTGPMKTLLVRVMTPDLRERLENLRKKPENIPQPISNTSRANLNKLLTDYTEMKKAILHVYWEEFQKDPVGLMSRVAQPASKKIDQNKLKPEMDEKGNLTTAGFACSQCGQPLFVYKLEQVSEKGKAYTNYFGRCNVAEHEKLILLAQLKPEKDSDEAVTYSLGKFGQRALDFYSIHVTKESTHPVKPLAQIAGNRYASGPVGKALSDACMGTIASFLSKYQDIIIEHQKVVKGNQKRLESLRELAGKENLEYPSVTLPPQPHTKEGVDAYNEVIARVRMWVNLNLWQKLKLSRDDAKPLLRLKGFPSFPLVERQANEVDWWDMVCNVKKLINEKKEDGKVFWQNLAGYKRQEALRPYLSSEEDRKKGKKFARYQLGDLLLHLEKKHGEDWGKVYDEAWERIDKKVEGLSKHIKLEEERRSEDAQSKAALTDWLRAKASFVIEGLKEADKDEFCRCELKLQKWYGDLRGKPFAIEAENSILDISGFSKQYNCAFIWQKDGVKKLNLYLIINYFKGGKLRFKKIKPEAFEANRFYTVINKKSGEIVPMEVNFNFDDPNLIILPLAFGKRQGREFIWNDLLSLETGSLKLANGRVIEKTLYNRRTRQDEPALFVALTFERREVLDSSNIKPMNLIGVDRGENIPAVIALTDPEGRPLSRFADSLGNPTHILRIGESYKEKQRTIQAKKEVEQRRAGGYSRKYASKAKNLADDMVRNTARDLLYYAVTQDAMLIFENLSRGFGRQGKRTFMAERQYTRMEDWLTAKLAYEGLPSKTYLSKTLAQYTSKTCSNCGFTITSADYDRVLEKLKKTATGWMTTINGKELKVEGQITYYNRYKRQNVVKDLSVELDRLSEESVNNDISSWTKGRSGEALSLLKKRFSHRPVQEKFVCLNCGFETHADEQAALNIARSWLFLRSQEYKKYQTNKTTGNTDKRAFVETWQSFYRKKLKEVWKPAV

SEQ ID NO: 25652 - protein, 978 aa, synthetic construct
  REGION 1..978: note = engineered CasX variant
QEIKRINKIRRRLVKDSNTKKAGKTGPMKTLLVRVMTPDLRERLENLRKKPENIPQPISNTSRANLNKLLTDYTEMKKAILHVYWEEFQKDPVGLMSRVAQPASKKIDQNKLKPEMDEKGNLTTAGFACSQCGQPLFVYKLEQVSEKGKAYTNYFGRCNVAEHEKLILLAQLKPEKDSDEAVTYSLGKFGQRALDFYSIHVTKESTHPVKPLAQIAGNRYASGPVGKALSDACMGTIASFLSKYQDIIIEHQKVVKGNQKRLESLRELAGKENLEYPSVTLPPQPHTKEGVDAYNEVIARVRMWVNLNLWQKLKLSRDDAKPLLRLKGFPSFPLVERQANEVDWWDMVCNVKKLINEKKEDGKVFWQNLAGYKRQEALRPYLSSEEDRKKGKKFARYQLGDLLLHLEKKHGEDWGKVYDEAWERIDKKVEGLSKHIKLEEERRSEDAQSKAALTDWLRAKASFVIEGLKEADKDEFCRCELKLQKWYGDLRGKPFAIEAENSILDISGFSKQYNCAFIWQKDGVKKLNLYLIINYFKGGKLRFKKIKPEAFEANRFYTVINKKSGEIVPMEVNFNFDDPNLIILPLAFGKRQGREFIWNDLLSLETGSLKLANGRVIEKTLYNRRTRQDEPALFVALTFERREVLDSSNIKPMNLIGVDRGENIPAVIALTDPEGRPISRYKDSLGNPTHILRIGESYKEKQRTIQAKKEVEQRRAGGYSRKYASKAKNLADDMVRNTARDLLYYAVTQDAMLIFENLSRGFGRQGKRTFMAERQYTRMEDWLTAKLAYEGLPSKTYLSKTLAQYTSKTCSNCGFTITSADYDRVLEKLKKTATGWMTTINGKELKVEGQITYYNRYKRQNVVKDLSVELDRLSEESVNNDISSWTKGRSGEALSLLKKRFSHRPVQEKFVCLNCGFETHADEQAALNIARSWLFLRSQEYKKYQTNKTTGNTDKRAFVETWQSFYRKKLKEVWKPAV

SEQ ID NO: 25653 - protein, 978 aa, synthetic construct
  REGION 1..978: note = engineered CasX variant
QEIKRINKIRRRLVKDSNTKKAGKTGPMKTLLVRVMTPDLRERLENLRKKPENIPQPISNTSRANLNKLLTDYTEMKKAILHVYWEEFQKDPVGLMSRVAQPASKKIDQNKLKPEMDEKGNLTTAGFACSQCGQPLFVYKLEQVSEKGKAYTNYFGRCNVAEHEKLILLAQLKPEKDSDEAVTYSLGKFGQRALDFYSIHVTKESTHPVKPLAQIAGNRYASGPVGKALSDACMGTIASFLSKYQDIIIEHQKVVKGNQKRLESLRELAGKENLEYPSVTLPPQPHTKEGVDAYNEVIARVRMWVNLNLWQKLKLSRDDAKPLLRLKGFPSFPLVERQANEVDWWDMVCNVKKLINEKKEDGKVFWQNLAGYKRQEALRPYLSSEEDRKKGKKFARYQLGDLLLHLEKKHGEDWGKVYDEAWERIDKKVEGLSKHIKLEEERRSEDAQSKAALTDWLRAKASFVIEGLKEADKDEFCRCELKLQKWYGDLRGKPFAIEAENSILDISGFSKQYNCAFIWQKDGVKKLNLYLIINYFKGGKLRFKKIKPEAFEANRFYTVINKKSGEIVPMEVNFNFDDPNLIILPLAFGKRQGREFIWNDLLSLETGSLKLANGRVIEKTLYNRRTRQDEPALFVALTFERREVLDSSNIKPMNLIGVDRGENIPAVIALTDPEGRPISRFKDSLGNPTHILRIGESYKEKQRTIQAKKEVEQRRMGGYSRKYASKAKNLADDMVRNTARDLLYYAVTQDAMLIFENLSRGFGRQGKRTFMAERQYTRMEDWLTAKLAYEGLPSKTYLSKTLAQYTSKTCSNCGFTITSADYDRVLEKLKKTATGWMTTINGKELKVEGQITYYNRYKRQNVVKDLSVELDRLSEESVNNDISSWTKGRSGEALSLLKKRFSHRPVQEKFVCLNCGFETHADEQAALNIARSWLFLRSQEYKKYQTNKTTGNTDKRAFVETWQSFYRKKLKEVWKPAV

SEQ ID NO: 25654 - protein, 978 aa, synthetic construct
  REGION 1..978: note = engineered CasX variant
QEIKRINKIRRRLVKDSNTKKAGKTGPMKTLLVRVMTPDLRERLENLRKKPENIPQPISNTSRANLNKLLTDYTEMKKAILHVYWEEFQKDPVGLMSRVAQPASKKIDQNKLKPEMDEKGNLTTAGFACSQCGQPLFVYKLEQVSEKGKAYTNYFGRCNVAEHEKLILLAQLKPEKDSDEAVTYSLGKFGQRALDFYSIHVTKESTHPVKPLAQIAGNRYASGPVGKALSDACMGTIASFLSKYQDIIIEHQKVVKGNQKRLESLRELAGKENLEYPSVTLPPQPHTKEGVDAYNEVIARVRMWVNLNLWQKLKLSRDDAKPLLRLKGFPSFPLVERQANEVDWWDMVCNVKKLINEKKEDGKVFWQNLAGYKRQEALRPYLSSEEDRKKGKKFARYQLGDLLLHLEKKHGEDWGKVYDEAWERIDKKVEGLSKHIKLEEERRSEDAQSKAALTDWLRAKASFVIEGLKEADKDEFCRCELKLQKWYGDLRGKPFAIEAENSILDISGFSKQYNCAFIWQKDGVKKLNLYLIINYFKGGKLRFKKIKPEAFEANRFYTVINKKSGEIVPMEVNFNFDDPNLIILPLAFGKRQGREFIWNDLLSLETGSLKLANGRVIEKTLYNRRTRQDEPALFVALTFERREVLDSSNIKPMNLIGVDRGENIPAVIALTDPEGRPISRFKDSLGNPTHILRIGESYKEKQRTIQAKKEVEQRRAGGYSRKYASKAKNLADDMVRNTARDLLYYAVTQDAMLIFENLSRGFGRQGKRTFMAERQYTRMEDWLTAKLAYEGLPSKTYLSKTLAQYTSKTCSNCGFTITSADYDRVLEKLKKTATGWMTTINGKELKVEGQITYYNRYKRQNVVKDLSVELDRLSEESVNNDISSWTKGRSGEALSLLKKRFSHRPVQEKFVCLNCGFETHADEQAALNIARSWLFLRSQEYKKYQTNKTTGNTDKRAFVETWQSFYRKKLKEVWKPAV

SEQ ID NO: 25655 - protein, 978 aa, synthetic construct
  REGION 1..978: note = engineered CasX variant
QEIKRINKIRRRLVKDSNTKKAGKTGPMKTLLVRVMTPDLRERLENLRKKPENIPQPISNTSRANLNKLLTDYTEMKKAILHVYWEEFQKDPVGLMSRVAQPASKKIDQNKLKPEMDEKGNLTTAGFACSQCGQPLFVYKLEQVSEKGKAYTNYFGRCNVAEHEKLILLAQLKPEKDSDEAVTYSLGKFGQRALDFYSIHVTKESTHPVKPLAQIAGNRYASGPVGKALSDACMGTIASFLSKYQDIIIEHQKVVKGNQKRLESLRELAGKENLEYPSVTLPPQPHTKEGVDAYNEVIARVRMWVNLNLWQKLKLSRDDAKPLLRLKGFPSFPLVERQANEVDWWDMVCNVKKLINEKKEDGKVFWQNLAGYKRQEALRPYLSSEEDRKKGKKFARYQLGDLLLHLEKKHGEDWGKVYDEAWERIDKKVEGLSKHIKLEEERRSEDAQSKAALTDWLRAKASFVIEGLKEADKDEFCRCELKLQKWYGDLRGKPFAIEAENSILDISGFSKQYNCAFIWQKDGVKKLNLYLIINYFKGGKLRFKKIKPEAFEANRFYTVINKKSGEIVPMEVNFNFDDPNLIILPLAFGKRQGREFIWNDLLSLETGSLKLANGRVIEKTLYNRRTRQDEPALFVALTFERREVLDSSNIKPMNLIGVDRGENIPAVIALTDPEGQTLSRFKDSLGNPTHILRIGESHKEKQRTIQAKKEVEQRRAGGYSRKYASKAKNLADDMVRNTARDLLYYAVTQDAMLIFENLSRGFGRQGKRTFMAERQYTRMEDWLTAKLAYEGLPSKTYLSKTLAQYTSKTCSNCGFTITSADYDRVLEKLKKTATGWMTTINGKELKVEGQITYYNRYKRQNVVKDLSVELDRLSEESVNNDISSWTKGRSGEALSLLKKRFSHRPVQEKFVCLNCGFETHADEQAALNIARSWLFLRSQEYKKYQTNKTTGNTDKRAFVETWQSFYRKKLKEVWKPAV

SEQ ID NO: 25656 - protein, 978 aa, synthetic construct
  REGION 1..978: note = engineered CasX variant
QEIKRINKIRRRLVKDSNTKKAGKTGPMKTLLVRVMTPDLRERLENLRKKPENIPQPISNTSRANLNKLLTDYTEMKKAILHVYWEEFQKDPVGLMSRVAQPASKKIDQNKLKPEMDEKGNLTTAGFACSQCGQPLFVYKLEQVSEKGKAYTNYFGRCNVAEHEKLILLAQLKPEKDSDEAVTYSLGKFGQRALDFYSIHVTKESTHPVKPLAQIAGNRYASGPVGKALSDACMGTIASFLSKYQDIIIEHQKVVKGNQKRLESLRELAGKENLEYPSVTLPPQPHTKEGVDAYNEVIARVRMWVNLNLWQKLKLSRDDAKPLLRLKGFPSFPLVERQANEVDWWDMVCNVKKLINEKKEDGKVFWQNLAGYKRQEALRPYLSSEEDRKKGKKFARYQLGDLLLHLEKKHGEDWGKVYDEAWERIDKKVEGLSKHIKLEEERRSEDAQSKAALTDWLRAKASFVIEGLKEADKDEFCRCELKLQKWYGDLRGKPFAIEAENSILDISGFSKQYNCAFIWQKDGVKKLNLYLIINYFKGGKLRFKKIKPEAFEANRFYTVINKKSGEIVPMEVNFNFDDPNLIILPLAFGKRQGREFIWNDLLSLETGSLKLANGRVIEKTLYNRRTRQDEPALFVALTFERREVLDSSNIKPMNLIGVDRGENIPAVIALTDPEGQPLSRFKDSLGNPTHILRIGESYKEKQRTIQTKKEVEQRRAGGYSRKYASKAKNLADDMVRNTARDLLYYAVTQDAMLIFENLSRGFGRQGKRTFMAERQYTRMEDWLTAKLAYEGLPSKTYLSKTLAQYTSKTCSNCGFTITSADYDRVLEKLKKTATGWMTTINGKELKVEGQITYYNRYKRQNVVKDLSVELDRLSEESVNNDISSWTKGRSGEALSLLKKRFSHRPVQEKFVCLNCGFETHADEQAALNIARSWLFLRSQEYKKYQTNKTTGNTDKRAFVETWQSFYRKKLKEVWKPAV

SEQ ID NO: 25657 - protein, 978 aa, synthetic construct
  REGION 1..978: note = engineered CasX variant
QEIKRINKIRRRLVKDSNTKKAGKTGPMKTLLVRVMTPDLRERLENLRKKPENIPQPISNTSRANLNKLLTDYTEMKKAILHVYWEEFQKDPVGLMSRVAQPASKKIDQNKLKPEMDEKGNLTTAGFACSQCGQPLFVYKLEQVSEKGKAYTNYFGRCNVAEHEKLILLAQLKPEKDSDEAVTYSLGKFGQRALDFYSIHVTKESTHPVKPLAQIAGNRYASGPVGKALSDACMGTIASFLSKYQDIIIEHQKVVKGNQKRLESLRELAGKENLEYPSVTLPPQPHTKEGVDAYNEVIARVRMWVNLNLWQKLKLSRDDAKPLLRLKGFPSFPLVERQANEVDWWDMVCNVKKLINEKKEDGKVFWQNLAGYKRQEALRPYLSSEEDRKKGKKFARYQLGDLLLHLEKKHGEDWGKVYDEAWERIDKKVEGLSKHIKLEEERRSEDAQSKAALTDWLRAKASFVIEGLKEADKDEFCRCELKLQKWYGDLRGKPFAIEAENSILDISGFSKQYNCAFIWQKDGVKKLNLYLIINYFKGGKLRFKKIKPEAFEANRFYTVINKKSGEIVPMEVNFNFDDPNLIILPLAFGKRQGREFIWNDLLSLETGSLKLANGRVIEKTLYNRRTRQDEPALFVALTFERREVLDSSNIKPMNLIGVDRGENIPAVIALTDPEGQPLSRFKDSLGNPTHILRIGESYKEKQRTIQAKKEVEQRRAGGYSRKYASKAKNLADDMVRNTARDLLYYAVTQDAMLIFENLSRGFGRQGKRTFMAERQYTRMEDWLTAKLAYEGLPSKTYLSKTLAQYTSKTCSNCGFTITSADYDRVLEKLKKTATGWMTTINGKELKVEGQITYYNRYKRQNVVKDLSVELDRLSEESVNNDISSWTKGRSGEALSLLKKRFSHRPVQEKFVCLNCGFETHADEQAALNIARSWLFLRSQEYKKYQTNKTTGNTDKRAFVETWQSFYRKKLKEVWKPAV

SEQ ID NO: 25658 - protein, 978 aa, synthetic construct
  REGION 1..978: note = engineered CasX variant
QEIKRINKIRRRLVKDSNTKKAGKTGPMKTLLVRVMTPDLRERLENLRKKPENIPQPISNTSRANLNKLLTDYTEMKKAILHVYWEEFQKDPVGLMSRVAQPASKKIDQNKLKPEMDEKGNLTTAGFACSQCGQPLFVYKLEQVSEKGKAYTNYFGRCNVAEHEKLILLAQLKPEKDSDEAVTYSLGKFGQRALDFYSIHVTKESTHPVKPLAQIAGNRYASGPVGKALSDACMGTIASFLSKYQDIIIEHQKVVKGNQKRLESLRELAGKENLEYPSVTLPPQPHTKEGVDAYNEVIARVRMWVNLNLWQKLKLSRDDAKPLLRLKGFPSFPLVERQANEVDWWDMVCNVKKLINEKKEDGKVFWQNLAGYKRQEALRPYLSSEEDRKKGKKFARYQLGDLLLHLEKKHGEDWGKVYDEAWERIDKKVEGLSKHIKLEEERRSEDAQSKAALTDWLRAKASFVIEGLKEADKDEFCRCELKLQKWYGDLRGKPFAIEAENSILDISGFSKQYNCAFIWQKDGVKKLNLYLIINYFKGGKLRFKKIKPEAFEANRFYTVINKKSGEIVPMEVNFNFDDPNLIILPLAFGKRQGREFIWNDLLSLETGSLKLANGRVIEKTLYNRRTRQDEPALFVALTFERREVLDSSNIKPMNLIGVDRGENIPAVIALTDPEGQPLSRFKDSLGNPTHILRIGESYKEKQRTIFAKKEVEQRRAGGYSRKYASKAKNLADDMVRNTARDLLYYAVTQDAMLIFENLSRGFGRQGKRTFMAERQYTRMEDWLTAKLAYEGLPSKTYLSKTLAQYTSKTCSNCGFTITSADYDRVLEKLKKTATGWMTTINGKELKVEGQITYYNRYKRQNVVKDLSVELDRLSEESVNNDISSWTKGRSGEALSLLKKRFSHRPVQEKFVCLNCGFETHADEQAALNIARSWLFLRSQEYKKYQTNKTTGNTDKRAFVETWQSFYRKKLKEVWKPAV

SEQ ID NO: 25659 - protein, 978 aa, synthetic construct
  REGION 1..978: note = engineered CasX variant
QEIKRINKIRRRLVKDSNTKKAGKTGPMKTLLVRVMTPDLRERLENLRKKPENIPQPISNTSRANLNKLLTDYTEMKKAILHVYWEEFQKDPVGLMSRVAQPASKKIDQNKLKPEMDEKGNLTTAGFACSQCGQPLFVYKLEQVSEKGKAYTNYFGRCNVAEHEKLILLAQLKPEKDSDEAVTYSLGKFGQRALDFYSIHVTKESTHPVKPLAQIAGNRYASGPVGKALSDACMGTIASFLSKYQDIIIEHQKVVKGNQKRLESLRELAGKENLEYPSVTLPPQPHTKEGVDAYNEVIARVRMWVNLNLWQKLKLSRDDAKPLLRLKGFPSFPLVERQANEVDWWDMVCNVKKLINEKKEDGKVFWQNLAGYKRQEALRPYLSSEEDRKKGKKFARYQLGDLLLHLEKKHGEDWGKVYDEAWERIDKKVEGLSKHIKLEEERRSEDAQSKAALTDWLRAKASFVIEGLKEADKDEFCRCELKLQKWYGDLRGKPFAIEAENSILDISGFSKQYNCAFIWQKDGVKKLNLYLIINYFKGGKLRFKKIKPEAFEANRFYTVINKKSGEIVPMEVNFNFDDPNLIILPLAFGKRQGREFIWNDLLSLETGSLKLANGRVIEKTLYNRRTRQDEPALFVALTFERREVLDSSNIKPMNLIGVDRGENIPAVIALTDPEGQPLSRFKDSLGNPTHILRIGESHKEKQRTIQAKKEVEQRRAGGYSRKYASKAKNLADDMVRNTARDLLYYAVTQDAMLIFENLSRGFGRQGKRTFMAERQYTRMEDWLTAKLAYEGLPSKTYLSKTLAQYTSKTCSNCGFTITSADYDRVLEKLKKTATGWMTTINGKELKVEGQITYYNRYKRQNVVKDLSVELDRLSEESVNNDISSWTKGRSGEALSLLKKRFSHRPVQEKFVCLNCGFETHADEQAALNIARSWLFLRSQEYKKYQTNKTTGNTDKRAFVETWQSFYRKKLKEVWKPAV

SEQ ID NO: 25660 - protein, 978 aa, synthetic construct
  REGION 1..978: note = engineered CasX variant
QEIKRINKIRRRLVKDSNTKKAGKTGPMKTLLVRVMTPDLRERLENLRKKPENIPQPISNTSRANLNKLLTDYTEMKKAILHVYWEEFQKDPVGLMSRVAQPASKKIDQNKLKPEMDEKGNLTTAGFACSQCGQPLFVYKLEQVSEKGKAYTNYFGRCNVAEHEKLILLAQLKPEKDSDEAVTYSLGKFGQRALDFYSIHVTKESTHPVKPLAQIAGNRYASGPVGKALSDACMGTIASFLSKYQDIIIEHQKVVKGNQKRLESLRELAGKENLEYPSVTLPPQPHTKEGVDAYNEVIARVRMWVNLNLWQKLKLSRDDAKPLLRLKGFPSFPLVERQANEVDWWDMVCNVKKLINEKKEDGKVFWQNLAGYKRQEALRPYLSSEEDRKKGKKFARYQLGDLLLHLEKKHGEDWGKVYDEAWERIDKKVEGLSKHIKLEEERRSEDAQSKAALTDWLRAKASFVIEGLKEADKDEFCRCELKLQKWYGDLRGKPFAIEAENSILDISGFSKQYNCAFIWQKDGVKKLNLYLIINYFKGGKLRFKKIKPEAFEANRFYTVINKKSGEIVPMEVNFNFDDPNLIILPLAFGKRQGREFIWNDLLSLETGSLKLANGRVIEKTLYNRRTRQDEPALFVALTFERREVLDSSNIKPMNLIGVDRGENIPAVIALTDPEGQPLSRFKDSLGNPTHCLRIGESYKEKQRTIFAKKEVEQRRAGGYSRKYASKAKNLADDMVRNTARDLLYYAVTQDAMLIFENLSRGFGRQGKRTFMAERQYTRMEDWLTAKLAYEGLPSKTYLSKTLAQYTSKTCSNCGFTITSADYDRVLEKLKKTATGWMTTINGKELKVEGQITYYNRYKRQNVVKDLSVELDRLSEESVNNDISSWTKGRSGEALSLLKKRFSHRPVQEKFVCLNCGFETHADEQAALNIARSWLFLRSQEYKKYQTNKTTGNTDKRAFVETWQSFYRKKLKEVWKPAV

SEQ ID NO: 25661 - protein, 978 aa, synthetic construct
  REGION 1..978: note = engineered CasX variant
QEIKRINKIRRRLVKDSNTKKAGKTGPMKTLLVRVMTPDLRERLENLRKKPENIPQPISNTSRANLNKLLTDYTEMKKAILHVYWEEFQKDPVGLMSRVAQPASKKIDQNKLKPEMDEKGNLTTAGFACSQCGQPLFVYKLEQVSEKGKAYTNYFGRCNVAEHEKLILLAQLKPEKDSDEAVTYSLGKFGQRALDFYSIHVTKESTHPVKPLAQIAGNRYASGPVGKALSDACMGTIASFLSKYQDIIIEHQKVVKGNQKRLESLRELAGKENLEYPSVTLPPQPHTKEGVDAYNEVIARVRMWVNLNLWQKLKLSRDDAKPLLRLKGFPSFPLVERQANEVDWWDMVCNVKKLINEKKEDGKVFWQNLAGYKRQEALRPYLSSEEDRKKGKKFARYQLGDLLLHLEKKHGEDWGKVYDEAWERIDKKVEGLSKHIKLEEERRSEDAQSKAALTDWLRAKASFVIEGLKEADKDEFCRCELKLQKWYGDLRGKPFAIEAENSILDISGFSKQYNCAFIWQKDGVKKLNLYLIINYFKGGKLRFKKIKPEAFEANRFYTVINKKSGEIVPMEVNFNFDDPNLIILPLAFGKRQGREFIWNDLLSLETGSLKLANGRVIEKTLYNRRTRQDEPALFVALTFERREVLDSSNIKPMNLIGVDRGENIPAVIALTDPEGNPLSRFKDSLGNPTHILRIGESYKEKQRTIQAKKEVTQRRAGGYSRKYASKAKNLADDMVRNTARDLLYYAVTQDAMLIFENLSRGFGRQGKRTFMAERQYTRMEDWLTAKLAYEGLPSKTYLSKTLAQYTSKTCSNCGFTITSADYDRVLEKLKKTATGWMTTINGKELKVEGQITYYNRYKRQNVVKDLSVELDRLSEESVNNDISSWTKGRSGEALSLLKKRFSHRPVQEKFVCLNCGFETHADEQAALNIARSWLFLRSQEYKKYQTNKTTGNTDKRAFVETWQSFYRKKLKEVWKPAV

SEQ ID NO: 25662 - protein, 978 aa, synthetic construct
  REGION 1..978: note = engineered CasX variant
QEIKRINKIRRRLVKDSNTKKAGKTGPMKTLLVRVMTPDLRERLENLRKKPENIPQPISNTSRANLNKLLTDYTEMKKAILHVYWEEFQKDPVGLMSRVAQPASKKIDQNKLKPEMDEKGNLTTAGFACSQCGQPLFVYKLEQVSEKGKAYTNYFGRCNVAEHEKLILLAQLKPEKDSDEAVTYSLGKFGQRALDFYSIHVTKESTHPVKPLAQIAGNRYASGPVGKALSDACMGTIASFLSKYQDIIIEHQKVVKGNQKRLESLRELAGKENLEYPSVTLPPQPHTKEGVDAYNEVIARVRMWVNLNLWQKLKLSRDDAKPLLRLKGFPSFPLVERQANEVDWWDMVCNVKKLINEKKEDGKVFWQNLAGYKRQEALRPYLSSEEDRKKGKKFARYQLGDLLLHLEKKHGEDWGKVYDEAWERIDKKVEGLSKHIKLEEERRSEDAQSKAALTDWLRAKASFVIEGLKEADKDEFCRCELKLQKWYGDLRGKPFAIEAENSILDISGFSKQYNCAFIWQKDGVKKLNLYLIINYFKGGKLRFKKIKPEAFEANRFYTVINKKSGEIVPMEVNFNFDDPNLIILPLAFGKRQGREFIWNDLLSLETGSLKLANGRVIEKTLYNRRTRQDEPALFVALTFERREVLDSSNIKPMNLIGVDRGENIPAVIALTDPEGNPLSRFKDSLGNPTHILRIGESYKEKQRTIQAKKEVEQRRAGGYSRKYASKAKNLADDMVRNTARDLLYYAVTQDAMLIFENLSRGFGRQGKRTFMAERQYTRMEDWLTAKLAYEGLPSKTYLSKTLAQYTSKTCSNCGFTITSADYDRVLEKLKKTATGWMTTINGKELKVEGQITYYNRYKRQNVVKDLSVELDRLSEESVNNDISSWTKGRSGEALSLLKKRFSHRPVQEKFVCLNCGFETHADEQAALNIARSWLFLRSQEYKKYQTNKTTGNTDKRAFVETWQSFYRKKLKEVWKPAV

SEQ ID NO: 25663 - protein, 978 aa, synthetic construct
  REGION 1..978: note = engineered CasX variant
QEIKRINKIRRRLVKDSNTKKAGKTGPMKTLLVRVMTPDLRERLENLRKKPENIPQPISNTSRANLNKLLTDYTEMKKAILHVYWEEFQKDPVGLMSRVAQPASKKIDQNKLKPEMDEKGNLTTAGFACSQCGQPLFVYKLEQVSEKGKAYTNYFGRCNVAEHEKLILLAQLKPEKDSDEAVTYSLGKFGQRALDFYSIHVTKESTHPVKPLAQIAGNRYASGPVGKALSDACMGTIASFLSKYQDIIIEHQKVVKGNQKRLESLRELAGKENLEYPSVTLPPQPHTKEGVDAYNEVIARVRMWVNLNLWQKLKLSRDDAKPLLRLKGFPSFPLVERQANEVDWWDMVCNVKKLINEKKEDGKVFWQNLAGYKRQEALRPYLSSEEDRKKGKKFARYQLGDLLLHLEKKHGEDWGKVYDEAWERIDKKVEGLSKHIKLEEERRSEDAQSKAALTDWLRAKASFVIEGLKEADKDEFCRCELKLQKWYGDLRGKPFAIEAENSILDISGFSKQYNCAFIWQKDGVKKLNLYLIINYFKGGKLRFKKIKPEAFEANRFYTVINKKSGEIVPMEVNFNFDDPNLIILPLAFGKRQGREFIWNDLLSLETGSLKLANGRVIEKTLYNRRTRQDEPALFVALTFERREVLDSSNIKPMNLIGVDRGENIPAVIALTDPEGNPLSRFKDSLGNPTHILRIGESYKEKQRQIQAKKEVTQRRAGGYSRKYASKAKNLADDMVRNTARDLLYYAVTQDAMLIFENLSRGFGRQGKRTFMAERQYTRMEDWLTAKLAYEGLPSKTYLSKTLAQYTSKTCSNCGFTITSADYDRVLEKLKKTATGWMTTINGKELKVEGQITYYNRYKRQNVVKDLSVELDRLSEESVNNDISSWTKGRSGEALSLLKKRFSHRPVQEKFVCLNCGFETHADEQAALNIARSWLFLRSQEYKKYQTNKTTGNTDKRAFVETWQSFYRKKLKEVWKPAV

SEQ ID NO: 25664 - protein, 978 aa, synthetic construct
  REGION 1..978: note = engineered CasX variant
QEIKRINKIRRRLVKDSNTKKAGKTGPMKTLLVRVMTPDLRERLENLRKKPENIPQPISNTSRANLNKLLTDYTEMKKAILHVYWEEFQKDPVGLMSRVAQPASKKIDQNKLKPEMDEKGNLTTAGFACSQCGQPLFVYKLEQVSEKGKAYTNYFGRCNVAEHEKLILLAQLKPEKDSDEAVTYSLGKFGQRALDFYSIHVTKESTHPVKPLAQIAGNRYASGPVGKALSDACMGTIASFLSKYQDIIIEHQKVVKGNQKRLESLRELAGKENLEYPSVTLPPQPHTKEGVDAYNEVIARVRMWVNLNLWQKLKLSRDDAKPLLRLKGFPSFPLVERQANEVDWWDMVCNVKKLINEKKEDGKVFWQNLAGYKRQEALRPYLSSEEDRKKGKKFARYQLGDLLLHLEKKHGEDWGKVYDEAWERIDKKVEGLSKHIKLEEERRSEDAQSKAALTDWLRAKASFVIEGLKEADKDEFCRCELKLQKWYGDLRGKPFAIEAENSILDISGFSKQYNCAFIWQKDGVKKLNLYLIINYFKGGKLRFKKIKPEAFEANRFYTVINKKSGEIVPMEVNFNFDDPNLIILPLAFGKRQGREFIWNDLLSLETGSLKLANGRVIEKTLYNRRTRQDEPALFVALTFERREVLDSSNIKPMNLIGVDRGENIPAVIALTDPEGNPLSRFKDSLGNPTHILRIGESYKEKQRQIQAKKEVEQRRAGGYSRKYASKAKNLADDMVRNTARDLLYYAVTQDAMLIFENLSRGFGRQGKRTFMAERQYTRMEDWLTAKLAYEGLPSKTYLSKTLAQYTSKTCSNCGFTITSADYDRVLEKLKKTATGWMTTINGKELKVEGQITYYNRYKRQNVVKDLSVELDRLSEESVNNDISSWTKGRSGEALSLLKKRFSHRPVQEKFVCLNCGFETHADEQAALNIARSWLFLRSQEYKKYQTNKTTGNTDKRAFVETWQSFYRKKLKEVWKPAV

SEQ ID NO: 25665 - protein, 978 aa, synthetic construct
  REGION 1..978: note = engineered CasX variant
QEIKRINKIRRRLVKDSNTKKAGKTGPMKTLLVRVMTPDLRERLENLRKKPENIPQPISNTSRANLNKLLTDYTEMKKAILHVYWEEFQKDPVGLMSRVAQPASKKIDQNKLKPEMDEKGNLTTAGFACSQCGQPLFVYKLEQVSEKGKAYTNYFGRCNVAEHEKLILLAQLKPEKDSDEAVTYSLGKFGQRALDFYSIHVTKESTHPVKPLAQIAGNRYASGPVGKALSDACMGTIASFLSKYQDIIIEHQKVVKGNQKRLESLRELAGKENLEYPSVTLPPQPHTKEGVDAYNEVIARVRMWVNLNLWQKLKLSRDDAKPLLRLKGFPSFPLVERQANEVDWWDMVCNVKKLINEKKEDGKVFWQNLAGYKRQEALRPYLSSEEDRKKGKKFARYQLGDLLLHLEKKHGEDWGKVYDEAWERIDKKVEGLSKHIKLEEERRSEDAQSKAALTDWLRAKASFVIEGLKEADKDEFCRCELKLQKWYGDLRGKPFAIEAENSILDISGFSKQYNCAFIWQKDGVKKLNLYLIINYFKGGKLRFKKIKPEAFEANRFYTVINKKSGEIVPMEVNFNFDDPNLIILPLAFGKRQGREFIWNDLLSLETGSLKLANGRVIEKTLYNRRTRQDEPALFVALTFERREVLDSSNIKPMNLIGVDRGENIPAVIALTDPEGNPLSRFKDSLGNKTHILRIGESYKEKQRTIQAKKEVEQRRAGGYSRKYASKAKNLADDMVRNTARDLLYYAVTQDAMLIFENLSRGFGRQGKRTFMAERQYTRMEDWLTAKLAYEGLPSKTYLSKTLAQYTSKTCSNCGFTITSADYDRVLEKLKKTATGWMTTINGKELKVEGQITYYNRYKRQNVVKDLSVELDRLSEESVNNDISSWTKGRSGEALSLLKKRFSHRPVQEKFVCLNCGFETHADEQAALNIARSWLFLRSQEYKKYQTNKTTGNTDKRAFVETWQSFYRKKLKEVWKPAV

SEQ ID NO: 25666 - protein, 978 aa, synthetic construct
  REGION 1..978: note = engineered CasX variant
QEIKRINKIRRRLVKDSNTKKAGKTGPMKTLLVRVMTPDLRERLENLRKKPENIPQPISNTSRANLNKLLTDYTEMKKAILHVYWEEFQKDPVGLMSRVAQPASKKIDQNKLKPEMDEKGNLTTAGFACSQCGQPLFVYKLEQVSEKGKAYTNYFGRCNVAEHEKLILLAQLKPEKDSDEAVTYSLGKFGQRALDFYSIHVTKESTHPVKPLAQIAGNRYASGPVGKALSDACMGTIASFLSKYQDIIIEHQKVVKGNQKRLESLRELAGKENLEYPSVTLPPQPHTKEGVDAYNEVIARVRMWVNLNLWQKLKLSRDDAKPLLRLKGFPSFPLVERQANEVDWWDMVCNVKKLINEKKEDGKVFWQNLAGYKRQEALRPYLSSEEDRKKGKKFARYQLGDLLLHLEKKHGEDWGKVYDEAWERIDKKVEGLSKHIKLEEERRSEDAQSKAALTDWLRAKASFVIEGLKEADKDEFCRCELKLQKWYGDLRGKPFAIEAENSILDISGFSKQYNCAFIWQKDGVKKLNLYLIINYFKGGKLRFKKIKPEAFEANRFYTVINKKSGEIVPMEVNFNFDDPNLIILPLAFGKRQGREFIWNDLLSLETGSLKLANGRVIEKTLYNRRTRQDEPALFVALTFERREVLDSSNIKPMNLIGVDRGENIPAVIALTDPEGNPLSRFKDQLGNPTHILRIGESYKEKQRTIQAKKEVEQRRAGGYSRKYASKAKNLADDMVRNTARDLLYYAVTQDAMLIFENLSRGFGRQGKRTFMAERQYTRMEDWLTAKLAYEGLPSKTYLSKTLAQYTSKTCSNCGFTITSADYDRVLEKLKKTATGWMTTINGKELKVEGQITYYNRYKRQNVVKDLSVELDRLSEESVNNDISSWTKGRSGEALSLLKKRFSHRPVQEKFVCLNCGFETHADEQAALNIARSWLFLRSQEYKKYQTNKTTGNTDKRAFVETWQSFYRKKLKEVWKPAV

SEQ ID NO: 25667 - protein, 978 aa, synthetic construct
  REGION 1..978: note = engineered CasX variant
QEIKRINKIRRRLVKDSNTKKAGKTGPMKTLLVRVMTPDLRERLENLRKKPENIPQPISNTSRANLNKLLTDYTEMKKAILHVYWEEFQKDPVGLMSRVAQPASKKIDQNKLKPEMDEKGNLTTAGFACSQCGQPLFVYKLEQVSEKGKAYTNYFGRCNVAEHEKLILLAQLKPEKDSDEAVTYSLGKFGQRALDFYSIHVTKESTHPVKPLAQIAGNRYASGPVGKALSDACMGTIASFLSKYQDIIIEHQKVVKGNQKRLESLRELAGKENLEYPSVTLPPQPHTKEGVDAYNEVIARVRMWVNLNLWQKLKLSRDDAKPLLRLKGFPSFPLVERQANEVDWWDMVCNVKKLINEKKEDGKVFWQNLAGYKRQEALRPYLSSEEDRKKGKKFARYQLGDLLLHLEKKHGEDWGKVYDEAWERIDKKVEGLSKHIKLEEERRSEDAQSKAALTDWLRAKASFVIEGLKEADKDEFCRCELKLQKWYGDLRGKPFAIEAENSILDISGFSKQYNCAFIWQKDGVKKLNLYLIINYFKGGKLRFKKIKPEAFEANRFYTVINKKSGEIVPMEVNFNFDDPNLIILPLAFGKRQGREFIWNDLLSLETGSLKLANGRVIEKTLYNRRTRQDEPALFVALTFERREVLDSSNIKPMNLIGVDRGENIPAVIALTDPEGNPLSRFKDMLGNPTHILRIGESYKEKQRTIQAKKEVEQRRAGGYSRKYASKAKNLADDMVRNTARDLLYYAVTQDAMLIFENLSRGFGRQGKRTFMAERQYTRMEDWLTAKLAYEGLPSKTYLSKTLAQYTSKTCSNCGFTITSADYDRVLEKLKKTATGWMTTINGKELKVEGQITYYNRYKRQNVVKDLSVELDRLSEESVNNDISSWTKGRSGEALSLLKKRFSHRPVQEKFVCLNCGFETHADEQAALNIARSWLFLRSQEYKKYQTNKTTGNTDKRAFVETWQSFYRKKLKEVWKPAV

SEQ ID NO: 25668 - protein, 978 aa, synthetic construct
  REGION 1..978: note = engineered CasX variant
QEIKRINKIRRRLVKDSNTKKAGKTGPMKTLLVRVMTPDLRERLENLRKKPENIPQPISNTSRANLNKLLTDYTEMKKAILHVYWEEFQKDPVGLMSRVAQPASKKIDQNKLKPEMDEKGNLTTAGFACSQCGQPLFVYKLEQVSEKGKAYTNYFGRCNVAEHEKLILLAQLKPEKDSDEAVTYSLGKFGQRALDFYSIHVTKESTHPVKPLAQIAGNRYASGPVGKALSDACMGTIASFLSKYQDIIIEHQKVVKGNQKRLESLRELAGKENLEYPSVTLPPQPHTKEGVDAYNEVIARVRMWVNLNLWQKLKLSRDDAKPLLRLKGFPSFPLVERQANEVDWWDMVCNVKKLINEKKEDGKVFWQNLAGYKRQEALRPYLSSEEDRKKGKKFARYQLGDLLLHLEKKHGEDWGKVYDEAWERIDKKVEGLSKHIKLEEERRSEDAQSKAALTDWLRAKASFVIEGLKEADKDEFCRCELKLQKWYGDLRGKPFAIEAENSILDISGFSKQYNCAFIWQKDGVKKLNLYLIINYFKGGKLRFKKIKPEAFEANRFYTVINKKSGEIVPMEVNFNFDDPNLIILPLAFGKRQGREFIWNDLLSLETGSLKLANGRVIEKTLYNRRTRQDEPALFVALTFERREVLDSSNIKPMNLIGVDRGENIPAVIALTDPEGNPLKRFKDSLGNPTHILRIGESYKEKQRTIQAKKEVEQRRAGGYSRKYASKAKNLADDMVRNTARDLLYYAVTQDAMLIFENLSRGFGRQGKRTFMAERQYTRMEDWLTAKLAYEGLPSKTYLSKTLAQYTSKTCSNCGFTITSADYDRVLEKLKKTATGWMTTINGKELKVEGQITYYNRYKRQNVVKDLSVELDRLSEESVNNDISSWTKGRSGEALSLLKKRFSHRPVQEKFVCLNCGFETHADEQAALNIARSWLFLRSQEYKKYQTNKTTGNTDKRAFVETWQSFYRKKLKEVWKPAV

SEQ ID NO: 25669 - protein, 978 aa, synthetic construct
  REGION 1..978: note = engineered CasX variant
QEIKRINKIRRRLVKDSNTKKAGKTGPMKTLLVRVMTPDLRERLENLRKKPENIPQPISNTSRANLNKLLTDYTEMKKAILHVYWEEFQKDPVGLMSRVAQPASKKIDQNKLKPEMDEKGNLTTAGFACSQCGQPLFVYKLEQVSEKGKAYTNYFGRCNVAEHEKLILLAQLKPEKDSDEAVTYSLGKFGQRALDFYSIHVTKESTHPVKPLAQIAGNRYASGPVGKALSDACMGTIASFLSKYQDIIIEHQKVVKGNQKRLESLRELAGKENLEYPSVTLPPQPHTKEGVDAYNEVIARVRMWVNLNLWQKLKLSRDDAKPLLRLKGFPSFPLVERQANEVDWWDMVCNVKKLINEKKEDGKVFWQNLAGYKRQEALRPYLSSEEDRKKGKKFARYQLGDLLLHLEKKHGEDWGKVYDEAWERIDKKVEGLSKHIKLEEERRSEDAQSKAALTDWLRAKASFVIEGLKEADKDEFCRCELKLQKWYGDLRGKPFAIEAENSILDISGFSKQYNCAFIWQKDGVKKLNLYLIINYFKGGKLRFKKIKPEAFEANRFYTVINKKSGEIVPMEVNFNFDDPNLIILPLAFGKRQGREFIWNDLLSLETGSLKLANGRVIEKTLYNRRTRQDEPALFVALTFERREVLDSSNIKPMNLIGVDRGENIPAVIALTDPEGNPLKRFKDMLGNPTHILRIGESYKEKQRTIQAKKEVEQRRAGGYSRKYASKAKNLADDMVRNTARDLLYYAVTQDAMLIFENLSRGFGRQGKRTFMAERQYTRMEDWLTAKLAYEGLPSKTYLSKTLAQYTSKTCSNCGFTITSADYDRVLEKLKKTATGWMTTINGKELKVEGQITYYNRYKRQNVVKDLSVELDRLSEESVNNDISSWTKGRSGEALSLLKKRFSHRPVQEKFVCLNCGFETHADEQAALNIARSWLFLRSQEYKKYQTNKTTGNTDKRAFVETWQSFYRKKLKEVWKPAV

SEQ ID NO: 25670 - protein, 978 aa, synthetic construct
  REGION 1..978: note = engineered CasX variant
QEIKRINKIRRRLVKDSNTKKAGKTGPMKTLLVRVMTPDLRERLENLRKKPENIPQPISNTSRANLNKLLTDYTEMKKAILHVYWEEFQKDPVGLMSRVAQPASKKIDQNKLKPEMDEKGNLTTAGFACSQCGQPLFVYKLEQVSEKGKAYTNYFGRCNVAEHEKLILLAQLKPEKDSDEAVTYSLGKFGQRALDFYSIHVTKESTHPVKPLAQIAGNRYASGPVGKALSDACMGTIASFLSKYQDIIIEHQKVVKGNQKRLESLRELAGKENLEYPSVTLPPQPHTKEGVDAYNEVIARVRMWVNLNLWQKLKLSRDDAKPLLRLKGFPSFPLVERQANEVDWWDMVCNVKKLINEKKEDGKVFWQNLAGYKRQEALRPYLSSEEDRKKGKKFARYQLGDLLLHLEKKHGEDWGKVYDEAWERIDKKVEGLSKHIKLEEERRSEDAQSKAALTDWLRAKASFVIEGLKEADKDEFCRCELKLQKWYGDLRGKPFAIEAENSILDISGFSKQYNCAFIWQKDGVKKLNLYLIINYFKGGKLRFKKIKPEAFEANRFYTVINKKSGEIVPMEVNFNFDDPNLIILPLAFGKRQGREFIWNDLLSLETGSLKLANGRVIEKTLYNRRTRQDEPALFVALTFERREVLDSSNIKPMNLIGVDRGENIPAVIALTDPEGMPLSRFKDSLGNPTHILRIGESYKEKQRTIQAKKEVEQRRAGGYSRKYASKAKNLADDMVRNTARDLLYYAVTQDAMLIFENLSRGFGRQGKRTFMAERQYTRMEDWLTAKLAYEGLPSKTYLSKTLAQYTSKTCSNCGFTITSADYDRVLEKLKKTATGWMTTINGKELKVEGQITYYNRYKRQNVVKDLSVELDRLSEESVNNDISSWTKGRSGEALSLLKKRFSHRPVQEKFVCLNCGFETHADEQAALNIARSWLFLRSQEYKKYQTNKTTGNTDKRAFVETWQSFYRKKLKEVWKPAV

SEQ ID NO: 25671 - protein, 978 aa, synthetic construct
  REGION 1..978: note = engineered CasX variant
QEIKRINKIRRRLVKDSNTKKAGKTGPMKTLLVRVMTPDLRERLENLRKKPENIPQPISNTSRANLNKLLTDYTEMKKAILHVYWEEFQKDPVGLMSRVAQPASKKIDQNKLKPEMDEKGNLTTAGFACSQCGQPLFVYKLEQVSEKGKAYTNYFGRCNVAEHEKLILLAQLKPEKDSDEAVTYSLGKFGQRALDFYSIHVTKESTHPVKPLAQIAGNRYASGPVGKALSDACMGTIASFLSKYQDIIIEHQKVVKGNQKRLESLRELAGKENLEYPSVTLPPQPHTKEGVDAYNEVIARVRMWVNLNLWQKLKLSRDDAKPLLRLKGFPSFPLVERQANEVDWWDMVCNVKKLINEKKEDGKVFWQNLAGYKRQEALRPYLSSEEDRKKGKKFARYQLGDLLLHLEKKHGEDWGKVYDEAWERIDKKVEGLSKHIKLEEERRSEDAQSKAALTDWLRAKASFVIEGLKEADKDEFCRCELKLQKWYGDLRGKPFAIEAENSILDISGFSKQYNCAFIWQKDGVKKLNLYLIINYFKGGKLRFKKIKPEAFEANRFYTVINKKSGEIVPMEVNFNFDDPNLIILPLAFGKRQGREFIWNDLLSLETGSLKLANGRVIEKTLYNRRTRQDEPALFVALTFERREVLDSSNIKPMNLIGVDRGENIPAVIALTDPEGMPLSRFKDSLGNPTHILRIGESYKEKQRTIQAKKEVEQLRAGGYSRKYASKAKNLADDMVRNTARDLLYYAVTQDAMLIFENLSRGFGRQGKRTFMAERQYTRMEDWLTAKLAYEGLPSKTYLSKTLAQYTSKTCSNCGFTITSADYDRVLEKLKKTATGWMTTINGKELKVEGQITYYNRYKRQNVVKDLSVELDRLSEESVNNDISSWTKGRSGEALSLLKKRFSHRPVQEKFVCLNCGFETHADEQAALNIARSWLFLRSQEYKKYQTNKTTGNTDKRAFVETWQSFYRKKLKEVWKPAV

SEQ ID NO: 25672 - protein, 978 aa, synthetic construct
  REGION 1..978: note = engineered CasX variant
QEIKRINKIRRRLVKDSNTKKAGKTGPMKTLLVRVMTPDLRERLENLRKKPENIPQPISNTSRANLNKLLTDYTEMKKAILHVYWEEFQKDPVGLMSRVAQPASKKIDQNKLKPEMDEKGNLTTAGFACSQCGQPLFVYKLEQVSEKGKAYTNYFGRCNVAEHEKLILLAQLKPEKDSDEAVTYSLGKFGQRALDFYSIHVTKESTHPVKPLAQIAGNRYASGPVGKALSDACMGTIASFLSKYQDIIIEHQKVVKGNQKRLESLRELAGKENLEYPSVTLPPQPHTKEGVDAYNEVIARVRMWVNLNLWQKLKLSRDDAKPLLRLKGFPSFPLVERQANEVDWWDMVCNVKKLINEKKEDGKVFWQNLAGYKRQEALRPYLSSEEDRKKGKKFARYQLGDLLLHLEKKHGEDWGKVYDEAWERIDKKVEGLSKHIKLEEERRSEDAQSKAALTDWLRAKASFVIEGLKEADKDEFCRCELKLQKWYGDLRGKPFAIEAENSILDISGFSKQYNCAFIWQKDGVKKLNLYLIINYFKGGKLRFKKIKPEAFEANRFYTVINKKSGEIVPMEVNFNFDDPNLIILPLAFGKRQGREFIWNDLLSLETGSLKLANGRVIEKTLYNRRTRQDEPALFVALTFERREVLDSSNIKPMNLIGVDRGENIPAVIALTDPEGMPLSRFKDSLGNPTHILRIGESYKEKQRTIQAKKEHEQRRAGGYSRKYASKAKNLADDMVRNTARDLLYYAVTQDAMLIFENLSRGFGRQGKRTFMAERQYTRMEDWLTAKLAYEGLPSKTYLSKTLAQYTSKTCSNCGFTITSADYDRVLEKLKKTATGWMTTINGKELKVEGQITYYNRYKRQNVVKDLSVELDRLSEESVNNDISSWTKGRSGEALSLLKKRFSHRPVQEKFVCLNCGFETHADEQAALNIARSWLFLRSQEYKKYQTNKTTGNTDKRAFVETWQSFYRKKLKEVWKPAV

SEQ ID NO: 25673 - protein, 978 aa, synthetic construct
  REGION 1..978: note = engineered CasX variant
QEIKRINKIRRRLVKDSNTKKAGKTGPMKTLLVRVMTPDLRERLENLRKKPENIPQPISNTSRANLNKLLTDYTEMKKAILHVYWEEFQKDPVGLMSRVAQPASKKIDQNKLKPEMDEKGNLTTAGFACSQCGQPLFVYKLEQVSEKGKAYTNYFGRCNVAEHEKLILLAQLKPEKDSDEAVTYSLGKFGQRALDFYSIHVTKESTHPVKPLAQIAGNRYASGPVGKALSDACMGTIASFLSKYQDIIIEHQKVVKGNQKRLESLRELAGKENLEYPSVTLPPQPHTKEGVDAYNEVIARVRMWVNLNLWQKLKLSRDDAKPLLRLKGFPSFPLVERQANEVDWWDMVCNVKKLINEKKEDGKVFWQNLAGYKRQEALRPYLSSEEDRKKGKKFARYQLGDLLLHLEKKHGEDWGKVYDEAWERIDKKVEGLSKHIKLEEERRSEDAQSKAALTDWLRAKASFVIEGLKEADKDEFCRCELKLQKWYGDLRGKPFAIEAENSILDISGFSKQYNCAFIWQKDGVKKLNLYLIINYFKGGKLRFKKIKPEAFEANRFYTVINKKSGEIVPMEVNFNFDDPNLIILPLAFGKRQGREFIWNDLLSLETGSLKLANGRVIEKTLYNRRTRQDEPALFVALTFERREVLDSSNIKPMNLIGVDRGENIPAVIALTDPEGMPLSRFKDNLGNPTHILRIGESYKEKQRTIQAKKEVEQRRAGGYSRKYASKAKNLADDMVRNTARDLLYYAVTQDAMLIFENLSRGFGRQGKRTFMAERQYTRMEDWLTAKLAYEGLPSKTYLSKTLAQYTSKTCSNCGFTITSADYDRVLEKLKKTATGWMTTINGKELKVEGQITYYNRYKRQNVVKDLSVELDRLSEESVNNDISSWTKGRSGEALSLLKKRFSHRPVQEKFVCLNCGFETHADEQAALNIARSWLFLRSQEYKKYQTNKTTGNTDKRAFVETWQSFYRKKLKEVWKPAV

SEQ ID NO: 25674 - protein, 978 aa, synthetic construct
  REGION 1..978: note = engineered CasX variant
QEIKRINKIRRRLVKDSNTKKAGKTGPMKTLLVRVMTPDLRERLENLRKKPENIPQPISNTSRANLNKLLTDYTEMKKAILHVYWEEFQKDPVGLMSRVAQPASKKIDQNKLKPEMDEKGNLTTAGFACSQCGQPLFVYKLEQVSEKGKAYTNYFGRCNVAEHEKLILLAQLKPEKDSDEAVTYSLGKFGQRALDFYSIHVTKESTHPVKPLAQIAGNRYASGPVGKALSDACMGTIASFLSKYQDIIIEHQKVVKGNQKRLESLRELAGKENLEYPSVTLPPQPHTKEGVDAYNEVIARVRMWVNLNLWQKLKLSRDDAKPLLRLKGFPSFPLVERQANEVDWWDMVCNVKKLINEKKEDGKVFWQNLAGYKRQEALRPYLSSEEDRKKGKKFARYQLGDLLLHLEKKHGEDWGKVYDEAWERIDKKVEGLSKHIKLEEERRSEDAQSKAALTDWLRAKASFVIEGLKEADKDEFCRCELKLQKWYGDLRGKPFAIEAENSILDISGFSKQYNCAFIWQKDGVKKLNLYLIINYFKGGKLRFKKIKPEAFEANRFYTVINKKSGEIVPMEVNFNFDDPNLIILPLAFGKRQGREFIWNDLLSLETGSLKLANGRVIEKTLYNRRTRQDEPALFVALTFERREVLDSSNIKPMNLIGVDRGENIPAVIALTDPEGMPLSRFKDHLGNPTHILRIGESYKEKQRTIQAKKEVEQRRAGGYSRKYASKAKNLADDMVRNTARDLLYYAVTQDAMLIFENLSRGFGRQGKRTFMAERQYTRMEDWLTAKLAYEGLPSKTYLSKTLAQYTSKTCSNCGFTITSADYDRVLEKLKKTATGWMTTINGKELKVEGQITYYNRYKRQNVVKDLSVELDRLSEESVNNDISSWTKGRSGEALSLLKKRFSHRPVQEKFVCLNCGFETHADEQAALNIARSWLFLRSQEYKKYQTNKTTGNTDKRAFVETWQSFYRKKLKEVWKPAV

SEQ ID NO: 25675 - protein, 978 aa, synthetic construct
  REGION 1..978: note = engineered CasX variant
QEIKRINKIRRRLVKDSNTKKAGKTGPMKTLLVRVMTPDLRERLENLRKKPENIPQPISNTSRANLNKLLTDYTEMKKAILHVYWEEFQKDPVGLMSRVAQPASKKIDQNKLKPEMDEKGNLTTAGFACSQCGQPLFVYKLEQVSEKGKAYTNYFGRCNVAEHEKLILLAQLKPEKDSDEAVTYSLGKFGQRALDFYSIHVTKESTHPVKPLAQIAGNRYASGPVGKALSDACMGTIASFLSKYQDIIIEHQKVVKGNQKRLESLRELAGKENLEYPSVTLPPQPHTKEGVDAYNEVIARVRMWVNLNLWQKLKLSRDDAKPLLRLKGFPSFPLVERQANEVDWWDMVCNVKKLINEKKEDGKVFWQNLAGYKRQEALRPYLSSEEDRKKGKKFARYQLGDLLLHLEKKHGEDWGKVYDEAWERIDKKVEGLSKHIKLEEERRSEDAQSKAALTDWLRAKASFVIEGLKEADKDEFCRCELKLQKWYGDLRGKPFAIEAENSILDISGFSKQYNCAFIWQKDGVKKLNLYLIINYFKGGKLRFKKIKPEAFEANRFYTVINKKSGEIVPMEVNFNFDDPNLIILPLAFGKRQGREFIWNDLLSLETGSLKLANGRVIEKTLYNRRTRQDEPALFVALTFERREVLDSSNIKPMNLIGVDRGENIPAVIALTDPEGMPLSRFKDHLGNPTHILRIGESYKEKQRTIQAKKEHEQRRAGGYSRKYASKAKNLADDMVRNTARDLLYYAVTQDAMLIFENLSRGFGRQGKRTFMAERQYTRMEDWLTAKLAYEGLPSKTYLSKTLAQYTSKTCSNCGFTITSADYDRVLEKLKKTATGWMTTINGKELKVEGQITYYNRYKRQNVVKDLSVELDRLSEESVNNDISSWTKGRSGEALSLLKKRFSHRPVQEKFVCLNCGFETHADEQAALNIARSWLFLRSQEYKKYQTNKTTGNTDKRAFVETWQSFYRKKLKEVWKPAV

SEQ ID NO: 25676 - protein, 978 aa, synthetic construct
  REGION 1..978: note = engineered CasX variant
QEIKRINKIRRRLVKDSNTKKAGKTGPMKTLLVRVMTPDLRERLENLRKKPENIPQPISNTSRANLNKLLTDYTEMKKAILHVYWEEFQKDPVGLMSRVAQPASKKIDQNKLKPEMDEKGNLTTAGFACSQCGQPLFVYKLEQVSEKGKAYTNYFGRCNVAEHEKLILLAQLKPEKDSDEAVTYSLGKFGQRALDFYSIHVTKESTHPVKPLAQIAGNRYASGPVGKALSDACMGTIASFLSKYQDIIIEHQKVVKGNQKRLESLRELAGKENLEYPSVTLPPQPHTKEGVDAYNEVIARVRMWVNLNLWQKLKLSRDDAKPLLRLKGFPSFPLVERQANEVDWWDMVCNVKKLINEKKEDGKVFWQNLAGYKRQEALRPYLSSEEDRKKGKKFARYQLGDLLLHLEKKHGEDWGKVYDEAWERIDKKVEGLSKHIKLEEERRSEDAQSKAALTDWLRAKASFVIEGLKEADKDEFCRCELKLQKWYGDLRGKPFAIEAENSILDISGFSKQYNCAFIWQKDGVKKLNLYLIINYFKGGKLRFKKIKPEAFEANRFYTVINKKSGEIVPMEVNFNFDDPNLIILPLAFGKRQGREFIWNDLLSLETGSLKLANGRVIEKTLYNRRTRQDEPALFVALTFERREVLDSSNIKPMNLIGVDRGENIPAVIALTDPEGLPLSRFKDSLGNPTHILRIGESYKEKQRTIQAKKEVEQRRAGGYSRKYASKAKNLADDMVRNTARDLLYYAVTQDAMLIFENLSRGFGRQGKRTFMAERQYTRMEDWLTAKLAYEGLPSKTYLSKTLAQYTSKTCSNCGFTITSADYDRVLEKLKKTATGWMTTINGKELKVEGQITYYNRYKRQNVVKDLSVELDRLSEESVNNDISSWTKGRSGEALSLLKKRFSHRPVQEKFVCLNCGFETHADEQAALNIARSWLFLRSQEYKKYQTNKTTGNTDKRAFVETWQSFYRKKLKEVWKPAV

SEQ ID NO: 25677 - protein, 978 aa, synthetic construct
  REGION 1..978: note = engineered CasX variant
QEIKRINKIRRRLVKDSNTKKAGKTGPMKTLLVRVMTPDLRERLENLRKKPENIPQPISNTSRANLNKLLTDYTEMKKAILHVYWEEFQKDPVGLMSRVAQPASKKIDQNKLKPEMDEKGNLTTAGFACSQCGQPLFVYKLEQVSEKGKAYTNYFGRCNVAEHEKLILLAQLKPEKDSDEAVTYSLGKFGQRALDFYSIHVTKESTHPVKPLAQIAGNRYASGPVGKALSDACMGTIASFLSKYQDIIIEHQKVVKGNQKRLESLRELAGKENLEYPSVTLPPQPHTKEGVDAYNEVIARVRMWVNLNLWQKLKLSRDDAKPLLRLKGFPSFPLVERQANEVDWWDMVCNVKKLINEKKEDGKVFWQNLAGYKRQEALRPYLSSEEDRKKGKKFARYQLGDLLLHLEKKHGEDWGKVYDEAWERIDKKVEGLSKHIKLEEERRSEDAQSKAALTDWLRAKASFVIEGLKEADKDEFCRCELKLQKWYGDLRGKPFAIEAENSILDISGFSKQYNCAFIWQKDGVKKLNLYLIINYFKGGKLRFKKIKPEAFEANRFYTVINKKSGEIVPMEVNFNFDDPNLIILPLAFGKRQGREFIWNDLLSLETGSLKLANGRVIEKTLYNRRTRQDEPALFVALTFERREVLDSSNIKPMNLIGVDRGENIPAVIALTDPEGLPLSRFKDSLGNPTHILRIGESYKEKQRTIQAKKEAEQRRAGGYSRKYASKAKNLADDMVRNTARDLLYYAVTQDAMLIFENLSRGFGRQGKRTFMAERQYTRMEDWLTAKLAYEGLPSKTYLSKTLAQYTSKTCSNCGFTITSADYDRVLEKLKKTATGWMTTINGKELKVEGQITYYNRYKRQNVVKDLSVELDRLSEESVNNDISSWTKGRSGEALSLLKKRFSHRPVQEKFVCLNCGFETHADEQAALNIARSWLFLRSQEYKKYQTNKTTGNTDKRAFVETWQSFYRKKLKEVWKPAV

SEQ ID NO: 25678 - protein, 978 aa, synthetic construct
  REGION 1..978: note = engineered CasX variant
QEIKRINKIRRRLVKDSNTKKAGKTGPMKTLLVRVMTPDLRERLENLRKKPENIPQPISNTSRANLNKLLTDYTEMKKAILHVYWEEFQKDPVGLMSRVAQPASKKIDQNKLKPEMDEKGNLTTAGFACSQCGQPLFVYKLEQVSEKGKAYTNYFGRCNVAEHEKLILLAQLKPEKDSDEAVTYSLGKFGQRALDFYSIHVTKESTHPVKPLAQIAGNRYASGPVGKALSDACMGTIASFLSKYQDIIIEHQKVVKGNQKRLESLRELAGKENLEYPSVTLPPQPHTKEGVDAYNEVIARVRMWVNLNLWQKLKLSRDDAKPLLRLKGFPSFPLVERQANEVDWWDMVCNVKKLINEKKEDGKVFWQNLAGYKRQEALRPYLSSEEDRKKGKKFARYQLGDLLLHLEKKHGEDWGKVYDEAWERIDKKVEGLSKHIKLEEERRSEDAQSKAALTDWLRAKASFVIEGLKEADKDEFCRCELKLQKWYGDLRGKPFAIEAENSILDISGFSKQYNCAFIWQKDGVKKLNLYLIINYFKGGKLRFKKIKPEAFEANRFYTVINKKSGEIVPMEVNFNFDDPNLIILPLAFGKRQGREFIWNDLLSLETGSLKLANGRVIEKTLYNRRTRQDEPALFVALTFERREVLDSSNIKPMNLIGVDRGENIPAVIALTDPEGLPLSRFKDSLGNPTHILRIGESYKEKQRFIQAKKEVEQRRAGGYSRKYASKAKNLADDMVRNTARDLLYYAVTQDAMLIFENLSRGFGRQGKRTFMAERQYTRMEDWLTAKLAYEGLPSKTYLSKTLAQYTSKTCSNCGFTITSADYDRVLEKLKKTATGWMTTINGKELKVEGQITYYNRYKRQNVVKDLSVELDRLSEESVNNDISSWTKGRSGEALSLLKKRFSHRPVQEKFVCLNCGFETHADEQAALNIARSWLFLRSQEYKKYQTNKTTGNTDKRAFVETWQSFYRKKLKEVWKPAV

SEQ ID NO: 25679 - protein, 978 aa, synthetic construct
  REGION 1..978: note = engineered CasX variant
QEIKRINKIRRRLVKDSNTKKAGKTGPMKTLLVRVMTPDLRERLENLRKKPENIPQPISNTSRANLNKLLTDYTEMKKAILHVYWEEFQKDPVGLMSRVAQPASKKIDQNKLKPEMDEKGNLTTAGFACSQCGQPLFVYKLEQVSEKGKAYTNYFGRCNVAEHEKLILLAQLKPEKDSDEAVTYSLGKFGQRALDFYSIHVTKESTHPVKPLAQIAGNRYASGPVGKALSDACMGTIASFLSKYQDIIIEHQKVVKGNQKRLESLRELAGKENLEYPSVTLPPQPHTKEGVDAYNEVIARVRMWVNLNLWQKLKLSRDDAKPLLRLKGFPSFPLVERQANEVDWWDMVCNVKKLINEKKEDGKVFWQNLAGYKRQEALRPYLSSEEDRKKGKKFARYQLGDLLLHLEKKHGEDWGKVYDEAWERIDKKVEGLSKHIKLEEERRSEDAQSKAALTDWLRAKASFVIEGLKEADKDEFCRCELKLQKWYGDLRGKPFAIEAENSILDISGFSKQYNCAFIWQKDGVKKLNLYLIINYFKGGKLRFKKIKPEAFEANRFYTVINKKSGEIVPMEVNFNFDDPNLIILPLAFGKRQGREFIWNDLLSLETGSLKLANGRVIEKTLYNRRTRQDEPALFVALTFERREVLDSSNIKPMNLIGVDRGENIPAVIALTDPEGLPLSRFKDSLGNPTHILRIGESYKEKQRFIQAKKEAEQRRAGGYSRKYASKAKNLADDMVRNTARDLLYYAVTQDAMLIFENLSRGFGRQGKRTFMAERQYTRMEDWLTAKLAYEGLPSKTYLSKTLAQYTSKTCSNCGFTITSADYDRVLEKLKKTATGWMTTINGKELKVEGQITYYNRYKRQNVVKDLSVELDRLSEESVNNDISSWTKGRSGEALSLLKKRFSHRPVQEKFVCLNCGFETHADEQAALNIARSWLFLRSQEYKKYQTNKTTGNTDKRAFVETWQSFYRKKLKEVWKPAV

SEQ ID NO: 25680 - protein, 978 aa, synthetic construct
  REGION 1..978: note = engineered CasX variant
QEIKRINKIRRRLVKDSNTKKAGKTGPMKTLLVRVMTPDLRERLENLRKKPENIPQPISNTSRANLNKLLTDYTEMKKAILHVYWEEFQKDPVGLMSRVAQPASKKIDQNKLKPEMDEKGNLTTAGFACSQCGQPLFVYKLEQVSEKGKAYTNYFGRCNVAEHEKLILLAQLKPEKDSDEAVTYSLGKFGQRALDFYSIHVTKESTHPVKPLAQIAGNRYASGPVGKALSDACMGTIASFLSKYQDIIIEHQKVVKGNQKRLESLRELAGKENLEYPSVTLPPQPHTKEGVDAYNEVIARVRMWVNLNLWQKLKLSRDDAKPLLRLKGFPSFPLVERQANEVDWWDMVCNVKKLINEKKEDGKVFWQNLAGYKRQEALRPYLSSEEDRKKGKKFARYQLGDLLLHLEKKHGEDWGKVYDEAWERIDKKVEGLSKHIKLEEERRSEDAQSKAALTDWLRAKASFVIEGLKEADKDEFCRCELKLQKWYGDLRGKPFAIEAENSILDISGFSKQYNCAFIWQKDGVKKLNLYLIINYFKGGKLRFKKIKPEAFEANRFYTVINKKSGEIVPMEVNFNFDDPNLIILPLAFGKRQGREFIWNDLLSLETGSLKLANGRVIEKTLYNRRTRQDEPALFVALTFERREVLDSSNIKPMNLIGVDRGENIPAVIALTDPEGKPLSRFKDYLGNPTHILRIGESYKEKQRTIQAKKEVEQRRAGGYSRKYASKAKNLADDMVRNTARDLLYYAVTQDAMLIFENLSRGFGRQGKRTFMAERQYTRMEDWLTAKLAYEGLPSKTYLSKTLAQYTSKTCSNCGFTITSADYDRVLEKLKKTATGWMTTINGKELKVEGQITYYNRYKRQNVVKDLSVELDRLSEESVNNDISSWTKGRSGEALSLLKKRFSHRPVQEKFVCLNCGFETHADEQAALNIARSWLFLRSQEYKKYQTNKTTGNTDKRAFVETWQSFYRKKLKEVWKPAV

SEQ ID NO: 25681 - protein, 978 aa, synthetic construct
  REGION 1..978: note = engineered CasX variant
QEIKRINKIRRRLVKDSNTKKAGKTGPMKTLLVRVMTPDLRERLENLRKKPENIPQPISNTSRANLNKLLTDYTEMKKAILHVYWEEFQKDPVGLMSRVAQPASKKIDQNKLKPEMDEKGNLTTAGFACSQCGQPLFVYKLEQVSEKGKAYTNYFGRCNVAEHEKLILLAQLKPEKDSDEAVTYSLGKFGQRALDFYSIHVTKESTHPVKPLAQIAGNRYASGPVGKALSDACMGTIASFLSKYQDIIIEHQKVVKGNQKRLESLRELAGKENLEYPSVTLPPQPHTKEGVDAYNEVIARVRMWVNLNLWQKLKLSRDDAKPLLRLKGFPSFPLVERQANEVDWWDMVCNVKKLINEKKEDGKVFWQNLAGYKRQEALRPYLSSEEDRKKGKKFARYQLGDLLLHLEKKHGEDWGKVYDEAWERIDKKVEGLSKHIKLEEERRSEDAQSKAALTDWLRAKASFVIEGLKEADKDEFCRCELKLQKWYGDLRGKPFAIEAENSILDISGFSKQYNCAFIWQKDGVKKLNLYLIINYFKGGKLRFKKIKPEAFEANRFYTVINKKSGEIVPMEVNFNFDDPNLIILPLAFGKRQGREFIWNDLLSLETGSLKLANGRVIEKTLYNRRTRQDEPALFVALTFERREVLDSSNIKPMNLIGVDRGENIPAVIALTDPEGKPLSRFKDSLGNSTHILRIGESYKEKQRTIQAKKEVEQRRAGGYSRKYASKAKNLADDMVRNTARDLLYYAVTQDAMLIFENLSRGFGRQGKRTFMAERQYTRMEDWLTAKLAYEGLPSKTYLSKTLAQYTSKTCSNCGFTITSADYDRVLEKLKKTATGWMTTINGKELKVEGQITYYNRYKRQNVVKDLSVELDRLSEESVNNDISSWTKGRSGEALSLLKKRFSHRPVQEKFVCLNCGFETHADEQAALNIARSWLFLRSQEYKKYQTNKTTGNTDKRAFVETWQSFYRKKLKEVWKPAV

SEQ ID NO: 25682 - protein, 978 aa, synthetic construct
  REGION 1..978: note = engineered CasX variant
QEIKRINKIRRRLVKDSNTKKAGKTGPMKTLLVRVMTPDLRERLENLRKKPENIPQPISNTSRANLNKLLTDYTEMKKAILHVYWEEFQKDPVGLMSRVAQPASKKIDQNKLKPEMDEKGNLTTAGFACSQCGQPLFVYKLEQVSEKGKAYTNYFGRCNVAEHEKLILLAQLKPEKDSDEAVTYSLGKFGQRALDFYSIHVTKESTHPVKPLAQIAGNRYASGPVGKALSDACMGTIASFLSKYQDIIIEHQKVVKGNQKRLESLRELAGKENLEYPSVTLPPQPHTKEGVDAYNEVIARVRMWVNLNLWQKLKLSRDDAKPLLRLKGFPSFPLVERQANEVDWWDMVCNVKKLINEKKEDGKVFWQNLAGYKRQEALRPYLSSEEDRKKGKKFARYQLGDLLLHLEKKHGEDWGKVYDEAWERIDKKVEGLSKHIKLEEERRSEDAQSKAALTDWLRAKASFVIEGLKEADKDEFCRCELKLQKWYGDLRGKPFAIEAENSILDISGFSKQYNCAFIWQKDGVKKLNLYLIINYFKGGKLRFKKIKPEAFEANRFYTVINKKSGEIVPMEVNFNFDDPNLIILPLAFGKRQGREFIWNDLLSLETGSLKLANGRVIEKTLYNRRTRQDEPALFVALTFERREVLDSSNIKPMNLIGVDRGENIPAVIALTDPEGKPLSRFKDSLGNPTHVLRIGESYKEKQRTIQAKKEVEQRRAGGYSRKYASKAKNLADDMVRNTARDLLYYAVTQDAMLIFENLSRGFGRQGKRTFMAERQYTRMEDWLTAKLAYEGLPSKTYLSKTLAQYTSKTCSNCGFTITSADYDRVLEKLKKTATGWMTTINGKELKVEGQITYYNRYKRQNVVKDLSVELDRLSEESVNNDISSWTKGRSGEALSLLKKRFSHRPVQEKFVCLNCGFETHADEQAALNIARSWLFLRSQEYKKYQTNKTTGNTDKRAFVETWQSFYRKKLKEVWKPAV

SEQ ID NO: 25683 - protein, 978 aa, synthetic construct
  REGION 1..978: note = engineered CasX variant
QEIKRINKIRRRLVKDSNTKKAGKTGPMKTLLVRVMTPDLRERLENLRKKPENIPQPISNTSRANLNKLLTDYTEMKKAILHVYWEEFQKDPVGLMSRVAQPASKKIDQNKLKPEMDEKGNLTTAGFACSQCGQPLFVYKLEQVSEKGKAYTNYFGRCNVAEHEKLILLAQLKPEKDSDEAVTYSLGKFGQRALDFYSIHVTKESTHPVKPLAQIAGNRYASGPVGKALSDACMGTIASFLSKYQDIIIEHQKVVKGNQKRLESLRELAGKENLEYPSVTLPPQPHTKEGVDAYNEVIARVRMWVNLNLWQKLKLSRDDAKPLLRLKGFPSFPLVERQANEVDWWDMVCNVKKLINEKKEDGKVFWQNLAGYKRQEALRPYLSSEEDRKKGKKFARYQLGDLLLHLEKKHGEDWGKVYDEAWERIDKKVEGLSKHIKLEEERRSEDAQSKAALTDWLRAKASFVIEGLKEADKDEFCRCELKLQKWYGDLRGKPFAIEAENSILDISGFSKQYNCAFIWQKDGVKKLNLYLIINYFKGGKLRFKKIKPEAFEANRFYTVINKKSGEIVPMEVNFNFDDPNLIILPLAFGKRQGREFIWNDLLSLETGSLKLANGRVIEKTLYNRRTRQDEPALFVALTFERREVLDSSNIKPMNLIGVDRGENIPAVIALTDPEGKPLSRFKDSLGNPTHILRIGNSYKEKQRTIQAKKEVEQRRAGGYSRKYASKAKNLADDMVRNTARDLLYYAVTQDAMLIFENLSRGFGRQGKRTFMAERQYTRMEDWLTAKLAYEGLPSKTYLSKTLAQYTSKTCSNCGFTITSADYDRVLEKLKKTATGWMTTINGKELKVEGQITYYNRYKRQNVVKDLSVELDRLSEESVNNDISSWTKGRSGEALSLLKKRFSHRPVQEKFVCLNCGFETHADEQAALNIARSWLFLRSQEYKKYQTNKTTGNTDKRAFVETWQSFYRKKLKEVWKPAV

SEQ ID NO: 25684 - protein, 978 aa, synthetic construct
  REGION 1..978: note = engineered CasX variant
QEIKRINKIRRRLVKDSNTKKAGKTGPMKTLLVRVMTPDLRERLENLRKKPENIPQPISNTSRANLNKLLTDYTEMKKAILHVYWEEFQKDPVGLMSRVAQPASKKIDQNKLKPEMDEKGNLTTAGFACSQCGQPLFVYKLEQVSEKGKAYTNYFGRCNVAEHEKLILLAQLKPEKDSDEAVTYSLGKFGQRALDFYSIHVTKESTHPVKPLAQIAGNRYASGPVGKALSDACMGTIASFLSKYQDIIIEHQKVVKGNQKRLESLRELAGKENLEYPSVTLPPQPHTKEGVDAYNEVIARVRMWVNLNLWQKLKLSRDDAKPLLRLKGFPSFPLVERQANEVDWWDMVCNVKKLINEKKEDGKVFWQNLAGYKRQEALRPYLSSEEDRKKGKKFARYQLGDLLLHLEKKHGEDWGKVYDEAWERIDKKVEGLSKHIKLEEERRSEDAQSKAALTDWLRAKASFVIEGLKEADKDEFCRCELKLQKWYGDLRGKPFAIEAENSILDISGFSKQYNCAFIWQKDGVKKLNLYLIINYFKGGKLRFKKIKPEAFEANRFYTVINKKSGEIVPMEVNFNFDDPNLIILPLAFGKRQGREFIWNDLLSLETGSLKLANGRVIEKTLYNRRTRQDEPALFVALTFERREVLDSSNIKPMNLIGVDRGENIPAVIALTDPEGKPLSRFKDSLGNPTHILRIGESYREKQRTIQAKKEVEQRRAGTYSRKYASKAKNLADDMVRNTARDLLYYAVTQDAMLIFENLSRGFGRQGKRTFMAERQYTRMEDWLTAKLAYEGLPSKTYLSKTLAQYTSKTCSNCGFTITSADYDRVLEKLKKTATGWMTTINGKELKVEGQITYYNRYKRQNVVKDLSVELDRLSEESVNNDISSWTKGRSGEALSLLKKRFSHRPVQEKFVCLNCGFETHADEQAALNIARSWLFLRSQEYKKYQTNKTTGNTDKRAFVETWQSFYRKKLKEVWKPAV

SEQ ID NO: 25685 - protein, 978 aa, synthetic construct
  REGION 1..978: note = engineered CasX variant
QEIKRINKIRRRLVKDSNTKKAGKTGPMKTLLVRVMTPDLRERLENLRKKPENIPQPISNTSRANLNKLLTDYTEMKKAILHVYWEEFQKDPVGLMSRVAQPASKKIDQNKLKPEMDEKGNLTTAGFACSQCGQPLFVYKLEQVSEKGKAYTNYFGRCNVAEHEKLILLAQLKPEKDSDEAVTYSLGKFGQRALDFYSIHVTKESTHPVKPLAQIAGNRYASGPVGKALSDACMGTIASFLSKYQDIIIEHQKVVKGNQKRLESLRELAGKENLEYPSVTLPPQPHTKEGVDAYNEVIARVRMWVNLNLWQKLKLSRDDAKPLLRLKGFPSFPLVERQANEVDWWDMVCNVKKLINEKKEDGKVFWQNLAGYKRQEALRPYLSSEEDRKKGKKFARYQLGDLLLHLEKKHGEDWGKVYDEAWERIDKKVEGLSKHIKLEEERRSEDAQSKAALTDWLRAKASFVIEGLKEADKDEFCRCELKLQKWYGDLRGKPFAIEAENSILDISGFSKQYNCAFIWQKDGVKKLNLYLIINYFKGGKLRFKKIKPEAFEANRFYTVINKKSGEIVPMEVNFNFDDPNLIILPLAFGKRQGREFIWNDLLSLETGSLKLANGRVIEKTLYNRRTRQDEPALFVALTFERREVLDSSNIKPMNLIGVDRGENIPAVIALTDPEGKPLSRFKDSLGNPTHILRIGESYREKQRTIQAKKEVEQRRAGGYSRKYASKAKNLADDMVRNTARDLLYYAVTQDAMLIFENLSRGFGRQGKRTFMAERQYTRMEDWLTAKLAYEGLPSKTYLSKTLAQYTSKTCSNCGFTITSADYDRVLEKLKKTATGWMTTINGKELKVEGQITYYNRYKRQNVVKDLSVELDRLSEESVNNDISSWTKGRSGEALSLLKKRFSHRPVQEKFVCLNCGFETHADEQAALNIARSWLFLRSQEYKKYQTNKTTGNTDKRAFVETWQSFYRKKLKEVWKPAV

SEQ ID NO: 25686 - protein, 978 aa, synthetic construct
  REGION 1..978: note = engineered CasX variant
QEIKRINKIRRRLVKDSNTKKAGKTGPMKTLLVRVMTPDLRERLENLRKKPENIPQPISNTSRANLNKLLTDYTEMKKAILHVYWEEFQKDPVGLMSRVAQPASKKIDQNKLKPEMDEKGNLTTAGFACSQCGQPLFVYKLEQVSEKGKAYTNYFGRCNVAEHEKLILLAQLKPEKDSDEAVTYSLGKFGQRALDFYSIHVTKESTHPVKPLAQIAGNRYASGPVGKALSDACMGTIASFLSKYQDIIIEHQKVVKGNQKRLESLRELAGKENLEYPSVTLPPQPHTKEGVDAYNEVIARVRMWVNLNLWQKLKLSRDDAKPLLRLKGFPSFPLVERQANEVDWWDMVCNVKKLINEKKEDGKVFWQNLAGYKRQEALRPYLSSEEDRKKGKKFARYQLGDLLLHLEKKHGEDWGKVYDEAWERIDKKVEGLSKHIKLEEERRSEDAQSKAALTDWLRAKASFVIEGLKEADKDEFCRCELKLQKWYGDLRGKPFAIEAENSILDISGFSKQYNCAFIWQKDGVKKLNLYLIINYFKGGKLRFKKIKPEAFEANRFYTVINKKSGEIVPMEVNFNFDDPNLIILPLAFGKRQGREFIWNDLLSLETGSLKLANGRVIEKTLYNRRTRQDEPALFVALTFERREVLDSSNIKPMNLIGVDRGENIPAVIALTDPEGKPLSRFKDSLGNPTHILRIGESYKEKQRTIQAKKEVEQRRCGGYSRKYASKAKNLADDMVRNTARDLLYYAVTQDAMLIFENLSRGFGRQGKRTFMAERQYTRMEDWLTAKLAYEGLPSKTYLSKTLAQYTSKTCSNCGFTITSADYDRVLEKLKKTATGWMTTINGKELKVEGQITYYNRYKRQNVVKDLSVELDRLSEESVNNDISSWTKGRSGEALSLLKKRFSHRPVQEKFVCLNCGFETHADEQAALNIARSWLFLRSQEYKKYQTNKTTGNTDKRAFVETWQSFYRKKLKEVWKPAV

SEQ ID NO: 25687 - protein, 978 aa, synthetic construct
  REGION 1..978: note = engineered CasX variant
QEIKRINKIRRRLVKDSNTKKAGKTGPMKTLLVRVMTPDLRERLENLRKKPENIPQPISNTSRANLNKLLTDYTEMKKAILHVYWEEFQKDPVGLMSRVAQPASKKIDQNKLKPEMDEKGNLTTAGFACSQCGQPLFVYKLEQVSEKGKAYTNYFGRCNVAEHEKLILLAQLKPEKDSDEAVTYSLGKFGQRALDFYSIHVTKESTHPVKPLAQIAGNRYASGPVGKALSDACMGTIASFLSKYQDIIIEHQKVVKGNQKRLESLRELAGKENLEYPSVTLPPQPHTKEGVDAYNEVIARVRMWVNLNLWQKLKLSRDDAKPLLRLKGFPSFPLVERQANEVDWWDMVCNVKKLINEKKEDGKVFWQNLAGYKRQEALRPYLSSEEDRKKGKKFARYQLGDLLLHLEKKHGEDWGKVYDEAWERIDKKVEGLSKHIKLEEERRSEDAQSKAALTDWLRAKASFVIEGLKEADKDEFCRCELKLQKWYGDLRGKPFAIEAENSILDISGFSKQYNCAFIWQKDGVKKLNLYLIINYFKGGKLRFKKIKPEAFEANRFYTVINKKSGEIVPMEVNFNFDDPNLIILPLAFGKRQGREFIWNDLLSLETGSLKLANGRVIEKTLYNRRTRQDEPALFVALTFERREVLDSSNIKPMNLIGVDRGENIPAVIALTDPEGKPLSRFKDSLGNPTHILRIGESYKEKQRTIQAKKEVEQRRAGTYSRKYASKAKNLADDMVRNTARDLLYYAVTQDAMLIFENLSRGFGRQGKRTFMAERQYTRMEDWLTAKLAYEGLPSKTYLSKTLAQYTSKTCSNCGFTITSADYDRVLEKLKKTATGWMTTINGKELKVEGQITYYNRYKRQNVVKDLSVELDRLSEESVNNDISSWTKGRSGEALSLLKKRFSHRPVQEKFVCLNCGFETHADEQAALNIARSWLFLRSQEYKKYQTNKTTGNTDKRAFVETWQSFYRKKLKEVWKPAV

SEQ ID NO: 25688 - protein, 978 aa, synthetic construct
  REGION 1..978: note = engineered CasX variant
QEIKRINKIRRRLVKDSNTKKAGKTGPMKTLLVRVMTPDLRERLENLRKKPENIPQPISNTSRANLNKLLTDYTEMKKAILHVYWEEFQKDPVGLMSRVAQPASKKIDQNKLKPEMDEKGNLTTAGFACSQCGQPLFVYKLEQVSEKGKAYTNYFGRCNVAEHEKLILLAQLKPEKDSDEAVTYSLGKFGQRALDFYSIHVTKESTHPVKPLAQIAGNRYASGPVGKALSDACMGTIASFLSKYQDIIIEHQKVVKGNQKRLESLRELAGKENLEYPSVTLPPQPHTKEGVDAYNEVIARVRMWVNLNLWQKLKLSRDDAKPLLRLKGFPSFPLVERQANEVDWWDMVCNVKKLINEKKEDGKVFWQNLAGYKRQEALRPYLSSEEDRKKGKKFARYQLGDLLLHLEKKHGEDWGKVYDEAWERIDKKVEGLSKHIKLEEERRSEDAQSKAALTDWLRAKASFVIEGLKEADKDEFCRCELKLQKWYGDLRGKPFAIEAENSILDISGFSKQYNCAFIWQKDGVKKLNLYLIINYFKGGKLRFKKIKPEAFEANRFYTVINKKSGEIVPMEVNFNFDDPNLIILPLAFGKRQGREFIWNDLLSLETGSLKLANGRVIEKTLYNRRTRQDEPALFVALTFERREVLDSSNIKPMNLIGVDRGENIPAVIALTDPEGKPLSRFKDSLGNPTHILRIGESYKEKQRTIQAKKEVEQRRAGGYSRKYASKAKNLADDMVRNTARDLLYYAVTQDAMLIFENLSRGFGRQGKRTFMAERQYTRMEDWLTAKLAYEGLPSKTYLSKTLAQYTSKTCSNCGFTITSADYDRVLEKLKKTATGWMTTINGKELKVEGQITYYNRYKRQNVVKDLSVELDRLSEESVNNDISSWTKGRSGEALSLLKKRFSHRPVQEKFVCLNCGFETHADEQAALNIARSWLFLRSQEYKKYQTNKTTGNTDKRAFVETWQSFYRKKLKEVWKPAV

SEQ ID NO: 25689 - protein, 978 aa, synthetic construct
  REGION 1..978: note = engineered CasX variant
QEIKRINKIRRRLVKDSNTKKAGKTGPMKTLLVRVMTPDLRERLENLRKKPENIPQPISNTSRANLNKLLTDYTEMKKAILHVYWEEFQKDPVGLMSRVAQPASKKIDQNKLKPEMDEKGNLTTAGFACSQCGQPLFVYKLEQVSEKGKAYTNYFGRCNVAEHEKLILLAQLKPEKDSDEAVTYSLGKFGQRALDFYSIHVTKESTHPVKPLAQIAGNRYASGPVGKALSDACMGTIASFLSKYQDIIIEHQKVVKGNQKRLESLRELAGKENLEYPSVTLPPQPHTKEGVDAYNEVIARVRMWVNLNLWQKLKLSRDDAKPLLRLKGFPSFPLVERQANEVDWWDMVCNVKKLINEKKEDGKVFWQNLAGYKRQEALRPYLSSEEDRKKGKKFARYQLGDLLLHLEKKHGEDWGKVYDEAWERIDKKVEGLSKHIKLEEERRSEDAQSKAALTDWLRAKASFVIEGLKEADKDEFCRCELKLQKWYGDLRGKPFAIEAENSILDISGFSKQYNCAFIWQKDGVKKLNLYLIINYFKGGKLRFKKIKPEAFEANRFYTVINKKSGEIVPMEVNFNFDDPNLIILPLAFGKRQGREFIWNDLLSLETGSLKLANGRVIEKTLYNRRTRQDEPALFVALTFERREVLDSSNIKPMNLIGVDRGENIPAVIALTDPEGKPLSRFKDSLGNPTHILRIGESYKEKQRTIQAKKEREQRRAGGYSRKYASKAKNLADDMVRNTARDLLYYAVTQDAMLIFENLSRGFGRQGKRTFMAERQYTRMEDWLTAKLAYEGLPSKTYLSKTLAQYTSKTCSNCGFTITSADYDRVLEKLKKTATGWMTTINGKELKVEGQITYYNRYKRQNVVKDLSVELDRLSEESVNNDISSWTKGRSGEALSLLKKRFSHRPVQEKFVCLNCGFETHADEQAALNIARSWLFLRSQEYKKYQTNKTTGNTDKRAFVETWQSFYRKKLKEVWKPAV

SEQ ID NO: 25690 - protein, 978 aa, synthetic construct
  REGION 1..978: note = engineered CasX variant
QEIKRINKIRRRLVKDSNTKKAGKTGPMKTLLVRVMTPDLRERLENLRKKPENIPQPISNTSRANLNKLLTDYTEMKKAILHVYWEEFQKDPVGLMSRVAQPASKKIDQNKLKPEMDEKGNLTTAGFACSQCGQPLFVYKLEQVSEKGKAYTNYFGRCNVAEHEKLILLAQLKPEKDSDEAVTYSLGKFGQRALDFYSIHVTKESTHPVKPLAQIAGNRYASGPVGKALSDACMGTIASFLSKYQDIIIEHQKVVKGNQKRLESLRELAGKENLEYPSVTLPPQPHTKEGVDAYNEVIARVRMWVNLNLWQKLKLSRDDAKPLLRLKGFPSFPLVERQANEVDWWDMVCNVKKLINEKKEDGKVFWQNLAGYKRQEALRPYLSSEEDRKKGKKFARYQLGDLLLHLEKKHGEDWGKVYDEAWERIDKKVEGLSKHIKLEEERRSEDAQSKAALTDWLRAKASFVIEGLKEADKDEFCRCELKLQKWYGDLRGKPFAIEAENSILDISGFSKQYNCAFIWQKDGVKKLNLYLIINYFKGGKLRFKKIKPEAFEANRFYTVINKKSGEIVPMEVNFNFDDPNLIILPLAFGKRQGREFIWNDLLSLETGSLKLANGRVIEKTLYNRRTRQDEPALFVALTFERREVLDSSNIKPMNLIGVDRGENIPAVIALTDPEGKPLSRFKDSLGNPTHILRIGERYKEKQRTIQAKKEVEQRRAGGYSRKYASKAKNLADDMVRNTARDLLYYAVTQDAMLIFENLSRGFGRQGKRTFMAERQYTRMEDWLTAKLAYEGLPSKTYLSKTLAQYTSKTCSNCGFTITSADYDRVLEKLKKTATGWMTTINGKELKVEGQITYYNRYKRQNVVKDLSVELDRLSEESVNNDISSWTKGRSGEALSLLKKRFSHRPVQEKFVCLNCGFETHADEQAALNIARSWLFLRSQEYKKYQTNKTTGNTDKRAFVETWQSFYRKKLKEVWKPAV

SEQ ID NO: 25691 - protein, 978 aa, synthetic construct
  REGION 1..978: note = engineered CasX variant
QEIKRINKIRRRLVKDSNTKKAGKTGPMKTLLVRVMTPDLRERLENLRKKPENIPQPISNTSRANLNKLLTDYTEMKKAILHVYWEEFQKDPVGLMSRVAQPASKKIDQNKLKPEMDEKGNLTTAGFACSQCGQPLFVYKLEQVSEKGKAYTNYFGRCNVAEHEKLILLAQLKPEKDSDEAVTYSLGKFGQRALDFYSIHVTKESTHPVKPLAQIAGNRYASGPVGKALSDACMGTIASFLSKYQDIIIEHQKVVKGNQKRLESLRELAGKENLEYPSVTLPPQPHTKEGVDAYNEVIARVRMWVNLNLWQKLKLSRDDAKPLLRLKGFPSFPLVERQANEVDWWDMVCNVKKLINEKKEDGKVFWQNLAGYKRQEALRPYLSSEEDRKKGKKFARYQLGDLLLHLEKKHGEDWGKVYDEAWERIDKKVEGLSKHIKLEEERRSEDAQSKAALTDWLRAKASFVIEGLKEADKDEFCRCELKLQKWYGDLRGKPFAIEAENSILDISGFSKQYNCAFIWQKDGVKKLNLYLIINYFKGGKLRFKKIKPEAFEANRFYTVINKKSGEIVPMEVNFNFDDPNLIILPLAFGKRQGREFIWNDLLSLETGSLKLANGRVIEKTLYNRRTRQDEPALFVALTFERREVLDSSNIKPMNLIGVDRGENIPAVIALTDPEGKPLSRFCDSLGNPTHILRIGNSYKEKQRTIQAKKEVEQRRAGGYSRKYASKAKNLADDMVRNTARDLLYYAVTQDAMLIFENLSRGFGRQGKRTFMAERQYTRMEDWLTAKLAYEGLPSKTYLSKTLAQYTSKTCSNCGFTITSADYDRVLEKLKKTATGWMTTINGKELKVEGQITYYNRYKRQNVVKDLSVELDRLSEESVNNDISSWTKGRSGEALSLLKKRFSHRPVQEKFVCLNCGFETHADEQAALNIARSWLFLRSQEYKKYQTNKTTGNTDKRAFVETWQSFYRKKLKEVWKPAV

SEQ ID NO: 25692 - protein, 978 aa, synthetic construct
  REGION 1..978: note = engineered CasX variant
QEIKRINKIRRRLVKDSNTKKAGKTGPMKTLLVRVMTPDLRERLENLRKKPENIPQPISNTSRANLNKLLTDYTEMKKAILHVYWEEFQKDPVGLMSRVAQPASKKIDQNKLKPEMDEKGNLTTAGFACSQCGQPLFVYKLEQVSEKGKAYTNYFGRCNVAEHEKLILLAQLKPEKDSDEAVTYSLGKFGQRALDFYSIHVTKESTHPVKPLAQIAGNRYASGPVGKALSDACMGTIASFLSKYQDIIIEHQKVVKGNQKRLESLRELAGKENLEYPSVTLPPQPHTKEGVDAYNEVIARVRMWVNLNLWQKLKLSRDDAKPLLRLKGFPSFPLVERQANEVDWWDMVCNVKKLINEKKEDGKVFWQNLAGYKRQEALRPYLSSEEDRKKGKKFARYQLGDLLLHLEKKHGEDWGKVYDEAWERIDKKVEGLSKHIKLEEERRSEDAQSKAALTDWLRAKASFVIEGLKEADKDEFCRCELKLQKWYGDLRGKPFAIEAENSILDISGFSKQYNCAFIWQKDGVKKLNLYLIINYFKGGKLRFKKIKPEAFEANRFYTVINKKSGEIVPMEVNFNFDDPNLIILPLAFGKRQGREFIWNDLLSLETGSLKLANGRVIEKTLYNRRTRQDEPALFVALTFERREVLDSSNIKPMNLIGVDRGENIPAVIALTDPEGKPLSRFCDSLGNPTHILRIGESYKEKQRTIQAKKEVEQRRAGGYSRKYASKAKNLADDMVRNTARDLLYYAVTQDAMLIFENLSRGFGRQGKRTFMAERQYTRMEDWLTAKLAYEGLPSKTYLSKTLAQYTSKTCSNCGFTITSADYDRVLEKLKKTATGWMTTINGKELKVEGQITYYNRYKRQNVVKDLSVELDRLSEESVNNDISSWTKGRSGEALSLLKKRFSHRPVQEKFVCLNCGFETHADEQAALNIARSWLFLRSQEYKKYQTNKTTGNTDKRAFVETWQSFYRKKLKEVWKPAV

SEQ ID NO: 25693 - protein, 978 aa, synthetic construct
  REGION 1..978: note = engineered CasX variant
QEIKRINKIRRRLVKDSNTKKAGKTGPMKTLLVRVMTPDLRERLENLRKKPENIPQPISNTSRANLNKLLTDYTEMKKAILHVYWEEFQKDPVGLMSRVAQPASKKIDQNKLKPEMDEKGNLTTAGFACSQCGQPLFVYKLEQVSEKGKAYTNYFGRCNVAEHEKLILLAQLKPEKDSDEAVTYSLGKFGQRALDFYSIHVTKESTHPVKPLAQIAGNRYASGPVGKALSDACMGTIASFLSKYQDIIIEHQKVVKGNQKRLESLRELAGKENLEYPSVTLPPQPHTKEGVDAYNEVIARVRMWVNLNLWQKLKLSRDDAKPLLRLKGFPSFPLVERQANEVDWWDMVCNVKKLINEKKEDGKVFWQNLAGYKRQEALRPYLSSEEDRKKGKKFARYQLGDLLLHLEKKHGEDWGKVYDEAWERIDKKVEGLSKHIKLEEERRSEDAQSKAALTDWLRAKASFVIEGLKEADKDEFCRCELKLQKWYGDLRGKPFAIEAENSILDISGFSKQYNCAFIWQKDGVKKLNLYLIINYFKGGKLRFKKIKPEAFEANRFYTVINKKSGEIVPMEVNFNFDDPNLIILPLAFGKRQGREFIWNDLLSLETGSLKLANGRVIEKTLYNRRTRQDEPALFVALTFERREVLDSSNIKPMNLIGVDRGENIPAVIALTDPEGKPLSNFKDSLGNPTHILRIGESYKEKQRTIQAKKEVEQRRAGGYSRKYASKAKNLADDMVRNTARDLLYYAVTQDAMLIFENLSRGFGRQGKRTFMAERQYTRMEDWLTAKLAYEGLPSKTYLSKTLAQYTSKTCSNCGFTITSADYDRVLEKLKKTATGWMTTINGKELKVEGQITYYNRYKRQNVVKDLSVELDRLSEESVNNDISSWTKGRSGEALSLLKKRFSHRPVQEKFVCLNCGFETHADEQAALNIARSWLFLRSQEYKKYQTNKTTGNTDKRAFVETWQSFYRKKLKEVWKPAV

SEQ ID NO: 25694 - protein, 978 aa, synthetic construct
  REGION 1..978: note = engineered CasX variant
QEIKRINKIRRRLVKDSNTKKAGKTGPMKTLLVRVMTPDLRERLENLRKKPENIPQPISNTSRANLNKLLTDYTEMKKAILHVYWEEFQKDPVGLMSRVAQPASKKIDQNKLKPEMDEKGNLTTAGFACSQCGQPLFVYKLEQVSEKGKAYTNYFGRCNVAEHEKLILLAQLKPEKDSDEAVTYSLGKFGQRALDFYSIHVTKESTHPVKPLAQIAGNRYASGPVGKALSDACMGTIASFLSKYQDIIIEHQKVVKGNQKRLESLRELAGKENLEYPSVTLPPQPHTKEGVDAYNEVIARVRMWVNLNLWQKLKLSRDDAKPLLRLKGFPSFPLVERQANEVDWWDMVCNVKKLINEKKEDGKVFWQNLAGYKRQEALRPYLSSEEDRKKGKKFARYQLGDLLLHLEKKHGEDWGKVYDEAWERIDKKVEGLSKHIKLEEERRSEDAQSKAALTDWLRAKASFVIEGLKEADKDEFCRCELKLQKWYGDLRGKPFAIEAENSILDISGFSKQYNCAFIWQKDGVKKLNLYLIINYFKGGKLRFKKIKPEAFEANRFYTVINKKSGEIVPMEVNFNFDDPNLIILPLAFGKRQGREFIWNDLLSLETGSLKLANGRVIEKTLYNRRTRQDEPALFVALTFERREVLDSSNIKPMNLIGVDRGENIPAVIALTDPEGKPLRRFKDSLGNPTHILRIGESYKEKQRTIQAKKEVEQRRAGGYSRKYASKAKNLADDMVRNTARDLLYYAVTQDAMLIFENLSRGFGRQGKRTFMAERQYTRMEDWLTAKLAYEGLPSKTYLSKTLAQYTSKTCSNCGFTITSADYDRVLEKLKKTATGWMTTINGKELKVEGQITYYNRYKRQNVVKDLSVELDRLSEESVNNDISSWTKGRSGEALSLLKKRFSHRPVQEKFVCLNCGFETHADEQAALNIARSWLFLRSQEYKKYQTNKTTGNTDKRAFVETWQSFYRKKLKEVWKPAV

SEQ ID NO: 25695 - protein, 978 aa, synthetic construct
  REGION 1..978: note = engineered CasX variant
QEIKRINKIRRRLVKDSNTKKAGKTGPMKTLLVRVMTPDLRERLENLRKKPENIPQPISNTSRANLNKLLTDYTEMKKAILHVYWEEFQKDPVGLMSRVAQPASKKIDQNKLKPEMDEKGNLTTAGFACSQCGQPLFVYKLEQVSEKGKAYTNYFGRCNVAEHEKLILLAQLKPEKDSDEAVTYSLGKFGQRALDFYSIHVTKESTHPVKPLAQIAGNRYASGPVGKALSDACMGTIASFLSKYQDIIIEHQKVVKGNQKRLESLRELAGKENLEYPSVTLPPQPHTKEGVDAYNEVIARVRMWVNLNLWQKLKLSRDDAKPLLRLKGFPSFPLVERQANEVDWWDMVCNVKKLINEKKEDGKVFWQNLAGYKRQEALRPYLSSEEDRKKGKKFARYQLGDLLLHLEKKHGEDWGKVYDEAWERIDKKVEGLSKHIKLEEERRSEDAQSKAALTDWLRAKASFVIEGLKEADKDEFCRCELKLQKWYGDLRGKPFAIEAENSILDISGFSKQYNCAFIWQKDGVKKLNLYLIINYFKGGKLRFKKIKPEAFEANRFYTVINKKSGEIVPMEVNFNFDDPNLIILPLAFGKRQGREFIWNDLLSLETGSLKLANGRVIEKTLYNRRTRQDEPALFVALTFERREVLDSSNIKPMNLIGVDRGENIPAVIALTDPEGKPLRNFKDSLGNPTHILRIGESYKEKQRTIQAKKEVEQRRAGGYSRKYASKAKNLADDMVRNTARDLLYYAVTQDAMLIFENLSRGFGRQGKRTFMAERQYTRMEDWLTAKLAYEGLPSKTYLSKTLAQYTSKTCSNCGFTITSADYDRVLEKLKKTATGWMTTINGKELKVEGQITYYNRYKRQNVVKDLSVELDRLSEESVNNDISSWTKGRSGEALSLLKKRFSHRPVQEKFVCLNCGFETHADEQAALNIARSWLFLRSQEYKKYQTNKTTGNTDKRAFVETWQSFYRKKLKEVWKPAV

SEQ ID NO: 25696 - protein, 978 aa, synthetic construct
  REGION 1..978: note = engineered CasX variant
QEIKRINKIRRRLVKDSNTKKAGKTGPMKTLLVRVMTPDLRERLENLRKKPENIPQPISNTSRANLNKLLTDYTEMKKAILHVYWEEFQKDPVGLMSRVAQPASKKIDQNKLKPEMDEKGNLTTAGFACSQCGQPLFVYKLEQVSEKGKAYTNYFGRCNVAEHEKLILLAQLKPEKDSDEAVTYSLGKFGQRALDFYSIHVTKESTHPVKPLAQIAGNRYASGPVGKALSDACMGTIASFLSKYQDIIIEHQKVVKGNQKRLESLRELAGKENLEYPSVTLPPQPHTKEGVDAYNEVIARVRMWVNLNLWQKLKLSRDDAKPLLRLKGFPSFPLVERQANEVDWWDMVCNVKKLINEKKEDGKVFWQNLAGYKRQEALRPYLSSEEDRKKGKKFARYQLGDLLLHLEKKHGEDWGKVYDEAWERIDKKVEGLSKHIKLEEERRSEDAQSKAALTDWLRAKASFVIEGLKEADKDEFCRCELKLQKWYGDLRGKPFAIEAENSILDISGFSKQYNCAFIWQKDGVKKLNLYLIINYFKGGKLRFKKIKPEAFEANRFYTVINKKSGEIVPMEVNFNFDDPNLIILPLAFGKRQGREFIWNDLLSLETGSLKLANGRVIEKTLYNRRTRQDEPALFVALTFERREVLDSSNIKPMNLIGVDRGENIPAVIALTDPEGKPLCRFKDSLGNPTHILRIGESYKEKQRTIQAKKEVEQRRAGGYSRKYASKAKNLADDMVRNTARDLLYYAVTQDAMLIFENLSRGFGRQGKRTFMAERQYTRMEDWLTAKLAYEGLPSKTYLSKTLAQYTSKTCSNCGFTITSADYDRVLEKLKKTATGWMTTINGKELKVEGQITYYNRYKRQNVVKDLSVELDRLSEESVNNDISSWTKGRSGEALSLLKKRFSHRPVQEKFVCLNCGFETHADEQAALNIARSWLFLRSQEYKKYQTNKTTGNTDKRAFVETWQSFYRKKLKEVWKPAV

SEQ ID NO: 25697 - protein, 978 aa, synthetic construct
  REGION 1..978: note = engineered CasX variant
QEIKRINKIRRRLVKDSNTKKAGKTGPMKTLLVRVMTPDLRERLENLRKKPENIPQPISNTSRANLNKLLTDYTEMKKAILHVYWEEFQKDPVGLMSRVAQPASKKIDQNKLKPEMDEKGNLTTAGFACSQCGQPLFVYKLEQVSEKGKAYTNYFGRCNVAEHEKLILLAQLKPEKDSDEAVTYSLGKFGQRALDFYSIHVTKESTHPVKPLAQIAGNRYASGPVGKALSDACMGTIASFLSKYQDIIIEHQKVVKGNQKRLESLRELAGKENLEYPSVTLPPQPHTKEGVDAYNEVIARVRMWVNLNLWQKLKLSRDDAKPLLRLKGFPSFPLVERQANEVDWWDMVCNVKKLINEKKEDGKVFWQNLAGYKRQEALRPYLSSEEDRKKGKKFARYQLGDLLLHLEKKHGEDWGKVYDEAWERIDKKVEGLSKHIKLEEERRSEDAQSKAALTDWLRAKASFVIEGLKEADKDEFCRCELKLQKWYGDLRGKPFAIEAENSILDISGFSKQYNCAFIWQKDGVKKLNLYLIINYFKGGKLRFKKIKPEAFEANRFYTVINKKSGEIVPMEVNFNFDDPNLIILPLAFGKRQGREFIWNDLLSLETGSLKLANGRVIEKTLYNRRTRQDEPALFVALTFERREVLDSSNIKPMNLIGVDRGENIPAVIALTDPEGIPLSRFKDSLGNPTHILRIGESYKEKQTTIQAKKEVEQRRAGGYSRKYASKAKNLADDMVRNTARDLLYYAVTQDAMLIFENLSRGFGRQGKRTFMAERQYTRMEDWLTAKLAYEGLPSKTYLSKTLAQYTSKTCSNCGFTITSADYDRVLEKLKKTATGWMTTINGKELKVEGQITYYNRYKRQNVVKDLSVELDRLSEESVNNDISSWTKGRSGEALSLLKKRFSHRPVQEKFVCLNCGFETHADEQAALNIARSWLFLRSQEYKKYQTNKTTGNTDKRAFVETWQSFYRKKLKEVWKPAV

SEQ ID NO: 25698 - protein, 978 aa, synthetic construct
  REGION 1..978: note = engineered CasX variant
QEIKRINKIRRRLVKDSNTKKAGKTGPMKTLLVRVMTPDLRERLENLRKKPENIPQPISNTSRANLNKLLTDYTEMKKAILHVYWEEFQKDPVGLMSRVAQPASKKIDQNKLKPEMDEKGNLTTAGFACSQCGQPLFVYKLEQVSEKGKAYTNYFGRCNVAEHEKLILLAQLKPEKDSDEAVTYSLGKFGQRALDFYSIHVTKESTHPVKPLAQIAGNRYASGPVGKALSDACMGTIASFLSKYQDIIIEHQKVVKGNQKRLESLRELAGKENLEYPSVTLPPQPHTKEGVDAYNEVIARVRMWVNLNLWQKLKLSRDDAKPLLRLKGFPSFPLVERQANEVDWWDMVCNVKKLINEKKEDGKVFWQNLAGYKRQEALRPYLSSEEDRKKGKKFARYQLGDLLLHLEKKHGEDWGKVYDEAWERIDKKVEGLSKHIKLEEERRSEDAQSKAALTDWLRAKASFVIEGLKEADKDEFCRCELKLQKWYGDLRGKPFAIEAENSILDISGFSKQYNCAFIWQKDGVKKLNLYLIINYFKGGKLRFKKIKPEAFEANRFYTVINKKSGEIVPMEVNFNFDDPNLIILPLAFGKRQGREFIWNDLLSLETGSLKLANGRVIEKTLYNRRTRQDEPALFVALTFERREVLDSSNIKPMNLIGVDRGENIPAVIALTDPEGIPLSRFKDSLGNPTHILRIGESYKEKQRTIQAKKEVEQRRAGGYSRKYASKAKNLADDMVRNTARDLLYYAVTQDAMLIFENLSRGFGRQGKRTFMAERQYTRMEDWLTAKLAYEGLPSKTYLSKTLAQYTSKTCSNCGFTITSADYDRVLEKLKKTATGWMTTINGKELKVEGQITYYNRYKRQNVVKDLSVELDRLSEESVNNDISSWTKGRSGEALSLLKKRFSHRPVQEKFVCLNCGFETHADEQAALNIARSWLFLRSQEYKKYQTNKTTGNTDKRAFVETWQSFYRKKLKEVWKPAV

SEQ ID NO: 25699 - protein, 978 aa, synthetic construct
  REGION 1..978: note = engineered CasX variant
QEIKRINKIRRRLVKDSNTKKAGKTGPMKTLLVRVMTPDLRERLENLRKKPENIPQPISNTSRANLNKLLTDYTEMKKAILHVYWEEFQKDPVGLMSRVAQPASKKIDQNKLKPEMDEKGNLTTAGFACSQCGQPLFVYKLEQVSEKGKAYTNYFGRCNVAEHEKLILLAQLKPEKDSDEAVTYSLGKFGQRALDFYSIHVTKESTHPVKPLAQIAGNRYASGPVGKALSDACMGTIASFLSKYQDIIIEHQKVVKGNQKRLESLRELAGKENLEYPSVTLPPQPHTKEGVDAYNEVIARVRMWVNLNLWQKLKLSRDDAKPLLRLKGFPSFPLVERQANEVDWWDMVCNVKKLINEKKEDGKVFWQNLAGYKRQEALRPYLSSEEDRKKGKKFARYQLGDLLLHLEKKHGEDWGKVYDEAWERIDKKVEGLSKHIKLEEERRSEDAQSKAALTDWLRAKASFVIEGLKEADKDEFCRCELKLQKWYGDLRGKPFAIEAENSILDISGFSKQYNCAFIWQKDGVKKLNLYLIINYFKGGKLRFKKIKPEAFEANRFYTVINKKSGEIVPMEVNFNFDDPNLIILPLAFGKRQGREFIWNDLLSLETGSLKLANGRVIEKTLYNRRTRQDEPALFVALTFERREVLDSSNIKPMNLIGVDRGENIPAVIALTDPEGIPLSRFKDSLGNPTHILRIGESYKEKQRTIQAKKEREQRRAGGYSRKYASKAKNLADDMVRNTARDLLYYAVTQDAMLIFENLSRGFGRQGKRTFMAERQYTRMEDWLTAKLAYEGLPSKTYLSKTLAQYTSKTCSNCGFTITSADYDRVLEKLKKTATGWMTTINGKELKVEGQITYYNRYKRQNVVKDLSVELDRLSEESVNNDISSWTKGRSGEALSLLKKRFSHRPVQEKFVCLNCGFETHADEQAALNIARSWLFLRSQEYKKYQTNKTTGNTDKRAFVETWQSFYRKKLKEVWKPAV

SEQ ID NO: 25700 - protein, 978 aa, synthetic construct
  REGION 1..978: note = engineered CasX variant
QEIKRINKIRRRLVKDSNTKKAGKTGPMKTLLVRVMTPDLRERLENLRKKPENIPQPISNTSRANLNKLLTDYTEMKKAILHVYWEEFQKDPVGLMSRVAQPASKKIDQNKLKPEMDEKGNLTTAGFACSQCGQPLFVYKLEQVSEKGKAYTNYFGRCNVAEHEKLILLAQLKPEKDSDEAVTYSLGKFGQRALDFYSIHVTKESTHPVKPLAQIAGNRYASGPVGKALSDACMGTIASFLSKYQDIIIEHQKVVKGNQKRLESLRELAGKENLEYPSVTLPPQPHTKEGVDAYNEVIARVRMWVNLNLWQKLKLSRDDAKPLLRLKGFPSFPLVERQANEVDWWDMVCNVKKLINEKKEDGKVFWQNLAGYKRQEALRPYLSSEEDRKKGKKFARYQLGDLLLHLEKKHGEDWGKVYDEAWERIDKKVEGLSKHIKLEEERRSEDAQSKAALTDWLRAKASFVIEGLKEADKDEFCRCELKLQKWYGDLRGKPFAIEAENSILDISGFSKQYNCAFIWQKDGVKKLNLYLIINYFKGGKLRFKKIKPEAFEANRFYTVINKKSGEIVPMEVNFNFDDPNLIILPLAFGKRQGREFIWNDLLSLETGSLKLANGRVIEKTLYNRRTRQDEPALFVALTFERREVLDSSNIKPMNLIGVDRGENIPAVIALTDPEGHPLSRFKDSLGNPTHIMRIGESYKENQRTIQAKKEVEQRRAGGYSRKYASKAKNLADDMVRNTARDLLYYAVTQDAMLIFENLSRGFGRQGKRTFMAERQYTRMEDWLTAKLAYEGLPSKTYLSKTLAQYTSKTCSNCGFTITSADYDRVLEKLKKTATGWMTTINGKELKVEGQITYYNRYKRQNVVKDLSVELDRLSEESVNNDISSWTKGRSGEALSLLKKRFSHRPVQEKFVCLNCGFETHADEQAALNIARSWLFLRSQEYKKYQTNKTTGNTDKRAFVETWQSFYRKKLKEVWKPAV

SEQ ID NO: 25701 - protein, 978 aa, synthetic construct
  REGION 1..978: note = engineered CasX variant
QEIKRINKIRRRLVKDSNTKKAGKTGPMKTLLVRVMTPDLRERLENLRKKPENIPQPISNTSRANLNKLLTDYTEMKKAILHVYWEEFQKDPVGLMSRVAQPASKKIDQNKLKPEMDEKGNLTTAGFACSQCGQPLFVYKLEQVSEKGKAYTNYFGRCNVAEHEKLILLAQLKPEKDSDEAVTYSLGKFGQRALDFYSIHVTKESTHPVKPLAQIAGNRYASGPVGKALSDACMGTIASFLSKYQDIIIEHQKVVKGNQKRLESLRELAGKENLEYPSVTLPPQPHTKEGVDAYNEVIARVRMWVNLNLWQKLKLSRDDAKPLLRLKGFPSFPLVERQANEVDWWDMVCNVKKLINEKKEDGKVFWQNLAGYKRQEALRPYLSSEEDRKKGKKFARYQLGDLLLHLEKKHGEDWGKVYDEAWERIDKKVEGLSKHIKLEEERRSEDAQSKAALTDWLRAKASFVIEGLKEADKDEFCRCELKLQKWYGDLRGKPFAIEAENSILDISGFSKQYNCAFIWQKDGVKKLNLYLIINYFKGGKLRFKKIKPEAFEANRFYTVINKKSGEIVPMEVNFNFDDPNLIILPLAFGKRQGREFIWNDLLSLETGSLKLANGRVIEKTLYNRRTRQDEPALFVALTFERREVLDSSNIKPMNLIGVDRGENIPAVIALTDPEGHPLSRFKDSLGNPTHIMRIGESYKEKQRTIQAKKEVEQRRAGGYSRKYASKAKNLADDMVRNTARDLLYYAVTQDAMLIFENLSRGFGRQGKRTFMAERQYTRMEDWLTAKLAYEGLPSKTYLSKTLAQYTSKTCSNCGFTITSADYDRVLEKLKKTATGWMTTINGKELKVEGQITYYNRYKRQNVVKDLSVELDRLSEESVNNDISSWTKGRSGEALSLLKKRFSHRPVQEKFVCLNCGFETHADEQAALNIARSWLFLRSQEYKKYQTNKTTGNTDKRAFVETWQSFYRKKLKEVWKPAV

SEQ ID NO: 25702 - protein, 978 aa, synthetic construct
  REGION 1..978: note = engineered CasX variant
QEIKRINKIRRRLVKDSNTKKAGKTGPMKTLLVRVMTPDLRERLENLRKKPENIPQPISNTSRANLNKLLTDYTEMKKAILHVYWEEFQKDPVGLMSRVAQPASKKIDQNKLKPEMDEKGNLTTAGFACSQCGQPLFVYKLEQVSEKGKAYTNYFGRCNVAEHEKLILLAQLKPEKDSDEAVTYSLGKFGQRALDFYSIHVTKESTHPVKPLAQIAGNRYASGPVGKALSDACMGTIASFLSKYQDIIIEHQKVVKGNQKRLESLRELAGKENLEYPSVTLPPQPHTKEGVDAYNEVIARVRMWVNLNLWQKLKLSRDDAKPLLRLKGFPSFPLVERQANEVDWWDMVCNVKKLINEKKEDGKVFWQNLAGYKRQEALRPYLSSEEDRKKGKKFARYQLGDLLLHLEKKHGEDWGKVYDEAWERIDKKVEGLSKHIKLEEERRSEDAQSKAALTDWLRAKASFVIEGLKEADKDEFCRCELKLQKWYGDLRGKPFAIEAENSILDISGFSKQYNCAFIWQKDGVKKLNLYLIINYFKGGKLRFKKIKPEAFEANRFYTVINKKSGEIVPMEVNFNFDDPNLIILPLAFGKRQGREFIWNDLLSLETGSLKLANGRVIEKTLYNRRTRQDEPALFVALTFERREVLDSSNIKPMNLIGVDRGENIPAVIALTDPEGHPLSRFKDSLGNPTHILRIGESYKENQRTIQAKKEVEQRRAGGYSRKYASKAKNLADDMVRNTARDLLYYAVTQDAMLIFENLSRGFGRQGKRTFMAERQYTRMEDWLTAKLAYEGLPSKTYLSKTLAQYTSKTCSNCGFTITSADYDRVLEKLKKTATGWMTTINGKELKVEGQITYYNRYKRQNVVKDLSVELDRLSEESVNNDISSWTKGRSGEALSLLKKRFSHRPVQEKFVCLNCGFETHADEQAALNIARSWLFLRSQEYKKYQTNKTTGNTDKRAFVETWQSFYRKKLKEVWKPAV

SEQ ID NO: 25703 - protein, 978 aa, synthetic construct
  REGION 1..978: note = engineered CasX variant
QEIKRINKIRRRLVKDSNTKKAGKTGPMKTLLVRVMTPDLRERLENLRKKPENIPQPISNTSRANLNKLLTDYTEMKKAILHVYWEEFQKDPVGLMSRVAQPASKKIDQNKLKPEMDEKGNLTTAGFACSQCGQPLFVYKLEQVSEKGKAYTNYFGRCNVAEHEKLILLAQLKPEKDSDEAVTYSLGKFGQRALDFYSIHVTKESTHPVKPLAQIAGNRYASGPVGKALSDACMGTIASFLSKYQDIIIEHQKVVKGNQKRLESLRELAGKENLEYPSVTLPPQPHTKEGVDAYNEVIARVRMWVNLNLWQKLKLSRDDAKPLLRLKGFPSFPLVERQANEVDWWDMVCNVKKLINEKKEDGKVFWQNLAGYKRQEALRPYLSSEEDRKKGKKFARYQLGDLLLHLEKKHGEDWGKVYDEAWERIDKKVEGLSKHIKLEEERRSEDAQSKAALTDWLRAKASFVIEGLKEADKDEFCRCELKLQKWYGDLRGKPFAIEAENSILDISGFSKQYNCAFIWQKDGVKKLNLYLIINYFKGGKLRFKKIKPEAFEANRFYTVINKKSGEIVPMEVNFNFDDPNLIILPLAFGKRQGREFIWNDLLSLETGSLKLANGRVIEKTLYNRRTRQDEPALFVALTFERREVLDSSNIKPMNLIGVDRGENIPAVIALTDPEGHPLSRFKDSLGNPTHILRIGESYKEKQRTIQATKEVEQRRAGGYSRKYASKAKNLADDMVRNTARDLLYYAVTQDAMLIFENLSRGFGRQGKRTFMAERQYTRMEDWLTAKLAYEGLPSKTYLSKTLAQYTSKTCSNCGFTITSADYDRVLEKLKKTATGWMTTINGKELKVEGQITYYNRYKRQNVVKDLSVELDRLSEESVNNDISSWTKGRSGEALSLLKKRFSHRPVQEKFVCLNCGFETHADEQAALNIARSWLFLRSQEYKKYQTNKTTGNTDKRAFVETWQSFYRKKLKEVWKPAV

SEQ ID NO: 25704 - protein, 978 aa, synthetic construct
  REGION 1..978: note = engineered CasX variant
QEIKRINKIRRRLVKDSNTKKAGKTGPMKTLLVRVMTPDLRERLENLRKKPENIPQPISNTSRANLNKLLTDYTEMKKAILHVYWEEFQKDPVGLMSRVAQPASKKIDQNKLKPEMDEKGNLTTAGFACSQCGQPLFVYKLEQVSEKGKAYTNYFGRCNVAEHEKLILLAQLKPEKDSDEAVTYSLGKFGQRALDFYSIHVTKESTHPVKPLAQIAGNRYASGPVGKALSDACMGTIASFLSKYQDIIIEHQKVVKGNQKRLESLRELAGKENLEYPSVTLPPQPHTKEGVDAYNEVIARVRMWVNLNLWQKLKLSRDDAKPLLRLKGFPSFPLVERQANEVDWWDMVCNVKKLINEKKEDGKVFWQNLAGYKRQEALRPYLSSEEDRKKGKKFARYQLGDLLLHLEKKHGEDWGKVYDEAWERIDKKVEGLSKHIKLEEERRSEDAQSKAALTDWLRAKASFVIEGLKEADKDEFCRCELKLQKWYGDLRGKPFAIEAENSILDISGFSKQYNCAFIWQKDGVKKLNLYLIINYFKGGKLRFKKIKPEAFEANRFYTVINKKSGEIVPMEVNFNFDDPNLIILPLAFGKRQGREFIWNDLLSLETGSLKLANGRVIEKTLYNRRTRQDEPALFVALTFERREVLDSSNIKPMNLIGVDRGENIPAVIALTDPEGHPLSRFKDSLGNPTHILRIGESYKEKQRTIQAKKEVEQRRVGGYSRKYASKAKNLADDMVRNTARDLLYYAVTQDAMLIFENLSRGFGRQGKRTFMAERQYTRMEDWLTAKLAYEGLPSKTYLSKTLAQYTSKTCSNCGFTITSADYDRVLEKLKKTATGWMTTINGKELKVEGQITYYNRYKRQNVVKDLSVELDRLSEESVNNDISSWTKGRSGEALSLLKKRFSHRPVQEKFVCLNCGFETHADEQAALNIARSWLFLRSQEYKKYQTNKTTGNTDKRAFVETWQSFYRKKLKEVWKPAV

SEQ ID NO: 25705 - protein, 978 aa, synthetic construct
  REGION 1..978: note = engineered CasX variant
QEIKRINKIRRRLVKDSNTKKAGKTGPMKTLLVRVMTPDLRERLENLRKKPENIPQPISNTSRANLNKLLTDYTEMKKAILHVYWEEFQKDPVGLMSRVAQPASKKIDQNKLKPEMDEKGNLTTAGFACSQCGQPLFVYKLEQVSEKGKAYTNYFGRCNVAEHEKLILLAQLKPEKDSDEAVTYSLGKFGQRALDFYSIHVTKESTHPVKPLAQIAGNRYASGPVGKALSDACMGTIASFLSKYQDIIIEHQKVVKGNQKRLESLRELAGKENLEYPSVTLPPQPHTKEGVDAYNEVIARVRMWVNLNLWQKLKLSRDDAKPLLRLKGFPSFPLVERQANEVDWWDMVCNVKKLINEKKEDGKVFWQNLAGYKRQEALRPYLSSEEDRKKGKKFARYQLGDLLLHLEKKHGEDWGKVYDEAWERIDKKVEGLSKHIKLEEERRSEDAQSKAALTDWLRAKASFVIEGLKEADKDEFCRCELKLQKWYGDLRGKPFAIEAENSILDISGFSKQYNCAFIWQKDGVKKLNLYLIINYFKGGKLRFKKIKPEAFEANRFYTVINKKSGEIVPMEVNFNFDDPNLIILPLAFGKRQGREFIWNDLLSLETGSLKLANGRVIEKTLYNRRTRQDEPALFVALTFERREVLDSSNIKPMNLIGVDRGENIPAVIALTDPEGHPLSRFKDSLGNPTHILRIGESYKEKQRTIQAKKEVEQRRAGGYSRKYASKAKNLADDMVRNTARDLLYYAVTQDAMLIFENLSRGFGRQGKRTFMAERQYTRMEDWLTAKLAYEGLPSKTYLSKTLAQYTSKTCSNCGFTITSADYDRVLEKLKKTATGWMTTINGKELKVEGQITYYNRYKRQNVVKDLSVELDRLSEESVNNDISSWTKGRSGEALSLLKKRFSHRPVQEKFVCLNCGFETHADEQAALNIARSWLFLRSQEYKKYQTNKTTGNTDKRAFVETWQSFYRKKLKEVWKPAV

SEQ ID NO: 25706 - protein, 978 aa, synthetic construct
  REGION 1..978: note = engineered CasX variant
QEIKRINKIRRRLVKDSNTKKAGKTGPMKTLLVRVMTPDLRERLENLRKKPENIPQPISNTSRANLNKLLTDYTEMKKAILHVYWEEFQKDPVGLMSRVAQPASKKIDQNKLKPEMDEKGNLTTAGFACSQCGQPLFVYKLEQVSEKGKAYTNYFGRCNVAEHEKLILLAQLKPEKDSDEAVTYSLGKFGQRALDFYSIHVTKESTHPVKPLAQIAGNRYASGPVGKALSDACMGTIASFLSKYQDIIIEHQKVVKGNQKRLESLRELAGKENLEYPSVTLPPQPHTKEGVDAYNEVIARVRMWVNLNLWQKLKLSRDDAKPLLRLKGFPSFPLVERQANEVDWWDMVCNVKKLINEKKEDGKVFWQNLAGYKRQEALRPYLSSEEDRKKGKKFARYQLGDLLLHLEKKHGEDWGKVYDEAWERIDKKVEGLSKHIKLEEERRSEDAQSKAALTDWLRAKASFVIEGLKEADKDEFCRCELKLQKWYGDLRGKPFAIEAENSILDISGFSKQYNCAFIWQKDGVKKLNLYLIINYFKGGKLRFKKIKPEAFEANRFYTVINKKSGEIVPMEVNFNFDDPNLIILPLAFGKRQGREFIWNDLLSLETGSLKLANGRVIEKTLYNRRTRQDEPALFVALTFERREVLDSSNIKPMNLIGVDRGENIPAVIALTDPEGHPLSRFKDSLGNKTHILRIGESYKEKQRTIQAKKEVEQRRAGGYSRKYASKAKNLADDMVRNTARDLLYYAVTQDAMLIFENLSRGFGRQGKRTFMAERQYTRMEDWLTAKLAYEGLPSKTYLSKTLAQYTSKTCSNCGFTITSADYDRVLEKLKKTATGWMTTINGKELKVEGQITYYNRYKRQNVVKDLSVELDRLSEESVNNDISSWTKGRSGEALSLLKKRFSHRPVQEKFVCLNCGFETHADEQAALNIARSWLFLRSQEYKKYQTNKTTGNTDKRAFVETWQSFYRKKLKEVWKPAV

SEQ ID NO: 25707 - protein, 978 aa, synthetic construct
  REGION 1..978: note = engineered CasX variant
QEIKRINKIRRRLVKDSNTKKAGKTGPMKTLLVRVMTPDLRERLENLRKKPENIPQPISNTSRANLNKLLTDYTEMKKAILHVYWEEFQKDPVGLMSRVAQPASKKIDQNKLKPEMDEKGNLTTAGFACSQCGQPLFVYKLEQVSEKGKAYTNYFGRCNVAEHEKLILLAQLKPEKDSDEAVTYSLGKFGQRALDFYSIHVTKESTHPVKPLAQIAGNRYASGPVGKALSDACMGTIASFLSKYQDIIIEHQKVVKGNQKRLESLRELAGKENLEYPSVTLPPQPHTKEGVDAYNEVIARVRMWVNLNLWQKLKLSRDDAKPLLRLKGFPSFPLVERQANEVDWWDMVCNVKKLINEKKEDGKVFWQNLAGYKRQEALRPYLSSEEDRKKGKKFARYQLGDLLLHLEKKHGEDWGKVYDEAWERIDKKVEGLSKHIKLEEERRSEDAQSKAALTDWLRAKASFVIEGLKEADKDEFCRCELKLQKWYGDLRGKPFAIEAENSILDISGFSKQYNCAFIWQKDGVKKLNLYLIINYFKGGKLRFKKIKPEAFEANRFYTVINKKSGEIVPMEVNFNFDDPNLIILPLAFGKRQGREFIWNDLLSLETGSLKLANGRVIEKTLYNRRTRQDEPALFVALTFERREVLDSSNIKPMNLIGVDRGENIPAVIALTDPEGGPLSCFKDSLGNPTHILRIGESYKEKQRTIQAKKEVEQRRAGGYSRKYASKAKNLADDMVRNTARDLLYYAVTQDAMLIFENLSRGFGRQGKRTFMAERQYTRMEDWLTAKLAYEGLPSKTYLSKTLAQYTSKTCSNCGFTITSADYDRVLEKLKKTATGWMTTINGKELKVEGQITYYNRYKRQNVVKDLSVELDRLSEESVNNDISSWTKGRSGEALSLLKKRFSHRPVQEKFVCLNCGFETHADEQAALNIARSWLFLRSQEYKKYQTNKTTGNTDKRAFVETWQSFYRKKLKEVWKPAV

SEQ ID NO: 25708 - protein, 978 aa, synthetic construct
  REGION 1..978: note = engineered CasX variant
QEIKRINKIRRRLVKDSNTKKAGKTGPMKTLLVRVMTPDLRERLENLRKKPENIPQPISNTSRANLNKLLTDYTEMKKAILHVYWEEFQKDPVGLMSRVAQPASKKIDQNKLKPEMDEKGNLTTAGFACSQCGQPLFVYKLEQVSEKGKAYTNYFGRCNVAEHEKLILLAQLKPEKDSDEAVTYSLGKFGQRALDFYSIHVTKESTHPVKPLAQIAGNRYASGPVGKALSDACMGTIASFLSKYQDIIIEHQKVVKGNQKRLESLRELAGKENLEYPSVTLPPQPHTKEGVDAYNEVIARVRMWVNLNLWQKLKLSRDDAKPLLRLKGFPSFPLVERQANEVDWWDMVCNVKKLINEKKEDGKVFWQNLAGYKRQEALRPYLSSEEDRKKGKKFARYQLGDLLLHLEKKHGEDWGKVYDEAWERIDKKVEGLSKHIKLEEERRSEDAQSKAALTDWLRAKASFVIEGLKEADKDEFCRCELKLQKWYGDLRGKPFAIEAENSILDISGFSKQYNCAFIWQKDGVKKLNLYLIINYFKGGKLRFKKIKPEAFEANRFYTVINKKSGEIVPMEVNFNFDDPNLIILPLAFGKRQGREFIWNDLLSLETGSLKLANGRVIEKTLYNRRTRQDEPALFVALTFERREVLDSSNIKPMNLIGVDRGENIPAVIALTDPEGFPLSRFKDSLGNPTHILRIGESYKEKQRTIQAKKEVEQRRAGGYSRKYASKAKNLADDMVRNTARDLLYYAVTQDAMLIFENLSRGFGRQGKRTFMAERQYTRMEDWLTAKLAYEGLPSKTYLSKTLAQYTSKTCSNCGFTITSADYDRVLEKLKKTATGWMTTINGKELKVEGQITYYNRYKRQNVVKDLSVELDRLSEESVNNDISSWTKGRSGEALSLLKKRFSHRPVQEKFVCLNCGFETHADEQAALNIARSWLFLRSQEYKKYQTNKTTGNTDKRAFVETWQSFYRKKLKEVWKPAV

SEQ ID NO: 25709 - protein, 978 aa, synthetic construct
  REGION 1..978: note = engineered CasX variant
QEIKRINKIRRRLVKDSNTKKAGKTGPMKTLLVRVMTPDLRERLENLRKKPENIPQPISNTSRANLNKLLTDYTEMKKAILHVYWEEFQKDPVGLMSRVAQPASKKIDQNKLKPEMDEKGNLTTAGFACSQCGQPLFVYKLEQVSEKGKAYTNYFGRCNVAEHEKLILLAQLKPEKDSDEAVTYSLGKFGQRALDFYSIHVTKESTHPVKPLAQIAGNRYASGPVGKALSDACMGTIASFLSKYQDIIIEHQKVVKGNQKRLESLRELAGKENLEYPSVTLPPQPHTKEGVDAYNEVIARVRMWVNLNLWQKLKLSRDDAKPLLRLKGFPSFPLVERQANEVDWWDMVCNVKKLINEKKEDGKVFWQNLAGYKRQEALRPYLSSEEDRKKGKKFARYQLGDLLLHLEKKHGEDWGKVYDEAWERIDKKVEGLSKHIKLEEERRSEDAQSKAALTDWLRAKASFVIEGLKEADKDEFCRCELKLQKWYGDLRGKPFAIEAENSILDISGFSKQYNCAFIWQKDGVKKLNLYLIINYFKGGKLRFKKIKPEAFEANRFYTVINKKSGEIVPMEVNFNFDDPNLIILPLAFGKRQGREFIWNDLLSLETGSLKLANGRVIEKTLYNRRTRQDEPALFVALTFERREVLDSSNIKPMNLIGVDRGENIPAVIALTDPEGFPLSRFKDSEGNPTHILRIGESYKEKQRTIQAKKEVEQRRAGGYSRKYASKAKNLADDMVRNTARDLLYYAVTQDAMLIFENLSRGFGRQGKRTFMAERQYTRMEDWLTAKLAYEGLPSKTYLSKTLAQYTSKTCSNCGFTITSADYDRVLEKLKKTATGWMTTINGKELKVEGQITYYNRYKRQNVVKDLSVELDRLSEESVNNDISSWTKGRSGEALSLLKKRFSHRPVQEKFVCLNCGFETHADEQAALNIARSWLFLRSQEYKKYQTNKTTGNTDKRAFVETWQSFYRKKLKEVWKPAV

SEQ ID NO: 25710 - protein, 978 aa, synthetic construct
  REGION 1..978: note = engineered CasX variant
QEIKRINKIRRRLVKDSNTKKAGKTGPMKTLLVRVMTPDLRERLENLRKKPENIPQPISNTSRANLNKLLTDYTEMKKAILHVYWEEFQKDPVGLMSRVAQPASKKIDQNKLKPEMDEKGNLTTAGFACSQCGQPLFVYKLEQVSEKGKAYTNYFGRCNVAEHEKLILLAQLKPEKDSDEAVTYSLGKFGQRALDFYSIHVTKESTHPVKPLAQIAGNRYASGPVGKALSDACMGTIASFLSKYQDIIIEHQKVVKGNQKRLESLRELAGKENLEYPSVTLPPQPHTKEGVDAYNEVIARVRMWVNLNLWQKLKLSRDDAKPLLRLKGFPSFPLVERQANEVDWWDMVCNVKKLINEKKEDGKVFWQNLAGYKRQEALRPYLSSEEDRKKGKKFARYQLGDLLLHLEKKHGEDWGKVYDEAWERIDKKVEGLSKHIKLEEERRSEDAQSKAALTDWLRAKASFVIEGLKEADKDEFCRCELKLQKWYGDLRGKPFAIEAENSILDISGFSKQYNCAFIWQKDGVKKLNLYLIINYFKGGKLRFKKIKPEAFEANRFYTVINKKSGEIVPMEVNFNFDDPNLIILPLAFGKRQGREFIWNDLLSLETGSLKLANGRVIEKTLYNRRTRQDEPALFVALTFERREVLDSSNIKPMNLIGVDRGENIPAVIALTDPEGFPLSRFEDSLGNPTHILRIGESYKEKQRTIQAKKEVEQRRAGGYSRKYASKAKNLADDMVRNTARDLLYYAVTQDAMLIFENLSRGFGRQGKRTFMAERQYTRMEDWLTAKLAYEGLPSKTYLSKTLAQYTSKTCSNCGFTITSADYDRVLEKLKKTATGWMTTINGKELKVEGQITYYNRYKRQNVVKDLSVELDRLSEESVNNDISSWTKGRSGEALSLLKKRFSHRPVQEKFVCLNCGFETHADEQAALNIARSWLFLRSQEYKKYQTNKTTGNTDKRAFVETWQSFYRKKLKEVWKPAV

SEQ ID NO: 25711 - protein, 978 aa, synthetic construct
  REGION 1..978: note = engineered CasX variant
QEIKRINKIRRRLVKDSNTKKAGKTGPMKTLLVRVMTPDLRERLENLRKKPENIPQPISNTSRANLNKLLTDYTEMKKAILHVYWEEFQKDPVGLMSRVAQPASKKIDQNKLKPEMDEKGNLTTAGFACSQCGQPLFVYKLEQVSEKGKAYTNYFGRCNVAEHEKLILLAQLKPEKDSDEAVTYSLGKFGQRALDFYSIHVTKESTHPVKPLAQIAGNRYASGPVGKALSDACMGTIASFLSKYQDIIIEHQKVVKGNQKRLESLRELAGKENLEYPSVTLPPQPHTKEGVDAYNEVIARVRMWVNLNLWQKLKLSRDDAKPLLRLKGFPSFPLVERQANEVDWWDMVCNVKKLINEKKEDGKVFWQNLAGYKRQEALRPYLSSEEDRKKGKKFARYQLGDLLLHLEKKHGEDWGKVYDEAWERIDKKVEGLSKHIKLEEERRSEDAQSKAALTDWLRAKASFVIEGLKEADKDEFCRCELKLQKWYGDLRGKPFAIEAENSILDISGFSKQYNCAFIWQKDGVKKLNLYLIINYFKGGKLRFKKIKPEAFEANRFYTVINKKSGEIVPMEVNFNFDDPNLIILPLAFGKRQGREFIWNDLLSLETGSLKLANGRVIEKTLYNRRTRQDEPALFVALTFERREVLDSSNIKPMNLIGVDRGENIPAVIALTDPEGFPLGRFKDSLGNPTHILRIGESYKEKQRTIQAKKEVEQRRAGGYSRKYASKAKNLADDMVRNTARDLLYYAVTQDAMLIFENLSRGFGRQGKRTFMAERQYTRMEDWLTAKLAYEGLPSKTYLSKTLAQYTSKTCSNCGFTITSADYDRVLEKLKKTATGWMTTINGKELKVEGQITYYNRYKRQNVVKDLSVELDRLSEESVNNDISSWTKGRSGEALSLLKKRFSHRPVQEKFVCLNCGFETHADEQAALNIARSWLFLRSQEYKKYQTNKTTGNTDKRAFVETWQSFYRKKLKEVWKPAV

SEQ ID NO: 25712 - protein, 978 aa, synthetic construct
  REGION 1..978: note = engineered CasX variant
QEIKRINKIRRRLVKDSNTKKAGKTGPMKTLLVRVMTPDLRERLENLRKKPENIPQPISNTSRANLNKLLTDYTEMKKAILHVYWEEFQKDPVGLMSRVAQPASKKIDQNKLKPEMDEKGNLTTAGFACSQCGQPLFVYKLEQVSEKGKAYTNYFGRCNVAEHEKLILLAQLKPEKDSDEAVTYSLGKFGQRALDFYSIHVTKESTHPVKPLAQIAGNRYASGPVGKALSDACMGTIASFLSKYQDIIIEHQKVVKGNQKRLESLRELAGKENLEYPSVTLPPQPHTKEGVDAYNEVIARVRMWVNLNLWQKLKLSRDDAKPLLRLKGFPSFPLVERQANEVDWWDMVCNVKKLINEKKEDGKVFWQNLAGYKRQEALRPYLSSEEDRKKGKKFARYQLGDLLLHLEKKHGEDWGKVYDEAWERIDKKVEGLSKHIKLEEERRSEDAQSKAALTDWLRAKASFVIEGLKEADKDEFCRCELKLQKWYGDLRGKPFAIEAENSILDISGFSKQYNCAFIWQKDGVKKLNLYLIINYFKGGKLRFKKIKPEAFEANRFYTVINKKSGEIVPMEVNFNFDDPNLIILPLAFGKRQGREFIWNDLLSLETGSLKLANGRVIEKTLYNRRTRQDEPALFVALTFERREVLDSSNIKPMNLIGVDRGENIPAVIALTDPEGFPLGRFKDSEGNPTHILRIGESYKEKQRTIQAKKEVEQRRAGGYSRKYASKAKNLADDMVRNTARDLLYYAVTQDAMLIFENLSRGFGRQGKRTFMAERQYTRMEDWLTAKLAYEGLPSKTYLSKTLAQYTSKTCSNCGFTITSADYDRVLEKLKKTATGWMTTINGKELKVEGQITYYNRYKRQNVVKDLSVELDRLSEESVNNDISSWTKGRSGEALSLLKKRFSHRPVQEKFVCLNCGFETHADEQAALNIARSWLFLRSQEYKKYQTNKTTGNTDKRAFVETWQSFYRKKLKEVWKPAV

SEQ ID NO: 25713 - protein, 978 aa, synthetic construct
  REGION 1..978: note = engineered CasX variant
QEIKRINKIRRRLVKDSNTKKAGKTGPMKTLLVRVMTPDLRERLENLRKKPENIPQPISNTSRANLNKLLTDYTEMKKAILHVYWEEFQKDPVGLMSRVAQPASKKIDQNKLKPEMDEKGNLTTAGFACSQCGQPLFVYKLEQVSEKGKAYTNYFGRCNVAEHEKLILLAQLKPEKDSDEAVTYSLGKFGQRALDFYSIHVTKESTHPVKPLAQIAGNRYASGPVGKALSDACMGTIASFLSKYQDIIIEHQKVVKGNQKRLESLRELAGKENLEYPSVTLPPQPHTKEGVDAYNEVIARVRMWVNLNLWQKLKLSRDDAKPLLRLKGFPSFPLVERQANEVDWWDMVCNVKKLINEKKEDGKVFWQNLAGYKRQEALRPYLSSEEDRKKGKKFARYQLGDLLLHLEKKHGEDWGKVYDEAWERIDKKVEGLSKHIKLEEERRSEDAQSKAALTDWLRAKASFVIEGLKEADKDEFCRCELKLQKWYGDLRGKPFAIEAENSILDISGFSKQYNCAFIWQKDGVKKLNLYLIINYFKGGKLRFKKIKPEAFEANRFYTVINKKSGEIVPMEVNFNFDDPNLIILPLAFGKRQGREFIWNDLLSLETGSLKLANGRVIEKTLYNRRTRQDEPALFVALTFERREVLDSSNIKPMNLIGVDRGENIPAVIALTDPEGCVLSRFKDSNGNPTHILRIGESYKEKQRTIQAKKEVVQRRAGGYSRKYASKAKNLADDMVRNTARDLLYYAVTQDAMLIFENLSRGFGRQGKRTFMAERQYTRMEDWLTAKLAYEGLPSKTYLSKTLAQYTSKTCSNCGFTITSADYDRVLEKLKKTATGWMTTINGKELKVEGQITYYNRYKRQNVVKDLSVELDRLSEESVNNDISSWTKGRSGEALSLLKKRFSHRPVQEKFVCLNCGFETHADEQAALNIARSWLFLRSQEYKKYQTNKTTGNTDKRAFVETWQSFYRKKLKEVWKPAV

SEQ ID NO: 25714 - protein, 978 aa, synthetic construct
  REGION 1..978: note = engineered CasX variant
QEIKRINKIRRRLVKDSNTKKAGKTGPMKTLLVRVMTPDLRERLENLRKKPENIPQPISNTSRANLNKLLTDYTEMKKAILHVYWEEFQKDPVGLMSRVAQPASKKIDQNKLKPEMDEKGNLTTAGFACSQCGQPLFVYKLEQVSEKGKAYTNYFGRCNVAEHEKLILLAQLKPEKDSDEAVTYSLGKFGQRALDFYSIHVTKESTHPVKPLAQIAGNRYASGPVGKALSDACMGTIASFLSKYQDIIIEHQKVVKGNQKRLESLRELAGKENLEYPSVTLPPQPHTKEGVDAYNEVIARVRMWVNLNLWQKLKLSRDDAKPLLRLKGFPSFPLVERQANEVDWWDMVCNVKKLINEKKEDGKVFWQNLAGYKRQEALRPYLSSEEDRKKGKKFARYQLGDLLLHLEKKHGEDWGKVYDEAWERIDKKVEGLSKHIKLEEERRSEDAQSKAALTDWLRAKASFVIEGLKEADKDEFCRCELKLQKWYGDLRGKPFAIEAENSILDISGFSKQYNCAFIWQKDGVKKLNLYLIINYFKGGKLRFKKIKPEAFEANRFYTVINKKSGEIVPMEVNFNFDDPNLIILPLAFGKRQGREFIWNDLLSLETGSLKLANGRVIEKTLYNRRTRQDEPALFVALTFERREVLDSSNIKPMNLIGVDRGENIPAVIALTDPEGCVLSRFKDSNGNPTHILRIGESYKEKQRTIQAKKEVEQRRAGGYSRKYASKAKNLADDMVRNTARDLLYYAVTQDAMLIFENLSRGFGRQGKRTFMAERQYTRMEDWLTAKLAYEGLPSKTYLSKTLAQYTSKTCSNCGFTITSADYDRVLEKLKKTATGWMTTINGKELKVEGQITYYNRYKRQNVVKDLSVELDRLSEESVNNDISSWTKGRSGEALSLLKKRFSHRPVQEKFVCLNCGFETHADEQAALNIARSWLFLRSQEYKKYQTNKTTGNTDKRAFVETWQSFYRKKLKEVWKPAV

SEQ ID NO: 25715 - protein, 978 aa, synthetic construct
  REGION 1..978: note = engineered CasX variant
QEIKRINKIRRRLVKDSNTKKAGKTGPMKTLLVRVMTPDLRERLENLRKKPENIPQPISNTSRANLNKLLTDYTEMKKAILHVYWEEFQKDPVGLMSRVAQPASKKIDQNKLKPEMDEKGNLTTAGFACSQCGQPLFVYKLEQVSEKGKAYTNYFGRCNVAEHEKLILLAQLKPEKDSDEAVTYSLGKFGQRALDFYSIHVTKESTHPVKPLAQIAGNRYASGPVGKALSDACMGTIASFLSKYQDIIIEHQKVVKGNQKRLESLRELAGKENLEYPSVTLPPQPHTKEGVDAYNEVIARVRMWVNLNLWQKLKLSRDDAKPLLRLKGFPSFPLVERQANEVDWWDMVCNVKKLINEKKEDGKVFWQNLAGYKRQEALRPYLSSEEDRKKGKKFARYQLGDLLLHLEKKHGEDWGKVYDEAWERIDKKVEGLSKHIKLEEERRSEDAQSKAALTDWLRAKASFVIEGLKEADKDEFCRCELKLQKWYGDLRGKPFAIEAENSILDISGFSKQYNCAFIWQKDGVKKLNLYLIINYFKGGKLRFKKIKPEAFEANRFYTVINKKSGEIVPMEVNFNFDDPNLIILPLAFGKRQGREFIWNDLLSLETGSLKLANGRVIEKTLYNRRTRQDEPALFVALTFERREVLDSSNIKPMNLIGVDRGENIPAVIALTDPEGCVLSRFKDSLGNPTHILRIGESYKEKQRTIQAKKEVVQRRAGGYSRKYASKAKNLADDMVRNTARDLLYYAVTQDAMLIFENLSRGFGRQGKRTFMAERQYTRMEDWLTAKLAYEGLPSKTYLSKTLAQYTSKTCSNCGFTITSADYDRVLEKLKKTATGWMTTINGKELKVEGQITYYNRYKRQNVVKDLSVELDRLSEESVNNDISSWTKGRSGEALSLLKKRFSHRPVQEKFVCLNCGFETHADEQAALNIARSWLFLRSQEYKKYQTNKTTGNTDKRAFVETWQSFYRKKLKEVWKPAV

SEQ ID NO: 25716 - protein, 978 aa, synthetic construct
  REGION 1..978: note = engineered CasX variant
QEIKRINKIRRRLVKDSNTKKAGKTGPMKTLLVRVMTPDLRERLENLRKKPENIPQPISNTSRANLNKLLTDYTEMKKAILHVYWEEFQKDPVGLMSRVAQPASKKIDQNKLKPEMDEKGNLTTAGFACSQCGQPLFVYKLEQVSEKGKAYTNYFGRCNVAEHEKLILLAQLKPEKDSDEAVTYSLGKFGQRALDFYSIHVTKESTHPVKPLAQIAGNRYASGPVGKALSDACMGTIASFLSKYQDIIIEHQKVVKGNQKRLESLRELAGKENLEYPSVTLPPQPHTKEGVDAYNEVIARVRMWVNLNLWQKLKLSRDDAKPLLRLKGFPSFPLVERQANEVDWWDMVCNVKKLINEKKEDGKVFWQNLAGYKRQEALRPYLSSEEDRKKGKKFARYQLGDLLLHLEKKHGEDWGKVYDEAWERIDKKVEGLSKHIKLEEERRSEDAQSKAALTDWLRAKASFVIEGLKEADKDEFCRCELKLQKWYGDLRGKPFAIEAENSILDISGFSKQYNCAFIWQKDGVKKLNLYLIINYFKGGKLRFKKIKPEAFEANRFYTVINKKSGEIVPMEVNFNFDDPNLIILPLAFGKRQGREFIWNDLLSLETGSLKLANGRVIEKTLYNRRTRQDEPALFVALTFERREVLDSSNIKPMNLIGVDRGENIPAVIALTDPEGCVLSRFKDSLGNPTHILRIGESYKEKQRTIQAKKEVEQRRAGGYSRKYASKAKNLADDMVRNTARDLLYYAVTQDAMLIFENLSRGFGRQGKRTFMAERQYTRMEDWLTAKLAYEGLPSKTYLSKTLAQYTSKTCSNCGFTITSADYDRVLEKLKKTATGWMTTINGKELKVEGQITYYNRYKRQNVVKDLSVELDRLSEESVNNDISSWTKGRSGEALSLLKKRFSHRPVQEKFVCLNCGFETHADEQAALNIARSWLFLRSQEYKKYQTNKTTGNTDKRAFVETWQSFYRKKLKEVWKPAV

SEQ ID NO: 25717 - protein, 978 aa, synthetic construct
  REGION 1..978: note = engineered CasX variant
QEIKRINKIRRRLVKDSNTKKAGKTGPMKTLLVRVMTPDLRERLENLRKKPENIPQPISNTSRANLNKLLTDYTEMKKAILHVYWEEFQKDPVGLMSRVAQPASKKIDQNKLKPEMDEKGNLTTAGFACSQCGQPLFVYKLEQVSEKGKAYTNYFGRCNVAEHEKLILLAQLKPEKDSDEAVTYSLGKFGQRALDFYSIHVTKESTHPVKPLAQIAGNRYASGPVGKALSDACMGTIASFLSKYQDIIIEHQKVVKGNQKRLESLRELAGKENLEYPSVTLPPQPHTKEGVDAYNEVIARVRMWVNLNLWQKLKLSRDDAKPLLRLKGFPSFPLVERQANEVDWWDMVCNVKKLINEKKEDGKVFWQNLAGYKRQEALRPYLSSEEDRKKGKKFARYQLGDLLLHLEKKHGEDWGKVYDEAWERIDKKVEGLSKHIKLEEERRSEDAQSKAALTDWLRAKASFVIEGLKEADKDEFCRCELKLQKWYGDLRGKPFAIEAENSILDISGFSKQYNCAFIWQKDGVKKLNLYLIINYFKGGKLRFKKIKPEAFEANRFYTVINKKSGEIVPMEVNFNFDDPNLIILPLAFGKRQGREFIWNDLLSLETGSLKLANGRVIEKTLYNRRTRQDEPALFVALTFERREVLDSSNIKPMNLIGVDRGENIPAVIALTDPEGCTLSRFKDSLGNPTHILRIGESYKEKQSTNQAKKEVEQRRAGGYSRKYASKAKNLADDMVRNTARDLLYYAVTQDAMLIFENLSRGFGRQGKRTFMAERQYTRMEDWLTAKLAYEGLPSKTYLSKTLAQYTSKTCSNCGFTITSADYDRVLEKLKKTATGWMTTINGKELKVEGQITYYNRYKRQNVVKDLSVELDRLSEESVNNDISSWTKGRSGEALSLLKKRFSHRPVQEKFVCLNCGFETHADEQAALNIARSWLFLRSQEYKKYQTNKTTGNTDKRAFVETWQSFYRKKLKEVWKPAV

SEQ ID NO: 25718 - protein, 978 aa, synthetic construct
  REGION 1..978: note = engineered CasX variant
QEIKRINKIRRRLVKDSNTKKAGKTGPMKTLLVRVMTPDLRERLENLRKKPENIPQPISNTSRANLNKLLTDYTEMKKAILHVYWEEFQKDPVGLMSRVAQPASKKIDQNKLKPEMDEKGNLTTAGFACSQCGQPLFVYKLEQVSEKGKAYTNYFGRCNVAEHEKLILLAQLKPEKDSDEAVTYSLGKFGQRALDFYSIHVTKESTHPVKPLAQIAGNRYASGPVGKALSDACMGTIASFLSKYQDIIIEHQKVVKGNQKRLESLRELAGKENLEYPSVTLPPQPHTKEGVDAYNEVIARVRMWVNLNLWQKLKLSRDDAKPLLRLKGFPSFPLVERQANEVDWWDMVCNVKKLINEKKEDGKVFWQNLAGYKRQEALRPYLSSEEDRKKGKKFARYQLGDLLLHLEKKHGEDWGKVYDEAWERIDKKVEGLSKHIKLEEERRSEDAQSKAALTDWLRAKASFVIEGLKEADKDEFCRCELKLQKWYGDLRGKPFAIEAENSILDISGFSKQYNCAFIWQKDGVKKLNLYLIINYFKGGKLRFKKIKPEAFEANRFYTVINKKSGEIVPMEVNFNFDDPNLIILPLAFGKRQGREFIWNDLLSLETGSLKLANGRVIEKTLYNRRTRQDEPALFVALTFERREVLDSSNIKPMNLIGVDRGENIPAVIALTDPEGCTLSRFKDSLGNPTHILRIGESYKEKQSTIQAKKEVEQRRAGGYSRKYASKAKNLADDMVRNTARDLLYYAVTQDAMLIFENLSRGFGRQGKRTFMAERQYTRMEDWLTAKLAYEGLPSKTYLSKTLAQYTSKTCSNCGFTITSADYDRVLEKLKKTATGWMTTINGKELKVEGQITYYNRYKRQNVVKDLSVELDRLSEESVNNDISSWTKGRSGEALSLLKKRFSHRPVQEKFVCLNCGFETHADEQAALNIARSWLFLRSQEYKKYQTNKTTGNTDKRAFVETWQSFYRKKLKEVWKPAV

SEQ ID NO: 25719 - protein, 978 aa, synthetic construct
  REGION 1..978: note = engineered CasX variant
QEIKRINKIRRRLVKDSNTKKAGKTGPMKTLLVRVMTPDLRERLENLRKKPENIPQPISNTSRANLNKLLTDYTEMKKAILHVYWEEFQKDPVGLMSRVAQPASKKIDQNKLKPEMDEKGNLTTAGFACSQCGQPLFVYKLEQVSEKGKAYTNYFGRCNVAEHEKLILLAQLKPEKDSDEAVTYSLGKFGQRALDFYSIHVTKESTHPVKPLAQIAGNRYASGPVGKALSDACMGTIASFLSKYQDIIIEHQKVVKGNQKRLESLRELAGKENLEYPSVTLPPQPHTKEGVDAYNEVIARVRMWVNLNLWQKLKLSRDDAKPLLRLKGFPSFPLVERQANEVDWWDMVCNVKKLINEKKEDGKVFWQNLAGYKRQEALRPYLSSEEDRKKGKKFARYQLGDLLLHLEKKHGEDWGKVYDEAWERIDKKVEGLSKHIKLEEERRSEDAQSKAALTDWLRAKASFVIEGLKEADKDEFCRCELKLQKWYGDLRGKPFAIEAENSILDISGFSKQYNCAFIWQKDGVKKLNLYLIINYFKGGKLRFKKIKPEAFEANRFYTVINKKSGEIVPMEVNFNFDDPNLIILPLAFGKRQGREFIWNDLLSLETGSLKLANGRVIEKTLYNRRTRQDEPALFVALTFERREVLDSSNIKPMNLIGVDRGENIPAVIALTDPEGCTLSRFKDSLGNPTHILRIGESYKEKQRTNQAKKEVEQRRAGGYSRKYASKAKNLADDMVRNTARDLLYYAVTQDAMLIFENLSRGFGRQGKRTFMAERQYTRMEDWLTAKLAYEGLPSKTYLSKTLAQYTSKTCSNCGFTITSADYDRVLEKLKKTATGWMTTINGKELKVEGQITYYNRYKRQNVVKDLSVELDRLSEESVNNDISSWTKGRSGEALSLLKKRFSHRPVQEKFVCLNCGFETHADEQAALNIARSWLFLRSQEYKKYQTNKTTGNTDKRAFVETWQSFYRKKLKEVWKPAV

SEQ ID NO: 25720 - protein, 978 aa, synthetic construct
  REGION 1..978: note = engineered CasX variant
QEIKRINKIRRRLVKDSNTKKAGKTGPMKTLLVRVMTPDLRERLENLRKKPENIPQPISNTSRANLNKLLTDYTEMKKAILHVYWEEFQKDPVGLMSRVAQPASKKIDQNKLKPEMDEKGNLTTAGFACSQCGQPLFVYKLEQVSEKGKAYTNYFGRCNVAEHEKLILLAQLKPEKDSDEAVTYSLGKFGQRALDFYSIHVTKESTHPVKPLAQIAGNRYASGPVGKALSDACMGTIASFLSKYQDIIIEHQKVVKGNQKRLESLRELAGKENLEYPSVTLPPQPHTKEGVDAYNEVIARVRMWVNLNLWQKLKLSRDDAKPLLRLKGFPSFPLVERQANEVDWWDMVCNVKKLINEKKEDGKVFWQNLAGYKRQEALRPYLSSEEDRKKGKKFARYQLGDLLLHLEKKHGEDWGKVYDEAWERIDKKVEGLSKHIKLEEERRSEDAQSKAALTDWLRAKASFVIEGLKEADKDEFCRCELKLQKWYGDLRGKPFAIEAENSILDISGFSKQYNCAFIWQKDGVKKLNLYLIINYFKGGKLRFKKIKPEAFEANRFYTVINKKSGEIVPMEVNFNFDDPNLIILPLAFGKRQGREFIWNDLLSLETGSLKLANGRVIEKTLYNRRTRQDEPALFVALTFERREVLDSSNIKPMNLIGVDRGENIPAVIALTDPEGCTLSRFKDSLGNPTHILRIGESYKEKQRTIQAKKEVEQRRAGGYSRKYASKAKNLADDMVRNTARDLLYYAVTQDAMLIFENLSRGFGRQGKRTFMAERQYTRMEDWLTAKLAYEGLPSKTYLSKTLAQYTSKTCSNCGFTITSADYDRVLEKLKKTATGWMTTINGKELKVEGQITYYNRYKRQNVVKDLSVELDRLSEESVNNDISSWTKGRSGEALSLLKKRFSHRPVQEKFVCLNCGFETHADEQAALNIARSWLFLRSQEYKKYQTNKTTGNTDKRAFVETWQSFYRKKLKEVWKPAV

SEQ ID NO: 25721 - protein, 978 aa, synthetic construct
  REGION 1..978: note = engineered CasX variant
QEIKRINKIRRRLVKDSNTKKAGKTGPMKTLLVRVMTPDLRERLENLRKKPENIPQPISNTSRANLNKLLTDYTEMKKAILHVYWEEFQKDPVGLMSRVAQPASKKIDQNKLKPEMDEKGNLTTAGFACSQCGQPLFVYKLEQVSEKGKAYTNYFGRCNVAEHEKLILLAQLKPEKDSDEAVTYSLGKFGQRALDFYSIHVTKESTHPVKPLAQIAGNRYASGPVGKALSDACMGTIASFLSKYQDIIIEHQKVVKGNQKRLESLRELAGKENLEYPSVTLPPQPHTKEGVDAYNEVIARVRMWVNLNLWQKLKLSRDDAKPLLRLKGFPSFPLVERQANEVDWWDMVCNVKKLINEKKEDGKVFWQNLAGYKRQEALRPYLSSEEDRKKGKKFARYQLGDLLLHLEKKHGEDWGKVYDEAWERIDKKVEGLSKHIKLEEERRSEDAQSKAALTDWLRAKASFVIEGLKEADKDEFCRCELKLQKWYGDLRGKPFAIEAENSILDISGFSKQYNCAFIWQKDGVKKLNLYLIINYFKGGKLRFKKIKPEAFEANRFYTVINKKSGEIVPMEVNFNFDDPNLIILPLAFGKRQGREFIWNDLLSLETGSLKLANGRVIEKTLYNRRTRQDEPALFVALTFERREVLDSSNIKPMNLIGVDRGENIPAVIALTDPEGCTLSRFKDSLGNPTHILRIGESYKEKQRTICAKKEVEQRRAGGYSRKYASKAKNLADDMVRNTARDLLYYAVTQDAMLIFENLSRGFGRQGKRTFMAERQYTRMEDWLTAKLAYEGLPSKTYLSKTLAQYTSKTCSNCGFTITSADYDRVLEKLKKTATGWMTTINGKELKVEGQITYYNRYKRQNVVKDLSVELDRLSEESVNNDISSWTKGRSGEALSLLKKRFSHRPVQEKFVCLNCGFETHADEQAALNIARSWLFLRSQEYKKYQTNKTTGNTDKRAFVETWQSFYRKKLKEVWKPAV

SEQ ID NO: 25722 - protein, 978 aa, synthetic construct
  REGION 1..978: note = engineered CasX variant
QEIKRINKIRRRLVKDSNTKKAGKTGPMKTLLVRVMTPDLRERLENLRKKPENIPQPISNTSRANLNKLLTDYTEMKKAILHVYWEEFQKDPVGLMSRVAQPASKKIDQNKLKPEMDEKGNLTTAGFACSQCGQPLFVYKLEQVSEKGKAYTNYFGRCNVAEHEKLILLAQLKPEKDSDEAVTYSLGKFGQRALDFYSIHVTKESTHPVKPLAQIAGNRYASGPVGKALSDACMGTIASFLSKYQDIIIEHQKVVKGNQKRLESLRELAGKENLEYPSVTLPPQPHTKEGVDAYNEVIARVRMWVNLNLWQKLKLSRDDAKPLLRLKGFPSFPLVERQANEVDWWDMVCNVKKLINEKKEDGKVFWQNLAGYKRQEALRPYLSSEEDRKKGKKFARYQLGDLLLHLEKKHGEDWGKVYDEAWERIDKKVEGLSKHIKLEEERRSEDAQSKAALTDWLRAKASFVIEGLKEADKDEFCRCELKLQKWYGDLRGKPFAIEAENSILDISGFSKQYNCAFIWQKDGVKKLNLYLIINYFKGGKLRFKKIKPEAFEANRFYTVINKKSGEIVPMEVNFNFDDPNLIILPLAFGKRQGREFIWNDLLSLETGSLKLANGRVIEKTLYNRRTRQDEPALFVALTFERREVLDSSNIKPMNLIGVDRGENIPAVIALTDPEGCTLSRFKDSLGNPTHILRIGESHKEKQRTIQAKKEVEQRRAGGYSRKYASKAKNLADDMVRNTARDLLYYAVTQDAMLIFENLSRGFGRQGKRTFMAERQYTRMEDWLTAKLAYEGLPSKTYLSKTLAQYTSKTCSNCGFTITSADYDRVLEKLKKTATGWMTTINGKELKVEGQITYYNRYKRQNVVKDLSVELDRLSEESVNNDISSWTKGRSGEALSLLKKRFSHRPVQEKFVCLNCGFETHADEQAALNIARSWLFLRSQEYKKYQTNKTTGNTDKRAFVETWQSFYRKKLKEVWKPAV

SEQ ID NO: 25723 - protein, 978 aa, synthetic construct
  REGION 1..978: note = engineered CasX variant
QEIKRINKIRRRLVKDSNTKKAGKTGPMKTLLVRVMTPDLRERLENLRKKPENIPQPISNTSRANLNKLLTDYTEMKKAILHVYWEEFQKDPVGLMSRVAQPASKKIDQNKLKPEMDEKGNLTTAGFACSQCGQPLFVYKLEQVSEKGKAYTNYFGRCNVAEHEKLILLAQLKPEKDSDEAVTYSLGKFGQRALDFYSIHVTKESTHPVKPLAQIAGNRYASGPVGKALSDACMGTIASFLSKYQDIIIEHQKVVKGNQKRLESLRELAGKENLEYPSVTLPPQPHTKEGVDAYNEVIARVRMWVNLNLWQKLKLSRDDAKPLLRLKGFPSFPLVERQANEVDWWDMVCNVKKLINEKKEDGKVFWQNLAGYKRQEALRPYLSSEEDRKKGKKFARYQLGDLLLHLEKKHGEDWGKVYDEAWERIDKKVEGLSKHIKLEEERRSEDAQSKAALTDWLRAKASFVIEGLKEADKDEFCRCELKLQKWYGDLRGKPFAIEAENSILDISGFSKQYNCAFIWQKDGVKKLNLYLIINYFKGGKLRFKKIKPEAFEANRFYTVINKKSGEIVPMEVNFNFDDPNLIILPLAFGKRQGREFIWNDLLSLETGSLKLANGRVIEKTLYNRRTRQDEPALFVALTFERREVLDSSNIKPMNLIGVDRGENIPAVIALTDPEGCSLSRFKDSLGNPTHILRIGESYKEKQRTHQAKKYVEQRRAGGYSRKYASKAKNLADDMVRNTARDLLYYAVTQDAMLIFENLSRGFGRQGKRTFMAERQYTRMEDWLTAKLAYEGLPSKTYLSKTLAQYTSKTCSNCGFTITSADYDRVLEKLKKTATGWMTTINGKELKVEGQITYYNRYKRQNVVKDLSVELDRLSEESVNNDISSWTKGRSGEALSLLKKRFSHRPVQEKFVCLNCGFETHADEQAALNIARSWLFLRSQEYKKYQTNKTTGNTDKRAFVETWQSFYRKKLKEVWKPAV

SEQ ID NO: 25724 - protein, 978 aa, synthetic construct
  REGION 1..978: note = engineered CasX variant
QEIKRINKIRRRLVKDSNTKKAGKTGPMKTLLVRVMTPDLRERLENLRKKPENIPQPISNTSRANLNKLLTDYTEMKKAILHVYWEEFQKDPVGLMSRVAQPASKKIDQNKLKPEMDEKGNLTTAGFACSQCGQPLFVYKLEQVSEKGKAYTNYFGRCNVAEHEKLILLAQLKPEKDSDEAVTYSLGKFGQRALDFYSIHVTKESTHPVKPLAQIAGNRYASGPVGKALSDACMGTIASFLSKYQDIIIEHQKVVKGNQKRLESLRELAGKENLEYPSVTLPPQPHTKEGVDAYNEVIARVRMWVNLNLWQKLKLSRDDAKPLLRLKGFPSFPLVERQANEVDWWDMVCNVKKLINEKKEDGKVFWQNLAGYKRQEALRPYLSSEEDRKKGKKFARYQLGDLLLHLEKKHGEDWGKVYDEAWERIDKKVEGLSKHIKLEEERRSEDAQSKAALTDWLRAKASFVIEGLKEADKDEFCRCELKLQKWYGDLRGKPFAIEAENSILDISGFSKQYNCAFIWQKDGVKKLNLYLIINYFKGGKLRFKKIKPEAFEANRFYTVINKKSGEIVPMEVNFNFDDPNLIILPLAFGKRQGREFIWNDLLSLETGSLKLANGRVIEKTLYNRRTRQDEPALFVALTFERREVLDSSNIKPMNLIGVDRGENIPAVIALTDPEGCSLSRFKDSLGNPTHILRIGASYKEKQRTIQAKKEVEQRRAGGYSRKYASKAKNLADDMVRNTARDLLYYAVTQDAMLIFENLSRGFGRQGKRTFMAERQYTRMEDWLTAKLAYEGLPSKTYLSKTLAQYTSKTCSNCGFTITSADYDRVLEKLKKTATGWMTTINGKELKVEGQITYYNRYKRQNVVKDLSVELDRLSEESVNNDISSWTKGRSGEALSLLKKRFSHRPVQEKFVCLNCGFETHADEQAALNIARSWLFLRSQEYKKYQTNKTTGNTDKRAFVETWQSFYRKKLKEVWKPAV

SEQ ID NO: 25725 - protein, 978 aa, synthetic construct
  REGION 1..978: note = engineered CasX variant
QEIKRINKIRRRLVKDSNTKKAGKTGPMKTLLVRVMTPDLRERLENLRKKPENIPQPISNTSRANLNKLLTDYTEMKKAILHVYWEEFQKDPVGLMSRVAQPASKKIDQNKLKPEMDEKGNLTTAGFACSQCGQPLFVYKLEQVSEKGKAYTNYFGRCNVAEHEKLILLAQLKPEKDSDEAVTYSLGKFGQRALDFYSIHVTKESTHPVKPLAQIAGNRYASGPVGKALSDACMGTIASFLSKYQDIIIEHQKVVKGNQKRLESLRELAGKENLEYPSVTLPPQPHTKEGVDAYNEVIARVRMWVNLNLWQKLKLSRDDAKPLLRLKGFPSFPLVERQANEVDWWDMVCNVKKLINEKKEDGKVFWQNLAGYKRQEALRPYLSSEEDRKKGKKFARYQLGDLLLHLEKKHGEDWGKVYDEAWERIDKKVEGLSKHIKLEEERRSEDAQSKAALTDWLRAKASFVIEGLKEADKDEFCRCELKLQKWYGDLRGKPFAIEAENSILDISGFSKQYNCAFIWQKDGVKKLNLYLIINYFKGGKLRFKKIKPEAFEANRFYTVINKKSGEIVPMEVNFNFDDPNLIILPLAFGKRQGREFIWNDLLSLETGSLKLANGRVIEKTLYNRRTRQDEPALFVALTFERREVLDSSNIKPMNLIGVDRGENIPAVIALTDPEGCPVSRFKDSLGNPTHILRIGESYKEKQRTIQAKKEVETRRAGGYSRKYASKAKNLADDMVRNTARDLLYYAVTQDAMLIFENLSRGFGRQGKRTFMAERQYTRMEDWLTAKLAYEGLPSKTYLSKTLAQYTSKTCSNCGFTITSADYDRVLEKLKKTATGWMTTINGKELKVEGQITYYNRYKRQNVVKDLSVELDRLSEESVNNDISSWTKGRSGEALSLLKKRFSHRPVQEKFVCLNCGFETHADEQAALNIARSWLFLRSQEYKKYQTNKTTGNTDKRAFVETWQSFYRKKLKEVWKPAV

SEQ ID NO: 25726 - protein, 978 aa, synthetic construct
  REGION 1..978: note = engineered CasX variant
QEIKRINKIRRRLVKDSNTKKAGKTGPMKTLLVRVMTPDLRERLENLRKKPENIPQPISNTSRANLNKLLTDYTEMKKAILHVYWEEFQKDPVGLMSRVAQPASKKIDQNKLKPEMDEKGNLTTAGFACSQCGQPLFVYKLEQVSEKGKAYTNYFGRCNVAEHEKLILLAQLKPEKDSDEAVTYSLGKFGQRALDFYSIHVTKESTHPVKPLAQIAGNRYASGPVGKALSDACMGTIASFLSKYQDIIIEHQKVVKGNQKRLESLRELAGKENLEYPSVTLPPQPHTKEGVDAYNEVIARVRMWVNLNLWQKLKLSRDDAKPLLRLKGFPSFPLVERQANEVDWWDMVCNVKKLINEKKEDGKVFWQNLAGYKRQEALRPYLSSEEDRKKGKKFARYQLGDLLLHLEKKHGEDWGKVYDEAWERIDKKVEGLSKHIKLEEERRSEDAQSKAALTDWLRAKASFVIEGLKEADKDEFCRCELKLQKWYGDLRGKPFAIEAENSILDISGFSKQYNCAFIWQKDGVKKLNLYLIINYFKGGKLRFKKIKPEAFEANRFYTVINKKSGEIVPMEVNFNFDDPNLIILPLAFGKRQGREFIWNDLLSLETGSLKLANGRVIEKTLYNRRTRQDEPALFVALTFERREVLDSSNIKPMNLIGVDRGENIPAVIALTDPEGCPVSRFKDSLGNPTHILRIGESYKEKQRTIQAKKEVEQRRAGGYSRKYASKAKNLADDMVRNTARDLLYYAVTQDAMLIFENLSRGFGRQGKRTFMAERQYTRMEDWLTAKLAYEGLPSKTYLSKTLAQYTSKTCSNCGFTITSADYDRVLEKLKKTATGWMTTINGKELKVEGQITYYNRYKRQNVVKDLSVELDRLSEESVNNDISSWTKGRSGEALSLLKKRFSHRPVQEKFVCLNCGFETHADEQAALNIARSWLFLRSQEYKKYQTNKTTGNTDKRAFVETWQSFYRKKLKEVWKPAV

SEQ ID NO: 25727 - protein, 978 aa, synthetic construct
  REGION 1..978: note = engineered CasX variant
QEIKRINKIRRRLVKDSNTKKAGKTGPMKTLLVRVMTPDLRERLENLRKKPENIPQPISNTSRANLNKLLTDYTEMKKAILHVYWEEFQKDPVGLMSRVAQPASKKIDQNKLKPEMDEKGNLTTAGFACSQCGQPLFVYKLEQVSEKGKAYTNYFGRCNVAEHEKLILLAQLKPEKDSDEAVTYSLGKFGQRALDFYSIHVTKESTHPVKPLAQIAGNRYASGPVGKALSDACMGTIASFLSKYQDIIIEHQKVVKGNQKRLESLRELAGKENLEYPSVTLPPQPHTKEGVDAYNEVIARVRMWVNLNLWQKLKLSRDDAKPLLRLKGFPSFPLVERQANEVDWWDMVCNVKKLINEKKEDGKVFWQNLAGYKRQEALRPYLSSEEDRKKGKKFARYQLGDLLLHLEKKHGEDWGKVYDEAWERIDKKVEGLSKHIKLEEERRSEDAQSKAALTDWLRAKASFVIEGLKEADKDEFCRCELKLQKWYGDLRGKPFAIEAENSILDISGFSKQYNCAFIWQKDGVKKLNLYLIINYFKGGKLRFKKIKPEAFEANRFYTVINKKSGEIVPMEVNFNFDDPNLIILPLAFGKRQGREFIWNDLLSLETGSLKLANGRVIEKTLYNRRTRQDEPALFVALTFERREVLDSSNIKPMNLIGVDRGENIPAVIALTDPEGCPVSRFKDSLGNPTHILRIGESYKEKQRCIQAKKEVETRRAGGYSRKYASKAKNLADDMVRNTARDLLYYAVTQDAMLIFENLSRGFGRQGKRTFMAERQYTRMEDWLTAKLAYEGLPSKTYLSKTLAQYTSKTCSNCGFTITSADYDRVLEKLKKTATGWMTTINGKELKVEGQITYYNRYKRQNVVKDLSVELDRLSEESVNNDISSWTKGRSGEALSLLKKRFSHRPVQEKFVCLNCGFETHADEQAALNIARSWLFLRSQEYKKYQTNKTTGNTDKRAFVETWQSFYRKKLKEVWKPAV

SEQ ID NO: 25728 - protein, 978 aa, synthetic construct
  REGION 1..978: note = engineered CasX variant
QEIKRINKIRRRLVKDSNTKKAGKTGPMKTLLVRVMTPDLRERLENLRKKPENIPQPISNTSRANLNKLLTDYTEMKKAILHVYWEEFQKDPVGLMSRVAQPASKKIDQNKLKPEMDEKGNLTTAGFACSQCGQPLFVYKLEQVSEKGKAYTNYFGRCNVAEHEKLILLAQLKPEKDSDEAVTYSLGKFGQRALDFYSIHVTKESTHPVKPLAQIAGNRYASGPVGKALSDACMGTIASFLSKYQDIIIEHQKVVKGNQKRLESLRELAGKENLEYPSVTLPPQPHTKEGVDAYNEVIARVRMWVNLNLWQKLKLSRDDAKPLLRLKGFPSFPLVERQANEVDWWDMVCNVKKLINEKKEDGKVFWQNLAGYKRQEALRPYLSSEEDRKKGKKFARYQLGDLLLHLEKKHGEDWGKVYDEAWERIDKKVEGLSKHIKLEEERRSEDAQSKAALTDWLRAKASFVIEGLKEADKDEFCRCELKLQKWYGDLRGKPFAIEAENSILDISGFSKQYNCAFIWQKDGVKKLNLYLIINYFKGGKLRFKKIKPEAFEANRFYTVINKKSGEIVPMEVNFNFDDPNLIILPLAFGKRQGREFIWNDLLSLETGSLKLANGRVIEKTLYNRRTRQDEPALFVALTFERREVLDSSNIKPMNLIGVDRGENIPAVIALTDPEGCPVSRFKDSLGNPTHILRIGESYKEKQRCIQAKKEVEQRRAGGYSRKYASKAKNLADDMVRNTARDLLYYAVTQDAMLIFENLSRGFGRQGKRTFMAERQYTRMEDWLTAKLAYEGLPSKTYLSKTLAQYTSKTCSNCGFTITSADYDRVLEKLKKTATGWMTTINGKELKVEGQITYYNRYKRQNVVKDLSVELDRLSEESVNNDISSWTKGRSGEALSLLKKRFSHRPVQEKFVCLNCGFETHADEQAALNIARSWLFLRSQEYKKYQTNKTTGNTDKRAFVETWQSFYRKKLKEVWKPAV

SEQ ID NO: 25729 - protein, 978 aa, synthetic construct
  REGION 1..978: note = engineered CasX variant
QEIKRINKIRRRLVKDSNTKKAGKTGPMKTLLVRVMTPDLRERLENLRKKPENIPQPISNTSRANLNKLLTDYTEMKKAILHVYWEEFQKDPVGLMSRVAQPASKKIDQNKLKPEMDEKGNLTTAGFACSQCGQPLFVYKLEQVSEKGKAYTNYFGRCNVAEHEKLILLAQLKPEKDSDEAVTYSLGKFGQRALDFYSIHVTKESTHPVKPLAQIAGNRYASGPVGKALSDACMGTIASFLSKYQDIIIEHQKVVKGNQKRLESLRELAGKENLEYPSVTLPPQPHTKEGVDAYNEVIARVRMWVNLNLWQKLKLSRDDAKPLLRLKGFPSFPLVERQANEVDWWDMVCNVKKLINEKKEDGKVFWQNLAGYKRQEALRPYLSSEEDRKKGKKFARYQLGDLLLHLEKKHGEDWGKVYDEAWERIDKKVEGLSKHIKLEEERRSEDAQSKAALTDWLRAKASFVIEGLKEADKDEFCRCELKLQKWYGDLRGKPFAIEAENSILDISGFSKQYNCAFIWQKDGVKKLNLYLIINYFKGGKLRFKKIKPEAFEANRFYTVINKKSGEIVPMEVNFNFDDPNLIILPLAFGKRQGREFIWNDLLSLETGSLKLANGRVIEKTLYNRRTRQDEPALFVALTFERREVLDSSNIKPMNLIGVDRGENIPAVIALTDPEGCPVSRFKDSLGNATHILRIGESYKEKQRTIQAKKEVEQRRAGGYSRKYASKAKNLADDMVRNTARDLLYYAVTQDAMLIFENLSRGFGRQGKRTFMAERQYTRMEDWLTAKLAYEGLPSKTYLSKTLAQYTSKTCSNCGFTITSADYDRVLEKLKKTATGWMTTINGKELKVEGQITYYNRYKRQNVVKDLSVELDRLSEESVNNDISSWTKGRSGEALSLLKKRFSHRPVQEKFVCLNCGFETHADEQAALNIARSWLFLRSQEYKKYQTNKTTGNTDKRAFVETWQSFYRKKLKEVWKPAV

SEQ ID NO: 25730 - protein, 978 aa, synthetic construct
  REGION 1..978: note = engineered CasX variant
QEIKRINKIRRRLVKDSNTKKAGKTGPMKTLLVRVMTPDLRERLENLRKKPENIPQPISNTSRANLNKLLTDYTEMKKAILHVYWEEFQKDPVGLMSRVAQPASKKIDQNKLKPEMDEKGNLTTAGFACSQCGQPLFVYKLEQVSEKGKAYTNYFGRCNVAEHEKLILLAQLKPEKDSDEAVTYSLGKFGQRALDFYSIHVTKESTHPVKPLAQIAGNRYASGPVGKALSDACMGTIASFLSKYQDIIIEHQKVVKGNQKRLESLRELAGKENLEYPSVTLPPQPHTKEGVDAYNEVIARVRMWVNLNLWQKLKLSRDDAKPLLRLKGFPSFPLVERQANEVDWWDMVCNVKKLINEKKEDGKVFWQNLAGYKRQEALRPYLSSEEDRKKGKKFARYQLGDLLLHLEKKHGEDWGKVYDEAWERIDKKVEGLSKHIKLEEERRSEDAQSKAALTDWLRAKASFVIEGLKEADKDEFCRCELKLQKWYGDLRGKPFAIEAENSILDISGFSKQYNCAFIWQKDGVKKLNLYLIINYFKGGKLRFKKIKPEAFEANRFYTVINKKSGEIVPMEVNFNFDDPNLIILPLAFGKRQGREFIWNDLLSLETGSLKLANGRVIEKTLYNRRTRQDEPALFVALTFERREVLDSSNIKPMNLIGVDRGENIPAVIALTDPEGCPVSRFKDSLGKPTHILRIGESYKEKQRTIQAKKEVEQRRAGGYSRKYASKAKNLADDMVRNTARDLLYYAVTQDAMLIFENLSRGFGRQGKRTFMAERQYTRMEDWLTAKLAYEGLPSKTYLSKTLAQYTSKTCSNCGFTITSADYDRVLEKLKKTATGWMTTINGKELKVEGQITYYNRYKRQNVVKDLSVELDRLSEESVNNDISSWTKGRSGEALSLLKKRFSHRPVQEKFVCLNCGFETHADEQAALNIARSWLFLRSQEYKKYQTNKTTGNTDKRAFVETWQSFYRKKLKEVWKPAV

SEQ ID NO: 25731 - protein, 978 aa, synthetic construct
  REGION 1..978: note = engineered CasX variant
QEIKRINKIRRRLVKDSNTKKAGKTGPMKTLLVRVMTPDLRERLENLRKKPENIPQPISNTSRANLNKLLTDYTEMKKAILHVYWEEFQKDPVGLMSRVAQPASKKIDQNKLKPEMDEKGNLTTAGFACSQCGQPLFVYKLEQVSEKGKAYTNYFGRCNVAEHEKLILLAQLKPEKDSDEAVTYSLGKFGQRALDFYSIHVTKESTHPVKPLAQIAGNRYASGPVGKALSDACMGTIASFLSKYQDIIIEHQKVVKGNQKRLESLRELAGKENLEYPSVTLPPQPHTKEGVDAYNEVIARVRMWVNLNLWQKLKLSRDDAKPLLRLKGFPSFPLVERQANEVDWWDMVCNVKKLINEKKEDGKVFWQNLAGYKRQEALRPYLSSEEDRKKGKKFARYQLGDLLLHLEKKHGEDWGKVYDEAWERIDKKVEGLSKHIKLEEERRSEDAQSKAALTDWLRAKASFVIEGLKEADKDEFCRCELKLQKWYGDLRGKPFAIEAENSILDISGFSKQYNCAFIWQKDGVKKLNLYLIINYFKGGKLRFKKIKPEAFEANRFYTVINKKSGEIVPMEVNFNFDDPNLIILPLAFGKRQGREFIWNDLLSLETGSLKLANGRVIEKTLYNRRTRQDEPALFVALTFERREVLDSSNIKPMNLIGVDRGENIPAVIALTDPEGCPTSRFKDSLGNPTHILRIGESYKRKQRTIQAKKEVEQRRAGGYSRKYASKAKNLADDMVRNTARDLLYYAVTQDAMLIFENLSRGFGRQGKRTFMAERQYTRMEDWLTAKLAYEGLPSKTYLSKTLAQYTSKTCSNCGFTITSADYDRVLEKLKKTATGWMTTINGKELKVEGQITYYNRYKRQNVVKDLSVELDRLSEESVNNDISSWTKGRSGEALSLLKKRFSHRPVQEKFVCLNCGFETHADEQAALNIARSWLFLRSQEYKKYQTNKTTGNTDKRAFVETWQSFYRKKLKEVWKPAV

SEQ ID NO: 25732 - protein, 978 aa, synthetic construct
  REGION 1..978: note = engineered CasX variant
QEIKRINKIRRRLVKDSNTKKAGKTGPMKTLLVRVMTPDLRERLENLRKKPENIPQPISNTSRANLNKLLTDYTEMKKAILHVYWEEFQKDPVGLMSRVAQPASKKIDQNKLKPEMDEKGNLTTAGFACSQCGQPLFVYKLEQVSEKGKAYTNYFGRCNVAEHEKLILLAQLKPEKDSDEAVTYSLGKFGQRALDFYSIHVTKESTHPVKPLAQIAGNRYASGPVGKALSDACMGTIASFLSKYQDIIIEHQKVVKGNQKRLESLRELAGKENLEYPSVTLPPQPHTKEGVDAYNEVIARVRMWVNLNLWQKLKLSRDDAKPLLRLKGFPSFPLVERQANEVDWWDMVCNVKKLINEKKEDGKVFWQNLAGYKRQEALRPYLSSEEDRKKGKKFARYQLGDLLLHLEKKHGEDWGKVYDEAWERIDKKVEGLSKHIKLEEERRSEDAQSKAALTDWLRAKASFVIEGLKEADKDEFCRCELKLQKWYGDLRGKPFAIEAENSILDISGFSKQYNCAFIWQKDGVKKLNLYLIINYFKGGKLRFKKIKPEAFEANRFYTVINKKSGEIVPMEVNFNFDDPNLIILPLAFGKRQGREFIWNDLLSLETGSLKLANGRVIEKTLYNRRTRQDEPALFVALTFERREVLDSSNIKPMNLIGVDRGENIPAVIALTDPEGCPSSRFKDSLGNPTHILRIGESYKEKQRTIQAKKEVEQRRAGGYSRKYASKAKNLADDMVRNTARDLLYYAVTQDAMLIFENLSRGFGRQGKRTFMAERQYTRMEDWLTAKLAYEGLPSKTYLSKTLAQYTSKTCSNCGFTITSADYDRVLEKLKKTATGWMTTINGKELKVEGQITYYNRYKRQNVVKDLSVELDRLSEESVNNDISSWTKGRSGEALSLLKKRFSHRPVQEKFVCLNCGFETHADEQAALNIARSWLFLRSQEYKKYQTNKTTGNTDKRAFVETWQSFYRKKLKEVWKPAV

SEQ ID NO: 25733 - protein, 978 aa, synthetic construct
  REGION 1..978: note = engineered CasX variant
QEIKRINKIRRRLVKDSNTKKAGKTGPMKTLLVRVMTPDLRERLENLRKKPENIPQPISNTSRANLNKLLTDYTEMKKAILHVYWEEFQKDPVGLMSRVAQPASKKIDQNKLKPEMDEKGNLTTAGFACSQCGQPLFVYKLEQVSEKGKAYTNYFGRCNVAEHEKLILLAQLKPEKDSDEAVTYSLGKFGQRALDFYSIHVTKESTHPVKPLAQIAGNRYASGPVGKALSDACMGTIASFLSKYQDIIIEHQKVVKGNQKRLESLRELAGKENLEYPSVTLPPQPHTKEGVDAYNEVIARVRMWVNLNLWQKLKLSRDDAKPLLRLKGFPSFPLVERQANEVDWWDMVCNVKKLINEKKEDGKVFWQNLAGYKRQEALRPYLSSEEDRKKGKKFARYQLGDLLLHLEKKHGEDWGKVYDEAWERIDKKVEGLSKHIKLEEERRSEDAQSKAALTDWLRAKASFVIEGLKEADKDEFCRCELKLQKWYGDLRGKPFAIEAENSILDISGFSKQYNCAFIWQKDGVKKLNLYLIINYFKGGKLRFKKIKPEAFEANRFYTVINKKSGEIVPMEVNFNFDDPNLIILPLAFGKRQGREFIWNDLLSLETGSLKLANGRVIEKTLYNRRTRQDEPALFVALTFERREVLDSSNIKPMNLIGVDRGENIPAVIALTDPEGCPSSRFKDSLGNPTHILRIGECYKEKQRTIQAKKEVEQRRAGGYSRKYASKAKNLADDMVRNTARDLLYYAVTQDAMLIFENLSRGFGRQGKRTFMAERQYTRMEDWLTAKLAYEGLPSKTYLSKTLAQYTSKTCSNCGFTITSADYDRVLEKLKKTATGWMTTINGKELKVEGQITYYNRYKRQNVVKDLSVELDRLSEESVNNDISSWTKGRSGEALSLLKKRFSHRPVQEKFVCLNCGFETHADEQAALNIARSWLFLRSQEYKKYQTNKTTGNTDKRAFVETWQSFYRKKLKEVWKPAV

SEQ ID NO: 25734 - protein, 978 aa, synthetic construct
  REGION 1..978: note = engineered CasX variant
QEIKRINKIRRRLVKDSNTKKAGKTGPMKTLLVRVMTPDLRERLENLRKKPENIPQPISNTSRANLNKLLTDYTEMKKAILHVYWEEFQKDPVGLMSRVAQPASKKIDQNKLKPEMDEKGNLTTAGFACSQCGQPLFVYKLEQVSEKGKAYTNYFGRCNVAEHEKLILLAQLKPEKDSDEAVTYSLGKFGQRALDFYSIHVTKESTHPVKPLAQIAGNRYASGPVGKALSDACMGTIASFLSKYQDIIIEHQKVVKGNQKRLESLRELAGKENLEYPSVTLPPQPHTKEGVDAYNEVIARVRMWVNLNLWQKLKLSRDDAKPLLRLKGFPSFPLVERQANEVDWWDMVCNVKKLINEKKEDGKVFWQNLAGYKRQEALRPYLSSEEDRKKGKKFARYQLGDLLLHLEKKHGEDWGKVYDEAWERIDKKVEGLSKHIKLEEERRSEDAQSKAALTDWLRAKASFVIEGLKEADKDEFCRCELKLQKWYGDLRGKPFAIEAENSILDISGFSKQYNCAFIWQKDGVKKLNLYLIINYFKGGKLRFKKIKPEAFEANRFYTVINKKSGEIVPMEVNFNFDDPNLIILPLAFGKRQGREFIWNDLLSLETGSLKLANGRVIEKTLYNRRTRQDEPALFVALTFERREVLDSSNIKPMNLIGVDRGENIPAVIALTDPEGCPQSRFKDSLGNPTHILRIGESYKEKQRTIQAKKEVEQRRAGGYSRKYASKAKNLADDMVRNTARDLLYYAVTQDAMLIFENLSRGFGRQGKRTFMAERQYTRMEDWLTAKLAYEGLPSKTYLSKTLAQYTSKTCSNCGFTITSADYDRVLEKLKKTATGWMTTINGKELKVEGQITYYNRYKRQNVVKDLSVELDRLSEESVNNDISSWTKGRSGEALSLLKKRFSHRPVQEKFVCLNCGFETHADEQAALNIARSWLFLRSQEYKKYQTNKTTGNTDKRAFVETWQSFYRKKLKEVWKPAV

SEQ ID NO: 25735 - protein, 978 aa, synthetic construct
  REGION 1..978: note = engineered CasX variant
QEIKRINKIRRRLVKDSNTKKAGKTGPMKTLLVRVMTPDLRERLENLRKKPENIPQPISNTSRANLNKLLTDYTEMKKAILHVYWEEFQKDPVGLMSRVAQPASKKIDQNKLKPEMDEKGNLTTAGFACSQCGQPLFVYKLEQVSEKGKAYTNYFGRCNVAEHEKLILLAQLKPEKDSDEAVTYSLGKFGQRALDFYSIHVTKESTHPVKPLAQIAGNRYASGPVGKALSDACMGTIASFLSKYQDIIIEHQKVVKGNQKRLESLRELAGKENLEYPSVTLPPQPHTKEGVDAYNEVIARVRMWVNLNLWQKLKLSRDDAKPLLRLKGFPSFPLVERQANEVDWWDMVCNVKKLINEKKEDGKVFWQNLAGYKRQEALRPYLSSEEDRKKGKKFARYQLGDLLLHLEKKHGEDWGKVYDEAWERIDKKVEGLSKHIKLEEERRSEDAQSKAALTDWLRAKASFVIEGLKEADKDEFCRCELKLQKWYGDLRGKPFAIEAENSILDISGFSKQYNCAFIWQKDGVKKLNLYLIINYFKGGKLRFKKIKPEAFEANRFYTVINKKSGEIVPMEVNFNFDDPNLIILPLAFGKRQGREFIWNDLLSLETGSLKLANGRVIEKTLYNRRTRQDEPALFVALTFERREVLDSSNIKPMNLIGVDRGENIPAVIALTDPEGCPQKRFKDSLGNPTHILRIGESYKEKQRTIQAKKEVEQRRAGGYSRKYASKAKNLADDMVRNTARDLLYYAVTQDAMLIFENLSRGFGRQGKRTFMAERQYTRMEDWLTAKLAYEGLPSKTYLSKTLAQYTSKTCSNCGFTITSADYDRVLEKLKKTATGWMTTINGKELKVEGQITYYNRYKRQNVVKDLSVELDRLSEESVNNDISSWTKGRSGEALSLLKKRFSHRPVQEKFVCLNCGFETHADEQAALNIARSWLFLRSQEYKKYQTNKTTGNTDKRAFVETWQSFYRKKLKEVWKPAV

SEQ ID NO: 25736 - protein, 978 aa, synthetic construct
  REGION 1..978: note = engineered CasX variant
QEIKRINKIRRRLVKDSNTKKAGKTGPMKTLLVRVMTPDLRERLENLRKKPENIPQPISNTSRANLNKLLTDYTEMKKAILHVYWEEFQKDPVGLMSRVAQPASKKIDQNKLKPEMDEKGNLTTAGFACSQCGQPLFVYKLEQVSEKGKAYTNYFGRCNVAEHEKLILLAQLKPEKDSDEAVTYSLGKFGQRALDFYSIHVTKESTHPVKPLAQIAGNRYASGPVGKALSDACMGTIASFLSKYQDIIIEHQKVVKGNQKRLESLRELAGKENLEYPSVTLPPQPHTKEGVDAYNEVIARVRMWVNLNLWQKLKLSRDDAKPLLRLKGFPSFPLVERQANEVDWWDMVCNVKKLINEKKEDGKVFWQNLAGYKRQEALRPYLSSEEDRKKGKKFARYQLGDLLLHLEKKHGEDWGKVYDEAWERIDKKVEGLSKHIKLEEERRSEDAQSKAALTDWLRAKASFVIEGLKEADKDEFCRCELKLQKWYGDLRGKPFAIEAENSILDISGFSKQYNCAFIWQKDGVKKLNLYLIINYFKGGKLRFKKIKPEAFEANRFYTVINKKSGEIVPMEVNFNFDDPNLIILPLAFGKRQGREFIWNDLLSLETGSLKLANGRVIEKTLYNRRTRQDEPALFVALTFERREVLDSSNIKPMNLIGVDRGENIPAVIALTDPEGCPMSRFKDSLGNPTHILRIGESYKEKQRTIQAKKEVEQRRAGPYSRKYASKAKNLADDMVRNTARDLLYYAVTQDAMLIFENLSRGFGRQGKRTFMAERQYTRMEDWLTAKLAYEGLPSKTYLSKTLAQYTSKTCSNCGFTITSADYDRVLEKLKKTATGWMTTINGKELKVEGQITYYNRYKRQNVVKDLSVELDRLSEESVNNDISSWTKGRSGEALSLLKKRFSHRPVQEKFVCLNCGFETHADEQAALNIARSWLFLRSQEYKKYQTNKTTGNTDKRAFVETWQSFYRKKLKEVWKPAV

SEQ ID NO: 25737 - protein, 978 aa, synthetic construct
  REGION 1..978: note = engineered CasX variant
QEIKRINKIRRRLVKDSNTKKAGKTGPMKTLLVRVMTPDLRERLENLRKKPENIPQPISNTSRANLNKLLTDYTEMKKAILHVYWEEFQKDPVGLMSRVAQPASKKIDQNKLKPEMDEKGNLTTAGFACSQCGQPLFVYKLEQVSEKGKAYTNYFGRCNVAEHEKLILLAQLKPEKDSDEAVTYSLGKFGQRALDFYSIHVTKESTHPVKPLAQIAGNRYASGPVGKALSDACMGTIASFLSKYQDIIIEHQKVVKGNQKRLESLRELAGKENLEYPSVTLPPQPHTKEGVDAYNEVIARVRMWVNLNLWQKLKLSRDDAKPLLRLKGFPSFPLVERQANEVDWWDMVCNVKKLINEKKEDGKVFWQNLAGYKRQEALRPYLSSEEDRKKGKKFARYQLGDLLLHLEKKHGEDWGKVYDEAWERIDKKVEGLSKHIKLEEERRSEDAQSKAALTDWLRAKASFVIEGLKEADKDEFCRCELKLQKWYGDLRGKPFAIEAENSILDISGFSKQYNCAFIWQKDGVKKLNLYLIINYFKGGKLRFKKIKPEAFEANRFYTVINKKSGEIVPMEVNFNFDDPNLIILPLAFGKRQGREFIWNDLLSLETGSLKLANGRVIEKTLYNRRTRQDEPALFVALTFERREVLDSSNIKPMNLIGVDRGENIPAVIALTDPEGCPMSRFKDSLGNPTHILRIGESYKEKQRTIQAKKEVEQRRAGGYSRKYASKAKNLADDMVRNTARDLLYYAVTQDAMLIFENLSRGFGRQGKRTFMAERQYTRMEDWLTAKLAYEGLPSKTYLSKTLAQYTSKTCSNCGFTITSADYDRVLEKLKKTATGWMTTINGKELKVEGQITYYNRYKRQNVVKDLSVELDRLSEESVNNDISSWTKGRSGEALSLLKKRFSHRPVQEKFVCLNCGFETHADEQAALNIARSWLFLRSQEYKKYQTNKTTGNTDKRAFVETWQSFYRKKLKEVWKPAV

SEQ ID NO: 25738 - protein, 978 aa, synthetic construct
  REGION 1..978: note = engineered CasX variant
QEIKRINKIRRRLVKDSNTKKAGKTGPMKTLLVRVMTPDLRERLENLRKKPENIPQPISNTSRANLNKLLTDYTEMKKAILHVYWEEFQKDPVGLMSRVAQPASKKIDQNKLKPEMDEKGNLTTAGFACSQCGQPLFVYKLEQVSEKGKAYTNYFGRCNVAEHEKLILLAQLKPEKDSDEAVTYSLGKFGQRALDFYSIHVTKESTHPVKPLAQIAGNRYASGPVGKALSDACMGTIASFLSKYQDIIIEHQKVVKGNQKRLESLRELAGKENLEYPSVTLPPQPHTKEGVDAYNEVIARVRMWVNLNLWQKLKLSRDDAKPLLRLKGFPSFPLVERQANEVDWWDMVCNVKKLINEKKEDGKVFWQNLAGYKRQEALRPYLSSEEDRKKGKKFARYQLGDLLLHLEKKHGEDWGKVYDEAWERIDKKVEGLSKHIKLEEERRSEDAQSKAALTDWLRAKASFVIEGLKEADKDEFCRCELKLQKWYGDLRGKPFAIEAENSILDISGFSKQYNCAFIWQKDGVKKLNLYLIINYFKGGKLRFKKIKPEAFEANRFYTVINKKSGEIVPMEVNFNFDDPNLIILPLAFGKRQGREFIWNDLLSLETGSLKLANGRVIEKTLYNRRTRQDEPALFVALTFERREVLDSSNIKPMNLIGVDRGENIPAVIALTDPEGCPMSRFKDSLGNPTHILRIGESNKEKQRTIQAKKEVEQRRAGGYSRKYASKAKNLADDMVRNTARDLLYYAVTQDAMLIFENLSRGFGRQGKRTFMAERQYTRMEDWLTAKLAYEGLPSKTYLSKTLAQYTSKTCSNCGFTITSADYDRVLEKLKKTATGWMTTINGKELKVEGQITYYNRYKRQNVVKDLSVELDRLSEESVNNDISSWTKGRSGEALSLLKKRFSHRPVQEKFVCLNCGFETHADEQAALNIARSWLFLRSQEYKKYQTNKTTGNTDKRAFVETWQSFYRKKLKEVWKPAV

SEQ ID NO: 25739 - protein, 978 aa, synthetic construct
  REGION 1..978: note = engineered CasX variant
QEIKRINKIRRRLVKDSNTKKAGKTGPMKTLLVRVMTPDLRERLENLRKKPENIPQPISNTSRANLNKLLTDYTEMKKAILHVYWEEFQKDPVGLMSRVAQPASKKIDQNKLKPEMDEKGNLTTAGFACSQCGQPLFVYKLEQVSEKGKAYTNYFGRCNVAEHEKLILLAQLKPEKDSDEAVTYSLGKFGQRALDFYSIHVTKESTHPVKPLAQIAGNRYASGPVGKALSDACMGTIASFLSKYQDIIIEHQKVVKGNQKRLESLRELAGKENLEYPSVTLPPQPHTKEGVDAYNEVIARVRMWVNLNLWQKLKLSRDDAKPLLRLKGFPSFPLVERQANEVDWWDMVCNVKKLINEKKEDGKVFWQNLAGYKRQEALRPYLSSEEDRKKGKKFARYQLGDLLLHLEKKHGEDWGKVYDEAWERIDKKVEGLSKHIKLEEERRSEDAQSKAALTDWLRAKASFVIEGLKEADKDEFCRCELKLQKWYGDLRGKPFAIEAENSILDISGFSKQYNCAFIWQKDGVKKLNLYLIINYFKGGKLRFKKIKPEAFEANRFYTVINKKSGEIVPMEVNFNFDDPNLIILPLAFGKRQGREFIWNDLLSLETGSLKLANGRVIEKTLYNRRTRQDEPALFVALTFERREVLDSSNIKPMNLIGVDRGENIPAVIALTDPEGCPLYRFKDSRGNPTHILRIGESYKEKQRTIQAKKEVEQRRAGGYSRKYASKAKNLADDMVRNTARDLLYYAVTQDAMLIFENLSRGFGRQGKRTFMAERQYTRMEDWLTAKLAYEGLPSKTYLSKTLAQYTSKTCSNCGFTITSADYDRVLEKLKKTATGWMTTINGKELKVEGQITYYNRYKRQNVVKDLSVELDRLSEESVNNDISSWTKGRSGEALSLLKKRFSHRPVQEKFVCLNCGFETHADEQAALNIARSWLFLRSQEYKKYQTNKTTGNTDKRAFVETWQSFYRKKLKEVWKPAV

SEQ ID NO: 25740 - protein, 978 aa, synthetic construct
  REGION 1..978: note = engineered CasX variant
QEIKRINKIRRRLVKDSNTKKAGKTGPMKTLLVRVMTPDLRERLENLRKKPENIPQPISNTSRANLNKLLTDYTEMKKAILHVYWEEFQKDPVGLMSRVAQPASKKIDQNKLKPEMDEKGNLTTAGFACSQCGQPLFVYKLEQVSEKGKAYTNYFGRCNVAEHEKLILLAQLKPEKDSDEAVTYSLGKFGQRALDFYSIHVTKESTHPVKPLAQIAGNRYASGPVGKALSDACMGTIASFLSKYQDIIIEHQKVVKGNQKRLESLRELAGKENLEYPSVTLPPQPHTKEGVDAYNEVIARVRMWVNLNLWQKLKLSRDDAKPLLRLKGFPSFPLVERQANEVDWWDMVCNVKKLINEKKEDGKVFWQNLAGYKRQEALRPYLSSEEDRKKGKKFARYQLGDLLLHLEKKHGEDWGKVYDEAWERIDKKVEGLSKHIKLEEERRSEDAQSKAALTDWLRAKASFVIEGLKEADKDEFCRCELKLQKWYGDLRGKPFAIEAENSILDISGFSKQYNCAFIWQKDGVKKLNLYLIINYFKGGKLRFKKIKPEAFEANRFYTVINKKSGEIVPMEVNFNFDDPNLIILPLAFGKRQGREFIWNDLLSLETGSLKLANGRVIEKTLYNRRTRQDEPALFVALTFERREVLDSSNIKPMNLIGVDRGENIPAVIALTDPEGCPLYRFKDSLGNPTHILRIGESYKSKQRTIQAKKEVEQRRAGGYSRKYASKAKNLADDMVRNTARDLLYYAVTQDAMLIFENLSRGFGRQGKRTFMAERQYTRMEDWLTAKLAYEGLPSKTYLSKTLAQYTSKTCSNCGFTITSADYDRVLEKLKKTATGWMTTINGKELKVEGQITYYNRYKRQNVVKDLSVELDRLSEESVNNDISSWTKGRSGEALSLLKKRFSHRPVQEKFVCLNCGFETHADEQAALNIARSWLFLRSQEYKKYQTNKTTGNTDKRAFVETWQSFYRKKLKEVWKPAV

SEQ ID NO: 25741 - protein, 978 aa, synthetic construct
  REGION 1..978: note = engineered CasX variant
QEIKRINKIRRRLVKDSNTKKAGKTGPMKTLLVRVMTPDLRERLENLRKKPENIPQPISNTSRANLNKLLTDYTEMKKAILHVYWEEFQKDPVGLMSRVAQPASKKIDQNKLKPEMDEKGNLTTAGFACSQCGQPLFVYKLEQVSEKGKAYTNYFGRCNVAEHEKLILLAQLKPEKDSDEAVTYSLGKFGQRALDFYSIHVTKESTHPVKPLAQIAGNRYASGPVGKALSDACMGTIASFLSKYQDIIIEHQKVVKGNQKRLESLRELAGKENLEYPSVTLPPQPHTKEGVDAYNEVIARVRMWVNLNLWQKLKLSRDDAKPLLRLKGFPSFPLVERQANEVDWWDMVCNVKKLINEKKEDGKVFWQNLAGYKRQEALRPYLSSEEDRKKGKKFARYQLGDLLLHLEKKHGEDWGKVYDEAWERIDKKVEGLSKHIKLEEERRSEDAQSKAALTDWLRAKASFVIEGLKEADKDEFCRCELKLQKWYGDLRGKPFAIEAENSILDISGFSKQYNCAFIWQKDGVKKLNLYLIINYFKGGKLRFKKIKPEAFEANRFYTVINKKSGEIVPMEVNFNFDDPNLIILPLAFGKRQGREFIWNDLLSLETGSLKLANGRVIEKTLYNRRTRQDEPALFVALTFERREVLDSSNIKPMNLIGVDRGENIPAVIALTDPEGCPLYRFKDSLGNPTHILRIGESYKSKQRTIQACKEVEQRRAGGYSRKYASKAKNLADDMVRNTARDLLYYAVTQDAMLIFENLSRGFGRQGKRTFMAERQYTRMEDWLTAKLAYEGLPSKTYLSKTLAQYTSKTCSNCGFTITSADYDRVLEKLKKTATGWMTTINGKELKVEGQITYYNRYKRQNVVKDLSVELDRLSEESVNNDISSWTKGRSGEALSLLKKRFSHRPVQEKFVCLNCGFETHADEQAALNIARSWLFLRSQEYKKYQTNKTTGNTDKRAFVETWQSFYRKKLKEVWKPAV

SEQ ID NO: 25742 - protein, 978 aa, synthetic construct
  REGION 1..978: note = engineered CasX variant
QEIKRINKIRRRLVKDSNTKKAGKTGPMKTLLVRVMTPDLRERLENLRKKPENIPQPISNTSRANLNKLLTDYTEMKKAILHVYWEEFQKDPVGLMSRVAQPASKKIDQNKLKPEMDEKGNLTTAGFACSQCGQPLFVYKLEQVSEKGKAYTNYFGRCNVAEHEKLILLAQLKPEKDSDEAVTYSLGKFGQRALDFYSIHVTKESTHPVKPLAQIAGNRYASGPVGKALSDACMGTIASFLSKYQDIIIEHQKVVKGNQKRLESLRELAGKENLEYPSVTLPPQPHTKEGVDAYNEVIARVRMWVNLNLWQKLKLSRDDAKPLLRLKGFPSFPLVERQANEVDWWDMVCNVKKLINEKKEDGKVFWQNLAGYKRQEALRPYLSSEEDRKKGKKFARYQLGDLLLHLEKKHGEDWGKVYDEAWERIDKKVEGLSKHIKLEEERRSEDAQSKAALTDWLRAKASFVIEGLKEADKDEFCRCELKLQKWYGDLRGKPFAIEAENSILDISGFSKQYNCAFIWQKDGVKKLNLYLIINYFKGGKLRFKKIKPEAFEANRFYTVINKKSGEIVPMEVNFNFDDPNLIILPLAFGKRQGREFIWNDLLSLETGSLKLANGRVIEKTLYNRRTRQDEPALFVALTFERREVLDSSNIKPMNLIGVDRGENIPAVIALTDPEGCPLYRFKDSLGNPTHILRIGESYKEKQRTIQAKKEVEQRRAGGYSRKYASKAKNLADDMVRNTARDLLYYAVTQDAMLIFENLSRGFGRQGKRTFMAERQYTRMEDWLTAKLAYEGLPSKTYLSKTLAQYTSKTCSNCGFTITSADYDRVLEKLKKTATGWMTTINGKELKVEGQITYYNRYKRQNVVKDLSVELDRLSEESVNNDISSWTKGRSGEALSLLKKRFSHRPVQEKFVCLNCGFETHADEQAALNIARSWLFLRSQEYKKYQTNKTTGNTDKRAFVETWQSFYRKKLKEVWKPAV

SEQ ID NO: 25743 - protein, 978 aa, synthetic construct
  REGION 1..978: note = engineered CasX variant
QEIKRINKIRRRLVKDSNTKKAGKTGPMKTLLVRVMTPDLRERLENLRKKPENIPQPISNTSRANLNKLLTDYTEMKKAILHVYWEEFQKDPVGLMSRVAQPASKKIDQNKLKPEMDEKGNLTTAGFACSQCGQPLFVYKLEQVSEKGKAYTNYFGRCNVAEHEKLILLAQLKPEKDSDEAVTYSLGKFGQRALDFYSIHVTKESTHPVKPLAQIAGNRYASGPVGKALSDACMGTIASFLSKYQDIIIEHQKVVKGNQKRLESLRELAGKENLEYPSVTLPPQPHTKEGVDAYNEVIARVRMWVNLNLWQKLKLSRDDAKPLLRLKGFPSFPLVERQANEVDWWDMVCNVKKLINEKKEDGKVFWQNLAGYKRQEALRPYLSSEEDRKKGKKFARYQLGDLLLHLEKKHGEDWGKVYDEAWERIDKKVEGLSKHIKLEEERRSEDAQSKAALTDWLRAKASFVIEGLKEADKDEFCRCELKLQKWYGDLRGKPFAIEAENSILDISGFSKQYNCAFIWQKDGVKKLNLYLIINYFKGGKLRFKKIKPEAFEANRFYTVINKKSGEIVPMEVNFNFDDPNLIILPLAFGKRQGREFIWNDLLSLETGSLKLANGRVIEKTLYNRRTRQDEPALFVALTFERREVLDSSNIKPMNLIGVDRGENIPAVIALTDPEGCPLYRFKDSLGNPTHILRIGESYKEKQRTIQACKEVEQRRAGGYSRKYASKAKNLADDMVRNTARDLLYYAVTQDAMLIFENLSRGFGRQGKRTFMAERQYTRMEDWLTAKLAYEGLPSKTYLSKTLAQYTSKTCSNCGFTITSADYDRVLEKLKKTATGWMTTINGKELKVEGQITYYNRYKRQNVVKDLSVELDRLSEESVNNDISSWTKGRSGEALSLLKKRFSHRPVQEKFVCLNCGFETHADEQAALNIARSWLFLRSQEYKKYQTNKTTGNTDKRAFVETWQSFYRKKLKEVWKPAV

SEQ ID NO: 25744 - protein, 978 aa, synthetic construct
  REGION 1..978: note = engineered CasX variant
QEIKRINKIRRRLVKDSNTKKAGKTGPMKTLLVRVMTPDLRERLENLRKKPENIPQPISNTSRANLNKLLTDYTEMKKAILHVYWEEFQKDPVGLMSRVAQPASKKIDQNKLKPEMDEKGNLTTAGFACSQCGQPLFVYKLEQVSEKGKAYTNYFGRCNVAEHEKLILLAQLKPEKDSDEAVTYSLGKFGQRALDFYSIHVTKESTHPVKPLAQIAGNRYASGPVGKALSDACMGTIASFLSKYQDIIIEHQKVVKGNQKRLESLRELAGKENLEYPSVTLPPQPHTKEGVDAYNEVIARVRMWVNLNLWQKLKLSRDDAKPLLRLKGFPSFPLVERQANEVDWWDMVCNVKKLINEKKEDGKVFWQNLAGYKRQEALRPYLSSEEDRKKGKKFARYQLGDLLLHLEKKHGEDWGKVYDEAWERIDKKVEGLSKHIKLEEERRSEDAQSKAALTDWLRAKASFVIEGLKEADKDEFCRCELKLQKWYGDLRGKPFAIEAENSILDISGFSKQYNCAFIWQKDGVKKLNLYLIINYFKGGKLRFKKIKPEAFEANRFYTVINKKSGEIVPMEVNFNFDDPNLIILPLAFGKRQGREFIWNDLLSLETGSLKLANGRVIEKTLYNRRTRQDEPALFVALTFERREVLDSSNIKPMNLIGVDRGENIPAVIALTDPEGCPLYRFKDSLGNKTHILRIGESYKEKQRTIQAKKEVEQRRAGGYSRKYASKAKNLADDMVRNTARDLLYYAVTQDAMLIFENLSRGFGRQGKRTFMAERQYTRMEDWLTAKLAYEGLPSKTYLSKTLAQYTSKTCSNCGFTITSADYDRVLEKLKKTATGWMTTINGKELKVEGQITYYNRYKRQNVVKDLSVELDRLSEESVNNDISSWTKGRSGEALSLLKKRFSHRPVQEKFVCLNCGFETHADEQAALNIARSWLFLRSQEYKKYQTNKTTGNTDKRAFVETWQSFYRKKLKEVWKPAV

SEQ ID NO: 25745 - protein, 978 aa, synthetic construct
  REGION 1..978: note = engineered CasX variant
QEIKRINKIRRRLVKDSNTKKAGKTGPMKTLLVRVMTPDLRERLENLRKKPENIPQPISNTSRANLNKLLTDYTEMKKAILHVYWEEFQKDPVGLMSRVAQPASKKIDQNKLKPEMDEKGNLTTAGFACSQCGQPLFVYKLEQVSEKGKAYTNYFGRCNVAEHEKLILLAQLKPEKDSDEAVTYSLGKFGQRALDFYSIHVTKESTHPVKPLAQIAGNRYASGPVGKALSDACMGTIASFLSKYQDIIIEHQKVVKGNQKRLESLRELAGKENLEYPSVTLPPQPHTKEGVDAYNEVIARVRMWVNLNLWQKLKLSRDDAKPLLRLKGFPSFPLVERQANEVDWWDMVCNVKKLINEKKEDGKVFWQNLAGYKRQEALRPYLSSEEDRKKGKKFARYQLGDLLLHLEKKHGEDWGKVYDEAWERIDKKVEGLSKHIKLEEERRSEDAQSKAALTDWLRAKASFVIEGLKEADKDEFCRCELKLQKWYGDLRGKPFAIEAENSILDISGFSKQYNCAFIWQKDGVKKLNLYLIINYFKGGKLRFKKIKPEAFEANRFYTVINKKSGEIVPMEVNFNFDDPNLIILPLAFGKRQGREFIWNDLLSLETGSLKLANGRVIEKTLYNRRTRQDEPALFVALTFERREVLDSSNIKPMNLIGVDRGENIPAVIALTDPEGCPLWRFKDSLGNPTHILRIGESYKEKQRTIQAKKEVEQRRAGGYSRKYASKAKNLADDMVRNTARDLLYYAVTQDAMLIFENLSRGFGRQGKRTFMAERQYTRMEDWLTAKLAYEGLPSKTYLSKTLAQYTSKTCSNCGFTITSADYDRVLEKLKKTATGWMTTINGKELKVEGQITYYNRYKRQNVVKDLSVELDRLSEESVNNDISSWTKGRSGEALSLLKKRFSHRPVQEKFVCLNCGFETHADEQAALNIARSWLFLRSQEYKKYQTNKTTGNTDKRAFVETWQSFYRKKLKEVWKPAV

SEQ ID NO: 25746 - protein, 978 aa, synthetic construct
  REGION 1..978: note = engineered CasX variant
QEIKRINKIRRRLVKDSNTKKAGKTGPMKTLLVRVMTPDLRERLENLRKKPENIPQPISNTSRANLNKLLTDYTEMKKAILHVYWEEFQKDPVGLMSRVAQPASKKIDQNKLKPEMDEKGNLTTAGFACSQCGQPLFVYKLEQVSEKGKAYTNYFGRCNVAEHEKLILLAQLKPEKDSDEAVTYSLGKFGQRALDFYSIHVTKESTHPVKPLAQIAGNRYASGPVGKALSDACMGTIASFLSKYQDIIIEHQKVVKGNQKRLESLRELAGKENLEYPSVTLPPQPHTKEGVDAYNEVIARVRMWVNLNLWQKLKLSRDDAKPLLRLKGFPSFPLVERQANEVDWWDMVCNVKKLINEKKEDGKVFWQNLAGYKRQEALRPYLSSEEDRKKGKKFARYQLGDLLLHLEKKHGEDWGKVYDEAWERIDKKVEGLSKHIKLEEERRSEDAQSKAALTDWLRAKASFVIEGLKEADKDEFCRCELKLQKWYGDLRGKPFAIEAENSILDISGFSKQYNCAFIWQKDGVKKLNLYLIINYFKGGKLRFKKIKPEAFEANRFYTVINKKSGEIVPMEVNFNFDDPNLIILPLAFGKRQGREFIWNDLLSLETGSLKLANGRVIEKTLYNRRTRQDEPALFVALTFERREVLDSSNIKPMNLIGVDRGENIPAVIALTDPEGCPLVRFKDSLGNPTHILRIGESYKEKQRTIQAKKEVEQRRSGGYSRKYASKAKNLADDMVRNTARDLLYYAVTQDAMLIFENLSRGFGRQGKRTFMAERQYTRMEDWLTAKLAYEGLPSKTYLSKTLAQYTSKTCSNCGFTITSADYDRVLEKLKKTATGWMTTINGKELKVEGQITYYNRYKRQNVVKDLSVELDRLSEESVNNDISSWTKGRSGEALSLLKKRFSHRPVQEKFVCLNCGFETHADEQAALNIARSWLFLRSQEYKKYQTNKTTGNTDKRAFVETWQSFYRKKLKEVWKPAV

SEQ ID NO: 25747 - protein, 978 aa, synthetic construct
  REGION 1..978: note = engineered CasX variant
QEIKRINKIRRRLVKDSNTKKAGKTGPMKTLLVRVMTPDLRERLENLRKKPENIPQPISNTSRANLNKLLTDYTEMKKAILHVYWEEFQKDPVGLMSRVAQPASKKIDQNKLKPEMDEKGNLTTAGFACSQCGQPLFVYKLEQVSEKGKAYTNYFGRCNVAEHEKLILLAQLKPEKDSDEAVTYSLGKFGQRALDFYSIHVTKESTHPVKPLAQIAGNRYASGPVGKALSDACMGTIASFLSKYQDIIIEHQKVVKGNQKRLESLRELAGKENLEYPSVTLPPQPHTKEGVDAYNEVIARVRMWVNLNLWQKLKLSRDDAKPLLRLKGFPSFPLVERQANEVDWWDMVCNVKKLINEKKEDGKVFWQNLAGYKRQEALRPYLSSEEDRKKGKKFARYQLGDLLLHLEKKHGEDWGKVYDEAWERIDKKVEGLSKHIKLEEERRSEDAQSKAALTDWLRAKASFVIEGLKEADKDEFCRCELKLQKWYGDLRGKPFAIEAENSILDISGFSKQYNCAFIWQKDGVKKLNLYLIINYFKGGKLRFKKIKPEAFEANRFYTVINKKSGEIVPMEVNFNFDDPNLIILPLAFGKRQGREFIWNDLLSLETGSLKLANGRVIEKTLYNRRTRQDEPALFVALTFERREVLDSSNIKPMNLIGVDRGENIPAVIALTDPEGCPLVRFKDSLGNPTHILRIGESYKEKQRTIQAKKEVEQRRAGGYSRKYASKAKNLADDMVRNTARDLLYYAVTQDAMLIFENLSRGFGRQGKRTFMAERQYTRMEDWLTAKLAYEGLPSKTYLSKTLAQYTSKTCSNCGFTITSADYDRVLEKLKKTATGWMTTINGKELKVEGQITYYNRYKRQNVVKDLSVELDRLSEESVNNDISSWTKGRSGEALSLLKKRFSHRPVQEKFVCLNCGFETHADEQAALNIARSWLFLRSQEYKKYQTNKTTGNTDKRAFVETWQSFYRKKLKEVWKPAV

SEQ ID NO: 25748 - protein, 978 aa, synthetic construct
  REGION 1..978: note = engineered CasX variant
QEIKRINKIRRRLVKDSNTKKAGKTGPMKTLLVRVMTPDLRERLENLRKKPENIPQPISNTSRANLNKLLTDYTEMKKAILHVYWEEFQKDPVGLMSRVAQPASKKIDQNKLKPEMDEKGNLTTAGFACSQCGQPLFVYKLEQVSEKGKAYTNYFGRCNVAEHEKLILLAQLKPEKDSDEAVTYSLGKFGQRALDFYSIHVTKESTHPVKPLAQIAGNRYASGPVGKALSDACMGTIASFLSKYQDIIIEHQKVVKGNQKRLESLRELAGKENLEYPSVTLPPQPHTKEGVDAYNEVIARVRMWVNLNLWQKLKLSRDDAKPLLRLKGFPSFPLVERQANEVDWWDMVCNVKKLINEKKEDGKVFWQNLAGYKRQEALRPYLSSEEDRKKGKKFARYQLGDLLLHLEKKHGEDWGKVYDEAWERIDKKVEGLSKHIKLEEERRSEDAQSKAALTDWLRAKASFVIEGLKEADKDEFCRCELKLQKWYGDLRGKPFAIEAENSILDISGFSKQYNCAFIWQKDGVKKLNLYLIINYFKGGKLRFKKIKPEAFEANRFYTVINKKSGEIVPMEVNFNFDDPNLIILPLAFGKRQGREFIWNDLLSLETGSLKLANGRVIEKTLYNRRTRQDEPALFVALTFERREVLDSSNIKPMNLIGVDRGENIPAVIALTDPEGCPLTRFKDSLGNPTHILRIGESYKEKQRTIQRKKEVEQRRAGGYSRKYASKAKNLADDMVRNTARDLLYYAVTQDAMLIFENLSRGFGRQGKRTFMAERQYTRMEDWLTAKLAYEGLPSKTYLSKTLAQYTSKTCSNCGFTITSADYDRVLEKLKKTATGWMTTINGKELKVEGQITYYNRYKRQNVVKDLSVELDRLSEESVNNDISSWTKGRSGEALSLLKKRFSHRPVQEKFVCLNCGFETHADEQAALNIARSWLFLRSQEYKKYQTNKTTGNTDKRAFVETWQSFYRKKLKEVWKPAV

SEQ ID NO: 25749 - protein, 978 aa, synthetic construct
  REGION 1..978: note = engineered CasX variant
QEIKRINKIRRRLVKDSNTKKAGKTGPMKTLLVRVMTPDLRERLENLRKKPENIPQPISNTSRANLNKLLTDYTEMKKAILHVYWEEFQKDPVGLMSRVAQPASKKIDQNKLKPEMDEKGNLTTAGFACSQCGQPLFVYKLEQVSEKGKAYTNYFGRCNVAEHEKLILLAQLKPEKDSDEAVTYSLGKFGQRALDFYSIHVTKESTHPVKPLAQIAGNRYASGPVGKALSDACMGTIASFLSKYQDIIIEHQKVVKGNQKRLESLRELAGKENLEYPSVTLPPQPHTKEGVDAYNEVIARVRMWVNLNLWQKLKLSRDDAKPLLRLKGFPSFPLVERQANEVDWWDMVCNVKKLINEKKEDGKVFWQNLAGYKRQEALRPYLSSEEDRKKGKKFARYQLGDLLLHLEKKHGEDWGKVYDEAWERIDKKVEGLSKHIKLEEERRSEDAQSKAALTDWLRAKASFVIEGLKEADKDEFCRCELKLQKWYGDLRGKPFAIEAENSILDISGFSKQYNCAFIWQKDGVKKLNLYLIINYFKGGKLRFKKIKPEAFEANRFYTVINKKSGEIVPMEVNFNFDDPNLIILPLAFGKRQGREFIWNDLLSLETGSLKLANGRVIEKTLYNRRTRQDEPALFVALTFERREVLDSSNIKPMNLIGVDRGENIPAVIALTDPEGCPLTRFKDSLGNPTHILRIGESYKEKQRTIQAYKEVEQRRAGGYSRKYASKAKNLADDMVRNTARDLLYYAVTQDAMLIFENLSRGFGRQGKRTFMAERQYTRMEDWLTAKLAYEGLPSKTYLSKTLAQYTSKTCSNCGFTITSADYDRVLEKLKKTATGWMTTINGKELKVEGQITYYNRYKRQNVVKDLSVELDRLSEESVNNDISSWTKGRSGEALSLLKKRFSHRPVQEKFVCLNCGFETHADEQAALNIARSWLFLRSQEYKKYQTNKTTGNTDKRAFVETWQSFYRKKLKEVWKPAV

SEQ ID NO: 25750 - protein, 978 aa, synthetic construct
  REGION 1..978: note = engineered CasX variant
QEIKRINKIRRRLVKDSNTKKAGKTGPMKTLLVRVMTPDLRERLENLRKKPENIPQPISNTSRANLNKLLTDYTEMKKAILHVYWEEFQKDPVGLMSRVAQPASKKIDQNKLKPEMDEKGNLTTAGFACSQCGQPLFVYKLEQVSEKGKAYTNYFGRCNVAEHEKLILLAQLKPEKDSDEAVTYSLGKFGQRALDFYSIHVTKESTHPVKPLAQIAGNRYASGPVGKALSDACMGTIASFLSKYQDIIIEHQKVVKGNQKRLESLRELAGKENLEYPSVTLPPQPHTKEGVDAYNEVIARVRMWVNLNLWQKLKLSRDDAKPLLRLKGFPSFPLVERQANEVDWWDMVCNVKKLINEKKEDGKVFWQNLAGYKRQEALRPYLSSEEDRKKGKKFARYQLGDLLLHLEKKHGEDWGKVYDEAWERIDKKVEGLSKHIKLEEERRSEDAQSKAALTDWLRAKASFVIEGLKEADKDEFCRCELKLQKWYGDLRGKPFAIEAENSILDISGFSKQYNCAFIWQKDGVKKLNLYLIINYFKGGKLRFKKIKPEAFEANRFYTVINKKSGEIVPMEVNFNFDDPNLIILPLAFGKRQGREFIWNDLLSLETGSLKLANGRVIEKTLYNRRTRQDEPALFVALTFERREVLDSSNIKPMNLIGVDRGENIPAVIALTDPEGCPLTRFKDSLGNPTHILRIGESYKEKQRTIQAKKEVEQRRAGGYSRKYASKAKNLADDMVRNTARDLLYYAVTQDAMLIFENLSRGFGRQGKRTFMAERQYTRMEDWLTAKLAYEGLPSKTYLSKTLAQYTSKTCSNCGFTITSADYDRVLEKLKKTATGWMTTINGKELKVEGQITYYNRYKRQNVVKDLSVELDRLSEESVNNDISSWTKGRSGEALSLLKKRFSHRPVQEKFVCLNCGFETHADEQAALNIARSWLFLRSQEYKKYQTNKTTGNTDKRAFVETWQSFYRKKLKEVWKPAV

SEQ ID NO: 25751 - protein, 978 aa, synthetic construct
  REGION 1..978: note = engineered CasX variant
QEIKRINKIRRRLVKDSNTKKAGKTGPMKTLLVRVMTPDLRERLENLRKKPENIPQPISNTSRANLNKLLTDYTEMKKAILHVYWEEFQKDPVGLMSRVAQPASKKIDQNKLKPEMDEKGNLTTAGFACSQCGQPLFVYKLEQVSEKGKAYTNYFGRCNVAEHEKLILLAQLKPEKDSDEAVTYSLGKFGQRALDFYSIHVTKESTHPVKPLAQIAGNRYASGPVGKALSDACMGTIASFLSKYQDIIIEHQKVVKGNQKRLESLRELAGKENLEYPSVTLPPQPHTKEGVDAYNEVIARVRMWVNLNLWQKLKLSRDDAKPLLRLKGFPSFPLVERQANEVDWWDMVCNVKKLINEKKEDGKVFWQNLAGYKRQEALRPYLSSEEDRKKGKKFARYQLGDLLLHLEKKHGEDWGKVYDEAWERIDKKVEGLSKHIKLEEERRSEDAQSKAALTDWLRAKASFVIEGLKEADKDEFCRCELKLQKWYGDLRGKPFAIEAENSILDISGFSKQYNCAFIWQKDGVKKLNLYLIINYFKGGKLRFKKIKPEAFEANRFYTVINKKSGEIVPMEVNFNFDDPNLIILPLAFGKRQGREFIWNDLLSLETGSLKLANGRVIEKTLYNRRTRQDEPALFVALTFERREVLDSSNIKPMNLIGVDRGENIPAVIALTDPEGCPLTRFKDSLGNPTHILRIGESYKEKQRTIQAKKEVEQRHAGGYSRKYASKAKNLADDMVRNTARDLLYYAVTQDAMLIFENLSRGFGRQGKRTFMAERQYTRMEDWLTAKLAYEGLPSKTYLSKTLAQYTSKTCSNCGFTITSADYDRVLEKLKKTATGWMTTINGKELKVEGQITYYNRYKRQNVVKDLSVELDRLSEESVNNDISSWTKGRSGEALSLLKKRFSHRPVQEKFVCLNCGFETHADEQAALNIARSWLFLRSQEYKKYQTNKTTGNTDKRAFVETWQSFYRKKLKEVWKPAV

SEQ ID NO: 25752 - protein, 978 aa, synthetic construct
  REGION 1..978: note = engineered CasX variant
QEIKRINKIRRRLVKDSNTKKAGKTGPMKTLLVRVMTPDLRERLENLRKKPENIPQPISNTSRANLNKLLTDYTEMKKAILHVYWEEFQKDPVGLMSRVAQPASKKIDQNKLKPEMDEKGNLTTAGFACSQCGQPLFVYKLEQVSEKGKAYTNYFGRCNVAEHEKLILLAQLKPEKDSDEAVTYSLGKFGQRALDFYSIHVTKESTHPVKPLAQIAGNRYASGPVGKALSDACMGTIASFLSKYQDIIIEHQKVVKGNQKRLESLRELAGKENLEYPSVTLPPQPHTKEGVDAYNEVIARVRMWVNLNLWQKLKLSRDDAKPLLRLKGFPSFPLVERQANEVDWWDMVCNVKKLINEKKEDGKVFWQNLAGYKRQEALRPYLSSEEDRKKGKKFARYQLGDLLLHLEKKHGEDWGKVYDEAWERIDKKVEGLSKHIKLEEERRSEDAQSKAALTDWLRAKASFVIEGLKEADKDEFCRCELKLQKWYGDLRGKPFAIEAENSILDISGFSKQYNCAFIWQKDGVKKLNLYLIINYFKGGKLRFKKIKPEAFEANRFYTVINKKSGEIVPMEVNFNFDDPNLIILPLAFGKRQGREFIWNDLLSLETGSLKLANGRVIEKTLYNRRTRQDEPALFVALTFERREVLDSSNIKPMNLIGVDRGENIPAVIALTDPEGCPLTRFKDSLGNPTHILRIGESYKEKQRTIQAKKEEEQRRAGGYSRKYASKAKNLADDMVRNTARDLLYYAVTQDAMLIFENLSRGFGRQGKRTFMAERQYTRMEDWLTAKLAYEGLPSKTYLSKTLAQYTSKTCSNCGFTITSADYDRVLEKLKKTATGWMTTINGKELKVEGQITYYNRYKRQNVVKDLSVELDRLSEESVNNDISSWTKGRSGEALSLLKKRFSHRPVQEKFVCLNCGFETHADEQAALNIARSWLFLRSQEYKKYQTNKTTGNTDKRAFVETWQSFYRKKLKEVWKPAV

SEQ ID NO: 25753 - protein, 978 aa, synthetic construct
  REGION 1..978: note = engineered CasX variant
QEIKRINKIRRRLVKDSNTKKAGKTGPMKTLLVRVMTPDLRERLENLRKKPENIPQPISNTSRANLNKLLTDYTEMKKAILHVYWEEFQKDPVGLMSRVAQPASKKIDQNKLKPEMDEKGNLTTAGFACSQCGQPLFVYKLEQVSEKGKAYTNYFGRCNVAEHEKLILLAQLKPEKDSDEAVTYSLGKFGQRALDFYSIHVTKESTHPVKPLAQIAGNRYASGPVGKALSDACMGTIASFLSKYQDIIIEHQKVVKGNQKRLESLRELAGKENLEYPSVTLPPQPHTKEGVDAYNEVIARVRMWVNLNLWQKLKLSRDDAKPLLRLKGFPSFPLVERQANEVDWWDMVCNVKKLINEKKEDGKVFWQNLAGYKRQEALRPYLSSEEDRKKGKKFARYQLGDLLLHLEKKHGEDWGKVYDEAWERIDKKVEGLSKHIKLEEERRSEDAQSKAALTDWLRAKASFVIEGLKEADKDEFCRCELKLQKWYGDLRGKPFAIEAENSILDISGFSKQYNCAFIWQKDGVKKLNLYLIINYFKGGKLRFKKIKPEAFEANRFYTVINKKSGEIVPMEVNFNFDDPNLIILPLAFGKRQGREFIWNDLLSLETGSLKLANGRVIEKTLYNRRTRQDEPALFVALTFERREVLDSSNIKPMNLIGVDRGENIPAVIALTDPEGCPLTRFKDSLGNPTHILRIGESYKEKMRTIQAKKEVEQRRAGGYSRKYASKAKNLADDMVRNTARDLLYYAVTQDAMLIFENLSRGFGRQGKRTFMAERQYTRMEDWLTAKLAYEGLPSKTYLSKTLAQYTSKTCSNCGFTITSADYDRVLEKLKKTATGWMTTINGKELKVEGQITYYNRYKRQNVVKDLSVELDRLSEESVNNDISSWTKGRSGEALSLLKKRFSHRPVQEKFVCLNCGFETHADEQAALNIARSWLFLRSQEYKKYQTNKTTGNTDKRAFVETWQSFYRKKLKEVWKPAV

SEQ ID NO: 25754 - protein, 978 aa, synthetic construct
  REGION 1..978: note = engineered CasX variant
QEIKRINKIRRRLVKDSNTKKAGKTGPMKTLLVRVMTPDLRERLENLRKKPENIPQPISNTSRANLNKLLTDYTEMKKAILHVYWEEFQKDPVGLMSRVAQPASKKIDQNKLKPEMDEKGNLTTAGFACSQCGQPLFVYKLEQVSEKGKAYTNYFGRCNVAEHEKLILLAQLKPEKDSDEAVTYSLGKFGQRALDFYSIHVTKESTHPVKPLAQIAGNRYASGPVGKALSDACMGTIASFLSKYQDIIIEHQKVVKGNQKRLESLRELAGKENLEYPSVTLPPQPHTKEGVDAYNEVIARVRMWVNLNLWQKLKLSRDDAKPLLRLKGFPSFPLVERQANEVDWWDMVCNVKKLINEKKEDGKVFWQNLAGYKRQEALRPYLSSEEDRKKGKKFARYQLGDLLLHLEKKHGEDWGKVYDEAWERIDKKVEGLSKHIKLEEERRSEDAQSKAALTDWLRAKASFVIEGLKEADKDEFCRCELKLQKWYGDLRGKPFAIEAENSILDISGFSKQYNCAFIWQKDGVKKLNLYLIINYFKGGKLRFKKIKPEAFEANRFYTVINKKSGEIVPMEVNFNFDDPNLIILPLAFGKRQGREFIWNDLLSLETGSLKLANGRVIEKTLYNRRTRQDEPALFVALTFERREVLDSSNIKPMNLIGVDRGENIPAVIALTDPEGCPLTRFKDSAGNPTHILRIGESYKEKQRTIQRKKEVEQRRAGGYSRKYASKAKNLADDMVRNTARDLLYYAVTQDAMLIFENLSRGFGRQGKRTFMAERQYTRMEDWLTAKLAYEGLPSKTYLSKTLAQYTSKTCSNCGFTITSADYDRVLEKLKKTATGWMTTINGKELKVEGQITYYNRYKRQNVVKDLSVELDRLSEESVNNDISSWTKGRSGEALSLLKKRFSHRPVQEKFVCLNCGFETHADEQAALNIARSWLFLRSQEYKKYQTNKTTGNTDKRAFVETWQSFYRKKLKEVWKPAV

SEQ ID NO: 25755 - protein, 978 aa, synthetic construct
  REGION 1..978: note = engineered CasX variant
QEIKRINKIRRRLVKDSNTKKAGKTGPMKTLLVRVMTPDLRERLENLRKKPENIPQPISNTSRANLNKLLTDYTEMKKAILHVYWEEFQKDPVGLMSRVAQPASKKIDQNKLKPEMDEKGNLTTAGFACSQCGQPLFVYKLEQVSEKGKAYTNYFGRCNVAEHEKLILLAQLKPEKDSDEAVTYSLGKFGQRALDFYSIHVTKESTHPVKPLAQIAGNRYASGPVGKALSDACMGTIASFLSKYQDIIIEHQKVVKGNQKRLESLRELAGKENLEYPSVTLPPQPHTKEGVDAYNEVIARVRMWVNLNLWQKLKLSRDDAKPLLRLKGFPSFPLVERQANEVDWWDMVCNVKKLINEKKEDGKVFWQNLAGYKRQEALRPYLSSEEDRKKGKKFARYQLGDLLLHLEKKHGEDWGKVYDEAWERIDKKVEGLSKHIKLEEERRSEDAQSKAALTDWLRAKASFVIEGLKEADKDEFCRCELKLQKWYGDLRGKPFAIEAENSILDISGFSKQYNCAFIWQKDGVKKLNLYLIINYFKGGKLRFKKIKPEAFEANRFYTVINKKSGEIVPMEVNFNFDDPNLIILPLAFGKRQGREFIWNDLLSLETGSLKLANGRVIEKTLYNRRTRQDEPALFVALTFERREVLDSSNIKPMNLIGVDRGENIPAVIALTDPEGCPLTRFKDSAGNPTHILRIGESYKEKQRTIQAKKEVEQRRAGGYSRKYASKAKNLADDMVRNTARDLLYYAVTQDAMLIFENLSRGFGRQGKRTFMAERQYTRMEDWLTAKLAYEGLPSKTYLSKTLAQYTSKTCSNCGFTITSADYDRVLEKLKKTATGWMTTINGKELKVEGQITYYNRYKRQNVVKDLSVELDRLSEESVNNDISSWTKGRSGEALSLLKKRFSHRPVQEKFVCLNCGFETHADEQAALNIARSWLFLRSQEYKKYQTNKTTGNTDKRAFVETWQSFYRKKLKEVWKPAV

SEQ ID NO: 25756 - protein, 978 aa, synthetic construct
  REGION 1..978: note = engineered CasX variant
QEIKRINKIRRRLVKDSNTKKAGKTGPMKTLLVRVMTPDLRERLENLRKKPENIPQPISNTSRANLNKLLTDYTEMKKAILHVYWEEFQKDPVGLMSRVAQPASKKIDQNKLKPEMDEKGNLTTAGFACSQCGQPLFVYKLEQVSEKGKAYTNYFGRCNVAEHEKLILLAQLKPEKDSDEAVTYSLGKFGQRALDFYSIHVTKESTHPVKPLAQIAGNRYASGPVGKALSDACMGTIASFLSKYQDIIIEHQKVVKGNQKRLESLRELAGKENLEYPSVTLPPQPHTKEGVDAYNEVIARVRMWVNLNLWQKLKLSRDDAKPLLRLKGFPSFPLVERQANEVDWWDMVCNVKKLINEKKEDGKVFWQNLAGYKRQEALRPYLSSEEDRKKGKKFARYQLGDLLLHLEKKHGEDWGKVYDEAWERIDKKVEGLSKHIKLEEERRSEDAQSKAALTDWLRAKASFVIEGLKEADKDEFCRCELKLQKWYGDLRGKPFAIEAENSILDISGFSKQYNCAFIWQKDGVKKLNLYLIINYFKGGKLRFKKIKPEAFEANRFYTVINKKSGEIVPMEVNFNFDDPNLIILPLAFGKRQGREFIWNDLLSLETGSLKLANGRVIEKTLYNRRTRQDEPALFVALTFERREVLDSSNIKPMNLIGVDRGENIPAVIALTDPEGCPLSYFSDSLGNPTHILRIGESYKEKQRTIQANKEVEQRRAGGYSRKYASKAKNLADDMVRNTARDLLYYAVTQDAMLIFENLSRGFGRQGKRTFMAERQYTRMEDWLTAKLAYEGLPSKTYLSKTLAQYTSKTCSNCGFTITSADYDRVLEKLKKTATGWMTTINGKELKVEGQITYYNRYKRQNVVKDLSVELDRLSEESVNNDISSWTKGRSGEALSLLKKRFSHRPVQEKFVCLNCGFETHADEQAALNIARSWLFLRSQEYKKYQTNKTTGNTDKRAFVETWQSFYRKKLKEVWKPAV

SEQ ID NO: 25757 - protein, 978 aa, synthetic construct
  REGION 1..978: note = engineered CasX variant
QEIKRINKIRRRLVKDSNTKKAGKTGPMKTLLVRVMTPDLRERLENLRKKPENIPQPISNTSRANLNKLLTDYTEMKKAILHVYWEEFQKDPVGLMSRVAQPASKKIDQNKLKPEMDEKGNLTTAGFACSQCGQPLFVYKLEQVSEKGKAYTNYFGRCNVAEHEKLILLAQLKPEKDSDEAVTYSLGKFGQRALDFYSIHVTKESTHPVKPLAQIAGNRYASGPVGKALSDACMGTIASFLSKYQDIIIEHQKVVKGNQKRLESLRELAGKENLEYPSVTLPPQPHTKEGVDAYNEVIARVRMWVNLNLWQKLKLSRDDAKPLLRLKGFPSFPLVERQANEVDWWDMVCNVKKLINEKKEDGKVFWQNLAGYKRQEALRPYLSSEEDRKKGKKFARYQLGDLLLHLEKKHGEDWGKVYDEAWERIDKKVEGLSKHIKLEEERRSEDAQSKAALTDWLRAKASFVIEGLKEADKDEFCRCELKLQKWYGDLRGKPFAIEAENSILDISGFSKQYNCAFIWQKDGVKKLNLYLIINYFKGGKLRFKKIKPEAFEANRFYTVINKKSGEIVPMEVNFNFDDPNLIILPLAFGKRQGREFIWNDLLSLETGSLKLANGRVIEKTLYNRRTRQDEPALFVALTFERREVLDSSNIKPMNLIGVDRGENIPAVIALTDPEGCPLSYFSDSLGNPTHILRIGESYKEKQRTIQAKKEVEQRRAGGYSRKYASKAKNLADDMVRNTARDLLYYAVTQDAMLIFENLSRGFGRQGKRTFMAERQYTRMEDWLTAKLAYEGLPSKTYLSKTLAQYTSKTCSNCGFTITSADYDRVLEKLKKTATGWMTTINGKELKVEGQITYYNRYKRQNVVKDLSVELDRLSEESVNNDISSWTKGRSGEALSLLKKRFSHRPVQEKFVCLNCGFETHADEQAALNIARSWLFLRSQEYKKYQTNKTTGNTDKRAFVETWQSFYRKKLKEVWKPAV

SEQ ID NO: 25758 - protein, 978 aa, synthetic construct
  REGION 1..978: note = engineered CasX variant
QEIKRINKIRRRLVKDSNTKKAGKTGPMKTLLVRVMTPDLRERLENLRKKPENIPQPISNTSRANLNKLLTDYTEMKKAILHVYWEEFQKDPVGLMSRVAQPASKKIDQNKLKPEMDEKGNLTTAGFACSQCGQPLFVYKLEQVSEKGKAYTNYFGRCNVAEHEKLILLAQLKPEKDSDEAVTYSLGKFGQRALDFYSIHVTKESTHPVKPLAQIAGNRYASGPVGKALSDACMGTIASFLSKYQDIIIEHQKVVKGNQKRLESLRELAGKENLEYPSVTLPPQPHTKEGVDAYNEVIARVRMWVNLNLWQKLKLSRDDAKPLLRLKGFPSFPLVERQANEVDWWDMVCNVKKLINEKKEDGKVFWQNLAGYKRQEALRPYLSSEEDRKKGKKFARYQLGDLLLHLEKKHGEDWGKVYDEAWERIDKKVEGLSKHIKLEEERRSEDAQSKAALTDWLRAKASFVIEGLKEADKDEFCRCELKLQKWYGDLRGKPFAIEAENSILDISGFSKQYNCAFIWQKDGVKKLNLYLIINYFKGGKLRFKKIKPEAFEANRFYTVINKKSGEIVPMEVNFNFDDPNLIILPLAFGKRQGREFIWNDLLSLETGSLKLANGRVIEKTLYNRRTRQDEPALFVALTFERREVLDSSNIKPMNLIGVDRGENIPAVIALTDPEGCPLSYFKDSLGNPTHILRIGGSYKEKQRTIQAKKEVEQRRAGGYSRKYASKAKNLADDMVRNTARDLLYYAVTQDAMLIFENLSRGFGRQGKRTFMAERQYTRMEDWLTAKLAYEGLPSKTYLSKTLAQYTSKTCSNCGFTITSADYDRVLEKLKKTATGWMTTINGKELKVEGQITYYNRYKRQNVVKDLSVELDRLSEESVNNDISSWTKGRSGEALSLLKKRFSHRPVQEKFVCLNCGFETHADEQAALNIARSWLFLRSQEYKKYQTNKTTGNTDKRAFVETWQSFYRKKLKEVWKPAV

SEQ ID NO: 25759 - protein, 978 aa, synthetic construct
  REGION 1..978: note = engineered CasX variant
QEIKRINKIRRRLVKDSNTKKAGKTGPMKTLLVRVMTPDLRERLENLRKKPENIPQPISNTSRANLNKLLTDYTEMKKAILHVYWEEFQKDPVGLMSRVAQPASKKIDQNKLKPEMDEKGNLTTAGFACSQCGQPLFVYKLEQVSEKGKAYTNYFGRCNVAEHEKLILLAQLKPEKDSDEAVTYSLGKFGQRALDFYSIHVTKESTHPVKPLAQIAGNRYASGPVGKALSDACMGTIASFLSKYQDIIIEHQKVVKGNQKRLESLRELAGKENLEYPSVTLPPQPHTKEGVDAYNEVIARVRMWVNLNLWQKLKLSRDDAKPLLRLKGFPSFPLVERQANEVDWWDMVCNVKKLINEKKEDGKVFWQNLAGYKRQEALRPYLSSEEDRKKGKKFARYQLGDLLLHLEKKHGEDWGKVYDEAWERIDKKVEGLSKHIKLEEERRSEDAQSKAALTDWLRAKASFVIEGLKEADKDEFCRCELKLQKWYGDLRGKPFAIEAENSILDISGFSKQYNCAFIWQKDGVKKLNLYLIINYFKGGKLRFKKIKPEAFEANRFYTVINKKSGEIVPMEVNFNFDDPNLIILPLAFGKRQGREFIWNDLLSLETGSLKLANGRVIEKTLYNRRTRQDEPALFVALTFERREVLDSSNIKPMNLIGVDRGENIPAVIALTDPEGCPLSYFKDSLGNPTHILRIGESYKEKQRTIQANKEVEQRRAGGYSRKYASKAKNLADDMVRNTARDLLYYAVTQDAMLIFENLSRGFGRQGKRTFMAERQYTRMEDWLTAKLAYEGLPSKTYLSKTLAQYTSKTCSNCGFTITSADYDRVLEKLKKTATGWMTTINGKELKVEGQITYYNRYKRQNVVKDLSVELDRLSEESVNNDISSWTKGRSGEALSLLKKRFSHRPVQEKFVCLNCGFETHADEQAALNIARSWLFLRSQEYKKYQTNKTTGNTDKRAFVETWQSFYRKKLKEVWKPAV

SEQ ID NO: 25760 - protein, 978 aa, synthetic construct
  REGION 1..978: note = engineered CasX variant
QEIKRINKIRRRLVKDSNTKKAGKTGPMKTLLVRVMTPDLRERLENLRKKPENIPQPISNTSRANLNKLLTDYTEMKKAILHVYWEEFQKDPVGLMSRVAQPASKKIDQNKLKPEMDEKGNLTTAGFACSQCGQPLFVYKLEQVSEKGKAYTNYFGRCNVAEHEKLILLAQLKPEKDSDEAVTYSLGKFGQRALDFYSIHVTKESTHPVKPLAQIAGNRYASGPVGKALSDACMGTIASFLSKYQDIIIEHQKVVKGNQKRLESLRELAGKENLEYPSVTLPPQPHTKEGVDAYNEVIARVRMWVNLNLWQKLKLSRDDAKPLLRLKGFPSFPLVERQANEVDWWDMVCNVKKLINEKKEDGKVFWQNLAGYKRQEALRPYLSSEEDRKKGKKFARYQLGDLLLHLEKKHGEDWGKVYDEAWERIDKKVEGLSKHIKLEEERRSEDAQSKAALTDWLRAKASFVIEGLKEADKDEFCRCELKLQKWYGDLRGKPFAIEAENSILDISGFSKQYNCAFIWQKDGVKKLNLYLIINYFKGGKLRFKKIKPEAFEANRFYTVINKKSGEIVPMEVNFNFDDPNLIILPLAFGKRQGREFIWNDLLSLETGSLKLANGRVIEKTLYNRRTRQDEPALFVALTFERREVLDSSNIKPMNLIGVDRGENIPAVIALTDPEGCPLSYFKDSLGNPTHILRIGESYKEKQRTIQAKQEVEQRRAGGYSRKYASKAKNLADDMVRNTARDLLYYAVTQDAMLIFENLSRGFGRQGKRTFMAERQYTRMEDWLTAKLAYEGLPSKTYLSKTLAQYTSKTCSNCGFTITSADYDRVLEKLKKTATGWMTTINGKELKVEGQITYYNRYKRQNVVKDLSVELDRLSEESVNNDISSWTKGRSGEALSLLKKRFSHRPVQEKFVCLNCGFETHADEQAALNIARSWLFLRSQEYKKYQTNKTTGNTDKRAFVETWQSFYRKKLKEVWKPAV

SEQ ID NO: 25761 - protein, 978 aa, synthetic construct
  REGION 1..978: note = engineered CasX variant
QEIKRINKIRRRLVKDSNTKKAGKTGPMKTLLVRVMTPDLRERLENLRKKPENIPQPISNTSRANLNKLLTDYTEMKKAILHVYWEEFQKDPVGLMSRVAQPASKKIDQNKLKPEMDEKGNLTTAGFACSQCGQPLFVYKLEQVSEKGKAYTNYFGRCNVAEHEKLILLAQLKPEKDSDEAVTYSLGKFGQRALDFYSIHVTKESTHPVKPLAQIAGNRYASGPVGKALSDACMGTIASFLSKYQDIIIEHQKVVKGNQKRLESLRELAGKENLEYPSVTLPPQPHTKEGVDAYNEVIARVRMWVNLNLWQKLKLSRDDAKPLLRLKGFPSFPLVERQANEVDWWDMVCNVKKLINEKKEDGKVFWQNLAGYKRQEALRPYLSSEEDRKKGKKFARYQLGDLLLHLEKKHGEDWGKVYDEAWERIDKKVEGLSKHIKLEEERRSEDAQSKAALTDWLRAKASFVIEGLKEADKDEFCRCELKLQKWYGDLRGKPFAIEAENSILDISGFSKQYNCAFIWQKDGVKKLNLYLIINYFKGGKLRFKKIKPEAFEANRFYTVINKKSGEIVPMEVNFNFDDPNLIILPLAFGKRQGREFIWNDLLSLETGSLKLANGRVIEKTLYNRRTRQDEPALFVALTFERREVLDSSNIKPMNLIGVDRGENIPAVIALTDPEGCPLSYFKDSLGNPTHILRIGESYKEKQRTIQAKKLVEQRRAGGYSRKYASKAKNLADDMVRNTARDLLYYAVTQDAMLIFENLSRGFGRQGKRTFMAERQYTRMEDWLTAKLAYEGLPSKTYLSKTLAQYTSKTCSNCGFTITSADYDRVLEKLKKTATGWMTTINGKELKVEGQITYYNRYKRQNVVKDLSVELDRLSEESVNNDISSWTKGRSGEALSLLKKRFSHRPVQEKFVCLNCGFETHADEQAALNIARSWLFLRSQEYKKYQTNKTTGNTDKRAFVETWQSFYRKKLKEVWKPAV

SEQ ID NO: 25762 - protein, 978 aa, synthetic construct
  REGION 1..978: note = engineered CasX variant
QEIKRINKIRRRLVKDSNTKKAGKTGPMKTLLVRVMTPDLRERLENLRKKPENIPQPISNTSRANLNKLLTDYTEMKKAILHVYWEEFQKDPVGLMSRVAQPASKKIDQNKLKPEMDEKGNLTTAGFACSQCGQPLFVYKLEQVSEKGKAYTNYFGRCNVAEHEKLILLAQLKPEKDSDEAVTYSLGKFGQRALDFYSIHVTKESTHPVKPLAQIAGNRYASGPVGKALSDACMGTIASFLSKYQDIIIEHQKVVKGNQKRLESLRELAGKENLEYPSVTLPPQPHTKEGVDAYNEVIARVRMWVNLNLWQKLKLSRDDAKPLLRLKGFPSFPLVERQANEVDWWDMVCNVKKLINEKKEDGKVFWQNLAGYKRQEALRPYLSSEEDRKKGKKFARYQLGDLLLHLEKKHGEDWGKVYDEAWERIDKKVEGLSKHIKLEEERRSEDAQSKAALTDWLRAKASFVIEGLKEADKDEFCRCELKLQKWYGDLRGKPFAIEAENSILDISGFSKQYNCAFIWQKDGVKKLNLYLIINYFKGGKLRFKKIKPEAFEANRFYTVINKKSGEIVPMEVNFNFDDPNLIILPLAFGKRQGREFIWNDLLSLETGSLKLANGRVIEKTLYNRRTRQDEPALFVALTFERREVLDSSNIKPMNLIGVDRGENIPAVIALTDPEGCPLSYFKDSLGNPTHILRIGESYKEKQRTIQAKKEVEQRRAGGYSRKYASKAKNLADDMVRNTARDLLYYAVTQDAMLIFENLSRGFGRQGKRTFMAERQYTRMEDWLTAKLAYEGLPSKTYLSKTLAQYTSKTCSNCGFTITSADYDRVLEKLKKTATGWMTTINGKELKVEGQITYYNRYKRQNVVKDLSVELDRLSEESVNNDISSWTKGRSGEALSLLKKRFSHRPVQEKFVCLNCGFETHADEQAALNIARSWLFLRSQEYKKYQTNKTTGNTDKRAFVETWQSFYRKKLKEVWKPAV

SEQ ID NO: 25763 - protein, 978 aa, synthetic construct
  REGION 1..978: note = engineered CasX variant
QEIKRINKIRRRLVKDSNTKKAGKTGPMKTLLVRVMTPDLRERLENLRKKPENIPQPISNTSRANLNKLLTDYTEMKKAILHVYWEEFQKDPVGLMSRVAQPASKKIDQNKLKPEMDEKGNLTTAGFACSQCGQPLFVYKLEQVSEKGKAYTNYFGRCNVAEHEKLILLAQLKPEKDSDEAVTYSLGKFGQRALDFYSIHVTKESTHPVKPLAQIAGNRYASGPVGKALSDACMGTIASFLSKYQDIIIEHQKVVKGNQKRLESLRELAGKENLEYPSVTLPPQPHTKEGVDAYNEVIARVRMWVNLNLWQKLKLSRDDAKPLLRLKGFPSFPLVERQANEVDWWDMVCNVKKLINEKKEDGKVFWQNLAGYKRQEALRPYLSSEEDRKKGKKFARYQLGDLLLHLEKKHGEDWGKVYDEAWERIDKKVEGLSKHIKLEEERRSEDAQSKAALTDWLRAKASFVIEGLKEADKDEFCRCELKLQKWYGDLRGKPFAIEAENSILDISGFSKQYNCAFIWQKDGVKKLNLYLIINYFKGGKLRFKKIKPEAFEANRFYTVINKKSGEIVPMEVNFNFDDPNLIILPLAFGKRQGREFIWNDLLSLETGSLKLANGRVIEKTLYNRRTRQDEPALFVALTFERREVLDSSNIKPMNLIGVDRGENIPAVIALTDPEGCPLSYFKDSLGNPTHILRIGESYKEKQRQIQAKKEVEQRRAGGYSRKYASKAKNLADDMVRNTARDLLYYAVTQDAMLIFENLSRGFGRQGKRTFMAERQYTRMEDWLTAKLAYEGLPSKTYLSKTLAQYTSKTCSNCGFTITSADYDRVLEKLKKTATGWMTTINGKELKVEGQITYYNRYKRQNVVKDLSVELDRLSEESVNNDISSWTKGRSGEALSLLKKRFSHRPVQEKFVCLNCGFETHADEQAALNIARSWLFLRSQEYKKYQTNKTTGNTDKRAFVETWQSFYRKKLKEVWKPAV

SEQ ID NO: 25764 - protein, 978 aa, synthetic construct
  REGION 1..978: note = engineered CasX variant
QEIKRINKIRRRLVKDSNTKKAGKTGPMKTLLVRVMTPDLRERLENLRKKPENIPQPISNTSRANLNKLLTDYTEMKKAILHVYWEEFQKDPVGLMSRVAQPASKKIDQNKLKPEMDEKGNLTTAGFACSQCGQPLFVYKLEQVSEKGKAYTNYFGRCNVAEHEKLILLAQLKPEKDSDEAVTYSLGKFGQRALDFYSIHVTKESTHPVKPLAQIAGNRYASGPVGKALSDACMGTIASFLSKYQDIIIEHQKVVKGNQKRLESLRELAGKENLEYPSVTLPPQPHTKEGVDAYNEVIARVRMWVNLNLWQKLKLSRDDAKPLLRLKGFPSFPLVERQANEVDWWDMVCNVKKLINEKKEDGKVFWQNLAGYKRQEALRPYLSSEEDRKKGKKFARYQLGDLLLHLEKKHGEDWGKVYDEAWERIDKKVEGLSKHIKLEEERRSEDAQSKAALTDWLRAKASFVIEGLKEADKDEFCRCELKLQKWYGDLRGKPFAIEAENSILDISGFSKQYNCAFIWQKDGVKKLNLYLIINYFKGGKLRFKKIKPEAFEANRFYTVINKKSGEIVPMEVNFNFDDPNLIILPLAFGKRQGREFIWNDLLSLETGSLKLANGRVIEKTLYNRRTRQDEPALFVALTFERREVLDSSNIKPMNLIGVDRGENIPAVIALTDPEGCPLSYFKDSLGNPTHILRIGESYKEKQQTIQAKQEVEQRRAGGYSRKYASKAKNLADDMVRNTARDLLYYAVTQDAMLIFENLSRGFGRQGKRTFMAERQYTRMEDWLTAKLAYEGLPSKTYLSKTLAQYTSKTCSNCGFTITSADYDRVLEKLKKTATGWMTTINGKELKVEGQITYYNRYKRQNVVKDLSVELDRLSEESVNNDISSWTKGRSGEALSLLKKRFSHRPVQEKFVCLNCGFETHADEQAALNIARSWLFLRSQEYKKYQTNKTTGNTDKRAFVETWQSFYRKKLKEVWKPAV

SEQ ID NO: 25765 - protein, 978 aa, synthetic construct
  REGION 1..978: note = engineered CasX variant
QEIKRINKIRRRLVKDSNTKKAGKTGPMKTLLVRVMTPDLRERLENLRKKPENIPQPISNTSRANLNKLLTDYTEMKKAILHVYWEEFQKDPVGLMSRVAQPASKKIDQNKLKPEMDEKGNLTTAGFACSQCGQPLFVYKLEQVSEKGKAYTNYFGRCNVAEHEKLILLAQLKPEKDSDEAVTYSLGKFGQRALDFYSIHVTKESTHPVKPLAQIAGNRYASGPVGKALSDACMGTIASFLSKYQDIIIEHQKVVKGNQKRLESLRELAGKENLEYPSVTLPPQPHTKEGVDAYNEVIARVRMWVNLNLWQKLKLSRDDAKPLLRLKGFPSFPLVERQANEVDWWDMVCNVKKLINEKKEDGKVFWQNLAGYKRQEALRPYLSSEEDRKKGKKFARYQLGDLLLHLEKKHGEDWGKVYDEAWERIDKKVEGLSKHIKLEEERRSEDAQSKAALTDWLRAKASFVIEGLKEADKDEFCRCELKLQKWYGDLRGKPFAIEAENSILDISGFSKQYNCAFIWQKDGVKKLNLYLIINYFKGGKLRFKKIKPEAFEANRFYTVINKKSGEIVPMEVNFNFDDPNLIILPLAFGKRQGREFIWNDLLSLETGSLKLANGRVIEKTLYNRRTRQDEPALFVALTFERREVLDSSNIKPMNLIGVDRGENIPAVIALTDPEGCPLSYFKDSLGNPTHILRIGESYKEKQQTIQAKKEVEQRRAGGYSRKYASKAKNLADDMVRNTARDLLYYAVTQDAMLIFENLSRGFGRQGKRTFMAERQYTRMEDWLTAKLAYEGLPSKTYLSKTLAQYTSKTCSNCGFTITSADYDRVLEKLKKTATGWMTTINGKELKVEGQITYYNRYKRQNVVKDLSVELDRLSEESVNNDISSWTKGRSGEALSLLKKRFSHRPVQEKFVCLNCGFETHADEQAALNIARSWLFLRSQEYKKYQTNKTTGNTDKRAFVETWQSFYRKKLKEVWKPAV

SEQ ID NO: 25766 - protein, 978 aa, synthetic construct
  REGION 1..978: note = engineered CasX variant
QEIKRINKIRRRLVKDSNTKKAGKTGPMKTLLVRVMTPDLRERLENLRKKPENIPQPISNTSRANLNKLLTDYTEMKKAILHVYWEEFQKDPVGLMSRVAQPASKKIDQNKLKPEMDEKGNLTTAGFACSQCGQPLFVYKLEQVSEKGKAYTNYFGRCNVAEHEKLILLAQLKPEKDSDEAVTYSLGKFGQRALDFYSIHVTKESTHPVKPLAQIAGNRYASGPVGKALSDACMGTIASFLSKYQDIIIEHQKVVKGNQKRLESLRELAGKENLEYPSVTLPPQPHTKEGVDAYNEVIARVRMWVNLNLWQKLKLSRDDAKPLLRLKGFPSFPLVERQANEVDWWDMVCNVKKLINEKKEDGKVFWQNLAGYKRQEALRPYLSSEEDRKKGKKFARYQLGDLLLHLEKKHGEDWGKVYDEAWERIDKKVEGLSKHIKLEEERRSEDAQSKAALTDWLRAKASFVIEGLKEADKDEFCRCELKLQKWYGDLRGKPFAIEAENSILDISGFSKQYNCAFIWQKDGVKKLNLYLIINYFKGGKLRFKKIKPEAFEANRFYTVINKKSGEIVPMEVNFNFDDPNLIILPLAFGKRQGREFIWNDLLSLETGSLKLANGRVIEKTLYNRRTRQDEPALFVALTFERREVLDSSNIKPMNLIGVDRGENIPAVIALTDPEGCPLSYFKDSLGNPTHILRIDESYKEKQRTIQAKKEVEQRRAGGYSRKYASKAKNLADDMVRNTARDLLYYAVTQDAMLIFENLSRGFGRQGKRTFMAERQYTRMEDWLTAKLAYEGLPSKTYLSKTLAQYTSKTCSNCGFTITSADYDRVLEKLKKTATGWMTTINGKELKVEGQITYYNRYKRQNVVKDLSVELDRLSEESVNNDISSWTKGRSGEALSLLKKRFSHRPVQEKFVCLNCGFETHADEQAALNIARSWLFLRSQEYKKYQTNKTTGNTDKRAFVETWQSFYRKKLKEVWKPAV

SEQ ID NO: 25767 - protein, 978 aa, synthetic construct
  REGION 1..978: note = engineered CasX variant
QEIKRINKIRRRLVKDSNTKKAGKTGPMKTLLVRVMTPDLRERLENLRKKPENIPQPISNTSRANLNKLLTDYTEMKKAILHVYWEEFQKDPVGLMSRVAQPASKKIDQNKLKPEMDEKGNLTTAGFACSQCGQPLFVYKLEQVSEKGKAYTNYFGRCNVAEHEKLILLAQLKPEKDSDEAVTYSLGKFGQRALDFYSIHVTKESTHPVKPLAQIAGNRYASGPVGKALSDACMGTIASFLSKYQDIIIEHQKVVKGNQKRLESLRELAGKENLEYPSVTLPPQPHTKEGVDAYNEVIARVRMWVNLNLWQKLKLSRDDAKPLLRLKGFPSFPLVERQANEVDWWDMVCNVKKLINEKKEDGKVFWQNLAGYKRQEALRPYLSSEEDRKKGKKFARYQLGDLLLHLEKKHGEDWGKVYDEAWERIDKKVEGLSKHIKLEEERRSEDAQSKAALTDWLRAKASFVIEGLKEADKDEFCRCELKLQKWYGDLRGKPFAIEAENSILDISGFSKQYNCAFIWQKDGVKKLNLYLIINYFKGGKLRFKKIKPEAFEANRFYTVINKKSGEIVPMEVNFNFDDPNLIILPLAFGKRQGREFIWNDLLSLETGSLKLANGRVIEKTLYNRRTRQDEPALFVALTFERREVLDSSNIKPMNLIGVDRGENIPAVIALTDPEGCPLSYFKDSKGNPTHILRIGESYKEKQRTIQAKKEVEQRRAGGYSRKYASKAKNLADDMVRNTARDLLYYAVTQDAMLIFENLSRGFGRQGKRTFMAERQYTRMEDWLTAKLAYEGLPSKTYLSKTLAQYTSKTCSNCGFTITSADYDRVLEKLKKTATGWMTTINGKELKVEGQITYYNRYKRQNVVKDLSVELDRLSEESVNNDISSWTKGRSGEALSLLKKRFSHRPVQEKFVCLNCGFETHADEQAALNIARSWLFLRSQEYKKYQTNKTTGNTDKRAFVETWQSFYRKKLKEVWKPAV

SEQ ID NO: 25768 - protein, 978 aa, synthetic construct
  REGION 1..978: note = engineered CasX variant
QEIKRINKIRRRLVKDSNTKKAGKTGPMKTLLVRVMTPDLRERLENLRKKPENIPQPISNTSRANLNKLLTDYTEMKKAILHVYWEEFQKDPVGLMSRVAQPASKKIDQNKLKPEMDEKGNLTTAGFACSQCGQPLFVYKLEQVSEKGKAYTNYFGRCNVAEHEKLILLAQLKPEKDSDEAVTYSLGKFGQRALDFYSIHVTKESTHPVKPLAQIAGNRYASGPVGKALSDACMGTIASFLSKYQDIIIEHQKVVKGNQKRLESLRELAGKENLEYPSVTLPPQPHTKEGVDAYNEVIARVRMWVNLNLWQKLKLSRDDAKPLLRLKGFPSFPLVERQANEVDWWDMVCNVKKLINEKKEDGKVFWQNLAGYKRQEALRPYLSSEEDRKKGKKFARYQLGDLLLHLEKKHGEDWGKVYDEAWERIDKKVEGLSKHIKLEEERRSEDAQSKAALTDWLRAKASFVIEGLKEADKDEFCRCELKLQKWYGDLRGKPFAIEAENSILDISGFSKQYNCAFIWQKDGVKKLNLYLIINYFKGGKLRFKKIKPEAFEANRFYTVINKKSGEIVPMEVNFNFDDPNLIILPLAFGKRQGREFIWNDLLSLETGSLKLANGRVIEKTLYNRRTRQDEPALFVALTFERREVLDSSNIKPMNLIGVDRGENIPAVIALTDPEGCPLSYFKDSFGNPTHILRIGGSYKEKQRTIQAKKEVEQRRAGGYSRKYASKAKNLADDMVRNTARDLLYYAVTQDAMLIFENLSRGFGRQGKRTFMAERQYTRMEDWLTAKLAYEGLPSKTYLSKTLAQYTSKTCSNCGFTITSADYDRVLEKLKKTATGWMTTINGKELKVEGQITYYNRYKRQNVVKDLSVELDRLSEESVNNDISSWTKGRSGEALSLLKKRFSHRPVQEKFVCLNCGFETHADEQAALNIARSWLFLRSQEYKKYQTNKTTGNTDKRAFVETWQSFYRKKLKEVWKPAV

SEQ ID NO: 25769 - protein, 978 aa, synthetic construct
  REGION 1..978: note = engineered CasX variant
QEIKRINKIRRRLVKDSNTKKAGKTGPMKTLLVRVMTPDLRERLENLRKKPENIPQPISNTSRANLNKLLTDYTEMKKAILHVYWEEFQKDPVGLMSRVAQPASKKIDQNKLKPEMDEKGNLTTAGFACSQCGQPLFVYKLEQVSEKGKAYTNYFGRCNVAEHEKLILLAQLKPEKDSDEAVTYSLGKFGQRALDFYSIHVTKESTHPVKPLAQIAGNRYASGPVGKALSDACMGTIASFLSKYQDIIIEHQKVVKGNQKRLESLRELAGKENLEYPSVTLPPQPHTKEGVDAYNEVIARVRMWVNLNLWQKLKLSRDDAKPLLRLKGFPSFPLVERQANEVDWWDMVCNVKKLINEKKEDGKVFWQNLAGYKRQEALRPYLSSEEDRKKGKKFARYQLGDLLLHLEKKHGEDWGKVYDEAWERIDKKVEGLSKHIKLEEERRSEDAQSKAALTDWLRAKASFVIEGLKEADKDEFCRCELKLQKWYGDLRGKPFAIEAENSILDISGFSKQYNCAFIWQKDGVKKLNLYLIINYFKGGKLRFKKIKPEAFEANRFYTVINKKSGEIVPMEVNFNFDDPNLIILPLAFGKRQGREFIWNDLLSLETGSLKLANGRVIEKTLYNRRTRQDEPALFVALTFERREVLDSSNIKPMNLIGVDRGENIPAVIALTDPEGCPLSYFKDSFGNPTHILRIGESYKEKQRTIQAKKEVEQRRAGGYSRKYASKAKNLADDMVRNTARDLLYYAVTQDAMLIFENLSRGFGRQGKRTFMAERQYTRMEDWLTAKLAYEGLPSKTYLSKTLAQYTSKTCSNCGFTITSADYDRVLEKLKKTATGWMTTINGKELKVEGQITYYNRYKRQNVVKDLSVELDRLSEESVNNDISSWTKGRSGEALSLLKKRFSHRPVQEKFVCLNCGFETHADEQAALNIARSWLFLRSQEYKKYQTNKTTGNTDKRAFVETWQSFYRKKLKEVWKPAV

SEQ ID NO: 25770 - protein, 978 aa, synthetic construct
  REGION 1..978: note = engineered CasX variant
QEIKRINKIRRRLVKDSNTKKAGKTGPMKTLLVRVMTPDLRERLENLRKKPENIPQPISNTSRANLNKLLTDYTEMKKAILHVYWEEFQKDPVGLMSRVAQPASKKIDQNKLKPEMDEKGNLTTAGFACSQCGQPLFVYKLEQVSEKGKAYTNYFGRCNVAEHEKLILLAQLKPEKDSDEAVTYSLGKFGQRALDFYSIHVTKESTHPVKPLAQIAGNRYASGPVGKALSDACMGTIASFLSKYQDIIIEHQKVVKGNQKRLESLRELAGKENLEYPSVTLPPQPHTKEGVDAYNEVIARVRMWVNLNLWQKLKLSRDDAKPLLRLKGFPSFPLVERQANEVDWWDMVCNVKKLINEKKEDGKVFWQNLAGYKRQEALRPYLSSEEDRKKGKKFARYQLGDLLLHLEKKHGEDWGKVYDEAWERIDKKVEGLSKHIKLEEERRSEDAQSKAALTDWLRAKASFVIEGLKEADKDEFCRCELKLQKWYGDLRGKPFAIEAENSILDISGFSKQYNCAFIWQKDGVKKLNLYLIINYFKGGKLRFKKIKPEAFEANRFYTVINKKSGEIVPMEVNFNFDDPNLIILPLAFGKRQGREFIWNDLLSLETGSLKLANGRVIEKTLYNRRTRQDEPALFVALTFERREVLDSSNIKPMNLIGVDRGENIPAVIALTDPEGCPLSYFCDSLGNPTHILRIGESYKEKQRTIQAKKEVEQRRAGGYSRKYASKAKNLADDMVRNTARDLLYYAVTQDAMLIFENLSRGFGRQGKRTFMAERQYTRMEDWLTAKLAYEGLPSKTYLSKTLAQYTSKTCSNCGFTITSADYDRVLEKLKKTATGWMTTINGKELKVEGQITYYNRYKRQNVVKDLSVELDRLSEESVNNDISSWTKGRSGEALSLLKKRFSHRPVQEKFVCLNCGFETHADEQAALNIARSWLFLRSQEYKKYQTNKTTGNTDKRAFVETWQSFYRKKLKEVWKPAV

SEQ ID NO: 25771 - protein, 978 aa, synthetic construct
  REGION 1..978: note = engineered CasX variant
QEIKRINKIRRRLVKDSNTKKAGKTGPMKTLLVRVMTPDLRERLENLRKKPENIPQPISNTSRANLNKLLTDYTEMKKAILHVYWEEFQKDPVGLMSRVAQPASKKIDQNKLKPEMDEKGNLTTAGFACSQCGQPLFVYKLEQVSEKGKAYTNYFGRCNVAEHEKLILLAQLKPEKDSDEAVTYSLGKFGQRALDFYSIHVTKESTHPVKPLAQIAGNRYASGPVGKALSDACMGTIASFLSKYQDIIIEHQKVVKGNQKRLESLRELAGKENLEYPSVTLPPQPHTKEGVDAYNEVIARVRMWVNLNLWQKLKLSRDDAKPLLRLKGFPSFPLVERQANEVDWWDMVCNVKKLINEKKEDGKVFWQNLAGYKRQEALRPYLSSEEDRKKGKKFARYQLGDLLLHLEKKHGEDWGKVYDEAWERIDKKVEGLSKHIKLEEERRSEDAQSKAALTDWLRAKASFVIEGLKEADKDEFCRCELKLQKWYGDLRGKPFAIEAENSILDISGFSKQYNCAFIWQKDGVKKLNLYLIINYFKGGKLRFKKIKPEAFEANRFYTVINKKSGEIVPMEVNFNFDDPNLIILPLAFGKRQGREFIWNDLLSLETGSLKLANGRVIEKTLYNRRTRQDEPALFVALTFERREVLDSSNIKPMNLIGVDRGENIPAVIALTDPEGCPLSYFADSLGNPTHILRIGESYKEKQRTIQAKKEVEQRRAGGYSRKYASKAKNLADDMVRNTARDLLYYAVTQDAMLIFENLSRGFGRQGKRTFMAERQYTRMEDWLTAKLAYEGLPSKTYLSKTLAQYTSKTCSNCGFTITSADYDRVLEKLKKTATGWMTTINGKELKVEGQITYYNRYKRQNVVKDLSVELDRLSEESVNNDISSWTKGRSGEALSLLKKRFSHRPVQEKFVCLNCGFETHADEQAALNIARSWLFLRSQEYKKYQTNKTTGNTDKRAFVETWQSFYRKKLKEVWKPAV

SEQ ID NO: 25772 - protein, 978 aa, synthetic construct
  REGION 1..978: note = engineered CasX variant
QEIKRINKIRRRLVKDSNTKKAGKTGPMKTLLVRVMTPDLRERLENLRKKPENIPQPISNTSRANLNKLLTDYTEMKKAILHVYWEEFQKDPVGLMSRVAQPASKKIDQNKLKPEMDEKGNLTTAGFACSQCGQPLFVYKLEQVSEKGKAYTNYFGRCNVAEHEKLILLAQLKPEKDSDEAVTYSLGKFGQRALDFYSIHVTKESTHPVKPLAQIAGNRYASGPVGKALSDACMGTIASFLSKYQDIIIEHQKVVKGNQKRLESLRELAGKENLEYPSVTLPPQPHTKEGVDAYNEVIARVRMWVNLNLWQKLKLSRDDAKPLLRLKGFPSFPLVERQANEVDWWDMVCNVKKLINEKKEDGKVFWQNLAGYKRQEALRPYLSSEEDRKKGKKFARYQLGDLLLHLEKKHGEDWGKVYDEAWERIDKKVEGLSKHIKLEEERRSEDAQSKAALTDWLRAKASFVIEGLKEADKDEFCRCELKLQKWYGDLRGKPFAIEAENSILDISGFSKQYNCAFIWQKDGVKKLNLYLIINYFKGGKLRFKKIKPEAFEANRFYTVINKKSGEIVPMEVNFNFDDPNLIILPLAFGKRQGREFIWNDLLSLETGSLKLANGRVIEKTLYNRRTRQDEPALFVALTFERREVLDSSNIKPMNLIGVDRGENIPAVIALTDPEGCPLSWFKDSLGNPTHILRIGESYKEQQRTIQAKKEVEQRRAGGYSRKYASKAKNLADDMVRNTARDLLYYAVTQDAMLIFENLSRGFGRQGKRTFMAERQYTRMEDWLTAKLAYEGLPSKTYLSKTLAQYTSKTCSNCGFTITSADYDRVLEKLKKTATGWMTTINGKELKVEGQITYYNRYKRQNVVKDLSVELDRLSEESVNNDISSWTKGRSGEALSLLKKRFSHRPVQEKFVCLNCGFETHADEQAALNIARSWLFLRSQEYKKYQTNKTTGNTDKRAFVETWQSFYRKKLKEVWKPAV

SEQ ID NO: 25773 - protein, 978 aa, synthetic construct
  REGION 1..978: note = engineered CasX variant
QEIKRINKIRRRLVKDSNTKKAGKTGPMKTLLVRVMTPDLRERLENLRKKPENIPQPISNTSRANLNKLLTDYTEMKKAILHVYWEEFQKDPVGLMSRVAQPASKKIDQNKLKPEMDEKGNLTTAGFACSQCGQPLFVYKLEQVSEKGKAYTNYFGRCNVAEHEKLILLAQLKPEKDSDEAVTYSLGKFGQRALDFYSIHVTKESTHPVKPLAQIAGNRYASGPVGKALSDACMGTIASFLSKYQDIIIEHQKVVKGNQKRLESLRELAGKENLEYPSVTLPPQPHTKEGVDAYNEVIARVRMWVNLNLWQKLKLSRDDAKPLLRLKGFPSFPLVERQANEVDWWDMVCNVKKLINEKKEDGKVFWQNLAGYKRQEALRPYLSSEEDRKKGKKFARYQLGDLLLHLEKKHGEDWGKVYDEAWERIDKKVEGLSKHIKLEEERRSEDAQSKAALTDWLRAKASFVIEGLKEADKDEFCRCELKLQKWYGDLRGKPFAIEAENSILDISGFSKQYNCAFIWQKDGVKKLNLYLIINYFKGGKLRFKKIKPEAFEANRFYTVINKKSGEIVPMEVNFNFDDPNLIILPLAFGKRQGREFIWNDLLSLETGSLKLANGRVIEKTLYNRRTRQDEPALFVALTFERREVLDSSNIKPMNLIGVDRGENIPAVIALTDPEGCPLSWFKDSLGNPTHILRIGESYKEKQRTIQGKKEVEQRRAGGYSRKYASKAKNLADDMVRNTARDLLYYAVTQDAMLIFENLSRGFGRQGKRTFMAERQYTRMEDWLTAKLAYEGLPSKTYLSKTLAQYTSKTCSNCGFTITSADYDRVLEKLKKTATGWMTTINGKELKVEGQITYYNRYKRQNVVKDLSVELDRLSEESVNNDISSWTKGRSGEALSLLKKRFSHRPVQEKFVCLNCGFETHADEQAALNIARSWLFLRSQEYKKYQTNKTTGNTDKRAFVETWQSFYRKKLKEVWKPAV

SEQ ID NO: 25774 - protein, 978 aa, synthetic construct
  REGION 1..978: note = engineered CasX variant
QEIKRINKIRRRLVKDSNTKKAGKTGPMKTLLVRVMTPDLRERLENLRKKPENIPQPISNTSRANLNKLLTDYTEMKKAILHVYWEEFQKDPVGLMSRVAQPASKKIDQNKLKPEMDEKGNLTTAGFACSQCGQPLFVYKLEQVSEKGKAYTNYFGRCNVAEHEKLILLAQLKPEKDSDEAVTYSLGKFGQRALDFYSIHVTKESTHPVKPLAQIAGNRYASGPVGKALSDACMGTIASFLSKYQDIIIEHQKVVKGNQKRLESLRELAGKENLEYPSVTLPPQPHTKEGVDAYNEVIARVRMWVNLNLWQKLKLSRDDAKPLLRLKGFPSFPLVERQANEVDWWDMVCNVKKLINEKKEDGKVFWQNLAGYKRQEALRPYLSSEEDRKKGKKFARYQLGDLLLHLEKKHGEDWGKVYDEAWERIDKKVEGLSKHIKLEEERRSEDAQSKAALTDWLRAKASFVIEGLKEADKDEFCRCELKLQKWYGDLRGKPFAIEAENSILDISGFSKQYNCAFIWQKDGVKKLNLYLIINYFKGGKLRFKKIKPEAFEANRFYTVINKKSGEIVPMEVNFNFDDPNLIILPLAFGKRQGREFIWNDLLSLETGSLKLANGRVIEKTLYNRRTRQDEPALFVALTFERREVLDSSNIKPMNLIGVDRGENIPAVIALTDPEGCPLSWFKDSLGNPTHILRIGESYKEKQRTIQAKKEVEQRRAGGYSRKYASKAKNLADDMVRNTARDLLYYAVTQDAMLIFENLSRGFGRQGKRTFMAERQYTRMEDWLTAKLAYEGLPSKTYLSKTLAQYTSKTCSNCGFTITSADYDRVLEKLKKTATGWMTTINGKELKVEGQITYYNRYKRQNVVKDLSVELDRLSEESVNNDISSWTKGRSGEALSLLKKRFSHRPVQEKFVCLNCGFETHADEQAALNIARSWLFLRSQEYKKYQTNKTTGNTDKRAFVETWQSFYRKKLKEVWKPAV

SEQ ID NO: 25775 - protein, 978 aa, synthetic construct
  REGION 1..978: note = engineered CasX variant
QEIKRINKIRRRLVKDSNTKKAGKTGPMKTLLVRVMTPDLRERLENLRKKPENIPQPISNTSRANLNKLLTDYTEMKKAILHVYWEEFQKDPVGLMSRVAQPASKKIDQNKLKPEMDEKGNLTTAGFACSQCGQPLFVYKLEQVSEKGKAYTNYFGRCNVAEHEKLILLAQLKPEKDSDEAVTYSLGKFGQRALDFYSIHVTKESTHPVKPLAQIAGNRYASGPVGKALSDACMGTIASFLSKYQDIIIEHQKVVKGNQKRLESLRELAGKENLEYPSVTLPPQPHTKEGVDAYNEVIARVRMWVNLNLWQKLKLSRDDAKPLLRLKGFPSFPLVERQANEVDWWDMVCNVKKLINEKKEDGKVFWQNLAGYKRQEALRPYLSSEEDRKKGKKFARYQLGDLLLHLEKKHGEDWGKVYDEAWERIDKKVEGLSKHIKLEEERRSEDAQSKAALTDWLRAKASFVIEGLKEADKDEFCRCELKLQKWYGDLRGKPFAIEAENSILDISGFSKQYNCAFIWQKDGVKKLNLYLIINYFKGGKLRFKKIKPEAFEANRFYTVINKKSGEIVPMEVNFNFDDPNLIILPLAFGKRQGREFIWNDLLSLETGSLKLANGRVIEKTLYNRRTRQDEPALFVALTFERREVLDSSNIKPMNLIGVDRGENIPAVIALTDPEGCPLSWFKDSLGNPTHILRIGESYKEKQRTIQAKKEVEQKRAGGYSRKYASKAKNLADDMVRNTARDLLYYAVTQDAMLIFENLSRGFGRQGKRTFMAERQYTRMEDWLTAKLAYEGLPSKTYLSKTLAQYTSKTCSNCGFTITSADYDRVLEKLKKTATGWMTTINGKELKVEGQITYYNRYKRQNVVKDLSVELDRLSEESVNNDISSWTKGRSGEALSLLKKRFSHRPVQEKFVCLNCGFETHADEQAALNIARSWLFLRSQEYKKYQTNKTTGNTDKRAFVETWQSFYRKKLKEVWKPAV

SEQ ID NO: 25776 - protein, 978 aa, synthetic construct
  REGION 1..978: note = engineered CasX variant
QEIKRINKIRRRLVKDSNTKKAGKTGPMKTLLVRVMTPDLRERLENLRKKPENIPQPISNTSRANLNKLLTDYTEMKKAILHVYWEEFQKDPVGLMSRVAQPASKKIDQNKLKPEMDEKGNLTTAGFACSQCGQPLFVYKLEQVSEKGKAYTNYFGRCNVAEHEKLILLAQLKPEKDSDEAVTYSLGKFGQRALDFYSIHVTKESTHPVKPLAQIAGNRYASGPVGKALSDACMGTIASFLSKYQDIIIEHQKVVKGNQKRLESLRELAGKENLEYPSVTLPPQPHTKEGVDAYNEVIARVRMWVNLNLWQKLKLSRDDAKPLLRLKGFPSFPLVERQANEVDWWDMVCNVKKLINEKKEDGKVFWQNLAGYKRQEALRPYLSSEEDRKKGKKFARYQLGDLLLHLEKKHGEDWGKVYDEAWERIDKKVEGLSKHIKLEEERRSEDAQSKAALTDWLRAKASFVIEGLKEADKDEFCRCELKLQKWYGDLRGKPFAIEAENSILDISGFSKQYNCAFIWQKDGVKKLNLYLIINYFKGGKLRFKKIKPEAFEANRFYTVINKKSGEIVPMEVNFNFDDPNLIILPLAFGKRQGREFIWNDLLSLETGSLKLANGRVIEKTLYNRRTRQDEPALFVALTFERREVLDSSNIKPMNLIGVDRGENIPAVIALTDPEGCPLSWFKDSLGNPTHILRIGESYKEKQRTIFAKKEVEQRRAGGYSRKYASKAKNLADDMVRNTARDLLYYAVTQDAMLIFENLSRGFGRQGKRTFMAERQYTRMEDWLTAKLAYEGLPSKTYLSKTLAQYTSKTCSNCGFTITSADYDRVLEKLKKTATGWMTTINGKELKVEGQITYYNRYKRQNVVKDLSVELDRLSEESVNNDISSWTKGRSGEALSLLKKRFSHRPVQEKFVCLNCGFETHADEQAALNIARSWLFLRSQEYKKYQTNKTTGNTDKRAFVETWQSFYRKKLKEVWKPAV

SEQ ID NO: 25777 - protein, 978 aa, synthetic construct
  REGION 1..978: note = engineered CasX variant
QEIKRINKIRRRLVKDSNTKKAGKTGPMKTLLVRVMTPDLRERLENLRKKPENIPQPISNTSRANLNKLLTDYTEMKKAILHVYWEEFQKDPVGLMSRVAQPASKKIDQNKLKPEMDEKGNLTTAGFACSQCGQPLFVYKLEQVSEKGKAYTNYFGRCNVAEHEKLILLAQLKPEKDSDEAVTYSLGKFGQRALDFYSIHVTKESTHPVKPLAQIAGNRYASGPVGKALSDACMGTIASFLSKYQDIIIEHQKVVKGNQKRLESLRELAGKENLEYPSVTLPPQPHTKEGVDAYNEVIARVRMWVNLNLWQKLKLSRDDAKPLLRLKGFPSFPLVERQANEVDWWDMVCNVKKLINEKKEDGKVFWQNLAGYKRQEALRPYLSSEEDRKKGKKFARYQLGDLLLHLEKKHGEDWGKVYDEAWERIDKKVEGLSKHIKLEEERRSEDAQSKAALTDWLRAKASFVIEGLKEADKDEFCRCELKLQKWYGDLRGKPFAIEAENSILDISGFSKQYNCAFIWQKDGVKKLNLYLIINYFKGGKLRFKKIKPEAFEANRFYTVINKKSGEIVPMEVNFNFDDPNLIILPLAFGKRQGREFIWNDLLSLETGSLKLANGRVIEKTLYNRRTRQDEPALFVALTFERREVLDSSNIKPMNLIGVDRGENIPAVIALTDPEGCPLSWFKDSLGNPTHILRIGESYKEKQQTIQAKKEVEQRRAGGYSRKYASKAKNLADDMVRNTARDLLYYAVTQDAMLIFENLSRGFGRQGKRTFMAERQYTRMEDWLTAKLAYEGLPSKTYLSKTLAQYTSKTCSNCGFTITSADYDRVLEKLKKTATGWMTTINGKELKVEGQITYYNRYKRQNVVKDLSVELDRLSEESVNNDISSWTKGRSGEALSLLKKRFSHRPVQEKFVCLNCGFETHADEQAALNIARSWLFLRSQEYKKYQTNKTTGNTDKRAFVETWQSFYRKKLKEVWKPAV

SEQ ID NO: 25778 - protein, 978 aa, synthetic construct
  REGION 1..978: note = engineered CasX variant
QEIKRINKIRRRLVKDSNTKKAGKTGPMKTLLVRVMTPDLRERLENLRKKPENIPQPISNTSRANLNKLLTDYTEMKKAILHVYWEEFQKDPVGLMSRVAQPASKKIDQNKLKPEMDEKGNLTTAGFACSQCGQPLFVYKLEQVSEKGKAYTNYFGRCNVAEHEKLILLAQLKPEKDSDEAVTYSLGKFGQRALDFYSIHVTKESTHPVKPLAQIAGNRYASGPVGKALSDACMGTIASFLSKYQDIIIEHQKVVKGNQKRLESLRELAGKENLEYPSVTLPPQPHTKEGVDAYNEVIARVRMWVNLNLWQKLKLSRDDAKPLLRLKGFPSFPLVERQANEVDWWDMVCNVKKLINEKKEDGKVFWQNLAGYKRQEALRPYLSSEEDRKKGKKFARYQLGDLLLHLEKKHGEDWGKVYDEAWERIDKKVEGLSKHIKLEEERRSEDAQSKAALTDWLRAKASFVIEGLKEADKDEFCRCELKLQKWYGDLRGKPFAIEAENSILDISGFSKQYNCAFIWQKDGVKKLNLYLIINYFKGGKLRFKKIKPEAFEANRFYTVINKKSGEIVPMEVNFNFDDPNLIILPLAFGKRQGREFIWNDLLSLETGSLKLANGRVIEKTLYNRRTRQDEPALFVALTFERREVLDSSNIKPMNLIGVDRGENIPAVIALTDPEGCPLSWFKDSLGNPTHILRIGESYKEKQKTIQAKKEVEQRRAGGYSRKYASKAKNLADDMVRNTARDLLYYAVTQDAMLIFENLSRGFGRQGKRTFMAERQYTRMEDWLTAKLAYEGLPSKTYLSKTLAQYTSKTCSNCGFTITSADYDRVLEKLKKTATGWMTTINGKELKVEGQITYYNRYKRQNVVKDLSVELDRLSEESVNNDISSWTKGRSGEALSLLKKRFSHRPVQEKFVCLNCGFETHADEQAALNIARSWLFLRSQEYKKYQTNKTTGNTDKRAFVETWQSFYRKKLKEVWKPAV

SEQ ID NO: 25779 - protein, 978 aa, synthetic construct
  REGION 1..978: note = engineered CasX variant
QEIKRINKIRRRLVKDSNTKKAGKTGPMKTLLVRVMTPDLRERLENLRKKPENIPQPISNTSRANLNKLLTDYTEMKKAILHVYWEEFQKDPVGLMSRVAQPASKKIDQNKLKPEMDEKGNLTTAGFACSQCGQPLFVYKLEQVSEKGKAYTNYFGRCNVAEHEKLILLAQLKPEKDSDEAVTYSLGKFGQRALDFYSIHVTKESTHPVKPLAQIAGNRYASGPVGKALSDACMGTIASFLSKYQDIIIEHQKVVKGNQKRLESLRELAGKENLEYPSVTLPPQPHTKEGVDAYNEVIARVRMWVNLNLWQKLKLSRDDAKPLLRLKGFPSFPLVERQANEVDWWDMVCNVKKLINEKKEDGKVFWQNLAGYKRQEALRPYLSSEEDRKKGKKFARYQLGDLLLHLEKKHGEDWGKVYDEAWERIDKKVEGLSKHIKLEEERRSEDAQSKAALTDWLRAKASFVIEGLKEADKDEFCRCELKLQKWYGDLRGKPFAIEAENSILDISGFSKQYNCAFIWQKDGVKKLNLYLIINYFKGGKLRFKKIKPEAFEANRFYTVINKKSGEIVPMEVNFNFDDPNLIILPLAFGKRQGREFIWNDLLSLETGSLKLANGRVIEKTLYNRRTRQDEPALFVALTFERREVLDSSNIKPMNLIGVDRGENIPAVIALTDPEGCPLSWFKDSLGNPTHCLRIGESYKEKQRTIQAKKEVEQRRAGGYSRKYASKAKNLADDMVRNTARDLLYYAVTQDAMLIFENLSRGFGRQGKRTFMAERQYTRMEDWLTAKLAYEGLPSKTYLSKTLAQYTSKTCSNCGFTITSADYDRVLEKLKKTATGWMTTINGKELKVEGQITYYNRYKRQNVVKDLSVELDRLSEESVNNDISSWTKGRSGEALSLLKKRFSHRPVQEKFVCLNCGFETHADEQAALNIARSWLFLRSQEYKKYQTNKTTGNTDKRAFVETWQSFYRKKLKEVWKPAV

SEQ ID NO: 25780 - protein, 978 aa, synthetic construct
  REGION 1..978: note = engineered CasX variant
QEIKRINKIRRRLVKDSNTKKAGKTGPMKTLLVRVMTPDLRERLENLRKKPENIPQPISNTSRANLNKLLTDYTEMKKAILHVYWEEFQKDPVGLMSRVAQPASKKIDQNKLKPEMDEKGNLTTAGFACSQCGQPLFVYKLEQVSEKGKAYTNYFGRCNVAEHEKLILLAQLKPEKDSDEAVTYSLGKFGQRALDFYSIHVTKESTHPVKPLAQIAGNRYASGPVGKALSDACMGTIASFLSKYQDIIIEHQKVVKGNQKRLESLRELAGKENLEYPSVTLPPQPHTKEGVDAYNEVIARVRMWVNLNLWQKLKLSRDDAKPLLRLKGFPSFPLVERQANEVDWWDMVCNVKKLINEKKEDGKVFWQNLAGYKRQEALRPYLSSEEDRKKGKKFARYQLGDLLLHLEKKHGEDWGKVYDEAWERIDKKVEGLSKHIKLEEERRSEDAQSKAALTDWLRAKASFVIEGLKEADKDEFCRCELKLQKWYGDLRGKPFAIEAENSILDISGFSKQYNCAFIWQKDGVKKLNLYLIINYFKGGKLRFKKIKPEAFEANRFYTVINKKSGEIVPMEVNFNFDDPNLIILPLAFGKRQGREFIWNDLLSLETGSLKLANGRVIEKTLYNRRTRQDEPALFVALTFERREVLDSSNIKPMNLIGVDRGENIPAVIALTDPEGCPLSWFKDSGGNPTHILRIGESYKEKQRTIQAKKEVEQRRAGGYSRKYASKAKNLADDMVRNTARDLLYYAVTQDAMLIFENLSRGFGRQGKRTFMAERQYTRMEDWLTAKLAYEGLPSKTYLSKTLAQYTSKTCSNCGFTITSADYDRVLEKLKKTATGWMTTINGKELKVEGQITYYNRYKRQNVVKDLSVELDRLSEESVNNDISSWTKGRSGEALSLLKKRFSHRPVQEKFVCLNCGFETHADEQAALNIARSWLFLRSQEYKKYQTNKTTGNTDKRAFVETWQSFYRKKLKEVWKPAV

SEQ ID NO: 25781 - protein, 978 aa, synthetic construct
  REGION 1..978: note = engineered CasX variant
QEIKRINKIRRRLVKDSNTKKAGKTGPMKTLLVRVMTPDLRERLENLRKKPENIPQPISNTSRANLNKLLTDYTEMKKAILHVYWEEFQKDPVGLMSRVAQPASKKIDQNKLKPEMDEKGNLTTAGFACSQCGQPLFVYKLEQVSEKGKAYTNYFGRCNVAEHEKLILLAQLKPEKDSDEAVTYSLGKFGQRALDFYSIHVTKESTHPVKPLAQIAGNRYASGPVGKALSDACMGTIASFLSKYQDIIIEHQKVVKGNQKRLESLRELAGKENLEYPSVTLPPQPHTKEGVDAYNEVIARVRMWVNLNLWQKLKLSRDDAKPLLRLKGFPSFPLVERQANEVDWWDMVCNVKKLINEKKEDGKVFWQNLAGYKRQEALRPYLSSEEDRKKGKKFARYQLGDLLLHLEKKHGEDWGKVYDEAWERIDKKVEGLSKHIKLEEERRSEDAQSKAALTDWLRAKASFVIEGLKEADKDEFCRCELKLQKWYGDLRGKPFAIEAENSILDISGFSKQYNCAFIWQKDGVKKLNLYLIINYFKGGKLRFKKIKPEAFEANRFYTVINKKSGEIVPMEVNFNFDDPNLIILPLAFGKRQGREFIWNDLLSLETGSLKLANGRVIEKTLYNRRTRQDEPALFVALTFERREVLDSSNIKPMNLIGVDRGENIPAVIALTDPEGCPLSWFKDSEGNPTHILRIGESYKEKQRTIQAKKEVEQRRAGGYSRKYASKAKNLADDMVRNTARDLLYYAVTQDAMLIFENLSRGFGRQGKRTFMAERQYTRMEDWLTAKLAYEGLPSKTYLSKTLAQYTSKTCSNCGFTITSADYDRVLEKLKKTATGWMTTINGKELKVEGQITYYNRYKRQNVVKDLSVELDRLSEESVNNDISSWTKGRSGEALSLLKKRFSHRPVQEKFVCLNCGFETHADEQAALNIARSWLFLRSQEYKKYQTNKTTGNTDKRAFVETWQSFYRKKLKEVWKPAV

SEQ ID NO: 25782 - protein, 978 aa, synthetic construct
  REGION 1..978: note = engineered CasX variant
QEIKRINKIRRRLVKDSNTKKAGKTGPMKTLLVRVMTPDLRERLENLRKKPENIPQPISNTSRANLNKLLTDYTEMKKAILHVYWEEFQKDPVGLMSRVAQPASKKIDQNKLKPEMDEKGNLTTAGFACSQCGQPLFVYKLEQVSEKGKAYTNYFGRCNVAEHEKLILLAQLKPEKDSDEAVTYSLGKFGQRALDFYSIHVTKESTHPVKPLAQIAGNRYASGPVGKALSDACMGTIASFLSKYQDIIIEHQKVVKGNQKRLESLRELAGKENLEYPSVTLPPQPHTKEGVDAYNEVIARVRMWVNLNLWQKLKLSRDDAKPLLRLKGFPSFPLVERQANEVDWWDMVCNVKKLINEKKEDGKVFWQNLAGYKRQEALRPYLSSEEDRKKGKKFARYQLGDLLLHLEKKHGEDWGKVYDEAWERIDKKVEGLSKHIKLEEERRSEDAQSKAALTDWLRAKASFVIEGLKEADKDEFCRCELKLQKWYGDLRGKPFAIEAENSILDISGFSKQYNCAFIWQKDGVKKLNLYLIINYFKGGKLRFKKIKPEAFEANRFYTVINKKSGEIVPMEVNFNFDDPNLIILPLAFGKRQGREFIWNDLLSLETGSLKLANGRVIEKTLYNRRTRQDEPALFVALTFERREVLDSSNIKPMNLIGVDRGENIPAVIALTDPEGCPLSVFKDSWGNPTHILRIGESYKEKQRTIQAKKEVEQRRAGGYSRKYASKAKNLADDMVRNTARDLLYYAVTQDAMLIFENLSRGFGRQGKRTFMAERQYTRMEDWLTAKLAYEGLPSKTYLSKTLAQYTSKTCSNCGFTITSADYDRVLEKLKKTATGWMTTINGKELKVEGQITYYNRYKRQNVVKDLSVELDRLSEESVNNDISSWTKGRSGEALSLLKKRFSHRPVQEKFVCLNCGFETHADEQAALNIARSWLFLRSQEYKKYQTNKTTGNTDKRAFVETWQSFYRKKLKEVWKPAV

SEQ ID NO: 25783 - protein, 978 aa, synthetic construct
  REGION 1..978: note = engineered CasX variant
QEIKRINKIRRRLVKDSNTKKAGKTGPMKTLLVRVMTPDLRERLENLRKKPENIPQPISNTSRANLNKLLTDYTEMKKAILHVYWEEFQKDPVGLMSRVAQPASKKIDQNKLKPEMDEKGNLTTAGFACSQCGQPLFVYKLEQVSEKGKAYTNYFGRCNVAEHEKLILLAQLKPEKDSDEAVTYSLGKFGQRALDFYSIHVTKESTHPVKPLAQIAGNRYASGPVGKALSDACMGTIASFLSKYQDIIIEHQKVVKGNQKRLESLRELAGKENLEYPSVTLPPQPHTKEGVDAYNEVIARVRMWVNLNLWQKLKLSRDDAKPLLRLKGFPSFPLVERQANEVDWWDMVCNVKKLINEKKEDGKVFWQNLAGYKRQEALRPYLSSEEDRKKGKKFARYQLGDLLLHLEKKHGEDWGKVYDEAWERIDKKVEGLSKHIKLEEERRSEDAQSKAALTDWLRAKASFVIEGLKEADKDEFCRCELKLQKWYGDLRGKPFAIEAENSILDISGFSKQYNCAFIWQKDGVKKLNLYLIINYFKGGKLRFKKIKPEAFEANRFYTVINKKSGEIVPMEVNFNFDDPNLIILPLAFGKRQGREFIWNDLLSLETGSLKLANGRVIEKTLYNRRTRQDEPALFVALTFERREVLDSSNIKPMNLIGVDRGENIPAVIALTDPEGCPLSVFKDSLGNPTHILRIGESYKEKQRTIQASKEVEQRRAGGYSRKYASKAKNLADDMVRNTARDLLYYAVTQDAMLIFENLSRGFGRQGKRTFMAERQYTRMEDWLTAKLAYEGLPSKTYLSKTLAQYTSKTCSNCGFTITSADYDRVLEKLKKTATGWMTTINGKELKVEGQITYYNRYKRQNVVKDLSVELDRLSEESVNNDISSWTKGRSGEALSLLKKRFSHRPVQEKFVCLNCGFETHADEQAALNIARSWLFLRSQEYKKYQTNKTTGNTDKRAFVETWQSFYRKKLKEVWKPAV

SEQ ID NO: 25784 - protein, 978 aa, synthetic construct
  REGION 1..978: note = engineered CasX variant
QEIKRINKIRRRLVKDSNTKKAGKTGPMKTLLVRVMTPDLRERLENLRKKPENIPQPISNTSRANLNKLLTDYTEMKKAILHVYWEEFQKDPVGLMSRVAQPASKKIDQNKLKPEMDEKGNLTTAGFACSQCGQPLFVYKLEQVSEKGKAYTNYFGRCNVAEHEKLILLAQLKPEKDSDEAVTYSLGKFGQRALDFYSIHVTKESTHPVKPLAQIAGNRYASGPVGKALSDACMGTIASFLSKYQDIIIEHQKVVKGNQKRLESLRELAGKENLEYPSVTLPPQPHTKEGVDAYNEVIARVRMWVNLNLWQKLKLSRDDAKPLLRLKGFPSFPLVERQANEVDWWDMVCNVKKLINEKKEDGKVFWQNLAGYKRQEALRPYLSSEEDRKKGKKFARYQLGDLLLHLEKKHGEDWGKVYDEAWERIDKKVEGLSKHIKLEEERRSEDAQSKAALTDWLRAKASFVIEGLKEADKDEFCRCELKLQKWYGDLRGKPFAIEAENSILDISGFSKQYNCAFIWQKDGVKKLNLYLIINYFKGGKLRFKKIKPEAFEANRFYTVINKKSGEIVPMEVNFNFDDPNLIILPLAFGKRQGREFIWNDLLSLETGSLKLANGRVIEKTLYNRRTRQDEPALFVALTFERREVLDSSNIKPMNLIGVDRGENIPAVIALTDPEGCPLSVFKDSLGNPTHILRIGESYKEKQRTIQAKKEVEQRRAGGYSRKYASKAKNLADDMVRNTARDLLYYAVTQDAMLIFENLSRGFGRQGKRTFMAERQYTRMEDWLTAKLAYEGLPSKTYLSKTLAQYTSKTCSNCGFTITSADYDRVLEKLKKTATGWMTTINGKELKVEGQITYYNRYKRQNVVKDLSVELDRLSEESVNNDISSWTKGRSGEALSLLKKRFSHRPVQEKFVCLNCGFETHADEQAALNIARSWLFLRSQEYKKYQTNKTTGNTDKRAFVETWQSFYRKKLKEVWKPAV

SEQ ID NO: 25785 - protein, 978 aa, synthetic construct
  REGION 1..978: note = engineered CasX variant
QEIKRINKIRRRLVKDSNTKKAGKTGPMKTLLVRVMTPDLRERLENLRKKPENIPQPISNTSRANLNKLLTDYTEMKKAILHVYWEEFQKDPVGLMSRVAQPASKKIDQNKLKPEMDEKGNLTTAGFACSQCGQPLFVYKLEQVSEKGKAYTNYFGRCNVAEHEKLILLAQLKPEKDSDEAVTYSLGKFGQRALDFYSIHVTKESTHPVKPLAQIAGNRYASGPVGKALSDACMGTIASFLSKYQDIIIEHQKVVKGNQKRLESLRELAGKENLEYPSVTLPPQPHTKEGVDAYNEVIARVRMWVNLNLWQKLKLSRDDAKPLLRLKGFPSFPLVERQANEVDWWDMVCNVKKLINEKKEDGKVFWQNLAGYKRQEALRPYLSSEEDRKKGKKFARYQLGDLLLHLEKKHGEDWGKVYDEAWERIDKKVEGLSKHIKLEEERRSEDAQSKAALTDWLRAKASFVIEGLKEADKDEFCRCELKLQKWYGDLRGKPFAIEAENSILDISGFSKQYNCAFIWQKDGVKKLNLYLIINYFKGGKLRFKKIKPEAFEANRFYTVINKKSGEIVPMEVNFNFDDPNLIILPLAFGKRQGREFIWNDLLSLETGSLKLANGRVIEKTLYNRRTRQDEPALFVALTFERREVLDSSNIKPMNLIGVDRGENIPAVIALTDPEGCPLSVFKDSLGNPTHILRIGESYKEKQRQIQAKKEVEQRRAGGYSRKYASKAKNLADDMVRNTARDLLYYAVTQDAMLIFENLSRGFGRQGKRTFMAERQYTRMEDWLTAKLAYEGLPSKTYLSKTLAQYTSKTCSNCGFTITSADYDRVLEKLKKTATGWMTTINGKELKVEGQITYYNRYKRQNVVKDLSVELDRLSEESVNNDISSWTKGRSGEALSLLKKRFSHRPVQEKFVCLNCGFETHADEQAALNIARSWLFLRSQEYKKYQTNKTTGNTDKRAFVETWQSFYRKKLKEVWKPAV

SEQ ID NO: 25786 - protein, 978 aa, synthetic construct
  REGION 1..978: note = engineered CasX variant
QEIKRINKIRRRLVKDSNTKKAGKTGPMKTLLVRVMTPDLRERLENLRKKPENIPQPISNTSRANLNKLLTDYTEMKKAILHVYWEEFQKDPVGLMSRVAQPASKKIDQNKLKPEMDEKGNLTTAGFACSQCGQPLFVYKLEQVSEKGKAYTNYFGRCNVAEHEKLILLAQLKPEKDSDEAVTYSLGKFGQRALDFYSIHVTKESTHPVKPLAQIAGNRYASGPVGKALSDACMGTIASFLSKYQDIIIEHQKVVKGNQKRLESLRELAGKENLEYPSVTLPPQPHTKEGVDAYNEVIARVRMWVNLNLWQKLKLSRDDAKPLLRLKGFPSFPLVERQANEVDWWDMVCNVKKLINEKKEDGKVFWQNLAGYKRQEALRPYLSSEEDRKKGKKFARYQLGDLLLHLEKKHGEDWGKVYDEAWERIDKKVEGLSKHIKLEEERRSEDAQSKAALTDWLRAKASFVIEGLKEADKDEFCRCELKLQKWYGDLRGKPFAIEAENSILDISGFSKQYNCAFIWQKDGVKKLNLYLIINYFKGGKLRFKKIKPEAFEANRFYTVINKKSGEIVPMEVNFNFDDPNLIILPLAFGKRQGREFIWNDLLSLETGSLKLANGRVIEKTLYNRRTRQDEPALFVALTFERREVLDSSNIKPMNLIGVDRGENIPAVIALTDPEGCPLSVFKDSHGNPTHILRIGESYKEKQRTIQAKKEVEQRRAGGYSRKYASKAKNLADDMVRNTARDLLYYAVTQDAMLIFENLSRGFGRQGKRTFMAERQYTRMEDWLTAKLAYEGLPSKTYLSKTLAQYTSKTCSNCGFTITSADYDRVLEKLKKTATGWMTTINGKELKVEGQITYYNRYKRQNVVKDLSVELDRLSEESVNNDISSWTKGRSGEALSLLKKRFSHRPVQEKFVCLNCGFETHADEQAALNIARSWLFLRSQEYKKYQTNKTTGNTDKRAFVETWQSFYRKKLKEVWKPAV

SEQ ID NO: 25787 - protein, 978 aa, synthetic construct
  REGION 1..978: note = engineered CasX variant
QEIKRINKIRRRLVKDSNTKKAGKTGPMKTLLVRVMTPDLRERLENLRKKPENIPQPISNTSRANLNKLLTDYTEMKKAILHVYWEEFQKDPVGLMSRVAQPASKKIDQNKLKPEMDEKGNLTTAGFACSQCGQPLFVYKLEQVSEKGKAYTNYFGRCNVAEHEKLILLAQLKPEKDSDEAVTYSLGKFGQRALDFYSIHVTKESTHPVKPLAQIAGNRYASGPVGKALSDACMGTIASFLSKYQDIIIEHQKVVKGNQKRLESLRELAGKENLEYPSVTLPPQPHTKEGVDAYNEVIARVRMWVNLNLWQKLKLSRDDAKPLLRLKGFPSFPLVERQANEVDWWDMVCNVKKLINEKKEDGKVFWQNLAGYKRQEALRPYLSSEEDRKKGKKFARYQLGDLLLHLEKKHGEDWGKVYDEAWERIDKKVEGLSKHIKLEEERRSEDAQSKAALTDWLRAKASFVIEGLKEADKDEFCRCELKLQKWYGDLRGKPFAIEAENSILDISGFSKQYNCAFIWQKDGVKKLNLYLIINYFKGGKLRFKKIKPEAFEANRFYTVINKKSGEIVPMEVNFNFDDPNLIILPLAFGKRQGREFIWNDLLSLETGSLKLANGRVIEKTLYNRRTRQDEPALFVALTFERREVLDSSNIKPMNLIGVDRGENIPAVIALTDPEGCPLSTFYDSLGNPTHILRIGESYKEKQRTIQAKKEVEQRRAGGYSRKYASKAKNLADDMVRNTARDLLYYAVTQDAMLIFENLSRGFGRQGKRTFMAERQYTRMEDWLTAKLAYEGLPSKTYLSKTLAQYTSKTCSNCGFTITSADYDRVLEKLKKTATGWMTTINGKELKVEGQITYYNRYKRQNVVKDLSVELDRLSEESVNNDISSWTKGRSGEALSLLKKRFSHRPVQEKFVCLNCGFETHADEQAALNIARSWLFLRSQEYKKYQTNKTTGNTDKRAFVETWQSFYRKKLKEVWKPAV

SEQ ID NO: 25788 - protein, 978 aa, synthetic construct
  REGION 1..978: note = engineered CasX variant
QEIKRINKIRRRLVKDSNTKKAGKTGPMKTLLVRVMTPDLRERLENLRKKPENIPQPISNTSRANLNKLLTDYTEMKKAILHVYWEEFQKDPVGLMSRVAQPASKKIDQNKLKPEMDEKGNLTTAGFACSQCGQPLFVYKLEQVSEKGKAYTNYFGRCNVAEHEKLILLAQLKPEKDSDEAVTYSLGKFGQRALDFYSIHVTKESTHPVKPLAQIAGNRYASGPVGKALSDACMGTIASFLSKYQDIIIEHQKVVKGNQKRLESLRELAGKENLEYPSVTLPPQPHTKEGVDAYNEVIARVRMWVNLNLWQKLKLSRDDAKPLLRLKGFPSFPLVERQANEVDWWDMVCNVKKLINEKKEDGKVFWQNLAGYKRQEALRPYLSSEEDRKKGKKFARYQLGDLLLHLEKKHGEDWGKVYDEAWERIDKKVEGLSKHIKLEEERRSEDAQSKAALTDWLRAKASFVIEGLKEADKDEFCRCELKLQKWYGDLRGKPFAIEAENSILDISGFSKQYNCAFIWQKDGVKKLNLYLIINYFKGGKLRFKKIKPEAFEANRFYTVINKKSGEIVPMEVNFNFDDPNLIILPLAFGKRQGREFIWNDLLSLETGSLKLANGRVIEKTLYNRRTRQDEPALFVALTFERREVLDSSNIKPMNLIGVDRGENIPAVIALTDPEGCPLSTFKDSLGNPTHILRIGESYKNKQRTIQAKKEVEQRRAGGYSRKYASKAKNLADDMVRNTARDLLYYAVTQDAMLIFENLSRGFGRQGKRTFMAERQYTRMEDWLTAKLAYEGLPSKTYLSKTLAQYTSKTCSNCGFTITSADYDRVLEKLKKTATGWMTTINGKELKVEGQITYYNRYKRQNVVKDLSVELDRLSEESVNNDISSWTKGRSGEALSLLKKRFSHRPVQEKFVCLNCGFETHADEQAALNIARSWLFLRSQEYKKYQTNKTTGNTDKRAFVETWQSFYRKKLKEVWKPAV

SEQ ID NO: 25789 - protein, 978 aa, synthetic construct
  REGION 1..978: note = engineered CasX variant
QEIKRINKIRRRLVKDSNTKKAGKTGPMKTLLVRVMTPDLRERLENLRKKPENIPQPISNTSRANLNKLLTDYTEMKKAILHVYWEEFQKDPVGLMSRVAQPASKKIDQNKLKPEMDEKGNLTTAGFACSQCGQPLFVYKLEQVSEKGKAYTNYFGRCNVAEHEKLILLAQLKPEKDSDEAVTYSLGKFGQRALDFYSIHVTKESTHPVKPLAQIAGNRYASGPVGKALSDACMGTIASFLSKYQDIIIEHQKVVKGNQKRLESLRELAGKENLEYPSVTLPPQPHTKEGVDAYNEVIARVRMWVNLNLWQKLKLSRDDAKPLLRLKGFPSFPLVERQANEVDWWDMVCNVKKLINEKKEDGKVFWQNLAGYKRQEALRPYLSSEEDRKKGKKFARYQLGDLLLHLEKKHGEDWGKVYDEAWERIDKKVEGLSKHIKLEEERRSEDAQSKAALTDWLRAKASFVIEGLKEADKDEFCRCELKLQKWYGDLRGKPFAIEAENSILDISGFSKQYNCAFIWQKDGVKKLNLYLIINYFKGGKLRFKKIKPEAFEANRFYTVINKKSGEIVPMEVNFNFDDPNLIILPLAFGKRQGREFIWNDLLSLETGSLKLANGRVIEKTLYNRRTRQDEPALFVALTFERREVLDSSNIKPMNLIGVDRGENIPAVIALTDPEGCPLSTFKDSLGNPTHILRIGESYKEKQRTIQAKKEVEQRRAGGYSRKYASKAKNLADDMVRNTARDLLYYAVTQDAMLIFENLSRGFGRQGKRTFMAERQYTRMEDWLTAKLAYEGLPSKTYLSKTLAQYTSKTCSNCGFTITSADYDRVLEKLKKTATGWMTTINGKELKVEGQITYYNRYKRQNVVKDLSVELDRLSEESVNNDISSWTKGRSGEALSLLKKRFSHRPVQEKFVCLNCGFETHADEQAALNIARSWLFLRSQEYKKYQTNKTTGNTDKRAFVETWQSFYRKKLKEVWKPAV

SEQ ID NO: 25790 - protein, 978 aa, synthetic construct
  REGION 1..978: note = engineered CasX variant
QEIKRINKIRRRLVKDSNTKKAGKTGPMKTLLVRVMTPDLRERLENLRKKPENIPQPISNTSRANLNKLLTDYTEMKKAILHVYWEEFQKDPVGLMSRVAQPASKKIDQNKLKPEMDEKGNLTTAGFACSQCGQPLFVYKLEQVSEKGKAYTNYFGRCNVAEHEKLILLAQLKPEKDSDEAVTYSLGKFGQRALDFYSIHVTKESTHPVKPLAQIAGNRYASGPVGKALSDACMGTIASFLSKYQDIIIEHQKVVKGNQKRLESLRELAGKENLEYPSVTLPPQPHTKEGVDAYNEVIARVRMWVNLNLWQKLKLSRDDAKPLLRLKGFPSFPLVERQANEVDWWDMVCNVKKLINEKKEDGKVFWQNLAGYKRQEALRPYLSSEEDRKKGKKFARYQLGDLLLHLEKKHGEDWGKVYDEAWERIDKKVEGLSKHIKLEEERRSEDAQSKAALTDWLRAKASFVIEGLKEADKDEFCRCELKLQKWYGDLRGKPFAIEAENSILDISGFSKQYNCAFIWQKDGVKKLNLYLIINYFKGGKLRFKKIKPEAFEANRFYTVINKKSGEIVPMEVNFNFDDPNLIILPLAFGKRQGREFIWNDLLSLETGSLKLANGRVIEKTLYNRRTRQDEPALFVALTFERREVLDSSNIKPMNLIGVDRGENIPAVIALTDPEGCPLSSFKDSLGNPTHILRIGESYKTKQRTIQAKKEVSQRRAGGYSRKYASKAKNLADDMVRNTARDLLYYAVTQDAMLIFENLSRGFGRQGKRTFMAERQYTRMEDWLTAKLAYEGLPSKTYLSKTLAQYTSKTCSNCGFTITSADYDRVLEKLKKTATGWMTTINGKELKVEGQITYYNRYKRQNVVKDLSVELDRLSEESVNNDISSWTKGRSGEALSLLKKRFSHRPVQEKFVCLNCGFETHADEQAALNIARSWLFLRSQEYKKYQTNKTTGNTDKRAFVETWQSFYRKKLKEVWKPAV

SEQ ID NO: 25791 - protein, 978 aa, synthetic construct
  REGION 1..978: note = engineered CasX variant
QEIKRINKIRRRLVKDSNTKKAGKTGPMKTLLVRVMTPDLRERLENLRKKPENIPQPISNTSRANLNKLLTDYTEMKKAILHVYWEEFQKDPVGLMSRVAQPASKKIDQNKLKPEMDEKGNLTTAGFACSQCGQPLFVYKLEQVSEKGKAYTNYFGRCNVAEHEKLILLAQLKPEKDSDEAVTYSLGKFGQRALDFYSIHVTKESTHPVKPLAQIAGNRYASGPVGKALSDACMGTIASFLSKYQDIIIEHQKVVKGNQKRLESLRELAGKENLEYPSVTLPPQPHTKEGVDAYNEVIARVRMWVNLNLWQKLKLSRDDAKPLLRLKGFPSFPLVERQANEVDWWDMVCNVKKLINEKKEDGKVFWQNLAGYKRQEALRPYLSSEEDRKKGKKFARYQLGDLLLHLEKKHGEDWGKVYDEAWERIDKKVEGLSKHIKLEEERRSEDAQSKAALTDWLRAKASFVIEGLKEADKDEFCRCELKLQKWYGDLRGKPFAIEAENSILDISGFSKQYNCAFIWQKDGVKKLNLYLIINYFKGGKLRFKKIKPEAFEANRFYTVINKKSGEIVPMEVNFNFDDPNLIILPLAFGKRQGREFIWNDLLSLETGSLKLANGRVIEKTLYNRRTRQDEPALFVALTFERREVLDSSNIKPMNLIGVDRGENIPAVIALTDPEGCPLSSFKDSLGNPTHILRIGESYKTKQRTIQAKKEVEQRRAGGYSRKYASKAKNLADDMVRNTARDLLYYAVTQDAMLIFENLSRGFGRQGKRTFMAERQYTRMEDWLTAKLAYEGLPSKTYLSKTLAQYTSKTCSNCGFTITSADYDRVLEKLKKTATGWMTTINGKELKVEGQITYYNRYKRQNVVKDLSVELDRLSEESVNNDISSWTKGRSGEALSLLKKRFSHRPVQEKFVCLNCGFETHADEQAALNIARSWLFLRSQEYKKYQTNKTTGNTDKRAFVETWQSFYRKKLKEVWKPAV

SEQ ID NO: 25792 - protein, 978 aa, synthetic construct
  REGION 1..978: note = engineered CasX variant
QEIKRINKIRRRLVKDSNTKKAGKTGPMKTLLVRVMTPDLRERLENLRKKPENIPQPISNTSRANLNKLLTDYTEMKKAILHVYWEEFQKDPVGLMSRVAQPASKKIDQNKLKPEMDEKGNLTTAGFACSQCGQPLFVYKLEQVSEKGKAYTNYFGRCNVAEHEKLILLAQLKPEKDSDEAVTYSLGKFGQRALDFYSIHVTKESTHPVKPLAQIAGNRYASGPVGKALSDACMGTIASFLSKYQDIIIEHQKVVKGNQKRLESLRELAGKENLEYPSVTLPPQPHTKEGVDAYNEVIARVRMWVNLNLWQKLKLSRDDAKPLLRLKGFPSFPLVERQANEVDWWDMVCNVKKLINEKKEDGKVFWQNLAGYKRQEALRPYLSSEEDRKKGKKFARYQLGDLLLHLEKKHGEDWGKVYDEAWERIDKKVEGLSKHIKLEEERRSEDAQSKAALTDWLRAKASFVIEGLKEADKDEFCRCELKLQKWYGDLRGKPFAIEAENSILDISGFSKQYNCAFIWQKDGVKKLNLYLIINYFKGGKLRFKKIKPEAFEANRFYTVINKKSGEIVPMEVNFNFDDPNLIILPLAFGKRQGREFIWNDLLSLETGSLKLANGRVIEKTLYNRRTRQDEPALFVALTFERREVLDSSNIKPMNLIGVDRGENIPAVIALTDPEGCPLSSFKDSLGNPTHILRIGESYKEKQRTYQAKKEVEQRRAGGYSRKYASKAKNLADDMVRNTARDLLYYAVTQDAMLIFENLSRGFGRQGKRTFMAERQYTRMEDWLTAKLAYEGLPSKTYLSKTLAQYTSKTCSNCGFTITSADYDRVLEKLKKTATGWMTTINGKELKVEGQITYYNRYKRQNVVKDLSVELDRLSEESVNNDISSWTKGRSGEALSLLKKRFSHRPVQEKFVCLNCGFETHADEQAALNIARSWLFLRSQEYKKYQTNKTTGNTDKRAFVETWQSFYRKKLKEVWKPAV

SEQ ID NO: 25793 - protein, 978 aa, synthetic construct
  REGION 1..978: note = engineered CasX variant
QEIKRINKIRRRLVKDSNTKKAGKTGPMKTLLVRVMTPDLRERLENLRKKPENIPQPISNTSRANLNKLLTDYTEMKKAILHVYWEEFQKDPVGLMSRVAQPASKKIDQNKLKPEMDEKGNLTTAGFACSQCGQPLFVYKLEQVSEKGKAYTNYFGRCNVAEHEKLILLAQLKPEKDSDEAVTYSLGKFGQRALDFYSIHVTKESTHPVKPLAQIAGNRYASGPVGKALSDACMGTIASFLSKYQDIIIEHQKVVKGNQKRLESLRELAGKENLEYPSVTLPPQPHTKEGVDAYNEVIARVRMWVNLNLWQKLKLSRDDAKPLLRLKGFPSFPLVERQANEVDWWDMVCNVKKLINEKKEDGKVFWQNLAGYKRQEALRPYLSSEEDRKKGKKFARYQLGDLLLHLEKKHGEDWGKVYDEAWERIDKKVEGLSKHIKLEEERRSEDAQSKAALTDWLRAKASFVIEGLKEADKDEFCRCELKLQKWYGDLRGKPFAIEAENSILDISGFSKQYNCAFIWQKDGVKKLNLYLIINYFKGGKLRFKKIKPEAFEANRFYTVINKKSGEIVPMEVNFNFDDPNLIILPLAFGKRQGREFIWNDLLSLETGSLKLANGRVIEKTLYNRRTRQDEPALFVALTFERREVLDSSNIKPMNLIGVDRGENIPAVIALTDPEGCPLSSFKDSLGNPTHILRIGESYKEKQRTIQQKKEVEQRRAGGYSRKYASKAKNLADDMVRNTARDLLYYAVTQDAMLIFENLSRGFGRQGKRTFMAERQYTRMEDWLTAKLAYEGLPSKTYLSKTLAQYTSKTCSNCGFTITSADYDRVLEKLKKTATGWMTTINGKELKVEGQITYYNRYKRQNVVKDLSVELDRLSEESVNNDISSWTKGRSGEALSLLKKRFSHRPVQEKFVCLNCGFETHADEQAALNIARSWLFLRSQEYKKYQTNKTTGNTDKRAFVETWQSFYRKKLKEVWKPAV

SEQ ID NO: 25794 - protein, 978 aa, synthetic construct
  REGION 1..978: note = engineered CasX variant
QEIKRINKIRRRLVKDSNTKKAGKTGPMKTLLVRVMTPDLRERLENLRKKPENIPQPISNTSRANLNKLLTDYTEMKKAILHVYWEEFQKDPVGLMSRVAQPASKKIDQNKLKPEMDEKGNLTTAGFACSQCGQPLFVYKLEQVSEKGKAYTNYFGRCNVAEHEKLILLAQLKPEKDSDEAVTYSLGKFGQRALDFYSIHVTKESTHPVKPLAQIAGNRYASGPVGKALSDACMGTIASFLSKYQDIIIEHQKVVKGNQKRLESLRELAGKENLEYPSVTLPPQPHTKEGVDAYNEVIARVRMWVNLNLWQKLKLSRDDAKPLLRLKGFPSFPLVERQANEVDWWDMVCNVKKLINEKKEDGKVFWQNLAGYKRQEALRPYLSSEEDRKKGKKFARYQLGDLLLHLEKKHGEDWGKVYDEAWERIDKKVEGLSKHIKLEEERRSEDAQSKAALTDWLRAKASFVIEGLKEADKDEFCRCELKLQKWYGDLRGKPFAIEAENSILDISGFSKQYNCAFIWQKDGVKKLNLYLIINYFKGGKLRFKKIKPEAFEANRFYTVINKKSGEIVPMEVNFNFDDPNLIILPLAFGKRQGREFIWNDLLSLETGSLKLANGRVIEKTLYNRRTRQDEPALFVALTFERREVLDSSNIKPMNLIGVDRGENIPAVIALTDPEGCPLSSFKDSLGNPTHILRIGESYKEKQRTIQASKEVEQRRAGGYSRKYASKAKNLADDMVRNTARDLLYYAVTQDAMLIFENLSRGFGRQGKRTFMAERQYTRMEDWLTAKLAYEGLPSKTYLSKTLAQYTSKTCSNCGFTITSADYDRVLEKLKKTATGWMTTINGKELKVEGQITYYNRYKRQNVVKDLSVELDRLSEESVNNDISSWTKGRSGEALSLLKKRFSHRPVQEKFVCLNCGFETHADEQAALNIARSWLFLRSQEYKKYQTNKTTGNTDKRAFVETWQSFYRKKLKEVWKPAV

SEQ ID NO: 25795 - protein, 978 aa, synthetic construct
  REGION 1..978: note = engineered CasX variant
QEIKRINKIRRRLVKDSNTKKAGKTGPMKTLLVRVMTPDLRERLENLRKKPENIPQPISNTSRANLNKLLTDYTEMKKAILHVYWEEFQKDPVGLMSRVAQPASKKIDQNKLKPEMDEKGNLTTAGFACSQCGQPLFVYKLEQVSEKGKAYTNYFGRCNVAEHEKLILLAQLKPEKDSDEAVTYSLGKFGQRALDFYSIHVTKESTHPVKPLAQIAGNRYASGPVGKALSDACMGTIASFLSKYQDIIIEHQKVVKGNQKRLESLRELAGKENLEYPSVTLPPQPHTKEGVDAYNEVIARVRMWVNLNLWQKLKLSRDDAKPLLRLKGFPSFPLVERQANEVDWWDMVCNVKKLINEKKEDGKVFWQNLAGYKRQEALRPYLSSEEDRKKGKKFARYQLGDLLLHLEKKHGEDWGKVYDEAWERIDKKVEGLSKHIKLEEERRSEDAQSKAALTDWLRAKASFVIEGLKEADKDEFCRCELKLQKWYGDLRGKPFAIEAENSILDISGFSKQYNCAFIWQKDGVKKLNLYLIINYFKGGKLRFKKIKPEAFEANRFYTVINKKSGEIVPMEVNFNFDDPNLIILPLAFGKRQGREFIWNDLLSLETGSLKLANGRVIEKTLYNRRTRQDEPALFVALTFERREVLDSSNIKPMNLIGVDRGENIPAVIALTDPEGCPLSSFKDSLGNPTHILRIGESYKEKQRTIQAKKEVSQRRAGGYSRKYASKAKNLADDMVRNTARDLLYYAVTQDAMLIFENLSRGFGRQGKRTFMAERQYTRMEDWLTAKLAYEGLPSKTYLSKTLAQYTSKTCSNCGFTITSADYDRVLEKLKKTATGWMTTINGKELKVEGQITYYNRYKRQNVVKDLSVELDRLSEESVNNDISSWTKGRSGEALSLLKKRFSHRPVQEKFVCLNCGFETHADEQAALNIARSWLFLRSQEYKKYQTNKTTGNTDKRAFVETWQSFYRKKLKEVWKPAV

SEQ ID NO: 25796 - protein, 978 aa, synthetic construct
  REGION 1..978: note = engineered CasX variant
QEIKRINKIRRRLVKDSNTKKAGKTGPMKTLLVRVMTPDLRERLENLRKKPENIPQPISNTSRANLNKLLTDYTEMKKAILHVYWEEFQKDPVGLMSRVAQPASKKIDQNKLKPEMDEKGNLTTAGFACSQCGQPLFVYKLEQVSEKGKAYTNYFGRCNVAEHEKLILLAQLKPEKDSDEAVTYSLGKFGQRALDFYSIHVTKESTHPVKPLAQIAGNRYASGPVGKALSDACMGTIASFLSKYQDIIIEHQKVVKGNQKRLESLRELAGKENLEYPSVTLPPQPHTKEGVDAYNEVIARVRMWVNLNLWQKLKLSRDDAKPLLRLKGFPSFPLVERQANEVDWWDMVCNVKKLINEKKEDGKVFWQNLAGYKRQEALRPYLSSEEDRKKGKKFARYQLGDLLLHLEKKHGEDWGKVYDEAWERIDKKVEGLSKHIKLEEERRSEDAQSKAALTDWLRAKASFVIEGLKEADKDEFCRCELKLQKWYGDLRGKPFAIEAENSILDISGFSKQYNCAFIWQKDGVKKLNLYLIINYFKGGKLRFKKIKPEAFEANRFYTVINKKSGEIVPMEVNFNFDDPNLIILPLAFGKRQGREFIWNDLLSLETGSLKLANGRVIEKTLYNRRTRQDEPALFVALTFERREVLDSSNIKPMNLIGVDRGENIPAVIALTDPEGCPLSSFKDSLGNPTHILRIGESYKEKQRTIQAKKEVGQRRAGGYSRKYASKAKNLADDMVRNTARDLLYYAVTQDAMLIFENLSRGFGRQGKRTFMAERQYTRMEDWLTAKLAYEGLPSKTYLSKTLAQYTSKTCSNCGFTITSADYDRVLEKLKKTATGWMTTINGKELKVEGQITYYNRYKRQNVVKDLSVELDRLSEESVNNDISSWTKGRSGEALSLLKKRFSHRPVQEKFVCLNCGFETHADEQAALNIARSWLFLRSQEYKKYQTNKTTGNTDKRAFVETWQSFYRKKLKEVWKPAV

SEQ ID NO: 25797 - protein, 978 aa, synthetic construct
  REGION 1..978: note = engineered CasX variant
QEIKRINKIRRRLVKDSNTKKAGKTGPMKTLLVRVMTPDLRERLENLRKKPENIPQPISNTSRANLNKLLTDYTEMKKAILHVYWEEFQKDPVGLMSRVAQPASKKIDQNKLKPEMDEKGNLTTAGFACSQCGQPLFVYKLEQVSEKGKAYTNYFGRCNVAEHEKLILLAQLKPEKDSDEAVTYSLGKFGQRALDFYSIHVTKESTHPVKPLAQIAGNRYASGPVGKALSDACMGTIASFLSKYQDIIIEHQKVVKGNQKRLESLRELAGKENLEYPSVTLPPQPHTKEGVDAYNEVIARVRMWVNLNLWQKLKLSRDDAKPLLRLKGFPSFPLVERQANEVDWWDMVCNVKKLINEKKEDGKVFWQNLAGYKRQEALRPYLSSEEDRKKGKKFARYQLGDLLLHLEKKHGEDWGKVYDEAWERIDKKVEGLSKHIKLEEERRSEDAQSKAALTDWLRAKASFVIEGLKEADKDEFCRCELKLQKWYGDLRGKPFAIEAENSILDISGFSKQYNCAFIWQKDGVKKLNLYLIINYFKGGKLRFKKIKPEAFEANRFYTVINKKSGEIVPMEVNFNFDDPNLIILPLAFGKRQGREFIWNDLLSLETGSLKLANGRVIEKTLYNRRTRQDEPALFVALTFERREVLDSSNIKPMNLIGVDRGENIPAVIALTDPEGCPLSSFKDSLGNPTHILRIGESYKEKQRTIQAKKEVEQRRAGGYSRKYASKAKNLADDMVRNTARDLLYYAVTQDAMLIFENLSRGFGRQGKRTFMAERQYTRMEDWLTAKLAYEGLPSKTYLSKTLAQYTSKTCSNCGFTITSADYDRVLEKLKKTATGWMTTINGKELKVEGQITYYNRYKRQNVVKDLSVELDRLSEESVNNDISSWTKGRSGEALSLLKKRFSHRPVQEKFVCLNCGFETHADEQAALNIARSWLFLRSQEYKKYQTNKTTGNTDKRAFVETWQSFYRKKLKEVWKPAV

SEQ ID NO: 25798 - protein, 978 aa, synthetic construct
  REGION 1..978: note = engineered CasX variant
QEIKRINKIRRRLVKDSNTKKAGKTGPMKTLLVRVMTPDLRERLENLRKKPENIPQPISNTSRANLNKLLTDYTEMKKAILHVYWEEFQKDPVGLMSRVAQPASKKIDQNKLKPEMDEKGNLTTAGFACSQCGQPLFVYKLEQVSEKGKAYTNYFGRCNVAEHEKLILLAQLKPEKDSDEAVTYSLGKFGQRALDFYSIHVTKESTHPVKPLAQIAGNRYASGPVGKALSDACMGTIASFLSKYQDIIIEHQKVVKGNQKRLESLRELAGKENLEYPSVTLPPQPHTKEGVDAYNEVIARVRMWVNLNLWQKLKLSRDDAKPLLRLKGFPSFPLVERQANEVDWWDMVCNVKKLINEKKEDGKVFWQNLAGYKRQEALRPYLSSEEDRKKGKKFARYQLGDLLLHLEKKHGEDWGKVYDEAWERIDKKVEGLSKHIKLEEERRSEDAQSKAALTDWLRAKASFVIEGLKEADKDEFCRCELKLQKWYGDLRGKPFAIEAENSILDISGFSKQYNCAFIWQKDGVKKLNLYLIINYFKGGKLRFKKIKPEAFEANRFYTVINKKSGEIVPMEVNFNFDDPNLIILPLAFGKRQGREFIWNDLLSLETGSLKLANGRVIEKTLYNRRTRQDEPALFVALTFERREVLDSSNIKPMNLIGVDRGENIPAVIALTDPEGCPLSSFKDSLGNPTHILRIGESYKEKQRGIQAKKEVEQRRAGGYSRKYASKAKNLADDMVRNTARDLLYYAVTQDAMLIFENLSRGFGRQGKRTFMAERQYTRMEDWLTAKLAYEGLPSKTYLSKTLAQYTSKTCSNCGFTITSADYDRVLEKLKKTATGWMTTINGKELKVEGQITYYNRYKRQNVVKDLSVELDRLSEESVNNDISSWTKGRSGEALSLLKKRFSHRPVQEKFVCLNCGFETHADEQAALNIARSWLFLRSQEYKKYQTNKTTGNTDKRAFVETWQSFYRKKLKEVWKPAV

SEQ ID NO: 25799 - protein, 978 aa, synthetic construct
  REGION 1..978: note = engineered CasX variant
QEIKRINKIRRRLVKDSNTKKAGKTGPMKTLLVRVMTPDLRERLENLRKKPENIPQPISNTSRANLNKLLTDYTEMKKAILHVYWEEFQKDPVGLMSRVAQPASKKIDQNKLKPEMDEKGNLTTAGFACSQCGQPLFVYKLEQVSEKGKAYTNYFGRCNVAEHEKLILLAQLKPEKDSDEAVTYSLGKFGQRALDFYSIHVTKESTHPVKPLAQIAGNRYASGPVGKALSDACMGTIASFLSKYQDIIIEHQKVVKGNQKRLESLRELAGKENLEYPSVTLPPQPHTKEGVDAYNEVIARVRMWVNLNLWQKLKLSRDDAKPLLRLKGFPSFPLVERQANEVDWWDMVCNVKKLINEKKEDGKVFWQNLAGYKRQEALRPYLSSEEDRKKGKKFARYQLGDLLLHLEKKHGEDWGKVYDEAWERIDKKVEGLSKHIKLEEERRSEDAQSKAALTDWLRAKASFVIEGLKEADKDEFCRCELKLQKWYGDLRGKPFAIEAENSILDISGFSKQYNCAFIWQKDGVKKLNLYLIINYFKGGKLRFKKIKPEAFEANRFYTVINKKSGEIVPMEVNFNFDDPNLIILPLAFGKRQGREFIWNDLLSLETGSLKLANGRVIEKTLYNRRTRQDEPALFVALTFERREVLDSSNIKPMNLIGVDRGENIPAVIALTDPEGCPLSSFKDSLGNPTHFLRIGESYKEKQRTIQAKKEVEQRRAGGYSRKYASKAKNLADDMVRNTARDLLYYAVTQDAMLIFENLSRGFGRQGKRTFMAERQYTRMEDWLTAKLAYEGLPSKTYLSKTLAQYTSKTCSNCGFTITSADYDRVLEKLKKTATGWMTTINGKELKVEGQITYYNRYKRQNVVKDLSVELDRLSEESVNNDISSWTKGRSGEALSLLKKRFSHRPVQEKFVCLNCGFETHADEQAALNIARSWLFLRSQEYKKYQTNKTTGNTDKRAFVETWQSFYRKKLKEVWKPAV

SEQ ID NO: 25800 - protein, 978 aa, synthetic construct
  REGION 1..978: note = engineered CasX variant
QEIKRINKIRRRLVKDSNTKKAGKTGPMKTLLVRVMTPDLRERLENLRKKPENIPQPISNTSRANLNKLLTDYTEMKKAILHVYWEEFQKDPVGLMSRVAQPASKKIDQNKLKPEMDEKGNLTTAGFACSQCGQPLFVYKLEQVSEKGKAYTNYFGRCNVAEHEKLILLAQLKPEKDSDEAVTYSLGKFGQRALDFYSIHVTKESTHPVKPLAQIAGNRYASGPVGKALSDACMGTIASFLSKYQDIIIEHQKVVKGNQKRLESLRELAGKENLEYPSVTLPPQPHTKEGVDAYNEVIARVRMWVNLNLWQKLKLSRDDAKPLLRLKGFPSFPLVERQANEVDWWDMVCNVKKLINEKKEDGKVFWQNLAGYKRQEALRPYLSSEEDRKKGKKFARYQLGDLLLHLEKKHGEDWGKVYDEAWERIDKKVEGLSKHIKLEEERRSEDAQSKAALTDWLRAKASFVIEGLKEADKDEFCRCELKLQKWYGDLRGKPFAIEAENSILDISGFSKQYNCAFIWQKDGVKKLNLYLIINYFKGGKLRFKKIKPEAFEANRFYTVINKKSGEIVPMEVNFNFDDPNLIILPLAFGKRQGREFIWNDLLSLETGSLKLANGRVIEKTLYNRRTRQDEPALFVALTFERREVLDSSNIKPMNLIGVDRGENIPAVIALTDPEGCPLSSFKDSLGNPTFILRIGESYKEKQRTYQAKKEVEQRRAGGYSRKYASKAKNLADDMVRNTARDLLYYAVTQDAMLIFENLSRGFGRQGKRTFMAERQYTRMEDWLTAKLAYEGLPSKTYLSKTLAQYTSKTCSNCGFTITSADYDRVLEKLKKTATGWMTTINGKELKVEGQITYYNRYKRQNVVKDLSVELDRLSEESVNNDISSWTKGRSGEALSLLKKRFSHRPVQEKFVCLNCGFETHADEQAALNIARSWLFLRSQEYKKYQTNKTTGNTDKRAFVETWQSFYRKKLKEVWKPAV

SEQ ID NO: 25801 - protein, 978 aa, synthetic construct
  REGION 1..978: note = engineered CasX variant
QEIKRINKIRRRLVKDSNTKKAGKTGPMKTLLVRVMTPDLRERLENLRKKPENIPQPISNTSRANLNKLLTDYTEMKKAILHVYWEEFQKDPVGLMSRVAQPASKKIDQNKLKPEMDEKGNLTTAGFACSQCGQPLFVYKLEQVSEKGKAYTNYFGRCNVAEHEKLILLAQLKPEKDSDEAVTYSLGKFGQRALDFYSIHVTKESTHPVKPLAQIAGNRYASGPVGKALSDACMGTIASFLSKYQDIIIEHQKVVKGNQKRLESLRELAGKENLEYPSVTLPPQPHTKEGVDAYNEVIARVRMWVNLNLWQKLKLSRDDAKPLLRLKGFPSFPLVERQANEVDWWDMVCNVKKLINEKKEDGKVFWQNLAGYKRQEALRPYLSSEEDRKKGKKFARYQLGDLLLHLEKKHGEDWGKVYDEAWERIDKKVEGLSKHIKLEEERRSEDAQSKAALTDWLRAKASFVIEGLKEADKDEFCRCELKLQKWYGDLRGKPFAIEAENSILDISGFSKQYNCAFIWQKDGVKKLNLYLIINYFKGGKLRFKKIKPEAFEANRFYTVINKKSGEIVPMEVNFNFDDPNLIILPLAFGKRQGREFIWNDLLSLETGSLKLANGRVIEKTLYNRRTRQDEPALFVALTFERREVLDSSNIKPMNLIGVDRGENIPAVIALTDPEGCPLSSFKDSLGNATHILRIGESYKEKQRTIQAKKEVEQRRAGGYSRKYASKAKNLADDMVRNTARDLLYYAVTQDAMLIFENLSRGFGRQGKRTFMAERQYTRMEDWLTAKLAYEGLPSKTYLSKTLAQYTSKTCSNCGFTITSADYDRVLEKLKKTATGWMTTINGKELKVEGQITYYNRYKRQNVVKDLSVELDRLSEESVNNDISSWTKGRSGEALSLLKKRFSHRPVQEKFVCLNCGFETHADEQAALNIARSWLFLRSQEYKKYQTNKTTGNTDKRAFVETWQSFYRKKLKEVWKPAV

SEQ ID NO: 25802 - protein, 978 aa, synthetic construct
  REGION 1..978: note = engineered CasX variant
QEIKRINKIRRRLVKDSNTKKAGKTGPMKTLLVRVMTPDLRERLENLRKKPENIPQPISNTSRANLNKLLTDYTEMKKAILHVYWEEFQKDPVGLMSRVAQPASKKIDQNKLKPEMDEKGNLTTAGFACSQCGQPLFVYKLEQVSEKGKAYTNYFGRCNVAEHEKLILLAQLKPEKDSDEAVTYSLGKFGQRALDFYSIHVTKESTHPVKPLAQIAGNRYASGPVGKALSDACMGTIASFLSKYQDIIIEHQKVVKGNQKRLESLRELAGKENLEYPSVTLPPQPHTKEGVDAYNEVIARVRMWVNLNLWQKLKLSRDDAKPLLRLKGFPSFPLVERQANEVDWWDMVCNVKKLINEKKEDGKVFWQNLAGYKRQEALRPYLSSEEDRKKGKKFARYQLGDLLLHLEKKHGEDWGKVYDEAWERIDKKVEGLSKHIKLEEERRSEDAQSKAALTDWLRAKASFVIEGLKEADKDEFCRCELKLQKWYGDLRGKPFAIEAENSILDISGFSKQYNCAFIWQKDGVKKLNLYLIINYFKGGKLRFKKIKPEAFEANRFYTVINKKSGEIVPMEVNFNFDDPNLIILPLAFGKRQGREFIWNDLLSLETGSLKLANGRVIEKTLYNRRTRQDEPALFVALTFERREVLDSSNIKPMNLIGVDRGENIPAVIALTDPEGCPLSSFKDSLGKPTHILRIGESYKEKQRTIQASKEVEQRRAGGYSRKYASKAKNLADDMVRNTARDLLYYAVTQDAMLIFENLSRGFGRQGKRTFMAERQYTRMEDWLTAKLAYEGLPSKTYLSKTLAQYTSKTCSNCGFTITSADYDRVLEKLKKTATGWMTTINGKELKVEGQITYYNRYKRQNVVKDLSVELDRLSEESVNNDISSWTKGRSGEALSLLKKRFSHRPVQEKFVCLNCGFETHADEQAALNIARSWLFLRSQEYKKYQTNKTTGNTDKRAFVETWQSFYRKKLKEVWKPAV

SEQ ID NO: 25803 - protein, 978 aa, synthetic construct
  REGION 1..978: note = engineered CasX variant
QEIKRINKIRRRLVKDSNTKKAGKTGPMKTLLVRVMTPDLRERLENLRKKPENIPQPISNTSRANLNKLLTDYTEMKKAILHVYWEEFQKDPVGLMSRVAQPASKKIDQNKLKPEMDEKGNLTTAGFACSQCGQPLFVYKLEQVSEKGKAYTNYFGRCNVAEHEKLILLAQLKPEKDSDEAVTYSLGKFGQRALDFYSIHVTKESTHPVKPLAQIAGNRYASGPVGKALSDACMGTIASFLSKYQDIIIEHQKVVKGNQKRLESLRELAGKENLEYPSVTLPPQPHTKEGVDAYNEVIARVRMWVNLNLWQKLKLSRDDAKPLLRLKGFPSFPLVERQANEVDWWDMVCNVKKLINEKKEDGKVFWQNLAGYKRQEALRPYLSSEEDRKKGKKFARYQLGDLLLHLEKKHGEDWGKVYDEAWERIDKKVEGLSKHIKLEEERRSEDAQSKAALTDWLRAKASFVIEGLKEADKDEFCRCELKLQKWYGDLRGKPFAIEAENSILDISGFSKQYNCAFIWQKDGVKKLNLYLIINYFKGGKLRFKKIKPEAFEANRFYTVINKKSGEIVPMEVNFNFDDPNLIILPLAFGKRQGREFIWNDLLSLETGSLKLANGRVIEKTLYNRRTRQDEPALFVALTFERREVLDSSNIKPMNLIGVDRGENIPAVIALTDPEGCPLSSFKDSLGKPTHILRIGESYKEKQRTIQAKKEVEQRRAGGYSRKYASKAKNLADDMVRNTARDLLYYAVTQDAMLIFENLSRGFGRQGKRTFMAERQYTRMEDWLTAKLAYEGLPSKTYLSKTLAQYTSKTCSNCGFTITSADYDRVLEKLKKTATGWMTTINGKELKVEGQITYYNRYKRQNVVKDLSVELDRLSEESVNNDISSWTKGRSGEALSLLKKRFSHRPVQEKFVCLNCGFETHADEQAALNIARSWLFLRSQEYKKYQTNKTTGNTDKRAFVETWQSFYRKKLKEVWKPAV

SEQ ID NO: 25804 - protein, 978 aa, synthetic construct
  REGION 1..978: note = engineered CasX variant
QEIKRINKIRRRLVKDSNTKKAGKTGPMKTLLVRVMTPDLRERLENLRKKPENIPQPISNTSRANLNKLLTDYTEMKKAILHVYWEEFQKDPVGLMSRVAQPASKKIDQNKLKPEMDEKGNLTTAGFACSQCGQPLFVYKLEQVSEKGKAYTNYFGRCNVAEHEKLILLAQLKPEKDSDEAVTYSLGKFGQRALDFYSIHVTKESTHPVKPLAQIAGNRYASGPVGKALSDACMGTIASFLSKYQDIIIEHQKVVKGNQKRLESLRELAGKENLEYPSVTLPPQPHTKEGVDAYNEVIARVRMWVNLNLWQKLKLSRDDAKPLLRLKGFPSFPLVERQANEVDWWDMVCNVKKLINEKKEDGKVFWQNLAGYKRQEALRPYLSSEEDRKKGKKFARYQLGDLLLHLEKKHGEDWGKVYDEAWERIDKKVEGLSKHIKLEEERRSEDAQSKAALTDWLRAKASFVIEGLKEADKDEFCRCELKLQKWYGDLRGKPFAIEAENSILDISGFSKQYNCAFIWQKDGVKKLNLYLIINYFKGGKLRFKKIKPEAFEANRFYTVINKKSGEIVPMEVNFNFDDPNLIILPLAFGKRQGREFIWNDLLSLETGSLKLANGRVIEKTLYNRRTRQDEPALFVALTFERREVLDSSNIKPMNLIGVDRGENIPAVIALTDPEGCPLSSFCDSLGNPTHILRIGESYKEKQRTIQQKKEVEQRRAGGYSRKYASKAKNLADDMVRNTARDLLYYAVTQDAMLIFENLSRGFGRQGKRTFMAERQYTRMEDWLTAKLAYEGLPSKTYLSKTLAQYTSKTCSNCGFTITSADYDRVLEKLKKTATGWMTTINGKELKVEGQITYYNRYKRQNVVKDLSVELDRLSEESVNNDISSWTKGRSGEALSLLKKRFSHRPVQEKFVCLNCGFETHADEQAALNIARSWLFLRSQEYKKYQTNKTTGNTDKRAFVETWQSFYRKKLKEVWKPAV

SEQ ID NO: 25805 - protein, 978 aa, synthetic construct
  REGION 1..978: note = engineered CasX variant
QEIKRINKIRRRLVKDSNTKKAGKTGPMKTLLVRVMTPDLRERLENLRKKPENIPQPISNTSRANLNKLLTDYTEMKKAILHVYWEEFQKDPVGLMSRVAQPASKKIDQNKLKPEMDEKGNLTTAGFACSQCGQPLFVYKLEQVSEKGKAYTNYFGRCNVAEHEKLILLAQLKPEKDSDEAVTYSLGKFGQRALDFYSIHVTKESTHPVKPLAQIAGNRYASGPVGKALSDACMGTIASFLSKYQDIIIEHQKVVKGNQKRLESLRELAGKENLEYPSVTLPPQPHTKEGVDAYNEVIARVRMWVNLNLWQKLKLSRDDAKPLLRLKGFPSFPLVERQANEVDWWDMVCNVKKLINEKKEDGKVFWQNLAGYKRQEALRPYLSSEEDRKKGKKFARYQLGDLLLHLEKKHGEDWGKVYDEAWERIDKKVEGLSKHIKLEEERRSEDAQSKAALTDWLRAKASFVIEGLKEADKDEFCRCELKLQKWYGDLRGKPFAIEAENSILDISGFSKQYNCAFIWQKDGVKKLNLYLIINYFKGGKLRFKKIKPEAFEANRFYTVINKKSGEIVPMEVNFNFDDPNLIILPLAFGKRQGREFIWNDLLSLETGSLKLANGRVIEKTLYNRRTRQDEPALFVALTFERREVLDSSNIKPMNLIGVDRGENIPAVIALTDPEGCPLSSFCDSLGNPTHILRIGESYKEKQRTIQAKKEVEQRRAGGYSRKYASKAKNLADDMVRNTARDLLYYAVTQDAMLIFENLSRGFGRQGKRTFMAERQYTRMEDWLTAKLAYEGLPSKTYLSKTLAQYTSKTCSNCGFTITSADYDRVLEKLKKTATGWMTTINGKELKVEGQITYYNRYKRQNVVKDLSVELDRLSEESVNNDISSWTKGRSGEALSLLKKRFSHRPVQEKFVCLNCGFETHADEQAALNIARSWLFLRSQEYKKYQTNKTTGNTDKRAFVETWQSFYRKKLKEVWKPAV

SEQ ID NO: 25806 - protein, 978 aa, synthetic construct
  REGION 1..978: note = engineered CasX variant
QEIKRINKIRRRLVKDSNTKKAGKTGPMKTLLVRVMTPDLRERLENLRKKPENIPQPISNTSRANLNKLLTDYTEMKKAILHVYWEEFQKDPVGLMSRVAQPASKKIDQNKLKPEMDEKGNLTTAGFACSQCGQPLFVYKLEQVSEKGKAYTNYFGRCNVAEHEKLILLAQLKPEKDSDEAVTYSLGKFGQRALDFYSIHVTKESTHPVKPLAQIAGNRYASGPVGKALSDACMGTIASFLSKYQDIIIEHQKVVKGNQKRLESLRELAGKENLEYPSVTLPPQPHTKEGVDAYNEVIARVRMWVNLNLWQKLKLSRDDAKPLLRLKGFPSFPLVERQANEVDWWDMVCNVKKLINEKKEDGKVFWQNLAGYKRQEALRPYLSSEEDRKKGKKFARYQLGDLLLHLEKKHGEDWGKVYDEAWERIDKKVEGLSKHIKLEEERRSEDAQSKAALTDWLRAKASFVIEGLKEADKDEFCRCELKLQKWYGDLRGKPFAIEAENSILDISGFSKQYNCAFIWQKDGVKKLNLYLIINYFKGGKLRFKKIKPEAFEANRFYTVINKKSGEIVPMEVNFNFDDPNLIILPLAFGKRQGREFIWNDLLSLETGSLKLANGRVIEKTLYNRRTRQDEPALFVALTFERREVLDSSNIKPMNLIGVDRGENIPAVIALTDPEGCPLSRYKDSSGNPTHILRIGESYKEKQRTIQAKKEVEQRRAGGYSRKYASKAKNLADDMVRNTARDLLYYAVTQDAMLIFENLSRGFGRQGKRTFMAERQYTRMEDWLTAKLAYEGLPSKTYLSKTLAQYTSKTCSNCGFTITSADYDRVLEKLKKTATGWMTTINGKELKVEGQITYYNRYKRQNVVKDLSVELDRLSEESVNNDISSWTKGRSGEALSLLKKRFSHRPVQEKFVCLNCGFETHADEQAALNIARSWLFLRSQEYKKYQTNKTTGNTDKRAFVETWQSFYRKKLKEVWKPAV

SEQ ID NO: 25807 - protein, 978 aa, synthetic construct
  REGION 1..978: note = engineered CasX variant
QEIKRINKIRRRLVKDSNTKKAGKTGPMKTLLVRVMTPDLRERLENLRKKPENIPQPISNTSRANLNKLLTDYTEMKKAILHVYWEEFQKDPVGLMSRVAQPASKKIDQNKLKPEMDEKGNLTTAGFACSQCGQPLFVYKLEQVSEKGKAYTNYFGRCNVAEHEKLILLAQLKPEKDSDEAVTYSLGKFGQRALDFYSIHVTKESTHPVKPLAQIAGNRYASGPVGKALSDACMGTIASFLSKYQDIIIEHQKVVKGNQKRLESLRELAGKENLEYPSVTLPPQPHTKEGVDAYNEVIARVRMWVNLNLWQKLKLSRDDAKPLLRLKGFPSFPLVERQANEVDWWDMVCNVKKLINEKKEDGKVFWQNLAGYKRQEALRPYLSSEEDRKKGKKFARYQLGDLLLHLEKKHGEDWGKVYDEAWERIDKKVEGLSKHIKLEEERRSEDAQSKAALTDWLRAKASFVIEGLKEADKDEFCRCELKLQKWYGDLRGKPFAIEAENSILDISGFSKQYNCAFIWQKDGVKKLNLYLIINYFKGGKLRFKKIKPEAFEANRFYTVINKKSGEIVPMEVNFNFDDPNLIILPLAFGKRQGREFIWNDLLSLETGSLKLANGRVIEKTLYNRRTRQDEPALFVALTFERREVLDSSNIKPMNLIGVDRGENIPAVIALTDPEGCPLSRYKDSLGNPTHILRIGESYKEKQRTIQAKKEVEQRRMGGYSRKYASKAKNLADDMVRNTARDLLYYAVTQDAMLIFENLSRGFGRQGKRTFMAERQYTRMEDWLTAKLAYEGLPSKTYLSKTLAQYTSKTCSNCGFTITSADYDRVLEKLKKTATGWMTTINGKELKVEGQITYYNRYKRQNVVKDLSVELDRLSEESVNNDISSWTKGRSGEALSLLKKRFSHRPVQEKFVCLNCGFETHADEQAALNIARSWLFLRSQEYKKYQTNKTTGNTDKRAFVETWQSFYRKKLKEVWKPAV

SEQ ID NO: 25808 - protein, 978 aa, synthetic construct
  REGION 1..978: note = engineered CasX variant
QEIKRINKIRRRLVKDSNTKKAGKTGPMKTLLVRVMTPDLRERLENLRKKPENIPQPISNTSRANLNKLLTDYTEMKKAILHVYWEEFQKDPVGLMSRVAQPASKKIDQNKLKPEMDEKGNLTTAGFACSQCGQPLFVYKLEQVSEKGKAYTNYFGRCNVAEHEKLILLAQLKPEKDSDEAVTYSLGKFGQRALDFYSIHVTKESTHPVKPLAQIAGNRYASGPVGKALSDACMGTIASFLSKYQDIIIEHQKVVKGNQKRLESLRELAGKENLEYPSVTLPPQPHTKEGVDAYNEVIARVRMWVNLNLWQKLKLSRDDAKPLLRLKGFPSFPLVERQANEVDWWDMVCNVKKLINEKKEDGKVFWQNLAGYKRQEALRPYLSSEEDRKKGKKFARYQLGDLLLHLEKKHGEDWGKVYDEAWERIDKKVEGLSKHIKLEEERRSEDAQSKAALTDWLRAKASFVIEGLKEADKDEFCRCELKLQKWYGDLRGKPFAIEAENSILDISGFSKQYNCAFIWQKDGVKKLNLYLIINYFKGGKLRFKKIKPEAFEANRFYTVINKKSGEIVPMEVNFNFDDPNLIILPLAFGKRQGREFIWNDLLSLETGSLKLANGRVIEKTLYNRRTRQDEPALFVALTFERREVLDSSNIKPMNLIGVDRGENIPAVIALTDPEGCPLSRYKDSLGNPTHILRIGESYKEKQRTIQAKKEVEQRRAGGYSRKYASKAKNLADDMVRNTARDLLYYAVTQDAMLIFENLSRGFGRQGKRTFMAERQYTRMEDWLTAKLAYEGLPSKTYLSKTLAQYTSKTCSNCGFTITSADYDRVLEKLKKTATGWMTTINGKELKVEGQITYYNRYKRQNVVKDLSVELDRLSEESVNNDISSWTKGRSGEALSLLKKRFSHRPVQEKFVCLNCGFETHADEQAALNIARSWLFLRSQEYKKYQTNKTTGNTDKRAFVETWQSFYRKKLKEVWKPAV

SEQ ID NO: 25809 - protein, 978 aa, synthetic construct
  REGION 1..978: note = engineered CasX variant
QEIKRINKIRRRLVKDSNTKKAGKTGPMKTLLVRVMTPDLRERLENLRKKPENIPQPISNTSRANLNKLLTDYTEMKKAILHVYWEEFQKDPVGLMSRVAQPASKKIDQNKLKPEMDEKGNLTTAGFACSQCGQPLFVYKLEQVSEKGKAYTNYFGRCNVAEHEKLILLAQLKPEKDSDEAVTYSLGKFGQRALDFYSIHVTKESTHPVKPLAQIAGNRYASGPVGKALSDACMGTIASFLSKYQDIIIEHQKVVKGNQKRLESLRELAGKENLEYPSVTLPPQPHTKEGVDAYNEVIARVRMWVNLNLWQKLKLSRDDAKPLLRLKGFPSFPLVERQANEVDWWDMVCNVKKLINEKKEDGKVFWQNLAGYKRQEALRPYLSSEEDRKKGKKFARYQLGDLLLHLEKKHGEDWGKVYDEAWERIDKKVEGLSKHIKLEEERRSEDAQSKAALTDWLRAKASFVIEGLKEADKDEFCRCELKLQKWYGDLRGKPFAIEAENSILDISGFSKQYNCAFIWQKDGVKKLNLYLIINYFKGGKLRFKKIKPEAFEANRFYTVINKKSGEIVPMEVNFNFDDPNLIILPLAFGKRQGREFIWNDLLSLETGSLKLANGRVIEKTLYNRRTRQDEPALFVALTFERREVLDSSNIKPMNLIGVDRGENIPAVIALTDPEGCPLSRWKDSLGNPTHILRIGESYKERQRTIQAKKEVEQRRAGGYSRKYASKAKNLADDMVRNTARDLLYYAVTQDAMLIFENLSRGFGRQGKRTFMAERQYTRMEDWLTAKLAYEGLPSKTYLSKTLAQYTSKTCSNCGFTITSADYDRVLEKLKKTATGWMTTINGKELKVEGQITYYNRYKRQNVVKDLSVELDRLSEESVNNDISSWTKGRSGEALSLLKKRFSHRPVQEKFVCLNCGFETHADEQAALNIARSWLFLRSQEYKKYQTNKTTGNTDKRAFVETWQSFYRKKLKEVWKPAV

SEQ ID NO: 25810 - protein, 978 aa, synthetic construct
  REGION 1..978: note = engineered CasX variant
QEIKRINKIRRRLVKDSNTKKAGKTGPMKTLLVRVMTPDLRERLENLRKKPENIPQPISNTSRANLNKLLTDYTEMKKAILHVYWEEFQKDPVGLMSRVAQPASKKIDQNKLKPEMDEKGNLTTAGFACSQCGQPLFVYKLEQVSEKGKAYTNYFGRCNVAEHEKLILLAQLKPEKDSDEAVTYSLGKFGQRALDFYSIHVTKESTHPVKPLAQIAGNRYASGPVGKALSDACMGTIASFLSKYQDIIIEHQKVVKGNQKRLESLRELAGKENLEYPSVTLPPQPHTKEGVDAYNEVIARVRMWVNLNLWQKLKLSRDDAKPLLRLKGFPSFPLVERQANEVDWWDMVCNVKKLINEKKEDGKVFWQNLAGYKRQEALRPYLSSEEDRKKGKKFARYQLGDLLLHLEKKHGEDWGKVYDEAWERIDKKVEGLSKHIKLEEERRSEDAQSKAALTDWLRAKASFVIEGLKEADKDEFCRCELKLQKWYGDLRGKPFAIEAENSILDISGFSKQYNCAFIWQKDGVKKLNLYLIINYFKGGKLRFKKIKPEAFEANRFYTVINKKSGEIVPMEVNFNFDDPNLIILPLAFGKRQGREFIWNDLLSLETGSLKLANGRVIEKTLYNRRTRQDEPALFVALTFERREVLDSSNIKPMNLIGVDRGENIPAVIALTDPEGCPLSRWKDSLGNPTHILRIGESYKEKQRTIQAKKEVEQRRAGGYSRKYASKAKNLADDMVRNTARDLLYYAVTQDAMLIFENLSRGFGRQGKRTFMAERQYTRMEDWLTAKLAYEGLPSKTYLSKTLAQYTSKTCSNCGFTITSADYDRVLEKLKKTATGWMTTINGKELKVEGQITYYNRYKRQNVVKDLSVELDRLSEESVNNDISSWTKGRSGEALSLLKKRFSHRPVQEKFVCLNCGFETHADEQAALNIARSWLFLRSQEYKKYQTNKTTGNTDKRAFVETWQSFYRKKLKEVWKPAV

SEQ ID NO: 25811 - protein, 978 aa, synthetic construct
  REGION 1..978: note = engineered CasX variant
QEIKRINKIRRRLVKDSNTKKAGKTGPMKTLLVRVMTPDLRERLENLRKKPENIPQPISNTSRANLNKLLTDYTEMKKAILHVYWEEFQKDPVGLMSRVAQPASKKIDQNKLKPEMDEKGNLTTAGFACSQCGQPLFVYKLEQVSEKGKAYTNYFGRCNVAEHEKLILLAQLKPEKDSDEAVTYSLGKFGQRALDFYSIHVTKESTHPVKPLAQIAGNRYASGPVGKALSDACMGTIASFLSKYQDIIIEHQKVVKGNQKRLESLRELAGKENLEYPSVTLPPQPHTKEGVDAYNEVIARVRMWVNLNLWQKLKLSRDDAKPLLRLKGFPSFPLVERQANEVDWWDMVCNVKKLINEKKEDGKVFWQNLAGYKRQEALRPYLSSEEDRKKGKKFARYQLGDLLLHLEKKHGEDWGKVYDEAWERIDKKVEGLSKHIKLEEERRSEDAQSKAALTDWLRAKASFVIEGLKEADKDEFCRCELKLQKWYGDLRGKPFAIEAENSILDISGFSKQYNCAFIWQKDGVKKLNLYLIINYFKGGKLRFKKIKPEAFEANRFYTVINKKSGEIVPMEVNFNFDDPNLIILPLAFGKRQGREFIWNDLLSLETGSLKLANGRVIEKTLYNRRTRQDEPALFVALTFERREVLDSSNIKPMNLIGVDRGENIPAVIALTDPEGCPLSRFYDSYGNPTHILRIGESYKEKQRTYQAKKEVEQRRAGGYSRKYASKAKNLADDMVRNTARDLLYYAVTQDAMLIFENLSRGFGRQGKRTFMAERQYTRMEDWLTAKLAYEGLPSKTYLSKTLAQYTSKTCSNCGFTITSADYDRVLEKLKKTATGWMTTINGKELKVEGQITYYNRYKRQNVVKDLSVELDRLSEESVNNDISSWTKGRSGEALSLLKKRFSHRPVQEKFVCLNCGFETHADEQAALNIARSWLFLRSQEYKKYQTNKTTGNTDKRAFVETWQSFYRKKLKEVWKPAV

SEQ ID NO: 25812 - protein, 978 aa, synthetic construct
  REGION 1..978: note = engineered CasX variant
QEIKRINKIRRRLVKDSNTKKAGKTGPMKTLLVRVMTPDLRERLENLRKKPENIPQPISNTSRANLNKLLTDYTEMKKAILHVYWEEFQKDPVGLMSRVAQPASKKIDQNKLKPEMDEKGNLTTAGFACSQCGQPLFVYKLEQVSEKGKAYTNYFGRCNVAEHEKLILLAQLKPEKDSDEAVTYSLGKFGQRALDFYSIHVTKESTHPVKPLAQIAGNRYASGPVGKALSDACMGTIASFLSKYQDIIIEHQKVVKGNQKRLESLRELAGKENLEYPSVTLPPQPHTKEGVDAYNEVIARVRMWVNLNLWQKLKLSRDDAKPLLRLKGFPSFPLVERQANEVDWWDMVCNVKKLINEKKEDGKVFWQNLAGYKRQEALRPYLSSEEDRKKGKKFARYQLGDLLLHLEKKHGEDWGKVYDEAWERIDKKVEGLSKHIKLEEERRSEDAQSKAALTDWLRAKASFVIEGLKEADKDEFCRCELKLQKWYGDLRGKPFAIEAENSILDISGFSKQYNCAFIWQKDGVKKLNLYLIINYFKGGKLRFKKIKPEAFEANRFYTVINKKSGEIVPMEVNFNFDDPNLIILPLAFGKRQGREFIWNDLLSLETGSLKLANGRVIEKTLYNRRTRQDEPALFVALTFERREVLDSSNIKPMNLIGVDRGENIPAVIALTDPEGCPLSRFYDSYGNPTHILRIGESYKEKQRTIQAKKEVEQRRAGGYSRKYASKAKNLADDMVRNTARDLLYYAVTQDAMLIFENLSRGFGRQGKRTFMAERQYTRMEDWLTAKLAYEGLPSKTYLSKTLAQYTSKTCSNCGFTITSADYDRVLEKLKKTATGWMTTINGKELKVEGQITYYNRYKRQNVVKDLSVELDRLSEESVNNDISSWTKGRSGEALSLLKKRFSHRPVQEKFVCLNCGFETHADEQAALNIARSWLFLRSQEYKKYQTNKTTGNTDKRAFVETWQSFYRKKLKEVWKPAV

SEQ ID NO: 25813 - protein, 978 aa, synthetic construct
  REGION 1..978: note = engineered CasX variant
QEIKRINKIRRRLVKDSNTKKAGKTGPMKTLLVRVMTPDLRERLENLRKKPENIPQPISNTSRANLNKLLTDYTEMKKAILHVYWEEFQKDPVGLMSRVAQPASKKIDQNKLKPEMDEKGNLTTAGFACSQCGQPLFVYKLEQVSEKGKAYTNYFGRCNVAEHEKLILLAQLKPEKDSDEAVTYSLGKFGQRALDFYSIHVTKESTHPVKPLAQIAGNRYASGPVGKALSDACMGTIASFLSKYQDIIIEHQKVVKGNQKRLESLRELAGKENLEYPSVTLPPQPHTKEGVDAYNEVIARVRMWVNLNLWQKLKLSRDDAKPLLRLKGFPSFPLVERQANEVDWWDMVCNVKKLINEKKEDGKVFWQNLAGYKRQEALRPYLSSEEDRKKGKKFARYQLGDLLLHLEKKHGEDWGKVYDEAWERIDKKVEGLSKHIKLEEERRSEDAQSKAALTDWLRAKASFVIEGLKEADKDEFCRCELKLQKWYGDLRGKPFAIEAENSILDISGFSKQYNCAFIWQKDGVKKLNLYLIINYFKGGKLRFKKIKPEAFEANRFYTVINKKSGEIVPMEVNFNFDDPNLIILPLAFGKRQGREFIWNDLLSLETGSLKLANGRVIEKTLYNRRTRQDEPALFVALTFERREVLDSSNIKPMNLIGVDRGENIPAVIALTDPEGCPLSRFYDSLGNPTHILRIGESYKVKQRTIQAKKEVEQRRAGGYSRKYASKAKNLADDMVRNTARDLLYYAVTQDAMLIFENLSRGFGRQGKRTFMAERQYTRMEDWLTAKLAYEGLPSKTYLSKTLAQYTSKTCSNCGFTITSADYDRVLEKLKKTATGWMTTINGKELKVEGQITYYNRYKRQNVVKDLSVELDRLSEESVNNDISSWTKGRSGEALSLLKKRFSHRPVQEKFVCLNCGFETHADEQAALNIARSWLFLRSQEYKKYQTNKTTGNTDKRAFVETWQSFYRKKLKEVWKPAV

SEQ ID NO: 25814 - protein, 978 aa, synthetic construct
  REGION 1..978: note = engineered CasX variant
QEIKRINKIRRRLVKDSNTKKAGKTGPMKTLLVRVMTPDLRERLENLRKKPENIPQPISNTSRANLNKLLTDYTEMKKAILHVYWEEFQKDPVGLMSRVAQPASKKIDQNKLKPEMDEKGNLTTAGFACSQCGQPLFVYKLEQVSEKGKAYTNYFGRCNVAEHEKLILLAQLKPEKDSDEAVTYSLGKFGQRALDFYSIHVTKESTHPVKPLAQIAGNRYASGPVGKALSDACMGTIASFLSKYQDIIIEHQKVVKGNQKRLESLRELAGKENLEYPSVTLPPQPHTKEGVDAYNEVIARVRMWVNLNLWQKLKLSRDDAKPLLRLKGFPSFPLVERQANEVDWWDMVCNVKKLINEKKEDGKVFWQNLAGYKRQEALRPYLSSEEDRKKGKKFARYQLGDLLLHLEKKHGEDWGKVYDEAWERIDKKVEGLSKHIKLEEERRSEDAQSKAALTDWLRAKASFVIEGLKEADKDEFCRCELKLQKWYGDLRGKPFAIEAENSILDISGFSKQYNCAFIWQKDGVKKLNLYLIINYFKGGKLRFKKIKPEAFEANRFYTVINKKSGEIVPMEVNFNFDDPNLIILPLAFGKRQGREFIWNDLLSLETGSLKLANGRVIEKTLYNRRTRQDEPALFVALTFERREVLDSSNIKPMNLIGVDRGENIPAVIALTDPEGCPLSRFYDSLGNPTHILRIGESYKLKQRTIQAKKEVEQRRAGGYSRKYASKAKNLADDMVRNTARDLLYYAVTQDAMLIFENLSRGFGRQGKRTFMAERQYTRMEDWLTAKLAYEGLPSKTYLSKTLAQYTSKTCSNCGFTITSADYDRVLEKLKKTATGWMTTINGKELKVEGQITYYNRYKRQNVVKDLSVELDRLSEESVNNDISSWTKGRSGEALSLLKKRFSHRPVQEKFVCLNCGFETHADEQAALNIARSWLFLRSQEYKKYQTNKTTGNTDKRAFVETWQSFYRKKLKEVWKPAV

SEQ ID NO: 25815 - protein, 978 aa, synthetic construct
  REGION 1..978: note = engineered CasX variant
QEIKRINKIRRRLVKDSNTKKAGKTGPMKTLLVRVMTPDLRERLENLRKKPENIPQPISNTSRANLNKLLTDYTEMKKAILHVYWEEFQKDPVGLMSRVAQPASKKIDQNKLKPEMDEKGNLTTAGFACSQCGQPLFVYKLEQVSEKGKAYTNYFGRCNVAEHEKLILLAQLKPEKDSDEAVTYSLGKFGQRALDFYSIHVTKESTHPVKPLAQIAGNRYASGPVGKALSDACMGTIASFLSKYQDIIIEHQKVVKGNQKRLESLRELAGKENLEYPSVTLPPQPHTKEGVDAYNEVIARVRMWVNLNLWQKLKLSRDDAKPLLRLKGFPSFPLVERQANEVDWWDMVCNVKKLINEKKEDGKVFWQNLAGYKRQEALRPYLSSEEDRKKGKKFARYQLGDLLLHLEKKHGEDWGKVYDEAWERIDKKVEGLSKHIKLEEERRSEDAQSKAALTDWLRAKASFVIEGLKEADKDEFCRCELKLQKWYGDLRGKPFAIEAENSILDISGFSKQYNCAFIWQKDGVKKLNLYLIINYFKGGKLRFKKIKPEAFEANRFYTVINKKSGEIVPMEVNFNFDDPNLIILPLAFGKRQGREFIWNDLLSLETGSLKLANGRVIEKTLYNRRTRQDEPALFVALTFERREVLDSSNIKPMNLIGVDRGENIPAVIALTDPEGCPLSRFYDSLGNPTHILRIGESYKEKQRTYQAKKEVEQRRAGGYSRKYASKAKNLADDMVRNTARDLLYYAVTQDAMLIFENLSRGFGRQGKRTFMAERQYTRMEDWLTAKLAYEGLPSKTYLSKTLAQYTSKTCSNCGFTITSADYDRVLEKLKKTATGWMTTINGKELKVEGQITYYNRYKRQNVVKDLSVELDRLSEESVNNDISSWTKGRSGEALSLLKKRFSHRPVQEKFVCLNCGFETHADEQAALNIARSWLFLRSQEYKKYQTNKTTGNTDKRAFVETWQSFYRKKLKEVWKPAV

SEQ ID NO: 25816 - protein, 978 aa, synthetic construct
  REGION 1..978: note = engineered CasX variant
QEIKRINKIRRRLVKDSNTKKAGKTGPMKTLLVRVMTPDLRERLENLRKKPENIPQPISNTSRANLNKLLTDYTEMKKAILHVYWEEFQKDPVGLMSRVAQPASKKIDQNKLKPEMDEKGNLTTAGFACSQCGQPLFVYKLEQVSEKGKAYTNYFGRCNVAEHEKLILLAQLKPEKDSDEAVTYSLGKFGQRALDFYSIHVTKESTHPVKPLAQIAGNRYASGPVGKALSDACMGTIASFLSKYQDIIIEHQKVVKGNQKRLESLRELAGKENLEYPSVTLPPQPHTKEGVDAYNEVIARVRMWVNLNLWQKLKLSRDDAKPLLRLKGFPSFPLVERQANEVDWWDMVCNVKKLINEKKEDGKVFWQNLAGYKRQEALRPYLSSEEDRKKGKKFARYQLGDLLLHLEKKHGEDWGKVYDEAWERIDKKVEGLSKHIKLEEERRSEDAQSKAALTDWLRAKASFVIEGLKEADKDEFCRCELKLQKWYGDLRGKPFAIEAENSILDISGFSKQYNCAFIWQKDGVKKLNLYLIINYFKGGKLRFKKIKPEAFEANRFYTVINKKSGEIVPMEVNFNFDDPNLIILPLAFGKRQGREFIWNDLLSLETGSLKLANGRVIEKTLYNRRTRQDEPALFVALTFERREVLDSSNIKPMNLIGVDRGENIPAVIALTDPEGCPLSRFYDSLGNPTHILRIGESYKEKQRTIQAKKEVEQRRAGGYSRKYASKAKNLADDMVRNTARDLLYYAVTQDAMLIFENLSRGFGRQGKRTFMAERQYTRMEDWLTAKLAYEGLPSKTYLSKTLAQYTSKTCSNCGFTITSADYDRVLEKLKKTATGWMTTINGKELKVEGQITYYNRYKRQNVVKDLSVELDRLSEESVNNDISSWTKGRSGEALSLLKKRFSHRPVQEKFVCLNCGFETHADEQAALNIARSWLFLRSQEYKKYQTNKTTGNTDKRAFVETWQSFYRKKLKEVWKPAV

SEQ ID NO: 25817 - protein, 978 aa, synthetic construct
  REGION 1..978: note = engineered CasX variant
QEIKRINKIRRRLVKDSNTKKAGKTGPMKTLLVRVMTPDLRERLENLRKKPENIPQPISNTSRANLNKLLTDYTEMKKAILHVYWEEFQKDPVGLMSRVAQPASKKIDQNKLKPEMDEKGNLTTAGFACSQCGQPLFVYKLEQVSEKGKAYTNYFGRCNVAEHEKLILLAQLKPEKDSDEAVTYSLGKFGQRALDFYSIHVTKESTHPVKPLAQIAGNRYASGPVGKALSDACMGTIASFLSKYQDIIIEHQKVVKGNQKRLESLRELAGKENLEYPSVTLPPQPHTKEGVDAYNEVIARVRMWVNLNLWQKLKLSRDDAKPLLRLKGFPSFPLVERQANEVDWWDMVCNVKKLINEKKEDGKVFWQNLAGYKRQEALRPYLSSEEDRKKGKKFARYQLGDLLLHLEKKHGEDWGKVYDEAWERIDKKVEGLSKHIKLEEERRSEDAQSKAALTDWLRAKASFVIEGLKEADKDEFCRCELKLQKWYGDLRGKPFAIEAENSILDISGFSKQYNCAFIWQKDGVKKLNLYLIINYFKGGKLRFKKIKPEAFEANRFYTVINKKSGEIVPMEVNFNFDDPNLIILPLAFGKRQGREFIWNDLLSLETGSLKLANGRVIEKTLYNRRTRQDEPALFVALTFERREVLDSSNIKPMNLIGVDRGENIPAVIALTDPEGCPLSRFYDSAGNPTHILRIGESYKEKQRTIQAKKEVEQRRAGGYSRKYASKAKNLADDMVRNTARDLLYYAVTQDAMLIFENLSRGFGRQGKRTFMAERQYTRMEDWLTAKLAYEGLPSKTYLSKTLAQYTSKTCSNCGFTITSADYDRVLEKLKKTATGWMTTINGKELKVEGQITYYNRYKRQNVVKDLSVELDRLSEESVNNDISSWTKGRSGEALSLLKKRFSHRPVQEKFVCLNCGFETHADEQAALNIARSWLFLRSQEYKKYQTNKTTGNTDKRAFVETWQSFYRKKLKEVWKPAV

SEQ ID NO: 25818 - protein, 978 aa, synthetic construct
  REGION 1..978: note = engineered CasX variant
QEIKRINKIRRRLVKDSNTKKAGKTGPMKTLLVRVMTPDLRERLENLRKKPENIPQPISNTSRANLNKLLTDYTEMKKAILHVYWEEFQKDPVGLMSRVAQPASKKIDQNKLKPEMDEKGNLTTAGFACSQCGQPLFVYKLEQVSEKGKAYTNYFGRCNVAEHEKLILLAQLKPEKDSDEAVTYSLGKFGQRALDFYSIHVTKESTHPVKPLAQIAGNRYASGPVGKALSDACMGTIASFLSKYQDIIIEHQKVVKGNQKRLESLRELAGKENLEYPSVTLPPQPHTKEGVDAYNEVIARVRMWVNLNLWQKLKLSRDDAKPLLRLKGFPSFPLVERQANEVDWWDMVCNVKKLINEKKEDGKVFWQNLAGYKRQEALRPYLSSEEDRKKGKKFARYQLGDLLLHLEKKHGEDWGKVYDEAWERIDKKVEGLSKHIKLEEERRSEDAQSKAALTDWLRAKASFVIEGLKEADKDEFCRCELKLQKWYGDLRGKPFAIEAENSILDISGFSKQYNCAFIWQKDGVKKLNLYLIINYFKGGKLRFKKIKPEAFEANRFYTVINKKSGEIVPMEVNFNFDDPNLIILPLAFGKRQGREFIWNDLLSLETGSLKLANGRVIEKTLYNRRTRQDEPALFVALTFERREVLDSSNIKPMNLIGVDRGENIPAVIALTDPEGCPLSRFYDALGNPTHILRIGESYKEKQRTIQAKKEVEQRRAGGYSRKYASKAKNLADDMVRNTARDLLYYAVTQDAMLIFENLSRGFGRQGKRTFMAERQYTRMEDWLTAKLAYEGLPSKTYLSKTLAQYTSKTCSNCGFTITSADYDRVLEKLKKTATGWMTTINGKELKVEGQITYYNRYKRQNVVKDLSVELDRLSEESVNNDISSWTKGRSGEALSLLKKRFSHRPVQEKFVCLNCGFETHADEQAALNIARSWLFLRSQEYKKYQTNKTTGNTDKRAFVETWQSFYRKKLKEVWKPAV

SEQ ID NO: 25819 - protein, 978 aa, synthetic construct
  REGION 1..978: note = engineered CasX variant
QEIKRINKIRRRLVKDSNTKKAGKTGPMKTLLVRVMTPDLRERLENLRKKPENIPQPISNTSRANLNKLLTDYTEMKKAILHVYWEEFQKDPVGLMSRVAQPASKKIDQNKLKPEMDEKGNLTTAGFACSQCGQPLFVYKLEQVSEKGKAYTNYFGRCNVAEHEKLILLAQLKPEKDSDEAVTYSLGKFGQRALDFYSIHVTKESTHPVKPLAQIAGNRYASGPVGKALSDACMGTIASFLSKYQDIIIEHQKVVKGNQKRLESLRELAGKENLEYPSVTLPPQPHTKEGVDAYNEVIARVRMWVNLNLWQKLKLSRDDAKPLLRLKGFPSFPLVERQANEVDWWDMVCNVKKLINEKKEDGKVFWQNLAGYKRQEALRPYLSSEEDRKKGKKFARYQLGDLLLHLEKKHGEDWGKVYDEAWERIDKKVEGLSKHIKLEEERRSEDAQSKAALTDWLRAKASFVIEGLKEADKDEFCRCELKLQKWYGDLRGKPFAIEAENSILDISGFSKQYNCAFIWQKDGVKKLNLYLIINYFKGGKLRFKKIKPEAFEANRFYTVINKKSGEIVPMEVNFNFDDPNLIILPLAFGKRQGREFIWNDLLSLETGSLKLANGRVIEKTLYNRRTRQDEPALFVALTFERREVLDSSNIKPMNLIGVDRGENIPAVIALTDPEGCPLSRFVDSLGNPTHILRIGESYKEKQRTIQAKKEVEQRRAGGYSRKYASKAKNLADDMVRNTARDLLYYAVTQDAMLIFENLSRGFGRQGKRTFMAERQYTRMEDWLTAKLAYEGLPSKTYLSKTLAQYTSKTCSNCGFTITSADYDRVLEKLKKTATGWMTTINGKELKVEGQITYYNRYKRQNVVKDLSVELDRLSEESVNNDISSWTKGRSGEALSLLKKRFSHRPVQEKFVCLNCGFETHADEQAALNIARSWLFLRSQEYKKYQTNKTTGNTDKRAFVETWQSFYRKKLKEVWKPAV

SEQ ID NO: 25820 - protein, 978 aa, synthetic construct
  REGION 1..978: note = engineered CasX variant
QEIKRINKIRRRLVKDSNTKKAGKTGPMKTLLVRVMTPDLRERLENLRKKPENIPQPISNTSRANLNKLLTDYTEMKKAILHVYWEEFQKDPVGLMSRVAQPASKKIDQNKLKPEMDEKGNLTTAGFACSQCGQPLFVYKLEQVSEKGKAYTNYFGRCNVAEHEKLILLAQLKPEKDSDEAVTYSLGKFGQRALDFYSIHVTKESTHPVKPLAQIAGNRYASGPVGKALSDACMGTIASFLSKYQDIIIEHQKVVKGNQKRLESLRELAGKENLEYPSVTLPPQPHTKEGVDAYNEVIARVRMWVNLNLWQKLKLSRDDAKPLLRLKGFPSFPLVERQANEVDWWDMVCNVKKLINEKKEDGKVFWQNLAGYKRQEALRPYLSSEEDRKKGKKFARYQLGDLLLHLEKKHGEDWGKVYDEAWERIDKKVEGLSKHIKLEEERRSEDAQSKAALTDWLRAKASFVIEGLKEADKDEFCRCELKLQKWYGDLRGKPFAIEAENSILDISGFSKQYNCAFIWQKDGVKKLNLYLIINYFKGGKLRFKKIKPEAFEANRFYTVINKKSGEIVPMEVNFNFDDPNLIILPLAFGKRQGREFIWNDLLSLETGSLKLANGRVIEKTLYNRRTRQDEPALFVALTFERREVLDSSNIKPMNLIGVDRGENIPAVIALTDPEGCPLSRFTDSLGNYTHILRIGESYKEKQRTIQAKKEVEQRRAGGYSRKYASKAKNLADDMVRNTARDLLYYAVTQDAMLIFENLSRGFGRQGKRTFMAERQYTRMEDWLTAKLAYEGLPSKTYLSKTLAQYTSKTCSNCGFTITSADYDRVLEKLKKTATGWMTTINGKELKVEGQITYYNRYKRQNVVKDLSVELDRLSEESVNNDISSWTKGRSGEALSLLKKRFSHRPVQEKFVCLNCGFETHADEQAALNIARSWLFLRSQEYKKYQTNKTTGNTDKRAFVETWQSFYRKKLKEVWKPAV

SEQ ID NO: 25821 - protein, 978 aa, synthetic construct
  REGION 1..978: note = engineered CasX variant
QEIKRINKIRRRLVKDSNTKKAGKTGPMKTLLVRVMTPDLRERLENLRKKPENIPQPISNTSRANLNKLLTDYTEMKKAILHVYWEEFQKDPVGLMSRVAQPASKKIDQNKLKPEMDEKGNLTTAGFACSQCGQPLFVYKLEQVSEKGKAYTNYFGRCNVAEHEKLILLAQLKPEKDSDEAVTYSLGKFGQRALDFYSIHVTKESTHPVKPLAQIAGNRYASGPVGKALSDACMGTIASFLSKYQDIIIEHQKVVKGNQKRLESLRELAGKENLEYPSVTLPPQPHTKEGVDAYNEVIARVRMWVNLNLWQKLKLSRDDAKPLLRLKGFPSFPLVERQANEVDWWDMVCNVKKLINEKKEDGKVFWQNLAGYKRQEALRPYLSSEEDRKKGKKFARYQLGDLLLHLEKKHGEDWGKVYDEAWERIDKKVEGLSKHIKLEEERRSEDAQSKAALTDWLRAKASFVIEGLKEADKDEFCRCELKLQKWYGDLRGKPFAIEAENSILDISGFSKQYNCAFIWQKDGVKKLNLYLIINYFKGGKLRFKKIKPEAFEANRFYTVINKKSGEIVPMEVNFNFDDPNLIILPLAFGKRQGREFIWNDLLSLETGSLKLANGRVIEKTLYNRRTRQDEPALFVALTFERREVLDSSNIKPMNLIGVDRGENIPAVIALTDPEGCPLSRFTDSLGNPTHILRIGQSYKEKQRTIQAKKEVEQRRAGGYSRKYASKAKNLADDMVRNTARDLLYYAVTQDAMLIFENLSRGFGRQGKRTFMAERQYTRMEDWLTAKLAYEGLPSKTYLSKTLAQYTSKTCSNCGFTITSADYDRVLEKLKKTATGWMTTINGKELKVEGQITYYNRYKRQNVVKDLSVELDRLSEESVNNDISSWTKGRSGEALSLLKKRFSHRPVQEKFVCLNCGFETHADEQAALNIARSWLFLRSQEYKKYQTNKTTGNTDKRAFVETWQSFYRKKLKEVWKPAV

SEQ ID NO: 25822 - protein, 978 aa, synthetic construct
  REGION 1..978: note = engineered CasX variant
QEIKRINKIRRRLVKDSNTKKAGKTGPMKTLLVRVMTPDLRERLENLRKKPENIPQPISNTSRANLNKLLTDYTEMKKAILHVYWEEFQKDPVGLMSRVAQPASKKIDQNKLKPEMDEKGNLTTAGFACSQCGQPLFVYKLEQVSEKGKAYTNYFGRCNVAEHEKLILLAQLKPEKDSDEAVTYSLGKFGQRALDFYSIHVTKESTHPVKPLAQIAGNRYASGPVGKALSDACMGTIASFLSKYQDIIIEHQKVVKGNQKRLESLRELAGKENLEYPSVTLPPQPHTKEGVDAYNEVIARVRMWVNLNLWQKLKLSRDDAKPLLRLKGFPSFPLVERQANEVDWWDMVCNVKKLINEKKEDGKVFWQNLAGYKRQEALRPYLSSEEDRKKGKKFARYQLGDLLLHLEKKHGEDWGKVYDEAWERIDKKVEGLSKHIKLEEERRSEDAQSKAALTDWLRAKASFVIEGLKEADKDEFCRCELKLQKWYGDLRGKPFAIEAENSILDISGFSKQYNCAFIWQKDGVKKLNLYLIINYFKGGKLRFKKIKPEAFEANRFYTVINKKSGEIVPMEVNFNFDDPNLIILPLAFGKRQGREFIWNDLLSLETGSLKLANGRVIEKTLYNRRTRQDEPALFVALTFERREVLDSSNIKPMNLIGVDRGENIPAVIALTDPEGCPLSRFTDSLGNPTHILRIGESYKEKQRTIQANKEVEQRRAGGYSRKYASKAKNLADDMVRNTARDLLYYAVTQDAMLIFENLSRGFGRQGKRTFMAERQYTRMEDWLTAKLAYEGLPSKTYLSKTLAQYTSKTCSNCGFTITSADYDRVLEKLKKTATGWMTTINGKELKVEGQITYYNRYKRQNVVKDLSVELDRLSEESVNNDISSWTKGRSGEALSLLKKRFSHRPVQEKFVCLNCGFETHADEQAALNIARSWLFLRSQEYKKYQTNKTTGNTDKRAFVETWQSFYRKKLKEVWKPAV

SEQ ID NO: 25823 - protein, 978 aa, synthetic construct
  REGION 1..978: note = engineered CasX variant
QEIKRINKIRRRLVKDSNTKKAGKTGPMKTLLVRVMTPDLRERLENLRKKPENIPQPISNTSRANLNKLLTDYTEMKKAILHVYWEEFQKDPVGLMSRVAQPASKKIDQNKLKPEMDEKGNLTTAGFACSQCGQPLFVYKLEQVSEKGKAYTNYFGRCNVAEHEKLILLAQLKPEKDSDEAVTYSLGKFGQRALDFYSIHVTKESTHPVKPLAQIAGNRYASGPVGKALSDACMGTIASFLSKYQDIIIEHQKVVKGNQKRLESLRELAGKENLEYPSVTLPPQPHTKEGVDAYNEVIARVRMWVNLNLWQKLKLSRDDAKPLLRLKGFPSFPLVERQANEVDWWDMVCNVKKLINEKKEDGKVFWQNLAGYKRQEALRPYLSSEEDRKKGKKFARYQLGDLLLHLEKKHGEDWGKVYDEAWERIDKKVEGLSKHIKLEEERRSEDAQSKAALTDWLRAKASFVIEGLKEADKDEFCRCELKLQKWYGDLRGKPFAIEAENSILDISGFSKQYNCAFIWQKDGVKKLNLYLIINYFKGGKLRFKKIKPEAFEANRFYTVINKKSGEIVPMEVNFNFDDPNLIILPLAFGKRQGREFIWNDLLSLETGSLKLANGRVIEKTLYNRRTRQDEPALFVALTFERREVLDSSNIKPMNLIGVDRGENIPAVIALTDPEGCPLSRFTDSLGNPTHILRIGESYKEKQRTIQAKKSVEQRRAGGYSRKYASKAKNLADDMVRNTARDLLYYAVTQDAMLIFENLSRGFGRQGKRTFMAERQYTRMEDWLTAKLAYEGLPSKTYLSKTLAQYTSKTCSNCGFTITSADYDRVLEKLKKTATGWMTTINGKELKVEGQITYYNRYKRQNVVKDLSVELDRLSEESVNNDISSWTKGRSGEALSLLKKRFSHRPVQEKFVCLNCGFETHADEQAALNIARSWLFLRSQEYKKYQTNKTTGNTDKRAFVETWQSFYRKKLKEVWKPAV

SEQ ID NO: 25824 - protein, 978 aa, synthetic construct
  REGION 1..978: note = engineered CasX variant
QEIKRINKIRRRLVKDSNTKKAGKTGPMKTLLVRVMTPDLRERLENLRKKPENIPQPISNTSRANLNKLLTDYTEMKKAILHVYWEEFQKDPVGLMSRVAQPASKKIDQNKLKPEMDEKGNLTTAGFACSQCGQPLFVYKLEQVSEKGKAYTNYFGRCNVAEHEKLILLAQLKPEKDSDEAVTYSLGKFGQRALDFYSIHVTKESTHPVKPLAQIAGNRYASGPVGKALSDACMGTIASFLSKYQDIIIEHQKVVKGNQKRLESLRELAGKENLEYPSVTLPPQPHTKEGVDAYNEVIARVRMWVNLNLWQKLKLSRDDAKPLLRLKGFPSFPLVERQANEVDWWDMVCNVKKLINEKKEDGKVFWQNLAGYKRQEALRPYLSSEEDRKKGKKFARYQLGDLLLHLEKKHGEDWGKVYDEAWERIDKKVEGLSKHIKLEEERRSEDAQSKAALTDWLRAKASFVIEGLKEADKDEFCRCELKLQKWYGDLRGKPFAIEAENSILDISGFSKQYNCAFIWQKDGVKKLNLYLIINYFKGGKLRFKKIKPEAFEANRFYTVINKKSGEIVPMEVNFNFDDPNLIILPLAFGKRQGREFIWNDLLSLETGSLKLANGRVIEKTLYNRRTRQDEPALFVALTFERREVLDSSNIKPMNLIGVDRGENIPAVIALTDPEGCPLSRFTDSLGNPTHILRIGESYKEKQRTIQAKKEVEQRRVGGYSRKYASKAKNLADDMVRNTARDLLYYAVTQDAMLIFENLSRGFGRQGKRTFMAERQYTRMEDWLTAKLAYEGLPSKTYLSKTLAQYTSKTCSNCGFTITSADYDRVLEKLKKTATGWMTTINGKELKVEGQITYYNRYKRQNVVKDLSVELDRLSEESVNNDISSWTKGRSGEALSLLKKRFSHRPVQEKFVCLNCGFETHADEQAALNIARSWLFLRSQEYKKYQTNKTTGNTDKRAFVETWQSFYRKKLKEVWKPAV

SEQ ID NO: 25825 - protein, 978 aa, synthetic construct
  REGION 1..978: note = engineered CasX variant
QEIKRINKIRRRLVKDSNTKKAGKTGPMKTLLVRVMTPDLRERLENLRKKPENIPQPISNTSRANLNKLLTDYTEMKKAILHVYWEEFQKDPVGLMSRVAQPASKKIDQNKLKPEMDEKGNLTTAGFACSQCGQPLFVYKLEQVSEKGKAYTNYFGRCNVAEHEKLILLAQLKPEKDSDEAVTYSLGKFGQRALDFYSIHVTKESTHPVKPLAQIAGNRYASGPVGKALSDACMGTIASFLSKYQDIIIEHQKVVKGNQKRLESLRELAGKENLEYPSVTLPPQPHTKEGVDAYNEVIARVRMWVNLNLWQKLKLSRDDAKPLLRLKGFPSFPLVERQANEVDWWDMVCNVKKLINEKKEDGKVFWQNLAGYKRQEALRPYLSSEEDRKKGKKFARYQLGDLLLHLEKKHGEDWGKVYDEAWERIDKKVEGLSKHIKLEEERRSEDAQSKAALTDWLRAKASFVIEGLKEADKDEFCRCELKLQKWYGDLRGKPFAIEAENSILDISGFSKQYNCAFIWQKDGVKKLNLYLIINYFKGGKLRFKKIKPEAFEANRFYTVINKKSGEIVPMEVNFNFDDPNLIILPLAFGKRQGREFIWNDLLSLETGSLKLANGRVIEKTLYNRRTRQDEPALFVALTFERREVLDSSNIKPMNLIGVDRGENIPAVIALTDPEGCPLSRFTDSLGNPTHILRIGESYKEKQRTIQAKKEVEQRRAGGYSRKYASKAKNLADDMVRNTARDLLYYAVTQDAMLIFENLSRGFGRQGKRTFMAERQYTRMEDWLTAKLAYEGLPSKTYLSKTLAQYTSKTCSNCGFTITSADYDRVLEKLKKTATGWMTTINGKELKVEGQITYYNRYKRQNVVKDLSVELDRLSEESVNNDISSWTKGRSGEALSLLKKRFSHRPVQEKFVCLNCGFETHADEQAALNIARSWLFLRSQEYKKYQTNKTTGNTDKRAFVETWQSFYRKKLKEVWKPAV

SEQ ID NO: 25826 - protein, 978 aa, synthetic construct
  REGION 1..978: note = engineered CasX variant
QEIKRINKIRRRLVKDSNTKKAGKTGPMKTLLVRVMTPDLRERLENLRKKPENIPQPISNTSRANLNKLLTDYTEMKKAILHVYWEEFQKDPVGLMSRVAQPASKKIDQNKLKPEMDEKGNLTTAGFACSQCGQPLFVYKLEQVSEKGKAYTNYFGRCNVAEHEKLILLAQLKPEKDSDEAVTYSLGKFGQRALDFYSIHVTKESTHPVKPLAQIAGNRYASGPVGKALSDACMGTIASFLSKYQDIIIEHQKVVKGNQKRLESLRELAGKENLEYPSVTLPPQPHTKEGVDAYNEVIARVRMWVNLNLWQKLKLSRDDAKPLLRLKGFPSFPLVERQANEVDWWDMVCNVKKLINEKKEDGKVFWQNLAGYKRQEALRPYLSSEEDRKKGKKFARYQLGDLLLHLEKKHGEDWGKVYDEAWERIDKKVEGLSKHIKLEEERRSEDAQSKAALTDWLRAKASFVIEGLKEADKDEFCRCELKLQKWYGDLRGKPFAIEAENSILDISGFSKQYNCAFIWQKDGVKKLNLYLIINYFKGGKLRFKKIKPEAFEANRFYTVINKKSGEIVPMEVNFNFDDPNLIILPLAFGKRQGREFIWNDLLSLETGSLKLANGRVIEKTLYNRRTRQDEPALFVALTFERREVLDSSNIKPMNLIGVDRGENIPAVIALTDPEGCPLSRFTDSLGNPTHILRIGESFKEKQRTIQAKKEVEQRRAGGYSRKYASKAKNLADDMVRNTARDLLYYAVTQDAMLIFENLSRGFGRQGKRTFMAERQYTRMEDWLTAKLAYEGLPSKTYLSKTLAQYTSKTCSNCGFTITSADYDRVLEKLKKTATGWMTTINGKELKVEGQITYYNRYKRQNVVKDLSVELDRLSEESVNNDISSWTKGRSGEALSLLKKRFSHRPVQEKFVCLNCGFETHADEQAALNIARSWLFLRSQEYKKYQTNKTTGNTDKRAFVETWQSFYRKKLKEVWKPAV

SEQ ID NO: 25827 - protein, 978 aa, synthetic construct
  REGION 1..978: note = engineered CasX variant
QEIKRINKIRRRLVKDSNTKKAGKTGPMKTLLVRVMTPDLRERLENLRKKPENIPQPISNTSRANLNKLLTDYTEMKKAILHVYWEEFQKDPVGLMSRVAQPASKKIDQNKLKPEMDEKGNLTTAGFACSQCGQPLFVYKLEQVSEKGKAYTNYFGRCNVAEHEKLILLAQLKPEKDSDEAVTYSLGKFGQRALDFYSIHVTKESTHPVKPLAQIAGNRYASGPVGKALSDACMGTIASFLSKYQDIIIEHQKVVKGNQKRLESLRELAGKENLEYPSVTLPPQPHTKEGVDAYNEVIARVRMWVNLNLWQKLKLSRDDAKPLLRLKGFPSFPLVERQANEVDWWDMVCNVKKLINEKKEDGKVFWQNLAGYKRQEALRPYLSSEEDRKKGKKFARYQLGDLLLHLEKKHGEDWGKVYDEAWERIDKKVEGLSKHIKLEEERRSEDAQSKAALTDWLRAKASFVIEGLKEADKDEFCRCELKLQKWYGDLRGKPFAIEAENSILDISGFSKQYNCAFIWQKDGVKKLNLYLIINYFKGGKLRFKKIKPEAFEANRFYTVINKKSGEIVPMEVNFNFDDPNLIILPLAFGKRQGREFIWNDLLSLETGSLKLANGRVIEKTLYNRRTRQDEPALFVALTFERREVLDSSNIKPMNLIGVDRGENIPAVIALTDPEGCPLSRFSDSLGNSTHILRIGESYKEKQRTIQAKKEVEQRRAGGYSRKYASKAKNLADDMVRNTARDLLYYAVTQDAMLIFENLSRGFGRQGKRTFMAERQYTRMEDWLTAKLAYEGLPSKTYLSKTLAQYTSKTCSNCGFTITSADYDRVLEKLKKTATGWMTTINGKELKVEGQITYYNRYKRQNVVKDLSVELDRLSEESVNNDISSWTKGRSGEALSLLKKRFSHRPVQEKFVCLNCGFETHADEQAALNIARSWLFLRSQEYKKYQTNKTTGNTDKRAFVETWQSFYRKKLKEVWKPAV

SEQ ID NO: 25828 - protein, 978 aa, synthetic construct
  REGION 1..978: note = engineered CasX variant
QEIKRINKIRRRLVKDSNTKKAGKTGPMKTLLVRVMTPDLRERLENLRKKPENIPQPISNTSRANLNKLLTDYTEMKKAILHVYWEEFQKDPVGLMSRVAQPASKKIDQNKLKPEMDEKGNLTTAGFACSQCGQPLFVYKLEQVSEKGKAYTNYFGRCNVAEHEKLILLAQLKPEKDSDEAVTYSLGKFGQRALDFYSIHVTKESTHPVKPLAQIAGNRYASGPVGKALSDACMGTIASFLSKYQDIIIEHQKVVKGNQKRLESLRELAGKENLEYPSVTLPPQPHTKEGVDAYNEVIARVRMWVNLNLWQKLKLSRDDAKPLLRLKGFPSFPLVERQANEVDWWDMVCNVKKLINEKKEDGKVFWQNLAGYKRQEALRPYLSSEEDRKKGKKFARYQLGDLLLHLEKKHGEDWGKVYDEAWERIDKKVEGLSKHIKLEEERRSEDAQSKAALTDWLRAKASFVIEGLKEADKDEFCRCELKLQKWYGDLRGKPFAIEAENSILDISGFSKQYNCAFIWQKDGVKKLNLYLIINYFKGGKLRFKKIKPEAFEANRFYTVINKKSGEIVPMEVNFNFDDPNLIILPLAFGKRQGREFIWNDLLSLETGSLKLANGRVIEKTLYNRRTRQDEPALFVALTFERREVLDSSNIKPMNLIGVDRGENIPAVIALTDPEGCPLSRFSDSLGNPTHILRIGHSYKEKQRTIQAKKEVEQRRAGGYSRKYASKAKNLADDMVRNTARDLLYYAVTQDAMLIFENLSRGFGRQGKRTFMAERQYTRMEDWLTAKLAYEGLPSKTYLSKTLAQYTSKTCSNCGFTITSADYDRVLEKLKKTATGWMTTINGKELKVEGQITYYNRYKRQNVVKDLSVELDRLSEESVNNDISSWTKGRSGEALSLLKKRFSHRPVQEKFVCLNCGFETHADEQAALNIARSWLFLRSQEYKKYQTNKTTGNTDKRAFVETWQSFYRKKLKEVWKPAV

SEQ ID NO: 25829 - protein, 978 aa, synthetic construct
  REGION 1..978: note = engineered CasX variant
QEIKRINKIRRRLVKDSNTKKAGKTGPMKTLLVRVMTPDLRERLENLRKKPENIPQPISNTSRANLNKLLTDYTEMKKAILHVYWEEFQKDPVGLMSRVAQPASKKIDQNKLKPEMDEKGNLTTAGFACSQCGQPLFVYKLEQVSEKGKAYTNYFGRCNVAEHEKLILLAQLKPEKDSDEAVTYSLGKFGQRALDFYSIHVTKESTHPVKPLAQIAGNRYASGPVGKALSDACMGTIASFLSKYQDIIIEHQKVVKGNQKRLESLRELAGKENLEYPSVTLPPQPHTKEGVDAYNEVIARVRMWVNLNLWQKLKLSRDDAKPLLRLKGFPSFPLVERQANEVDWWDMVCNVKKLINEKKEDGKVFWQNLAGYKRQEALRPYLSSEEDRKKGKKFARYQLGDLLLHLEKKHGEDWGKVYDEAWERIDKKVEGLSKHIKLEEERRSEDAQSKAALTDWLRAKASFVIEGLKEADKDEFCRCELKLQKWYGDLRGKPFAIEAENSILDISGFSKQYNCAFIWQKDGVKKLNLYLIINYFKGGKLRFKKIKPEAFEANRFYTVINKKSGEIVPMEVNFNFDDPNLIILPLAFGKRQGREFIWNDLLSLETGSLKLANGRVIEKTLYNRRTRQDEPALFVALTFERREVLDSSNIKPMNLIGVDRGENIPAVIALTDPEGCPLSRFSDSLGNPTHILRIGESYKEKQRTIQANKEVEQRRAGGYSRKYASKAKNLADDMVRNTARDLLYYAVTQDAMLIFENLSRGFGRQGKRTFMAERQYTRMEDWLTAKLAYEGLPSKTYLSKTLAQYTSKTCSNCGFTITSADYDRVLEKLKKTATGWMTTINGKELKVEGQITYYNRYKRQNVVKDLSVELDRLSEESVNNDISSWTKGRSGEALSLLKKRFSHRPVQEKFVCLNCGFETHADEQAALNIARSWLFLRSQEYKKYQTNKTTGNTDKRAFVETWQSFYRKKLKEVWKPAV

SEQ ID NO: 25830 - protein, 978 aa, synthetic construct
  REGION 1..978: note = engineered CasX variant
QEIKRINKIRRRLVKDSNTKKAGKTGPMKTLLVRVMTPDLRERLENLRKKPENIPQPISNTSRANLNKLLTDYTEMKKAILHVYWEEFQKDPVGLMSRVAQPASKKIDQNKLKPEMDEKGNLTTAGFACSQCGQPLFVYKLEQVSEKGKAYTNYFGRCNVAEHEKLILLAQLKPEKDSDEAVTYSLGKFGQRALDFYSIHVTKESTHPVKPLAQIAGNRYASGPVGKALSDACMGTIASFLSKYQDIIIEHQKVVKGNQKRLESLRELAGKENLEYPSVTLPPQPHTKEGVDAYNEVIARVRMWVNLNLWQKLKLSRDDAKPLLRLKGFPSFPLVERQANEVDWWDMVCNVKKLINEKKEDGKVFWQNLAGYKRQEALRPYLSSEEDRKKGKKFARYQLGDLLLHLEKKHGEDWGKVYDEAWERIDKKVEGLSKHIKLEEERRSEDAQSKAALTDWLRAKASFVIEGLKEADKDEFCRCELKLQKWYGDLRGKPFAIEAENSILDISGFSKQYNCAFIWQKDGVKKLNLYLIINYFKGGKLRFKKIKPEAFEANRFYTVINKKSGEIVPMEVNFNFDDPNLIILPLAFGKRQGREFIWNDLLSLETGSLKLANGRVIEKTLYNRRTRQDEPALFVALTFERREVLDSSNIKPMNLIGVDRGENIPAVIALTDPEGCPLSRFSDSLGNPTHILRIGESYKEKQRTIQAKKEVEQRRAGGYSRKYASKAKNLADDMVRNTARDLLYYAVTQDAMLIFENLSRGFGRQGKRTFMAERQYTRMEDWLTAKLAYEGLPSKTYLSKTLAQYTSKTCSNCGFTITSADYDRVLEKLKKTATGWMTTINGKELKVEGQITYYNRYKRQNVVKDLSVELDRLSEESVNNDISSWTKGRSGEALSLLKKRFSHRPVQEKFVCLNCGFETHADEQAALNIARSWLFLRSQEYKKYQTNKTTGNTDKRAFVETWQSFYRKKLKEVWKPAV

SEQ ID NO: 25831 - protein, 978 aa, synthetic construct
  REGION 1..978: note = engineered CasX variant
QEIKRINKIRRRLVKDSNTKKAGKTGPMKTLLVRVMTPDLRERLENLRKKPENIPQPISNTSRANLNKLLTDYTEMKKAILHVYWEEFQKDPVGLMSRVAQPASKKIDQNKLKPEMDEKGNLTTAGFACSQCGQPLFVYKLEQVSEKGKAYTNYFGRCNVAEHEKLILLAQLKPEKDSDEAVTYSLGKFGQRALDFYSIHVTKESTHPVKPLAQIAGNRYASGPVGKALSDACMGTIASFLSKYQDIIIEHQKVVKGNQKRLESLRELAGKENLEYPSVTLPPQPHTKEGVDAYNEVIARVRMWVNLNLWQKLKLSRDDAKPLLRLKGFPSFPLVERQANEVDWWDMVCNVKKLINEKKEDGKVFWQNLAGYKRQEALRPYLSSEEDRKKGKKFARYQLGDLLLHLEKKHGEDWGKVYDEAWERIDKKVEGLSKHIKLEEERRSEDAQSKAALTDWLRAKASFVIEGLKEADKDEFCRCELKLQKWYGDLRGKPFAIEAENSILDISGFSKQYNCAFIWQKDGVKKLNLYLIINYFKGGKLRFKKIKPEAFEANRFYTVINKKSGEIVPMEVNFNFDDPNLIILPLAFGKRQGREFIWNDLLSLETGSLKLANGRVIEKTLYNRRTRQDEPALFVALTFERREVLDSSNIKPMNLIGVDRGENIPAVIALTDPEGCPLSRFSDSLGNPTHILRIGESYKEAQRTIQAKKEVEQRRAGGYSRKYASKAKNLADDMVRNTARDLLYYAVTQDAMLIFENLSRGFGRQGKRTFMAERQYTRMEDWLTAKLAYEGLPSKTYLSKTLAQYTSKTCSNCGFTITSADYDRVLEKLKKTATGWMTTINGKELKVEGQITYYNRYKRQNVVKDLSVELDRLSEESVNNDISSWTKGRSGEALSLLKKRFSHRPVQEKFVCLNCGFETHADEQAALNIARSWLFLRSQEYKKYQTNKTTGNTDKRAFVETWQSFYRKKLKEVWKPAV

SEQ ID NO: 25832 - protein, 978 aa, synthetic construct
  REGION 1..978: note = engineered CasX variant
QEIKRINKIRRRLVKDSNTKKAGKTGPMKTLLVRVMTPDLRERLENLRKKPENIPQPISNTSRANLNKLLTDYTEMKKAILHVYWEEFQKDPVGLMSRVAQPASKKIDQNKLKPEMDEKGNLTTAGFACSQCGQPLFVYKLEQVSEKGKAYTNYFGRCNVAEHEKLILLAQLKPEKDSDEAVTYSLGKFGQRALDFYSIHVTKESTHPVKPLAQIAGNRYASGPVGKALSDACMGTIASFLSKYQDIIIEHQKVVKGNQKRLESLRELAGKENLEYPSVTLPPQPHTKEGVDAYNEVIARVRMWVNLNLWQKLKLSRDDAKPLLRLKGFPSFPLVERQANEVDWWDMVCNVKKLINEKKEDGKVFWQNLAGYKRQEALRPYLSSEEDRKKGKKFARYQLGDLLLHLEKKHGEDWGKVYDEAWERIDKKVEGLSKHIKLEEERRSEDAQSKAALTDWLRAKASFVIEGLKEADKDEFCRCELKLQKWYGDLRGKPFAIEAENSILDISGFSKQYNCAFIWQKDGVKKLNLYLIINYFKGGKLRFKKIKPEAFEANRFYTVINKKSGEIVPMEVNFNFDDPNLIILPLAFGKRQGREFIWNDLLSLETGSLKLANGRVIEKTLYNRRTRQDEPALFVALTFERREVLDSSNIKPMNLIGVDRGENIPAVIALTDPEGCPLSRFRDSLGNPTHILRIGESYKEKQRTIQAKKEVTQRRAGGYSRKYASKAKNLADDMVRNTARDLLYYAVTQDAMLIFENLSRGFGRQGKRTFMAERQYTRMEDWLTAKLAYEGLPSKTYLSKTLAQYTSKTCSNCGFTITSADYDRVLEKLKKTATGWMTTINGKELKVEGQITYYNRYKRQNVVKDLSVELDRLSEESVNNDISSWTKGRSGEALSLLKKRFSHRPVQEKFVCLNCGFETHADEQAALNIARSWLFLRSQEYKKYQTNKTTGNTDKRAFVETWQSFYRKKLKEVWKPAV

SEQ ID NO: 25833 - protein, 978 aa, synthetic construct
  REGION 1..978: note = engineered CasX variant
QEIKRINKIRRRLVKDSNTKKAGKTGPMKTLLVRVMTPDLRERLENLRKKPENIPQPISNTSRANLNKLLTDYTEMKKAILHVYWEEFQKDPVGLMSRVAQPASKKIDQNKLKPEMDEKGNLTTAGFACSQCGQPLFVYKLEQVSEKGKAYTNYFGRCNVAEHEKLILLAQLKPEKDSDEAVTYSLGKFGQRALDFYSIHVTKESTHPVKPLAQIAGNRYASGPVGKALSDACMGTIASFLSKYQDIIIEHQKVVKGNQKRLESLRELAGKENLEYPSVTLPPQPHTKEGVDAYNEVIARVRMWVNLNLWQKLKLSRDDAKPLLRLKGFPSFPLVERQANEVDWWDMVCNVKKLINEKKEDGKVFWQNLAGYKRQEALRPYLSSEEDRKKGKKFARYQLGDLLLHLEKKHGEDWGKVYDEAWERIDKKVEGLSKHIKLEEERRSEDAQSKAALTDWLRAKASFVIEGLKEADKDEFCRCELKLQKWYGDLRGKPFAIEAENSILDISGFSKQYNCAFIWQKDGVKKLNLYLIINYFKGGKLRFKKIKPEAFEANRFYTVINKKSGEIVPMEVNFNFDDPNLIILPLAFGKRQGREFIWNDLLSLETGSLKLANGRVIEKTLYNRRTRQDEPALFVALTFERREVLDSSNIKPMNLIGVDRGENIPAVIALTDPEGCPLSRFRDSLGNPTHILRIGESYKEKQRTIQAKKEVEQRRAGGYSRKYASKAKNLADDMVRNTARDLLYYAVTQDAMLIFENLSRGFGRQGKRTFMAERQYTRMEDWLTAKLAYEGLPSKTYLSKTLAQYTSKTCSNCGFTITSADYDRVLEKLKKTATGWMTTINGKELKVEGQITYYNRYKRQNVVKDLSVELDRLSEESVNNDISSWTKGRSGEALSLLKKRFSHRPVQEKFVCLNCGFETHADEQAALNIARSWLFLRSQEYKKYQTNKTTGNTDKRAFVETWQSFYRKKLKEVWKPAV

SEQ ID NO: 25834 - protein, 978 aa, synthetic construct
  REGION 1..978: note = engineered CasX variant
QEIKRINKIRRRLVKDSNTKKAGKTGPMKTLLVRVMTPDLRERLENLRKKPENIPQPISNTSRANLNKLLTDYTEMKKAILHVYWEEFQKDPVGLMSRVAQPASKKIDQNKLKPEMDEKGNLTTAGFACSQCGQPLFVYKLEQVSEKGKAYTNYFGRCNVAEHEKLILLAQLKPEKDSDEAVTYSLGKFGQRALDFYSIHVTKESTHPVKPLAQIAGNRYASGPVGKALSDACMGTIASFLSKYQDIIIEHQKVVKGNQKRLESLRELAGKENLEYPSVTLPPQPHTKEGVDAYNEVIARVRMWVNLNLWQKLKLSRDDAKPLLRLKGFPSFPLVERQANEVDWWDMVCNVKKLINEKKEDGKVFWQNLAGYKRQEALRPYLSSEEDRKKGKKFARYQLGDLLLHLEKKHGEDWGKVYDEAWERIDKKVEGLSKHIKLEEERRSEDAQSKAALTDWLRAKASFVIEGLKEADKDEFCRCELKLQKWYGDLRGKPFAIEAENSILDISGFSKQYNCAFIWQKDGVKKLNLYLIINYFKGGKLRFKKIKPEAFEANRFYTVINKKSGEIVPMEVNFNFDDPNLIILPLAFGKRQGREFIWNDLLSLETGSLKLANGRVIEKTLYNRRTRQDEPALFVALTFERREVLDSSNIKPMNLIGVDRGENIPAVIALTDPEGCPLSRFQDSLGNPTHILRITESYKEKQRTIQAKKEVEQRRAGGYSRKYASKAKNLADDMVRNTARDLLYYAVTQDAMLIFENLSRGFGRQGKRTFMAERQYTRMEDWLTAKLAYEGLPSKTYLSKTLAQYTSKTCSNCGFTITSADYDRVLEKLKKTATGWMTTINGKELKVEGQITYYNRYKRQNVVKDLSVELDRLSEESVNNDISSWTKGRSGEALSLLKKRFSHRPVQEKFVCLNCGFETHADEQAALNIARSWLFLRSQEYKKYQTNKTTGNTDKRAFVETWQSFYRKKLKEVWKPAV

SEQ ID NO: 25835 - protein, 978 aa, synthetic construct
  REGION 1..978: note = engineered CasX variant
QEIKRINKIRRRLVKDSNTKKAGKTGPMKTLLVRVMTPDLRERLENLRKKPENIPQPISNTSRANLNKLLTDYTEMKKAILHVYWEEFQKDPVGLMSRVAQPASKKIDQNKLKPEMDEKGNLTTAGFACSQCGQPLFVYKLEQVSEKGKAYTNYFGRCNVAEHEKLILLAQLKPEKDSDEAVTYSLGKFGQRALDFYSIHVTKESTHPVKPLAQIAGNRYASGPVGKALSDACMGTIASFLSKYQDIIIEHQKVVKGNQKRLESLRELAGKENLEYPSVTLPPQPHTKEGVDAYNEVIARVRMWVNLNLWQKLKLSRDDAKPLLRLKGFPSFPLVERQANEVDWWDMVCNVKKLINEKKEDGKVFWQNLAGYKRQEALRPYLSSEEDRKKGKKFARYQLGDLLLHLEKKHGEDWGKVYDEAWERIDKKVEGLSKHIKLEEERRSEDAQSKAALTDWLRAKASFVIEGLKEADKDEFCRCELKLQKWYGDLRGKPFAIEAENSILDISGFSKQYNCAFIWQKDGVKKLNLYLIINYFKGGKLRFKKIKPEAFEANRFYTVINKKSGEIVPMEVNFNFDDPNLIILPLAFGKRQGREFIWNDLLSLETGSLKLANGRVIEKTLYNRRTRQDEPALFVALTFERREVLDSSNIKPMNLIGVDRGENIPAVIALTDPEGCPLSRFQDSLGNPTHILRIGESYKEKQRTIQAKKEVEQRRAGGYSRKYASKAKNLADDMVRNTARDLLYYAVTQDAMLIFENLSRGFGRQGKRTFMAERQYTRMEDWLTAKLAYEGLPSKTYLSKTLAQYTSKTCSNCGFTITSADYDRVLEKLKKTATGWMTTINGKELKVEGQITYYNRYKRQNVVKDLSVELDRLSEESVNNDISSWTKGRSGEALSLLKKRFSHRPVQEKFVCLNCGFETHADEQAALNIARSWLFLRSQEYKKYQTNKTTGNTDKRAFVETWQSFYRKKLKEVWKPAV

SEQ ID NO: 25836 - protein, 978 aa, synthetic construct
  REGION 1..978: note = engineered CasX variant
QEIKRINKIRRRLVKDSNTKKAGKTGPMKTLLVRVMTPDLRERLENLRKKPENIPQPISNTSRANLNKLLTDYTEMKKAILHVYWEEFQKDPVGLMSRVAQPASKKIDQNKLKPEMDEKGNLTTAGFACSQCGQPLFVYKLEQVSEKGKAYTNYFGRCNVAEHEKLILLAQLKPEKDSDEAVTYSLGKFGQRALDFYSIHVTKESTHPVKPLAQIAGNRYASGPVGKALSDACMGTIASFLSKYQDIIIEHQKVVKGNQKRLESLRELAGKENLEYPSVTLPPQPHTKEGVDAYNEVIARVRMWVNLNLWQKLKLSRDDAKPLLRLKGFPSFPLVERQANEVDWWDMVCNVKKLINEKKEDGKVFWQNLAGYKRQEALRPYLSSEEDRKKGKKFARYQLGDLLLHLEKKHGEDWGKVYDEAWERIDKKVEGLSKHIKLEEERRSEDAQSKAALTDWLRAKASFVIEGLKEADKDEFCRCELKLQKWYGDLRGKPFAIEAENSILDISGFSKQYNCAFIWQKDGVKKLNLYLIINYFKGGKLRFKKIKPEAFEANRFYTVINKKSGEIVPMEVNFNFDDPNLIILPLAFGKRQGREFIWNDLLSLETGSLKLANGRVIEKTLYNRRTRQDEPALFVALTFERREVLDSSNIKPMNLIGVDRGENIPAVIALTDPEGCPLSRFPDSLGNPTHILRIGESYKGKQRTIQAKKEVEQRRAGGYSRKYASKAKNLADDMVRNTARDLLYYAVTQDAMLIFENLSRGFGRQGKRTFMAERQYTRMEDWLTAKLAYEGLPSKTYLSKTLAQYTSKTCSNCGFTITSADYDRVLEKLKKTATGWMTTINGKELKVEGQITYYNRYKRQNVVKDLSVELDRLSEESVNNDISSWTKGRSGEALSLLKKRFSHRPVQEKFVCLNCGFETHADEQAALNIARSWLFLRSQEYKKYQTNKTTGNTDKRAFVETWQSFYRKKLKEVWKPAV

SEQ ID NO: 25837 - protein, 978 aa, synthetic construct
  REGION 1..978: note = engineered CasX variant
QEIKRINKIRRRLVKDSNTKKAGKTGPMKTLLVRVMTPDLRERLENLRKKPENIPQPISNTSRANLNKLLTDYTEMKKAILHVYWEEFQKDPVGLMSRVAQPASKKIDQNKLKPEMDEKGNLTTAGFACSQCGQPLFVYKLEQVSEKGKAYTNYFGRCNVAEHEKLILLAQLKPEKDSDEAVTYSLGKFGQRALDFYSIHVTKESTHPVKPLAQIAGNRYASGPVGKALSDACMGTIASFLSKYQDIIIEHQKVVKGNQKRLESLRELAGKENLEYPSVTLPPQPHTKEGVDAYNEVIARVRMWVNLNLWQKLKLSRDDAKPLLRLKGFPSFPLVERQANEVDWWDMVCNVKKLINEKKEDGKVFWQNLAGYKRQEALRPYLSSEEDRKKGKKFARYQLGDLLLHLEKKHGEDWGKVYDEAWERIDKKVEGLSKHIKLEEERRSEDAQSKAALTDWLRAKASFVIEGLKEADKDEFCRCELKLQKWYGDLRGKPFAIEAENSILDISGFSKQYNCAFIWQKDGVKKLNLYLIINYFKGGKLRFKKIKPEAFEANRFYTVINKKSGEIVPMEVNFNFDDPNLIILPLAFGKRQGREFIWNDLLSLETGSLKLANGRVIEKTLYNRRTRQDEPALFVALTFERREVLDSSNIKPMNLIGVDRGENIPAVIALTDPEGCPLSRFNDSLGNPTHILRIGESYKSKQRTIQASKEVEQRRAGGYSRKYASKAKNLADDMVRNTARDLLYYAVTQDAMLIFENLSRGFGRQGKRTFMAERQYTRMEDWLTAKLAYEGLPSKTYLSKTLAQYTSKTCSNCGFTITSADYDRVLEKLKKTATGWMTTINGKELKVEGQITYYNRYKRQNVVKDLSVELDRLSEESVNNDISSWTKGRSGEALSLLKKRFSHRPVQEKFVCLNCGFETHADEQAALNIARSWLFLRSQEYKKYQTNKTTGNTDKRAFVETWQSFYRKKLKEVWKPAV

SEQ ID NO: 25838 - protein, 978 aa, synthetic construct
  REGION 1..978: note = engineered CasX variant
QEIKRINKIRRRLVKDSNTKKAGKTGPMKTLLVRVMTPDLRERLENLRKKPENIPQPISNTSRANLNKLLTDYTEMKKAILHVYWEEFQKDPVGLMSRVAQPASKKIDQNKLKPEMDEKGNLTTAGFACSQCGQPLFVYKLEQVSEKGKAYTNYFGRCNVAEHEKLILLAQLKPEKDSDEAVTYSLGKFGQRALDFYSIHVTKESTHPVKPLAQIAGNRYASGPVGKALSDACMGTIASFLSKYQDIIIEHQKVVKGNQKRLESLRELAGKENLEYPSVTLPPQPHTKEGVDAYNEVIARVRMWVNLNLWQKLKLSRDDAKPLLRLKGFPSFPLVERQANEVDWWDMVCNVKKLINEKKEDGKVFWQNLAGYKRQEALRPYLSSEEDRKKGKKFARYQLGDLLLHLEKKHGEDWGKVYDEAWERIDKKVEGLSKHIKLEEERRSEDAQSKAALTDWLRAKASFVIEGLKEADKDEFCRCELKLQKWYGDLRGKPFAIEAENSILDISGFSKQYNCAFIWQKDGVKKLNLYLIINYFKGGKLRFKKIKPEAFEANRFYTVINKKSGEIVPMEVNFNFDDPNLIILPLAFGKRQGREFIWNDLLSLETGSLKLANGRVIEKTLYNRRTRQDEPALFVALTFERREVLDSSNIKPMNLIGVDRGENIPAVIALTDPEGCPLSRFNDSLGNPTHILRIGESYKSKQRTIQAKKEVEQRRAGGYSRKYASKAKNLADDMVRNTARDLLYYAVTQDAMLIFENLSRGFGRQGKRTFMAERQYTRMEDWLTAKLAYEGLPSKTYLSKTLAQYTSKTCSNCGFTITSADYDRVLEKLKKTATGWMTTINGKELKVEGQITYYNRYKRQNVVKDLSVELDRLSEESVNNDISSWTKGRSGEALSLLKKRFSHRPVQEKFVCLNCGFETHADEQAALNIARSWLFLRSQEYKKYQTNKTTGNTDKRAFVETWQSFYRKKLKEVWKPAV

SEQ ID NO: 25839 - protein, 978 aa, synthetic construct
  REGION 1..978: note = engineered CasX variant
QEIKRINKIRRRLVKDSNTKKAGKTGPMKTLLVRVMTPDLRERLENLRKKPENIPQPISNTSRANLNKLLTDYTEMKKAILHVYWEEFQKDPVGLMSRVAQPASKKIDQNKLKPEMDEKGNLTTAGFACSQCGQPLFVYKLEQVSEKGKAYTNYFGRCNVAEHEKLILLAQLKPEKDSDEAVTYSLGKFGQRALDFYSIHVTKESTHPVKPLAQIAGNRYASGPVGKALSDACMGTIASFLSKYQDIIIEHQKVVKGNQKRLESLRELAGKENLEYPSVTLPPQPHTKEGVDAYNEVIARVRMWVNLNLWQKLKLSRDDAKPLLRLKGFPSFPLVERQANEVDWWDMVCNVKKLINEKKEDGKVFWQNLAGYKRQEALRPYLSSEEDRKKGKKFARYQLGDLLLHLEKKHGEDWGKVYDEAWERIDKKVEGLSKHIKLEEERRSEDAQSKAALTDWLRAKASFVIEGLKEADKDEFCRCELKLQKWYGDLRGKPFAIEAENSILDISGFSKQYNCAFIWQKDGVKKLNLYLIINYFKGGKLRFKKIKPEAFEANRFYTVINKKSGEIVPMEVNFNFDDPNLIILPLAFGKRQGREFIWNDLLSLETGSLKLANGRVIEKTLYNRRTRQDEPALFVALTFERREVLDSSNIKPMNLIGVDRGENIPAVIALTDPEGCPLSRFNDSLGNPTHILRIGESYKEKQRTIQASKEVEQRRAGGYSRKYASKAKNLADDMVRNTARDLLYYAVTQDAMLIFENLSRGFGRQGKRTFMAERQYTRMEDWLTAKLAYEGLPSKTYLSKTLAQYTSKTCSNCGFTITSADYDRVLEKLKKTATGWMTTINGKELKVEGQITYYNRYKRQNVVKDLSVELDRLSEESVNNDISSWTKGRSGEALSLLKKRFSHRPVQEKFVCLNCGFETHADEQAALNIARSWLFLRSQEYKKYQTNKTTGNTDKRAFVETWQSFYRKKLKEVWKPAV

SEQ ID NO: 25840 - protein, 978 aa, synthetic construct
  REGION 1..978: note = engineered CasX variant
QEIKRINKIRRRLVKDSNTKKAGKTGPMKTLLVRVMTPDLRERLENLRKKPENIPQPISNTSRANLNKLLTDYTEMKKAILHVYWEEFQKDPVGLMSRVAQPASKKIDQNKLKPEMDEKGNLTTAGFACSQCGQPLFVYKLEQVSEKGKAYTNYFGRCNVAEHEKLILLAQLKPEKDSDEAVTYSLGKFGQRALDFYSIHVTKESTHPVKPLAQIAGNRYASGPVGKALSDACMGTIASFLSKYQDIIIEHQKVVKGNQKRLESLRELAGKENLEYPSVTLPPQPHTKEGVDAYNEVIARVRMWVNLNLWQKLKLSRDDAKPLLRLKGFPSFPLVERQANEVDWWDMVCNVKKLINEKKEDGKVFWQNLAGYKRQEALRPYLSSEEDRKKGKKFARYQLGDLLLHLEKKHGEDWGKVYDEAWERIDKKVEGLSKHIKLEEERRSEDAQSKAALTDWLRAKASFVIEGLKEADKDEFCRCELKLQKWYGDLRGKPFAIEAENSILDISGFSKQYNCAFIWQKDGVKKLNLYLIINYFKGGKLRFKKIKPEAFEANRFYTVINKKSGEIVPMEVNFNFDDPNLIILPLAFGKRQGREFIWNDLLSLETGSLKLANGRVIEKTLYNRRTRQDEPALFVALTFERREVLDSSNIKPMNLIGVDRGENIPAVIALTDPEGCPLSRFNDSLGNPTHILRIGESYKEKQRTIQANKEVTQRRAGGYSRKYASKAKNLADDMVRNTARDLLYYAVTQDAMLIFENLSRGFGRQGKRTFMAERQYTRMEDWLTAKLAYEGLPSKTYLSKTLAQYTSKTCSNCGFTITSADYDRVLEKLKKTATGWMTTINGKELKVEGQITYYNRYKRQNVVKDLSVELDRLSEESVNNDISSWTKGRSGEALSLLKKRFSHRPVQEKFVCLNCGFETHADEQAALNIARSWLFLRSQEYKKYQTNKTTGNTDKRAFVETWQSFYRKKLKEVWKPAV

SEQ ID NO: 25841 - protein, 978 aa, synthetic construct
  REGION 1..978: note = engineered CasX variant
QEIKRINKIRRRLVKDSNTKKAGKTGPMKTLLVRVMTPDLRERLENLRKKPENIPQPISNTSRANLNKLLTDYTEMKKAILHVYWEEFQKDPVGLMSRVAQPASKKIDQNKLKPEMDEKGNLTTAGFACSQCGQPLFVYKLEQVSEKGKAYTNYFGRCNVAEHEKLILLAQLKPEKDSDEAVTYSLGKFGQRALDFYSIHVTKESTHPVKPLAQIAGNRYASGPVGKALSDACMGTIASFLSKYQDIIIEHQKVVKGNQKRLESLRELAGKENLEYPSVTLPPQPHTKEGVDAYNEVIARVRMWVNLNLWQKLKLSRDDAKPLLRLKGFPSFPLVERQANEVDWWDMVCNVKKLINEKKEDGKVFWQNLAGYKRQEALRPYLSSEEDRKKGKKFARYQLGDLLLHLEKKHGEDWGKVYDEAWERIDKKVEGLSKHIKLEEERRSEDAQSKAALTDWLRAKASFVIEGLKEADKDEFCRCELKLQKWYGDLRGKPFAIEAENSILDISGFSKQYNCAFIWQKDGVKKLNLYLIINYFKGGKLRFKKIKPEAFEANRFYTVINKKSGEIVPMEVNFNFDDPNLIILPLAFGKRQGREFIWNDLLSLETGSLKLANGRVIEKTLYNRRTRQDEPALFVALTFERREVLDSSNIKPMNLIGVDRGENIPAVIALTDPEGCPLSRFNDSLGNPTHILRIGESYKEKQRTIQANKEVEQRRAGGYSRKYASKAKNLADDMVRNTARDLLYYAVTQDAMLIFENLSRGFGRQGKRTFMAERQYTRMEDWLTAKLAYEGLPSKTYLSKTLAQYTSKTCSNCGFTITSADYDRVLEKLKKTATGWMTTINGKELKVEGQITYYNRYKRQNVVKDLSVELDRLSEESVNNDISSWTKGRSGEALSLLKKRFSHRPVQEKFVCLNCGFETHADEQAALNIARSWLFLRSQEYKKYQTNKTTGNTDKRAFVETWQSFYRKKLKEVWKPAV

SEQ ID NO: 25842 - protein, 978 aa, synthetic construct
  REGION 1..978: note = engineered CasX variant
QEIKRINKIRRRLVKDSNTKKAGKTGPMKTLLVRVMTPDLRERLENLRKKPENIPQPISNTSRANLNKLLTDYTEMKKAILHVYWEEFQKDPVGLMSRVAQPASKKIDQNKLKPEMDEKGNLTTAGFACSQCGQPLFVYKLEQVSEKGKAYTNYFGRCNVAEHEKLILLAQLKPEKDSDEAVTYSLGKFGQRALDFYSIHVTKESTHPVKPLAQIAGNRYASGPVGKALSDACMGTIASFLSKYQDIIIEHQKVVKGNQKRLESLRELAGKENLEYPSVTLPPQPHTKEGVDAYNEVIARVRMWVNLNLWQKLKLSRDDAKPLLRLKGFPSFPLVERQANEVDWWDMVCNVKKLINEKKEDGKVFWQNLAGYKRQEALRPYLSSEEDRKKGKKFARYQLGDLLLHLEKKHGEDWGKVYDEAWERIDKKVEGLSKHIKLEEERRSEDAQSKAALTDWLRAKASFVIEGLKEADKDEFCRCELKLQKWYGDLRGKPFAIEAENSILDISGFSKQYNCAFIWQKDGVKKLNLYLIINYFKGGKLRFKKIKPEAFEANRFYTVINKKSGEIVPMEVNFNFDDPNLIILPLAFGKRQGREFIWNDLLSLETGSLKLANGRVIEKTLYNRRTRQDEPALFVALTFERREVLDSSNIKPMNLIGVDRGENIPAVIALTDPEGCPLSRFNDSLGNPTHILRIGESYKEKQRTIQAKKEVTQRRAGGYSRKYASKAKNLADDMVRNTARDLLYYAVTQDAMLIFENLSRGFGRQGKRTFMAERQYTRMEDWLTAKLAYEGLPSKTYLSKTLAQYTSKTCSNCGFTITSADYDRVLEKLKKTATGWMTTINGKELKVEGQITYYNRYKRQNVVKDLSVELDRLSEESVNNDISSWTKGRSGEALSLLKKRFSHRPVQEKFVCLNCGFETHADEQAALNIARSWLFLRSQEYKKYQTNKTTGNTDKRAFVETWQSFYRKKLKEVWKPAV

SEQ ID NO: 25843 - protein, 978 aa, synthetic construct
  REGION 1..978: note = engineered CasX variant
QEIKRINKIRRRLVKDSNTKKAGKTGPMKTLLVRVMTPDLRERLENLRKKPENIPQPISNTSRANLNKLLTDYTEMKKAILHVYWEEFQKDPVGLMSRVAQPASKKIDQNKLKPEMDEKGNLTTAGFACSQCGQPLFVYKLEQVSEKGKAYTNYFGRCNVAEHEKLILLAQLKPEKDSDEAVTYSLGKFGQRALDFYSIHVTKESTHPVKPLAQIAGNRYASGPVGKALSDACMGTIASFLSKYQDIIIEHQKVVKGNQKRLESLRELAGKENLEYPSVTLPPQPHTKEGVDAYNEVIARVRMWVNLNLWQKLKLSRDDAKPLLRLKGFPSFPLVERQANEVDWWDMVCNVKKLINEKKEDGKVFWQNLAGYKRQEALRPYLSSEEDRKKGKKFARYQLGDLLLHLEKKHGEDWGKVYDEAWERIDKKVEGLSKHIKLEEERRSEDAQSKAALTDWLRAKASFVIEGLKEADKDEFCRCELKLQKWYGDLRGKPFAIEAENSILDISGFSKQYNCAFIWQKDGVKKLNLYLIINYFKGGKLRFKKIKPEAFEANRFYTVINKKSGEIVPMEVNFNFDDPNLIILPLAFGKRQGREFIWNDLLSLETGSLKLANGRVIEKTLYNRRTRQDEPALFVALTFERREVLDSSNIKPMNLIGVDRGENIPAVIALTDPEGCPLSRFNDSLGNPTHILRIGESYKEKQRTIQAKKEVEQRRAGGYSRKYASKAKNLADDMVRNTARDLLYYAVTQDAMLIFENLSRGFGRQGKRTFMAERQYTRMEDWLTAKLAYEGLPSKTYLSKTLAQYTSKTCSNCGFTITSADYDRVLEKLKKTATGWMTTINGKELKVEGQITYYNRYKRQNVVKDLSVELDRLSEESVNNDISSWTKGRSGEALSLLKKRFSHRPVQEKFVCLNCGFETHADEQAALNIARSWLFLRSQEYKKYQTNKTTGNTDKRAFVETWQSFYRKKLKEVWKPAV

SEQ ID NO: 25844 - protein, 978 aa, synthetic construct
  REGION 1..978: note = engineered CasX variant
QEIKRINKIRRRLVKDSNTKKAGKTGPMKTLLVRVMTPDLRERLENLRKKPENIPQPISNTSRANLNKLLTDYTEMKKAILHVYWEEFQKDPVGLMSRVAQPASKKIDQNKLKPEMDEKGNLTTAGFACSQCGQPLFVYKLEQVSEKGKAYTNYFGRCNVAEHEKLILLAQLKPEKDSDEAVTYSLGKFGQRALDFYSIHVTKESTHPVKPLAQIAGNRYASGPVGKALSDACMGTIASFLSKYQDIIIEHQKVVKGNQKRLESLRELAGKENLEYPSVTLPPQPHTKEGVDAYNEVIARVRMWVNLNLWQKLKLSRDDAKPLLRLKGFPSFPLVERQANEVDWWDMVCNVKKLINEKKEDGKVFWQNLAGYKRQEALRPYLSSEEDRKKGKKFARYQLGDLLLHLEKKHGEDWGKVYDEAWERIDKKVEGLSKHIKLEEERRSEDAQSKAALTDWLRAKASFVIEGLKEADKDEFCRCELKLQKWYGDLRGKPFAIEAENSILDISGFSKQYNCAFIWQKDGVKKLNLYLIINYFKGGKLRFKKIKPEAFEANRFYTVINKKSGEIVPMEVNFNFDDPNLIILPLAFGKRQGREFIWNDLLSLETGSLKLANGRVIEKTLYNRRTRQDEPALFVALTFERREVLDSSNIKPMNLIGVDRGENIPAVIALTDPEGCPLSRFNDSLGNPTHILRIGESYKEKQRTIQAKKEMEQRRAGGYSRKYASKAKNLADDMVRNTARDLLYYAVTQDAMLIFENLSRGFGRQGKRTFMAERQYTRMEDWLTAKLAYEGLPSKTYLSKTLAQYTSKTCSNCGFTITSADYDRVLEKLKKTATGWMTTINGKELKVEGQITYYNRYKRQNVVKDLSVELDRLSEESVNNDISSWTKGRSGEALSLLKKRFSHRPVQEKFVCLNCGFETHADEQAALNIARSWLFLRSQEYKKYQTNKTTGNTDKRAFVETWQSFYRKKLKEVWKPAV

SEQ ID NO: 25845 - protein, 978 aa, synthetic construct
  REGION 1..978: note = engineered CasX variant
QEIKRINKIRRRLVKDSNTKKAGKTGPMKTLLVRVMTPDLRERLENLRKKPENIPQPISNTSRANLNKLLTDYTEMKKAILHVYWEEFQKDPVGLMSRVAQPASKKIDQNKLKPEMDEKGNLTTAGFACSQCGQPLFVYKLEQVSEKGKAYTNYFGRCNVAEHEKLILLAQLKPEKDSDEAVTYSLGKFGQRALDFYSIHVTKESTHPVKPLAQIAGNRYASGPVGKALSDACMGTIASFLSKYQDIIIEHQKVVKGNQKRLESLRELAGKENLEYPSVTLPPQPHTKEGVDAYNEVIARVRMWVNLNLWQKLKLSRDDAKPLLRLKGFPSFPLVERQANEVDWWDMVCNVKKLINEKKEDGKVFWQNLAGYKRQEALRPYLSSEEDRKKGKKFARYQLGDLLLHLEKKHGEDWGKVYDEAWERIDKKVEGLSKHIKLEEERRSEDAQSKAALTDWLRAKASFVIEGLKEADKDEFCRCELKLQKWYGDLRGKPFAIEAENSILDISGFSKQYNCAFIWQKDGVKKLNLYLIINYFKGGKLRFKKIKPEAFEANRFYTVINKKSGEIVPMEVNFNFDDPNLIILPLAFGKRQGREFIWNDLLSLETGSLKLANGRVIEKTLYNRRTRQDEPALFVALTFERREVLDSSNIKPMNLIGVDRGENIPAVIALTDPEGCPLSRFNDSLGNPTHILRIGESYKEKQRTIQAAKEVEQRRAGGYSRKYASKAKNLADDMVRNTARDLLYYAVTQDAMLIFENLSRGFGRQGKRTFMAERQYTRMEDWLTAKLAYEGLPSKTYLSKTLAQYTSKTCSNCGFTITSADYDRVLEKLKKTATGWMTTINGKELKVEGQITYYNRYKRQNVVKDLSVELDRLSEESVNNDISSWTKGRSGEALSLLKKRFSHRPVQEKFVCLNCGFETHADEQAALNIARSWLFLRSQEYKKYQTNKTTGNTDKRAFVETWQSFYRKKLKEVWKPAV

SEQ ID NO: 25846 - protein, 978 aa, synthetic construct
  REGION 1..978: note = engineered CasX variant
QEIKRINKIRRRLVKDSNTKKAGKTGPMKTLLVRVMTPDLRERLENLRKKPENIPQPISNTSRANLNKLLTDYTEMKKAILHVYWEEFQKDPVGLMSRVAQPASKKIDQNKLKPEMDEKGNLTTAGFACSQCGQPLFVYKLEQVSEKGKAYTNYFGRCNVAEHEKLILLAQLKPEKDSDEAVTYSLGKFGQRALDFYSIHVTKESTHPVKPLAQIAGNRYASGPVGKALSDACMGTIASFLSKYQDIIIEHQKVVKGNQKRLESLRELAGKENLEYPSVTLPPQPHTKEGVDAYNEVIARVRMWVNLNLWQKLKLSRDDAKPLLRLKGFPSFPLVERQANEVDWWDMVCNVKKLINEKKEDGKVFWQNLAGYKRQEALRPYLSSEEDRKKGKKFARYQLGDLLLHLEKKHGEDWGKVYDEAWERIDKKVEGLSKHIKLEEERRSEDAQSKAALTDWLRAKASFVIEGLKEADKDEFCRCELKLQKWYGDLRGKPFAIEAENSILDISGFSKQYNCAFIWQKDGVKKLNLYLIINYFKGGKLRFKKIKPEAFEANRFYTVINKKSGEIVPMEVNFNFDDPNLIILPLAFGKRQGREFIWNDLLSLETGSLKLANGRVIEKTLYNRRTRQDEPALFVALTFERREVLDSSNIKPMNLIGVDRGENIPAVIALTDPEGCPLSRFNDSLGNPTHILRIGEAYKEKQRTIQAKKEVEQRRAGGYSRKYASKAKNLADDMVRNTARDLLYYAVTQDAMLIFENLSRGFGRQGKRTFMAERQYTRMEDWLTAKLAYEGLPSKTYLSKTLAQYTSKTCSNCGFTITSADYDRVLEKLKKTATGWMTTINGKELKVEGQITYYNRYKRQNVVKDLSVELDRLSEESVNNDISSWTKGRSGEALSLLKKRFSHRPVQEKFVCLNCGFETHADEQAALNIARSWLFLRSQEYKKYQTNKTTGNTDKRAFVETWQSFYRKKLKEVWKPAV

SEQ ID NO: 25847 - protein, 978 aa, synthetic construct
  REGION 1..978: note = engineered CasX variant
QEIKRINKIRRRLVKDSNTKKAGKTGPMKTLLVRVMTPDLRERLENLRKKPENIPQPISNTSRANLNKLLTDYTEMKKAILHVYWEEFQKDPVGLMSRVAQPASKKIDQNKLKPEMDEKGNLTTAGFACSQCGQPLFVYKLEQVSEKGKAYTNYFGRCNVAEHEKLILLAQLKPEKDSDEAVTYSLGKFGQRALDFYSIHVTKESTHPVKPLAQIAGNRYASGPVGKALSDACMGTIASFLSKYQDIIIEHQKVVKGNQKRLESLRELAGKENLEYPSVTLPPQPHTKEGVDAYNEVIARVRMWVNLNLWQKLKLSRDDAKPLLRLKGFPSFPLVERQANEVDWWDMVCNVKKLINEKKEDGKVFWQNLAGYKRQEALRPYLSSEEDRKKGKKFARYQLGDLLLHLEKKHGEDWGKVYDEAWERIDKKVEGLSKHIKLEEERRSEDAQSKAALTDWLRAKASFVIEGLKEADKDEFCRCELKLQKWYGDLRGKPFAIEAENSILDISGFSKQYNCAFIWQKDGVKKLNLYLIINYFKGGKLRFKKIKPEAFEANRFYTVINKKSGEIVPMEVNFNFDDPNLIILPLAFGKRQGREFIWNDLLSLETGSLKLANGRVIEKTLYNRRTRQDEPALFVALTFERREVLDSSNIKPMNLIGVDRGENIPAVIALTDPEGCPLSRFMDSLGNPTHILRIGESYKEKQRTIQAKKEVMQRRAGGYSRKYASKAKNLADDMVRNTARDLLYYAVTQDAMLIFENLSRGFGRQGKRTFMAERQYTRMEDWLTAKLAYEGLPSKTYLSKTLAQYTSKTCSNCGFTITSADYDRVLEKLKKTATGWMTTINGKELKVEGQITYYNRYKRQNVVKDLSVELDRLSEESVNNDISSWTKGRSGEALSLLKKRFSHRPVQEKFVCLNCGFETHADEQAALNIARSWLFLRSQEYKKYQTNKTTGNTDKRAFVETWQSFYRKKLKEVWKPAV

SEQ ID NO: 25848 - protein, 978 aa, synthetic construct
  REGION 1..978: note = engineered CasX variant
QEIKRINKIRRRLVKDSNTKKAGKTGPMKTLLVRVMTPDLRERLENLRKKPENIPQPISNTSRANLNKLLTDYTEMKKAILHVYWEEFQKDPVGLMSRVAQPASKKIDQNKLKPEMDEKGNLTTAGFACSQCGQPLFVYKLEQVSEKGKAYTNYFGRCNVAEHEKLILLAQLKPEKDSDEAVTYSLGKFGQRALDFYSIHVTKESTHPVKPLAQIAGNRYASGPVGKALSDACMGTIASFLSKYQDIIIEHQKVVKGNQKRLESLRELAGKENLEYPSVTLPPQPHTKEGVDAYNEVIARVRMWVNLNLWQKLKLSRDDAKPLLRLKGFPSFPLVERQANEVDWWDMVCNVKKLINEKKEDGKVFWQNLAGYKRQEALRPYLSSEEDRKKGKKFARYQLGDLLLHLEKKHGEDWGKVYDEAWERIDKKVEGLSKHIKLEEERRSEDAQSKAALTDWLRAKASFVIEGLKEADKDEFCRCELKLQKWYGDLRGKPFAIEAENSILDISGFSKQYNCAFIWQKDGVKKLNLYLIINYFKGGKLRFKKIKPEAFEANRFYTVINKKSGEIVPMEVNFNFDDPNLIILPLAFGKRQGREFIWNDLLSLETGSLKLANGRVIEKTLYNRRTRQDEPALFVALTFERREVLDSSNIKPMNLIGVDRGENIPAVIALTDPEGCPLSRFMDSLGNPTHILRIGESYKEKQRTIQAKKEVEQRRAGGYSRKYASKAKNLADDMVRNTARDLLYYAVTQDAMLIFENLSRGFGRQGKRTFMAERQYTRMEDWLTAKLAYEGLPSKTYLSKTLAQYTSKTCSNCGFTITSADYDRVLEKLKKTATGWMTTINGKELKVEGQITYYNRYKRQNVVKDLSVELDRLSEESVNNDISSWTKGRSGEALSLLKKRFSHRPVQEKFVCLNCGFETHADEQAALNIARSWLFLRSQEYKKYQTNKTTGNTDKRAFVETWQSFYRKKLKEVWKPAV

SEQ ID NO: 25849 - protein, 978 aa, synthetic construct
  REGION 1..978: note = engineered CasX variant
QEIKRINKIRRRLVKDSNTKKAGKTGPMKTLLVRVMTPDLRERLENLRKKPENIPQPISNTSRANLNKLLTDYTEMKKAILHVYWEEFQKDPVGLMSRVAQPASKKIDQNKLKPEMDEKGNLTTAGFACSQCGQPLFVYKLEQVSEKGKAYTNYFGRCNVAEHEKLILLAQLKPEKDSDEAVTYSLGKFGQRALDFYSIHVTKESTHPVKPLAQIAGNRYASGPVGKALSDACMGTIASFLSKYQDIIIEHQKVVKGNQKRLESLRELAGKENLEYPSVTLPPQPHTKEGVDAYNEVIARVRMWVNLNLWQKLKLSRDDAKPLLRLKGFPSFPLVERQANEVDWWDMVCNVKKLINEKKEDGKVFWQNLAGYKRQEALRPYLSSEEDRKKGKKFARYQLGDLLLHLEKKHGEDWGKVYDEAWERIDKKVEGLSKHIKLEEERRSEDAQSKAALTDWLRAKASFVIEGLKEADKDEFCRCELKLQKWYGDLRGKPFAIEAENSILDISGFSKQYNCAFIWQKDGVKKLNLYLIINYFKGGKLRFKKIKPEAFEANRFYTVINKKSGEIVPMEVNFNFDDPNLIILPLAFGKRQGREFIWNDLLSLETGSLKLANGRVIEKTLYNRRTRQDEPALFVALTFERREVLDSSNIKPMNLIGVDRGENIPAVIALTDPEGCPLSRFLDSLGNPTHILRIGESYKMKQRTIQAKKEVEQRRAGGYSRKYASKAKNLADDMVRNTARDLLYYAVTQDAMLIFENLSRGFGRQGKRTFMAERQYTRMEDWLTAKLAYEGLPSKTYLSKTLAQYTSKTCSNCGFTITSADYDRVLEKLKKTATGWMTTINGKELKVEGQITYYNRYKRQNVVKDLSVELDRLSEESVNNDISSWTKGRSGEALSLLKKRFSHRPVQEKFVCLNCGFETHADEQAALNIARSWLFLRSQEYKKYQTNKTTGNTDKRAFVETWQSFYRKKLKEVWKPAV

SEQ ID NO: 25850 - protein, 978 aa, synthetic construct
  REGION 1..978: note = engineered CasX variant
QEIKRINKIRRRLVKDSNTKKAGKTGPMKTLLVRVMTPDLRERLENLRKKPENIPQPISNTSRANLNKLLTDYTEMKKAILHVYWEEFQKDPVGLMSRVAQPASKKIDQNKLKPEMDEKGNLTTAGFACSQCGQPLFVYKLEQVSEKGKAYTNYFGRCNVAEHEKLILLAQLKPEKDSDEAVTYSLGKFGQRALDFYSIHVTKESTHPVKPLAQIAGNRYASGPVGKALSDACMGTIASFLSKYQDIIIEHQKVVKGNQKRLESLRELAGKENLEYPSVTLPPQPHTKEGVDAYNEVIARVRMWVNLNLWQKLKLSRDDAKPLLRLKGFPSFPLVERQANEVDWWDMVCNVKKLINEKKEDGKVFWQNLAGYKRQEALRPYLSSEEDRKKGKKFARYQLGDLLLHLEKKHGEDWGKVYDEAWERIDKKVEGLSKHIKLEEERRSEDAQSKAALTDWLRAKASFVIEGLKEADKDEFCRCELKLQKWYGDLRGKPFAIEAENSILDISGFSKQYNCAFIWQKDGVKKLNLYLIINYFKGGKLRFKKIKPEAFEANRFYTVINKKSGEIVPMEVNFNFDDPNLIILPLAFGKRQGREFIWNDLLSLETGSLKLANGRVIEKTLYNRRTRQDEPALFVALTFERREVLDSSNIKPMNLIGVDRGENIPAVIALTDPEGCPLSRFLDSLGNPTHILRIGESYKEKQRTIQAKKEVEQRRAGGYSRKYASKAKNLADDMVRNTARDLLYYAVTQDAMLIFENLSRGFGRQGKRTFMAERQYTRMEDWLTAKLAYEGLPSKTYLSKTLAQYTSKTCSNCGFTITSADYDRVLEKLKKTATGWMTTINGKELKVEGQITYYNRYKRQNVVKDLSVELDRLSEESVNNDISSWTKGRSGEALSLLKKRFSHRPVQEKFVCLNCGFETHADEQAALNIARSWLFLRSQEYKKYQTNKTTGNTDKRAFVETWQSFYRKKLKEVWKPAV

SEQ ID NO: 25851 - protein, 978 aa, synthetic construct
  REGION 1..978: note = engineered CasX variant
QEIKRINKIRRRLVKDSNTKKAGKTGPMKTLLVRVMTPDLRERLENLRKKPENIPQPISNTSRANLNKLLTDYTEMKKAILHVYWEEFQKDPVGLMSRVAQPASKKIDQNKLKPEMDEKGNLTTAGFACSQCGQPLFVYKLEQVSEKGKAYTNYFGRCNVAEHEKLILLAQLKPEKDSDEAVTYSLGKFGQRALDFYSIHVTKESTHPVKPLAQIAGNRYASGPVGKALSDACMGTIASFLSKYQDIIIEHQKVVKGNQKRLESLRELAGKENLEYPSVTLPPQPHTKEGVDAYNEVIARVRMWVNLNLWQKLKLSRDDAKPLLRLKGFPSFPLVERQANEVDWWDMVCNVKKLINEKKEDGKVFWQNLAGYKRQEALRPYLSSEEDRKKGKKFARYQLGDLLLHLEKKHGEDWGKVYDEAWERIDKKVEGLSKHIKLEEERRSEDAQSKAALTDWLRAKASFVIEGLKEADKDEFCRCELKLQKWYGDLRGKPFAIEAENSILDISGFSKQYNCAFIWQKDGVKKLNLYLIINYFKGGKLRFKKIKPEAFEANRFYTVINKKSGEIVPMEVNFNFDDPNLIILPLAFGKRQGREFIWNDLLSLETGSLKLANGRVIEKTLYNRRTRQDEPALFVALTFERREVLDSSNIKPMNLIGVDRGENIPAVIALTDPEGCPLSRFLDSLGNPTHILRIGESYKEKQRAIQAKKEVEQRRAGGYSRKYASKAKNLADDMVRNTARDLLYYAVTQDAMLIFENLSRGFGRQGKRTFMAERQYTRMEDWLTAKLAYEGLPSKTYLSKTLAQYTSKTCSNCGFTITSADYDRVLEKLKKTATGWMTTINGKELKVEGQITYYNRYKRQNVVKDLSVELDRLSEESVNNDISSWTKGRSGEALSLLKKRFSHRPVQEKFVCLNCGFETHADEQAALNIARSWLFLRSQEYKKYQTNKTTGNTDKRAFVETWQSFYRKKLKEVWKPAV

SEQ ID NO: 25852 - protein, 978 aa, synthetic construct
  REGION 1..978: note = engineered CasX variant
QEIKRINKIRRRLVKDSNTKKAGKTGPMKTLLVRVMTPDLRERLENLRKKPENIPQPISNTSRANLNKLLTDYTEMKKAILHVYWEEFQKDPVGLMSRVAQPASKKIDQNKLKPEMDEKGNLTTAGFACSQCGQPLFVYKLEQVSEKGKAYTNYFGRCNVAEHEKLILLAQLKPEKDSDEAVTYSLGKFGQRALDFYSIHVTKESTHPVKPLAQIAGNRYASGPVGKALSDACMGTIASFLSKYQDIIIEHQKVVKGNQKRLESLRELAGKENLEYPSVTLPPQPHTKEGVDAYNEVIARVRMWVNLNLWQKLKLSRDDAKPLLRLKGFPSFPLVERQANEVDWWDMVCNVKKLINEKKEDGKVFWQNLAGYKRQEALRPYLSSEEDRKKGKKFARYQLGDLLLHLEKKHGEDWGKVYDEAWERIDKKVEGLSKHIKLEEERRSEDAQSKAALTDWLRAKASFVIEGLKEADKDEFCRCELKLQKWYGDLRGKPFAIEAENSILDISGFSKQYNCAFIWQKDGVKKLNLYLIINYFKGGKLRFKKIKPEAFEANRFYTVINKKSGEIVPMEVNFNFDDPNLIILPLAFGKRQGREFIWNDLLSLETGSLKLANGRVIEKTLYNRRTRQDEPALFVALTFERREVLDSSNIKPMNLIGVDRGENIPAVIALTDPEGCPLSRFLDSLGNPTHILRIGESYKEKQRAIFAKKEVEQRRAGGYSRKYASKAKNLADDMVRNTARDLLYYAVTQDAMLIFENLSRGFGRQGKRTFMAERQYTRMEDWLTAKLAYEGLPSKTYLSKTLAQYTSKTCSNCGFTITSADYDRVLEKLKKTATGWMTTINGKELKVEGQITYYNRYKRQNVVKDLSVELDRLSEESVNNDISSWTKGRSGEALSLLKKRFSHRPVQEKFVCLNCGFETHADEQAALNIARSWLFLRSQEYKKYQTNKTTGNTDKRAFVETWQSFYRKKLKEVWKPAV

SEQ ID NO: 25853 - protein, 978 aa, synthetic construct
  REGION 1..978: note = engineered CasX variant
QEIKRINKIRRRLVKDSNTKKAGKTGPMKTLLVRVMTPDLRERLENLRKKPENIPQPISNTSRANLNKLLTDYTEMKKAILHVYWEEFQKDPVGLMSRVAQPASKKIDQNKLKPEMDEKGNLTTAGFACSQCGQPLFVYKLEQVSEKGKAYTNYFGRCNVAEHEKLILLAQLKPEKDSDEAVTYSLGKFGQRALDFYSIHVTKESTHPVKPLAQIAGNRYASGPVGKALSDACMGTIASFLSKYQDIIIEHQKVVKGNQKRLESLRELAGKENLEYPSVTLPPQPHTKEGVDAYNEVIARVRMWVNLNLWQKLKLSRDDAKPLLRLKGFPSFPLVERQANEVDWWDMVCNVKKLINEKKEDGKVFWQNLAGYKRQEALRPYLSSEEDRKKGKKFARYQLGDLLLHLEKKHGEDWGKVYDEAWERIDKKVEGLSKHIKLEEERRSEDAQSKAALTDWLRAKASFVIEGLKEADKDEFCRCELKLQKWYGDLRGKPFAIEAENSILDISGFSKQYNCAFIWQKDGVKKLNLYLIINYFKGGKLRFKKIKPEAFEANRFYTVINKKSGEIVPMEVNFNFDDPNLIILPLAFGKRQGREFIWNDLLSLETGSLKLANGRVIEKTLYNRRTRQDEPALFVALTFERREVLDSSNIKPMNLIGVDRGENIPAVIALTDPEGCPLSRFKNSLGNPTHILRIGESYKEKQRTIQAKKEVEQRRAGGYSRKYASKAKNLADDMVRNTARDLLYYAVTQDAMLIFENLSRGFGRQGKRTFMAERQYTRMEDWLTAKLAYEGLPSKTYLSKTLAQYTSKTCSNCGFTITSADYDRVLEKLKKTATGWMTTINGKELKVEGQITYYNRYKRQNVVKDLSVELDRLSEESVNNDISSWTKGRSGEALSLLKKRFSHRPVQEKFVCLNCGFETHADEQAALNIARSWLFLRSQEYKKYQTNKTTGNTDKRAFVETWQSFYRKKLKEVWKPAV

SEQ ID NO: 25854 - protein, 978 aa, synthetic construct
  REGION 1..978: note = engineered CasX variant
QEIKRINKIRRRLVKDSNTKKAGKTGPMKTLLVRVMTPDLRERLENLRKKPENIPQPISNTSRANLNKLLTDYTEMKKAILHVYWEEFQKDPVGLMSRVAQPASKKIDQNKLKPEMDEKGNLTTAGFACSQCGQPLFVYKLEQVSEKGKAYTNYFGRCNVAEHEKLILLAQLKPEKDSDEAVTYSLGKFGQRALDFYSIHVTKESTHPVKPLAQIAGNRYASGPVGKALSDACMGTIASFLSKYQDIIIEHQKVVKGNQKRLESLRELAGKENLEYPSVTLPPQPHTKEGVDAYNEVIARVRMWVNLNLWQKLKLSRDDAKPLLRLKGFPSFPLVERQANEVDWWDMVCNVKKLINEKKEDGKVFWQNLAGYKRQEALRPYLSSEEDRKKGKKFARYQLGDLLLHLEKKHGEDWGKVYDEAWERIDKKVEGLSKHIKLEEERRSEDAQSKAALTDWLRAKASFVIEGLKEADKDEFCRCELKLQKWYGDLRGKPFAIEAENSILDISGFSKQYNCAFIWQKDGVKKLNLYLIINYFKGGKLRFKKIKPEAFEANRFYTVINKKSGEIVPMEVNFNFDDPNLIILPLAFGKRQGREFIWNDLLSLETGSLKLANGRVIEKTLYNRRTRQDEPALFVALTFERREVLDSSNIKPMNLIGVDRGENIPAVIALTDPEGCPLSRFKNSLGNPTHILRIGESYKEKQRTIQACKEVEQRRAGGYSRKYASKAKNLADDMVRNTARDLLYYAVTQDAMLIFENLSRGFGRQGKRTFMAERQYTRMEDWLTAKLAYEGLPSKTYLSKTLAQYTSKTCSNCGFTITSADYDRVLEKLKKTATGWMTTINGKELKVEGQITYYNRYKRQNVVKDLSVELDRLSEESVNNDISSWTKGRSGEALSLLKKRFSHRPVQEKFVCLNCGFETHADEQAALNIARSWLFLRSQEYKKYQTNKTTGNTDKRAFVETWQSFYRKKLKEVWKPAV

SEQ ID NO: 25855 - protein, 978 aa, synthetic construct
  REGION 1..978: note = engineered CasX variant
QEIKRINKIRRRLVKDSNTKKAGKTGPMKTLLVRVMTPDLRERLENLRKKPENIPQPISNTSRANLNKLLTDYTEMKKAILHVYWEEFQKDPVGLMSRVAQPASKKIDQNKLKPEMDEKGNLTTAGFACSQCGQPLFVYKLEQVSEKGKAYTNYFGRCNVAEHEKLILLAQLKPEKDSDEAVTYSLGKFGQRALDFYSIHVTKESTHPVKPLAQIAGNRYASGPVGKALSDACMGTIASFLSKYQDIIIEHQKVVKGNQKRLESLRELAGKENLEYPSVTLPPQPHTKEGVDAYNEVIARVRMWVNLNLWQKLKLSRDDAKPLLRLKGFPSFPLVERQANEVDWWDMVCNVKKLINEKKEDGKVFWQNLAGYKRQEALRPYLSSEEDRKKGKKFARYQLGDLLLHLEKKHGEDWGKVYDEAWERIDKKVEGLSKHIKLEEERRSEDAQSKAALTDWLRAKASFVIEGLKEADKDEFCRCELKLQKWYGDLRGKPFAIEAENSILDISGFSKQYNCAFIWQKDGVKKLNLYLIINYFKGGKLRFKKIKPEAFEANRFYTVINKKSGEIVPMEVNFNFDDPNLIILPLAFGKRQGREFIWNDLLSLETGSLKLANGRVIEKTLYNRRTRQDEPALFVALTFERREVLDSSNIKPMNLIGVDRGENIPAVIALTDPEGCPLSRFKDYLGNPTHILRIGESYKEKQRTKQAKKEVEQRRAGGYSRKYASKAKNLADDMVRNTARDLLYYAVTQDAMLIFENLSRGFGRQGKRTFMAERQYTRMEDWLTAKLAYEGLPSKTYLSKTLAQYTSKTCSNCGFTITSADYDRVLEKLKKTATGWMTTINGKELKVEGQITYYNRYKRQNVVKDLSVELDRLSEESVNNDISSWTKGRSGEALSLLKKRFSHRPVQEKFVCLNCGFETHADEQAALNIARSWLFLRSQEYKKYQTNKTTGNTDKRAFVETWQSFYRKKLKEVWKPAV

SEQ ID NO: 25856 - protein, 978 aa, synthetic construct
  REGION 1..978: note = engineered CasX variant
QEIKRINKIRRRLVKDSNTKKAGKTGPMKTLLVRVMTPDLRERLENLRKKPENIPQPISNTSRANLNKLLTDYTEMKKAILHVYWEEFQKDPVGLMSRVAQPASKKIDQNKLKPEMDEKGNLTTAGFACSQCGQPLFVYKLEQVSEKGKAYTNYFGRCNVAEHEKLILLAQLKPEKDSDEAVTYSLGKFGQRALDFYSIHVTKESTHPVKPLAQIAGNRYASGPVGKALSDACMGTIASFLSKYQDIIIEHQKVVKGNQKRLESLRELAGKENLEYPSVTLPPQPHTKEGVDAYNEVIARVRMWVNLNLWQKLKLSRDDAKPLLRLKGFPSFPLVERQANEVDWWDMVCNVKKLINEKKEDGKVFWQNLAGYKRQEALRPYLSSEEDRKKGKKFARYQLGDLLLHLEKKHGEDWGKVYDEAWERIDKKVEGLSKHIKLEEERRSEDAQSKAALTDWLRAKASFVIEGLKEADKDEFCRCELKLQKWYGDLRGKPFAIEAENSILDISGFSKQYNCAFIWQKDGVKKLNLYLIINYFKGGKLRFKKIKPEAFEANRFYTVINKKSGEIVPMEVNFNFDDPNLIILPLAFGKRQGREFIWNDLLSLETGSLKLANGRVIEKTLYNRRTRQDEPALFVALTFERREVLDSSNIKPMNLIGVDRGENIPAVIALTDPEGCPLSRFKDYLGNPTHILRIGESYKEKQRTIQAKKEVEQRRAGGYSRKYASKAKNLADDMVRNTARDLLYYAVTQDAMLIFENLSRGFGRQGKRTFMAERQYTRMEDWLTAKLAYEGLPSKTYLSKTLAQYTSKTCSNCGFTITSADYDRVLEKLKKTATGWMTTINGKELKVEGQITYYNRYKRQNVVKDLSVELDRLSEESVNNDISSWTKGRSGEALSLLKKRFSHRPVQEKFVCLNCGFETHADEQAALNIARSWLFLRSQEYKKYQTNKTTGNTDKRAFVETWQSFYRKKLKEVWKPAV

SEQ ID NO: 25857 - protein, 978 aa, synthetic construct
  REGION 1..978: note = engineered CasX variant
QEIKRINKIRRRLVKDSNTKKAGKTGPMKTLLVRVMTPDLRERLENLRKKPENIPQPISNTSRANLNKLLTDYTEMKKAILHVYWEEFQKDPVGLMSRVAQPASKKIDQNKLKPEMDEKGNLTTAGFACSQCGQPLFVYKLEQVSEKGKAYTNYFGRCNVAEHEKLILLAQLKPEKDSDEAVTYSLGKFGQRALDFYSIHVTKESTHPVKPLAQIAGNRYASGPVGKALSDACMGTIASFLSKYQDIIIEHQKVVKGNQKRLESLRELAGKENLEYPSVTLPPQPHTKEGVDAYNEVIARVRMWVNLNLWQKLKLSRDDAKPLLRLKGFPSFPLVERQANEVDWWDMVCNVKKLINEKKEDGKVFWQNLAGYKRQEALRPYLSSEEDRKKGKKFARYQLGDLLLHLEKKHGEDWGKVYDEAWERIDKKVEGLSKHIKLEEERRSEDAQSKAALTDWLRAKASFVIEGLKEADKDEFCRCELKLQKWYGDLRGKPFAIEAENSILDISGFSKQYNCAFIWQKDGVKKLNLYLIINYFKGGKLRFKKIKPEAFEANRFYTVINKKSGEIVPMEVNFNFDDPNLIILPLAFGKRQGREFIWNDLLSLETGSLKLANGRVIEKTLYNRRTRQDEPALFVALTFERREVLDSSNIKPMNLIGVDRGENIPAVIALTDPEGCPLSRFKDYLGNPTHILRIGESYKEKQRKIQAKKEVEQRRAGGYSRKYASKAKNLADDMVRNTARDLLYYAVTQDAMLIFENLSRGFGRQGKRTFMAERQYTRMEDWLTAKLAYEGLPSKTYLSKTLAQYTSKTCSNCGFTITSADYDRVLEKLKKTATGWMTTINGKELKVEGQITYYNRYKRQNVVKDLSVELDRLSEESVNNDISSWTKGRSGEALSLLKKRFSHRPVQEKFVCLNCGFETHADEQAALNIARSWLFLRSQEYKKYQTNKTTGNTDKRAFVETWQSFYRKKLKEVWKPAV

SEQ ID NO: 25858 - protein, 978 aa, synthetic construct
  REGION 1..978: note = engineered CasX variant
QEIKRINKIRRRLVKDSNTKKAGKTGPMKTLLVRVMTPDLRERLENLRKKPENIPQPISNTSRANLNKLLTDYTEMKKAILHVYWEEFQKDPVGLMSRVAQPASKKIDQNKLKPEMDEKGNLTTAGFACSQCGQPLFVYKLEQVSEKGKAYTNYFGRCNVAEHEKLILLAQLKPEKDSDEAVTYSLGKFGQRALDFYSIHVTKESTHPVKPLAQIAGNRYASGPVGKALSDACMGTIASFLSKYQDIIIEHQKVVKGNQKRLESLRELAGKENLEYPSVTLPPQPHTKEGVDAYNEVIARVRMWVNLNLWQKLKLSRDDAKPLLRLKGFPSFPLVERQANEVDWWDMVCNVKKLINEKKEDGKVFWQNLAGYKRQEALRPYLSSEEDRKKGKKFARYQLGDLLLHLEKKHGEDWGKVYDEAWERIDKKVEGLSKHIKLEEERRSEDAQSKAALTDWLRAKASFVIEGLKEADKDEFCRCELKLQKWYGDLRGKPFAIEAENSILDISGFSKQYNCAFIWQKDGVKKLNLYLIINYFKGGKLRFKKIKPEAFEANRFYTVINKKSGEIVPMEVNFNFDDPNLIILPLAFGKRQGREFIWNDLLSLETGSLKLANGRVIEKTLYNRRTRQDEPALFVALTFERREVLDSSNIKPMNLIGVDRGENIPAVIALTDPEGCPLSRFKDVNGNPTHILRIGESYKEKQRTIQAKKTVEQRRAGGYSRKYASKAKNLADDMVRNTARDLLYYAVTQDAMLIFENLSRGFGRQGKRTFMAERQYTRMEDWLTAKLAYEGLPSKTYLSKTLAQYTSKTCSNCGFTITSADYDRVLEKLKKTATGWMTTINGKELKVEGQITYYNRYKRQNVVKDLSVELDRLSEESVNNDISSWTKGRSGEALSLLKKRFSHRPVQEKFVCLNCGFETHADEQAALNIARSWLFLRSQEYKKYQTNKTTGNTDKRAFVETWQSFYRKKLKEVWKPAV

SEQ ID NO: 25859 - protein, 978 aa, synthetic construct
  REGION 1..978: note = engineered CasX variant
QEIKRINKIRRRLVKDSNTKKAGKTGPMKTLLVRVMTPDLRERLENLRKKPENIPQPISNTSRANLNKLLTDYTEMKKAILHVYWEEFQKDPVGLMSRVAQPASKKIDQNKLKPEMDEKGNLTTAGFACSQCGQPLFVYKLEQVSEKGKAYTNYFGRCNVAEHEKLILLAQLKPEKDSDEAVTYSLGKFGQRALDFYSIHVTKESTHPVKPLAQIAGNRYASGPVGKALSDACMGTIASFLSKYQDIIIEHQKVVKGNQKRLESLRELAGKENLEYPSVTLPPQPHTKEGVDAYNEVIARVRMWVNLNLWQKLKLSRDDAKPLLRLKGFPSFPLVERQANEVDWWDMVCNVKKLINEKKEDGKVFWQNLAGYKRQEALRPYLSSEEDRKKGKKFARYQLGDLLLHLEKKHGEDWGKVYDEAWERIDKKVEGLSKHIKLEEERRSEDAQSKAALTDWLRAKASFVIEGLKEADKDEFCRCELKLQKWYGDLRGKPFAIEAENSILDISGFSKQYNCAFIWQKDGVKKLNLYLIINYFKGGKLRFKKIKPEAFEANRFYTVINKKSGEIVPMEVNFNFDDPNLIILPLAFGKRQGREFIWNDLLSLETGSLKLANGRVIEKTLYNRRTRQDEPALFVALTFERREVLDSSNIKPMNLIGVDRGENIPAVIALTDPEGCPLSRFKDVNGNPTHILRIGESYKEKQRTIQAKKEVEQRRAGGYSRKYASKAKNLADDMVRNTARDLLYYAVTQDAMLIFENLSRGFGRQGKRTFMAERQYTRMEDWLTAKLAYEGLPSKTYLSKTLAQYTSKTCSNCGFTITSADYDRVLEKLKKTATGWMTTINGKELKVEGQITYYNRYKRQNVVKDLSVELDRLSEESVNNDISSWTKGRSGEALSLLKKRFSHRPVQEKFVCLNCGFETHADEQAALNIARSWLFLRSQEYKKYQTNKTTGNTDKRAFVETWQSFYRKKLKEVWKPAV

SEQ ID NO: 25860 - protein, 978 aa, synthetic construct
  REGION 1..978: note = engineered CasX variant
QEIKRINKIRRRLVKDSNTKKAGKTGPMKTLLVRVMTPDLRERLENLRKKPENIPQPISNTSRANLNKLLTDYTEMKKAILHVYWEEFQKDPVGLMSRVAQPASKKIDQNKLKPEMDEKGNLTTAGFACSQCGQPLFVYKLEQVSEKGKAYTNYFGRCNVAEHEKLILLAQLKPEKDSDEAVTYSLGKFGQRALDFYSIHVTKESTHPVKPLAQIAGNRYASGPVGKALSDACMGTIASFLSKYQDIIIEHQKVVKGNQKRLESLRELAGKENLEYPSVTLPPQPHTKEGVDAYNEVIARVRMWVNLNLWQKLKLSRDDAKPLLRLKGFPSFPLVERQANEVDWWDMVCNVKKLINEKKEDGKVFWQNLAGYKRQEALRPYLSSEEDRKKGKKFARYQLGDLLLHLEKKHGEDWGKVYDEAWERIDKKVEGLSKHIKLEEERRSEDAQSKAALTDWLRAKASFVIEGLKEADKDEFCRCELKLQKWYGDLRGKPFAIEAENSILDISGFSKQYNCAFIWQKDGVKKLNLYLIINYFKGGKLRFKKIKPEAFEANRFYTVINKKSGEIVPMEVNFNFDDPNLIILPLAFGKRQGREFIWNDLLSLETGSLKLANGRVIEKTLYNRRTRQDEPALFVALTFERREVLDSSNIKPMNLIGVDRGENIPAVIALTDPEGCPLSRFKDVLGNPTHILRIGESYKEKQRTIQAKKTVEQRRAGGYSRKYASKAKNLADDMVRNTARDLLYYAVTQDAMLIFENLSRGFGRQGKRTFMAERQYTRMEDWLTAKLAYEGLPSKTYLSKTLAQYTSKTCSNCGFTITSADYDRVLEKLKKTATGWMTTINGKELKVEGQITYYNRYKRQNVVKDLSVELDRLSEESVNNDISSWTKGRSGEALSLLKKRFSHRPVQEKFVCLNCGFETHADEQAALNIARSWLFLRSQEYKKYQTNKTTGNTDKRAFVETWQSFYRKKLKEVWKPAV

SEQ ID NO: 25861 - protein, 978 aa, synthetic construct
  REGION 1..978: note = engineered CasX variant
QEIKRINKIRRRLVKDSNTKKAGKTGPMKTLLVRVMTPDLRERLENLRKKPENIPQPISNTSRANLNKLLTDYTEMKKAILHVYWEEFQKDPVGLMSRVAQPASKKIDQNKLKPEMDEKGNLTTAGFACSQCGQPLFVYKLEQVSEKGKAYTNYFGRCNVAEHEKLILLAQLKPEKDSDEAVTYSLGKFGQRALDFYSIHVTKESTHPVKPLAQIAGNRYASGPVGKALSDACMGTIASFLSKYQDIIIEHQKVVKGNQKRLESLRELAGKENLEYPSVTLPPQPHTKEGVDAYNEVIARVRMWVNLNLWQKLKLSRDDAKPLLRLKGFPSFPLVERQANEVDWWDMVCNVKKLINEKKEDGKVFWQNLAGYKRQEALRPYLSSEEDRKKGKKFARYQLGDLLLHLEKKHGEDWGKVYDEAWERIDKKVEGLSKHIKLEEERRSEDAQSKAALTDWLRAKASFVIEGLKEADKDEFCRCELKLQKWYGDLRGKPFAIEAENSILDISGFSKQYNCAFIWQKDGVKKLNLYLIINYFKGGKLRFKKIKPEAFEANRFYTVINKKSGEIVPMEVNFNFDDPNLIILPLAFGKRQGREFIWNDLLSLETGSLKLANGRVIEKTLYNRRTRQDEPALFVALTFERREVLDSSNIKPMNLIGVDRGENIPAVIALTDPEGCPLSRFKDVLGNPTHILRIGESYKEKQRTIQAKKEVEQRRAGGYSRKYASKAKNLADDMVRNTARDLLYYAVTQDAMLIFENLSRGFGRQGKRTFMAERQYTRMEDWLTAKLAYEGLPSKTYLSKTLAQYTSKTCSNCGFTITSADYDRVLEKLKKTATGWMTTINGKELKVEGQITYYNRYKRQNVVKDLSVELDRLSEESVNNDISSWTKGRSGEALSLLKKRFSHRPVQEKFVCLNCGFETHADEQAALNIARSWLFLRSQEYKKYQTNKTTGNTDKRAFVETWQSFYRKKLKEVWKPAV

SEQ ID NO: 25862 - protein, 978 aa, synthetic construct
  REGION 1..978: note = engineered CasX variant
QEIKRINKIRRRLVKDSNTKKAGKTGPMKTLLVRVMTPDLRERLENLRKKPENIPQPISNTSRANLNKLLTDYTEMKKAILHVYWEEFQKDPVGLMSRVAQPASKKIDQNKLKPEMDEKGNLTTAGFACSQCGQPLFVYKLEQVSEKGKAYTNYFGRCNVAEHEKLILLAQLKPEKDSDEAVTYSLGKFGQRALDFYSIHVTKESTHPVKPLAQIAGNRYASGPVGKALSDACMGTIASFLSKYQDIIIEHQKVVKGNQKRLESLRELAGKENLEYPSVTLPPQPHTKEGVDAYNEVIARVRMWVNLNLWQKLKLSRDDAKPLLRLKGFPSFPLVERQANEVDWWDMVCNVKKLINEKKEDGKVFWQNLAGYKRQEALRPYLSSEEDRKKGKKFARYQLGDLLLHLEKKHGEDWGKVYDEAWERIDKKVEGLSKHIKLEEERRSEDAQSKAALTDWLRAKASFVIEGLKEADKDEFCRCELKLQKWYGDLRGKPFAIEAENSILDISGFSKQYNCAFIWQKDGVKKLNLYLIINYFKGGKLRFKKIKPEAFEANRFYTVINKKSGEIVPMEVNFNFDDPNLIILPLAFGKRQGREFIWNDLLSLETGSLKLANGRVIEKTLYNRRTRQDEPALFVALTFERREVLDSSNIKPMNLIGVDRGENIPAVIALTDPEGCPLSRFKDVLGNPTHILRIGESYKEKQRTIQAKKEVENRRAGGYSRKYASKAKNLADDMVRNTARDLLYYAVTQDAMLIFENLSRGFGRQGKRTFMAERQYTRMEDWLTAKLAYEGLPSKTYLSKTLAQYTSKTCSNCGFTITSADYDRVLEKLKKTATGWMTTINGKELKVEGQITYYNRYKRQNVVKDLSVELDRLSEESVNNDISSWTKGRSGEALSLLKKRFSHRPVQEKFVCLNCGFETHADEQAALNIARSWLFLRSQEYKKYQTNKTTGNTDKRAFVETWQSFYRKKLKEVWKPAV

SEQ ID NO: 25863 - protein, 978 aa, synthetic construct
  REGION 1..978: note = engineered CasX variant
QEIKRINKIRRRLVKDSNTKKAGKTGPMKTLLVRVMTPDLRERLENLRKKPENIPQPISNTSRANLNKLLTDYTEMKKAILHVYWEEFQKDPVGLMSRVAQPASKKIDQNKLKPEMDEKGNLTTAGFACSQCGQPLFVYKLEQVSEKGKAYTNYFGRCNVAEHEKLILLAQLKPEKDSDEAVTYSLGKFGQRALDFYSIHVTKESTHPVKPLAQIAGNRYASGPVGKALSDACMGTIASFLSKYQDIIIEHQKVVKGNQKRLESLRELAGKENLEYPSVTLPPQPHTKEGVDAYNEVIARVRMWVNLNLWQKLKLSRDDAKPLLRLKGFPSFPLVERQANEVDWWDMVCNVKKLINEKKEDGKVFWQNLAGYKRQEALRPYLSSEEDRKKGKKFARYQLGDLLLHLEKKHGEDWGKVYDEAWERIDKKVEGLSKHIKLEEERRSEDAQSKAALTDWLRAKASFVIEGLKEADKDEFCRCELKLQKWYGDLRGKPFAIEAENSILDISGFSKQYNCAFIWQKDGVKKLNLYLIINYFKGGKLRFKKIKPEAFEANRFYTVINKKSGEIVPMEVNFNFDDPNLIILPLAFGKRQGREFIWNDLLSLETGSLKLANGRVIEKTLYNRRTRQDEPALFVALTFERREVLDSSNIKPMNLIGVDRGENIPAVIALTDPEGCPLSRFKDVLGNPTHILRIGESYKEKQRTIQACKEVEQRRAGGYSRKYASKAKNLADDMVRNTARDLLYYAVTQDAMLIFENLSRGFGRQGKRTFMAERQYTRMEDWLTAKLAYEGLPSKTYLSKTLAQYTSKTCSNCGFTITSADYDRVLEKLKKTATGWMTTINGKELKVEGQITYYNRYKRQNVVKDLSVELDRLSEESVNNDISSWTKGRSGEALSLLKKRFSHRPVQEKFVCLNCGFETHADEQAALNIARSWLFLRSQEYKKYQTNKTTGNTDKRAFVETWQSFYRKKLKEVWKPAV

SEQ ID NO: 25864 - protein, 978 aa, synthetic construct
  REGION 1..978: note = engineered CasX variant
QEIKRINKIRRRLVKDSNTKKAGKTGPMKTLLVRVMTPDLRERLENLRKKPENIPQPISNTSRANLNKLLTDYTEMKKAILHVYWEEFQKDPVGLMSRVAQPASKKIDQNKLKPEMDEKGNLTTAGFACSQCGQPLFVYKLEQVSEKGKAYTNYFGRCNVAEHEKLILLAQLKPEKDSDEAVTYSLGKFGQRALDFYSIHVTKESTHPVKPLAQIAGNRYASGPVGKALSDACMGTIASFLSKYQDIIIEHQKVVKGNQKRLESLRELAGKENLEYPSVTLPPQPHTKEGVDAYNEVIARVRMWVNLNLWQKLKLSRDDAKPLLRLKGFPSFPLVERQANEVDWWDMVCNVKKLINEKKEDGKVFWQNLAGYKRQEALRPYLSSEEDRKKGKKFARYQLGDLLLHLEKKHGEDWGKVYDEAWERIDKKVEGLSKHIKLEEERRSEDAQSKAALTDWLRAKASFVIEGLKEADKDEFCRCELKLQKWYGDLRGKPFAIEAENSILDISGFSKQYNCAFIWQKDGVKKLNLYLIINYFKGGKLRFKKIKPEAFEANRFYTVINKKSGEIVPMEVNFNFDDPNLIILPLAFGKRQGREFIWNDLLSLETGSLKLANGRVIEKTLYNRRTRQDEPALFVALTFERREVLDSSNIKPMNLIGVDRGENIPAVIALTDPEGCPLSRFKDVLGNPTHILRIGESYKEKQRTIQACKEVENRRAGGYSRKYASKAKNLADDMVRNTARDLLYYAVTQDAMLIFENLSRGFGRQGKRTFMAERQYTRMEDWLTAKLAYEGLPSKTYLSKTLAQYTSKTCSNCGFTITSADYDRVLEKLKKTATGWMTTINGKELKVEGQITYYNRYKRQNVVKDLSVELDRLSEESVNNDISSWTKGRSGEALSLLKKRFSHRPVQEKFVCLNCGFETHADEQAALNIARSWLFLRSQEYKKYQTNKTTGNTDKRAFVETWQSFYRKKLKEVWKPAV

SEQ ID NO: 25865 - protein, 978 aa, synthetic construct
  REGION 1..978: note = engineered CasX variant
QEIKRINKIRRRLVKDSNTKKAGKTGPMKTLLVRVMTPDLRERLENLRKKPENIPQPISNTSRANLNKLLTDYTEMKKAILHVYWEEFQKDPVGLMSRVAQPASKKIDQNKLKPEMDEKGNLTTAGFACSQCGQPLFVYKLEQVSEKGKAYTNYFGRCNVAEHEKLILLAQLKPEKDSDEAVTYSLGKFGQRALDFYSIHVTKESTHPVKPLAQIAGNRYASGPVGKALSDACMGTIASFLSKYQDIIIEHQKVVKGNQKRLESLRELAGKENLEYPSVTLPPQPHTKEGVDAYNEVIARVRMWVNLNLWQKLKLSRDDAKPLLRLKGFPSFPLVERQANEVDWWDMVCNVKKLINEKKEDGKVFWQNLAGYKRQEALRPYLSSEEDRKKGKKFARYQLGDLLLHLEKKHGEDWGKVYDEAWERIDKKVEGLSKHIKLEEERRSEDAQSKAALTDWLRAKASFVIEGLKEADKDEFCRCELKLQKWYGDLRGKPFAIEAENSILDISGFSKQYNCAFIWQKDGVKKLNLYLIINYFKGGKLRFKKIKPEAFEANRFYTVINKKSGEIVPMEVNFNFDDPNLIILPLAFGKRQGREFIWNDLLSLETGSLKLANGRVIEKTLYNRRTRQDEPALFVALTFERREVLDSSNIKPMNLIGVDRGENIPAVIALTDPEGCPLSRFKDTLGNYTHILRIGESYKEKQRTIQAKKEVEQRRAGGYSRKYASKAKNLADDMVRNTARDLLYYAVTQDAMLIFENLSRGFGRQGKRTFMAERQYTRMEDWLTAKLAYEGLPSKTYLSKTLAQYTSKTCSNCGFTITSADYDRVLEKLKKTATGWMTTINGKELKVEGQITYYNRYKRQNVVKDLSVELDRLSEESVNNDISSWTKGRSGEALSLLKKRFSHRPVQEKFVCLNCGFETHADEQAALNIARSWLFLRSQEYKKYQTNKTTGNTDKRAFVETWQSFYRKKLKEVWKPAV

SEQ ID NO: 25866 - protein, 978 aa, synthetic construct
  REGION 1..978: note = engineered CasX variant
QEIKRINKIRRRLVKDSNTKKAGKTGPMKTLLVRVMTPDLRERLENLRKKPENIPQPISNTSRANLNKLLTDYTEMKKAILHVYWEEFQKDPVGLMSRVAQPASKKIDQNKLKPEMDEKGNLTTAGFACSQCGQPLFVYKLEQVSEKGKAYTNYFGRCNVAEHEKLILLAQLKPEKDSDEAVTYSLGKFGQRALDFYSIHVTKESTHPVKPLAQIAGNRYASGPVGKALSDACMGTIASFLSKYQDIIIEHQKVVKGNQKRLESLRELAGKENLEYPSVTLPPQPHTKEGVDAYNEVIARVRMWVNLNLWQKLKLSRDDAKPLLRLKGFPSFPLVERQANEVDWWDMVCNVKKLINEKKEDGKVFWQNLAGYKRQEALRPYLSSEEDRKKGKKFARYQLGDLLLHLEKKHGEDWGKVYDEAWERIDKKVEGLSKHIKLEEERRSEDAQSKAALTDWLRAKASFVIEGLKEADKDEFCRCELKLQKWYGDLRGKPFAIEAENSILDISGFSKQYNCAFIWQKDGVKKLNLYLIINYFKGGKLRFKKIKPEAFEANRFYTVINKKSGEIVPMEVNFNFDDPNLIILPLAFGKRQGREFIWNDLLSLETGSLKLANGRVIEKTLYNRRTRQDEPALFVALTFERREVLDSSNIKPMNLIGVDRGENIPAVIALTDPEGCPLSRFKDTLGNPTHILRIGESYKEKQRTIQKKREVEQRRAGGYSRKYASKAKNLADDMVRNTARDLLYYAVTQDAMLIFENLSRGFGRQGKRTFMAERQYTRMEDWLTAKLAYEGLPSKTYLSKTLAQYTSKTCSNCGFTITSADYDRVLEKLKKTATGWMTTINGKELKVEGQITYYNRYKRQNVVKDLSVELDRLSEESVNNDISSWTKGRSGEALSLLKKRFSHRPVQEKFVCLNCGFETHADEQAALNIARSWLFLRSQEYKKYQTNKTTGNTDKRAFVETWQSFYRKKLKEVWKPAV

SEQ ID NO: 25867 - protein, 978 aa, synthetic construct
  REGION 1..978: note = engineered CasX variant
QEIKRINKIRRRLVKDSNTKKAGKTGPMKTLLVRVMTPDLRERLENLRKKPENIPQPISNTSRANLNKLLTDYTEMKKAILHVYWEEFQKDPVGLMSRVAQPASKKIDQNKLKPEMDEKGNLTTAGFACSQCGQPLFVYKLEQVSEKGKAYTNYFGRCNVAEHEKLILLAQLKPEKDSDEAVTYSLGKFGQRALDFYSIHVTKESTHPVKPLAQIAGNRYASGPVGKALSDACMGTIASFLSKYQDIIIEHQKVVKGNQKRLESLRELAGKENLEYPSVTLPPQPHTKEGVDAYNEVIARVRMWVNLNLWQKLKLSRDDAKPLLRLKGFPSFPLVERQANEVDWWDMVCNVKKLINEKKEDGKVFWQNLAGYKRQEALRPYLSSEEDRKKGKKFARYQLGDLLLHLEKKHGEDWGKVYDEAWERIDKKVEGLSKHIKLEEERRSEDAQSKAALTDWLRAKASFVIEGLKEADKDEFCRCELKLQKWYGDLRGKPFAIEAENSILDISGFSKQYNCAFIWQKDGVKKLNLYLIINYFKGGKLRFKKIKPEAFEANRFYTVINKKSGEIVPMEVNFNFDDPNLIILPLAFGKRQGREFIWNDLLSLETGSLKLANGRVIEKTLYNRRTRQDEPALFVALTFERREVLDSSNIKPMNLIGVDRGENIPAVIALTDPEGCPLSRFKDTLGNPTHILRIGESYKEKQRTIQKKKEVEQRRAGGYSRKYASKAKNLADDMVRNTARDLLYYAVTQDAMLIFENLSRGFGRQGKRTFMAERQYTRMEDWLTAKLAYEGLPSKTYLSKTLAQYTSKTCSNCGFTITSADYDRVLEKLKKTATGWMTTINGKELKVEGQITYYNRYKRQNVVKDLSVELDRLSEESVNNDISSWTKGRSGEALSLLKKRFSHRPVQEKFVCLNCGFETHADEQAALNIARSWLFLRSQEYKKYQTNKTTGNTDKRAFVETWQSFYRKKLKEVWKPAV

SEQ ID NO: 25868 - protein, 978 aa, synthetic construct
  REGION 1..978: note = engineered CasX variant
QEIKRINKIRRRLVKDSNTKKAGKTGPMKTLLVRVMTPDLRERLENLRKKPENIPQPISNTSRANLNKLLTDYTEMKKAILHVYWEEFQKDPVGLMSRVAQPASKKIDQNKLKPEMDEKGNLTTAGFACSQCGQPLFVYKLEQVSEKGKAYTNYFGRCNVAEHEKLILLAQLKPEKDSDEAVTYSLGKFGQRALDFYSIHVTKESTHPVKPLAQIAGNRYASGPVGKALSDACMGTIASFLSKYQDIIIEHQKVVKGNQKRLESLRELAGKENLEYPSVTLPPQPHTKEGVDAYNEVIARVRMWVNLNLWQKLKLSRDDAKPLLRLKGFPSFPLVERQANEVDWWDMVCNVKKLINEKKEDGKVFWQNLAGYKRQEALRPYLSSEEDRKKGKKFARYQLGDLLLHLEKKHGEDWGKVYDEAWERIDKKVEGLSKHIKLEEERRSEDAQSKAALTDWLRAKASFVIEGLKEADKDEFCRCELKLQKWYGDLRGKPFAIEAENSILDISGFSKQYNCAFIWQKDGVKKLNLYLIINYFKGGKLRFKKIKPEAFEANRFYTVINKKSGEIVPMEVNFNFDDPNLIILPLAFGKRQGREFIWNDLLSLETGSLKLANGRVIEKTLYNRRTRQDEPALFVALTFERREVLDSSNIKPMNLIGVDRGENIPAVIALTDPEGCPLSRFKDTLGNPTHILRIGESYKEKQRTIQAKREVEQRRAGGYSRKYASKAKNLADDMVRNTARDLLYYAVTQDAMLIFENLSRGFGRQGKRTFMAERQYTRMEDWLTAKLAYEGLPSKTYLSKTLAQYTSKTCSNCGFTITSADYDRVLEKLKKTATGWMTTINGKELKVEGQITYYNRYKRQNVVKDLSVELDRLSEESVNNDISSWTKGRSGEALSLLKKRFSHRPVQEKFVCLNCGFETHADEQAALNIARSWLFLRSQEYKKYQTNKTTGNTDKRAFVETWQSFYRKKLKEVWKPAV

SEQ ID NO: 25869 - protein, 978 aa, synthetic construct
  REGION 1..978: note = engineered CasX variant
QEIKRINKIRRRLVKDSNTKKAGKTGPMKTLLVRVMTPDLRERLENLRKKPENIPQPISNTSRANLNKLLTDYTEMKKAILHVYWEEFQKDPVGLMSRVAQPASKKIDQNKLKPEMDEKGNLTTAGFACSQCGQPLFVYKLEQVSEKGKAYTNYFGRCNVAEHEKLILLAQLKPEKDSDEAVTYSLGKFGQRALDFYSIHVTKESTHPVKPLAQIAGNRYASGPVGKALSDACMGTIASFLSKYQDIIIEHQKVVKGNQKRLESLRELAGKENLEYPSVTLPPQPHTKEGVDAYNEVIARVRMWVNLNLWQKLKLSRDDAKPLLRLKGFPSFPLVERQANEVDWWDMVCNVKKLINEKKEDGKVFWQNLAGYKRQEALRPYLSSEEDRKKGKKFARYQLGDLLLHLEKKHGEDWGKVYDEAWERIDKKVEGLSKHIKLEEERRSEDAQSKAALTDWLRAKASFVIEGLKEADKDEFCRCELKLQKWYGDLRGKPFAIEAENSILDISGFSKQYNCAFIWQKDGVKKLNLYLIINYFKGGKLRFKKIKPEAFEANRFYTVINKKSGEIVPMEVNFNFDDPNLIILPLAFGKRQGREFIWNDLLSLETGSLKLANGRVIEKTLYNRRTRQDEPALFVALTFERREVLDSSNIKPMNLIGVDRGENIPAVIALTDPEGCPLSRFKDTLGNPTHILRIGESYKEKQRTIQAKKEVEQRRHGGYSRKYASKAKNLADDMVRNTARDLLYYAVTQDAMLIFENLSRGFGRQGKRTFMAERQYTRMEDWLTAKLAYEGLPSKTYLSKTLAQYTSKTCSNCGFTITSADYDRVLEKLKKTATGWMTTINGKELKVEGQITYYNRYKRQNVVKDLSVELDRLSEESVNNDISSWTKGRSGEALSLLKKRFSHRPVQEKFVCLNCGFETHADEQAALNIARSWLFLRSQEYKKYQTNKTTGNTDKRAFVETWQSFYRKKLKEVWKPAV

SEQ ID NO: 25870 - protein, 978 aa, synthetic construct
  REGION 1..978: note = engineered CasX variant
QEIKRINKIRRRLVKDSNTKKAGKTGPMKTLLVRVMTPDLRERLENLRKKPENIPQPISNTSRANLNKLLTDYTEMKKAILHVYWEEFQKDPVGLMSRVAQPASKKIDQNKLKPEMDEKGNLTTAGFACSQCGQPLFVYKLEQVSEKGKAYTNYFGRCNVAEHEKLILLAQLKPEKDSDEAVTYSLGKFGQRALDFYSIHVTKESTHPVKPLAQIAGNRYASGPVGKALSDACMGTIASFLSKYQDIIIEHQKVVKGNQKRLESLRELAGKENLEYPSVTLPPQPHTKEGVDAYNEVIARVRMWVNLNLWQKLKLSRDDAKPLLRLKGFPSFPLVERQANEVDWWDMVCNVKKLINEKKEDGKVFWQNLAGYKRQEALRPYLSSEEDRKKGKKFARYQLGDLLLHLEKKHGEDWGKVYDEAWERIDKKVEGLSKHIKLEEERRSEDAQSKAALTDWLRAKASFVIEGLKEADKDEFCRCELKLQKWYGDLRGKPFAIEAENSILDISGFSKQYNCAFIWQKDGVKKLNLYLIINYFKGGKLRFKKIKPEAFEANRFYTVINKKSGEIVPMEVNFNFDDPNLIILPLAFGKRQGREFIWNDLLSLETGSLKLANGRVIEKTLYNRRTRQDEPALFVALTFERREVLDSSNIKPMNLIGVDRGENIPAVIALTDPEGCPLSRFKDTLGNPTHILRIGESYKEKQRTIQAKKEVEQRRAGGYSRKYASKAKNLADDMVRNTARDLLYYAVTQDAMLIFENLSRGFGRQGKRTFMAERQYTRMEDWLTAKLAYEGLPSKTYLSKTLAQYTSKTCSNCGFTITSADYDRVLEKLKKTATGWMTTINGKELKVEGQITYYNRYKRQNVVKDLSVELDRLSEESVNNDISSWTKGRSGEALSLLKKRFSHRPVQEKFVCLNCGFETHADEQAALNIARSWLFLRSQEYKKYQTNKTTGNTDKRAFVETWQSFYRKKLKEVWKPAV

SEQ ID NO: 25871 - protein, 978 aa, synthetic construct
  REGION 1..978: note = engineered CasX variant
QEIKRINKIRRRLVKDSNTKKAGKTGPMKTLLVRVMTPDLRERLENLRKKPENIPQPISNTSRANLNKLLTDYTEMKKAILHVYWEEFQKDPVGLMSRVAQPASKKIDQNKLKPEMDEKGNLTTAGFACSQCGQPLFVYKLEQVSEKGKAYTNYFGRCNVAEHEKLILLAQLKPEKDSDEAVTYSLGKFGQRALDFYSIHVTKESTHPVKPLAQIAGNRYASGPVGKALSDACMGTIASFLSKYQDIIIEHQKVVKGNQKRLESLRELAGKENLEYPSVTLPPQPHTKEGVDAYNEVIARVRMWVNLNLWQKLKLSRDDAKPLLRLKGFPSFPLVERQANEVDWWDMVCNVKKLINEKKEDGKVFWQNLAGYKRQEALRPYLSSEEDRKKGKKFARYQLGDLLLHLEKKHGEDWGKVYDEAWERIDKKVEGLSKHIKLEEERRSEDAQSKAALTDWLRAKASFVIEGLKEADKDEFCRCELKLQKWYGDLRGKPFAIEAENSILDISGFSKQYNCAFIWQKDGVKKLNLYLIINYFKGGKLRFKKIKPEAFEANRFYTVINKKSGEIVPMEVNFNFDDPNLIILPLAFGKRQGREFIWNDLLSLETGSLKLANGRVIEKTLYNRRTRQDEPALFVALTFERREVLDSSNIKPMNLIGVDRGENIPAVIALTDPEGCPLSRFKDTLGNPTHILRIGESYKEKQRTIQAHKEVEQRRAGGYSRKYASKAKNLADDMVRNTARDLLYYAVTQDAMLIFENLSRGFGRQGKRTFMAERQYTRMEDWLTAKLAYEGLPSKTYLSKTLAQYTSKTCSNCGFTITSADYDRVLEKLKKTATGWMTTINGKELKVEGQITYYNRYKRQNVVKDLSVELDRLSEESVNNDISSWTKGRSGEALSLLKKRFSHRPVQEKFVCLNCGFETHADEQAALNIARSWLFLRSQEYKKYQTNKTTGNTDKRAFVETWQSFYRKKLKEVWKPAV

SEQ ID NO: 25872 - protein, 978 aa, synthetic construct
  REGION 1..978: note = engineered CasX variant
QEIKRINKIRRRLVKDSNTKKAGKTGPMKTLLVRVMTPDLRERLENLRKKPENIPQPISNTSRANLNKLLTDYTEMKKAILHVYWEEFQKDPVGLMSRVAQPASKKIDQNKLKPEMDEKGNLTTAGFACSQCGQPLFVYKLEQVSEKGKAYTNYFGRCNVAEHEKLILLAQLKPEKDSDEAVTYSLGKFGQRALDFYSIHVTKESTHPVKPLAQIAGNRYASGPVGKALSDACMGTIASFLSKYQDIIIEHQKVVKGNQKRLESLRELAGKENLEYPSVTLPPQPHTKEGVDAYNEVIARVRMWVNLNLWQKLKLSRDDAKPLLRLKGFPSFPLVERQANEVDWWDMVCNVKKLINEKKEDGKVFWQNLAGYKRQEALRPYLSSEEDRKKGKKFARYQLGDLLLHLEKKHGEDWGKVYDEAWERIDKKVEGLSKHIKLEEERRSEDAQSKAALTDWLRAKASFVIEGLKEADKDEFCRCELKLQKWYGDLRGKPFAIEAENSILDISGFSKQYNCAFIWQKDGVKKLNLYLIINYFKGGKLRFKKIKPEAFEANRFYTVINKKSGEIVPMEVNFNFDDPNLIILPLAFGKRQGREFIWNDLLSLETGSLKLANGRVIEKTLYNRRTRQDEPALFVALTFERREVLDSSNIKPMNLIGVDRGENIPAVIALTDPEGCPLSRFKDTLGNPTHILRIGESYKEKQRMIQAKKEVEQRRAGGYSRKYASKAKNLADDMVRNTARDLLYYAVTQDAMLIFENLSRGFGRQGKRTFMAERQYTRMEDWLTAKLAYEGLPSKTYLSKTLAQYTSKTCSNCGFTITSADYDRVLEKLKKTATGWMTTINGKELKVEGQITYYNRYKRQNVVKDLSVELDRLSEESVNNDISSWTKGRSGEALSLLKKRFSHRPVQEKFVCLNCGFETHADEQAALNIARSWLFLRSQEYKKYQTNKTTGNTDKRAFVETWQSFYRKKLKEVWKPAV

SEQ ID NO: 25873 - protein, 978 aa, synthetic construct
  REGION 1..978: note = engineered CasX variant
QEIKRINKIRRRLVKDSNTKKAGKTGPMKTLLVRVMTPDLRERLENLRKKPENIPQPISNTSRANLNKLLTDYTEMKKAILHVYWEEFQKDPVGLMSRVAQPASKKIDQNKLKPEMDEKGNLTTAGFACSQCGQPLFVYKLEQVSEKGKAYTNYFGRCNVAEHEKLILLAQLKPEKDSDEAVTYSLGKFGQRALDFYSIHVTKESTHPVKPLAQIAGNRYASGPVGKALSDACMGTIASFLSKYQDIIIEHQKVVKGNQKRLESLRELAGKENLEYPSVTLPPQPHTKEGVDAYNEVIARVRMWVNLNLWQKLKLSRDDAKPLLRLKGFPSFPLVERQANEVDWWDMVCNVKKLINEKKEDGKVFWQNLAGYKRQEALRPYLSSEEDRKKGKKFARYQLGDLLLHLEKKHGEDWGKVYDEAWERIDKKVEGLSKHIKLEEERRSEDAQSKAALTDWLRAKASFVIEGLKEADKDEFCRCELKLQKWYGDLRGKPFAIEAENSILDISGFSKQYNCAFIWQKDGVKKLNLYLIINYFKGGKLRFKKIKPEAFEANRFYTVINKKSGEIVPMEVNFNFDDPNLIILPLAFGKRQGREFIWNDLLSLETGSLKLANGRVIEKTLYNRRTRQDEPALFVALTFERREVLDSSNIKPMNLIGVDRGENIPAVIALTDPEGCPLSRFKDTLGNPTHILRIGESYKEKQRAIQAKKEVEQRRAGGYSRKYASKAKNLADDMVRNTARDLLYYAVTQDAMLIFENLSRGFGRQGKRTFMAERQYTRMEDWLTAKLAYEGLPSKTYLSKTLAQYTSKTCSNCGFTITSADYDRVLEKLKKTATGWMTTINGKELKVEGQITYYNRYKRQNVVKDLSVELDRLSEESVNNDISSWTKGRSGEALSLLKKRFSHRPVQEKFVCLNCGFETHADEQAALNIARSWLFLRSQEYKKYQTNKTTGNTDKRAFVETWQSFYRKKLKEVWKPAV

SEQ ID NO: 25874 - protein, 978 aa, synthetic construct
  REGION 1..978: note = engineered CasX variant
QEIKRINKIRRRLVKDSNTKKAGKTGPMKTLLVRVMTPDLRERLENLRKKPENIPQPISNTSRANLNKLLTDYTEMKKAILHVYWEEFQKDPVGLMSRVAQPASKKIDQNKLKPEMDEKGNLTTAGFACSQCGQPLFVYKLEQVSEKGKAYTNYFGRCNVAEHEKLILLAQLKPEKDSDEAVTYSLGKFGQRALDFYSIHVTKESTHPVKPLAQIAGNRYASGPVGKALSDACMGTIASFLSKYQDIIIEHQKVVKGNQKRLESLRELAGKENLEYPSVTLPPQPHTKEGVDAYNEVIARVRMWVNLNLWQKLKLSRDDAKPLLRLKGFPSFPLVERQANEVDWWDMVCNVKKLINEKKEDGKVFWQNLAGYKRQEALRPYLSSEEDRKKGKKFARYQLGDLLLHLEKKHGEDWGKVYDEAWERIDKKVEGLSKHIKLEEERRSEDAQSKAALTDWLRAKASFVIEGLKEADKDEFCRCELKLQKWYGDLRGKPFAIEAENSILDISGFSKQYNCAFIWQKDGVKKLNLYLIINYFKGGKLRFKKIKPEAFEANRFYTVINKKSGEIVPMEVNFNFDDPNLIILPLAFGKRQGREFIWNDLLSLETGSLKLANGRVIEKTLYNRRTRQDEPALFVALTFERREVLDSSNIKPMNLIGVDRGENIPAVIALTDPEGCPLSRFKDTLGNPTHILRIGEHYKEKQRTIQAKKEVEQRRAGGYSRKYASKAKNLADDMVRNTARDLLYYAVTQDAMLIFENLSRGFGRQGKRTFMAERQYTRMEDWLTAKLAYEGLPSKTYLSKTLAQYTSKTCSNCGFTITSADYDRVLEKLKKTATGWMTTINGKELKVEGQITYYNRYKRQNVVKDLSVELDRLSEESVNNDISSWTKGRSGEALSLLKKRFSHRPVQEKFVCLNCGFETHADEQAALNIARSWLFLRSQEYKKYQTNKTTGNTDKRAFVETWQSFYRKKLKEVWKPAV

SEQ ID NO: 25875 - protein, 978 aa, synthetic construct
  REGION 1..978: note = engineered CasX variant
QEIKRINKIRRRLVKDSNTKKAGKTGPMKTLLVRVMTPDLRERLENLRKKPENIPQPISNTSRANLNKLLTDYTEMKKAILHVYWEEFQKDPVGLMSRVAQPASKKIDQNKLKPEMDEKGNLTTAGFACSQCGQPLFVYKLEQVSEKGKAYTNYFGRCNVAEHEKLILLAQLKPEKDSDEAVTYSLGKFGQRALDFYSIHVTKESTHPVKPLAQIAGNRYASGPVGKALSDACMGTIASFLSKYQDIIIEHQKVVKGNQKRLESLRELAGKENLEYPSVTLPPQPHTKEGVDAYNEVIARVRMWVNLNLWQKLKLSRDDAKPLLRLKGFPSFPLVERQANEVDWWDMVCNVKKLINEKKEDGKVFWQNLAGYKRQEALRPYLSSEEDRKKGKKFARYQLGDLLLHLEKKHGEDWGKVYDEAWERIDKKVEGLSKHIKLEEERRSEDAQSKAALTDWLRAKASFVIEGLKEADKDEFCRCELKLQKWYGDLRGKPFAIEAENSILDISGFSKQYNCAFIWQKDGVKKLNLYLIINYFKGGKLRFKKIKPEAFEANRFYTVINKKSGEIVPMEVNFNFDDPNLIILPLAFGKRQGREFIWNDLLSLETGSLKLANGRVIEKTLYNRRTRQDEPALFVALTFERREVLDSSNIKPMNLIGVDRGENIPAVIALTDPEGCPLSRFKDTEGNPTHILRIGESYKEKQRTIQAKKEVEQRRHGGYSRKYASKAKNLADDMVRNTARDLLYYAVTQDAMLIFENLSRGFGRQGKRTFMAERQYTRMEDWLTAKLAYEGLPSKTYLSKTLAQYTSKTCSNCGFTITSADYDRVLEKLKKTATGWMTTINGKELKVEGQITYYNRYKRQNVVKDLSVELDRLSEESVNNDISSWTKGRSGEALSLLKKRFSHRPVQEKFVCLNCGFETHADEQAALNIARSWLFLRSQEYKKYQTNKTTGNTDKRAFVETWQSFYRKKLKEVWKPAV

SEQ ID NO: 25876 - protein, 978 aa, synthetic construct
  REGION 1..978: note = engineered CasX variant
QEIKRINKIRRRLVKDSNTKKAGKTGPMKTLLVRVMTPDLRERLENLRKKPENIPQPISNTSRANLNKLLTDYTEMKKAILHVYWEEFQKDPVGLMSRVAQPASKKIDQNKLKPEMDEKGNLTTAGFACSQCGQPLFVYKLEQVSEKGKAYTNYFGRCNVAEHEKLILLAQLKPEKDSDEAVTYSLGKFGQRALDFYSIHVTKESTHPVKPLAQIAGNRYASGPVGKALSDACMGTIASFLSKYQDIIIEHQKVVKGNQKRLESLRELAGKENLEYPSVTLPPQPHTKEGVDAYNEVIARVRMWVNLNLWQKLKLSRDDAKPLLRLKGFPSFPLVERQANEVDWWDMVCNVKKLINEKKEDGKVFWQNLAGYKRQEALRPYLSSEEDRKKGKKFARYQLGDLLLHLEKKHGEDWGKVYDEAWERIDKKVEGLSKHIKLEEERRSEDAQSKAALTDWLRAKASFVIEGLKEADKDEFCRCELKLQKWYGDLRGKPFAIEAENSILDISGFSKQYNCAFIWQKDGVKKLNLYLIINYFKGGKLRFKKIKPEAFEANRFYTVINKKSGEIVPMEVNFNFDDPNLIILPLAFGKRQGREFIWNDLLSLETGSLKLANGRVIEKTLYNRRTRQDEPALFVALTFERREVLDSSNIKPMNLIGVDRGENIPAVIALTDPEGCPLSRFKDTEGNPTHILRIGESYKEKQRTIQAKKEVEQRRAGGYSRKYASKAKNLADDMVRNTARDLLYYAVTQDAMLIFENLSRGFGRQGKRTFMAERQYTRMEDWLTAKLAYEGLPSKTYLSKTLAQYTSKTCSNCGFTITSADYDRVLEKLKKTATGWMTTINGKELKVEGQITYYNRYKRQNVVKDLSVELDRLSEESVNNDISSWTKGRSGEALSLLKKRFSHRPVQEKFVCLNCGFETHADEQAALNIARSWLFLRSQEYKKYQTNKTTGNTDKRAFVETWQSFYRKKLKEVWKPAV

SEQ ID NO: 25877 - protein, 978 aa, synthetic construct
  REGION 1..978: note = engineered CasX variant
QEIKRINKIRRRLVKDSNTKKAGKTGPMKTLLVRVMTPDLRERLENLRKKPENIPQPISNTSRANLNKLLTDYTEMKKAILHVYWEEFQKDPVGLMSRVAQPASKKIDQNKLKPEMDEKGNLTTAGFACSQCGQPLFVYKLEQVSEKGKAYTNYFGRCNVAEHEKLILLAQLKPEKDSDEAVTYSLGKFGQRALDFYSIHVTKESTHPVKPLAQIAGNRYASGPVGKALSDACMGTIASFLSKYQDIIIEHQKVVKGNQKRLESLRELAGKENLEYPSVTLPPQPHTKEGVDAYNEVIARVRMWVNLNLWQKLKLSRDDAKPLLRLKGFPSFPLVERQANEVDWWDMVCNVKKLINEKKEDGKVFWQNLAGYKRQEALRPYLSSEEDRKKGKKFARYQLGDLLLHLEKKHGEDWGKVYDEAWERIDKKVEGLSKHIKLEEERRSEDAQSKAALTDWLRAKASFVIEGLKEADKDEFCRCELKLQKWYGDLRGKPFAIEAENSILDISGFSKQYNCAFIWQKDGVKKLNLYLIINYFKGGKLRFKKIKPEAFEANRFYTVINKKSGEIVPMEVNFNFDDPNLIILPLAFGKRQGREFIWNDLLSLETGSLKLANGRVIEKTLYNRRTRQDEPALFVALTFERREVLDSSNIKPMNLIGVDRGENIPAVIALTDPEGCPLSRFKDSYGNPTHILRIGESYKEKQRTYQAKKEVEQRRAGGYSRKYASKAKNLADDMVRNTARDLLYYAVTQDAMLIFENLSRGFGRQGKRTFMAERQYTRMEDWLTAKLAYEGLPSKTYLSKTLAQYTSKTCSNCGFTITSADYDRVLEKLKKTATGWMTTINGKELKVEGQITYYNRYKRQNVVKDLSVELDRLSEESVNNDISSWTKGRSGEALSLLKKRFSHRPVQEKFVCLNCGFETHADEQAALNIARSWLFLRSQEYKKYQTNKTTGNTDKRAFVETWQSFYRKKLKEVWKPAV

SEQ ID NO: 25878 - protein, 978 aa, synthetic construct
  REGION 1..978: note = engineered CasX variant
QEIKRINKIRRRLVKDSNTKKAGKTGPMKTLLVRVMTPDLRERLENLRKKPENIPQPISNTSRANLNKLLTDYTEMKKAILHVYWEEFQKDPVGLMSRVAQPASKKIDQNKLKPEMDEKGNLTTAGFACSQCGQPLFVYKLEQVSEKGKAYTNYFGRCNVAEHEKLILLAQLKPEKDSDEAVTYSLGKFGQRALDFYSIHVTKESTHPVKPLAQIAGNRYASGPVGKALSDACMGTIASFLSKYQDIIIEHQKVVKGNQKRLESLRELAGKENLEYPSVTLPPQPHTKEGVDAYNEVIARVRMWVNLNLWQKLKLSRDDAKPLLRLKGFPSFPLVERQANEVDWWDMVCNVKKLINEKKEDGKVFWQNLAGYKRQEALRPYLSSEEDRKKGKKFARYQLGDLLLHLEKKHGEDWGKVYDEAWERIDKKVEGLSKHIKLEEERRSEDAQSKAALTDWLRAKASFVIEGLKEADKDEFCRCELKLQKWYGDLRGKPFAIEAENSILDISGFSKQYNCAFIWQKDGVKKLNLYLIINYFKGGKLRFKKIKPEAFEANRFYTVINKKSGEIVPMEVNFNFDDPNLIILPLAFGKRQGREFIWNDLLSLETGSLKLANGRVIEKTLYNRRTRQDEPALFVALTFERREVLDSSNIKPMNLIGVDRGENIPAVIALTDPEGCPLSRFKDSYGNPTHILRIGESYKEKQRTIQAYKEVEQRRAGGYSRKYASKAKNLADDMVRNTARDLLYYAVTQDAMLIFENLSRGFGRQGKRTFMAERQYTRMEDWLTAKLAYEGLPSKTYLSKTLAQYTSKTCSNCGFTITSADYDRVLEKLKKTATGWMTTINGKELKVEGQITYYNRYKRQNVVKDLSVELDRLSEESVNNDISSWTKGRSGEALSLLKKRFSHRPVQEKFVCLNCGFETHADEQAALNIARSWLFLRSQEYKKYQTNKTTGNTDKRAFVETWQSFYRKKLKEVWKPAV

SEQ ID NO: 25879 - protein, 978 aa, synthetic construct
  REGION 1..978: note = engineered CasX variant
QEIKRINKIRRRLVKDSNTKKAGKTGPMKTLLVRVMTPDLRERLENLRKKPENIPQPISNTSRANLNKLLTDYTEMKKAILHVYWEEFQKDPVGLMSRVAQPASKKIDQNKLKPEMDEKGNLTTAGFACSQCGQPLFVYKLEQVSEKGKAYTNYFGRCNVAEHEKLILLAQLKPEKDSDEAVTYSLGKFGQRALDFYSIHVTKESTHPVKPLAQIAGNRYASGPVGKALSDACMGTIASFLSKYQDIIIEHQKVVKGNQKRLESLRELAGKENLEYPSVTLPPQPHTKEGVDAYNEVIARVRMWVNLNLWQKLKLSRDDAKPLLRLKGFPSFPLVERQANEVDWWDMVCNVKKLINEKKEDGKVFWQNLAGYKRQEALRPYLSSEEDRKKGKKFARYQLGDLLLHLEKKHGEDWGKVYDEAWERIDKKVEGLSKHIKLEEERRSEDAQSKAALTDWLRAKASFVIEGLKEADKDEFCRCELKLQKWYGDLRGKPFAIEAENSILDISGFSKQYNCAFIWQKDGVKKLNLYLIINYFKGGKLRFKKIKPEAFEANRFYTVINKKSGEIVPMEVNFNFDDPNLIILPLAFGKRQGREFIWNDLLSLETGSLKLANGRVIEKTLYNRRTRQDEPALFVALTFERREVLDSSNIKPMNLIGVDRGENIPAVIALTDPEGCPLSRFKDSYGNPTHILRIGESYKEKQRTIQAKKEVEQRRAGGYSRKYASKAKNLADDMVRNTARDLLYYAVTQDAMLIFENLSRGFGRQGKRTFMAERQYTRMEDWLTAKLAYEGLPSKTYLSKTLAQYTSKTCSNCGFTITSADYDRVLEKLKKTATGWMTTINGKELKVEGQITYYNRYKRQNVVKDLSVELDRLSEESVNNDISSWTKGRSGEALSLLKKRFSHRPVQEKFVCLNCGFETHADEQAALNIARSWLFLRSQEYKKYQTNKTTGNTDKRAFVETWQSFYRKKLKEVWKPAV

SEQ ID NO: 25880 - protein, 978 aa, synthetic construct
  REGION 1..978: note = engineered CasX variant
QEIKRINKIRRRLVKDSNTKKAGKTGPMKTLLVRVMTPDLRERLENLRKKPENIPQPISNTSRANLNKLLTDYTEMKKAILHVYWEEFQKDPVGLMSRVAQPASKKIDQNKLKPEMDEKGNLTTAGFACSQCGQPLFVYKLEQVSEKGKAYTNYFGRCNVAEHEKLILLAQLKPEKDSDEAVTYSLGKFGQRALDFYSIHVTKESTHPVKPLAQIAGNRYASGPVGKALSDACMGTIASFLSKYQDIIIEHQKVVKGNQKRLESLRELAGKENLEYPSVTLPPQPHTKEGVDAYNEVIARVRMWVNLNLWQKLKLSRDDAKPLLRLKGFPSFPLVERQANEVDWWDMVCNVKKLINEKKEDGKVFWQNLAGYKRQEALRPYLSSEEDRKKGKKFARYQLGDLLLHLEKKHGEDWGKVYDEAWERIDKKVEGLSKHIKLEEERRSEDAQSKAALTDWLRAKASFVIEGLKEADKDEFCRCELKLQKWYGDLRGKPFAIEAENSILDISGFSKQYNCAFIWQKDGVKKLNLYLIINYFKGGKLRFKKIKPEAFEANRFYTVINKKSGEIVPMEVNFNFDDPNLIILPLAFGKRQGREFIWNDLLSLETGSLKLANGRVIEKTLYNRRTRQDEPALFVALTFERREVLDSSNIKPMNLIGVDRGENIPAVIALTDPEGCPLSRFKDSYGNPTHILRIGESYKEKQRTIQACKEVEQRRAGGYSRKYASKAKNLADDMVRNTARDLLYYAVTQDAMLIFENLSRGFGRQGKRTFMAERQYTRMEDWLTAKLAYEGLPSKTYLSKTLAQYTSKTCSNCGFTITSADYDRVLEKLKKTATGWMTTINGKELKVEGQITYYNRYKRQNVVKDLSVELDRLSEESVNNDISSWTKGRSGEALSLLKKRFSHRPVQEKFVCLNCGFETHADEQAALNIARSWLFLRSQEYKKYQTNKTTGNTDKRAFVETWQSFYRKKLKEVWKPAV

SEQ ID NO: 25881 - protein, 978 aa, synthetic construct
  REGION 1..978: note = engineered CasX variant
QEIKRINKIRRRLVKDSNTKKAGKTGPMKTLLVRVMTPDLRERLENLRKKPENIPQPISNTSRANLNKLLTDYTEMKKAILHVYWEEFQKDPVGLMSRVAQPASKKIDQNKLKPEMDEKGNLTTAGFACSQCGQPLFVYKLEQVSEKGKAYTNYFGRCNVAEHEKLILLAQLKPEKDSDEAVTYSLGKFGQRALDFYSIHVTKESTHPVKPLAQIAGNRYASGPVGKALSDACMGTIASFLSKYQDIIIEHQKVVKGNQKRLESLRELAGKENLEYPSVTLPPQPHTKEGVDAYNEVIARVRMWVNLNLWQKLKLSRDDAKPLLRLKGFPSFPLVERQANEVDWWDMVCNVKKLINEKKEDGKVFWQNLAGYKRQEALRPYLSSEEDRKKGKKFARYQLGDLLLHLEKKHGEDWGKVYDEAWERIDKKVEGLSKHIKLEEERRSEDAQSKAALTDWLRAKASFVIEGLKEADKDEFCRCELKLQKWYGDLRGKPFAIEAENSILDISGFSKQYNCAFIWQKDGVKKLNLYLIINYFKGGKLRFKKIKPEAFEANRFYTVINKKSGEIVPMEVNFNFDDPNLIILPLAFGKRQGREFIWNDLLSLETGSLKLANGRVIEKTLYNRRTRQDEPALFVALTFERREVLDSSNIKPMNLIGVDRGENIPAVIALTDPEGCPLSRFKDSYGNPTHILRIGESYKCKQRTIQAKKEVEQRRAGGYSRKYASKAKNLADDMVRNTARDLLYYAVTQDAMLIFENLSRGFGRQGKRTFMAERQYTRMEDWLTAKLAYEGLPSKTYLSKTLAQYTSKTCSNCGFTITSADYDRVLEKLKKTATGWMTTINGKELKVEGQITYYNRYKRQNVVKDLSVELDRLSEESVNNDISSWTKGRSGEALSLLKKRFSHRPVQEKFVCLNCGFETHADEQAALNIARSWLFLRSQEYKKYQTNKTTGNTDKRAFVETWQSFYRKKLKEVWKPAV

SEQ ID NO: 25882 - protein, 978 aa, synthetic construct
  REGION 1..978: note = engineered CasX variant
QEIKRINKIRRRLVKDSNTKKAGKTGPMKTLLVRVMTPDLRERLENLRKKPENIPQPISNTSRANLNKLLTDYTEMKKAILHVYWEEFQKDPVGLMSRVAQPASKKIDQNKLKPEMDEKGNLTTAGFACSQCGQPLFVYKLEQVSEKGKAYTNYFGRCNVAEHEKLILLAQLKPEKDSDEAVTYSLGKFGQRALDFYSIHVTKESTHPVKPLAQIAGNRYASGPVGKALSDACMGTIASFLSKYQDIIIEHQKVVKGNQKRLESLRELAGKENLEYPSVTLPPQPHTKEGVDAYNEVIARVRMWVNLNLWQKLKLSRDDAKPLLRLKGFPSFPLVERQANEVDWWDMVCNVKKLINEKKEDGKVFWQNLAGYKRQEALRPYLSSEEDRKKGKKFARYQLGDLLLHLEKKHGEDWGKVYDEAWERIDKKVEGLSKHIKLEEERRSEDAQSKAALTDWLRAKASFVIEGLKEADKDEFCRCELKLQKWYGDLRGKPFAIEAENSILDISGFSKQYNCAFIWQKDGVKKLNLYLIINYFKGGKLRFKKIKPEAFEANRFYTVINKKSGEIVPMEVNFNFDDPNLIILPLAFGKRQGREFIWNDLLSLETGSLKLANGRVIEKTLYNRRTRQDEPALFVALTFERREVLDSSNIKPMNLIGVDRGENIPAVIALTDPEGCPLSRFKDSYGNPTHILRIGESYKCKQRTIQACKEVEQRRAGGYSRKYASKAKNLADDMVRNTARDLLYYAVTQDAMLIFENLSRGFGRQGKRTFMAERQYTRMEDWLTAKLAYEGLPSKTYLSKTLAQYTSKTCSNCGFTITSADYDRVLEKLKKTATGWMTTINGKELKVEGQITYYNRYKRQNVVKDLSVELDRLSEESVNNDISSWTKGRSGEALSLLKKRFSHRPVQEKFVCLNCGFETHADEQAALNIARSWLFLRSQEYKKYQTNKTTGNTDKRAFVETWQSFYRKKLKEVWKPAV

SEQ ID NO: 25883 - protein, 978 aa, synthetic construct
  REGION 1..978: note = engineered CasX variant
QEIKRINKIRRRLVKDSNTKKAGKTGPMKTLLVRVMTPDLRERLENLRKKPENIPQPISNTSRANLNKLLTDYTEMKKAILHVYWEEFQKDPVGLMSRVAQPASKKIDQNKLKPEMDEKGNLTTAGFACSQCGQPLFVYKLEQVSEKGKAYTNYFGRCNVAEHEKLILLAQLKPEKDSDEAVTYSLGKFGQRALDFYSIHVTKESTHPVKPLAQIAGNRYASGPVGKALSDACMGTIASFLSKYQDIIIEHQKVVKGNQKRLESLRELAGKENLEYPSVTLPPQPHTKEGVDAYNEVIARVRMWVNLNLWQKLKLSRDDAKPLLRLKGFPSFPLVERQANEVDWWDMVCNVKKLINEKKEDGKVFWQNLAGYKRQEALRPYLSSEEDRKKGKKFARYQLGDLLLHLEKKHGEDWGKVYDEAWERIDKKVEGLSKHIKLEEERRSEDAQSKAALTDWLRAKASFVIEGLKEADKDEFCRCELKLQKWYGDLRGKPFAIEAENSILDISGFSKQYNCAFIWQKDGVKKLNLYLIINYFKGGKLRFKKIKPEAFEANRFYTVINKKSGEIVPMEVNFNFDDPNLIILPLAFGKRQGREFIWNDLLSLETGSLKLANGRVIEKTLYNRRTRQDEPALFVALTFERREVLDSSNIKPMNLIGVDRGENIPAVIALTDPEGCPLSRFKDSWGNPTHILRIGESYKMKQRTIQAKKEVEQRRAGGYSRKYASKAKNLADDMVRNTARDLLYYAVTQDAMLIFENLSRGFGRQGKRTFMAERQYTRMEDWLTAKLAYEGLPSKTYLSKTLAQYTSKTCSNCGFTITSADYDRVLEKLKKTATGWMTTINGKELKVEGQITYYNRYKRQNVVKDLSVELDRLSEESVNNDISSWTKGRSGEALSLLKKRFSHRPVQEKFVCLNCGFETHADEQAALNIARSWLFLRSQEYKKYQTNKTTGNTDKRAFVETWQSFYRKKLKEVWKPAV

SEQ ID NO: 25884 - protein, 978 aa, synthetic construct
  REGION 1..978: note = engineered CasX variant
QEIKRINKIRRRLVKDSNTKKAGKTGPMKTLLVRVMTPDLRERLENLRKKPENIPQPISNTSRANLNKLLTDYTEMKKAILHVYWEEFQKDPVGLMSRVAQPASKKIDQNKLKPEMDEKGNLTTAGFACSQCGQPLFVYKLEQVSEKGKAYTNYFGRCNVAEHEKLILLAQLKPEKDSDEAVTYSLGKFGQRALDFYSIHVTKESTHPVKPLAQIAGNRYASGPVGKALSDACMGTIASFLSKYQDIIIEHQKVVKGNQKRLESLRELAGKENLEYPSVTLPPQPHTKEGVDAYNEVIARVRMWVNLNLWQKLKLSRDDAKPLLRLKGFPSFPLVERQANEVDWWDMVCNVKKLINEKKEDGKVFWQNLAGYKRQEALRPYLSSEEDRKKGKKFARYQLGDLLLHLEKKHGEDWGKVYDEAWERIDKKVEGLSKHIKLEEERRSEDAQSKAALTDWLRAKASFVIEGLKEADKDEFCRCELKLQKWYGDLRGKPFAIEAENSILDISGFSKQYNCAFIWQKDGVKKLNLYLIINYFKGGKLRFKKIKPEAFEANRFYTVINKKSGEIVPMEVNFNFDDPNLIILPLAFGKRQGREFIWNDLLSLETGSLKLANGRVIEKTLYNRRTRQDEPALFVALTFERREVLDSSNIKPMNLIGVDRGENIPAVIALTDPEGCPLSRFKDSWGNPTHILRIGESYKEKQRTIQAKKEVEQRRAGGYSRKYASKAKNLADDMVRNTARDLLYYAVTQDAMLIFENLSRGFGRQGKRTFMAERQYTRMEDWLTAKLAYEGLPSKTYLSKTLAQYTSKTCSNCGFTITSADYDRVLEKLKKTATGWMTTINGKELKVEGQITYYNRYKRQNVVKDLSVELDRLSEESVNNDISSWTKGRSGEALSLLKKRFSHRPVQEKFVCLNCGFETHADEQAALNIARSWLFLRSQEYKKYQTNKTTGNTDKRAFVETWQSFYRKKLKEVWKPAV

SEQ ID NO: 25885 - protein, 978 aa, synthetic construct
  REGION 1..978: note = engineered CasX variant
QEIKRINKIRRRLVKDSNTKKAGKTGPMKTLLVRVMTPDLRERLENLRKKPENIPQPISNTSRANLNKLLTDYTEMKKAILHVYWEEFQKDPVGLMSRVAQPASKKIDQNKLKPEMDEKGNLTTAGFACSQCGQPLFVYKLEQVSEKGKAYTNYFGRCNVAEHEKLILLAQLKPEKDSDEAVTYSLGKFGQRALDFYSIHVTKESTHPVKPLAQIAGNRYASGPVGKALSDACMGTIASFLSKYQDIIIEHQKVVKGNQKRLESLRELAGKENLEYPSVTLPPQPHTKEGVDAYNEVIARVRMWVNLNLWQKLKLSRDDAKPLLRLKGFPSFPLVERQANEVDWWDMVCNVKKLINEKKEDGKVFWQNLAGYKRQEALRPYLSSEEDRKKGKKFARYQLGDLLLHLEKKHGEDWGKVYDEAWERIDKKVEGLSKHIKLEEERRSEDAQSKAALTDWLRAKASFVIEGLKEADKDEFCRCELKLQKWYGDLRGKPFAIEAENSILDISGFSKQYNCAFIWQKDGVKKLNLYLIINYFKGGKLRFKKIKPEAFEANRFYTVINKKSGEIVPMEVNFNFDDPNLIILPLAFGKRQGREFIWNDLLSLETGSLKLANGRVIEKTLYNRRTRQDEPALFVALTFERREVLDSSNIKPMNLIGVDRGENIPAVIALTDPEGCPLSRFKDSVGNPTHILRIGESYKEKQRTIQAKKEVEQRRAGGYSRKYASKAKNLADDMVRNTARDLLYYAVTQDAMLIFENLSRGFGRQGKRTFMAERQYTRMEDWLTAKLAYEGLPSKTYLSKTLAQYTSKTCSNCGFTITSADYDRVLEKLKKTATGWMTTINGKELKVEGQITYYNRYKRQNVVKDLSVELDRLSEESVNNDISSWTKGRSGEALSLLKKRFSHRPVQEKFVCLNCGFETHADEQAALNIARSWLFLRSQEYKKYQTNKTTGNTDKRAFVETWQSFYRKKLKEVWKPAV

SEQ ID NO: 25886 - protein, 978 aa, synthetic construct
  REGION 1..978: note = engineered CasX variant
QEIKRINKIRRRLVKDSNTKKAGKTGPMKTLLVRVMTPDLRERLENLRKKPENIPQPISNTSRANLNKLLTDYTEMKKAILHVYWEEFQKDPVGLMSRVAQPASKKIDQNKLKPEMDEKGNLTTAGFACSQCGQPLFVYKLEQVSEKGKAYTNYFGRCNVAEHEKLILLAQLKPEKDSDEAVTYSLGKFGQRALDFYSIHVTKESTHPVKPLAQIAGNRYASGPVGKALSDACMGTIASFLSKYQDIIIEHQKVVKGNQKRLESLRELAGKENLEYPSVTLPPQPHTKEGVDAYNEVIARVRMWVNLNLWQKLKLSRDDAKPLLRLKGFPSFPLVERQANEVDWWDMVCNVKKLINEKKEDGKVFWQNLAGYKRQEALRPYLSSEEDRKKGKKFARYQLGDLLLHLEKKHGEDWGKVYDEAWERIDKKVEGLSKHIKLEEERRSEDAQSKAALTDWLRAKASFVIEGLKEADKDEFCRCELKLQKWYGDLRGKPFAIEAENSILDISGFSKQYNCAFIWQKDGVKKLNLYLIINYFKGGKLRFKKIKPEAFEANRFYTVINKKSGEIVPMEVNFNFDDPNLIILPLAFGKRQGREFIWNDLLSLETGSLKLANGRVIEKTLYNRRTRQDEPALFVALTFERREVLDSSNIKPMNLIGVDRGENIPAVIALTDPEGCPLSRFKDSVGNPTHILRIGESYKEKQRTFQAKKEVEQRRAGGYSRKYASKAKNLADDMVRNTARDLLYYAVTQDAMLIFENLSRGFGRQGKRTFMAERQYTRMEDWLTAKLAYEGLPSKTYLSKTLAQYTSKTCSNCGFTITSADYDRVLEKLKKTATGWMTTINGKELKVEGQITYYNRYKRQNVVKDLSVELDRLSEESVNNDISSWTKGRSGEALSLLKKRFSHRPVQEKFVCLNCGFETHADEQAALNIARSWLFLRSQEYKKYQTNKTTGNTDKRAFVETWQSFYRKKLKEVWKPAV

SEQ ID NO: 25887 - protein, 978 aa, synthetic construct
  REGION 1..978: note = engineered CasX variant
QEIKRINKIRRRLVKDSNTKKAGKTGPMKTLLVRVMTPDLRERLENLRKKPENIPQPISNTSRANLNKLLTDYTEMKKAILHVYWEEFQKDPVGLMSRVAQPASKKIDQNKLKPEMDEKGNLTTAGFACSQCGQPLFVYKLEQVSEKGKAYTNYFGRCNVAEHEKLILLAQLKPEKDSDEAVTYSLGKFGQRALDFYSIHVTKESTHPVKPLAQIAGNRYASGPVGKALSDACMGTIASFLSKYQDIIIEHQKVVKGNQKRLESLRELAGKENLEYPSVTLPPQPHTKEGVDAYNEVIARVRMWVNLNLWQKLKLSRDDAKPLLRLKGFPSFPLVERQANEVDWWDMVCNVKKLINEKKEDGKVFWQNLAGYKRQEALRPYLSSEEDRKKGKKFARYQLGDLLLHLEKKHGEDWGKVYDEAWERIDKKVEGLSKHIKLEEERRSEDAQSKAALTDWLRAKASFVIEGLKEADKDEFCRCELKLQKWYGDLRGKPFAIEAENSILDISGFSKQYNCAFIWQKDGVKKLNLYLIINYFKGGKLRFKKIKPEAFEANRFYTVINKKSGEIVPMEVNFNFDDPNLIILPLAFGKRQGREFIWNDLLSLETGSLKLANGRVIEKTLYNRRTRQDEPALFVALTFERREVLDSSNIKPMNLIGVDRGENIPAVIALTDPEGCPLSRFKDSTGNPTHILRIGESYKYKQRTIQAKKEVEQRRAGGYSRKYASKAKNLADDMVRNTARDLLYYAVTQDAMLIFENLSRGFGRQGKRTFMAERQYTRMEDWLTAKLAYEGLPSKTYLSKTLAQYTSKTCSNCGFTITSADYDRVLEKLKKTATGWMTTINGKELKVEGQITYYNRYKRQNVVKDLSVELDRLSEESVNNDISSWTKGRSGEALSLLKKRFSHRPVQEKFVCLNCGFETHADEQAALNIARSWLFLRSQEYKKYQTNKTTGNTDKRAFVETWQSFYRKKLKEVWKPAV

SEQ ID NO: 25888 - protein, 978 aa, synthetic construct
  REGION 1..978: note = engineered CasX variant
QEIKRINKIRRRLVKDSNTKKAGKTGPMKTLLVRVMTPDLRERLENLRKKPENIPQPISNTSRANLNKLLTDYTEMKKAILHVYWEEFQKDPVGLMSRVAQPASKKIDQNKLKPEMDEKGNLTTAGFACSQCGQPLFVYKLEQVSEKGKAYTNYFGRCNVAEHEKLILLAQLKPEKDSDEAVTYSLGKFGQRALDFYSIHVTKESTHPVKPLAQIAGNRYASGPVGKALSDACMGTIASFLSKYQDIIIEHQKVVKGNQKRLESLRELAGKENLEYPSVTLPPQPHTKEGVDAYNEVIARVRMWVNLNLWQKLKLSRDDAKPLLRLKGFPSFPLVERQANEVDWWDMVCNVKKLINEKKEDGKVFWQNLAGYKRQEALRPYLSSEEDRKKGKKFARYQLGDLLLHLEKKHGEDWGKVYDEAWERIDKKVEGLSKHIKLEEERRSEDAQSKAALTDWLRAKASFVIEGLKEADKDEFCRCELKLQKWYGDLRGKPFAIEAENSILDISGFSKQYNCAFIWQKDGVKKLNLYLIINYFKGGKLRFKKIKPEAFEANRFYTVINKKSGEIVPMEVNFNFDDPNLIILPLAFGKRQGREFIWNDLLSLETGSLKLANGRVIEKTLYNRRTRQDEPALFVALTFERREVLDSSNIKPMNLIGVDRGENIPAVIALTDPEGCPLSRFKDSTGNPTHILRIGESYKEKQRTIQAKKEVEQRRRGGYSRKYASKAKNLADDMVRNTARDLLYYAVTQDAMLIFENLSRGFGRQGKRTFMAERQYTRMEDWLTAKLAYEGLPSKTYLSKTLAQYTSKTCSNCGFTITSADYDRVLEKLKKTATGWMTTINGKELKVEGQITYYNRYKRQNVVKDLSVELDRLSEESVNNDISSWTKGRSGEALSLLKKRFSHRPVQEKFVCLNCGFETHADEQAALNIARSWLFLRSQEYKKYQTNKTTGNTDKRAFVETWQSFYRKKLKEVWKPAV

SEQ ID NO: 25889 - protein, 978 aa, synthetic construct
  REGION 1..978: note = engineered CasX variant
QEIKRINKIRRRLVKDSNTKKAGKTGPMKTLLVRVMTPDLRERLENLRKKPENIPQPISNTSRANLNKLLTDYTEMKKAILHVYWEEFQKDPVGLMSRVAQPASKKIDQNKLKPEMDEKGNLTTAGFACSQCGQPLFVYKLEQVSEKGKAYTNYFGRCNVAEHEKLILLAQLKPEKDSDEAVTYSLGKFGQRALDFYSIHVTKESTHPVKPLAQIAGNRYASGPVGKALSDACMGTIASFLSKYQDIIIEHQKVVKGNQKRLESLRELAGKENLEYPSVTLPPQPHTKEGVDAYNEVIARVRMWVNLNLWQKLKLSRDDAKPLLRLKGFPSFPLVERQANEVDWWDMVCNVKKLINEKKEDGKVFWQNLAGYKRQEALRPYLSSEEDRKKGKKFARYQLGDLLLHLEKKHGEDWGKVYDEAWERIDKKVEGLSKHIKLEEERRSEDAQSKAALTDWLRAKASFVIEGLKEADKDEFCRCELKLQKWYGDLRGKPFAIEAENSILDISGFSKQYNCAFIWQKDGVKKLNLYLIINYFKGGKLRFKKIKPEAFEANRFYTVINKKSGEIVPMEVNFNFDDPNLIILPLAFGKRQGREFIWNDLLSLETGSLKLANGRVIEKTLYNRRTRQDEPALFVALTFERREVLDSSNIKPMNLIGVDRGENIPAVIALTDPEGCPLSRFKDSTGNPTHILRIGESYKEKQRTIQAKKEVEQRRAGGYSRKYASKAKNLADDMVRNTARDLLYYAVTQDAMLIFENLSRGFGRQGKRTFMAERQYTRMEDWLTAKLAYEGLPSKTYLSKTLAQYTSKTCSNCGFTITSADYDRVLEKLKKTATGWMTTINGKELKVEGQITYYNRYKRQNVVKDLSVELDRLSEESVNNDISSWTKGRSGEALSLLKKRFSHRPVQEKFVCLNCGFETHADEQAALNIARSWLFLRSQEYKKYQTNKTTGNTDKRAFVETWQSFYRKKLKEVWKPAV

SEQ ID NO: 25890 - protein, 978 aa, synthetic construct
  REGION 1..978: note = engineered CasX variant
QEIKRINKIRRRLVKDSNTKKAGKTGPMKTLLVRVMTPDLRERLENLRKKPENIPQPISNTSRANLNKLLTDYTEMKKAILHVYWEEFQKDPVGLMSRVAQPASKKIDQNKLKPEMDEKGNLTTAGFACSQCGQPLFVYKLEQVSEKGKAYTNYFGRCNVAEHEKLILLAQLKPEKDSDEAVTYSLGKFGQRALDFYSIHVTKESTHPVKPLAQIAGNRYASGPVGKALSDACMGTIASFLSKYQDIIIEHQKVVKGNQKRLESLRELAGKENLEYPSVTLPPQPHTKEGVDAYNEVIARVRMWVNLNLWQKLKLSRDDAKPLLRLKGFPSFPLVERQANEVDWWDMVCNVKKLINEKKEDGKVFWQNLAGYKRQEALRPYLSSEEDRKKGKKFARYQLGDLLLHLEKKHGEDWGKVYDEAWERIDKKVEGLSKHIKLEEERRSEDAQSKAALTDWLRAKASFVIEGLKEADKDEFCRCELKLQKWYGDLRGKPFAIEAENSILDISGFSKQYNCAFIWQKDGVKKLNLYLIINYFKGGKLRFKKIKPEAFEANRFYTVINKKSGEIVPMEVNFNFDDPNLIILPLAFGKRQGREFIWNDLLSLETGSLKLANGRVIEKTLYNRRTRQDEPALFVALTFERREVLDSSNIKPMNLIGVDRGENIPAVIALTDPEGCPLSRFKDSTGNPTHILRIGESYKEKQRMIQAKKEVEQRRAGGYSRKYASKAKNLADDMVRNTARDLLYYAVTQDAMLIFENLSRGFGRQGKRTFMAERQYTRMEDWLTAKLAYEGLPSKTYLSKTLAQYTSKTCSNCGFTITSADYDRVLEKLKKTATGWMTTINGKELKVEGQITYYNRYKRQNVVKDLSVELDRLSEESVNNDISSWTKGRSGEALSLLKKRFSHRPVQEKFVCLNCGFETHADEQAALNIARSWLFLRSQEYKKYQTNKTTGNTDKRAFVETWQSFYRKKLKEVWKPAV

SEQ ID NO: 25891 - protein, 978 aa, synthetic construct
  REGION 1..978: note = engineered CasX variant
QEIKRINKIRRRLVKDSNTKKAGKTGPMKTLLVRVMTPDLRERLENLRKKPENIPQPISNTSRANLNKLLTDYTEMKKAILHVYWEEFQKDPVGLMSRVAQPASKKIDQNKLKPEMDEKGNLTTAGFACSQCGQPLFVYKLEQVSEKGKAYTNYFGRCNVAEHEKLILLAQLKPEKDSDEAVTYSLGKFGQRALDFYSIHVTKESTHPVKPLAQIAGNRYASGPVGKALSDACMGTIASFLSKYQDIIIEHQKVVKGNQKRLESLRELAGKENLEYPSVTLPPQPHTKEGVDAYNEVIARVRMWVNLNLWQKLKLSRDDAKPLLRLKGFPSFPLVERQANEVDWWDMVCNVKKLINEKKEDGKVFWQNLAGYKRQEALRPYLSSEEDRKKGKKFARYQLGDLLLHLEKKHGEDWGKVYDEAWERIDKKVEGLSKHIKLEEERRSEDAQSKAALTDWLRAKASFVIEGLKEADKDEFCRCELKLQKWYGDLRGKPFAIEAENSILDISGFSKQYNCAFIWQKDGVKKLNLYLIINYFKGGKLRFKKIKPEAFEANRFYTVINKKSGEIVPMEVNFNFDDPNLIILPLAFGKRQGREFIWNDLLSLETGSLKLANGRVIEKTLYNRRTRQDEPALFVALTFERREVLDSSNIKPMNLIGVDRGENIPAVIALTDPEGCPLSRFKDSTGNPTHILRIGASYKEKQRTIQAKKEVEQRRAGGYSRKYASKAKNLADDMVRNTARDLLYYAVTQDAMLIFENLSRGFGRQGKRTFMAERQYTRMEDWLTAKLAYEGLPSKTYLSKTLAQYTSKTCSNCGFTITSADYDRVLEKLKKTATGWMTTINGKELKVEGQITYYNRYKRQNVVKDLSVELDRLSEESVNNDISSWTKGRSGEALSLLKKRFSHRPVQEKFVCLNCGFETHADEQAALNIARSWLFLRSQEYKKYQTNKTTGNTDKRAFVETWQSFYRKKLKEVWKPAV

SEQ ID NO: 25892 - protein, 978 aa, synthetic construct
  REGION 1..978: note = engineered CasX variant
QEIKRINKIRRRLVKDSNTKKAGKTGPMKTLLVRVMTPDLRERLENLRKKPENIPQPISNTSRANLNKLLTDYTEMKKAILHVYWEEFQKDPVGLMSRVAQPASKKIDQNKLKPEMDEKGNLTTAGFACSQCGQPLFVYKLEQVSEKGKAYTNYFGRCNVAEHEKLILLAQLKPEKDSDEAVTYSLGKFGQRALDFYSIHVTKESTHPVKPLAQIAGNRYASGPVGKALSDACMGTIASFLSKYQDIIIEHQKVVKGNQKRLESLRELAGKENLEYPSVTLPPQPHTKEGVDAYNEVIARVRMWVNLNLWQKLKLSRDDAKPLLRLKGFPSFPLVERQANEVDWWDMVCNVKKLINEKKEDGKVFWQNLAGYKRQEALRPYLSSEEDRKKGKKFARYQLGDLLLHLEKKHGEDWGKVYDEAWERIDKKVEGLSKHIKLEEERRSEDAQSKAALTDWLRAKASFVIEGLKEADKDEFCRCELKLQKWYGDLRGKPFAIEAENSILDISGFSKQYNCAFIWQKDGVKKLNLYLIINYFKGGKLRFKKIKPEAFEANRFYTVINKKSGEIVPMEVNFNFDDPNLIILPLAFGKRQGREFIWNDLLSLETGSLKLANGRVIEKTLYNRRTRQDEPALFVALTFERREVLDSSNIKPMNLIGVDRGENIPAVIALTDPEGCPLSRFKDSSGNPTHILRIGESYKEKQRTIQAKKEVEQRRAGGYSRKYASKAKNLADDMVRNTARDLLYYAVTQDAMLIFENLSRGFGRQGKRTFMAERQYTRMEDWLTAKLAYEGLPSKTYLSKTLAQYTSKTCSNCGFTITSADYDRVLEKLKKTATGWMTTINGKELKVEGQITYYNRYKRQNVVKDLSVELDRLSEESVNNDISSWTKGRSGEALSLLKKRFSHRPVQEKFVCLNCGFETHADEQAALNIARSWLFLRSQEYKKYQTNKTTGNTDKRAFVETWQSFYRKKLKEVWKPAV

SEQ ID NO: 25893 - protein, 978 aa, synthetic construct
  REGION 1..978: note = engineered CasX variant
QEIKRINKIRRRLVKDSNTKKAGKTGPMKTLLVRVMTPDLRERLENLRKKPENIPQPISNTSRANLNKLLTDYTEMKKAILHVYWEEFQKDPVGLMSRVAQPASKKIDQNKLKPEMDEKGNLTTAGFACSQCGQPLFVYKLEQVSEKGKAYTNYFGRCNVAEHEKLILLAQLKPEKDSDEAVTYSLGKFGQRALDFYSIHVTKESTHPVKPLAQIAGNRYASGPVGKALSDACMGTIASFLSKYQDIIIEHQKVVKGNQKRLESLRELAGKENLEYPSVTLPPQPHTKEGVDAYNEVIARVRMWVNLNLWQKLKLSRDDAKPLLRLKGFPSFPLVERQANEVDWWDMVCNVKKLINEKKEDGKVFWQNLAGYKRQEALRPYLSSEEDRKKGKKFARYQLGDLLLHLEKKHGEDWGKVYDEAWERIDKKVEGLSKHIKLEEERRSEDAQSKAALTDWLRAKASFVIEGLKEADKDEFCRCELKLQKWYGDLRGKPFAIEAENSILDISGFSKQYNCAFIWQKDGVKKLNLYLIINYFKGGKLRFKKIKPEAFEANRFYTVINKKSGEIVPMEVNFNFDDPNLIILPLAFGKRQGREFIWNDLLSLETGSLKLANGRVIEKTLYNRRTRQDEPALFVALTFERREVLDSSNIKPMNLIGVDRGENIPAVIALTDPEGCPLSRFKDSSGNPTHILRIGESYKEKQRTIQAKKELEQRRAGGYSRKYASKAKNLADDMVRNTARDLLYYAVTQDAMLIFENLSRGFGRQGKRTFMAERQYTRMEDWLTAKLAYEGLPSKTYLSKTLAQYTSKTCSNCGFTITSADYDRVLEKLKKTATGWMTTINGKELKVEGQITYYNRYKRQNVVKDLSVELDRLSEESVNNDISSWTKGRSGEALSLLKKRFSHRPVQEKFVCLNCGFETHADEQAALNIARSWLFLRSQEYKKYQTNKTTGNTDKRAFVETWQSFYRKKLKEVWKPAV

SEQ ID NO: 25894 - protein, 978 aa, synthetic construct
  REGION 1..978: note = engineered CasX variant
QEIKRINKIRRRLVKDSNTKKAGKTGPMKTLLVRVMTPDLRERLENLRKKPENIPQPISNTSRANLNKLLTDYTEMKKAILHVYWEEFQKDPVGLMSRVAQPASKKIDQNKLKPEMDEKGNLTTAGFACSQCGQPLFVYKLEQVSEKGKAYTNYFGRCNVAEHEKLILLAQLKPEKDSDEAVTYSLGKFGQRALDFYSIHVTKESTHPVKPLAQIAGNRYASGPVGKALSDACMGTIASFLSKYQDIIIEHQKVVKGNQKRLESLRELAGKENLEYPSVTLPPQPHTKEGVDAYNEVIARVRMWVNLNLWQKLKLSRDDAKPLLRLKGFPSFPLVERQANEVDWWDMVCNVKKLINEKKEDGKVFWQNLAGYKRQEALRPYLSSEEDRKKGKKFARYQLGDLLLHLEKKHGEDWGKVYDEAWERIDKKVEGLSKHIKLEEERRSEDAQSKAALTDWLRAKASFVIEGLKEADKDEFCRCELKLQKWYGDLRGKPFAIEAENSILDISGFSKQYNCAFIWQKDGVKKLNLYLIINYFKGGKLRFKKIKPEAFEANRFYTVINKKSGEIVPMEVNFNFDDPNLIILPLAFGKRQGREFIWNDLLSLETGSLKLANGRVIEKTLYNRRTRQDEPALFVALTFERREVLDSSNIKPMNLIGVDRGENIPAVIALTDPEGCPLSRFKDSSGNPTHILRIGESYKEKQKTIQAKKEVEQRRAGGYSRKYASKAKNLADDMVRNTARDLLYYAVTQDAMLIFENLSRGFGRQGKRTFMAERQYTRMEDWLTAKLAYEGLPSKTYLSKTLAQYTSKTCSNCGFTITSADYDRVLEKLKKTATGWMTTINGKELKVEGQITYYNRYKRQNVVKDLSVELDRLSEESVNNDISSWTKGRSGEALSLLKKRFSHRPVQEKFVCLNCGFETHADEQAALNIARSWLFLRSQEYKKYQTNKTTGNTDKRAFVETWQSFYRKKLKEVWKPAV

SEQ ID NO: 25895 - protein, 978 aa, synthetic construct
  REGION 1..978: note = engineered CasX variant
QEIKRINKIRRRLVKDSNTKKAGKTGPMKTLLVRVMTPDLRERLENLRKKPENIPQPISNTSRANLNKLLTDYTEMKKAILHVYWEEFQKDPVGLMSRVAQPASKKIDQNKLKPEMDEKGNLTTAGFACSQCGQPLFVYKLEQVSEKGKAYTNYFGRCNVAEHEKLILLAQLKPEKDSDEAVTYSLGKFGQRALDFYSIHVTKESTHPVKPLAQIAGNRYASGPVGKALSDACMGTIASFLSKYQDIIIEHQKVVKGNQKRLESLRELAGKENLEYPSVTLPPQPHTKEGVDAYNEVIARVRMWVNLNLWQKLKLSRDDAKPLLRLKGFPSFPLVERQANEVDWWDMVCNVKKLINEKKEDGKVFWQNLAGYKRQEALRPYLSSEEDRKKGKKFARYQLGDLLLHLEKKHGEDWGKVYDEAWERIDKKVEGLSKHIKLEEERRSEDAQSKAALTDWLRAKASFVIEGLKEADKDEFCRCELKLQKWYGDLRGKPFAIEAENSILDISGFSKQYNCAFIWQKDGVKKLNLYLIINYFKGGKLRFKKIKPEAFEANRFYTVINKKSGEIVPMEVNFNFDDPNLIILPLAFGKRQGREFIWNDLLSLETGSLKLANGRVIEKTLYNRRTRQDEPALFVALTFERREVLDSSNIKPMNLIGVDRGENIPAVIALTDPEGCPLSRFKDSRGNPTHILRIGESYKEKQRTLQAKKEVEQRRAGGYSRKYASKAKNLADDMVRNTARDLLYYAVTQDAMLIFENLSRGFGRQGKRTFMAERQYTRMEDWLTAKLAYEGLPSKTYLSKTLAQYTSKTCSNCGFTITSADYDRVLEKLKKTATGWMTTINGKELKVEGQITYYNRYKRQNVVKDLSVELDRLSEESVNNDISSWTKGRSGEALSLLKKRFSHRPVQEKFVCLNCGFETHADEQAALNIARSWLFLRSQEYKKYQTNKTTGNTDKRAFVETWQSFYRKKLKEVWKPAV

SEQ ID NO: 25896 - protein, 978 aa, synthetic construct
  REGION 1..978: note = engineered CasX variant
QEIKRINKIRRRLVKDSNTKKAGKTGPMKTLLVRVMTPDLRERLENLRKKPENIPQPISNTSRANLNKLLTDYTEMKKAILHVYWEEFQKDPVGLMSRVAQPASKKIDQNKLKPEMDEKGNLTTAGFACSQCGQPLFVYKLEQVSEKGKAYTNYFGRCNVAEHEKLILLAQLKPEKDSDEAVTYSLGKFGQRALDFYSIHVTKESTHPVKPLAQIAGNRYASGPVGKALSDACMGTIASFLSKYQDIIIEHQKVVKGNQKRLESLRELAGKENLEYPSVTLPPQPHTKEGVDAYNEVIARVRMWVNLNLWQKLKLSRDDAKPLLRLKGFPSFPLVERQANEVDWWDMVCNVKKLINEKKEDGKVFWQNLAGYKRQEALRPYLSSEEDRKKGKKFARYQLGDLLLHLEKKHGEDWGKVYDEAWERIDKKVEGLSKHIKLEEERRSEDAQSKAALTDWLRAKASFVIEGLKEADKDEFCRCELKLQKWYGDLRGKPFAIEAENSILDISGFSKQYNCAFIWQKDGVKKLNLYLIINYFKGGKLRFKKIKPEAFEANRFYTVINKKSGEIVPMEVNFNFDDPNLIILPLAFGKRQGREFIWNDLLSLETGSLKLANGRVIEKTLYNRRTRQDEPALFVALTFERREVLDSSNIKPMNLIGVDRGENIPAVIALTDPEGCPLSRFKDSRGNPTHILRIGESYKEKQRTIQAKKEVTQRRAGGYSRKYASKAKNLADDMVRNTARDLLYYAVTQDAMLIFENLSRGFGRQGKRTFMAERQYTRMEDWLTAKLAYEGLPSKTYLSKTLAQYTSKTCSNCGFTITSADYDRVLEKLKKTATGWMTTINGKELKVEGQITYYNRYKRQNVVKDLSVELDRLSEESVNNDISSWTKGRSGEALSLLKKRFSHRPVQEKFVCLNCGFETHADEQAALNIARSWLFLRSQEYKKYQTNKTTGNTDKRAFVETWQSFYRKKLKEVWKPAV

SEQ ID NO: 25897 - protein, 978 aa, synthetic construct
  REGION 1..978: note = engineered CasX variant
QEIKRINKIRRRLVKDSNTKKAGKTGPMKTLLVRVMTPDLRERLENLRKKPENIPQPISNTSRANLNKLLTDYTEMKKAILHVYWEEFQKDPVGLMSRVAQPASKKIDQNKLKPEMDEKGNLTTAGFACSQCGQPLFVYKLEQVSEKGKAYTNYFGRCNVAEHEKLILLAQLKPEKDSDEAVTYSLGKFGQRALDFYSIHVTKESTHPVKPLAQIAGNRYASGPVGKALSDACMGTIASFLSKYQDIIIEHQKVVKGNQKRLESLRELAGKENLEYPSVTLPPQPHTKEGVDAYNEVIARVRMWVNLNLWQKLKLSRDDAKPLLRLKGFPSFPLVERQANEVDWWDMVCNVKKLINEKKEDGKVFWQNLAGYKRQEALRPYLSSEEDRKKGKKFARYQLGDLLLHLEKKHGEDWGKVYDEAWERIDKKVEGLSKHIKLEEERRSEDAQSKAALTDWLRAKASFVIEGLKEADKDEFCRCELKLQKWYGDLRGKPFAIEAENSILDISGFSKQYNCAFIWQKDGVKKLNLYLIINYFKGGKLRFKKIKPEAFEANRFYTVINKKSGEIVPMEVNFNFDDPNLIILPLAFGKRQGREFIWNDLLSLETGSLKLANGRVIEKTLYNRRTRQDEPALFVALTFERREVLDSSNIKPMNLIGVDRGENIPAVIALTDPEGCPLSRFKDSRGNPTHILRIGESYKEKQRTIQAKKEVEQRRAGGYSRKYASKAKNLADDMVRNTARDLLYYAVTQDAMLIFENLSRGFGRQGKRTFMAERQYTRMEDWLTAKLAYEGLPSKTYLSKTLAQYTSKTCSNCGFTITSADYDRVLEKLKKTATGWMTTINGKELKVEGQITYYNRYKRQNVVKDLSVELDRLSEESVNNDISSWTKGRSGEALSLLKKRFSHRPVQEKFVCLNCGFETHADEQAALNIARSWLFLRSQEYKKYQTNKTTGNTDKRAFVETWQSFYRKKLKEVWKPAV

SEQ ID NO: 25898 - protein, 978 aa, synthetic construct
  REGION 1..978: note = engineered CasX variant
QEIKRINKIRRRLVKDSNTKKAGKTGPMKTLLVRVMTPDLRERLENLRKKPENIPQPISNTSRANLNKLLTDYTEMKKAILHVYWEEFQKDPVGLMSRVAQPASKKIDQNKLKPEMDEKGNLTTAGFACSQCGQPLFVYKLEQVSEKGKAYTNYFGRCNVAEHEKLILLAQLKPEKDSDEAVTYSLGKFGQRALDFYSIHVTKESTHPVKPLAQIAGNRYASGPVGKALSDACMGTIASFLSKYQDIIIEHQKVVKGNQKRLESLRELAGKENLEYPSVTLPPQPHTKEGVDAYNEVIARVRMWVNLNLWQKLKLSRDDAKPLLRLKGFPSFPLVERQANEVDWWDMVCNVKKLINEKKEDGKVFWQNLAGYKRQEALRPYLSSEEDRKKGKKFARYQLGDLLLHLEKKHGEDWGKVYDEAWERIDKKVEGLSKHIKLEEERRSEDAQSKAALTDWLRAKASFVIEGLKEADKDEFCRCELKLQKWYGDLRGKPFAIEAENSILDISGFSKQYNCAFIWQKDGVKKLNLYLIINYFKGGKLRFKKIKPEAFEANRFYTVINKKSGEIVPMEVNFNFDDPNLIILPLAFGKRQGREFIWNDLLSLETGSLKLANGRVIEKTLYNRRTRQDEPALFVALTFERREVLDSSNIKPMNLIGVDRGENIPAVIALTDPEGCPLSRFKDSRGNPTHILRIGESYKEKQRSIQAKKEVEQRRAGGYSRKYASKAKNLADDMVRNTARDLLYYAVTQDAMLIFENLSRGFGRQGKRTFMAERQYTRMEDWLTAKLAYEGLPSKTYLSKTLAQYTSKTCSNCGFTITSADYDRVLEKLKKTATGWMTTINGKELKVEGQITYYNRYKRQNVVKDLSVELDRLSEESVNNDISSWTKGRSGEALSLLKKRFSHRPVQEKFVCLNCGFETHADEQAALNIARSWLFLRSQEYKKYQTNKTTGNTDKRAFVETWQSFYRKKLKEVWKPAV

SEQ ID NO: 25899 - protein, 978 aa, synthetic construct
  REGION 1..978: note = engineered CasX variant
QEIKRINKIRRRLVKDSNTKKAGKTGPMKTLLVRVMTPDLRERLENLRKKPENIPQPISNTSRANLNKLLTDYTEMKKAILHVYWEEFQKDPVGLMSRVAQPASKKIDQNKLKPEMDEKGNLTTAGFACSQCGQPLFVYKLEQVSEKGKAYTNYFGRCNVAEHEKLILLAQLKPEKDSDEAVTYSLGKFGQRALDFYSIHVTKESTHPVKPLAQIAGNRYASGPVGKALSDACMGTIASFLSKYQDIIIEHQKVVKGNQKRLESLRELAGKENLEYPSVTLPPQPHTKEGVDAYNEVIARVRMWVNLNLWQKLKLSRDDAKPLLRLKGFPSFPLVERQANEVDWWDMVCNVKKLINEKKEDGKVFWQNLAGYKRQEALRPYLSSEEDRKKGKKFARYQLGDLLLHLEKKHGEDWGKVYDEAWERIDKKVEGLSKHIKLEEERRSEDAQSKAALTDWLRAKASFVIEGLKEADKDEFCRCELKLQKWYGDLRGKPFAIEAENSILDISGFSKQYNCAFIWQKDGVKKLNLYLIINYFKGGKLRFKKIKPEAFEANRFYTVINKKSGEIVPMEVNFNFDDPNLIILPLAFGKRQGREFIWNDLLSLETGSLKLANGRVIEKTLYNRRTRQDEPALFVALTFERREVLDSSNIKPMNLIGVDRGENIPAVIALTDPEGCPLSRFKDSQGNPTHILRIGESYKEKQRTIQQKKEVEQRRAGGYSRKYASKAKNLADDMVRNTARDLLYYAVTQDAMLIFENLSRGFGRQGKRTFMAERQYTRMEDWLTAKLAYEGLPSKTYLSKTLAQYTSKTCSNCGFTITSADYDRVLEKLKKTATGWMTTINGKELKVEGQITYYNRYKRQNVVKDLSVELDRLSEESVNNDISSWTKGRSGEALSLLKKRFSHRPVQEKFVCLNCGFETHADEQAALNIARSWLFLRSQEYKKYQTNKTTGNTDKRAFVETWQSFYRKKLKEVWKPAV

SEQ ID NO: 25900 - protein, 978 aa, synthetic construct
  REGION 1..978: note = engineered CasX variant
QEIKRINKIRRRLVKDSNTKKAGKTGPMKTLLVRVMTPDLRERLENLRKKPENIPQPISNTSRANLNKLLTDYTEMKKAILHVYWEEFQKDPVGLMSRVAQPASKKIDQNKLKPEMDEKGNLTTAGFACSQCGQPLFVYKLEQVSEKGKAYTNYFGRCNVAEHEKLILLAQLKPEKDSDEAVTYSLGKFGQRALDFYSIHVTKESTHPVKPLAQIAGNRYASGPVGKALSDACMGTIASFLSKYQDIIIEHQKVVKGNQKRLESLRELAGKENLEYPSVTLPPQPHTKEGVDAYNEVIARVRMWVNLNLWQKLKLSRDDAKPLLRLKGFPSFPLVERQANEVDWWDMVCNVKKLINEKKEDGKVFWQNLAGYKRQEALRPYLSSEEDRKKGKKFARYQLGDLLLHLEKKHGEDWGKVYDEAWERIDKKVEGLSKHIKLEEERRSEDAQSKAALTDWLRAKASFVIEGLKEADKDEFCRCELKLQKWYGDLRGKPFAIEAENSILDISGFSKQYNCAFIWQKDGVKKLNLYLIINYFKGGKLRFKKIKPEAFEANRFYTVINKKSGEIVPMEVNFNFDDPNLIILPLAFGKRQGREFIWNDLLSLETGSLKLANGRVIEKTLYNRRTRQDEPALFVALTFERREVLDSSNIKPMNLIGVDRGENIPAVIALTDPEGCPLSRFKDSQGNPTHILRIGESYKEKQRTIQAKKEVEQRRAGGYSRKYASKAKNLADDMVRNTARDLLYYAVTQDAMLIFENLSRGFGRQGKRTFMAERQYTRMEDWLTAKLAYEGLPSKTYLSKTLAQYTSKTCSNCGFTITSADYDRVLEKLKKTATGWMTTINGKELKVEGQITYYNRYKRQNVVKDLSVELDRLSEESVNNDISSWTKGRSGEALSLLKKRFSHRPVQEKFVCLNCGFETHADEQAALNIARSWLFLRSQEYKKYQTNKTTGNTDKRAFVETWQSFYRKKLKEVWKPAV

SEQ ID NO: 25901 - protein, 978 aa, synthetic construct
  REGION 1..978: note = engineered CasX variant
QEIKRINKIRRRLVKDSNTKKAGKTGPMKTLLVRVMTPDLRERLENLRKKPENIPQPISNTSRANLNKLLTDYTEMKKAILHVYWEEFQKDPVGLMSRVAQPASKKIDQNKLKPEMDEKGNLTTAGFACSQCGQPLFVYKLEQVSEKGKAYTNYFGRCNVAEHEKLILLAQLKPEKDSDEAVTYSLGKFGQRALDFYSIHVTKESTHPVKPLAQIAGNRYASGPVGKALSDACMGTIASFLSKYQDIIIEHQKVVKGNQKRLESLRELAGKENLEYPSVTLPPQPHTKEGVDAYNEVIARVRMWVNLNLWQKLKLSRDDAKPLLRLKGFPSFPLVERQANEVDWWDMVCNVKKLINEKKEDGKVFWQNLAGYKRQEALRPYLSSEEDRKKGKKFARYQLGDLLLHLEKKHGEDWGKVYDEAWERIDKKVEGLSKHIKLEEERRSEDAQSKAALTDWLRAKASFVIEGLKEADKDEFCRCELKLQKWYGDLRGKPFAIEAENSILDISGFSKQYNCAFIWQKDGVKKLNLYLIINYFKGGKLRFKKIKPEAFEANRFYTVINKKSGEIVPMEVNFNFDDPNLIILPLAFGKRQGREFIWNDLLSLETGSLKLANGRVIEKTLYNRRTRQDEPALFVALTFERREVLDSSNIKPMNLIGVDRGENIPAVIALTDPEGCPLSRFKDSQGNPTHILRIGESYKEKQRTIQAKKEVEQRRAFGYSRKYASKAKNLADDMVRNTARDLLYYAVTQDAMLIFENLSRGFGRQGKRTFMAERQYTRMEDWLTAKLAYEGLPSKTYLSKTLAQYTSKTCSNCGFTITSADYDRVLEKLKKTATGWMTTINGKELKVEGQITYYNRYKRQNVVKDLSVELDRLSEESVNNDISSWTKGRSGEALSLLKKRFSHRPVQEKFVCLNCGFETHADEQAALNIARSWLFLRSQEYKKYQTNKTTGNTDKRAFVETWQSFYRKKLKEVWKPAV

SEQ ID NO: 25902 - protein, 978 aa, synthetic construct
  REGION 1..978: note = engineered CasX variant
QEIKRINKIRRRLVKDSNTKKAGKTGPMKTLLVRVMTPDLRERLENLRKKPENIPQPISNTSRANLNKLLTDYTEMKKAILHVYWEEFQKDPVGLMSRVAQPASKKIDQNKLKPEMDEKGNLTTAGFACSQCGQPLFVYKLEQVSEKGKAYTNYFGRCNVAEHEKLILLAQLKPEKDSDEAVTYSLGKFGQRALDFYSIHVTKESTHPVKPLAQIAGNRYASGPVGKALSDACMGTIASFLSKYQDIIIEHQKVVKGNQKRLESLRELAGKENLEYPSVTLPPQPHTKEGVDAYNEVIARVRMWVNLNLWQKLKLSRDDAKPLLRLKGFPSFPLVERQANEVDWWDMVCNVKKLINEKKEDGKVFWQNLAGYKRQEALRPYLSSEEDRKKGKKFARYQLGDLLLHLEKKHGEDWGKVYDEAWERIDKKVEGLSKHIKLEEERRSEDAQSKAALTDWLRAKASFVIEGLKEADKDEFCRCELKLQKWYGDLRGKPFAIEAENSILDISGFSKQYNCAFIWQKDGVKKLNLYLIINYFKGGKLRFKKIKPEAFEANRFYTVINKKSGEIVPMEVNFNFDDPNLIILPLAFGKRQGREFIWNDLLSLETGSLKLANGRVIEKTLYNRRTRQDEPALFVALTFERREVLDSSNIKPMNLIGVDRGENIPAVIALTDPEGCPLSRFKDSQGNPTHILRIGESYKEKQRTIQAFKEVEQRRAGGYSRKYASKAKNLADDMVRNTARDLLYYAVTQDAMLIFENLSRGFGRQGKRTFMAERQYTRMEDWLTAKLAYEGLPSKTYLSKTLAQYTSKTCSNCGFTITSADYDRVLEKLKKTATGWMTTINGKELKVEGQITYYNRYKRQNVVKDLSVELDRLSEESVNNDISSWTKGRSGEALSLLKKRFSHRPVQEKFVCLNCGFETHADEQAALNIARSWLFLRSQEYKKYQTNKTTGNTDKRAFVETWQSFYRKKLKEVWKPAV

SEQ ID NO: 25903 - protein, 978 aa, synthetic construct
  REGION 1..978: note = engineered CasX variant
QEIKRINKIRRRLVKDSNTKKAGKTGPMKTLLVRVMTPDLRERLENLRKKPENIPQPISNTSRANLNKLLTDYTEMKKAILHVYWEEFQKDPVGLMSRVAQPASKKIDQNKLKPEMDEKGNLTTAGFACSQCGQPLFVYKLEQVSEKGKAYTNYFGRCNVAEHEKLILLAQLKPEKDSDEAVTYSLGKFGQRALDFYSIHVTKESTHPVKPLAQIAGNRYASGPVGKALSDACMGTIASFLSKYQDIIIEHQKVVKGNQKRLESLRELAGKENLEYPSVTLPPQPHTKEGVDAYNEVIARVRMWVNLNLWQKLKLSRDDAKPLLRLKGFPSFPLVERQANEVDWWDMVCNVKKLINEKKEDGKVFWQNLAGYKRQEALRPYLSSEEDRKKGKKFARYQLGDLLLHLEKKHGEDWGKVYDEAWERIDKKVEGLSKHIKLEEERRSEDAQSKAALTDWLRAKASFVIEGLKEADKDEFCRCELKLQKWYGDLRGKPFAIEAENSILDISGFSKQYNCAFIWQKDGVKKLNLYLIINYFKGGKLRFKKIKPEAFEANRFYTVINKKSGEIVPMEVNFNFDDPNLIILPLAFGKRQGREFIWNDLLSLETGSLKLANGRVIEKTLYNRRTRQDEPALFVALTFERREVLDSSNIKPMNLIGVDRGENIPAVIALTDPEGCPLSRFKDSQGNPTHILRFGESYKEKQRTIQAKKEVEQRRAGGYSRKYASKAKNLADDMVRNTARDLLYYAVTQDAMLIFENLSRGFGRQGKRTFMAERQYTRMEDWLTAKLAYEGLPSKTYLSKTLAQYTSKTCSNCGFTITSADYDRVLEKLKKTATGWMTTINGKELKVEGQITYYNRYKRQNVVKDLSVELDRLSEESVNNDISSWTKGRSGEALSLLKKRFSHRPVQEKFVCLNCGFETHADEQAALNIARSWLFLRSQEYKKYQTNKTTGNTDKRAFVETWQSFYRKKLKEVWKPAV

SEQ ID NO: 25904 - protein, 978 aa, synthetic construct
  REGION 1..978: note = engineered CasX variant
QEIKRINKIRRRLVKDSNTKKAGKTGPMKTLLVRVMTPDLRERLENLRKKPENIPQPISNTSRANLNKLLTDYTEMKKAILHVYWEEFQKDPVGLMSRVAQPASKKIDQNKLKPEMDEKGNLTTAGFACSQCGQPLFVYKLEQVSEKGKAYTNYFGRCNVAEHEKLILLAQLKPEKDSDEAVTYSLGKFGQRALDFYSIHVTKESTHPVKPLAQIAGNRYASGPVGKALSDACMGTIASFLSKYQDIIIEHQKVVKGNQKRLESLRELAGKENLEYPSVTLPPQPHTKEGVDAYNEVIARVRMWVNLNLWQKLKLSRDDAKPLLRLKGFPSFPLVERQANEVDWWDMVCNVKKLINEKKEDGKVFWQNLAGYKRQEALRPYLSSEEDRKKGKKFARYQLGDLLLHLEKKHGEDWGKVYDEAWERIDKKVEGLSKHIKLEEERRSEDAQSKAALTDWLRAKASFVIEGLKEADKDEFCRCELKLQKWYGDLRGKPFAIEAENSILDISGFSKQYNCAFIWQKDGVKKLNLYLIINYFKGGKLRFKKIKPEAFEANRFYTVINKKSGEIVPMEVNFNFDDPNLIILPLAFGKRQGREFIWNDLLSLETGSLKLANGRVIEKTLYNRRTRQDEPALFVALTFERREVLDSSNIKPMNLIGVDRGENIPAVIALTDPEGCPLSRFKDSQGNPTHILRFGESYKEKQRTIQAKKEVEQRRAFGYSRKYASKAKNLADDMVRNTARDLLYYAVTQDAMLIFENLSRGFGRQGKRTFMAERQYTRMEDWLTAKLAYEGLPSKTYLSKTLAQYTSKTCSNCGFTITSADYDRVLEKLKKTATGWMTTINGKELKVEGQITYYNRYKRQNVVKDLSVELDRLSEESVNNDISSWTKGRSGEALSLLKKRFSHRPVQEKFVCLNCGFETHADEQAALNIARSWLFLRSQEYKKYQTNKTTGNTDKRAFVETWQSFYRKKLKEVWKPAV

SEQ ID NO: 25905 - protein, 978 aa, synthetic construct
  REGION 1..978: note = engineered CasX variant
QEIKRINKIRRRLVKDSNTKKAGKTGPMKTLLVRVMTPDLRERLENLRKKPENIPQPISNTSRANLNKLLTDYTEMKKAILHVYWEEFQKDPVGLMSRVAQPASKKIDQNKLKPEMDEKGNLTTAGFACSQCGQPLFVYKLEQVSEKGKAYTNYFGRCNVAEHEKLILLAQLKPEKDSDEAVTYSLGKFGQRALDFYSIHVTKESTHPVKPLAQIAGNRYASGPVGKALSDACMGTIASFLSKYQDIIIEHQKVVKGNQKRLESLRELAGKENLEYPSVTLPPQPHTKEGVDAYNEVIARVRMWVNLNLWQKLKLSRDDAKPLLRLKGFPSFPLVERQANEVDWWDMVCNVKKLINEKKEDGKVFWQNLAGYKRQEALRPYLSSEEDRKKGKKFARYQLGDLLLHLEKKHGEDWGKVYDEAWERIDKKVEGLSKHIKLEEERRSEDAQSKAALTDWLRAKASFVIEGLKEADKDEFCRCELKLQKWYGDLRGKPFAIEAENSILDISGFSKQYNCAFIWQKDGVKKLNLYLIINYFKGGKLRFKKIKPEAFEANRFYTVINKKSGEIVPMEVNFNFDDPNLIILPLAFGKRQGREFIWNDLLSLETGSLKLANGRVIEKTLYNRRTRQDEPALFVALTFERREVLDSSNIKPMNLIGVDRGENIPAVIALTDPEGCPLSRFKDSNGNTTHILRIGESYKEKQRTIQAKKEVEQRRAGGYSRKYASKAKNLADDMVRNTARDLLYYAVTQDAMLIFENLSRGFGRQGKRTFMAERQYTRMEDWLTAKLAYEGLPSKTYLSKTLAQYTSKTCSNCGFTITSADYDRVLEKLKKTATGWMTTINGKELKVEGQITYYNRYKRQNVVKDLSVELDRLSEESVNNDISSWTKGRSGEALSLLKKRFSHRPVQEKFVCLNCGFETHADEQAALNIARSWLFLRSQEYKKYQTNKTTGNTDKRAFVETWQSFYRKKLKEVWKPAV

SEQ ID NO: 25906 - protein, 978 aa, synthetic construct
  REGION 1..978: note = engineered CasX variant
QEIKRINKIRRRLVKDSNTKKAGKTGPMKTLLVRVMTPDLRERLENLRKKPENIPQPISNTSRANLNKLLTDYTEMKKAILHVYWEEFQKDPVGLMSRVAQPASKKIDQNKLKPEMDEKGNLTTAGFACSQCGQPLFVYKLEQVSEKGKAYTNYFGRCNVAEHEKLILLAQLKPEKDSDEAVTYSLGKFGQRALDFYSIHVTKESTHPVKPLAQIAGNRYASGPVGKALSDACMGTIASFLSKYQDIIIEHQKVVKGNQKRLESLRELAGKENLEYPSVTLPPQPHTKEGVDAYNEVIARVRMWVNLNLWQKLKLSRDDAKPLLRLKGFPSFPLVERQANEVDWWDMVCNVKKLINEKKEDGKVFWQNLAGYKRQEALRPYLSSEEDRKKGKKFARYQLGDLLLHLEKKHGEDWGKVYDEAWERIDKKVEGLSKHIKLEEERRSEDAQSKAALTDWLRAKASFVIEGLKEADKDEFCRCELKLQKWYGDLRGKPFAIEAENSILDISGFSKQYNCAFIWQKDGVKKLNLYLIINYFKGGKLRFKKIKPEAFEANRFYTVINKKSGEIVPMEVNFNFDDPNLIILPLAFGKRQGREFIWNDLLSLETGSLKLANGRVIEKTLYNRRTRQDEPALFVALTFERREVLDSSNIKPMNLIGVDRGENIPAVIALTDPEGCPLSRFKDSNGNPTHIYRIGESYKEKQRTIQAKKEVEQRRAGGYSRKYASKAKNLADDMVRNTARDLLYYAVTQDAMLIFENLSRGFGRQGKRTFMAERQYTRMEDWLTAKLAYEGLPSKTYLSKTLAQYTSKTCSNCGFTITSADYDRVLEKLKKTATGWMTTINGKELKVEGQITYYNRYKRQNVVKDLSVELDRLSEESVNNDISSWTKGRSGEALSLLKKRFSHRPVQEKFVCLNCGFETHADEQAALNIARSWLFLRSQEYKKYQTNKTTGNTDKRAFVETWQSFYRKKLKEVWKPAV

SEQ ID NO: 25907 - protein, 978 aa, synthetic construct
  REGION 1..978: note = engineered CasX variant
QEIKRINKIRRRLVKDSNTKKAGKTGPMKTLLVRVMTPDLRERLENLRKKPENIPQPISNTSRANLNKLLTDYTEMKKAILHVYWEEFQKDPVGLMSRVAQPASKKIDQNKLKPEMDEKGNLTTAGFACSQCGQPLFVYKLEQVSEKGKAYTNYFGRCNVAEHEKLILLAQLKPEKDSDEAVTYSLGKFGQRALDFYSIHVTKESTHPVKPLAQIAGNRYASGPVGKALSDACMGTIASFLSKYQDIIIEHQKVVKGNQKRLESLRELAGKENLEYPSVTLPPQPHTKEGVDAYNEVIARVRMWVNLNLWQKLKLSRDDAKPLLRLKGFPSFPLVERQANEVDWWDMVCNVKKLINEKKEDGKVFWQNLAGYKRQEALRPYLSSEEDRKKGKKFARYQLGDLLLHLEKKHGEDWGKVYDEAWERIDKKVEGLSKHIKLEEERRSEDAQSKAALTDWLRAKASFVIEGLKEADKDEFCRCELKLQKWYGDLRGKPFAIEAENSILDISGFSKQYNCAFIWQKDGVKKLNLYLIINYFKGGKLRFKKIKPEAFEANRFYTVINKKSGEIVPMEVNFNFDDPNLIILPLAFGKRQGREFIWNDLLSLETGSLKLANGRVIEKTLYNRRTRQDEPALFVALTFERREVLDSSNIKPMNLIGVDRGENIPAVIALTDPEGCPLSRFKDSNGNPTHIYRIGESFKEKQRTIQAKKEVEQRRAGGYSRKYASKAKNLADDMVRNTARDLLYYAVTQDAMLIFENLSRGFGRQGKRTFMAERQYTRMEDWLTAKLAYEGLPSKTYLSKTLAQYTSKTCSNCGFTITSADYDRVLEKLKKTATGWMTTINGKELKVEGQITYYNRYKRQNVVKDLSVELDRLSEESVNNDISSWTKGRSGEALSLLKKRFSHRPVQEKFVCLNCGFETHADEQAALNIARSWLFLRSQEYKKYQTNKTTGNTDKRAFVETWQSFYRKKLKEVWKPAV

SEQ ID NO: 25908 - protein, 978 aa, synthetic construct
  REGION 1..978: note = engineered CasX variant
QEIKRINKIRRRLVKDSNTKKAGKTGPMKTLLVRVMTPDLRERLENLRKKPENIPQPISNTSRANLNKLLTDYTEMKKAILHVYWEEFQKDPVGLMSRVAQPASKKIDQNKLKPEMDEKGNLTTAGFACSQCGQPLFVYKLEQVSEKGKAYTNYFGRCNVAEHEKLILLAQLKPEKDSDEAVTYSLGKFGQRALDFYSIHVTKESTHPVKPLAQIAGNRYASGPVGKALSDACMGTIASFLSKYQDIIIEHQKVVKGNQKRLESLRELAGKENLEYPSVTLPPQPHTKEGVDAYNEVIARVRMWVNLNLWQKLKLSRDDAKPLLRLKGFPSFPLVERQANEVDWWDMVCNVKKLINEKKEDGKVFWQNLAGYKRQEALRPYLSSEEDRKKGKKFARYQLGDLLLHLEKKHGEDWGKVYDEAWERIDKKVEGLSKHIKLEEERRSEDAQSKAALTDWLRAKASFVIEGLKEADKDEFCRCELKLQKWYGDLRGKPFAIEAENSILDISGFSKQYNCAFIWQKDGVKKLNLYLIINYFKGGKLRFKKIKPEAFEANRFYTVINKKSGEIVPMEVNFNFDDPNLIILPLAFGKRQGREFIWNDLLSLETGSLKLANGRVIEKTLYNRRTRQDEPALFVALTFERREVLDSSNIKPMNLIGVDRGENIPAVIALTDPEGCPLSRFKDSNGNPTHILRIGESYKVKQRTIQAKKEVEQRRAGGYSRKYASKAKNLADDMVRNTARDLLYYAVTQDAMLIFENLSRGFGRQGKRTFMAERQYTRMEDWLTAKLAYEGLPSKTYLSKTLAQYTSKTCSNCGFTITSADYDRVLEKLKKTATGWMTTINGKELKVEGQITYYNRYKRQNVVKDLSVELDRLSEESVNNDISSWTKGRSGEALSLLKKRFSHRPVQEKFVCLNCGFETHADEQAALNIARSWLFLRSQEYKKYQTNKTTGNTDKRAFVETWQSFYRKKLKEVWKPAV

SEQ ID NO: 25909 - protein, 978 aa, synthetic construct
  REGION 1..978: note = engineered CasX variant
QEIKRINKIRRRLVKDSNTKKAGKTGPMKTLLVRVMTPDLRERLENLRKKPENIPQPISNTSRANLNKLLTDYTEMKKAILHVYWEEFQKDPVGLMSRVAQPASKKIDQNKLKPEMDEKGNLTTAGFACSQCGQPLFVYKLEQVSEKGKAYTNYFGRCNVAEHEKLILLAQLKPEKDSDEAVTYSLGKFGQRALDFYSIHVTKESTHPVKPLAQIAGNRYASGPVGKALSDACMGTIASFLSKYQDIIIEHQKVVKGNQKRLESLRELAGKENLEYPSVTLPPQPHTKEGVDAYNEVIARVRMWVNLNLWQKLKLSRDDAKPLLRLKGFPSFPLVERQANEVDWWDMVCNVKKLINEKKEDGKVFWQNLAGYKRQEALRPYLSSEEDRKKGKKFARYQLGDLLLHLEKKHGEDWGKVYDEAWERIDKKVEGLSKHIKLEEERRSEDAQSKAALTDWLRAKASFVIEGLKEADKDEFCRCELKLQKWYGDLRGKPFAIEAENSILDISGFSKQYNCAFIWQKDGVKKLNLYLIINYFKGGKLRFKKIKPEAFEANRFYTVINKKSGEIVPMEVNFNFDDPNLIILPLAFGKRQGREFIWNDLLSLETGSLKLANGRVIEKTLYNRRTRQDEPALFVALTFERREVLDSSNIKPMNLIGVDRGENIPAVIALTDPEGCPLSRFKDSNGNPTHILRIGESYKETQRTIQAKKEVEQRRAGGYSRKYASKAKNLADDMVRNTARDLLYYAVTQDAMLIFENLSRGFGRQGKRTFMAERQYTRMEDWLTAKLAYEGLPSKTYLSKTLAQYTSKTCSNCGFTITSADYDRVLEKLKKTATGWMTTINGKELKVEGQITYYNRYKRQNVVKDLSVELDRLSEESVNNDISSWTKGRSGEALSLLKKRFSHRPVQEKFVCLNCGFETHADEQAALNIARSWLFLRSQEYKKYQTNKTTGNTDKRAFVETWQSFYRKKLKEVWKPAV

SEQ ID NO: 25910 - protein, 978 aa, synthetic construct
  REGION 1..978: note = engineered CasX variant
QEIKRINKIRRRLVKDSNTKKAGKTGPMKTLLVRVMTPDLRERLENLRKKPENIPQPISNTSRANLNKLLTDYTEMKKAILHVYWEEFQKDPVGLMSRVAQPASKKIDQNKLKPEMDEKGNLTTAGFACSQCGQPLFVYKLEQVSEKGKAYTNYFGRCNVAEHEKLILLAQLKPEKDSDEAVTYSLGKFGQRALDFYSIHVTKESTHPVKPLAQIAGNRYASGPVGKALSDACMGTIASFLSKYQDIIIEHQKVVKGNQKRLESLRELAGKENLEYPSVTLPPQPHTKEGVDAYNEVIARVRMWVNLNLWQKLKLSRDDAKPLLRLKGFPSFPLVERQANEVDWWDMVCNVKKLINEKKEDGKVFWQNLAGYKRQEALRPYLSSEEDRKKGKKFARYQLGDLLLHLEKKHGEDWGKVYDEAWERIDKKVEGLSKHIKLEEERRSEDAQSKAALTDWLRAKASFVIEGLKEADKDEFCRCELKLQKWYGDLRGKPFAIEAENSILDISGFSKQYNCAFIWQKDGVKKLNLYLIINYFKGGKLRFKKIKPEAFEANRFYTVINKKSGEIVPMEVNFNFDDPNLIILPLAFGKRQGREFIWNDLLSLETGSLKLANGRVIEKTLYNRRTRQDEPALFVALTFERREVLDSSNIKPMNLIGVDRGENIPAVIALTDPEGCPLSRFKDSNGNPTHILRIGESYKEKQRTIQAKKTVEQRRAGGYSRKYASKAKNLADDMVRNTARDLLYYAVTQDAMLIFENLSRGFGRQGKRTFMAERQYTRMEDWLTAKLAYEGLPSKTYLSKTLAQYTSKTCSNCGFTITSADYDRVLEKLKKTATGWMTTINGKELKVEGQITYYNRYKRQNVVKDLSVELDRLSEESVNNDISSWTKGRSGEALSLLKKRFSHRPVQEKFVCLNCGFETHADEQAALNIARSWLFLRSQEYKKYQTNKTTGNTDKRAFVETWQSFYRKKLKEVWKPAV

SEQ ID NO: 25911 - protein, 978 aa, synthetic construct
  REGION 1..978: note = engineered CasX variant
QEIKRINKIRRRLVKDSNTKKAGKTGPMKTLLVRVMTPDLRERLENLRKKPENIPQPISNTSRANLNKLLTDYTEMKKAILHVYWEEFQKDPVGLMSRVAQPASKKIDQNKLKPEMDEKGNLTTAGFACSQCGQPLFVYKLEQVSEKGKAYTNYFGRCNVAEHEKLILLAQLKPEKDSDEAVTYSLGKFGQRALDFYSIHVTKESTHPVKPLAQIAGNRYASGPVGKALSDACMGTIASFLSKYQDIIIEHQKVVKGNQKRLESLRELAGKENLEYPSVTLPPQPHTKEGVDAYNEVIARVRMWVNLNLWQKLKLSRDDAKPLLRLKGFPSFPLVERQANEVDWWDMVCNVKKLINEKKEDGKVFWQNLAGYKRQEALRPYLSSEEDRKKGKKFARYQLGDLLLHLEKKHGEDWGKVYDEAWERIDKKVEGLSKHIKLEEERRSEDAQSKAALTDWLRAKASFVIEGLKEADKDEFCRCELKLQKWYGDLRGKPFAIEAENSILDISGFSKQYNCAFIWQKDGVKKLNLYLIINYFKGGKLRFKKIKPEAFEANRFYTVINKKSGEIVPMEVNFNFDDPNLIILPLAFGKRQGREFIWNDLLSLETGSLKLANGRVIEKTLYNRRTRQDEPALFVALTFERREVLDSSNIKPMNLIGVDRGENIPAVIALTDPEGCPLSRFKDSNGNPTHILRIGESYKEKQRTIQAKKEVVQRRAGGYSRKYASKAKNLADDMVRNTARDLLYYAVTQDAMLIFENLSRGFGRQGKRTFMAERQYTRMEDWLTAKLAYEGLPSKTYLSKTLAQYTSKTCSNCGFTITSADYDRVLEKLKKTATGWMTTINGKELKVEGQITYYNRYKRQNVVKDLSVELDRLSEESVNNDISSWTKGRSGEALSLLKKRFSHRPVQEKFVCLNCGFETHADEQAALNIARSWLFLRSQEYKKYQTNKTTGNTDKRAFVETWQSFYRKKLKEVWKPAV

SEQ ID NO: 25912 - protein, 978 aa, synthetic construct
  REGION 1..978: note = engineered CasX variant
QEIKRINKIRRRLVKDSNTKKAGKTGPMKTLLVRVMTPDLRERLENLRKKPENIPQPISNTSRANLNKLLTDYTEMKKAILHVYWEEFQKDPVGLMSRVAQPASKKIDQNKLKPEMDEKGNLTTAGFACSQCGQPLFVYKLEQVSEKGKAYTNYFGRCNVAEHEKLILLAQLKPEKDSDEAVTYSLGKFGQRALDFYSIHVTKESTHPVKPLAQIAGNRYASGPVGKALSDACMGTIASFLSKYQDIIIEHQKVVKGNQKRLESLRELAGKENLEYPSVTLPPQPHTKEGVDAYNEVIARVRMWVNLNLWQKLKLSRDDAKPLLRLKGFPSFPLVERQANEVDWWDMVCNVKKLINEKKEDGKVFWQNLAGYKRQEALRPYLSSEEDRKKGKKFARYQLGDLLLHLEKKHGEDWGKVYDEAWERIDKKVEGLSKHIKLEEERRSEDAQSKAALTDWLRAKASFVIEGLKEADKDEFCRCELKLQKWYGDLRGKPFAIEAENSILDISGFSKQYNCAFIWQKDGVKKLNLYLIINYFKGGKLRFKKIKPEAFEANRFYTVINKKSGEIVPMEVNFNFDDPNLIILPLAFGKRQGREFIWNDLLSLETGSLKLANGRVIEKTLYNRRTRQDEPALFVALTFERREVLDSSNIKPMNLIGVDRGENIPAVIALTDPEGCPLSRFKDSNGNPTHILRIGESYKEKQRTIQAKKEVEQRRAGGYSRKYASKAKNLADDMVRNTARDLLYYAVTQDAMLIFENLSRGFGRQGKRTFMAERQYTRMEDWLTAKLAYEGLPSKTYLSKTLAQYTSKTCSNCGFTITSADYDRVLEKLKKTATGWMTTINGKELKVEGQITYYNRYKRQNVVKDLSVELDRLSEESVNNDISSWTKGRSGEALSLLKKRFSHRPVQEKFVCLNCGFETHADEQAALNIARSWLFLRSQEYKKYQTNKTTGNTDKRAFVETWQSFYRKKLKEVWKPAV

SEQ ID NO: 25913 - protein, 978 aa, synthetic construct
  REGION 1..978: note = engineered CasX variant
QEIKRINKIRRRLVKDSNTKKAGKTGPMKTLLVRVMTPDLRERLENLRKKPENIPQPISNTSRANLNKLLTDYTEMKKAILHVYWEEFQKDPVGLMSRVAQPASKKIDQNKLKPEMDEKGNLTTAGFACSQCGQPLFVYKLEQVSEKGKAYTNYFGRCNVAEHEKLILLAQLKPEKDSDEAVTYSLGKFGQRALDFYSIHVTKESTHPVKPLAQIAGNRYASGPVGKALSDACMGTIASFLSKYQDIIIEHQKVVKGNQKRLESLRELAGKENLEYPSVTLPPQPHTKEGVDAYNEVIARVRMWVNLNLWQKLKLSRDDAKPLLRLKGFPSFPLVERQANEVDWWDMVCNVKKLINEKKEDGKVFWQNLAGYKRQEALRPYLSSEEDRKKGKKFARYQLGDLLLHLEKKHGEDWGKVYDEAWERIDKKVEGLSKHIKLEEERRSEDAQSKAALTDWLRAKASFVIEGLKEADKDEFCRCELKLQKWYGDLRGKPFAIEAENSILDISGFSKQYNCAFIWQKDGVKKLNLYLIINYFKGGKLRFKKIKPEAFEANRFYTVINKKSGEIVPMEVNFNFDDPNLIILPLAFGKRQGREFIWNDLLSLETGSLKLANGRVIEKTLYNRRTRQDEPALFVALTFERREVLDSSNIKPMNLIGVDRGENIPAVIALTDPEGCPLSRFKDSNGNPTHILRIGESYKEKQRTIQAKKEMEQRRAGGYSRKYASKAKNLADDMVRNTARDLLYYAVTQDAMLIFENLSRGFGRQGKRTFMAERQYTRMEDWLTAKLAYEGLPSKTYLSKTLAQYTSKTCSNCGFTITSADYDRVLEKLKKTATGWMTTINGKELKVEGQITYYNRYKRQNVVKDLSVELDRLSEESVNNDISSWTKGRSGEALSLLKKRFSHRPVQEKFVCLNCGFETHADEQAALNIARSWLFLRSQEYKKYQTNKTTGNTDKRAFVETWQSFYRKKLKEVWKPAV

SEQ ID NO: 25914 - protein, 978 aa, synthetic construct
  REGION 1..978: note = engineered CasX variant
QEIKRINKIRRRLVKDSNTKKAGKTGPMKTLLVRVMTPDLRERLENLRKKPENIPQPISNTSRANLNKLLTDYTEMKKAILHVYWEEFQKDPVGLMSRVAQPASKKIDQNKLKPEMDEKGNLTTAGFACSQCGQPLFVYKLEQVSEKGKAYTNYFGRCNVAEHEKLILLAQLKPEKDSDEAVTYSLGKFGQRALDFYSIHVTKESTHPVKPLAQIAGNRYASGPVGKALSDACMGTIASFLSKYQDIIIEHQKVVKGNQKRLESLRELAGKENLEYPSVTLPPQPHTKEGVDAYNEVIARVRMWVNLNLWQKLKLSRDDAKPLLRLKGFPSFPLVERQANEVDWWDMVCNVKKLINEKKEDGKVFWQNLAGYKRQEALRPYLSSEEDRKKGKKFARYQLGDLLLHLEKKHGEDWGKVYDEAWERIDKKVEGLSKHIKLEEERRSEDAQSKAALTDWLRAKASFVIEGLKEADKDEFCRCELKLQKWYGDLRGKPFAIEAENSILDISGFSKQYNCAFIWQKDGVKKLNLYLIINYFKGGKLRFKKIKPEAFEANRFYTVINKKSGEIVPMEVNFNFDDPNLIILPLAFGKRQGREFIWNDLLSLETGSLKLANGRVIEKTLYNRRTRQDEPALFVALTFERREVLDSSNIKPMNLIGVDRGENIPAVIALTDPEGCPLSRFKDSNGNPTHILRIGESYKEIQRTIQAKKEVEQRRAGGYSRKYASKAKNLADDMVRNTARDLLYYAVTQDAMLIFENLSRGFGRQGKRTFMAERQYTRMEDWLTAKLAYEGLPSKTYLSKTLAQYTSKTCSNCGFTITSADYDRVLEKLKKTATGWMTTINGKELKVEGQITYYNRYKRQNVVKDLSVELDRLSEESVNNDISSWTKGRSGEALSLLKKRFSHRPVQEKFVCLNCGFETHADEQAALNIARSWLFLRSQEYKKYQTNKTTGNTDKRAFVETWQSFYRKKLKEVWKPAV

SEQ ID NO: 25915 - protein, 978 aa, synthetic construct
  REGION 1..978: note = engineered CasX variant
QEIKRINKIRRRLVKDSNTKKAGKTGPMKTLLVRVMTPDLRERLENLRKKPENIPQPISNTSRANLNKLLTDYTEMKKAILHVYWEEFQKDPVGLMSRVAQPASKKIDQNKLKPEMDEKGNLTTAGFACSQCGQPLFVYKLEQVSEKGKAYTNYFGRCNVAEHEKLILLAQLKPEKDSDEAVTYSLGKFGQRALDFYSIHVTKESTHPVKPLAQIAGNRYASGPVGKALSDACMGTIASFLSKYQDIIIEHQKVVKGNQKRLESLRELAGKENLEYPSVTLPPQPHTKEGVDAYNEVIARVRMWVNLNLWQKLKLSRDDAKPLLRLKGFPSFPLVERQANEVDWWDMVCNVKKLINEKKEDGKVFWQNLAGYKRQEALRPYLSSEEDRKKGKKFARYQLGDLLLHLEKKHGEDWGKVYDEAWERIDKKVEGLSKHIKLEEERRSEDAQSKAALTDWLRAKASFVIEGLKEADKDEFCRCELKLQKWYGDLRGKPFAIEAENSILDISGFSKQYNCAFIWQKDGVKKLNLYLIINYFKGGKLRFKKIKPEAFEANRFYTVINKKSGEIVPMEVNFNFDDPNLIILPLAFGKRQGREFIWNDLLSLETGSLKLANGRVIEKTLYNRRTRQDEPALFVALTFERREVLDSSNIKPMNLIGVDRGENIPAVIALTDPEGCPLSRFKDSNGNPTHILRIGESFKEKQRTIQAKKEVEQRRAGGYSRKYASKAKNLADDMVRNTARDLLYYAVTQDAMLIFENLSRGFGRQGKRTFMAERQYTRMEDWLTAKLAYEGLPSKTYLSKTLAQYTSKTCSNCGFTITSADYDRVLEKLKKTATGWMTTINGKELKVEGQITYYNRYKRQNVVKDLSVELDRLSEESVNNDISSWTKGRSGEALSLLKKRFSHRPVQEKFVCLNCGFETHADEQAALNIARSWLFLRSQEYKKYQTNKTTGNTDKRAFVETWQSFYRKKLKEVWKPAV

SEQ ID NO: 25916 - protein, 978 aa, synthetic construct
  REGION 1..978: note = engineered CasX variant
QEIKRINKIRRRLVKDSNTKKAGKTGPMKTLLVRVMTPDLRERLENLRKKPENIPQPISNTSRANLNKLLTDYTEMKKAILHVYWEEFQKDPVGLMSRVAQPASKKIDQNKLKPEMDEKGNLTTAGFACSQCGQPLFVYKLEQVSEKGKAYTNYFGRCNVAEHEKLILLAQLKPEKDSDEAVTYSLGKFGQRALDFYSIHVTKESTHPVKPLAQIAGNRYASGPVGKALSDACMGTIASFLSKYQDIIIEHQKVVKGNQKRLESLRELAGKENLEYPSVTLPPQPHTKEGVDAYNEVIARVRMWVNLNLWQKLKLSRDDAKPLLRLKGFPSFPLVERQANEVDWWDMVCNVKKLINEKKEDGKVFWQNLAGYKRQEALRPYLSSEEDRKKGKKFARYQLGDLLLHLEKKHGEDWGKVYDEAWERIDKKVEGLSKHIKLEEERRSEDAQSKAALTDWLRAKASFVIEGLKEADKDEFCRCELKLQKWYGDLRGKPFAIEAENSILDISGFSKQYNCAFIWQKDGVKKLNLYLIINYFKGGKLRFKKIKPEAFEANRFYTVINKKSGEIVPMEVNFNFDDPNLIILPLAFGKRQGREFIWNDLLSLETGSLKLANGRVIEKTLYNRRTRQDEPALFVALTFERREVLDSSNIKPMNLIGVDRGENIPAVIALTDPEGCPLSRFKDSNGNPTFILRIGESYKEKQRTIQAKKEVEQRRAGGYSRKYASKAKNLADDMVRNTARDLLYYAVTQDAMLIFENLSRGFGRQGKRTFMAERQYTRMEDWLTAKLAYEGLPSKTYLSKTLAQYTSKTCSNCGFTITSADYDRVLEKLKKTATGWMTTINGKELKVEGQITYYNRYKRQNVVKDLSVELDRLSEESVNNDISSWTKGRSGEALSLLKKRFSHRPVQEKFVCLNCGFETHADEQAALNIARSWLFLRSQEYKKYQTNKTTGNTDKRAFVETWQSFYRKKLKEVWKPAV

SEQ ID NO: 25917 - protein, 978 aa, synthetic construct
  REGION 1..978: note = engineered CasX variant
QEIKRINKIRRRLVKDSNTKKAGKTGPMKTLLVRVMTPDLRERLENLRKKPENIPQPISNTSRANLNKLLTDYTEMKKAILHVYWEEFQKDPVGLMSRVAQPASKKIDQNKLKPEMDEKGNLTTAGFACSQCGQPLFVYKLEQVSEKGKAYTNYFGRCNVAEHEKLILLAQLKPEKDSDEAVTYSLGKFGQRALDFYSIHVTKESTHPVKPLAQIAGNRYASGPVGKALSDACMGTIASFLSKYQDIIIEHQKVVKGNQKRLESLRELAGKENLEYPSVTLPPQPHTKEGVDAYNEVIARVRMWVNLNLWQKLKLSRDDAKPLLRLKGFPSFPLVERQANEVDWWDMVCNVKKLINEKKEDGKVFWQNLAGYKRQEALRPYLSSEEDRKKGKKFARYQLGDLLLHLEKKHGEDWGKVYDEAWERIDKKVEGLSKHIKLEEERRSEDAQSKAALTDWLRAKASFVIEGLKEADKDEFCRCELKLQKWYGDLRGKPFAIEAENSILDISGFSKQYNCAFIWQKDGVKKLNLYLIINYFKGGKLRFKKIKPEAFEANRFYTVINKKSGEIVPMEVNFNFDDPNLIILPLAFGKRQGREFIWNDLLSLETGSLKLANGRVIEKTLYNRRTRQDEPALFVALTFERREVLDSSNIKPMNLIGVDRGENIPAVIALTDPEGCPLSRFKDSMGNPTHILRIRESYKEKQRTIQAKKEVEQRRAGGYSRKYASKAKNLADDMVRNTARDLLYYAVTQDAMLIFENLSRGFGRQGKRTFMAERQYTRMEDWLTAKLAYEGLPSKTYLSKTLAQYTSKTCSNCGFTITSADYDRVLEKLKKTATGWMTTINGKELKVEGQITYYNRYKRQNVVKDLSVELDRLSEESVNNDISSWTKGRSGEALSLLKKRFSHRPVQEKFVCLNCGFETHADEQAALNIARSWLFLRSQEYKKYQTNKTTGNTDKRAFVETWQSFYRKKLKEVWKPAV

SEQ ID NO: 25918 - protein, 978 aa, synthetic construct
  REGION 1..978: note = engineered CasX variant
QEIKRINKIRRRLVKDSNTKKAGKTGPMKTLLVRVMTPDLRERLENLRKKPENIPQPISNTSRANLNKLLTDYTEMKKAILHVYWEEFQKDPVGLMSRVAQPASKKIDQNKLKPEMDEKGNLTTAGFACSQCGQPLFVYKLEQVSEKGKAYTNYFGRCNVAEHEKLILLAQLKPEKDSDEAVTYSLGKFGQRALDFYSIHVTKESTHPVKPLAQIAGNRYASGPVGKALSDACMGTIASFLSKYQDIIIEHQKVVKGNQKRLESLRELAGKENLEYPSVTLPPQPHTKEGVDAYNEVIARVRMWVNLNLWQKLKLSRDDAKPLLRLKGFPSFPLVERQANEVDWWDMVCNVKKLINEKKEDGKVFWQNLAGYKRQEALRPYLSSEEDRKKGKKFARYQLGDLLLHLEKKHGEDWGKVYDEAWERIDKKVEGLSKHIKLEEERRSEDAQSKAALTDWLRAKASFVIEGLKEADKDEFCRCELKLQKWYGDLRGKPFAIEAENSILDISGFSKQYNCAFIWQKDGVKKLNLYLIINYFKGGKLRFKKIKPEAFEANRFYTVINKKSGEIVPMEVNFNFDDPNLIILPLAFGKRQGREFIWNDLLSLETGSLKLANGRVIEKTLYNRRTRQDEPALFVALTFERREVLDSSNIKPMNLIGVDRGENIPAVIALTDPEGCPLSRFKDSMGNPTHILRIGESYKEKQRTIQAMKEVEQRRAGGYSRKYASKAKNLADDMVRNTARDLLYYAVTQDAMLIFENLSRGFGRQGKRTFMAERQYTRMEDWLTAKLAYEGLPSKTYLSKTLAQYTSKTCSNCGFTITSADYDRVLEKLKKTATGWMTTINGKELKVEGQITYYNRYKRQNVVKDLSVELDRLSEESVNNDISSWTKGRSGEALSLLKKRFSHRPVQEKFVCLNCGFETHADEQAALNIARSWLFLRSQEYKKYQTNKTTGNTDKRAFVETWQSFYRKKLKEVWKPAV

SEQ ID NO: 25919 - protein, 978 aa, synthetic construct
  REGION 1..978: note = engineered CasX variant
QEIKRINKIRRRLVKDSNTKKAGKTGPMKTLLVRVMTPDLRERLENLRKKPENIPQPISNTSRANLNKLLTDYTEMKKAILHVYWEEFQKDPVGLMSRVAQPASKKIDQNKLKPEMDEKGNLTTAGFACSQCGQPLFVYKLEQVSEKGKAYTNYFGRCNVAEHEKLILLAQLKPEKDSDEAVTYSLGKFGQRALDFYSIHVTKESTHPVKPLAQIAGNRYASGPVGKALSDACMGTIASFLSKYQDIIIEHQKVVKGNQKRLESLRELAGKENLEYPSVTLPPQPHTKEGVDAYNEVIARVRMWVNLNLWQKLKLSRDDAKPLLRLKGFPSFPLVERQANEVDWWDMVCNVKKLINEKKEDGKVFWQNLAGYKRQEALRPYLSSEEDRKKGKKFARYQLGDLLLHLEKKHGEDWGKVYDEAWERIDKKVEGLSKHIKLEEERRSEDAQSKAALTDWLRAKASFVIEGLKEADKDEFCRCELKLQKWYGDLRGKPFAIEAENSILDISGFSKQYNCAFIWQKDGVKKLNLYLIINYFKGGKLRFKKIKPEAFEANRFYTVINKKSGEIVPMEVNFNFDDPNLIILPLAFGKRQGREFIWNDLLSLETGSLKLANGRVIEKTLYNRRTRQDEPALFVALTFERREVLDSSNIKPMNLIGVDRGENIPAVIALTDPEGCPLSRFKDSMGNPTHILRIGESYKEKQRTIQAKKEVEQRSAGGYSRKYASKAKNLADDMVRNTARDLLYYAVTQDAMLIFENLSRGFGRQGKRTFMAERQYTRMEDWLTAKLAYEGLPSKTYLSKTLAQYTSKTCSNCGFTITSADYDRVLEKLKKTATGWMTTINGKELKVEGQITYYNRYKRQNVVKDLSVELDRLSEESVNNDISSWTKGRSGEALSLLKKRFSHRPVQEKFVCLNCGFETHADEQAALNIARSWLFLRSQEYKKYQTNKTTGNTDKRAFVETWQSFYRKKLKEVWKPAV

SEQ ID NO: 25920 - protein, 978 aa, synthetic construct
  REGION 1..978: note = engineered CasX variant
QEIKRINKIRRRLVKDSNTKKAGKTGPMKTLLVRVMTPDLRERLENLRKKPENIPQPISNTSRANLNKLLTDYTEMKKAILHVYWEEFQKDPVGLMSRVAQPASKKIDQNKLKPEMDEKGNLTTAGFACSQCGQPLFVYKLEQVSEKGKAYTNYFGRCNVAEHEKLILLAQLKPEKDSDEAVTYSLGKFGQRALDFYSIHVTKESTHPVKPLAQIAGNRYASGPVGKALSDACMGTIASFLSKYQDIIIEHQKVVKGNQKRLESLRELAGKENLEYPSVTLPPQPHTKEGVDAYNEVIARVRMWVNLNLWQKLKLSRDDAKPLLRLKGFPSFPLVERQANEVDWWDMVCNVKKLINEKKEDGKVFWQNLAGYKRQEALRPYLSSEEDRKKGKKFARYQLGDLLLHLEKKHGEDWGKVYDEAWERIDKKVEGLSKHIKLEEERRSEDAQSKAALTDWLRAKASFVIEGLKEADKDEFCRCELKLQKWYGDLRGKPFAIEAENSILDISGFSKQYNCAFIWQKDGVKKLNLYLIINYFKGGKLRFKKIKPEAFEANRFYTVINKKSGEIVPMEVNFNFDDPNLIILPLAFGKRQGREFIWNDLLSLETGSLKLANGRVIEKTLYNRRTRQDEPALFVALTFERREVLDSSNIKPMNLIGVDRGENIPAVIALTDPEGCPLSRFKDSMGNPTHILRIGESYKEKQRTIQAKKEVEQRRAGGYSRKYASKAKNLADDMVRNTARDLLYYAVTQDAMLIFENLSRGFGRQGKRTFMAERQYTRMEDWLTAKLAYEGLPSKTYLSKTLAQYTSKTCSNCGFTITSADYDRVLEKLKKTATGWMTTINGKELKVEGQITYYNRYKRQNVVKDLSVELDRLSEESVNNDISSWTKGRSGEALSLLKKRFSHRPVQEKFVCLNCGFETHADEQAALNIARSWLFLRSQEYKKYQTNKTTGNTDKRAFVETWQSFYRKKLKEVWKPAV

SEQ ID NO: 25921 - protein, 978 aa, synthetic construct
  REGION 1..978: note = engineered CasX variant
QEIKRINKIRRRLVKDSNTKKAGKTGPMKTLLVRVMTPDLRERLENLRKKPENIPQPISNTSRANLNKLLTDYTEMKKAILHVYWEEFQKDPVGLMSRVAQPASKKIDQNKLKPEMDEKGNLTTAGFACSQCGQPLFVYKLEQVSEKGKAYTNYFGRCNVAEHEKLILLAQLKPEKDSDEAVTYSLGKFGQRALDFYSIHVTKESTHPVKPLAQIAGNRYASGPVGKALSDACMGTIASFLSKYQDIIIEHQKVVKGNQKRLESLRELAGKENLEYPSVTLPPQPHTKEGVDAYNEVIARVRMWVNLNLWQKLKLSRDDAKPLLRLKGFPSFPLVERQANEVDWWDMVCNVKKLINEKKEDGKVFWQNLAGYKRQEALRPYLSSEEDRKKGKKFARYQLGDLLLHLEKKHGEDWGKVYDEAWERIDKKVEGLSKHIKLEEERRSEDAQSKAALTDWLRAKASFVIEGLKEADKDEFCRCELKLQKWYGDLRGKPFAIEAENSILDISGFSKQYNCAFIWQKDGVKKLNLYLIINYFKGGKLRFKKIKPEAFEANRFYTVINKKSGEIVPMEVNFNFDDPNLIILPLAFGKRQGREFIWNDLLSLETGSLKLANGRVIEKTLYNRRTRQDEPALFVALTFERREVLDSSNIKPMNLIGVDRGENIPAVIALTDPEGCPLSRFKDSMGNPTHILRIGESYKEKQRTIFAKKEVEQRRAGGYSRKYASKAKNLADDMVRNTARDLLYYAVTQDAMLIFENLSRGFGRQGKRTFMAERQYTRMEDWLTAKLAYEGLPSKTYLSKTLAQYTSKTCSNCGFTITSADYDRVLEKLKKTATGWMTTINGKELKVEGQITYYNRYKRQNVVKDLSVELDRLSEESVNNDISSWTKGRSGEALSLLKKRFSHRPVQEKFVCLNCGFETHADEQAALNIARSWLFLRSQEYKKYQTNKTTGNTDKRAFVETWQSFYRKKLKEVWKPAV

SEQ ID NO: 25922 - protein, 978 aa, synthetic construct
  REGION 1..978: note = engineered CasX variant
QEIKRINKIRRRLVKDSNTKKAGKTGPMKTLLVRVMTPDLRERLENLRKKPENIPQPISNTSRANLNKLLTDYTEMKKAILHVYWEEFQKDPVGLMSRVAQPASKKIDQNKLKPEMDEKGNLTTAGFACSQCGQPLFVYKLEQVSEKGKAYTNYFGRCNVAEHEKLILLAQLKPEKDSDEAVTYSLGKFGQRALDFYSIHVTKESTHPVKPLAQIAGNRYASGPVGKALSDACMGTIASFLSKYQDIIIEHQKVVKGNQKRLESLRELAGKENLEYPSVTLPPQPHTKEGVDAYNEVIARVRMWVNLNLWQKLKLSRDDAKPLLRLKGFPSFPLVERQANEVDWWDMVCNVKKLINEKKEDGKVFWQNLAGYKRQEALRPYLSSEEDRKKGKKFARYQLGDLLLHLEKKHGEDWGKVYDEAWERIDKKVEGLSKHIKLEEERRSEDAQSKAALTDWLRAKASFVIEGLKEADKDEFCRCELKLQKWYGDLRGKPFAIEAENSILDISGFSKQYNCAFIWQKDGVKKLNLYLIINYFKGGKLRFKKIKPEAFEANRFYTVINKKSGEIVPMEVNFNFDDPNLIILPLAFGKRQGREFIWNDLLSLETGSLKLANGRVIEKTLYNRRTRQDEPALFVALTFERREVLDSSNIKPMNLIGVDRGENIPAVIALTDPEGCPLSRFKDSMGNPTHILRIGESYKEKQRTCQAMKEVEQRRAGGYSRKYASKAKNLADDMVRNTARDLLYYAVTQDAMLIFENLSRGFGRQGKRTFMAERQYTRMEDWLTAKLAYEGLPSKTYLSKTLAQYTSKTCSNCGFTITSADYDRVLEKLKKTATGWMTTINGKELKVEGQITYYNRYKRQNVVKDLSVELDRLSEESVNNDISSWTKGRSGEALSLLKKRFSHRPVQEKFVCLNCGFETHADEQAALNIARSWLFLRSQEYKKYQTNKTTGNTDKRAFVETWQSFYRKKLKEVWKPAV

SEQ ID NO: 25923 - protein, 978 aa, synthetic construct
  REGION 1..978: note = engineered CasX variant
QEIKRINKIRRRLVKDSNTKKAGKTGPMKTLLVRVMTPDLRERLENLRKKPENIPQPISNTSRANLNKLLTDYTEMKKAILHVYWEEFQKDPVGLMSRVAQPASKKIDQNKLKPEMDEKGNLTTAGFACSQCGQPLFVYKLEQVSEKGKAYTNYFGRCNVAEHEKLILLAQLKPEKDSDEAVTYSLGKFGQRALDFYSIHVTKESTHPVKPLAQIAGNRYASGPVGKALSDACMGTIASFLSKYQDIIIEHQKVVKGNQKRLESLRELAGKENLEYPSVTLPPQPHTKEGVDAYNEVIARVRMWVNLNLWQKLKLSRDDAKPLLRLKGFPSFPLVERQANEVDWWDMVCNVKKLINEKKEDGKVFWQNLAGYKRQEALRPYLSSEEDRKKGKKFARYQLGDLLLHLEKKHGEDWGKVYDEAWERIDKKVEGLSKHIKLEEERRSEDAQSKAALTDWLRAKASFVIEGLKEADKDEFCRCELKLQKWYGDLRGKPFAIEAENSILDISGFSKQYNCAFIWQKDGVKKLNLYLIINYFKGGKLRFKKIKPEAFEANRFYTVINKKSGEIVPMEVNFNFDDPNLIILPLAFGKRQGREFIWNDLLSLETGSLKLANGRVIEKTLYNRRTRQDEPALFVALTFERREVLDSSNIKPMNLIGVDRGENIPAVIALTDPEGCPLSRFKDSMGNPTHILRIGESYKEKQRTCQAKKEVEQRRAGGYSRKYASKAKNLADDMVRNTARDLLYYAVTQDAMLIFENLSRGFGRQGKRTFMAERQYTRMEDWLTAKLAYEGLPSKTYLSKTLAQYTSKTCSNCGFTITSADYDRVLEKLKKTATGWMTTINGKELKVEGQITYYNRYKRQNVVKDLSVELDRLSEESVNNDISSWTKGRSGEALSLLKKRFSHRPVQEKFVCLNCGFETHADEQAALNIARSWLFLRSQEYKKYQTNKTTGNTDKRAFVETWQSFYRKKLKEVWKPAV

SEQ ID NO: 25924 - protein, 978 aa, synthetic construct
  REGION 1..978: note = engineered CasX variant
QEIKRINKIRRRLVKDSNTKKAGKTGPMKTLLVRVMTPDLRERLENLRKKPENIPQPISNTSRANLNKLLTDYTEMKKAILHVYWEEFQKDPVGLMSRVAQPASKKIDQNKLKPEMDEKGNLTTAGFACSQCGQPLFVYKLEQVSEKGKAYTNYFGRCNVAEHEKLILLAQLKPEKDSDEAVTYSLGKFGQRALDFYSIHVTKESTHPVKPLAQIAGNRYASGPVGKALSDACMGTIASFLSKYQDIIIEHQKVVKGNQKRLESLRELAGKENLEYPSVTLPPQPHTKEGVDAYNEVIARVRMWVNLNLWQKLKLSRDDAKPLLRLKGFPSFPLVERQANEVDWWDMVCNVKKLINEKKEDGKVFWQNLAGYKRQEALRPYLSSEEDRKKGKKFARYQLGDLLLHLEKKHGEDWGKVYDEAWERIDKKVEGLSKHIKLEEERRSEDAQSKAALTDWLRAKASFVIEGLKEADKDEFCRCELKLQKWYGDLRGKPFAIEAENSILDISGFSKQYNCAFIWQKDGVKKLNLYLIINYFKGGKLRFKKIKPEAFEANRFYTVINKKSGEIVPMEVNFNFDDPNLIILPLAFGKRQGREFIWNDLLSLETGSLKLANGRVIEKTLYNRRTRQDEPALFVALTFERREVLDSSNIKPMNLIGVDRGENIPAVIALTDPEGCPLSRFKDSLNNPTHILRIGESYKEKQRTIQAKKEVEQRRAGGYSRKYASKAKNLADDMVRNTARDLLYYAVTQDAMLIFENLSRGFGRQGKRTFMAERQYTRMEDWLTAKLAYEGLPSKTYLSKTLAQYTSKTCSNCGFTITSADYDRVLEKLKKTATGWMTTINGKELKVEGQITYYNRYKRQNVVKDLSVELDRLSEESVNNDISSWTKGRSGEALSLLKKRFSHRPVQEKFVCLNCGFETHADEQAALNIARSWLFLRSQEYKKYQTNKTTGNTDKRAFVETWQSFYRKKLKEVWKPAV

SEQ ID NO: 25925 - protein, 978 aa, synthetic construct
  REGION 1..978: note = engineered CasX variant
QEIKRINKIRRRLVKDSNTKKAGKTGPMKTLLVRVMTPDLRERLENLRKKPENIPQPISNTSRANLNKLLTDYTEMKKAILHVYWEEFQKDPVGLMSRVAQPASKKIDQNKLKPEMDEKGNLTTAGFACSQCGQPLFVYKLEQVSEKGKAYTNYFGRCNVAEHEKLILLAQLKPEKDSDEAVTYSLGKFGQRALDFYSIHVTKESTHPVKPLAQIAGNRYASGPVGKALSDACMGTIASFLSKYQDIIIEHQKVVKGNQKRLESLRELAGKENLEYPSVTLPPQPHTKEGVDAYNEVIARVRMWVNLNLWQKLKLSRDDAKPLLRLKGFPSFPLVERQANEVDWWDMVCNVKKLINEKKEDGKVFWQNLAGYKRQEALRPYLSSEEDRKKGKKFARYQLGDLLLHLEKKHGEDWGKVYDEAWERIDKKVEGLSKHIKLEEERRSEDAQSKAALTDWLRAKASFVIEGLKEADKDEFCRCELKLQKWYGDLRGKPFAIEAENSILDISGFSKQYNCAFIWQKDGVKKLNLYLIINYFKGGKLRFKKIKPEAFEANRFYTVINKKSGEIVPMEVNFNFDDPNLIILPLAFGKRQGREFIWNDLLSLETGSLKLANGRVIEKTLYNRRTRQDEPALFVALTFERREVLDSSNIKPMNLIGVDRGENIPAVIALTDPEGCPLSRFKDSLNNPTHILRIGESYKEKQRTIQAKKEVEQGRAGGYSRKYASKAKNLADDMVRNTARDLLYYAVTQDAMLIFENLSRGFGRQGKRTFMAERQYTRMEDWLTAKLAYEGLPSKTYLSKTLAQYTSKTCSNCGFTITSADYDRVLEKLKKTATGWMTTINGKELKVEGQITYYNRYKRQNVVKDLSVELDRLSEESVNNDISSWTKGRSGEALSLLKKRFSHRPVQEKFVCLNCGFETHADEQAALNIARSWLFLRSQEYKKYQTNKTTGNTDKRAFVETWQSFYRKKLKEVWKPAV

SEQ ID NO: 25926 - protein, 978 aa, synthetic construct
  REGION 1..978: note = engineered CasX variant
QEIKRINKIRRRLVKDSNTKKAGKTGPMKTLLVRVMTPDLRERLENLRKKPENIPQPISNTSRANLNKLLTDYTEMKKAILHVYWEEFQKDPVGLMSRVAQPASKKIDQNKLKPEMDEKGNLTTAGFACSQCGQPLFVYKLEQVSEKGKAYTNYFGRCNVAEHEKLILLAQLKPEKDSDEAVTYSLGKFGQRALDFYSIHVTKESTHPVKPLAQIAGNRYASGPVGKALSDACMGTIASFLSKYQDIIIEHQKVVKGNQKRLESLRELAGKENLEYPSVTLPPQPHTKEGVDAYNEVIARVRMWVNLNLWQKLKLSRDDAKPLLRLKGFPSFPLVERQANEVDWWDMVCNVKKLINEKKEDGKVFWQNLAGYKRQEALRPYLSSEEDRKKGKKFARYQLGDLLLHLEKKHGEDWGKVYDEAWERIDKKVEGLSKHIKLEEERRSEDAQSKAALTDWLRAKASFVIEGLKEADKDEFCRCELKLQKWYGDLRGKPFAIEAENSILDISGFSKQYNCAFIWQKDGVKKLNLYLIINYFKGGKLRFKKIKPEAFEANRFYTVINKKSGEIVPMEVNFNFDDPNLIILPLAFGKRQGREFIWNDLLSLETGSLKLANGRVIEKTLYNRRTRQDEPALFVALTFERREVLDSSNIKPMNLIGVDRGENIPAVIALTDPEGCPLSRFKDSLHNPTHILRIGESYKEKQRTIQANKEVEQRRAGGYSRKYASKAKNLADDMVRNTARDLLYYAVTQDAMLIFENLSRGFGRQGKRTFMAERQYTRMEDWLTAKLAYEGLPSKTYLSKTLAQYTSKTCSNCGFTITSADYDRVLEKLKKTATGWMTTINGKELKVEGQITYYNRYKRQNVVKDLSVELDRLSEESVNNDISSWTKGRSGEALSLLKKRFSHRPVQEKFVCLNCGFETHADEQAALNIARSWLFLRSQEYKKYQTNKTTGNTDKRAFVETWQSFYRKKLKEVWKPAV

SEQ ID NO: 25927 - protein, 978 aa, synthetic construct
  REGION 1..978: note = engineered CasX variant
QEIKRINKIRRRLVKDSNTKKAGKTGPMKTLLVRVMTPDLRERLENLRKKPENIPQPISNTSRANLNKLLTDYTEMKKAILHVYWEEFQKDPVGLMSRVAQPASKKIDQNKLKPEMDEKGNLTTAGFACSQCGQPLFVYKLEQVSEKGKAYTNYFGRCNVAEHEKLILLAQLKPEKDSDEAVTYSLGKFGQRALDFYSIHVTKESTHPVKPLAQIAGNRYASGPVGKALSDACMGTIASFLSKYQDIIIEHQKVVKGNQKRLESLRELAGKENLEYPSVTLPPQPHTKEGVDAYNEVIARVRMWVNLNLWQKLKLSRDDAKPLLRLKGFPSFPLVERQANEVDWWDMVCNVKKLINEKKEDGKVFWQNLAGYKRQEALRPYLSSEEDRKKGKKFARYQLGDLLLHLEKKHGEDWGKVYDEAWERIDKKVEGLSKHIKLEEERRSEDAQSKAALTDWLRAKASFVIEGLKEADKDEFCRCELKLQKWYGDLRGKPFAIEAENSILDISGFSKQYNCAFIWQKDGVKKLNLYLIINYFKGGKLRFKKIKPEAFEANRFYTVINKKSGEIVPMEVNFNFDDPNLIILPLAFGKRQGREFIWNDLLSLETGSLKLANGRVIEKTLYNRRTRQDEPALFVALTFERREVLDSSNIKPMNLIGVDRGENIPAVIALTDPEGCPLSRFKDSLGYPTHILRIQESYKEKQRTIQAHKEVEQRRAGGYSRKYASKAKNLADDMVRNTARDLLYYAVTQDAMLIFENLSRGFGRQGKRTFMAERQYTRMEDWLTAKLAYEGLPSKTYLSKTLAQYTSKTCSNCGFTITSADYDRVLEKLKKTATGWMTTINGKELKVEGQITYYNRYKRQNVVKDLSVELDRLSEESVNNDISSWTKGRSGEALSLLKKRFSHRPVQEKFVCLNCGFETHADEQAALNIARSWLFLRSQEYKKYQTNKTTGNTDKRAFVETWQSFYRKKLKEVWKPAV

SEQ ID NO: 25928 - protein, 978 aa, synthetic construct
  REGION 1..978: note = engineered CasX variant
QEIKRINKIRRRLVKDSNTKKAGKTGPMKTLLVRVMTPDLRERLENLRKKPENIPQPISNTSRANLNKLLTDYTEMKKAILHVYWEEFQKDPVGLMSRVAQPASKKIDQNKLKPEMDEKGNLTTAGFACSQCGQPLFVYKLEQVSEKGKAYTNYFGRCNVAEHEKLILLAQLKPEKDSDEAVTYSLGKFGQRALDFYSIHVTKESTHPVKPLAQIAGNRYASGPVGKALSDACMGTIASFLSKYQDIIIEHQKVVKGNQKRLESLRELAGKENLEYPSVTLPPQPHTKEGVDAYNEVIARVRMWVNLNLWQKLKLSRDDAKPLLRLKGFPSFPLVERQANEVDWWDMVCNVKKLINEKKEDGKVFWQNLAGYKRQEALRPYLSSEEDRKKGKKFARYQLGDLLLHLEKKHGEDWGKVYDEAWERIDKKVEGLSKHIKLEEERRSEDAQSKAALTDWLRAKASFVIEGLKEADKDEFCRCELKLQKWYGDLRGKPFAIEAENSILDISGFSKQYNCAFIWQKDGVKKLNLYLIINYFKGGKLRFKKIKPEAFEANRFYTVINKKSGEIVPMEVNFNFDDPNLIILPLAFGKRQGREFIWNDLLSLETGSLKLANGRVIEKTLYNRRTRQDEPALFVALTFERREVLDSSNIKPMNLIGVDRGENIPAVIALTDPEGCPLSRFKDSLGYPTHILRIGESYKEKQRTIQAKKSVEQRRAGGYSRKYASKAKNLADDMVRNTARDLLYYAVTQDAMLIFENLSRGFGRQGKRTFMAERQYTRMEDWLTAKLAYEGLPSKTYLSKTLAQYTSKTCSNCGFTITSADYDRVLEKLKKTATGWMTTINGKELKVEGQITYYNRYKRQNVVKDLSVELDRLSEESVNNDISSWTKGRSGEALSLLKKRFSHRPVQEKFVCLNCGFETHADEQAALNIARSWLFLRSQEYKKYQTNKTTGNTDKRAFVETWQSFYRKKLKEVWKPAV

SEQ ID NO: 25929 - protein, 978 aa, synthetic construct
  REGION 1..978: note = engineered CasX variant
QEIKRINKIRRRLVKDSNTKKAGKTGPMKTLLVRVMTPDLRERLENLRKKPENIPQPISNTSRANLNKLLTDYTEMKKAILHVYWEEFQKDPVGLMSRVAQPASKKIDQNKLKPEMDEKGNLTTAGFACSQCGQPLFVYKLEQVSEKGKAYTNYFGRCNVAEHEKLILLAQLKPEKDSDEAVTYSLGKFGQRALDFYSIHVTKESTHPVKPLAQIAGNRYASGPVGKALSDACMGTIASFLSKYQDIIIEHQKVVKGNQKRLESLRELAGKENLEYPSVTLPPQPHTKEGVDAYNEVIARVRMWVNLNLWQKLKLSRDDAKPLLRLKGFPSFPLVERQANEVDWWDMVCNVKKLINEKKEDGKVFWQNLAGYKRQEALRPYLSSEEDRKKGKKFARYQLGDLLLHLEKKHGEDWGKVYDEAWERIDKKVEGLSKHIKLEEERRSEDAQSKAALTDWLRAKASFVIEGLKEADKDEFCRCELKLQKWYGDLRGKPFAIEAENSILDISGFSKQYNCAFIWQKDGVKKLNLYLIINYFKGGKLRFKKIKPEAFEANRFYTVINKKSGEIVPMEVNFNFDDPNLIILPLAFGKRQGREFIWNDLLSLETGSLKLANGRVIEKTLYNRRTRQDEPALFVALTFERREVLDSSNIKPMNLIGVDRGENIPAVIALTDPEGCPLSRFKDSLGYPTHILRIGESYKEKQRTIQAKKEVEQRRAGGYSRKYASKAKNLADDMVRNTARDLLYYAVTQDAMLIFENLSRGFGRQGKRTFMAERQYTRMEDWLTAKLAYEGLPSKTYLSKTLAQYTSKTCSNCGFTITSADYDRVLEKLKKTATGWMTTINGKELKVEGQITYYNRYKRQNVVKDLSVELDRLSEESVNNDISSWTKGRSGEALSLLKKRFSHRPVQEKFVCLNCGFETHADEQAALNIARSWLFLRSQEYKKYQTNKTTGNTDKRAFVETWQSFYRKKLKEVWKPAV

SEQ ID NO: 25930 - protein, 978 aa, synthetic construct
  REGION 1..978: note = engineered CasX variant
QEIKRINKIRRRLVKDSNTKKAGKTGPMKTLLVRVMTPDLRERLENLRKKPENIPQPISNTSRANLNKLLTDYTEMKKAILHVYWEEFQKDPVGLMSRVAQPASKKIDQNKLKPEMDEKGNLTTAGFACSQCGQPLFVYKLEQVSEKGKAYTNYFGRCNVAEHEKLILLAQLKPEKDSDEAVTYSLGKFGQRALDFYSIHVTKESTHPVKPLAQIAGNRYASGPVGKALSDACMGTIASFLSKYQDIIIEHQKVVKGNQKRLESLRELAGKENLEYPSVTLPPQPHTKEGVDAYNEVIARVRMWVNLNLWQKLKLSRDDAKPLLRLKGFPSFPLVERQANEVDWWDMVCNVKKLINEKKEDGKVFWQNLAGYKRQEALRPYLSSEEDRKKGKKFARYQLGDLLLHLEKKHGEDWGKVYDEAWERIDKKVEGLSKHIKLEEERRSEDAQSKAALTDWLRAKASFVIEGLKEADKDEFCRCELKLQKWYGDLRGKPFAIEAENSILDISGFSKQYNCAFIWQKDGVKKLNLYLIINYFKGGKLRFKKIKPEAFEANRFYTVINKKSGEIVPMEVNFNFDDPNLIILPLAFGKRQGREFIWNDLLSLETGSLKLANGRVIEKTLYNRRTRQDEPALFVALTFERREVLDSSNIKPMNLIGVDRGENIPAVIALTDPEGCPLSRFKDSLGYPTHILRIGESYKEKQRTIQAHKEVEQRRAGGYSRKYASKAKNLADDMVRNTARDLLYYAVTQDAMLIFENLSRGFGRQGKRTFMAERQYTRMEDWLTAKLAYEGLPSKTYLSKTLAQYTSKTCSNCGFTITSADYDRVLEKLKKTATGWMTTINGKELKVEGQITYYNRYKRQNVVKDLSVELDRLSEESVNNDISSWTKGRSGEALSLLKKRFSHRPVQEKFVCLNCGFETHADEQAALNIARSWLFLRSQEYKKYQTNKTTGNTDKRAFVETWQSFYRKKLKEVWKPAV

SEQ ID NO: 25931 - protein, 978 aa, synthetic construct
  REGION 1..978: note = engineered CasX variant
QEIKRINKIRRRLVKDSNTKKAGKTGPMKTLLVRVMTPDLRERLENLRKKPENIPQPISNTSRANLNKLLTDYTEMKKAILHVYWEEFQKDPVGLMSRVAQPASKKIDQNKLKPEMDEKGNLTTAGFACSQCGQPLFVYKLEQVSEKGKAYTNYFGRCNVAEHEKLILLAQLKPEKDSDEAVTYSLGKFGQRALDFYSIHVTKESTHPVKPLAQIAGNRYASGPVGKALSDACMGTIASFLSKYQDIIIEHQKVVKGNQKRLESLRELAGKENLEYPSVTLPPQPHTKEGVDAYNEVIARVRMWVNLNLWQKLKLSRDDAKPLLRLKGFPSFPLVERQANEVDWWDMVCNVKKLINEKKEDGKVFWQNLAGYKRQEALRPYLSSEEDRKKGKKFARYQLGDLLLHLEKKHGEDWGKVYDEAWERIDKKVEGLSKHIKLEEERRSEDAQSKAALTDWLRAKASFVIEGLKEADKDEFCRCELKLQKWYGDLRGKPFAIEAENSILDISGFSKQYNCAFIWQKDGVKKLNLYLIINYFKGGKLRFKKIKPEAFEANRFYTVINKKSGEIVPMEVNFNFDDPNLIILPLAFGKRQGREFIWNDLLSLETGSLKLANGRVIEKTLYNRRTRQDEPALFVALTFERREVLDSSNIKPMNLIGVDRGENIPAVIALTDPEGCPLSRFKDSLGVPTHILRIGESYKEKQRTIQAKKEVEQRRAGGYSRKYASKAKNLADDMVRNTARDLLYYAVTQDAMLIFENLSRGFGRQGKRTFMAERQYTRMEDWLTAKLAYEGLPSKTYLSKTLAQYTSKTCSNCGFTITSADYDRVLEKLKKTATGWMTTINGKELKVEGQITYYNRYKRQNVVKDLSVELDRLSEESVNNDISSWTKGRSGEALSLLKKRFSHRPVQEKFVCLNCGFETHADEQAALNIARSWLFLRSQEYKKYQTNKTTGNTDKRAFVETWQSFYRKKLKEVWKPAV

SEQ ID NO: 25932 - protein, 978 aa, synthetic construct
  REGION 1..978: note = engineered CasX variant
QEIKRINKIRRRLVKDSNTKKAGKTGPMKTLLVRVMTPDLRERLENLRKKPENIPQPISNTSRANLNKLLTDYTEMKKAILHVYWEEFQKDPVGLMSRVAQPASKKIDQNKLKPEMDEKGNLTTAGFACSQCGQPLFVYKLEQVSEKGKAYTNYFGRCNVAEHEKLILLAQLKPEKDSDEAVTYSLGKFGQRALDFYSIHVTKESTHPVKPLAQIAGNRYASGPVGKALSDACMGTIASFLSKYQDIIIEHQKVVKGNQKRLESLRELAGKENLEYPSVTLPPQPHTKEGVDAYNEVIARVRMWVNLNLWQKLKLSRDDAKPLLRLKGFPSFPLVERQANEVDWWDMVCNVKKLINEKKEDGKVFWQNLAGYKRQEALRPYLSSEEDRKKGKKFARYQLGDLLLHLEKKHGEDWGKVYDEAWERIDKKVEGLSKHIKLEEERRSEDAQSKAALTDWLRAKASFVIEGLKEADKDEFCRCELKLQKWYGDLRGKPFAIEAENSILDISGFSKQYNCAFIWQKDGVKKLNLYLIINYFKGGKLRFKKIKPEAFEANRFYTVINKKSGEIVPMEVNFNFDDPNLIILPLAFGKRQGREFIWNDLLSLETGSLKLANGRVIEKTLYNRRTRQDEPALFVALTFERREVLDSSNIKPMNLIGVDRGENIPAVIALTDPEGCPLSRFKDSLGTPTHILRIGESYKEKQRTIQAKKEVEQRRAGGYSRKYASKAKNLADDMVRNTARDLLYYAVTQDAMLIFENLSRGFGRQGKRTFMAERQYTRMEDWLTAKLAYEGLPSKTYLSKTLAQYTSKTCSNCGFTITSADYDRVLEKLKKTATGWMTTINGKELKVEGQITYYNRYKRQNVVKDLSVELDRLSEESVNNDISSWTKGRSGEALSLLKKRFSHRPVQEKFVCLNCGFETHADEQAALNIARSWLFLRSQEYKKYQTNKTTGNTDKRAFVETWQSFYRKKLKEVWKPAV

SEQ ID NO: 25933 - protein, 978 aa, synthetic construct
  REGION 1..978: note = engineered CasX variant
QEIKRINKIRRRLVKDSNTKKAGKTGPMKTLLVRVMTPDLRERLENLRKKPENIPQPISNTSRANLNKLLTDYTEMKKAILHVYWEEFQKDPVGLMSRVAQPASKKIDQNKLKPEMDEKGNLTTAGFACSQCGQPLFVYKLEQVSEKGKAYTNYFGRCNVAEHEKLILLAQLKPEKDSDEAVTYSLGKFGQRALDFYSIHVTKESTHPVKPLAQIAGNRYASGPVGKALSDACMGTIASFLSKYQDIIIEHQKVVKGNQKRLESLRELAGKENLEYPSVTLPPQPHTKEGVDAYNEVIARVRMWVNLNLWQKLKLSRDDAKPLLRLKGFPSFPLVERQANEVDWWDMVCNVKKLINEKKEDGKVFWQNLAGYKRQEALRPYLSSEEDRKKGKKFARYQLGDLLLHLEKKHGEDWGKVYDEAWERIDKKVEGLSKHIKLEEERRSEDAQSKAALTDWLRAKASFVIEGLKEADKDEFCRCELKLQKWYGDLRGKPFAIEAENSILDISGFSKQYNCAFIWQKDGVKKLNLYLIINYFKGGKLRFKKIKPEAFEANRFYTVINKKSGEIVPMEVNFNFDDPNLIILPLAFGKRQGREFIWNDLLSLETGSLKLANGRVIEKTLYNRRTRQDEPALFVALTFERREVLDSSNIKPMNLIGVDRGENIPAVIALTDPEGCPLSRFKDSLGTPTHILRIGESYKEKQRTIQAKKESEQRRAGGYSRKYASKAKNLADDMVRNTARDLLYYAVTQDAMLIFENLSRGFGRQGKRTFMAERQYTRMEDWLTAKLAYEGLPSKTYLSKTLAQYTSKTCSNCGFTITSADYDRVLEKLKKTATGWMTTINGKELKVEGQITYYNRYKRQNVVKDLSVELDRLSEESVNNDISSWTKGRSGEALSLLKKRFSHRPVQEKFVCLNCGFETHADEQAALNIARSWLFLRSQEYKKYQTNKTTGNTDKRAFVETWQSFYRKKLKEVWKPAV

SEQ ID NO: 25934 - protein, 978 aa, synthetic construct
  REGION 1..978: note = engineered CasX variant
QEIKRINKIRRRLVKDSNTKKAGKTGPMKTLLVRVMTPDLRERLENLRKKPENIPQPISNTSRANLNKLLTDYTEMKKAILHVYWEEFQKDPVGLMSRVAQPASKKIDQNKLKPEMDEKGNLTTAGFACSQCGQPLFVYKLEQVSEKGKAYTNYFGRCNVAEHEKLILLAQLKPEKDSDEAVTYSLGKFGQRALDFYSIHVTKESTHPVKPLAQIAGNRYASGPVGKALSDACMGTIASFLSKYQDIIIEHQKVVKGNQKRLESLRELAGKENLEYPSVTLPPQPHTKEGVDAYNEVIARVRMWVNLNLWQKLKLSRDDAKPLLRLKGFPSFPLVERQANEVDWWDMVCNVKKLINEKKEDGKVFWQNLAGYKRQEALRPYLSSEEDRKKGKKFARYQLGDLLLHLEKKHGEDWGKVYDEAWERIDKKVEGLSKHIKLEEERRSEDAQSKAALTDWLRAKASFVIEGLKEADKDEFCRCELKLQKWYGDLRGKPFAIEAENSILDISGFSKQYNCAFIWQKDGVKKLNLYLIINYFKGGKLRFKKIKPEAFEANRFYTVINKKSGEIVPMEVNFNFDDPNLIILPLAFGKRQGREFIWNDLLSLETGSLKLANGRVIEKTLYNRRTRQDEPALFVALTFERREVLDSSNIKPMNLIGVDRGENIPAVIALTDPEGCPLSRFKDSLGTPTHILRIGESYKEKQRFIQAKKEVEQRRAGGYSRKYASKAKNLADDMVRNTARDLLYYAVTQDAMLIFENLSRGFGRQGKRTFMAERQYTRMEDWLTAKLAYEGLPSKTYLSKTLAQYTSKTCSNCGFTITSADYDRVLEKLKKTATGWMTTINGKELKVEGQITYYNRYKRQNVVKDLSVELDRLSEESVNNDISSWTKGRSGEALSLLKKRFSHRPVQEKFVCLNCGFETHADEQAALNIARSWLFLRSQEYKKYQTNKTTGNTDKRAFVETWQSFYRKKLKEVWKPAV

SEQ ID NO: 25935 - protein, 978 aa, synthetic construct
  REGION 1..978: note = engineered CasX variant
QEIKRINKIRRRLVKDSNTKKAGKTGPMKTLLVRVMTPDLRERLENLRKKPENIPQPISNTSRANLNKLLTDYTEMKKAILHVYWEEFQKDPVGLMSRVAQPASKKIDQNKLKPEMDEKGNLTTAGFACSQCGQPLFVYKLEQVSEKGKAYTNYFGRCNVAEHEKLILLAQLKPEKDSDEAVTYSLGKFGQRALDFYSIHVTKESTHPVKPLAQIAGNRYASGPVGKALSDACMGTIASFLSKYQDIIIEHQKVVKGNQKRLESLRELAGKENLEYPSVTLPPQPHTKEGVDAYNEVIARVRMWVNLNLWQKLKLSRDDAKPLLRLKGFPSFPLVERQANEVDWWDMVCNVKKLINEKKEDGKVFWQNLAGYKRQEALRPYLSSEEDRKKGKKFARYQLGDLLLHLEKKHGEDWGKVYDEAWERIDKKVEGLSKHIKLEEERRSEDAQSKAALTDWLRAKASFVIEGLKEADKDEFCRCELKLQKWYGDLRGKPFAIEAENSILDISGFSKQYNCAFIWQKDGVKKLNLYLIINYFKGGKLRFKKIKPEAFEANRFYTVINKKSGEIVPMEVNFNFDDPNLIILPLAFGKRQGREFIWNDLLSLETGSLKLANGRVIEKTLYNRRTRQDEPALFVALTFERREVLDSSNIKPMNLIGVDRGENIPAVIALTDPEGCPLSRFKDSLGTPTHILRIGESYKEKQRFIQAKKESEQRRAGGYSRKYASKAKNLADDMVRNTARDLLYYAVTQDAMLIFENLSRGFGRQGKRTFMAERQYTRMEDWLTAKLAYEGLPSKTYLSKTLAQYTSKTCSNCGFTITSADYDRVLEKLKKTATGWMTTINGKELKVEGQITYYNRYKRQNVVKDLSVELDRLSEESVNNDISSWTKGRSGEALSLLKKRFSHRPVQEKFVCLNCGFETHADEQAALNIARSWLFLRSQEYKKYQTNKTTGNTDKRAFVETWQSFYRKKLKEVWKPAV

SEQ ID NO: 25936 - protein, 978 aa, synthetic construct
  REGION 1..978: note = engineered CasX variant
QEIKRINKIRRRLVKDSNTKKAGKTGPMKTLLVRVMTPDLRERLENLRKKPENIPQPISNTSRANLNKLLTDYTEMKKAILHVYWEEFQKDPVGLMSRVAQPASKKIDQNKLKPEMDEKGNLTTAGFACSQCGQPLFVYKLEQVSEKGKAYTNYFGRCNVAEHEKLILLAQLKPEKDSDEAVTYSLGKFGQRALDFYSIHVTKESTHPVKPLAQIAGNRYASGPVGKALSDACMGTIASFLSKYQDIIIEHQKVVKGNQKRLESLRELAGKENLEYPSVTLPPQPHTKEGVDAYNEVIARVRMWVNLNLWQKLKLSRDDAKPLLRLKGFPSFPLVERQANEVDWWDMVCNVKKLINEKKEDGKVFWQNLAGYKRQEALRPYLSSEEDRKKGKKFARYQLGDLLLHLEKKHGEDWGKVYDEAWERIDKKVEGLSKHIKLEEERRSEDAQSKAALTDWLRAKASFVIEGLKEADKDEFCRCELKLQKWYGDLRGKPFAIEAENSILDISGFSKQYNCAFIWQKDGVKKLNLYLIINYFKGGKLRFKKIKPEAFEANRFYTVINKKSGEIVPMEVNFNFDDPNLIILPLAFGKRQGREFIWNDLLSLETGSLKLANGRVIEKTLYNRRTRQDEPALFVALTFERREVLDSSNIKPMNLIGVDRGENIPAVIALTDPEGCPLSRFKDSLGRPTHILRIGESYKEWQRTIQAKKEVEQRRAGGYSRKYASKAKNLADDMVRNTARDLLYYAVTQDAMLIFENLSRGFGRQGKRTFMAERQYTRMEDWLTAKLAYEGLPSKTYLSKTLAQYTSKTCSNCGFTITSADYDRVLEKLKKTATGWMTTINGKELKVEGQITYYNRYKRQNVVKDLSVELDRLSEESVNNDISSWTKGRSGEALSLLKKRFSHRPVQEKFVCLNCGFETHADEQAALNIARSWLFLRSQEYKKYQTNKTTGNTDKRAFVETWQSFYRKKLKEVWKPAV

SEQ ID NO: 25937 - protein, 978 aa, synthetic construct
  REGION 1..978: note = engineered CasX variant
QEIKRINKIRRRLVKDSNTKKAGKTGPMKTLLVRVMTPDLRERLENLRKKPENIPQPISNTSRANLNKLLTDYTEMKKAILHVYWEEFQKDPVGLMSRVAQPASKKIDQNKLKPEMDEKGNLTTAGFACSQCGQPLFVYKLEQVSEKGKAYTNYFGRCNVAEHEKLILLAQLKPEKDSDEAVTYSLGKFGQRALDFYSIHVTKESTHPVKPLAQIAGNRYASGPVGKALSDACMGTIASFLSKYQDIIIEHQKVVKGNQKRLESLRELAGKENLEYPSVTLPPQPHTKEGVDAYNEVIARVRMWVNLNLWQKLKLSRDDAKPLLRLKGFPSFPLVERQANEVDWWDMVCNVKKLINEKKEDGKVFWQNLAGYKRQEALRPYLSSEEDRKKGKKFARYQLGDLLLHLEKKHGEDWGKVYDEAWERIDKKVEGLSKHIKLEEERRSEDAQSKAALTDWLRAKASFVIEGLKEADKDEFCRCELKLQKWYGDLRGKPFAIEAENSILDISGFSKQYNCAFIWQKDGVKKLNLYLIINYFKGGKLRFKKIKPEAFEANRFYTVINKKSGEIVPMEVNFNFDDPNLIILPLAFGKRQGREFIWNDLLSLETGSLKLANGRVIEKTLYNRRTRQDEPALFVALTFERREVLDSSNIKPMNLIGVDRGENIPAVIALTDPEGCPLSRFKDSLGRPTHILRIGESYKEKQRTIQAKKEVEQRRAGGYSRKYASKAKNLADDMVRNTARDLLYYAVTQDAMLIFENLSRGFGRQGKRTFMAERQYTRMEDWLTAKLAYEGLPSKTYLSKTLAQYTSKTCSNCGFTITSADYDRVLEKLKKTATGWMTTINGKELKVEGQITYYNRYKRQNVVKDLSVELDRLSEESVNNDISSWTKGRSGEALSLLKKRFSHRPVQEKFVCLNCGFETHADEQAALNIARSWLFLRSQEYKKYQTNKTTGNTDKRAFVETWQSFYRKKLKEVWKPAV

SEQ ID NO: 25938 - protein, 978 aa, synthetic construct
  REGION 1..978: note = engineered CasX variant
QEIKRINKIRRRLVKDSNTKKAGKTGPMKTLLVRVMTPDLRERLENLRKKPENIPQPISNTSRANLNKLLTDYTEMKKAILHVYWEEFQKDPVGLMSRVAQPASKKIDQNKLKPEMDEKGNLTTAGFACSQCGQPLFVYKLEQVSEKGKAYTNYFGRCNVAEHEKLILLAQLKPEKDSDEAVTYSLGKFGQRALDFYSIHVTKESTHPVKPLAQIAGNRYASGPVGKALSDACMGTIASFLSKYQDIIIEHQKVVKGNQKRLESLRELAGKENLEYPSVTLPPQPHTKEGVDAYNEVIARVRMWVNLNLWQKLKLSRDDAKPLLRLKGFPSFPLVERQANEVDWWDMVCNVKKLINEKKEDGKVFWQNLAGYKRQEALRPYLSSEEDRKKGKKFARYQLGDLLLHLEKKHGEDWGKVYDEAWERIDKKVEGLSKHIKLEEERRSEDAQSKAALTDWLRAKASFVIEGLKEADKDEFCRCELKLQKWYGDLRGKPFAIEAENSILDISGFSKQYNCAFIWQKDGVKKLNLYLIINYFKGGKLRFKKIKPEAFEANRFYTVINKKSGEIVPMEVNFNFDDPNLIILPLAFGKRQGREFIWNDLLSLETGSLKLANGRVIEKTLYNRRTRQDEPALFVALTFERREVLDSSNIKPMNLIGVDRGENIPAVIALTDPEGCPLSRFKDSLGRPTHILRIGESYKEKQRTIQADKEVEQRRAGGYSRKYASKAKNLADDMVRNTARDLLYYAVTQDAMLIFENLSRGFGRQGKRTFMAERQYTRMEDWLTAKLAYEGLPSKTYLSKTLAQYTSKTCSNCGFTITSADYDRVLEKLKKTATGWMTTINGKELKVEGQITYYNRYKRQNVVKDLSVELDRLSEESVNNDISSWTKGRSGEALSLLKKRFSHRPVQEKFVCLNCGFETHADEQAALNIARSWLFLRSQEYKKYQTNKTTGNTDKRAFVETWQSFYRKKLKEVWKPAV

SEQ ID NO: 25939 - protein, 978 aa, synthetic construct
  REGION 1..978: note = engineered CasX variant
QEIKRINKIRRRLVKDSNTKKAGKTGPMKTLLVRVMTPDLRERLENLRKKPENIPQPISNTSRANLNKLLTDYTEMKKAILHVYWEEFQKDPVGLMSRVAQPASKKIDQNKLKPEMDEKGNLTTAGFACSQCGQPLFVYKLEQVSEKGKAYTNYFGRCNVAEHEKLILLAQLKPEKDSDEAVTYSLGKFGQRALDFYSIHVTKESTHPVKPLAQIAGNRYASGPVGKALSDACMGTIASFLSKYQDIIIEHQKVVKGNQKRLESLRELAGKENLEYPSVTLPPQPHTKEGVDAYNEVIARVRMWVNLNLWQKLKLSRDDAKPLLRLKGFPSFPLVERQANEVDWWDMVCNVKKLINEKKEDGKVFWQNLAGYKRQEALRPYLSSEEDRKKGKKFARYQLGDLLLHLEKKHGEDWGKVYDEAWERIDKKVEGLSKHIKLEEERRSEDAQSKAALTDWLRAKASFVIEGLKEADKDEFCRCELKLQKWYGDLRGKPFAIEAENSILDISGFSKQYNCAFIWQKDGVKKLNLYLIINYFKGGKLRFKKIKPEAFEANRFYTVINKKSGEIVPMEVNFNFDDPNLIILPLAFGKRQGREFIWNDLLSLETGSLKLANGRVIEKTLYNRRTRQDEPALFVALTFERREVLDSSNIKPMNLIGVDRGENIPAVIALTDPEGCPLSRFKDSLGRPTHILRIGESLKEKQRTIQAKKEVEQRRAGGYSRKYASKAKNLADDMVRNTARDLLYYAVTQDAMLIFENLSRGFGRQGKRTFMAERQYTRMEDWLTAKLAYEGLPSKTYLSKTLAQYTSKTCSNCGFTITSADYDRVLEKLKKTATGWMTTINGKELKVEGQITYYNRYKRQNVVKDLSVELDRLSEESVNNDISSWTKGRSGEALSLLKKRFSHRPVQEKFVCLNCGFETHADEQAALNIARSWLFLRSQEYKKYQTNKTTGNTDKRAFVETWQSFYRKKLKEVWKPAV

SEQ ID NO: 25940 - protein, 978 aa, synthetic construct
  REGION 1..978: note = engineered CasX variant
QEIKRINKIRRRLVKDSNTKKAGKTGPMKTLLVRVMTPDLRERLENLRKKPENIPQPISNTSRANLNKLLTDYTEMKKAILHVYWEEFQKDPVGLMSRVAQPASKKIDQNKLKPEMDEKGNLTTAGFACSQCGQPLFVYKLEQVSEKGKAYTNYFGRCNVAEHEKLILLAQLKPEKDSDEAVTYSLGKFGQRALDFYSIHVTKESTHPVKPLAQIAGNRYASGPVGKALSDACMGTIASFLSKYQDIIIEHQKVVKGNQKRLESLRELAGKENLEYPSVTLPPQPHTKEGVDAYNEVIARVRMWVNLNLWQKLKLSRDDAKPLLRLKGFPSFPLVERQANEVDWWDMVCNVKKLINEKKEDGKVFWQNLAGYKRQEALRPYLSSEEDRKKGKKFARYQLGDLLLHLEKKHGEDWGKVYDEAWERIDKKVEGLSKHIKLEEERRSEDAQSKAALTDWLRAKASFVIEGLKEADKDEFCRCELKLQKWYGDLRGKPFAIEAENSILDISGFSKQYNCAFIWQKDGVKKLNLYLIINYFKGGKLRFKKIKPEAFEANRFYTVINKKSGEIVPMEVNFNFDDPNLIILPLAFGKRQGREFIWNDLLSLETGSLKLANGRVIEKTLYNRRTRQDEPALFVALTFERREVLDSSNIKPMNLIGVDRGENIPAVIALTDPEGCPLSRFKDSLGQPTHILRIGESYKQKQRTLQAKKEVEQRRAGGYSRKYASKAKNLADDMVRNTARDLLYYAVTQDAMLIFENLSRGFGRQGKRTFMAERQYTRMEDWLTAKLAYEGLPSKTYLSKTLAQYTSKTCSNCGFTITSADYDRVLEKLKKTATGWMTTINGKELKVEGQITYYNRYKRQNVVKDLSVELDRLSEESVNNDISSWTKGRSGEALSLLKKRFSHRPVQEKFVCLNCGFETHADEQAALNIARSWLFLRSQEYKKYQTNKTTGNTDKRAFVETWQSFYRKKLKEVWKPAV

SEQ ID NO: 25941 - protein, 978 aa, synthetic construct
  REGION 1..978: note = engineered CasX variant
QEIKRINKIRRRLVKDSNTKKAGKTGPMKTLLVRVMTPDLRERLENLRKKPENIPQPISNTSRANLNKLLTDYTEMKKAILHVYWEEFQKDPVGLMSRVAQPASKKIDQNKLKPEMDEKGNLTTAGFACSQCGQPLFVYKLEQVSEKGKAYTNYFGRCNVAEHEKLILLAQLKPEKDSDEAVTYSLGKFGQRALDFYSIHVTKESTHPVKPLAQIAGNRYASGPVGKALSDACMGTIASFLSKYQDIIIEHQKVVKGNQKRLESLRELAGKENLEYPSVTLPPQPHTKEGVDAYNEVIARVRMWVNLNLWQKLKLSRDDAKPLLRLKGFPSFPLVERQANEVDWWDMVCNVKKLINEKKEDGKVFWQNLAGYKRQEALRPYLSSEEDRKKGKKFARYQLGDLLLHLEKKHGEDWGKVYDEAWERIDKKVEGLSKHIKLEEERRSEDAQSKAALTDWLRAKASFVIEGLKEADKDEFCRCELKLQKWYGDLRGKPFAIEAENSILDISGFSKQYNCAFIWQKDGVKKLNLYLIINYFKGGKLRFKKIKPEAFEANRFYTVINKKSGEIVPMEVNFNFDDPNLIILPLAFGKRQGREFIWNDLLSLETGSLKLANGRVIEKTLYNRRTRQDEPALFVALTFERREVLDSSNIKPMNLIGVDRGENIPAVIALTDPEGCPLSRFKDSLGQPTHILRIGESYKQKQRTIQAKKEVEQRRAGGYSRKYASKAKNLADDMVRNTARDLLYYAVTQDAMLIFENLSRGFGRQGKRTFMAERQYTRMEDWLTAKLAYEGLPSKTYLSKTLAQYTSKTCSNCGFTITSADYDRVLEKLKKTATGWMTTINGKELKVEGQITYYNRYKRQNVVKDLSVELDRLSEESVNNDISSWTKGRSGEALSLLKKRFSHRPVQEKFVCLNCGFETHADEQAALNIARSWLFLRSQEYKKYQTNKTTGNTDKRAFVETWQSFYRKKLKEVWKPAV

SEQ ID NO: 25942 - protein, 978 aa, synthetic construct
  REGION 1..978: note = engineered CasX variant
QEIKRINKIRRRLVKDSNTKKAGKTGPMKTLLVRVMTPDLRERLENLRKKPENIPQPISNTSRANLNKLLTDYTEMKKAILHVYWEEFQKDPVGLMSRVAQPASKKIDQNKLKPEMDEKGNLTTAGFACSQCGQPLFVYKLEQVSEKGKAYTNYFGRCNVAEHEKLILLAQLKPEKDSDEAVTYSLGKFGQRALDFYSIHVTKESTHPVKPLAQIAGNRYASGPVGKALSDACMGTIASFLSKYQDIIIEHQKVVKGNQKRLESLRELAGKENLEYPSVTLPPQPHTKEGVDAYNEVIARVRMWVNLNLWQKLKLSRDDAKPLLRLKGFPSFPLVERQANEVDWWDMVCNVKKLINEKKEDGKVFWQNLAGYKRQEALRPYLSSEEDRKKGKKFARYQLGDLLLHLEKKHGEDWGKVYDEAWERIDKKVEGLSKHIKLEEERRSEDAQSKAALTDWLRAKASFVIEGLKEADKDEFCRCELKLQKWYGDLRGKPFAIEAENSILDISGFSKQYNCAFIWQKDGVKKLNLYLIINYFKGGKLRFKKIKPEAFEANRFYTVINKKSGEIVPMEVNFNFDDPNLIILPLAFGKRQGREFIWNDLLSLETGSLKLANGRVIEKTLYNRRTRQDEPALFVALTFERREVLDSSNIKPMNLIGVDRGENIPAVIALTDPEGCPLSRFKDSLGQPTHILRIGESYKEKQRTLQAKKEVEQRRAGGYSRKYASKAKNLADDMVRNTARDLLYYAVTQDAMLIFENLSRGFGRQGKRTFMAERQYTRMEDWLTAKLAYEGLPSKTYLSKTLAQYTSKTCSNCGFTITSADYDRVLEKLKKTATGWMTTINGKELKVEGQITYYNRYKRQNVVKDLSVELDRLSEESVNNDISSWTKGRSGEALSLLKKRFSHRPVQEKFVCLNCGFETHADEQAALNIARSWLFLRSQEYKKYQTNKTTGNTDKRAFVETWQSFYRKKLKEVWKPAV

SEQ ID NO: 25943 - protein, 978 aa, synthetic construct
  REGION 1..978: note = engineered CasX variant
QEIKRINKIRRRLVKDSNTKKAGKTGPMKTLLVRVMTPDLRERLENLRKKPENIPQPISNTSRANLNKLLTDYTEMKKAILHVYWEEFQKDPVGLMSRVAQPASKKIDQNKLKPEMDEKGNLTTAGFACSQCGQPLFVYKLEQVSEKGKAYTNYFGRCNVAEHEKLILLAQLKPEKDSDEAVTYSLGKFGQRALDFYSIHVTKESTHPVKPLAQIAGNRYASGPVGKALSDACMGTIASFLSKYQDIIIEHQKVVKGNQKRLESLRELAGKENLEYPSVTLPPQPHTKEGVDAYNEVIARVRMWVNLNLWQKLKLSRDDAKPLLRLKGFPSFPLVERQANEVDWWDMVCNVKKLINEKKEDGKVFWQNLAGYKRQEALRPYLSSEEDRKKGKKFARYQLGDLLLHLEKKHGEDWGKVYDEAWERIDKKVEGLSKHIKLEEERRSEDAQSKAALTDWLRAKASFVIEGLKEADKDEFCRCELKLQKWYGDLRGKPFAIEAENSILDISGFSKQYNCAFIWQKDGVKKLNLYLIINYFKGGKLRFKKIKPEAFEANRFYTVINKKSGEIVPMEVNFNFDDPNLIILPLAFGKRQGREFIWNDLLSLETGSLKLANGRVIEKTLYNRRTRQDEPALFVALTFERREVLDSSNIKPMNLIGVDRGENIPAVIALTDPEGCPLSRFKDSLGQPTHILRIGESYKEKQRTIQAKKEVEQRRAGGYSRKYASKAKNLADDMVRNTARDLLYYAVTQDAMLIFENLSRGFGRQGKRTFMAERQYTRMEDWLTAKLAYEGLPSKTYLSKTLAQYTSKTCSNCGFTITSADYDRVLEKLKKTATGWMTTINGKELKVEGQITYYNRYKRQNVVKDLSVELDRLSEESVNNDISSWTKGRSGEALSLLKKRFSHRPVQEKFVCLNCGFETHADEQAALNIARSWLFLRSQEYKKYQTNKTTGNTDKRAFVETWQSFYRKKLKEVWKPAV

SEQ ID NO: 25944 - protein, 978 aa, synthetic construct
  REGION 1..978: note = engineered CasX variant
QEIKRINKIRRRLVKDSNTKKAGKTGPMKTLLVRVMTPDLRERLENLRKKPENIPQPISNTSRANLNKLLTDYTEMKKAILHVYWEEFQKDPVGLMSRVAQPASKKIDQNKLKPEMDEKGNLTTAGFACSQCGQPLFVYKLEQVSEKGKAYTNYFGRCNVAEHEKLILLAQLKPEKDSDEAVTYSLGKFGQRALDFYSIHVTKESTHPVKPLAQIAGNRYASGPVGKALSDACMGTIASFLSKYQDIIIEHQKVVKGNQKRLESLRELAGKENLEYPSVTLPPQPHTKEGVDAYNEVIARVRMWVNLNLWQKLKLSRDDAKPLLRLKGFPSFPLVERQANEVDWWDMVCNVKKLINEKKEDGKVFWQNLAGYKRQEALRPYLSSEEDRKKGKKFARYQLGDLLLHLEKKHGEDWGKVYDEAWERIDKKVEGLSKHIKLEEERRSEDAQSKAALTDWLRAKASFVIEGLKEADKDEFCRCELKLQKWYGDLRGKPFAIEAENSILDISGFSKQYNCAFIWQKDGVKKLNLYLIINYFKGGKLRFKKIKPEAFEANRFYTVINKKSGEIVPMEVNFNFDDPNLIILPLAFGKRQGREFIWNDLLSLETGSLKLANGRVIEKTLYNRRTRQDEPALFVALTFERREVLDSSNIKPMNLIGVDRGENIPAVIALTDPEGCPLSRFKDSLGNYTHILRIGTSYKEKQRTIQAKKEVEQRRAGGYSRKYASKAKNLADDMVRNTARDLLYYAVTQDAMLIFENLSRGFGRQGKRTFMAERQYTRMEDWLTAKLAYEGLPSKTYLSKTLAQYTSKTCSNCGFTITSADYDRVLEKLKKTATGWMTTINGKELKVEGQITYYNRYKRQNVVKDLSVELDRLSEESVNNDISSWTKGRSGEALSLLKKRFSHRPVQEKFVCLNCGFETHADEQAALNIARSWLFLRSQEYKKYQTNKTTGNTDKRAFVETWQSFYRKKLKEVWKPAV

SEQ ID NO: 25945 - protein, 978 aa, synthetic construct
  REGION 1..978: note = engineered CasX variant
QEIKRINKIRRRLVKDSNTKKAGKTGPMKTLLVRVMTPDLRERLENLRKKPENIPQPISNTSRANLNKLLTDYTEMKKAILHVYWEEFQKDPVGLMSRVAQPASKKIDQNKLKPEMDEKGNLTTAGFACSQCGQPLFVYKLEQVSEKGKAYTNYFGRCNVAEHEKLILLAQLKPEKDSDEAVTYSLGKFGQRALDFYSIHVTKESTHPVKPLAQIAGNRYASGPVGKALSDACMGTIASFLSKYQDIIIEHQKVVKGNQKRLESLRELAGKENLEYPSVTLPPQPHTKEGVDAYNEVIARVRMWVNLNLWQKLKLSRDDAKPLLRLKGFPSFPLVERQANEVDWWDMVCNVKKLINEKKEDGKVFWQNLAGYKRQEALRPYLSSEEDRKKGKKFARYQLGDLLLHLEKKHGEDWGKVYDEAWERIDKKVEGLSKHIKLEEERRSEDAQSKAALTDWLRAKASFVIEGLKEADKDEFCRCELKLQKWYGDLRGKPFAIEAENSILDISGFSKQYNCAFIWQKDGVKKLNLYLIINYFKGGKLRFKKIKPEAFEANRFYTVINKKSGEIVPMEVNFNFDDPNLIILPLAFGKRQGREFIWNDLLSLETGSLKLANGRVIEKTLYNRRTRQDEPALFVALTFERREVLDSSNIKPMNLIGVDRGENIPAVIALTDPEGCPLSRFKDSLGNYTHILRIGTSYKEKQRTIQAKKEVEQRGAGGYSRKYASKAKNLADDMVRNTARDLLYYAVTQDAMLIFENLSRGFGRQGKRTFMAERQYTRMEDWLTAKLAYEGLPSKTYLSKTLAQYTSKTCSNCGFTITSADYDRVLEKLKKTATGWMTTINGKELKVEGQITYYNRYKRQNVVKDLSVELDRLSEESVNNDISSWTKGRSGEALSLLKKRFSHRPVQEKFVCLNCGFETHADEQAALNIARSWLFLRSQEYKKYQTNKTTGNTDKRAFVETWQSFYRKKLKEVWKPAV

SEQ ID NO: 25946 - protein, 978 aa, synthetic construct
  REGION 1..978: note = engineered CasX variant
QEIKRINKIRRRLVKDSNTKKAGKTGPMKTLLVRVMTPDLRERLENLRKKPENIPQPISNTSRANLNKLLTDYTEMKKAILHVYWEEFQKDPVGLMSRVAQPASKKIDQNKLKPEMDEKGNLTTAGFACSQCGQPLFVYKLEQVSEKGKAYTNYFGRCNVAEHEKLILLAQLKPEKDSDEAVTYSLGKFGQRALDFYSIHVTKESTHPVKPLAQIAGNRYASGPVGKALSDACMGTIASFLSKYQDIIIEHQKVVKGNQKRLESLRELAGKENLEYPSVTLPPQPHTKEGVDAYNEVIARVRMWVNLNLWQKLKLSRDDAKPLLRLKGFPSFPLVERQANEVDWWDMVCNVKKLINEKKEDGKVFWQNLAGYKRQEALRPYLSSEEDRKKGKKFARYQLGDLLLHLEKKHGEDWGKVYDEAWERIDKKVEGLSKHIKLEEERRSEDAQSKAALTDWLRAKASFVIEGLKEADKDEFCRCELKLQKWYGDLRGKPFAIEAENSILDISGFSKQYNCAFIWQKDGVKKLNLYLIINYFKGGKLRFKKIKPEAFEANRFYTVINKKSGEIVPMEVNFNFDDPNLIILPLAFGKRQGREFIWNDLLSLETGSLKLANGRVIEKTLYNRRTRQDEPALFVALTFERREVLDSSNIKPMNLIGVDRGENIPAVIALTDPEGCPLSRFKDSLGNYTHILRIGESYKEKQRTIQAKKHVEQRRAGGYSRKYASKAKNLADDMVRNTARDLLYYAVTQDAMLIFENLSRGFGRQGKRTFMAERQYTRMEDWLTAKLAYEGLPSKTYLSKTLAQYTSKTCSNCGFTITSADYDRVLEKLKKTATGWMTTINGKELKVEGQITYYNRYKRQNVVKDLSVELDRLSEESVNNDISSWTKGRSGEALSLLKKRFSHRPVQEKFVCLNCGFETHADEQAALNIARSWLFLRSQEYKKYQTNKTTGNTDKRAFVETWQSFYRKKLKEVWKPAV

SEQ ID NO: 25947 - protein, 978 aa, synthetic construct
  REGION 1..978: note = engineered CasX variant
QEIKRINKIRRRLVKDSNTKKAGKTGPMKTLLVRVMTPDLRERLENLRKKPENIPQPISNTSRANLNKLLTDYTEMKKAILHVYWEEFQKDPVGLMSRVAQPASKKIDQNKLKPEMDEKGNLTTAGFACSQCGQPLFVYKLEQVSEKGKAYTNYFGRCNVAEHEKLILLAQLKPEKDSDEAVTYSLGKFGQRALDFYSIHVTKESTHPVKPLAQIAGNRYASGPVGKALSDACMGTIASFLSKYQDIIIEHQKVVKGNQKRLESLRELAGKENLEYPSVTLPPQPHTKEGVDAYNEVIARVRMWVNLNLWQKLKLSRDDAKPLLRLKGFPSFPLVERQANEVDWWDMVCNVKKLINEKKEDGKVFWQNLAGYKRQEALRPYLSSEEDRKKGKKFARYQLGDLLLHLEKKHGEDWGKVYDEAWERIDKKVEGLSKHIKLEEERRSEDAQSKAALTDWLRAKASFVIEGLKEADKDEFCRCELKLQKWYGDLRGKPFAIEAENSILDISGFSKQYNCAFIWQKDGVKKLNLYLIINYFKGGKLRFKKIKPEAFEANRFYTVINKKSGEIVPMEVNFNFDDPNLIILPLAFGKRQGREFIWNDLLSLETGSLKLANGRVIEKTLYNRRTRQDEPALFVALTFERREVLDSSNIKPMNLIGVDRGENIPAVIALTDPEGCPLSRFKDSLGNYTHILRIGESYKEKQRTIQAKKEVEQRRAGGYSRKYASKAKNLADDMVRNTARDLLYYAVTQDAMLIFENLSRGFGRQGKRTFMAERQYTRMEDWLTAKLAYEGLPSKTYLSKTLAQYTSKTCSNCGFTITSADYDRVLEKLKKTATGWMTTINGKELKVEGQITYYNRYKRQNVVKDLSVELDRLSEESVNNDISSWTKGRSGEALSLLKKRFSHRPVQEKFVCLNCGFETHADEQAALNIARSWLFLRSQEYKKYQTNKTTGNTDKRAFVETWQSFYRKKLKEVWKPAV

SEQ ID NO: 25948 - protein, 978 aa, synthetic construct
  REGION 1..978: note = engineered CasX variant
QEIKRINKIRRRLVKDSNTKKAGKTGPMKTLLVRVMTPDLRERLENLRKKPENIPQPISNTSRANLNKLLTDYTEMKKAILHVYWEEFQKDPVGLMSRVAQPASKKIDQNKLKPEMDEKGNLTTAGFACSQCGQPLFVYKLEQVSEKGKAYTNYFGRCNVAEHEKLILLAQLKPEKDSDEAVTYSLGKFGQRALDFYSIHVTKESTHPVKPLAQIAGNRYASGPVGKALSDACMGTIASFLSKYQDIIIEHQKVVKGNQKRLESLRELAGKENLEYPSVTLPPQPHTKEGVDAYNEVIARVRMWVNLNLWQKLKLSRDDAKPLLRLKGFPSFPLVERQANEVDWWDMVCNVKKLINEKKEDGKVFWQNLAGYKRQEALRPYLSSEEDRKKGKKFARYQLGDLLLHLEKKHGEDWGKVYDEAWERIDKKVEGLSKHIKLEEERRSEDAQSKAALTDWLRAKASFVIEGLKEADKDEFCRCELKLQKWYGDLRGKPFAIEAENSILDISGFSKQYNCAFIWQKDGVKKLNLYLIINYFKGGKLRFKKIKPEAFEANRFYTVINKKSGEIVPMEVNFNFDDPNLIILPLAFGKRQGREFIWNDLLSLETGSLKLANGRVIEKTLYNRRTRQDEPALFVALTFERREVLDSSNIKPMNLIGVDRGENIPAVIALTDPEGCPLSRFKDSLGNYTHILRIGESYKEKQRTIQAKKEVEQRRAFGYSRKYASKAKNLADDMVRNTARDLLYYAVTQDAMLIFENLSRGFGRQGKRTFMAERQYTRMEDWLTAKLAYEGLPSKTYLSKTLAQYTSKTCSNCGFTITSADYDRVLEKLKKTATGWMTTINGKELKVEGQITYYNRYKRQNVVKDLSVELDRLSEESVNNDISSWTKGRSGEALSLLKKRFSHRPVQEKFVCLNCGFETHADEQAALNIARSWLFLRSQEYKKYQTNKTTGNTDKRAFVETWQSFYRKKLKEVWKPAV

SEQ ID NO: 25949 - protein, 978 aa, synthetic construct
  REGION 1..978: note = engineered CasX variant
QEIKRINKIRRRLVKDSNTKKAGKTGPMKTLLVRVMTPDLRERLENLRKKPENIPQPISNTSRANLNKLLTDYTEMKKAILHVYWEEFQKDPVGLMSRVAQPASKKIDQNKLKPEMDEKGNLTTAGFACSQCGQPLFVYKLEQVSEKGKAYTNYFGRCNVAEHEKLILLAQLKPEKDSDEAVTYSLGKFGQRALDFYSIHVTKESTHPVKPLAQIAGNRYASGPVGKALSDACMGTIASFLSKYQDIIIEHQKVVKGNQKRLESLRELAGKENLEYPSVTLPPQPHTKEGVDAYNEVIARVRMWVNLNLWQKLKLSRDDAKPLLRLKGFPSFPLVERQANEVDWWDMVCNVKKLINEKKEDGKVFWQNLAGYKRQEALRPYLSSEEDRKKGKKFARYQLGDLLLHLEKKHGEDWGKVYDEAWERIDKKVEGLSKHIKLEEERRSEDAQSKAALTDWLRAKASFVIEGLKEADKDEFCRCELKLQKWYGDLRGKPFAIEAENSILDISGFSKQYNCAFIWQKDGVKKLNLYLIINYFKGGKLRFKKIKPEAFEANRFYTVINKKSGEIVPMEVNFNFDDPNLIILPLAFGKRQGREFIWNDLLSLETGSLKLANGRVIEKTLYNRRTRQDEPALFVALTFERREVLDSSNIKPMNLIGVDRGENIPAVIALTDPEGCPLSRFKDSLGNYTHILRIGESYKEKQRTIQAKKEVEQRGAGGYSRKYASKAKNLADDMVRNTARDLLYYAVTQDAMLIFENLSRGFGRQGKRTFMAERQYTRMEDWLTAKLAYEGLPSKTYLSKTLAQYTSKTCSNCGFTITSADYDRVLEKLKKTATGWMTTINGKELKVEGQITYYNRYKRQNVVKDLSVELDRLSEESVNNDISSWTKGRSGEALSLLKKRFSHRPVQEKFVCLNCGFETHADEQAALNIARSWLFLRSQEYKKYQTNKTTGNTDKRAFVETWQSFYRKKLKEVWKPAV

SEQ ID NO: 25950 - protein, 978 aa, synthetic construct
  REGION 1..978: note = engineered CasX variant
QEIKRINKIRRRLVKDSNTKKAGKTGPMKTLLVRVMTPDLRERLENLRKKPENIPQPISNTSRANLNKLLTDYTEMKKAILHVYWEEFQKDPVGLMSRVAQPASKKIDQNKLKPEMDEKGNLTTAGFACSQCGQPLFVYKLEQVSEKGKAYTNYFGRCNVAEHEKLILLAQLKPEKDSDEAVTYSLGKFGQRALDFYSIHVTKESTHPVKPLAQIAGNRYASGPVGKALSDACMGTIASFLSKYQDIIIEHQKVVKGNQKRLESLRELAGKENLEYPSVTLPPQPHTKEGVDAYNEVIARVRMWVNLNLWQKLKLSRDDAKPLLRLKGFPSFPLVERQANEVDWWDMVCNVKKLINEKKEDGKVFWQNLAGYKRQEALRPYLSSEEDRKKGKKFARYQLGDLLLHLEKKHGEDWGKVYDEAWERIDKKVEGLSKHIKLEEERRSEDAQSKAALTDWLRAKASFVIEGLKEADKDEFCRCELKLQKWYGDLRGKPFAIEAENSILDISGFSKQYNCAFIWQKDGVKKLNLYLIINYFKGGKLRFKKIKPEAFEANRFYTVINKKSGEIVPMEVNFNFDDPNLIILPLAFGKRQGREFIWNDLLSLETGSLKLANGRVIEKTLYNRRTRQDEPALFVALTFERREVLDSSNIKPMNLIGVDRGENIPAVIALTDPEGCPLSRFKDSLGNWTHILRIGESYKEKQRTIQAKKEVEQRRAGGYSRKYASKAKNLADDMVRNTARDLLYYAVTQDAMLIFENLSRGFGRQGKRTFMAERQYTRMEDWLTAKLAYEGLPSKTYLSKTLAQYTSKTCSNCGFTITSADYDRVLEKLKKTATGWMTTINGKELKVEGQITYYNRYKRQNVVKDLSVELDRLSEESVNNDISSWTKGRSGEALSLLKKRFSHRPVQEKFVCLNCGFETHADEQAALNIARSWLFLRSQEYKKYQTNKTTGNTDKRAFVETWQSFYRKKLKEVWKPAV

SEQ ID NO: 25951 - protein, 978 aa, synthetic construct
  REGION 1..978: note = engineered CasX variant
QEIKRINKIRRRLVKDSNTKKAGKTGPMKTLLVRVMTPDLRERLENLRKKPENIPQPISNTSRANLNKLLTDYTEMKKAILHVYWEEFQKDPVGLMSRVAQPASKKIDQNKLKPEMDEKGNLTTAGFACSQCGQPLFVYKLEQVSEKGKAYTNYFGRCNVAEHEKLILLAQLKPEKDSDEAVTYSLGKFGQRALDFYSIHVTKESTHPVKPLAQIAGNRYASGPVGKALSDACMGTIASFLSKYQDIIIEHQKVVKGNQKRLESLRELAGKENLEYPSVTLPPQPHTKEGVDAYNEVIARVRMWVNLNLWQKLKLSRDDAKPLLRLKGFPSFPLVERQANEVDWWDMVCNVKKLINEKKEDGKVFWQNLAGYKRQEALRPYLSSEEDRKKGKKFARYQLGDLLLHLEKKHGEDWGKVYDEAWERIDKKVEGLSKHIKLEEERRSEDAQSKAALTDWLRAKASFVIEGLKEADKDEFCRCELKLQKWYGDLRGKPFAIEAENSILDISGFSKQYNCAFIWQKDGVKKLNLYLIINYFKGGKLRFKKIKPEAFEANRFYTVINKKSGEIVPMEVNFNFDDPNLIILPLAFGKRQGREFIWNDLLSLETGSLKLANGRVIEKTLYNRRTRQDEPALFVALTFERREVLDSSNIKPMNLIGVDRGENIPAVIALTDPEGCPLSRFKDSLGNWTHILRIGESVKEKQRTIQAKKEVEQRRAGGYSRKYASKAKNLADDMVRNTARDLLYYAVTQDAMLIFENLSRGFGRQGKRTFMAERQYTRMEDWLTAKLAYEGLPSKTYLSKTLAQYTSKTCSNCGFTITSADYDRVLEKLKKTATGWMTTINGKELKVEGQITYYNRYKRQNVVKDLSVELDRLSEESVNNDISSWTKGRSGEALSLLKKRFSHRPVQEKFVCLNCGFETHADEQAALNIARSWLFLRSQEYKKYQTNKTTGNTDKRAFVETWQSFYRKKLKEVWKPAV

SEQ ID NO: 25952 - protein, 978 aa, synthetic construct
  REGION 1..978: note = engineered CasX variant
QEIKRINKIRRRLVKDSNTKKAGKTGPMKTLLVRVMTPDLRERLENLRKKPENIPQPISNTSRANLNKLLTDYTEMKKAILHVYWEEFQKDPVGLMSRVAQPASKKIDQNKLKPEMDEKGNLTTAGFACSQCGQPLFVYKLEQVSEKGKAYTNYFGRCNVAEHEKLILLAQLKPEKDSDEAVTYSLGKFGQRALDFYSIHVTKESTHPVKPLAQIAGNRYASGPVGKALSDACMGTIASFLSKYQDIIIEHQKVVKGNQKRLESLRELAGKENLEYPSVTLPPQPHTKEGVDAYNEVIARVRMWVNLNLWQKLKLSRDDAKPLLRLKGFPSFPLVERQANEVDWWDMVCNVKKLINEKKEDGKVFWQNLAGYKRQEALRPYLSSEEDRKKGKKFARYQLGDLLLHLEKKHGEDWGKVYDEAWERIDKKVEGLSKHIKLEEERRSEDAQSKAALTDWLRAKASFVIEGLKEADKDEFCRCELKLQKWYGDLRGKPFAIEAENSILDISGFSKQYNCAFIWQKDGVKKLNLYLIINYFKGGKLRFKKIKPEAFEANRFYTVINKKSGEIVPMEVNFNFDDPNLIILPLAFGKRQGREFIWNDLLSLETGSLKLANGRVIEKTLYNRRTRQDEPALFVALTFERREVLDSSNIKPMNLIGVDRGENIPAVIALTDPEGCPLSRFKDSLGNVTHILRIGEEYKEKQRTIQAKKEVEQRWAGGYSRKYASKAKNLADDMVRNTARDLLYYAVTQDAMLIFENLSRGFGRQGKRTFMAERQYTRMEDWLTAKLAYEGLPSKTYLSKTLAQYTSKTCSNCGFTITSADYDRVLEKLKKTATGWMTTINGKELKVEGQITYYNRYKRQNVVKDLSVELDRLSEESVNNDISSWTKGRSGEALSLLKKRFSHRPVQEKFVCLNCGFETHADEQAALNIARSWLFLRSQEYKKYQTNKTTGNTDKRAFVETWQSFYRKKLKEVWKPAV

SEQ ID NO: 25953 - protein, 978 aa, synthetic construct
  REGION 1..978: note = engineered CasX variant
QEIKRINKIRRRLVKDSNTKKAGKTGPMKTLLVRVMTPDLRERLENLRKKPENIPQPISNTSRANLNKLLTDYTEMKKAILHVYWEEFQKDPVGLMSRVAQPASKKIDQNKLKPEMDEKGNLTTAGFACSQCGQPLFVYKLEQVSEKGKAYTNYFGRCNVAEHEKLILLAQLKPEKDSDEAVTYSLGKFGQRALDFYSIHVTKESTHPVKPLAQIAGNRYASGPVGKALSDACMGTIASFLSKYQDIIIEHQKVVKGNQKRLESLRELAGKENLEYPSVTLPPQPHTKEGVDAYNEVIARVRMWVNLNLWQKLKLSRDDAKPLLRLKGFPSFPLVERQANEVDWWDMVCNVKKLINEKKEDGKVFWQNLAGYKRQEALRPYLSSEEDRKKGKKFARYQLGDLLLHLEKKHGEDWGKVYDEAWERIDKKVEGLSKHIKLEEERRSEDAQSKAALTDWLRAKASFVIEGLKEADKDEFCRCELKLQKWYGDLRGKPFAIEAENSILDISGFSKQYNCAFIWQKDGVKKLNLYLIINYFKGGKLRFKKIKPEAFEANRFYTVINKKSGEIVPMEVNFNFDDPNLIILPLAFGKRQGREFIWNDLLSLETGSLKLANGRVIEKTLYNRRTRQDEPALFVALTFERREVLDSSNIKPMNLIGVDRGENIPAVIALTDPEGCPLSRFKDSLGNTTHILRIGESYKEKQRTIQAKKEVEQRRAGGYSRKYASKAKNLADDMVRNTARDLLYYAVTQDAMLIFENLSRGFGRQGKRTFMAERQYTRMEDWLTAKLAYEGLPSKTYLSKTLAQYTSKTCSNCGFTITSADYDRVLEKLKKTATGWMTTINGKELKVEGQITYYNRYKRQNVVKDLSVELDRLSEESVNNDISSWTKGRSGEALSLLKKRFSHRPVQEKFVCLNCGFETHADEQAALNIARSWLFLRSQEYKKYQTNKTTGNTDKRAFVETWQSFYRKKLKEVWKPAV

SEQ ID NO: 25954 - protein, 978 aa, synthetic construct
  REGION 1..978: note = engineered CasX variant
QEIKRINKIRRRLVKDSNTKKAGKTGPMKTLLVRVMTPDLRERLENLRKKPENIPQPISNTSRANLNKLLTDYTEMKKAILHVYWEEFQKDPVGLMSRVAQPASKKIDQNKLKPEMDEKGNLTTAGFACSQCGQPLFVYKLEQVSEKGKAYTNYFGRCNVAEHEKLILLAQLKPEKDSDEAVTYSLGKFGQRALDFYSIHVTKESTHPVKPLAQIAGNRYASGPVGKALSDACMGTIASFLSKYQDIIIEHQKVVKGNQKRLESLRELAGKENLEYPSVTLPPQPHTKEGVDAYNEVIARVRMWVNLNLWQKLKLSRDDAKPLLRLKGFPSFPLVERQANEVDWWDMVCNVKKLINEKKEDGKVFWQNLAGYKRQEALRPYLSSEEDRKKGKKFARYQLGDLLLHLEKKHGEDWGKVYDEAWERIDKKVEGLSKHIKLEEERRSEDAQSKAALTDWLRAKASFVIEGLKEADKDEFCRCELKLQKWYGDLRGKPFAIEAENSILDISGFSKQYNCAFIWQKDGVKKLNLYLIINYFKGGKLRFKKIKPEAFEANRFYTVINKKSGEIVPMEVNFNFDDPNLIILPLAFGKRQGREFIWNDLLSLETGSLKLANGRVIEKTLYNRRTRQDEPALFVALTFERREVLDSSNIKPMNLIGVDRGENIPAVIALTDPEGCPLSRFKDSLGNTTHILRIGESYKEKQRTIQAKKELEQRRAGGYSRKYASKAKNLADDMVRNTARDLLYYAVTQDAMLIFENLSRGFGRQGKRTFMAERQYTRMEDWLTAKLAYEGLPSKTYLSKTLAQYTSKTCSNCGFTITSADYDRVLEKLKKTATGWMTTINGKELKVEGQITYYNRYKRQNVVKDLSVELDRLSEESVNNDISSWTKGRSGEALSLLKKRFSHRPVQEKFVCLNCGFETHADEQAALNIARSWLFLRSQEYKKYQTNKTTGNTDKRAFVETWQSFYRKKLKEVWKPAV

SEQ ID NO: 25955 - protein, 978 aa, synthetic construct
  REGION 1..978: note = engineered CasX variant
QEIKRINKIRRRLVKDSNTKKAGKTGPMKTLLVRVMTPDLRERLENLRKKPENIPQPISNTSRANLNKLLTDYTEMKKAILHVYWEEFQKDPVGLMSRVAQPASKKIDQNKLKPEMDEKGNLTTAGFACSQCGQPLFVYKLEQVSEKGKAYTNYFGRCNVAEHEKLILLAQLKPEKDSDEAVTYSLGKFGQRALDFYSIHVTKESTHPVKPLAQIAGNRYASGPVGKALSDACMGTIASFLSKYQDIIIEHQKVVKGNQKRLESLRELAGKENLEYPSVTLPPQPHTKEGVDAYNEVIARVRMWVNLNLWQKLKLSRDDAKPLLRLKGFPSFPLVERQANEVDWWDMVCNVKKLINEKKEDGKVFWQNLAGYKRQEALRPYLSSEEDRKKGKKFARYQLGDLLLHLEKKHGEDWGKVYDEAWERIDKKVEGLSKHIKLEEERRSEDAQSKAALTDWLRAKASFVIEGLKEADKDEFCRCELKLQKWYGDLRGKPFAIEAENSILDISGFSKQYNCAFIWQKDGVKKLNLYLIINYFKGGKLRFKKIKPEAFEANRFYTVINKKSGEIVPMEVNFNFDDPNLIILPLAFGKRQGREFIWNDLLSLETGSLKLANGRVIEKTLYNRRTRQDEPALFVALTFERREVLDSSNIKPMNLIGVDRGENIPAVIALTDPEGCPLSRFKDSLGNSTHILRIGESYKEKQRYIQAKKEVTQRRAGGYSRKYASKAKNLADDMVRNTARDLLYYAVTQDAMLIFENLSRGFGRQGKRTFMAERQYTRMEDWLTAKLAYEGLPSKTYLSKTLAQYTSKTCSNCGFTITSADYDRVLEKLKKTATGWMTTINGKELKVEGQITYYNRYKRQNVVKDLSVELDRLSEESVNNDISSWTKGRSGEALSLLKKRFSHRPVQEKFVCLNCGFETHADEQAALNIARSWLFLRSQEYKKYQTNKTTGNTDKRAFVETWQSFYRKKLKEVWKPAV

SEQ ID NO: 25956 - protein, 978 aa, synthetic construct
  REGION 1..978: note = engineered CasX variant
QEIKRINKIRRRLVKDSNTKKAGKTGPMKTLLVRVMTPDLRERLENLRKKPENIPQPISNTSRANLNKLLTDYTEMKKAILHVYWEEFQKDPVGLMSRVAQPASKKIDQNKLKPEMDEKGNLTTAGFACSQCGQPLFVYKLEQVSEKGKAYTNYFGRCNVAEHEKLILLAQLKPEKDSDEAVTYSLGKFGQRALDFYSIHVTKESTHPVKPLAQIAGNRYASGPVGKALSDACMGTIASFLSKYQDIIIEHQKVVKGNQKRLESLRELAGKENLEYPSVTLPPQPHTKEGVDAYNEVIARVRMWVNLNLWQKLKLSRDDAKPLLRLKGFPSFPLVERQANEVDWWDMVCNVKKLINEKKEDGKVFWQNLAGYKRQEALRPYLSSEEDRKKGKKFARYQLGDLLLHLEKKHGEDWGKVYDEAWERIDKKVEGLSKHIKLEEERRSEDAQSKAALTDWLRAKASFVIEGLKEADKDEFCRCELKLQKWYGDLRGKPFAIEAENSILDISGFSKQYNCAFIWQKDGVKKLNLYLIINYFKGGKLRFKKIKPEAFEANRFYTVINKKSGEIVPMEVNFNFDDPNLIILPLAFGKRQGREFIWNDLLSLETGSLKLANGRVIEKTLYNRRTRQDEPALFVALTFERREVLDSSNIKPMNLIGVDRGENIPAVIALTDPEGCPLSRFKDSLGNSTHILRIGESYKEKQRYIQAKKEVEQRRAGGYSRKYASKAKNLADDMVRNTARDLLYYAVTQDAMLIFENLSRGFGRQGKRTFMAERQYTRMEDWLTAKLAYEGLPSKTYLSKTLAQYTSKTCSNCGFTITSADYDRVLEKLKKTATGWMTTINGKELKVEGQITYYNRYKRQNVVKDLSVELDRLSEESVNNDISSWTKGRSGEALSLLKKRFSHRPVQEKFVCLNCGFETHADEQAALNIARSWLFLRSQEYKKYQTNKTTGNTDKRAFVETWQSFYRKKLKEVWKPAV

SEQ ID NO: 25957 - protein, 978 aa, synthetic construct
  REGION 1..978: note = engineered CasX variant
QEIKRINKIRRRLVKDSNTKKAGKTGPMKTLLVRVMTPDLRERLENLRKKPENIPQPISNTSRANLNKLLTDYTEMKKAILHVYWEEFQKDPVGLMSRVAQPASKKIDQNKLKPEMDEKGNLTTAGFACSQCGQPLFVYKLEQVSEKGKAYTNYFGRCNVAEHEKLILLAQLKPEKDSDEAVTYSLGKFGQRALDFYSIHVTKESTHPVKPLAQIAGNRYASGPVGKALSDACMGTIASFLSKYQDIIIEHQKVVKGNQKRLESLRELAGKENLEYPSVTLPPQPHTKEGVDAYNEVIARVRMWVNLNLWQKLKLSRDDAKPLLRLKGFPSFPLVERQANEVDWWDMVCNVKKLINEKKEDGKVFWQNLAGYKRQEALRPYLSSEEDRKKGKKFARYQLGDLLLHLEKKHGEDWGKVYDEAWERIDKKVEGLSKHIKLEEERRSEDAQSKAALTDWLRAKASFVIEGLKEADKDEFCRCELKLQKWYGDLRGKPFAIEAENSILDISGFSKQYNCAFIWQKDGVKKLNLYLIINYFKGGKLRFKKIKPEAFEANRFYTVINKKSGEIVPMEVNFNFDDPNLIILPLAFGKRQGREFIWNDLLSLETGSLKLANGRVIEKTLYNRRTRQDEPALFVALTFERREVLDSSNIKPMNLIGVDRGENIPAVIALTDPEGCPLSRFKDSLGNSTHILRIGESYKEKQRTIQAKKEVTQRRAGGYSRKYASKAKNLADDMVRNTARDLLYYAVTQDAMLIFENLSRGFGRQGKRTFMAERQYTRMEDWLTAKLAYEGLPSKTYLSKTLAQYTSKTCSNCGFTITSADYDRVLEKLKKTATGWMTTINGKELKVEGQITYYNRYKRQNVVKDLSVELDRLSEESVNNDISSWTKGRSGEALSLLKKRFSHRPVQEKFVCLNCGFETHADEQAALNIARSWLFLRSQEYKKYQTNKTTGNTDKRAFVETWQSFYRKKLKEVWKPAV

SEQ ID NO: 25958 - protein, 978 aa, synthetic construct
  REGION 1..978: note = engineered CasX variant
QEIKRINKIRRRLVKDSNTKKAGKTGPMKTLLVRVMTPDLRERLENLRKKPENIPQPISNTSRANLNKLLTDYTEMKKAILHVYWEEFQKDPVGLMSRVAQPASKKIDQNKLKPEMDEKGNLTTAGFACSQCGQPLFVYKLEQVSEKGKAYTNYFGRCNVAEHEKLILLAQLKPEKDSDEAVTYSLGKFGQRALDFYSIHVTKESTHPVKPLAQIAGNRYASGPVGKALSDACMGTIASFLSKYQDIIIEHQKVVKGNQKRLESLRELAGKENLEYPSVTLPPQPHTKEGVDAYNEVIARVRMWVNLNLWQKLKLSRDDAKPLLRLKGFPSFPLVERQANEVDWWDMVCNVKKLINEKKEDGKVFWQNLAGYKRQEALRPYLSSEEDRKKGKKFARYQLGDLLLHLEKKHGEDWGKVYDEAWERIDKKVEGLSKHIKLEEERRSEDAQSKAALTDWLRAKASFVIEGLKEADKDEFCRCELKLQKWYGDLRGKPFAIEAENSILDISGFSKQYNCAFIWQKDGVKKLNLYLIINYFKGGKLRFKKIKPEAFEANRFYTVINKKSGEIVPMEVNFNFDDPNLIILPLAFGKRQGREFIWNDLLSLETGSLKLANGRVIEKTLYNRRTRQDEPALFVALTFERREVLDSSNIKPMNLIGVDRGENIPAVIALTDPEGCPLSRFKDSLGNSTHILRIGESYKEKQRTIQAKKEVEQRRQGGYSRKYASKAKNLADDMVRNTARDLLYYAVTQDAMLIFENLSRGFGRQGKRTFMAERQYTRMEDWLTAKLAYEGLPSKTYLSKTLAQYTSKTCSNCGFTITSADYDRVLEKLKKTATGWMTTINGKELKVEGQITYYNRYKRQNVVKDLSVELDRLSEESVNNDISSWTKGRSGEALSLLKKRFSHRPVQEKFVCLNCGFETHADEQAALNIARSWLFLRSQEYKKYQTNKTTGNTDKRAFVETWQSFYRKKLKEVWKPAV

SEQ ID NO: 25959 - protein, 978 aa, synthetic construct
  REGION 1..978: note = engineered CasX variant
QEIKRINKIRRRLVKDSNTKKAGKTGPMKTLLVRVMTPDLRERLENLRKKPENIPQPISNTSRANLNKLLTDYTEMKKAILHVYWEEFQKDPVGLMSRVAQPASKKIDQNKLKPEMDEKGNLTTAGFACSQCGQPLFVYKLEQVSEKGKAYTNYFGRCNVAEHEKLILLAQLKPEKDSDEAVTYSLGKFGQRALDFYSIHVTKESTHPVKPLAQIAGNRYASGPVGKALSDACMGTIASFLSKYQDIIIEHQKVVKGNQKRLESLRELAGKENLEYPSVTLPPQPHTKEGVDAYNEVIARVRMWVNLNLWQKLKLSRDDAKPLLRLKGFPSFPLVERQANEVDWWDMVCNVKKLINEKKEDGKVFWQNLAGYKRQEALRPYLSSEEDRKKGKKFARYQLGDLLLHLEKKHGEDWGKVYDEAWERIDKKVEGLSKHIKLEEERRSEDAQSKAALTDWLRAKASFVIEGLKEADKDEFCRCELKLQKWYGDLRGKPFAIEAENSILDISGFSKQYNCAFIWQKDGVKKLNLYLIINYFKGGKLRFKKIKPEAFEANRFYTVINKKSGEIVPMEVNFNFDDPNLIILPLAFGKRQGREFIWNDLLSLETGSLKLANGRVIEKTLYNRRTRQDEPALFVALTFERREVLDSSNIKPMNLIGVDRGENIPAVIALTDPEGCPLSRFKDSLGNSTHILRIGESYKEKQRTIQAKKEVEQRRAGGYSRKYASKAKNLADDMVRNTARDLLYYAVTQDAMLIFENLSRGFGRQGKRTFMAERQYTRMEDWLTAKLAYEGLPSKTYLSKTLAQYTSKTCSNCGFTITSADYDRVLEKLKKTATGWMTTINGKELKVEGQITYYNRYKRQNVVKDLSVELDRLSEESVNNDISSWTKGRSGEALSLLKKRFSHRPVQEKFVCLNCGFETHADEQAALNIARSWLFLRSQEYKKYQTNKTTGNTDKRAFVETWQSFYRKKLKEVWKPAV

SEQ ID NO: 25960 - protein, 978 aa, synthetic construct
  REGION 1..978: note = engineered CasX variant
QEIKRINKIRRRLVKDSNTKKAGKTGPMKTLLVRVMTPDLRERLENLRKKPENIPQPISNTSRANLNKLLTDYTEMKKAILHVYWEEFQKDPVGLMSRVAQPASKKIDQNKLKPEMDEKGNLTTAGFACSQCGQPLFVYKLEQVSEKGKAYTNYFGRCNVAEHEKLILLAQLKPEKDSDEAVTYSLGKFGQRALDFYSIHVTKESTHPVKPLAQIAGNRYASGPVGKALSDACMGTIASFLSKYQDIIIEHQKVVKGNQKRLESLRELAGKENLEYPSVTLPPQPHTKEGVDAYNEVIARVRMWVNLNLWQKLKLSRDDAKPLLRLKGFPSFPLVERQANEVDWWDMVCNVKKLINEKKEDGKVFWQNLAGYKRQEALRPYLSSEEDRKKGKKFARYQLGDLLLHLEKKHGEDWGKVYDEAWERIDKKVEGLSKHIKLEEERRSEDAQSKAALTDWLRAKASFVIEGLKEADKDEFCRCELKLQKWYGDLRGKPFAIEAENSILDISGFSKQYNCAFIWQKDGVKKLNLYLIINYFKGGKLRFKKIKPEAFEANRFYTVINKKSGEIVPMEVNFNFDDPNLIILPLAFGKRQGREFIWNDLLSLETGSLKLANGRVIEKTLYNRRTRQDEPALFVALTFERREVLDSSNIKPMNLIGVDRGENIPAVIALTDPEGCPLSRFKDSLGNSTHILRIGDSYKEKQRTIQAKKEVEQRRAGGYSRKYASKAKNLADDMVRNTARDLLYYAVTQDAMLIFENLSRGFGRQGKRTFMAERQYTRMEDWLTAKLAYEGLPSKTYLSKTLAQYTSKTCSNCGFTITSADYDRVLEKLKKTATGWMTTINGKELKVEGQITYYNRYKRQNVVKDLSVELDRLSEESVNNDISSWTKGRSGEALSLLKKRFSHRPVQEKFVCLNCGFETHADEQAALNIARSWLFLRSQEYKKYQTNKTTGNTDKRAFVETWQSFYRKKLKEVWKPAV

SEQ ID NO: 25961 - protein, 978 aa, synthetic construct
  REGION 1..978: note = engineered CasX variant
QEIKRINKIRRRLVKDSNTKKAGKTGPMKTLLVRVMTPDLRERLENLRKKPENIPQPISNTSRANLNKLLTDYTEMKKAILHVYWEEFQKDPVGLMSRVAQPASKKIDQNKLKPEMDEKGNLTTAGFACSQCGQPLFVYKLEQVSEKGKAYTNYFGRCNVAEHEKLILLAQLKPEKDSDEAVTYSLGKFGQRALDFYSIHVTKESTHPVKPLAQIAGNRYASGPVGKALSDACMGTIASFLSKYQDIIIEHQKVVKGNQKRLESLRELAGKENLEYPSVTLPPQPHTKEGVDAYNEVIARVRMWVNLNLWQKLKLSRDDAKPLLRLKGFPSFPLVERQANEVDWWDMVCNVKKLINEKKEDGKVFWQNLAGYKRQEALRPYLSSEEDRKKGKKFARYQLGDLLLHLEKKHGEDWGKVYDEAWERIDKKVEGLSKHIKLEEERRSEDAQSKAALTDWLRAKASFVIEGLKEADKDEFCRCELKLQKWYGDLRGKPFAIEAENSILDISGFSKQYNCAFIWQKDGVKKLNLYLIINYFKGGKLRFKKIKPEAFEANRFYTVINKKSGEIVPMEVNFNFDDPNLIILPLAFGKRQGREFIWNDLLSLETGSLKLANGRVIEKTLYNRRTRQDEPALFVALTFERREVLDSSNIKPMNLIGVDRGENIPAVIALTDPEGCPLSRFKDSLGNRTHILRIGESYKEKQRTIQAKKEVEQRRAGGYSRKYASKAKNLADDMVRNTARDLLYYAVTQDAMLIFENLSRGFGRQGKRTFMAERQYTRMEDWLTAKLAYEGLPSKTYLSKTLAQYTSKTCSNCGFTITSADYDRVLEKLKKTATGWMTTINGKELKVEGQITYYNRYKRQNVVKDLSVELDRLSEESVNNDISSWTKGRSGEALSLLKKRFSHRPVQEKFVCLNCGFETHADEQAALNIARSWLFLRSQEYKKYQTNKTTGNTDKRAFVETWQSFYRKKLKEVWKPAV

SEQ ID NO: 25962 - protein, 978 aa, synthetic construct
  REGION 1..978: note = engineered CasX variant
QEIKRINKIRRRLVKDSNTKKAGKTGPMKTLLVRVMTPDLRERLENLRKKPENIPQPISNTSRANLNKLLTDYTEMKKAILHVYWEEFQKDPVGLMSRVAQPASKKIDQNKLKPEMDEKGNLTTAGFACSQCGQPLFVYKLEQVSEKGKAYTNYFGRCNVAEHEKLILLAQLKPEKDSDEAVTYSLGKFGQRALDFYSIHVTKESTHPVKPLAQIAGNRYASGPVGKALSDACMGTIASFLSKYQDIIIEHQKVVKGNQKRLESLRELAGKENLEYPSVTLPPQPHTKEGVDAYNEVIARVRMWVNLNLWQKLKLSRDDAKPLLRLKGFPSFPLVERQANEVDWWDMVCNVKKLINEKKEDGKVFWQNLAGYKRQEALRPYLSSEEDRKKGKKFARYQLGDLLLHLEKKHGEDWGKVYDEAWERIDKKVEGLSKHIKLEEERRSEDAQSKAALTDWLRAKASFVIEGLKEADKDEFCRCELKLQKWYGDLRGKPFAIEAENSILDISGFSKQYNCAFIWQKDGVKKLNLYLIINYFKGGKLRFKKIKPEAFEANRFYTVINKKSGEIVPMEVNFNFDDPNLIILPLAFGKRQGREFIWNDLLSLETGSLKLANGRVIEKTLYNRRTRQDEPALFVALTFERREVLDSSNIKPMNLIGVDRGENIPAVIALTDPEGCPLSRFKDSLGNRTHILRIGESYKEKQRTFQAKKEVEQRRAGGYSRKYASKAKNLADDMVRNTARDLLYYAVTQDAMLIFENLSRGFGRQGKRTFMAERQYTRMEDWLTAKLAYEGLPSKTYLSKTLAQYTSKTCSNCGFTITSADYDRVLEKLKKTATGWMTTINGKELKVEGQITYYNRYKRQNVVKDLSVELDRLSEESVNNDISSWTKGRSGEALSLLKKRFSHRPVQEKFVCLNCGFETHADEQAALNIARSWLFLRSQEYKKYQTNKTTGNTDKRAFVETWQSFYRKKLKEVWKPAV

SEQ ID NO: 25963 - protein, 978 aa, synthetic construct
  REGION 1..978: note = engineered CasX variant
QEIKRINKIRRRLVKDSNTKKAGKTGPMKTLLVRVMTPDLRERLENLRKKPENIPQPISNTSRANLNKLLTDYTEMKKAILHVYWEEFQKDPVGLMSRVAQPASKKIDQNKLKPEMDEKGNLTTAGFACSQCGQPLFVYKLEQVSEKGKAYTNYFGRCNVAEHEKLILLAQLKPEKDSDEAVTYSLGKFGQRALDFYSIHVTKESTHPVKPLAQIAGNRYASGPVGKALSDACMGTIASFLSKYQDIIIEHQKVVKGNQKRLESLRELAGKENLEYPSVTLPPQPHTKEGVDAYNEVIARVRMWVNLNLWQKLKLSRDDAKPLLRLKGFPSFPLVERQANEVDWWDMVCNVKKLINEKKEDGKVFWQNLAGYKRQEALRPYLSSEEDRKKGKKFARYQLGDLLLHLEKKHGEDWGKVYDEAWERIDKKVEGLSKHIKLEEERRSEDAQSKAALTDWLRAKASFVIEGLKEADKDEFCRCELKLQKWYGDLRGKPFAIEAENSILDISGFSKQYNCAFIWQKDGVKKLNLYLIINYFKGGKLRFKKIKPEAFEANRFYTVINKKSGEIVPMEVNFNFDDPNLIILPLAFGKRQGREFIWNDLLSLETGSLKLANGRVIEKTLYNRRTRQDEPALFVALTFERREVLDSSNIKPMNLIGVDRGENIPAVIALTDPEGCPLSRFKDSLGNQTHIWRIGESYKEKQRTIQAKKEVEQRRAGGYSRKYASKAKNLADDMVRNTARDLLYYAVTQDAMLIFENLSRGFGRQGKRTFMAERQYTRMEDWLTAKLAYEGLPSKTYLSKTLAQYTSKTCSNCGFTITSADYDRVLEKLKKTATGWMTTINGKELKVEGQITYYNRYKRQNVVKDLSVELDRLSEESVNNDISSWTKGRSGEALSLLKKRFSHRPVQEKFVCLNCGFETHADEQAALNIARSWLFLRSQEYKKYQTNKTTGNTDKRAFVETWQSFYRKKLKEVWKPAV

SEQ ID NO: 25964 - protein, 978 aa, synthetic construct
  REGION 1..978: note = engineered CasX variant
QEIKRINKIRRRLVKDSNTKKAGKTGPMKTLLVRVMTPDLRERLENLRKKPENIPQPISNTSRANLNKLLTDYTEMKKAILHVYWEEFQKDPVGLMSRVAQPASKKIDQNKLKPEMDEKGNLTTAGFACSQCGQPLFVYKLEQVSEKGKAYTNYFGRCNVAEHEKLILLAQLKPEKDSDEAVTYSLGKFGQRALDFYSIHVTKESTHPVKPLAQIAGNRYASGPVGKALSDACMGTIASFLSKYQDIIIEHQKVVKGNQKRLESLRELAGKENLEYPSVTLPPQPHTKEGVDAYNEVIARVRMWVNLNLWQKLKLSRDDAKPLLRLKGFPSFPLVERQANEVDWWDMVCNVKKLINEKKEDGKVFWQNLAGYKRQEALRPYLSSEEDRKKGKKFARYQLGDLLLHLEKKHGEDWGKVYDEAWERIDKKVEGLSKHIKLEEERRSEDAQSKAALTDWLRAKASFVIEGLKEADKDEFCRCELKLQKWYGDLRGKPFAIEAENSILDISGFSKQYNCAFIWQKDGVKKLNLYLIINYFKGGKLRFKKIKPEAFEANRFYTVINKKSGEIVPMEVNFNFDDPNLIILPLAFGKRQGREFIWNDLLSLETGSLKLANGRVIEKTLYNRRTRQDEPALFVALTFERREVLDSSNIKPMNLIGVDRGENIPAVIALTDPEGCPLSRFKDSLGNQTHILRIGESYKEKQRTIQAKKEVEQRRAGGYSRKYASKAKNLADDMVRNTARDLLYYAVTQDAMLIFENLSRGFGRQGKRTFMAERQYTRMEDWLTAKLAYEGLPSKTYLSKTLAQYTSKTCSNCGFTITSADYDRVLEKLKKTATGWMTTINGKELKVEGQITYYNRYKRQNVVKDLSVELDRLSEESVNNDISSWTKGRSGEALSLLKKRFSHRPVQEKFVCLNCGFETHADEQAALNIARSWLFLRSQEYKKYQTNKTTGNTDKRAFVETWQSFYRKKLKEVWKPAV

SEQ ID NO: 25965 - protein, 978 aa, synthetic construct
  REGION 1..978: note = engineered CasX variant
QEIKRINKIRRRLVKDSNTKKAGKTGPMKTLLVRVMTPDLRERLENLRKKPENIPQPISNTSRANLNKLLTDYTEMKKAILHVYWEEFQKDPVGLMSRVAQPASKKIDQNKLKPEMDEKGNLTTAGFACSQCGQPLFVYKLEQVSEKGKAYTNYFGRCNVAEHEKLILLAQLKPEKDSDEAVTYSLGKFGQRALDFYSIHVTKESTHPVKPLAQIAGNRYASGPVGKALSDACMGTIASFLSKYQDIIIEHQKVVKGNQKRLESLRELAGKENLEYPSVTLPPQPHTKEGVDAYNEVIARVRMWVNLNLWQKLKLSRDDAKPLLRLKGFPSFPLVERQANEVDWWDMVCNVKKLINEKKEDGKVFWQNLAGYKRQEALRPYLSSEEDRKKGKKFARYQLGDLLLHLEKKHGEDWGKVYDEAWERIDKKVEGLSKHIKLEEERRSEDAQSKAALTDWLRAKASFVIEGLKEADKDEFCRCELKLQKWYGDLRGKPFAIEAENSILDISGFSKQYNCAFIWQKDGVKKLNLYLIINYFKGGKLRFKKIKPEAFEANRFYTVINKKSGEIVPMEVNFNFDDPNLIILPLAFGKRQGREFIWNDLLSLETGSLKLANGRVIEKTLYNRRTRQDEPALFVALTFERREVLDSSNIKPMNLIGVDRGENIPAVIALTDPEGCPLSRFKDSLGNPTYILRIGESYKEKQRTIQAKKEVEQRRAGGYSRKYASKAKNLADDMVRNTARDLLYYAVTQDAMLIFENLSRGFGRQGKRTFMAERQYTRMEDWLTAKLAYEGLPSKTYLSKTLAQYTSKTCSNCGFTITSADYDRVLEKLKKTATGWMTTINGKELKVEGQITYYNRYKRQNVVKDLSVELDRLSEESVNNDISSWTKGRSGEALSLLKKRFSHRPVQEKFVCLNCGFETHADEQAALNIARSWLFLRSQEYKKYQTNKTTGNTDKRAFVETWQSFYRKKLKEVWKPAV

SEQ ID NO: 25966 - protein, 978 aa, synthetic construct
  REGION 1..978: note = engineered CasX variant
QEIKRINKIRRRLVKDSNTKKAGKTGPMKTLLVRVMTPDLRERLENLRKKPENIPQPISNTSRANLNKLLTDYTEMKKAILHVYWEEFQKDPVGLMSRVAQPASKKIDQNKLKPEMDEKGNLTTAGFACSQCGQPLFVYKLEQVSEKGKAYTNYFGRCNVAEHEKLILLAQLKPEKDSDEAVTYSLGKFGQRALDFYSIHVTKESTHPVKPLAQIAGNRYASGPVGKALSDACMGTIASFLSKYQDIIIEHQKVVKGNQKRLESLRELAGKENLEYPSVTLPPQPHTKEGVDAYNEVIARVRMWVNLNLWQKLKLSRDDAKPLLRLKGFPSFPLVERQANEVDWWDMVCNVKKLINEKKEDGKVFWQNLAGYKRQEALRPYLSSEEDRKKGKKFARYQLGDLLLHLEKKHGEDWGKVYDEAWERIDKKVEGLSKHIKLEEERRSEDAQSKAALTDWLRAKASFVIEGLKEADKDEFCRCELKLQKWYGDLRGKPFAIEAENSILDISGFSKQYNCAFIWQKDGVKKLNLYLIINYFKGGKLRFKKIKPEAFEANRFYTVINKKSGEIVPMEVNFNFDDPNLIILPLAFGKRQGREFIWNDLLSLETGSLKLANGRVIEKTLYNRRTRQDEPALFVALTFERREVLDSSNIKPMNLIGVDRGENIPAVIALTDPEGCPLSRFKDSLGNPTYILRIGESYKEKQRMIQAKKEVEQRRAGGYSRKYASKAKNLADDMVRNTARDLLYYAVTQDAMLIFENLSRGFGRQGKRTFMAERQYTRMEDWLTAKLAYEGLPSKTYLSKTLAQYTSKTCSNCGFTITSADYDRVLEKLKKTATGWMTTINGKELKVEGQITYYNRYKRQNVVKDLSVELDRLSEESVNNDISSWTKGRSGEALSLLKKRFSHRPVQEKFVCLNCGFETHADEQAALNIARSWLFLRSQEYKKYQTNKTTGNTDKRAFVETWQSFYRKKLKEVWKPAV

SEQ ID NO: 25967 - protein, 978 aa, synthetic construct
  REGION 1..978: note = engineered CasX variant
QEIKRINKIRRRLVKDSNTKKAGKTGPMKTLLVRVMTPDLRERLENLRKKPENIPQPISNTSRANLNKLLTDYTEMKKAILHVYWEEFQKDPVGLMSRVAQPASKKIDQNKLKPEMDEKGNLTTAGFACSQCGQPLFVYKLEQVSEKGKAYTNYFGRCNVAEHEKLILLAQLKPEKDSDEAVTYSLGKFGQRALDFYSIHVTKESTHPVKPLAQIAGNRYASGPVGKALSDACMGTIASFLSKYQDIIIEHQKVVKGNQKRLESLRELAGKENLEYPSVTLPPQPHTKEGVDAYNEVIARVRMWVNLNLWQKLKLSRDDAKPLLRLKGFPSFPLVERQANEVDWWDMVCNVKKLINEKKEDGKVFWQNLAGYKRQEALRPYLSSEEDRKKGKKFARYQLGDLLLHLEKKHGEDWGKVYDEAWERIDKKVEGLSKHIKLEEERRSEDAQSKAALTDWLRAKASFVIEGLKEADKDEFCRCELKLQKWYGDLRGKPFAIEAENSILDISGFSKQYNCAFIWQKDGVKKLNLYLIINYFKGGKLRFKKIKPEAFEANRFYTVINKKSGEIVPMEVNFNFDDPNLIILPLAFGKRQGREFIWNDLLSLETGSLKLANGRVIEKTLYNRRTRQDEPALFVALTFERREVLDSSNIKPMNLIGVDRGENIPAVIALTDPEGCPLSRFKDSLGNPTWILRIGESYKEKQRFIQAKKEVEQRRAGGYSRKYASKAKNLADDMVRNTARDLLYYAVTQDAMLIFENLSRGFGRQGKRTFMAERQYTRMEDWLTAKLAYEGLPSKTYLSKTLAQYTSKTCSNCGFTITSADYDRVLEKLKKTATGWMTTINGKELKVEGQITYYNRYKRQNVVKDLSVELDRLSEESVNNDISSWTKGRSGEALSLLKKRFSHRPVQEKFVCLNCGFETHADEQAALNIARSWLFLRSQEYKKYQTNKTTGNTDKRAFVETWQSFYRKKLKEVWKPAV

SEQ ID NO: 25968 - protein, 978 aa, synthetic construct
  REGION 1..978: note = engineered CasX variant
QEIKRINKIRRRLVKDSNTKKAGKTGPMKTLLVRVMTPDLRERLENLRKKPENIPQPISNTSRANLNKLLTDYTEMKKAILHVYWEEFQKDPVGLMSRVAQPASKKIDQNKLKPEMDEKGNLTTAGFACSQCGQPLFVYKLEQVSEKGKAYTNYFGRCNVAEHEKLILLAQLKPEKDSDEAVTYSLGKFGQRALDFYSIHVTKESTHPVKPLAQIAGNRYASGPVGKALSDACMGTIASFLSKYQDIIIEHQKVVKGNQKRLESLRELAGKENLEYPSVTLPPQPHTKEGVDAYNEVIARVRMWVNLNLWQKLKLSRDDAKPLLRLKGFPSFPLVERQANEVDWWDMVCNVKKLINEKKEDGKVFWQNLAGYKRQEALRPYLSSEEDRKKGKKFARYQLGDLLLHLEKKHGEDWGKVYDEAWERIDKKVEGLSKHIKLEEERRSEDAQSKAALTDWLRAKASFVIEGLKEADKDEFCRCELKLQKWYGDLRGKPFAIEAENSILDISGFSKQYNCAFIWQKDGVKKLNLYLIINYFKGGKLRFKKIKPEAFEANRFYTVINKKSGEIVPMEVNFNFDDPNLIILPLAFGKRQGREFIWNDLLSLETGSLKLANGRVIEKTLYNRRTRQDEPALFVALTFERREVLDSSNIKPMNLIGVDRGENIPAVIALTDPEGCPLSRFKDSLGNPTSILRIGESYKTYQRTIQAKKEVEQRRAGGYSRKYASKAKNLADDMVRNTARDLLYYAVTQDAMLIFENLSRGFGRQGKRTFMAERQYTRMEDWLTAKLAYEGLPSKTYLSKTLAQYTSKTCSNCGFTITSADYDRVLEKLKKTATGWMTTINGKELKVEGQITYYNRYKRQNVVKDLSVELDRLSEESVNNDISSWTKGRSGEALSLLKKRFSHRPVQEKFVCLNCGFETHADEQAALNIARSWLFLRSQEYKKYQTNKTTGNTDKRAFVETWQSFYRKKLKEVWKPAV

SEQ ID NO: 25969 - protein, 978 aa, synthetic construct
  REGION 1..978: note = engineered CasX variant
QEIKRINKIRRRLVKDSNTKKAGKTGPMKTLLVRVMTPDLRERLENLRKKPENIPQPISNTSRANLNKLLTDYTEMKKAILHVYWEEFQKDPVGLMSRVAQPASKKIDQNKLKPEMDEKGNLTTAGFACSQCGQPLFVYKLEQVSEKGKAYTNYFGRCNVAEHEKLILLAQLKPEKDSDEAVTYSLGKFGQRALDFYSIHVTKESTHPVKPLAQIAGNRYASGPVGKALSDACMGTIASFLSKYQDIIIEHQKVVKGNQKRLESLRELAGKENLEYPSVTLPPQPHTKEGVDAYNEVIARVRMWVNLNLWQKLKLSRDDAKPLLRLKGFPSFPLVERQANEVDWWDMVCNVKKLINEKKEDGKVFWQNLAGYKRQEALRPYLSSEEDRKKGKKFARYQLGDLLLHLEKKHGEDWGKVYDEAWERIDKKVEGLSKHIKLEEERRSEDAQSKAALTDWLRAKASFVIEGLKEADKDEFCRCELKLQKWYGDLRGKPFAIEAENSILDISGFSKQYNCAFIWQKDGVKKLNLYLIINYFKGGKLRFKKIKPEAFEANRFYTVINKKSGEIVPMEVNFNFDDPNLIILPLAFGKRQGREFIWNDLLSLETGSLKLANGRVIEKTLYNRRTRQDEPALFVALTFERREVLDSSNIKPMNLIGVDRGENIPAVIALTDPEGCPLSRFKDSLGNPTSILRIGESYKTKQRTIQAKKEVEQRRAGGYSRKYASKAKNLADDMVRNTARDLLYYAVTQDAMLIFENLSRGFGRQGKRTFMAERQYTRMEDWLTAKLAYEGLPSKTYLSKTLAQYTSKTCSNCGFTITSADYDRVLEKLKKTATGWMTTINGKELKVEGQITYYNRYKRQNVVKDLSVELDRLSEESVNNDISSWTKGRSGEALSLLKKRFSHRPVQEKFVCLNCGFETHADEQAALNIARSWLFLRSQEYKKYQTNKTTGNTDKRAFVETWQSFYRKKLKEVWKPAV

SEQ ID NO: 25970 - protein, 978 aa, synthetic construct
  REGION 1..978: note = engineered CasX variant
QEIKRINKIRRRLVKDSNTKKAGKTGPMKTLLVRVMTPDLRERLENLRKKPENIPQPISNTSRANLNKLLTDYTEMKKAILHVYWEEFQKDPVGLMSRVAQPASKKIDQNKLKPEMDEKGNLTTAGFACSQCGQPLFVYKLEQVSEKGKAYTNYFGRCNVAEHEKLILLAQLKPEKDSDEAVTYSLGKFGQRALDFYSIHVTKESTHPVKPLAQIAGNRYASGPVGKALSDACMGTIASFLSKYQDIIIEHQKVVKGNQKRLESLRELAGKENLEYPSVTLPPQPHTKEGVDAYNEVIARVRMWVNLNLWQKLKLSRDDAKPLLRLKGFPSFPLVERQANEVDWWDMVCNVKKLINEKKEDGKVFWQNLAGYKRQEALRPYLSSEEDRKKGKKFARYQLGDLLLHLEKKHGEDWGKVYDEAWERIDKKVEGLSKHIKLEEERRSEDAQSKAALTDWLRAKASFVIEGLKEADKDEFCRCELKLQKWYGDLRGKPFAIEAENSILDISGFSKQYNCAFIWQKDGVKKLNLYLIINYFKGGKLRFKKIKPEAFEANRFYTVINKKSGEIVPMEVNFNFDDPNLIILPLAFGKRQGREFIWNDLLSLETGSLKLANGRVIEKTLYNRRTRQDEPALFVALTFERREVLDSSNIKPMNLIGVDRGENIPAVIALTDPEGCPLSRFKDSLGNPTSILRIGESYKEKQRTIQAKKEKEQRRAGGYSRKYASKAKNLADDMVRNTARDLLYYAVTQDAMLIFENLSRGFGRQGKRTFMAERQYTRMEDWLTAKLAYEGLPSKTYLSKTLAQYTSKTCSNCGFTITSADYDRVLEKLKKTATGWMTTINGKELKVEGQITYYNRYKRQNVVKDLSVELDRLSEESVNNDISSWTKGRSGEALSLLKKRFSHRPVQEKFVCLNCGFETHADEQAALNIARSWLFLRSQEYKKYQTNKTTGNTDKRAFVETWQSFYRKKLKEVWKPAV

SEQ ID NO: 25971 - protein, 978 aa, synthetic construct
  REGION 1..978: note = engineered CasX variant
QEIKRINKIRRRLVKDSNTKKAGKTGPMKTLLVRVMTPDLRERLENLRKKPENIPQPISNTSRANLNKLLTDYTEMKKAILHVYWEEFQKDPVGLMSRVAQPASKKIDQNKLKPEMDEKGNLTTAGFACSQCGQPLFVYKLEQVSEKGKAYTNYFGRCNVAEHEKLILLAQLKPEKDSDEAVTYSLGKFGQRALDFYSIHVTKESTHPVKPLAQIAGNRYASGPVGKALSDACMGTIASFLSKYQDIIIEHQKVVKGNQKRLESLRELAGKENLEYPSVTLPPQPHTKEGVDAYNEVIARVRMWVNLNLWQKLKLSRDDAKPLLRLKGFPSFPLVERQANEVDWWDMVCNVKKLINEKKEDGKVFWQNLAGYKRQEALRPYLSSEEDRKKGKKFARYQLGDLLLHLEKKHGEDWGKVYDEAWERIDKKVEGLSKHIKLEEERRSEDAQSKAALTDWLRAKASFVIEGLKEADKDEFCRCELKLQKWYGDLRGKPFAIEAENSILDISGFSKQYNCAFIWQKDGVKKLNLYLIINYFKGGKLRFKKIKPEAFEANRFYTVINKKSGEIVPMEVNFNFDDPNLIILPLAFGKRQGREFIWNDLLSLETGSLKLANGRVIEKTLYNRRTRQDEPALFVALTFERREVLDSSNIKPMNLIGVDRGENIPAVIALTDPEGCPLSRFKDSLGNPTPILRIGESYKEKQRTIQAKKEVEQRRAGTYSRKYASKAKNLADDMVRNTARDLLYYAVTQDAMLIFENLSRGFGRQGKRTFMAERQYTRMEDWLTAKLAYEGLPSKTYLSKTLAQYTSKTCSNCGFTITSADYDRVLEKLKKTATGWMTTINGKELKVEGQITYYNRYKRQNVVKDLSVELDRLSEESVNNDISSWTKGRSGEALSLLKKRFSHRPVQEKFVCLNCGFETHADEQAALNIARSWLFLRSQEYKKYQTNKTTGNTDKRAFVETWQSFYRKKLKEVWKPAV

SEQ ID NO: 25972 - protein, 978 aa, synthetic construct
  REGION 1..978: note = engineered CasX variant
QEIKRINKIRRRLVKDSNTKKAGKTGPMKTLLVRVMTPDLRERLENLRKKPENIPQPISNTSRANLNKLLTDYTEMKKAILHVYWEEFQKDPVGLMSRVAQPASKKIDQNKLKPEMDEKGNLTTAGFACSQCGQPLFVYKLEQVSEKGKAYTNYFGRCNVAEHEKLILLAQLKPEKDSDEAVTYSLGKFGQRALDFYSIHVTKESTHPVKPLAQIAGNRYASGPVGKALSDACMGTIASFLSKYQDIIIEHQKVVKGNQKRLESLRELAGKENLEYPSVTLPPQPHTKEGVDAYNEVIARVRMWVNLNLWQKLKLSRDDAKPLLRLKGFPSFPLVERQANEVDWWDMVCNVKKLINEKKEDGKVFWQNLAGYKRQEALRPYLSSEEDRKKGKKFARYQLGDLLLHLEKKHGEDWGKVYDEAWERIDKKVEGLSKHIKLEEERRSEDAQSKAALTDWLRAKASFVIEGLKEADKDEFCRCELKLQKWYGDLRGKPFAIEAENSILDISGFSKQYNCAFIWQKDGVKKLNLYLIINYFKGGKLRFKKIKPEAFEANRFYTVINKKSGEIVPMEVNFNFDDPNLIILPLAFGKRQGREFIWNDLLSLETGSLKLANGRVIEKTLYNRRTRQDEPALFVALTFERREVLDSSNIKPMNLIGVDRGENIPAVIALTDPEGCPLSRFKDSLGNPTNILRIGESYKEKQRTIQAKKEVEQRRRGGYSRKYASKAKNLADDMVRNTARDLLYYAVTQDAMLIFENLSRGFGRQGKRTFMAERQYTRMEDWLTAKLAYEGLPSKTYLSKTLAQYTSKTCSNCGFTITSADYDRVLEKLKKTATGWMTTINGKELKVEGQITYYNRYKRQNVVKDLSVELDRLSEESVNNDISSWTKGRSGEALSLLKKRFSHRPVQEKFVCLNCGFETHADEQAALNIARSWLFLRSQEYKKYQTNKTTGNTDKRAFVETWQSFYRKKLKEVWKPAV

SEQ ID NO: 25973 - protein, 978 aa, synthetic construct
  REGION 1..978: note = engineered CasX variant
QEIKRINKIRRRLVKDSNTKKAGKTGPMKTLLVRVMTPDLRERLENLRKKPENIPQPISNTSRANLNKLLTDYTEMKKAILHVYWEEFQKDPVGLMSRVAQPASKKIDQNKLKPEMDEKGNLTTAGFACSQCGQPLFVYKLEQVSEKGKAYTNYFGRCNVAEHEKLILLAQLKPEKDSDEAVTYSLGKFGQRALDFYSIHVTKESTHPVKPLAQIAGNRYASGPVGKALSDACMGTIASFLSKYQDIIIEHQKVVKGNQKRLESLRELAGKENLEYPSVTLPPQPHTKEGVDAYNEVIARVRMWVNLNLWQKLKLSRDDAKPLLRLKGFPSFPLVERQANEVDWWDMVCNVKKLINEKKEDGKVFWQNLAGYKRQEALRPYLSSEEDRKKGKKFARYQLGDLLLHLEKKHGEDWGKVYDEAWERIDKKVEGLSKHIKLEEERRSEDAQSKAALTDWLRAKASFVIEGLKEADKDEFCRCELKLQKWYGDLRGKPFAIEAENSILDISGFSKQYNCAFIWQKDGVKKLNLYLIINYFKGGKLRFKKIKPEAFEANRFYTVINKKSGEIVPMEVNFNFDDPNLIILPLAFGKRQGREFIWNDLLSLETGSLKLANGRVIEKTLYNRRTRQDEPALFVALTFERREVLDSSNIKPMNLIGVDRGENIPAVIALTDPEGCPLSRFKDSLGNPTNILRIGESYKEKQRTIQAKKEVEQRRAGGYSRKYASKAKNLADDMVRNTARDLLYYAVTQDAMLIFENLSRGFGRQGKRTFMAERQYTRMEDWLTAKLAYEGLPSKTYLSKTLAQYTSKTCSNCGFTITSADYDRVLEKLKKTATGWMTTINGKELKVEGQITYYNRYKRQNVVKDLSVELDRLSEESVNNDISSWTKGRSGEALSLLKKRFSHRPVQEKFVCLNCGFETHADEQAALNIARSWLFLRSQEYKKYQTNKTTGNTDKRAFVETWQSFYRKKLKEVWKPAV

SEQ ID NO: 25974 - protein, 978 aa, synthetic construct
  REGION 1..978: note = engineered CasX variant
QEIKRINKIRRRLVKDSNTKKAGKTGPMKTLLVRVMTPDLRERLENLRKKPENIPQPISNTSRANLNKLLTDYTEMKKAILHVYWEEFQKDPVGLMSRVAQPASKKIDQNKLKPEMDEKGNLTTAGFACSQCGQPLFVYKLEQVSEKGKAYTNYFGRCNVAEHEKLILLAQLKPEKDSDEAVTYSLGKFGQRALDFYSIHVTKESTHPVKPLAQIAGNRYASGPVGKALSDACMGTIASFLSKYQDIIIEHQKVVKGNQKRLESLRELAGKENLEYPSVTLPPQPHTKEGVDAYNEVIARVRMWVNLNLWQKLKLSRDDAKPLLRLKGFPSFPLVERQANEVDWWDMVCNVKKLINEKKEDGKVFWQNLAGYKRQEALRPYLSSEEDRKKGKKFARYQLGDLLLHLEKKHGEDWGKVYDEAWERIDKKVEGLSKHIKLEEERRSEDAQSKAALTDWLRAKASFVIEGLKEADKDEFCRCELKLQKWYGDLRGKPFAIEAENSILDISGFSKQYNCAFIWQKDGVKKLNLYLIINYFKGGKLRFKKIKPEAFEANRFYTVINKKSGEIVPMEVNFNFDDPNLIILPLAFGKRQGREFIWNDLLSLETGSLKLANGRVIEKTLYNRRTRQDEPALFVALTFERREVLDSSNIKPMNLIGVDRGENIPAVIALTDPEGCPLSRFKDSLGNPTHYLRIGESYKEKQRTIQAKKRVEQRRAGGYSRKYASKAKNLADDMVRNTARDLLYYAVTQDAMLIFENLSRGFGRQGKRTFMAERQYTRMEDWLTAKLAYEGLPSKTYLSKTLAQYTSKTCSNCGFTITSADYDRVLEKLKKTATGWMTTINGKELKVEGQITYYNRYKRQNVVKDLSVELDRLSEESVNNDISSWTKGRSGEALSLLKKRFSHRPVQEKFVCLNCGFETHADEQAALNIARSWLFLRSQEYKKYQTNKTTGNTDKRAFVETWQSFYRKKLKEVWKPAV

SEQ ID NO: 25975 - protein, 978 aa, synthetic construct
  REGION 1..978: note = engineered CasX variant
QEIKRINKIRRRLVKDSNTKKAGKTGPMKTLLVRVMTPDLRERLENLRKKPENIPQPISNTSRANLNKLLTDYTEMKKAILHVYWEEFQKDPVGLMSRVAQPASKKIDQNKLKPEMDEKGNLTTAGFACSQCGQPLFVYKLEQVSEKGKAYTNYFGRCNVAEHEKLILLAQLKPEKDSDEAVTYSLGKFGQRALDFYSIHVTKESTHPVKPLAQIAGNRYASGPVGKALSDACMGTIASFLSKYQDIIIEHQKVVKGNQKRLESLRELAGKENLEYPSVTLPPQPHTKEGVDAYNEVIARVRMWVNLNLWQKLKLSRDDAKPLLRLKGFPSFPLVERQANEVDWWDMVCNVKKLINEKKEDGKVFWQNLAGYKRQEALRPYLSSEEDRKKGKKFARYQLGDLLLHLEKKHGEDWGKVYDEAWERIDKKVEGLSKHIKLEEERRSEDAQSKAALTDWLRAKASFVIEGLKEADKDEFCRCELKLQKWYGDLRGKPFAIEAENSILDISGFSKQYNCAFIWQKDGVKKLNLYLIINYFKGGKLRFKKIKPEAFEANRFYTVINKKSGEIVPMEVNFNFDDPNLIILPLAFGKRQGREFIWNDLLSLETGSLKLANGRVIEKTLYNRRTRQDEPALFVALTFERREVLDSSNIKPMNLIGVDRGENIPAVIALTDPEGCPLSRFKDSLGNPTHYLRIGESYKEKQRTIQAKKEVRVRRAGGYSRKYASKAKNLADDMVRNTARDLLYYAVTQDAMLIFENLSRGFGRQGKRTFMAERQYTRMEDWLTAKLAYEGLPSKTYLSKTLAQYTSKTCSNCGFTITSADYDRVLEKLKKTATGWMTTINGKELKVEGQITYYNRYKRQNVVKDLSVELDRLSEESVNNDISSWTKGRSGEALSLLKKRFSHRPVQEKFVCLNCGFETHADEQAALNIARSWLFLRSQEYKKYQTNKTTGNTDKRAFVETWQSFYRKKLKEVWKPAV

SEQ ID NO: 25976 - protein, 978 aa, synthetic construct
  REGION 1..978: note = engineered CasX variant
QEIKRINKIRRRLVKDSNTKKAGKTGPMKTLLVRVMTPDLRERLENLRKKPENIPQPISNTSRANLNKLLTDYTEMKKAILHVYWEEFQKDPVGLMSRVAQPASKKIDQNKLKPEMDEKGNLTTAGFACSQCGQPLFVYKLEQVSEKGKAYTNYFGRCNVAEHEKLILLAQLKPEKDSDEAVTYSLGKFGQRALDFYSIHVTKESTHPVKPLAQIAGNRYASGPVGKALSDACMGTIASFLSKYQDIIIEHQKVVKGNQKRLESLRELAGKENLEYPSVTLPPQPHTKEGVDAYNEVIARVRMWVNLNLWQKLKLSRDDAKPLLRLKGFPSFPLVERQANEVDWWDMVCNVKKLINEKKEDGKVFWQNLAGYKRQEALRPYLSSEEDRKKGKKFARYQLGDLLLHLEKKHGEDWGKVYDEAWERIDKKVEGLSKHIKLEEERRSEDAQSKAALTDWLRAKASFVIEGLKEADKDEFCRCELKLQKWYGDLRGKPFAIEAENSILDISGFSKQYNCAFIWQKDGVKKLNLYLIINYFKGGKLRFKKIKPEAFEANRFYTVINKKSGEIVPMEVNFNFDDPNLIILPLAFGKRQGREFIWNDLLSLETGSLKLANGRVIEKTLYNRRTRQDEPALFVALTFERREVLDSSNIKPMNLIGVDRGENIPAVIALTDPEGCPLSRFKDSLGNPTHYLRIGESYKEKQRTIQAKKEVRQRRAGGYSRKYASKAKNLADDMVRNTARDLLYYAVTQDAMLIFENLSRGFGRQGKRTFMAERQYTRMEDWLTAKLAYEGLPSKTYLSKTLAQYTSKTCSNCGFTITSADYDRVLEKLKKTATGWMTTINGKELKVEGQITYYNRYKRQNVVKDLSVELDRLSEESVNNDISSWTKGRSGEALSLLKKRFSHRPVQEKFVCLNCGFETHADEQAALNIARSWLFLRSQEYKKYQTNKTTGNTDKRAFVETWQSFYRKKLKEVWKPAV

SEQ ID NO: 25977 - protein, 978 aa, synthetic construct
  REGION 1..978: note = engineered CasX variant
QEIKRINKIRRRLVKDSNTKKAGKTGPMKTLLVRVMTPDLRERLENLRKKPENIPQPISNTSRANLNKLLTDYTEMKKAILHVYWEEFQKDPVGLMSRVAQPASKKIDQNKLKPEMDEKGNLTTAGFACSQCGQPLFVYKLEQVSEKGKAYTNYFGRCNVAEHEKLILLAQLKPEKDSDEAVTYSLGKFGQRALDFYSIHVTKESTHPVKPLAQIAGNRYASGPVGKALSDACMGTIASFLSKYQDIIIEHQKVVKGNQKRLESLRELAGKENLEYPSVTLPPQPHTKEGVDAYNEVIARVRMWVNLNLWQKLKLSRDDAKPLLRLKGFPSFPLVERQANEVDWWDMVCNVKKLINEKKEDGKVFWQNLAGYKRQEALRPYLSSEEDRKKGKKFARYQLGDLLLHLEKKHGEDWGKVYDEAWERIDKKVEGLSKHIKLEEERRSEDAQSKAALTDWLRAKASFVIEGLKEADKDEFCRCELKLQKWYGDLRGKPFAIEAENSILDISGFSKQYNCAFIWQKDGVKKLNLYLIINYFKGGKLRFKKIKPEAFEANRFYTVINKKSGEIVPMEVNFNFDDPNLIILPLAFGKRQGREFIWNDLLSLETGSLKLANGRVIEKTLYNRRTRQDEPALFVALTFERREVLDSSNIKPMNLIGVDRGENIPAVIALTDPEGCPLSRFKDSLGNPTHYLRIGESYKEKQRTIQAKKEVEVRRAGGYSRKYASKAKNLADDMVRNTARDLLYYAVTQDAMLIFENLSRGFGRQGKRTFMAERQYTRMEDWLTAKLAYEGLPSKTYLSKTLAQYTSKTCSNCGFTITSADYDRVLEKLKKTATGWMTTINGKELKVEGQITYYNRYKRQNVVKDLSVELDRLSEESVNNDISSWTKGRSGEALSLLKKRFSHRPVQEKFVCLNCGFETHADEQAALNIARSWLFLRSQEYKKYQTNKTTGNTDKRAFVETWQSFYRKKLKEVWKPAV

SEQ ID NO: 25978 - protein, 978 aa, synthetic construct
  REGION 1..978: note = engineered CasX variant
QEIKRINKIRRRLVKDSNTKKAGKTGPMKTLLVRVMTPDLRERLENLRKKPENIPQPISNTSRANLNKLLTDYTEMKKAILHVYWEEFQKDPVGLMSRVAQPASKKIDQNKLKPEMDEKGNLTTAGFACSQCGQPLFVYKLEQVSEKGKAYTNYFGRCNVAEHEKLILLAQLKPEKDSDEAVTYSLGKFGQRALDFYSIHVTKESTHPVKPLAQIAGNRYASGPVGKALSDACMGTIASFLSKYQDIIIEHQKVVKGNQKRLESLRELAGKENLEYPSVTLPPQPHTKEGVDAYNEVIARVRMWVNLNLWQKLKLSRDDAKPLLRLKGFPSFPLVERQANEVDWWDMVCNVKKLINEKKEDGKVFWQNLAGYKRQEALRPYLSSEEDRKKGKKFARYQLGDLLLHLEKKHGEDWGKVYDEAWERIDKKVEGLSKHIKLEEERRSEDAQSKAALTDWLRAKASFVIEGLKEADKDEFCRCELKLQKWYGDLRGKPFAIEAENSILDISGFSKQYNCAFIWQKDGVKKLNLYLIINYFKGGKLRFKKIKPEAFEANRFYTVINKKSGEIVPMEVNFNFDDPNLIILPLAFGKRQGREFIWNDLLSLETGSLKLANGRVIEKTLYNRRTRQDEPALFVALTFERREVLDSSNIKPMNLIGVDRGENIPAVIALTDPEGCPLSRFKDSLGNPTHYLRIGESYKEKQRTIQAKKEVEQRRAGGYSRKYASKAKNLADDMVRNTARDLLYYAVTQDAMLIFENLSRGFGRQGKRTFMAERQYTRMEDWLTAKLAYEGLPSKTYLSKTLAQYTSKTCSNCGFTITSADYDRVLEKLKKTATGWMTTINGKELKVEGQITYYNRYKRQNVVKDLSVELDRLSEESVNNDISSWTKGRSGEALSLLKKRFSHRPVQEKFVCLNCGFETHADEQAALNIARSWLFLRSQEYKKYQTNKTTGNTDKRAFVETWQSFYRKKLKEVWKPAV

SEQ ID NO: 25979 - protein, 978 aa, synthetic construct
  REGION 1..978: note = engineered CasX variant
QEIKRINKIRRRLVKDSNTKKAGKTGPMKTLLVRVMTPDLRERLENLRKKPENIPQPISNTSRANLNKLLTDYTEMKKAILHVYWEEFQKDPVGLMSRVAQPASKKIDQNKLKPEMDEKGNLTTAGFACSQCGQPLFVYKLEQVSEKGKAYTNYFGRCNVAEHEKLILLAQLKPEKDSDEAVTYSLGKFGQRALDFYSIHVTKESTHPVKPLAQIAGNRYASGPVGKALSDACMGTIASFLSKYQDIIIEHQKVVKGNQKRLESLRELAGKENLEYPSVTLPPQPHTKEGVDAYNEVIARVRMWVNLNLWQKLKLSRDDAKPLLRLKGFPSFPLVERQANEVDWWDMVCNVKKLINEKKEDGKVFWQNLAGYKRQEALRPYLSSEEDRKKGKKFARYQLGDLLLHLEKKHGEDWGKVYDEAWERIDKKVEGLSKHIKLEEERRSEDAQSKAALTDWLRAKASFVIEGLKEADKDEFCRCELKLQKWYGDLRGKPFAIEAENSILDISGFSKQYNCAFIWQKDGVKKLNLYLIINYFKGGKLRFKKIKPEAFEANRFYTVINKKSGEIVPMEVNFNFDDPNLIILPLAFGKRQGREFIWNDLLSLETGSLKLANGRVIEKTLYNRRTRQDEPALFVALTFERREVLDSSNIKPMNLIGVDRGENIPAVIALTDPEGCPLSRFKDSLGNPTHVLRIGESYKHKQRTIQAKKEVEQRRAGGYSRKYASKAKNLADDMVRNTARDLLYYAVTQDAMLIFENLSRGFGRQGKRTFMAERQYTRMEDWLTAKLAYEGLPSKTYLSKTLAQYTSKTCSNCGFTITSADYDRVLEKLKKTATGWMTTINGKELKVEGQITYYNRYKRQNVVKDLSVELDRLSEESVNNDISSWTKGRSGEALSLLKKRFSHRPVQEKFVCLNCGFETHADEQAALNIARSWLFLRSQEYKKYQTNKTTGNTDKRAFVETWQSFYRKKLKEVWKPAV

SEQ ID NO: 25980 - protein, 978 aa, synthetic construct
  REGION 1..978: note = engineered CasX variant
QEIKRINKIRRRLVKDSNTKKAGKTGPMKTLLVRVMTPDLRERLENLRKKPENIPQPISNTSRANLNKLLTDYTEMKKAILHVYWEEFQKDPVGLMSRVAQPASKKIDQNKLKPEMDEKGNLTTAGFACSQCGQPLFVYKLEQVSEKGKAYTNYFGRCNVAEHEKLILLAQLKPEKDSDEAVTYSLGKFGQRALDFYSIHVTKESTHPVKPLAQIAGNRYASGPVGKALSDACMGTIASFLSKYQDIIIEHQKVVKGNQKRLESLRELAGKENLEYPSVTLPPQPHTKEGVDAYNEVIARVRMWVNLNLWQKLKLSRDDAKPLLRLKGFPSFPLVERQANEVDWWDMVCNVKKLINEKKEDGKVFWQNLAGYKRQEALRPYLSSEEDRKKGKKFARYQLGDLLLHLEKKHGEDWGKVYDEAWERIDKKVEGLSKHIKLEEERRSEDAQSKAALTDWLRAKASFVIEGLKEADKDEFCRCELKLQKWYGDLRGKPFAIEAENSILDISGFSKQYNCAFIWQKDGVKKLNLYLIINYFKGGKLRFKKIKPEAFEANRFYTVINKKSGEIVPMEVNFNFDDPNLIILPLAFGKRQGREFIWNDLLSLETGSLKLANGRVIEKTLYNRRTRQDEPALFVALTFERREVLDSSNIKPMNLIGVDRGENIPAVIALTDPEGCPLSRFKDSLGNPTHVLRIGESYKENQRTIQAKKEVEQRRAGGYSRKYASKAKNLADDMVRNTARDLLYYAVTQDAMLIFENLSRGFGRQGKRTFMAERQYTRMEDWLTAKLAYEGLPSKTYLSKTLAQYTSKTCSNCGFTITSADYDRVLEKLKKTATGWMTTINGKELKVEGQITYYNRYKRQNVVKDLSVELDRLSEESVNNDISSWTKGRSGEALSLLKKRFSHRPVQEKFVCLNCGFETHADEQAALNIARSWLFLRSQEYKKYQTNKTTGNTDKRAFVETWQSFYRKKLKEVWKPAV

SEQ ID NO: 25981 - protein, 978 aa, synthetic construct
  REGION 1..978: note = engineered CasX variant
QEIKRINKIRRRLVKDSNTKKAGKTGPMKTLLVRVMTPDLRERLENLRKKPENIPQPISNTSRANLNKLLTDYTEMKKAILHVYWEEFQKDPVGLMSRVAQPASKKIDQNKLKPEMDEKGNLTTAGFACSQCGQPLFVYKLEQVSEKGKAYTNYFGRCNVAEHEKLILLAQLKPEKDSDEAVTYSLGKFGQRALDFYSIHVTKESTHPVKPLAQIAGNRYASGPVGKALSDACMGTIASFLSKYQDIIIEHQKVVKGNQKRLESLRELAGKENLEYPSVTLPPQPHTKEGVDAYNEVIARVRMWVNLNLWQKLKLSRDDAKPLLRLKGFPSFPLVERQANEVDWWDMVCNVKKLINEKKEDGKVFWQNLAGYKRQEALRPYLSSEEDRKKGKKFARYQLGDLLLHLEKKHGEDWGKVYDEAWERIDKKVEGLSKHIKLEEERRSEDAQSKAALTDWLRAKASFVIEGLKEADKDEFCRCELKLQKWYGDLRGKPFAIEAENSILDISGFSKQYNCAFIWQKDGVKKLNLYLIINYFKGGKLRFKKIKPEAFEANRFYTVINKKSGEIVPMEVNFNFDDPNLIILPLAFGKRQGREFIWNDLLSLETGSLKLANGRVIEKTLYNRRTRQDEPALFVALTFERREVLDSSNIKPMNLIGVDRGENIPAVIALTDPEGCPLSRFKDSLGNPTHVLRIGESYKEKQRTIQAKKEVEQRRAGGYSRKYASKAKNLADDMVRNTARDLLYYAVTQDAMLIFENLSRGFGRQGKRTFMAERQYTRMEDWLTAKLAYEGLPSKTYLSKTLAQYTSKTCSNCGFTITSADYDRVLEKLKKTATGWMTTINGKELKVEGQITYYNRYKRQNVVKDLSVELDRLSEESVNNDISSWTKGRSGEALSLLKKRFSHRPVQEKFVCLNCGFETHADEQAALNIARSWLFLRSQEYKKYQTNKTTGNTDKRAFVETWQSFYRKKLKEVWKPAV

SEQ ID NO: 25982 - protein, 978 aa, synthetic construct
  REGION 1..978: note = engineered CasX variant
QEIKRINKIRRRLVKDSNTKKAGKTGPMKTLLVRVMTPDLRERLENLRKKPENIPQPISNTSRANLNKLLTDYTEMKKAILHVYWEEFQKDPVGLMSRVAQPASKKIDQNKLKPEMDEKGNLTTAGFACSQCGQPLFVYKLEQVSEKGKAYTNYFGRCNVAEHEKLILLAQLKPEKDSDEAVTYSLGKFGQRALDFYSIHVTKESTHPVKPLAQIAGNRYASGPVGKALSDACMGTIASFLSKYQDIIIEHQKVVKGNQKRLESLRELAGKENLEYPSVTLPPQPHTKEGVDAYNEVIARVRMWVNLNLWQKLKLSRDDAKPLLRLKGFPSFPLVERQANEVDWWDMVCNVKKLINEKKEDGKVFWQNLAGYKRQEALRPYLSSEEDRKKGKKFARYQLGDLLLHLEKKHGEDWGKVYDEAWERIDKKVEGLSKHIKLEEERRSEDAQSKAALTDWLRAKASFVIEGLKEADKDEFCRCELKLQKWYGDLRGKPFAIEAENSILDISGFSKQYNCAFIWQKDGVKKLNLYLIINYFKGGKLRFKKIKPEAFEANRFYTVINKKSGEIVPMEVNFNFDDPNLIILPLAFGKRQGREFIWNDLLSLETGSLKLANGRVIEKTLYNRRTRQDEPALFVALTFERREVLDSSNIKPMNLIGVDRGENIPAVIALTDPEGCPLSRFKDSLGNPTHVLRIGESFKENQRTIQAKKEVEQRRAGGYSRKYASKAKNLADDMVRNTARDLLYYAVTQDAMLIFENLSRGFGRQGKRTFMAERQYTRMEDWLTAKLAYEGLPSKTYLSKTLAQYTSKTCSNCGFTITSADYDRVLEKLKKTATGWMTTINGKELKVEGQITYYNRYKRQNVVKDLSVELDRLSEESVNNDISSWTKGRSGEALSLLKKRFSHRPVQEKFVCLNCGFETHADEQAALNIARSWLFLRSQEYKKYQTNKTTGNTDKRAFVETWQSFYRKKLKEVWKPAV

SEQ ID NO: 25983 - protein, 978 aa, synthetic construct
  REGION 1..978: note = engineered CasX variant
QEIKRINKIRRRLVKDSNTKKAGKTGPMKTLLVRVMTPDLRERLENLRKKPENIPQPISNTSRANLNKLLTDYTEMKKAILHVYWEEFQKDPVGLMSRVAQPASKKIDQNKLKPEMDEKGNLTTAGFACSQCGQPLFVYKLEQVSEKGKAYTNYFGRCNVAEHEKLILLAQLKPEKDSDEAVTYSLGKFGQRALDFYSIHVTKESTHPVKPLAQIAGNRYASGPVGKALSDACMGTIASFLSKYQDIIIEHQKVVKGNQKRLESLRELAGKENLEYPSVTLPPQPHTKEGVDAYNEVIARVRMWVNLNLWQKLKLSRDDAKPLLRLKGFPSFPLVERQANEVDWWDMVCNVKKLINEKKEDGKVFWQNLAGYKRQEALRPYLSSEEDRKKGKKFARYQLGDLLLHLEKKHGEDWGKVYDEAWERIDKKVEGLSKHIKLEEERRSEDAQSKAALTDWLRAKASFVIEGLKEADKDEFCRCELKLQKWYGDLRGKPFAIEAENSILDISGFSKQYNCAFIWQKDGVKKLNLYLIINYFKGGKLRFKKIKPEAFEANRFYTVINKKSGEIVPMEVNFNFDDPNLIILPLAFGKRQGREFIWNDLLSLETGSLKLANGRVIEKTLYNRRTRQDEPALFVALTFERREVLDSSNIKPMNLIGVDRGENIPAVIALTDPEGCPLSRFKDSLGNPTHVLRIGESFKEKQRTIQAKKEVEQRRAGGYSRKYASKAKNLADDMVRNTARDLLYYAVTQDAMLIFENLSRGFGRQGKRTFMAERQYTRMEDWLTAKLAYEGLPSKTYLSKTLAQYTSKTCSNCGFTITSADYDRVLEKLKKTATGWMTTINGKELKVEGQITYYNRYKRQNVVKDLSVELDRLSEESVNNDISSWTKGRSGEALSLLKKRFSHRPVQEKFVCLNCGFETHADEQAALNIARSWLFLRSQEYKKYQTNKTTGNTDKRAFVETWQSFYRKKLKEVWKPAV

SEQ ID NO: 25984 - protein, 978 aa, synthetic construct
  REGION 1..978: note = engineered CasX variant
QEIKRINKIRRRLVKDSNTKKAGKTGPMKTLLVRVMTPDLRERLENLRKKPENIPQPISNTSRANLNKLLTDYTEMKKAILHVYWEEFQKDPVGLMSRVAQPASKKIDQNKLKPEMDEKGNLTTAGFACSQCGQPLFVYKLEQVSEKGKAYTNYFGRCNVAEHEKLILLAQLKPEKDSDEAVTYSLGKFGQRALDFYSIHVTKESTHPVKPLAQIAGNRYASGPVGKALSDACMGTIASFLSKYQDIIIEHQKVVKGNQKRLESLRELAGKENLEYPSVTLPPQPHTKEGVDAYNEVIARVRMWVNLNLWQKLKLSRDDAKPLLRLKGFPSFPLVERQANEVDWWDMVCNVKKLINEKKEDGKVFWQNLAGYKRQEALRPYLSSEEDRKKGKKFARYQLGDLLLHLEKKHGEDWGKVYDEAWERIDKKVEGLSKHIKLEEERRSEDAQSKAALTDWLRAKASFVIEGLKEADKDEFCRCELKLQKWYGDLRGKPFAIEAENSILDISGFSKQYNCAFIWQKDGVKKLNLYLIINYFKGGKLRFKKIKPEAFEANRFYTVINKKSGEIVPMEVNFNFDDPNLIILPLAFGKRQGREFIWNDLLSLETGSLKLANGRVIEKTLYNRRTRQDEPALFVALTFERREVLDSSNIKPMNLIGVDRGENIPAVIALTDPEGCPLSRFKDSLGNPTHLLRIGESYKEKQRTIQAKKEVEQRRAGGYSRKYASKAKNLADDMVRNTARDLLYYAVTQDAMLIFENLSRGFGRQGKRTFMAERQYTRMEDWLTAKLAYEGLPSKTYLSKTLAQYTSKTCSNCGFTITSADYDRVLEKLKKTATGWMTTINGKELKVEGQITYYNRYKRQNVVKDLSVELDRLSEESVNNDISSWTKGRSGEALSLLKKRFSHRPVQEKFVCLNCGFETHADEQAALNIARSWLFLRSQEYKKYQTNKTTGNTDKRAFVETWQSFYRKKLKEVWKPAV

SEQ ID NO: 25985 - protein, 978 aa, synthetic construct
  REGION 1..978: note = engineered CasX variant
QEIKRINKIRRRLVKDSNTKKAGKTGPMKTLLVRVMTPDLRERLENLRKKPENIPQPISNTSRANLNKLLTDYTEMKKAILHVYWEEFQKDPVGLMSRVAQPASKKIDQNKLKPEMDEKGNLTTAGFACSQCGQPLFVYKLEQVSEKGKAYTNYFGRCNVAEHEKLILLAQLKPEKDSDEAVTYSLGKFGQRALDFYSIHVTKESTHPVKPLAQIAGNRYASGPVGKALSDACMGTIASFLSKYQDIIIEHQKVVKGNQKRLESLRELAGKENLEYPSVTLPPQPHTKEGVDAYNEVIARVRMWVNLNLWQKLKLSRDDAKPLLRLKGFPSFPLVERQANEVDWWDMVCNVKKLINEKKEDGKVFWQNLAGYKRQEALRPYLSSEEDRKKGKKFARYQLGDLLLHLEKKHGEDWGKVYDEAWERIDKKVEGLSKHIKLEEERRSEDAQSKAALTDWLRAKASFVIEGLKEADKDEFCRCELKLQKWYGDLRGKPFAIEAENSILDISGFSKQYNCAFIWQKDGVKKLNLYLIINYFKGGKLRFKKIKPEAFEANRFYTVINKKSGEIVPMEVNFNFDDPNLIILPLAFGKRQGREFIWNDLLSLETGSLKLANGRVIEKTLYNRRTRQDEPALFVALTFERREVLDSSNIKPMNLIGVDRGENIPAVIALTDPEGCPLSRFKDSLGNPTHLLRIGESYKEKQRTIQAKKAVEQRRAGGYSRKYASKAKNLADDMVRNTARDLLYYAVTQDAMLIFENLSRGFGRQGKRTFMAERQYTRMEDWLTAKLAYEGLPSKTYLSKTLAQYTSKTCSNCGFTITSADYDRVLEKLKKTATGWMTTINGKELKVEGQITYYNRYKRQNVVKDLSVELDRLSEESVNNDISSWTKGRSGEALSLLKKRFSHRPVQEKFVCLNCGFETHADEQAALNIARSWLFLRSQEYKKYQTNKTTGNTDKRAFVETWQSFYRKKLKEVWKPAV

SEQ ID NO: 25986 - protein, 978 aa, synthetic construct
  REGION 1..978: note = engineered CasX variant
QEIKRINKIRRRLVKDSNTKKAGKTGPMKTLLVRVMTPDLRERLENLRKKPENIPQPISNTSRANLNKLLTDYTEMKKAILHVYWEEFQKDPVGLMSRVAQPASKKIDQNKLKPEMDEKGNLTTAGFACSQCGQPLFVYKLEQVSEKGKAYTNYFGRCNVAEHEKLILLAQLKPEKDSDEAVTYSLGKFGQRALDFYSIHVTKESTHPVKPLAQIAGNRYASGPVGKALSDACMGTIASFLSKYQDIIIEHQKVVKGNQKRLESLRELAGKENLEYPSVTLPPQPHTKEGVDAYNEVIARVRMWVNLNLWQKLKLSRDDAKPLLRLKGFPSFPLVERQANEVDWWDMVCNVKKLINEKKEDGKVFWQNLAGYKRQEALRPYLSSEEDRKKGKKFARYQLGDLLLHLEKKHGEDWGKVYDEAWERIDKKVEGLSKHIKLEEERRSEDAQSKAALTDWLRAKASFVIEGLKEADKDEFCRCELKLQKWYGDLRGKPFAIEAENSILDISGFSKQYNCAFIWQKDGVKKLNLYLIINYFKGGKLRFKKIKPEAFEANRFYTVINKKSGEIVPMEVNFNFDDPNLIILPLAFGKRQGREFIWNDLLSLETGSLKLANGRVIEKTLYNRRTRQDEPALFVALTFERREVLDSSNIKPMNLIGVDRGENIPAVIALTDPEGCPLSRFKDSLGNPTHLLRIGESYKEKQRCIQAKKEVEQRRAGGYSRKYASKAKNLADDMVRNTARDLLYYAVTQDAMLIFENLSRGFGRQGKRTFMAERQYTRMEDWLTAKLAYEGLPSKTYLSKTLAQYTSKTCSNCGFTITSADYDRVLEKLKKTATGWMTTINGKELKVEGQITYYNRYKRQNVVKDLSVELDRLSEESVNNDISSWTKGRSGEALSLLKKRFSHRPVQEKFVCLNCGFETHADEQAALNIARSWLFLRSQEYKKYQTNKTTGNTDKRAFVETWQSFYRKKLKEVWKPAV

SEQ ID NO: 25987 - protein, 978 aa, synthetic construct
  REGION 1..978: note = engineered CasX variant
QEIKRINKIRRRLVKDSNTKKAGKTGPMKTLLVRVMTPDLRERLENLRKKPENIPQPISNTSRANLNKLLTDYTEMKKAILHVYWEEFQKDPVGLMSRVAQPASKKIDQNKLKPEMDEKGNLTTAGFACSQCGQPLFVYKLEQVSEKGKAYTNYFGRCNVAEHEKLILLAQLKPEKDSDEAVTYSLGKFGQRALDFYSIHVTKESTHPVKPLAQIAGNRYASGPVGKALSDACMGTIASFLSKYQDIIIEHQKVVKGNQKRLESLRELAGKENLEYPSVTLPPQPHTKEGVDAYNEVIARVRMWVNLNLWQKLKLSRDDAKPLLRLKGFPSFPLVERQANEVDWWDMVCNVKKLINEKKEDGKVFWQNLAGYKRQEALRPYLSSEEDRKKGKKFARYQLGDLLLHLEKKHGEDWGKVYDEAWERIDKKVEGLSKHIKLEEERRSEDAQSKAALTDWLRAKASFVIEGLKEADKDEFCRCELKLQKWYGDLRGKPFAIEAENSILDISGFSKQYNCAFIWQKDGVKKLNLYLIINYFKGGKLRFKKIKPEAFEANRFYTVINKKSGEIVPMEVNFNFDDPNLIILPLAFGKRQGREFIWNDLLSLETGSLKLANGRVIEKTLYNRRTRQDEPALFVALTFERREVLDSSNIKPMNLIGVDRGENIPAVIALTDPEGCPLSRFKDSLGNPTHIYRIGESYKEKQRTIQAKKEVEQRRAGMYSRKYASKAKNLADDMVRNTARDLLYYAVTQDAMLIFENLSRGFGRQGKRTFMAERQYTRMEDWLTAKLAYEGLPSKTYLSKTLAQYTSKTCSNCGFTITSADYDRVLEKLKKTATGWMTTINGKELKVEGQITYYNRYKRQNVVKDLSVELDRLSEESVNNDISSWTKGRSGEALSLLKKRFSHRPVQEKFVCLNCGFETHADEQAALNIARSWLFLRSQEYKKYQTNKTTGNTDKRAFVETWQSFYRKKLKEVWKPAV

SEQ ID NO: 25988 - protein, 978 aa, synthetic construct
  REGION 1..978: note = engineered CasX variant
QEIKRINKIRRRLVKDSNTKKAGKTGPMKTLLVRVMTPDLRERLENLRKKPENIPQPISNTSRANLNKLLTDYTEMKKAILHVYWEEFQKDPVGLMSRVAQPASKKIDQNKLKPEMDEKGNLTTAGFACSQCGQPLFVYKLEQVSEKGKAYTNYFGRCNVAEHEKLILLAQLKPEKDSDEAVTYSLGKFGQRALDFYSIHVTKESTHPVKPLAQIAGNRYASGPVGKALSDACMGTIASFLSKYQDIIIEHQKVVKGNQKRLESLRELAGKENLEYPSVTLPPQPHTKEGVDAYNEVIARVRMWVNLNLWQKLKLSRDDAKPLLRLKGFPSFPLVERQANEVDWWDMVCNVKKLINEKKEDGKVFWQNLAGYKRQEALRPYLSSEEDRKKGKKFARYQLGDLLLHLEKKHGEDWGKVYDEAWERIDKKVEGLSKHIKLEEERRSEDAQSKAALTDWLRAKASFVIEGLKEADKDEFCRCELKLQKWYGDLRGKPFAIEAENSILDISGFSKQYNCAFIWQKDGVKKLNLYLIINYFKGGKLRFKKIKPEAFEANRFYTVINKKSGEIVPMEVNFNFDDPNLIILPLAFGKRQGREFIWNDLLSLETGSLKLANGRVIEKTLYNRRTRQDEPALFVALTFERREVLDSSNIKPMNLIGVDRGENIPAVIALTDPEGCPLSRFKDSLGNPTHIYRIGESYKEKQRTIQAKKEVEQRRAGGYSRKYASKAKNLADDMVRNTARDLLYYAVTQDAMLIFENLSRGFGRQGKRTFMAERQYTRMEDWLTAKLAYEGLPSKTYLSKTLAQYTSKTCSNCGFTITSADYDRVLEKLKKTATGWMTTINGKELKVEGQITYYNRYKRQNVVKDLSVELDRLSEESVNNDISSWTKGRSGEALSLLKKRFSHRPVQEKFVCLNCGFETHADEQAALNIARSWLFLRSQEYKKYQTNKTTGNTDKRAFVETWQSFYRKKLKEVWKPAV

SEQ ID NO: 25989 - protein, 978 aa, synthetic construct
  REGION 1..978: note = engineered CasX variant
QEIKRINKIRRRLVKDSNTKKAGKTGPMKTLLVRVMTPDLRERLENLRKKPENIPQPISNTSRANLNKLLTDYTEMKKAILHVYWEEFQKDPVGLMSRVAQPASKKIDQNKLKPEMDEKGNLTTAGFACSQCGQPLFVYKLEQVSEKGKAYTNYFGRCNVAEHEKLILLAQLKPEKDSDEAVTYSLGKFGQRALDFYSIHVTKESTHPVKPLAQIAGNRYASGPVGKALSDACMGTIASFLSKYQDIIIEHQKVVKGNQKRLESLRELAGKENLEYPSVTLPPQPHTKEGVDAYNEVIARVRMWVNLNLWQKLKLSRDDAKPLLRLKGFPSFPLVERQANEVDWWDMVCNVKKLINEKKEDGKVFWQNLAGYKRQEALRPYLSSEEDRKKGKKFARYQLGDLLLHLEKKHGEDWGKVYDEAWERIDKKVEGLSKHIKLEEERRSEDAQSKAALTDWLRAKASFVIEGLKEADKDEFCRCELKLQKWYGDLRGKPFAIEAENSILDISGFSKQYNCAFIWQKDGVKKLNLYLIINYFKGGKLRFKKIKPEAFEANRFYTVINKKSGEIVPMEVNFNFDDPNLIILPLAFGKRQGREFIWNDLLSLETGSLKLANGRVIEKTLYNRRTRQDEPALFVALTFERREVLDSSNIKPMNLIGVDRGENIPAVIALTDPEGCPLSRFKDSLGNPTHIYRIGESYKEKQRTIFAKKEVEQRRAGGYSRKYASKAKNLADDMVRNTARDLLYYAVTQDAMLIFENLSRGFGRQGKRTFMAERQYTRMEDWLTAKLAYEGLPSKTYLSKTLAQYTSKTCSNCGFTITSADYDRVLEKLKKTATGWMTTINGKELKVEGQITYYNRYKRQNVVKDLSVELDRLSEESVNNDISSWTKGRSGEALSLLKKRFSHRPVQEKFVCLNCGFETHADEQAALNIARSWLFLRSQEYKKYQTNKTTGNTDKRAFVETWQSFYRKKLKEVWKPAV

SEQ ID NO: 25990 - protein, 978 aa, synthetic construct
  REGION 1..978: note = engineered CasX variant
QEIKRINKIRRRLVKDSNTKKAGKTGPMKTLLVRVMTPDLRERLENLRKKPENIPQPISNTSRANLNKLLTDYTEMKKAILHVYWEEFQKDPVGLMSRVAQPASKKIDQNKLKPEMDEKGNLTTAGFACSQCGQPLFVYKLEQVSEKGKAYTNYFGRCNVAEHEKLILLAQLKPEKDSDEAVTYSLGKFGQRALDFYSIHVTKESTHPVKPLAQIAGNRYASGPVGKALSDACMGTIASFLSKYQDIIIEHQKVVKGNQKRLESLRELAGKENLEYPSVTLPPQPHTKEGVDAYNEVIARVRMWVNLNLWQKLKLSRDDAKPLLRLKGFPSFPLVERQANEVDWWDMVCNVKKLINEKKEDGKVFWQNLAGYKRQEALRPYLSSEEDRKKGKKFARYQLGDLLLHLEKKHGEDWGKVYDEAWERIDKKVEGLSKHIKLEEERRSEDAQSKAALTDWLRAKASFVIEGLKEADKDEFCRCELKLQKWYGDLRGKPFAIEAENSILDISGFSKQYNCAFIWQKDGVKKLNLYLIINYFKGGKLRFKKIKPEAFEANRFYTVINKKSGEIVPMEVNFNFDDPNLIILPLAFGKRQGREFIWNDLLSLETGSLKLANGRVIEKTLYNRRTRQDEPALFVALTFERREVLDSSNIKPMNLIGVDRGENIPAVIALTDPEGCPLSRFKDSLGNPTHIYRIGESFKEKQRTIQAKKEVEQRRAGGYSRKYASKAKNLADDMVRNTARDLLYYAVTQDAMLIFENLSRGFGRQGKRTFMAERQYTRMEDWLTAKLAYEGLPSKTYLSKTLAQYTSKTCSNCGFTITSADYDRVLEKLKKTATGWMTTINGKELKVEGQITYYNRYKRQNVVKDLSVELDRLSEESVNNDISSWTKGRSGEALSLLKKRFSHRPVQEKFVCLNCGFETHADEQAALNIARSWLFLRSQEYKKYQTNKTTGNTDKRAFVETWQSFYRKKLKEVWKPAV

SEQ ID NO: 25991 - protein, 978 aa, synthetic construct
  REGION 1..978: note = engineered CasX variant
QEIKRINKIRRRLVKDSNTKKAGKTGPMKTLLVRVMTPDLRERLENLRKKPENIPQPISNTSRANLNKLLTDYTEMKKAILHVYWEEFQKDPVGLMSRVAQPASKKIDQNKLKPEMDEKGNLTTAGFACSQCGQPLFVYKLEQVSEKGKAYTNYFGRCNVAEHEKLILLAQLKPEKDSDEAVTYSLGKFGQRALDFYSIHVTKESTHPVKPLAQIAGNRYASGPVGKALSDACMGTIASFLSKYQDIIIEHQKVVKGNQKRLESLRELAGKENLEYPSVTLPPQPHTKEGVDAYNEVIARVRMWVNLNLWQKLKLSRDDAKPLLRLKGFPSFPLVERQANEVDWWDMVCNVKKLINEKKEDGKVFWQNLAGYKRQEALRPYLSSEEDRKKGKKFARYQLGDLLLHLEKKHGEDWGKVYDEAWERIDKKVEGLSKHIKLEEERRSEDAQSKAALTDWLRAKASFVIEGLKEADKDEFCRCELKLQKWYGDLRGKPFAIEAENSILDISGFSKQYNCAFIWQKDGVKKLNLYLIINYFKGGKLRFKKIKPEAFEANRFYTVINKKSGEIVPMEVNFNFDDPNLIILPLAFGKRQGREFIWNDLLSLETGSLKLANGRVIEKTLYNRRTRQDEPALFVALTFERREVLDSSNIKPMNLIGVDRGENIPAVIALTDPEGCPLSRFKDSLGNPTHIWRIGESYKEKQRTIQAKKEVEQRRAGGYSRKYASKAKNLADDMVRNTARDLLYYAVTQDAMLIFENLSRGFGRQGKRTFMAERQYTRMEDWLTAKLAYEGLPSKTYLSKTLAQYTSKTCSNCGFTITSADYDRVLEKLKKTATGWMTTINGKELKVEGQITYYNRYKRQNVVKDLSVELDRLSEESVNNDISSWTKGRSGEALSLLKKRFSHRPVQEKFVCLNCGFETHADEQAALNIARSWLFLRSQEYKKYQTNKTTGNTDKRAFVETWQSFYRKKLKEVWKPAV

SEQ ID NO: 25992 - protein, 978 aa, synthetic construct
  REGION 1..978: note = engineered CasX variant
QEIKRINKIRRRLVKDSNTKKAGKTGPMKTLLVRVMTPDLRERLENLRKKPENIPQPISNTSRANLNKLLTDYTEMKKAILHVYWEEFQKDPVGLMSRVAQPASKKIDQNKLKPEMDEKGNLTTAGFACSQCGQPLFVYKLEQVSEKGKAYTNYFGRCNVAEHEKLILLAQLKPEKDSDEAVTYSLGKFGQRALDFYSIHVTKESTHPVKPLAQIAGNRYASGPVGKALSDACMGTIASFLSKYQDIIIEHQKVVKGNQKRLESLRELAGKENLEYPSVTLPPQPHTKEGVDAYNEVIARVRMWVNLNLWQKLKLSRDDAKPLLRLKGFPSFPLVERQANEVDWWDMVCNVKKLINEKKEDGKVFWQNLAGYKRQEALRPYLSSEEDRKKGKKFARYQLGDLLLHLEKKHGEDWGKVYDEAWERIDKKVEGLSKHIKLEEERRSEDAQSKAALTDWLRAKASFVIEGLKEADKDEFCRCELKLQKWYGDLRGKPFAIEAENSILDISGFSKQYNCAFIWQKDGVKKLNLYLIINYFKGGKLRFKKIKPEAFEANRFYTVINKKSGEIVPMEVNFNFDDPNLIILPLAFGKRQGREFIWNDLLSLETGSLKLANGRVIEKTLYNRRTRQDEPALFVALTFERREVLDSSNIKPMNLIGVDRGENIPAVIALTDPEGCPLSRFKDSLGNPTHIWRIGESYKEKQRTIMAKKEVEQRRAGGYSRKYASKAKNLADDMVRNTARDLLYYAVTQDAMLIFENLSRGFGRQGKRTFMAERQYTRMEDWLTAKLAYEGLPSKTYLSKTLAQYTSKTCSNCGFTITSADYDRVLEKLKKTATGWMTTINGKELKVEGQITYYNRYKRQNVVKDLSVELDRLSEESVNNDISSWTKGRSGEALSLLKKRFSHRPVQEKFVCLNCGFETHADEQAALNIARSWLFLRSQEYKKYQTNKTTGNTDKRAFVETWQSFYRKKLKEVWKPAV

SEQ ID NO: 25993 - protein, 978 aa, synthetic construct
  REGION 1..978: note = engineered CasX variant
QEIKRINKIRRRLVKDSNTKKAGKTGPMKTLLVRVMTPDLRERLENLRKKPENIPQPISNTSRANLNKLLTDYTEMKKAILHVYWEEFQKDPVGLMSRVAQPASKKIDQNKLKPEMDEKGNLTTAGFACSQCGQPLFVYKLEQVSEKGKAYTNYFGRCNVAEHEKLILLAQLKPEKDSDEAVTYSLGKFGQRALDFYSIHVTKESTHPVKPLAQIAGNRYASGPVGKALSDACMGTIASFLSKYQDIIIEHQKVVKGNQKRLESLRELAGKENLEYPSVTLPPQPHTKEGVDAYNEVIARVRMWVNLNLWQKLKLSRDDAKPLLRLKGFPSFPLVERQANEVDWWDMVCNVKKLINEKKEDGKVFWQNLAGYKRQEALRPYLSSEEDRKKGKKFARYQLGDLLLHLEKKHGEDWGKVYDEAWERIDKKVEGLSKHIKLEEERRSEDAQSKAALTDWLRAKASFVIEGLKEADKDEFCRCELKLQKWYGDLRGKPFAIEAENSILDISGFSKQYNCAFIWQKDGVKKLNLYLIINYFKGGKLRFKKIKPEAFEANRFYTVINKKSGEIVPMEVNFNFDDPNLIILPLAFGKRQGREFIWNDLLSLETGSLKLANGRVIEKTLYNRRTRQDEPALFVALTFERREVLDSSNIKPMNLIGVDRGENIPAVIALTDPEGCPLSRFKDSLGNPTHIWRIGESYKEKFRTIQAKKEVEQRRAGGYSRKYASKAKNLADDMVRNTARDLLYYAVTQDAMLIFENLSRGFGRQGKRTFMAERQYTRMEDWLTAKLAYEGLPSKTYLSKTLAQYTSKTCSNCGFTITSADYDRVLEKLKKTATGWMTTINGKELKVEGQITYYNRYKRQNVVKDLSVELDRLSEESVNNDISSWTKGRSGEALSLLKKRFSHRPVQEKFVCLNCGFETHADEQAALNIARSWLFLRSQEYKKYQTNKTTGNTDKRAFVETWQSFYRKKLKEVWKPAV

SEQ ID NO: 25994 - protein, 978 aa, synthetic construct
  REGION 1..978: note = engineered CasX variant
QEIKRINKIRRRLVKDSNTKKAGKTGPMKTLLVRVMTPDLRERLENLRKKPENIPQPISNTSRANLNKLLTDYTEMKKAILHVYWEEFQKDPVGLMSRVAQPASKKIDQNKLKPEMDEKGNLTTAGFACSQCGQPLFVYKLEQVSEKGKAYTNYFGRCNVAEHEKLILLAQLKPEKDSDEAVTYSLGKFGQRALDFYSIHVTKESTHPVKPLAQIAGNRYASGPVGKALSDACMGTIASFLSKYQDIIIEHQKVVKGNQKRLESLRELAGKENLEYPSVTLPPQPHTKEGVDAYNEVIARVRMWVNLNLWQKLKLSRDDAKPLLRLKGFPSFPLVERQANEVDWWDMVCNVKKLINEKKEDGKVFWQNLAGYKRQEALRPYLSSEEDRKKGKKFARYQLGDLLLHLEKKHGEDWGKVYDEAWERIDKKVEGLSKHIKLEEERRSEDAQSKAALTDWLRAKASFVIEGLKEADKDEFCRCELKLQKWYGDLRGKPFAIEAENSILDISGFSKQYNCAFIWQKDGVKKLNLYLIINYFKGGKLRFKKIKPEAFEANRFYTVINKKSGEIVPMEVNFNFDDPNLIILPLAFGKRQGREFIWNDLLSLETGSLKLANGRVIEKTLYNRRTRQDEPALFVALTFERREVLDSSNIKPMNLIGVDRGENIPAVIALTDPEGCPLSRFKDSLGNPTHIVRIGESYKEKQRTIQFKKEVEQYRAGGYSRKYASKAKNLADDMVRNTARDLLYYAVTQDAMLIFENLSRGFGRQGKRTFMAERQYTRMEDWLTAKLAYEGLPSKTYLSKTLAQYTSKTCSNCGFTITSADYDRVLEKLKKTATGWMTTINGKELKVEGQITYYNRYKRQNVVKDLSVELDRLSEESVNNDISSWTKGRSGEALSLLKKRFSHRPVQEKFVCLNCGFETHADEQAALNIARSWLFLRSQEYKKYQTNKTTGNTDKRAFVETWQSFYRKKLKEVWKPAV

SEQ ID NO: 25995 - protein, 978 aa, synthetic construct
  REGION 1..978: note = engineered CasX variant
QEIKRINKIRRRLVKDSNTKKAGKTGPMKTLLVRVMTPDLRERLENLRKKPENIPQPISNTSRANLNKLLTDYTEMKKAILHVYWEEFQKDPVGLMSRVAQPASKKIDQNKLKPEMDEKGNLTTAGFACSQCGQPLFVYKLEQVSEKGKAYTNYFGRCNVAEHEKLILLAQLKPEKDSDEAVTYSLGKFGQRALDFYSIHVTKESTHPVKPLAQIAGNRYASGPVGKALSDACMGTIASFLSKYQDIIIEHQKVVKGNQKRLESLRELAGKENLEYPSVTLPPQPHTKEGVDAYNEVIARVRMWVNLNLWQKLKLSRDDAKPLLRLKGFPSFPLVERQANEVDWWDMVCNVKKLINEKKEDGKVFWQNLAGYKRQEALRPYLSSEEDRKKGKKFARYQLGDLLLHLEKKHGEDWGKVYDEAWERIDKKVEGLSKHIKLEEERRSEDAQSKAALTDWLRAKASFVIEGLKEADKDEFCRCELKLQKWYGDLRGKPFAIEAENSILDISGFSKQYNCAFIWQKDGVKKLNLYLIINYFKGGKLRFKKIKPEAFEANRFYTVINKKSGEIVPMEVNFNFDDPNLIILPLAFGKRQGREFIWNDLLSLETGSLKLANGRVIEKTLYNRRTRQDEPALFVALTFERREVLDSSNIKPMNLIGVDRGENIPAVIALTDPEGCPLSRFKDSLGNPTHIVRIGESYKEKQRTIQFKKEVEQRRAGGYSRKYASKAKNLADDMVRNTARDLLYYAVTQDAMLIFENLSRGFGRQGKRTFMAERQYTRMEDWLTAKLAYEGLPSKTYLSKTLAQYTSKTCSNCGFTITSADYDRVLEKLKKTATGWMTTINGKELKVEGQITYYNRYKRQNVVKDLSVELDRLSEESVNNDISSWTKGRSGEALSLLKKRFSHRPVQEKFVCLNCGFETHADEQAALNIARSWLFLRSQEYKKYQTNKTTGNTDKRAFVETWQSFYRKKLKEVWKPAV

SEQ ID NO: 25996 - protein, 978 aa, synthetic construct
  REGION 1..978: note = engineered CasX variant
QEIKRINKIRRRLVKDSNTKKAGKTGPMKTLLVRVMTPDLRERLENLRKKPENIPQPISNTSRANLNKLLTDYTEMKKAILHVYWEEFQKDPVGLMSRVAQPASKKIDQNKLKPEMDEKGNLTTAGFACSQCGQPLFVYKLEQVSEKGKAYTNYFGRCNVAEHEKLILLAQLKPEKDSDEAVTYSLGKFGQRALDFYSIHVTKESTHPVKPLAQIAGNRYASGPVGKALSDACMGTIASFLSKYQDIIIEHQKVVKGNQKRLESLRELAGKENLEYPSVTLPPQPHTKEGVDAYNEVIARVRMWVNLNLWQKLKLSRDDAKPLLRLKGFPSFPLVERQANEVDWWDMVCNVKKLINEKKEDGKVFWQNLAGYKRQEALRPYLSSEEDRKKGKKFARYQLGDLLLHLEKKHGEDWGKVYDEAWERIDKKVEGLSKHIKLEEERRSEDAQSKAALTDWLRAKASFVIEGLKEADKDEFCRCELKLQKWYGDLRGKPFAIEAENSILDISGFSKQYNCAFIWQKDGVKKLNLYLIINYFKGGKLRFKKIKPEAFEANRFYTVINKKSGEIVPMEVNFNFDDPNLIILPLAFGKRQGREFIWNDLLSLETGSLKLANGRVIEKTLYNRRTRQDEPALFVALTFERREVLDSSNIKPMNLIGVDRGENIPAVIALTDPEGCPLSRFKDSLGNPTHIVRIGESYKEKQRTIQAKKEVEQYRAGGYSRKYASKAKNLADDMVRNTARDLLYYAVTQDAMLIFENLSRGFGRQGKRTFMAERQYTRMEDWLTAKLAYEGLPSKTYLSKTLAQYTSKTCSNCGFTITSADYDRVLEKLKKTATGWMTTINGKELKVEGQITYYNRYKRQNVVKDLSVELDRLSEESVNNDISSWTKGRSGEALSLLKKRFSHRPVQEKFVCLNCGFETHADEQAALNIARSWLFLRSQEYKKYQTNKTTGNTDKRAFVETWQSFYRKKLKEVWKPAV

SEQ ID NO: 25997 - protein, 978 aa, synthetic construct
  REGION 1..978: note = engineered CasX variant
QEIKRINKIRRRLVKDSNTKKAGKTGPMKTLLVRVMTPDLRERLENLRKKPENIPQPISNTSRANLNKLLTDYTEMKKAILHVYWEEFQKDPVGLMSRVAQPASKKIDQNKLKPEMDEKGNLTTAGFACSQCGQPLFVYKLEQVSEKGKAYTNYFGRCNVAEHEKLILLAQLKPEKDSDEAVTYSLGKFGQRALDFYSIHVTKESTHPVKPLAQIAGNRYASGPVGKALSDACMGTIASFLSKYQDIIIEHQKVVKGNQKRLESLRELAGKENLEYPSVTLPPQPHTKEGVDAYNEVIARVRMWVNLNLWQKLKLSRDDAKPLLRLKGFPSFPLVERQANEVDWWDMVCNVKKLINEKKEDGKVFWQNLAGYKRQEALRPYLSSEEDRKKGKKFARYQLGDLLLHLEKKHGEDWGKVYDEAWERIDKKVEGLSKHIKLEEERRSEDAQSKAALTDWLRAKASFVIEGLKEADKDEFCRCELKLQKWYGDLRGKPFAIEAENSILDISGFSKQYNCAFIWQKDGVKKLNLYLIINYFKGGKLRFKKIKPEAFEANRFYTVINKKSGEIVPMEVNFNFDDPNLIILPLAFGKRQGREFIWNDLLSLETGSLKLANGRVIEKTLYNRRTRQDEPALFVALTFERREVLDSSNIKPMNLIGVDRGENIPAVIALTDPEGCPLSRFKDSLGNPTHIVRIGESYKEKQRTIQAKKEVEQRRAGGYSRKYASKAKNLADDMVRNTARDLLYYAVTQDAMLIFENLSRGFGRQGKRTFMAERQYTRMEDWLTAKLAYEGLPSKTYLSKTLAQYTSKTCSNCGFTITSADYDRVLEKLKKTATGWMTTINGKELKVEGQITYYNRYKRQNVVKDLSVELDRLSEESVNNDISSWTKGRSGEALSLLKKRFSHRPVQEKFVCLNCGFETHADEQAALNIARSWLFLRSQEYKKYQTNKTTGNTDKRAFVETWQSFYRKKLKEVWKPAV

SEQ ID NO: 25998 - protein, 978 aa, synthetic construct
  REGION 1..978: note = engineered CasX variant
QEIKRINKIRRRLVKDSNTKKAGKTGPMKTLLVRVMTPDLRERLENLRKKPENIPQPISNTSRANLNKLLTDYTEMKKAILHVYWEEFQKDPVGLMSRVAQPASKKIDQNKLKPEMDEKGNLTTAGFACSQCGQPLFVYKLEQVSEKGKAYTNYFGRCNVAEHEKLILLAQLKPEKDSDEAVTYSLGKFGQRALDFYSIHVTKESTHPVKPLAQIAGNRYASGPVGKALSDACMGTIASFLSKYQDIIIEHQKVVKGNQKRLESLRELAGKENLEYPSVTLPPQPHTKEGVDAYNEVIARVRMWVNLNLWQKLKLSRDDAKPLLRLKGFPSFPLVERQANEVDWWDMVCNVKKLINEKKEDGKVFWQNLAGYKRQEALRPYLSSEEDRKKGKKFARYQLGDLLLHLEKKHGEDWGKVYDEAWERIDKKVEGLSKHIKLEEERRSEDAQSKAALTDWLRAKASFVIEGLKEADKDEFCRCELKLQKWYGDLRGKPFAIEAENSILDISGFSKQYNCAFIWQKDGVKKLNLYLIINYFKGGKLRFKKIKPEAFEANRFYTVINKKSGEIVPMEVNFNFDDPNLIILPLAFGKRQGREFIWNDLLSLETGSLKLANGRVIEKTLYNRRTRQDEPALFVALTFERREVLDSSNIKPMNLIGVDRGENIPAVIALTDPEGCPLSRFKDSLGNPTHIVRIGESYKEKQRTIQAFKEVEQRRAGGYSRKYASKAKNLADDMVRNTARDLLYYAVTQDAMLIFENLSRGFGRQGKRTFMAERQYTRMEDWLTAKLAYEGLPSKTYLSKTLAQYTSKTCSNCGFTITSADYDRVLEKLKKTATGWMTTINGKELKVEGQITYYNRYKRQNVVKDLSVELDRLSEESVNNDISSWTKGRSGEALSLLKKRFSHRPVQEKFVCLNCGFETHADEQAALNIARSWLFLRSQEYKKYQTNKTTGNTDKRAFVETWQSFYRKKLKEVWKPAV

SEQ ID NO: 25999 - protein, 978 aa, synthetic construct
  REGION 1..978: note = engineered CasX variant
QEIKRINKIRRRLVKDSNTKKAGKTGPMKTLLVRVMTPDLRERLENLRKKPENIPQPISNTSRANLNKLLTDYTEMKKAILHVYWEEFQKDPVGLMSRVAQPASKKIDQNKLKPEMDEKGNLTTAGFACSQCGQPLFVYKLEQVSEKGKAYTNYFGRCNVAEHEKLILLAQLKPEKDSDEAVTYSLGKFGQRALDFYSIHVTKESTHPVKPLAQIAGNRYASGPVGKALSDACMGTIASFLSKYQDIIIEHQKVVKGNQKRLESLRELAGKENLEYPSVTLPPQPHTKEGVDAYNEVIARVRMWVNLNLWQKLKLSRDDAKPLLRLKGFPSFPLVERQANEVDWWDMVCNVKKLINEKKEDGKVFWQNLAGYKRQEALRPYLSSEEDRKKGKKFARYQLGDLLLHLEKKHGEDWGKVYDEAWERIDKKVEGLSKHIKLEEERRSEDAQSKAALTDWLRAKASFVIEGLKEADKDEFCRCELKLQKWYGDLRGKPFAIEAENSILDISGFSKQYNCAFIWQKDGVKKLNLYLIINYFKGGKLRFKKIKPEAFEANRFYTVINKKSGEIVPMEVNFNFDDPNLIILPLAFGKRQGREFIWNDLLSLETGSLKLANGRVIEKTLYNRRTRQDEPALFVALTFERREVLDSSNIKPMNLIGVDRGENIPAVIALTDPEGCPLSRFKDSLGNPTHITRIGESYKEKQRTIQATKEVEQRRAGGYSRKYASKAKNLADDMVRNTARDLLYYAVTQDAMLIFENLSRGFGRQGKRTFMAERQYTRMEDWLTAKLAYEGLPSKTYLSKTLAQYTSKTCSNCGFTITSADYDRVLEKLKKTATGWMTTINGKELKVEGQITYYNRYKRQNVVKDLSVELDRLSEESVNNDISSWTKGRSGEALSLLKKRFSHRPVQEKFVCLNCGFETHADEQAALNIARSWLFLRSQEYKKYQTNKTTGNTDKRAFVETWQSFYRKKLKEVWKPAV

SEQ ID NO: 26000 - protein, 978 aa, synthetic construct
  REGION 1..978: note = engineered CasX variant
QEIKRINKIRRRLVKDSNTKKAGKTGPMKTLLVRVMTPDLRERLENLRKKPENIPQPISNTSRANLNKLLTDYTEMKKAILHVYWEEFQKDPVGLMSRVAQPASKKIDQNKLKPEMDEKGNLTTAGFACSQCGQPLFVYKLEQVSEKGKAYTNYFGRCNVAEHEKLILLAQLKPEKDSDEAVTYSLGKFGQRALDFYSIHVTKESTHPVKPLAQIAGNRYASGPVGKALSDACMGTIASFLSKYQDIIIEHQKVVKGNQKRLESLRELAGKENLEYPSVTLPPQPHTKEGVDAYNEVIARVRMWVNLNLWQKLKLSRDDAKPLLRLKGFPSFPLVERQANEVDWWDMVCNVKKLINEKKEDGKVFWQNLAGYKRQEALRPYLSSEEDRKKGKKFARYQLGDLLLHLEKKHGEDWGKVYDEAWERIDKKVEGLSKHIKLEEERRSEDAQSKAALTDWLRAKASFVIEGLKEADKDEFCRCELKLQKWYGDLRGKPFAIEAENSILDISGFSKQYNCAFIWQKDGVKKLNLYLIINYFKGGKLRFKKIKPEAFEANRFYTVINKKSGEIVPMEVNFNFDDPNLIILPLAFGKRQGREFIWNDLLSLETGSLKLANGRVIEKTLYNRRTRQDEPALFVALTFERREVLDSSNIKPMNLIGVDRGENIPAVIALTDPEGCPLSRFKDSLGNPTHIQRIGESYKEKQRTIQAKKEVEQRRAGGYSRKYASKAKNLADDMVRNTARDLLYYAVTQDAMLIFENLSRGFGRQGKRTFMAERQYTRMEDWLTAKLAYEGLPSKTYLSKTLAQYTSKTCSNCGFTITSADYDRVLEKLKKTATGWMTTINGKELKVEGQITYYNRYKRQNVVKDLSVELDRLSEESVNNDISSWTKGRSGEALSLLKKRFSHRPVQEKFVCLNCGFETHADEQAALNIARSWLFLRSQEYKKYQTNKTTGNTDKRAFVETWQSFYRKKLKEVWKPAV

SEQ ID NO: 26001 - protein, 978 aa, synthetic construct
  REGION 1..978: note = engineered CasX variant
QEIKRINKIRRRLVKDSNTKKAGKTGPMKTLLVRVMTPDLRERLENLRKKPENIPQPISNTSRANLNKLLTDYTEMKKAILHVYWEEFQKDPVGLMSRVAQPASKKIDQNKLKPEMDEKGNLTTAGFACSQCGQPLFVYKLEQVSEKGKAYTNYFGRCNVAEHEKLILLAQLKPEKDSDEAVTYSLGKFGQRALDFYSIHVTKESTHPVKPLAQIAGNRYASGPVGKALSDACMGTIASFLSKYQDIIIEHQKVVKGNQKRLESLRELAGKENLEYPSVTLPPQPHTKEGVDAYNEVIARVRMWVNLNLWQKLKLSRDDAKPLLRLKGFPSFPLVERQANEVDWWDMVCNVKKLINEKKEDGKVFWQNLAGYKRQEALRPYLSSEEDRKKGKKFARYQLGDLLLHLEKKHGEDWGKVYDEAWERIDKKVEGLSKHIKLEEERRSEDAQSKAALTDWLRAKASFVIEGLKEADKDEFCRCELKLQKWYGDLRGKPFAIEAENSILDISGFSKQYNCAFIWQKDGVKKLNLYLIINYFKGGKLRFKKIKPEAFEANRFYTVINKKSGEIVPMEVNFNFDDPNLIILPLAFGKRQGREFIWNDLLSLETGSLKLANGRVIEKTLYNRRTRQDEPALFVALTFERREVLDSSNIKPMNLIGVDRGENIPAVIALTDPEGCPLSRFKDSLGNPTHIMRIGESYKENQRTIQAKKEVEQRRAGGYSRKYASKAKNLADDMVRNTARDLLYYAVTQDAMLIFENLSRGFGRQGKRTFMAERQYTRMEDWLTAKLAYEGLPSKTYLSKTLAQYTSKTCSNCGFTITSADYDRVLEKLKKTATGWMTTINGKELKVEGQITYYNRYKRQNVVKDLSVELDRLSEESVNNDISSWTKGRSGEALSLLKKRFSHRPVQEKFVCLNCGFETHADEQAALNIARSWLFLRSQEYKKYQTNKTTGNTDKRAFVETWQSFYRKKLKEVWKPAV

SEQ ID NO: 26002 - protein, 978 aa, synthetic construct
  REGION 1..978: note = engineered CasX variant
QEIKRINKIRRRLVKDSNTKKAGKTGPMKTLLVRVMTPDLRERLENLRKKPENIPQPISNTSRANLNKLLTDYTEMKKAILHVYWEEFQKDPVGLMSRVAQPASKKIDQNKLKPEMDEKGNLTTAGFACSQCGQPLFVYKLEQVSEKGKAYTNYFGRCNVAEHEKLILLAQLKPEKDSDEAVTYSLGKFGQRALDFYSIHVTKESTHPVKPLAQIAGNRYASGPVGKALSDACMGTIASFLSKYQDIIIEHQKVVKGNQKRLESLRELAGKENLEYPSVTLPPQPHTKEGVDAYNEVIARVRMWVNLNLWQKLKLSRDDAKPLLRLKGFPSFPLVERQANEVDWWDMVCNVKKLINEKKEDGKVFWQNLAGYKRQEALRPYLSSEEDRKKGKKFARYQLGDLLLHLEKKHGEDWGKVYDEAWERIDKKVEGLSKHIKLEEERRSEDAQSKAALTDWLRAKASFVIEGLKEADKDEFCRCELKLQKWYGDLRGKPFAIEAENSILDISGFSKQYNCAFIWQKDGVKKLNLYLIINYFKGGKLRFKKIKPEAFEANRFYTVINKKSGEIVPMEVNFNFDDPNLIILPLAFGKRQGREFIWNDLLSLETGSLKLANGRVIEKTLYNRRTRQDEPALFVALTFERREVLDSSNIKPMNLIGVDRGENIPAVIALTDPEGCPLSRFKDSLGNPTHIMRIGESYKEKQVTIQAKKEVEQRRAGGYSRKYASKAKNLADDMVRNTARDLLYYAVTQDAMLIFENLSRGFGRQGKRTFMAERQYTRMEDWLTAKLAYEGLPSKTYLSKTLAQYTSKTCSNCGFTITSADYDRVLEKLKKTATGWMTTINGKELKVEGQITYYNRYKRQNVVKDLSVELDRLSEESVNNDISSWTKGRSGEALSLLKKRFSHRPVQEKFVCLNCGFETHADEQAALNIARSWLFLRSQEYKKYQTNKTTGNTDKRAFVETWQSFYRKKLKEVWKPAV

SEQ ID NO: 26003 - protein, 978 aa, synthetic construct
  REGION 1..978: note = engineered CasX variant
QEIKRINKIRRRLVKDSNTKKAGKTGPMKTLLVRVMTPDLRERLENLRKKPENIPQPISNTSRANLNKLLTDYTEMKKAILHVYWEEFQKDPVGLMSRVAQPASKKIDQNKLKPEMDEKGNLTTAGFACSQCGQPLFVYKLEQVSEKGKAYTNYFGRCNVAEHEKLILLAQLKPEKDSDEAVTYSLGKFGQRALDFYSIHVTKESTHPVKPLAQIAGNRYASGPVGKALSDACMGTIASFLSKYQDIIIEHQKVVKGNQKRLESLRELAGKENLEYPSVTLPPQPHTKEGVDAYNEVIARVRMWVNLNLWQKLKLSRDDAKPLLRLKGFPSFPLVERQANEVDWWDMVCNVKKLINEKKEDGKVFWQNLAGYKRQEALRPYLSSEEDRKKGKKFARYQLGDLLLHLEKKHGEDWGKVYDEAWERIDKKVEGLSKHIKLEEERRSEDAQSKAALTDWLRAKASFVIEGLKEADKDEFCRCELKLQKWYGDLRGKPFAIEAENSILDISGFSKQYNCAFIWQKDGVKKLNLYLIINYFKGGKLRFKKIKPEAFEANRFYTVINKKSGEIVPMEVNFNFDDPNLIILPLAFGKRQGREFIWNDLLSLETGSLKLANGRVIEKTLYNRRTRQDEPALFVALTFERREVLDSSNIKPMNLIGVDRGENIPAVIALTDPEGCPLSRFKDSLGNPTHIMRIGESYKEKQRTIQAKKEVEQRRAGGYSRKYASKAKNLADDMVRNTARDLLYYAVTQDAMLIFENLSRGFGRQGKRTFMAERQYTRMEDWLTAKLAYEGLPSKTYLSKTLAQYTSKTCSNCGFTITSADYDRVLEKLKKTATGWMTTINGKELKVEGQITYYNRYKRQNVVKDLSVELDRLSEESVNNDISSWTKGRSGEALSLLKKRFSHRPVQEKFVCLNCGFETHADEQAALNIARSWLFLRSQEYKKYQTNKTTGNTDKRAFVETWQSFYRKKLKEVWKPAV

SEQ ID NO: 26004 - protein, 978 aa, synthetic construct
  REGION 1..978: note = engineered CasX variant
QEIKRINKIRRRLVKDSNTKKAGKTGPMKTLLVRVMTPDLRERLENLRKKPENIPQPISNTSRANLNKLLTDYTEMKKAILHVYWEEFQKDPVGLMSRVAQPASKKIDQNKLKPEMDEKGNLTTAGFACSQCGQPLFVYKLEQVSEKGKAYTNYFGRCNVAEHEKLILLAQLKPEKDSDEAVTYSLGKFGQRALDFYSIHVTKESTHPVKPLAQIAGNRYASGPVGKALSDACMGTIASFLSKYQDIIIEHQKVVKGNQKRLESLRELAGKENLEYPSVTLPPQPHTKEGVDAYNEVIARVRMWVNLNLWQKLKLSRDDAKPLLRLKGFPSFPLVERQANEVDWWDMVCNVKKLINEKKEDGKVFWQNLAGYKRQEALRPYLSSEEDRKKGKKFARYQLGDLLLHLEKKHGEDWGKVYDEAWERIDKKVEGLSKHIKLEEERRSEDAQSKAALTDWLRAKASFVIEGLKEADKDEFCRCELKLQKWYGDLRGKPFAIEAENSILDISGFSKQYNCAFIWQKDGVKKLNLYLIINYFKGGKLRFKKIKPEAFEANRFYTVINKKSGEIVPMEVNFNFDDPNLIILPLAFGKRQGREFIWNDLLSLETGSLKLANGRVIEKTLYNRRTRQDEPALFVALTFERREVLDSSNIKPMNLIGVDRGENIPAVIALTDPEGCPLSRFKDSLGNPTHILYIGESYKEKQRTIQAKKEVEQRRAGGYSRKYASKAKNLADDMVRNTARDLLYYAVTQDAMLIFENLSRGFGRQGKRTFMAERQYTRMEDWLTAKLAYEGLPSKTYLSKTLAQYTSKTCSNCGFTITSADYDRVLEKLKKTATGWMTTINGKELKVEGQITYYNRYKRQNVVKDLSVELDRLSEESVNNDISSWTKGRSGEALSLLKKRFSHRPVQEKFVCLNCGFETHADEQAALNIARSWLFLRSQEYKKYQTNKTTGNTDKRAFVETWQSFYRKKLKEVWKPAV

SEQ ID NO: 26005 - protein, 978 aa, synthetic construct
  REGION 1..978: note = engineered CasX variant
QEIKRINKIRRRLVKDSNTKKAGKTGPMKTLLVRVMTPDLRERLENLRKKPENIPQPISNTSRANLNKLLTDYTEMKKAILHVYWEEFQKDPVGLMSRVAQPASKKIDQNKLKPEMDEKGNLTTAGFACSQCGQPLFVYKLEQVSEKGKAYTNYFGRCNVAEHEKLILLAQLKPEKDSDEAVTYSLGKFGQRALDFYSIHVTKESTHPVKPLAQIAGNRYASGPVGKALSDACMGTIASFLSKYQDIIIEHQKVVKGNQKRLESLRELAGKENLEYPSVTLPPQPHTKEGVDAYNEVIARVRMWVNLNLWQKLKLSRDDAKPLLRLKGFPSFPLVERQANEVDWWDMVCNVKKLINEKKEDGKVFWQNLAGYKRQEALRPYLSSEEDRKKGKKFARYQLGDLLLHLEKKHGEDWGKVYDEAWERIDKKVEGLSKHIKLEEERRSEDAQSKAALTDWLRAKASFVIEGLKEADKDEFCRCELKLQKWYGDLRGKPFAIEAENSILDISGFSKQYNCAFIWQKDGVKKLNLYLIINYFKGGKLRFKKIKPEAFEANRFYTVINKKSGEIVPMEVNFNFDDPNLIILPLAFGKRQGREFIWNDLLSLETGSLKLANGRVIEKTLYNRRTRQDEPALFVALTFERREVLDSSNIKPMNLIGVDRGENIPAVIALTDPEGCPLSRFKDSLGNPTHILTIGESYKEKQRTIQAKKEVEQRRAGGYSRKYASKAKNLADDMVRNTARDLLYYAVTQDAMLIFENLSRGFGRQGKRTFMAERQYTRMEDWLTAKLAYEGLPSKTYLSKTLAQYTSKTCSNCGFTITSADYDRVLEKLKKTATGWMTTINGKELKVEGQITYYNRYKRQNVVKDLSVELDRLSEESVNNDISSWTKGRSGEALSLLKKRFSHRPVQEKFVCLNCGFETHADEQAALNIARSWLFLRSQEYKKYQTNKTTGNTDKRAFVETWQSFYRKKLKEVWKPAV

SEQ ID NO: 26006 - protein, 978 aa, synthetic construct
  REGION 1..978: note = engineered CasX variant
QEIKRINKIRRRLVKDSNTKKAGKTGPMKTLLVRVMTPDLRERLENLRKKPENIPQPISNTSRANLNKLLTDYTEMKKAILHVYWEEFQKDPVGLMSRVAQPASKKIDQNKLKPEMDEKGNLTTAGFACSQCGQPLFVYKLEQVSEKGKAYTNYFGRCNVAEHEKLILLAQLKPEKDSDEAVTYSLGKFGQRALDFYSIHVTKESTHPVKPLAQIAGNRYASGPVGKALSDACMGTIASFLSKYQDIIIEHQKVVKGNQKRLESLRELAGKENLEYPSVTLPPQPHTKEGVDAYNEVIARVRMWVNLNLWQKLKLSRDDAKPLLRLKGFPSFPLVERQANEVDWWDMVCNVKKLINEKKEDGKVFWQNLAGYKRQEALRPYLSSEEDRKKGKKFARYQLGDLLLHLEKKHGEDWGKVYDEAWERIDKKVEGLSKHIKLEEERRSEDAQSKAALTDWLRAKASFVIEGLKEADKDEFCRCELKLQKWYGDLRGKPFAIEAENSILDISGFSKQYNCAFIWQKDGVKKLNLYLIINYFKGGKLRFKKIKPEAFEANRFYTVINKKSGEIVPMEVNFNFDDPNLIILPLAFGKRQGREFIWNDLLSLETGSLKLANGRVIEKTLYNRRTRQDEPALFVALTFERREVLDSSNIKPMNLIGVDRGENIPAVIALTDPEGCPLSRFKDSLGNPTHILTIGESYKCKQRTIQAKKEVEQRRAGGYSRKYASKAKNLADDMVRNTARDLLYYAVTQDAMLIFENLSRGFGRQGKRTFMAERQYTRMEDWLTAKLAYEGLPSKTYLSKTLAQYTSKTCSNCGFTITSADYDRVLEKLKKTATGWMTTINGKELKVEGQITYYNRYKRQNVVKDLSVELDRLSEESVNNDISSWTKGRSGEALSLLKKRFSHRPVQEKFVCLNCGFETHADEQAALNIARSWLFLRSQEYKKYQTNKTTGNTDKRAFVETWQSFYRKKLKEVWKPAV

SEQ ID NO: 26007 - protein, 978 aa, synthetic construct
  REGION 1..978: note = engineered CasX variant
QEIKRINKIRRRLVKDSNTKKAGKTGPMKTLLVRVMTPDLRERLENLRKKPENIPQPISNTSRANLNKLLTDYTEMKKAILHVYWEEFQKDPVGLMSRVAQPASKKIDQNKLKPEMDEKGNLTTAGFACSQCGQPLFVYKLEQVSEKGKAYTNYFGRCNVAEHEKLILLAQLKPEKDSDEAVTYSLGKFGQRALDFYSIHVTKESTHPVKPLAQIAGNRYASGPVGKALSDACMGTIASFLSKYQDIIIEHQKVVKGNQKRLESLRELAGKENLEYPSVTLPPQPHTKEGVDAYNEVIARVRMWVNLNLWQKLKLSRDDAKPLLRLKGFPSFPLVERQANEVDWWDMVCNVKKLINEKKEDGKVFWQNLAGYKRQEALRPYLSSEEDRKKGKKFARYQLGDLLLHLEKKHGEDWGKVYDEAWERIDKKVEGLSKHIKLEEERRSEDAQSKAALTDWLRAKASFVIEGLKEADKDEFCRCELKLQKWYGDLRGKPFAIEAENSILDISGFSKQYNCAFIWQKDGVKKLNLYLIINYFKGGKLRFKKIKPEAFEANRFYTVINKKSGEIVPMEVNFNFDDPNLIILPLAFGKRQGREFIWNDLLSLETGSLKLANGRVIEKTLYNRRTRQDEPALFVALTFERREVLDSSNIKPMNLIGVDRGENIPAVIALTDPEGCPLSRFKDSLGNPTHILRYGESYKEKQRTIQAKKEVEQRRATGYSRKYASKAKNLADDMVRNTARDLLYYAVTQDAMLIFENLSRGFGRQGKRTFMAERQYTRMEDWLTAKLAYEGLPSKTYLSKTLAQYTSKTCSNCGFTITSADYDRVLEKLKKTATGWMTTINGKELKVEGQITYYNRYKRQNVVKDLSVELDRLSEESVNNDISSWTKGRSGEALSLLKKRFSHRPVQEKFVCLNCGFETHADEQAALNIARSWLFLRSQEYKKYQTNKTTGNTDKRAFVETWQSFYRKKLKEVWKPAV

SEQ ID NO: 26008 - protein, 978 aa, synthetic construct
  REGION 1..978: note = engineered CasX variant
QEIKRINKIRRRLVKDSNTKKAGKTGPMKTLLVRVMTPDLRERLENLRKKPENIPQPISNTSRANLNKLLTDYTEMKKAILHVYWEEFQKDPVGLMSRVAQPASKKIDQNKLKPEMDEKGNLTTAGFACSQCGQPLFVYKLEQVSEKGKAYTNYFGRCNVAEHEKLILLAQLKPEKDSDEAVTYSLGKFGQRALDFYSIHVTKESTHPVKPLAQIAGNRYASGPVGKALSDACMGTIASFLSKYQDIIIEHQKVVKGNQKRLESLRELAGKENLEYPSVTLPPQPHTKEGVDAYNEVIARVRMWVNLNLWQKLKLSRDDAKPLLRLKGFPSFPLVERQANEVDWWDMVCNVKKLINEKKEDGKVFWQNLAGYKRQEALRPYLSSEEDRKKGKKFARYQLGDLLLHLEKKHGEDWGKVYDEAWERIDKKVEGLSKHIKLEEERRSEDAQSKAALTDWLRAKASFVIEGLKEADKDEFCRCELKLQKWYGDLRGKPFAIEAENSILDISGFSKQYNCAFIWQKDGVKKLNLYLIINYFKGGKLRFKKIKPEAFEANRFYTVINKKSGEIVPMEVNFNFDDPNLIILPLAFGKRQGREFIWNDLLSLETGSLKLANGRVIEKTLYNRRTRQDEPALFVALTFERREVLDSSNIKPMNLIGVDRGENIPAVIALTDPEGCPLSRFKDSLGNPTHILRYGESYKEKQRTIQAKKEVEQRRAGGYSRKYASKAKNLADDMVRNTARDLLYYAVTQDAMLIFENLSRGFGRQGKRTFMAERQYTRMEDWLTAKLAYEGLPSKTYLSKTLAQYTSKTCSNCGFTITSADYDRVLEKLKKTATGWMTTINGKELKVEGQITYYNRYKRQNVVKDLSVELDRLSEESVNNDISSWTKGRSGEALSLLKKRFSHRPVQEKFVCLNCGFETHADEQAALNIARSWLFLRSQEYKKYQTNKTTGNTDKRAFVETWQSFYRKKLKEVWKPAV

SEQ ID NO: 26009 - protein, 978 aa, synthetic construct
  REGION 1..978: note = engineered CasX variant
QEIKRINKIRRRLVKDSNTKKAGKTGPMKTLLVRVMTPDLRERLENLRKKPENIPQPISNTSRANLNKLLTDYTEMKKAILHVYWEEFQKDPVGLMSRVAQPASKKIDQNKLKPEMDEKGNLTTAGFACSQCGQPLFVYKLEQVSEKGKAYTNYFGRCNVAEHEKLILLAQLKPEKDSDEAVTYSLGKFGQRALDFYSIHVTKESTHPVKPLAQIAGNRYASGPVGKALSDACMGTIASFLSKYQDIIIEHQKVVKGNQKRLESLRELAGKENLEYPSVTLPPQPHTKEGVDAYNEVIARVRMWVNLNLWQKLKLSRDDAKPLLRLKGFPSFPLVERQANEVDWWDMVCNVKKLINEKKEDGKVFWQNLAGYKRQEALRPYLSSEEDRKKGKKFARYQLGDLLLHLEKKHGEDWGKVYDEAWERIDKKVEGLSKHIKLEEERRSEDAQSKAALTDWLRAKASFVIEGLKEADKDEFCRCELKLQKWYGDLRGKPFAIEAENSILDISGFSKQYNCAFIWQKDGVKKLNLYLIINYFKGGKLRFKKIKPEAFEANRFYTVINKKSGEIVPMEVNFNFDDPNLIILPLAFGKRQGREFIWNDLLSLETGSLKLANGRVIEKTLYNRRTRQDEPALFVALTFERREVLDSSNIKPMNLIGVDRGENIPAVIALTDPEGCPLSRFKDSLGNPTHILRYGESYKEKQRTIQAKKEVEQRQAGGYSRKYASKAKNLADDMVRNTARDLLYYAVTQDAMLIFENLSRGFGRQGKRTFMAERQYTRMEDWLTAKLAYEGLPSKTYLSKTLAQYTSKTCSNCGFTITSADYDRVLEKLKKTATGWMTTINGKELKVEGQITYYNRYKRQNVVKDLSVELDRLSEESVNNDISSWTKGRSGEALSLLKKRFSHRPVQEKFVCLNCGFETHADEQAALNIARSWLFLRSQEYKKYQTNKTTGNTDKRAFVETWQSFYRKKLKEVWKPAV

SEQ ID NO: 26010 - protein, 978 aa, synthetic construct
  REGION 1..978: note = engineered CasX variant
QEIKRINKIRRRLVKDSNTKKAGKTGPMKTLLVRVMTPDLRERLENLRKKPENIPQPISNTSRANLNKLLTDYTEMKKAILHVYWEEFQKDPVGLMSRVAQPASKKIDQNKLKPEMDEKGNLTTAGFACSQCGQPLFVYKLEQVSEKGKAYTNYFGRCNVAEHEKLILLAQLKPEKDSDEAVTYSLGKFGQRALDFYSIHVTKESTHPVKPLAQIAGNRYASGPVGKALSDACMGTIASFLSKYQDIIIEHQKVVKGNQKRLESLRELAGKENLEYPSVTLPPQPHTKEGVDAYNEVIARVRMWVNLNLWQKLKLSRDDAKPLLRLKGFPSFPLVERQANEVDWWDMVCNVKKLINEKKEDGKVFWQNLAGYKRQEALRPYLSSEEDRKKGKKFARYQLGDLLLHLEKKHGEDWGKVYDEAWERIDKKVEGLSKHIKLEEERRSEDAQSKAALTDWLRAKASFVIEGLKEADKDEFCRCELKLQKWYGDLRGKPFAIEAENSILDISGFSKQYNCAFIWQKDGVKKLNLYLIINYFKGGKLRFKKIKPEAFEANRFYTVINKKSGEIVPMEVNFNFDDPNLIILPLAFGKRQGREFIWNDLLSLETGSLKLANGRVIEKTLYNRRTRQDEPALFVALTFERREVLDSSNIKPMNLIGVDRGENIPAVIALTDPEGCPLSRFKDSLGNPTHILRYCESYKEKQRTIQAKKEVEQRRAGGYSRKYASKAKNLADDMVRNTARDLLYYAVTQDAMLIFENLSRGFGRQGKRTFMAERQYTRMEDWLTAKLAYEGLPSKTYLSKTLAQYTSKTCSNCGFTITSADYDRVLEKLKKTATGWMTTINGKELKVEGQITYYNRYKRQNVVKDLSVELDRLSEESVNNDISSWTKGRSGEALSLLKKRFSHRPVQEKFVCLNCGFETHADEQAALNIARSWLFLRSQEYKKYQTNKTTGNTDKRAFVETWQSFYRKKLKEVWKPAV

SEQ ID NO: 26011 - protein, 978 aa, synthetic construct
  REGION 1..978: note = engineered CasX variant
QEIKRINKIRRRLVKDSNTKKAGKTGPMKTLLVRVMTPDLRERLENLRKKPENIPQPISNTSRANLNKLLTDYTEMKKAILHVYWEEFQKDPVGLMSRVAQPASKKIDQNKLKPEMDEKGNLTTAGFACSQCGQPLFVYKLEQVSEKGKAYTNYFGRCNVAEHEKLILLAQLKPEKDSDEAVTYSLGKFGQRALDFYSIHVTKESTHPVKPLAQIAGNRYASGPVGKALSDACMGTIASFLSKYQDIIIEHQKVVKGNQKRLESLRELAGKENLEYPSVTLPPQPHTKEGVDAYNEVIARVRMWVNLNLWQKLKLSRDDAKPLLRLKGFPSFPLVERQANEVDWWDMVCNVKKLINEKKEDGKVFWQNLAGYKRQEALRPYLSSEEDRKKGKKFARYQLGDLLLHLEKKHGEDWGKVYDEAWERIDKKVEGLSKHIKLEEERRSEDAQSKAALTDWLRAKASFVIEGLKEADKDEFCRCELKLQKWYGDLRGKPFAIEAENSILDISGFSKQYNCAFIWQKDGVKKLNLYLIINYFKGGKLRFKKIKPEAFEANRFYTVINKKSGEIVPMEVNFNFDDPNLIILPLAFGKRQGREFIWNDLLSLETGSLKLANGRVIEKTLYNRRTRQDEPALFVALTFERREVLDSSNIKPMNLIGVDRGENIPAVIALTDPEGCPLSRFKDSLGNPTHILRWGESYKEKQRTIQAKKEVEQRRAGGYSRKYASKAKNLADDMVRNTARDLLYYAVTQDAMLIFENLSRGFGRQGKRTFMAERQYTRMEDWLTAKLAYEGLPSKTYLSKTLAQYTSKTCSNCGFTITSADYDRVLEKLKKTATGWMTTINGKELKVEGQITYYNRYKRQNVVKDLSVELDRLSEESVNNDISSWTKGRSGEALSLLKKRFSHRPVQEKFVCLNCGFETHADEQAALNIARSWLFLRSQEYKKYQTNKTTGNTDKRAFVETWQSFYRKKLKEVWKPAV

SEQ ID NO: 26012 - protein, 978 aa, synthetic construct
  REGION 1..978: note = engineered CasX variant
QEIKRINKIRRRLVKDSNTKKAGKTGPMKTLLVRVMTPDLRERLENLRKKPENIPQPISNTSRANLNKLLTDYTEMKKAILHVYWEEFQKDPVGLMSRVAQPASKKIDQNKLKPEMDEKGNLTTAGFACSQCGQPLFVYKLEQVSEKGKAYTNYFGRCNVAEHEKLILLAQLKPEKDSDEAVTYSLGKFGQRALDFYSIHVTKESTHPVKPLAQIAGNRYASGPVGKALSDACMGTIASFLSKYQDIIIEHQKVVKGNQKRLESLRELAGKENLEYPSVTLPPQPHTKEGVDAYNEVIARVRMWVNLNLWQKLKLSRDDAKPLLRLKGFPSFPLVERQANEVDWWDMVCNVKKLINEKKEDGKVFWQNLAGYKRQEALRPYLSSEEDRKKGKKFARYQLGDLLLHLEKKHGEDWGKVYDEAWERIDKKVEGLSKHIKLEEERRSEDAQSKAALTDWLRAKASFVIEGLKEADKDEFCRCELKLQKWYGDLRGKPFAIEAENSILDISGFSKQYNCAFIWQKDGVKKLNLYLIINYFKGGKLRFKKIKPEAFEANRFYTVINKKSGEIVPMEVNFNFDDPNLIILPLAFGKRQGREFIWNDLLSLETGSLKLANGRVIEKTLYNRRTRQDEPALFVALTFERREVLDSSNIKPMNLIGVDRGENIPAVIALTDPEGCPLSRFKDSLGNPTHILRPGESYKEKQRTIQAKKEVEQRRAGGYSRKYASKAKNLADDMVRNTARDLLYYAVTQDAMLIFENLSRGFGRQGKRTFMAERQYTRMEDWLTAKLAYEGLPSKTYLSKTLAQYTSKTCSNCGFTITSADYDRVLEKLKKTATGWMTTINGKELKVEGQITYYNRYKRQNVVKDLSVELDRLSEESVNNDISSWTKGRSGEALSLLKKRFSHRPVQEKFVCLNCGFETHADEQAALNIARSWLFLRSQEYKKYQTNKTTGNTDKRAFVETWQSFYRKKLKEVWKPAV

SEQ ID NO: 26013 - protein, 978 aa, synthetic construct
  REGION 1..978: note = engineered CasX variant
QEIKRINKIRRRLVKDSNTKKAGKTGPMKTLLVRVMTPDLRERLENLRKKPENIPQPISNTSRANLNKLLTDYTEMKKAILHVYWEEFQKDPVGLMSRVAQPASKKIDQNKLKPEMDEKGNLTTAGFACSQCGQPLFVYKLEQVSEKGKAYTNYFGRCNVAEHEKLILLAQLKPEKDSDEAVTYSLGKFGQRALDFYSIHVTKESTHPVKPLAQIAGNRYASGPVGKALSDACMGTIASFLSKYQDIIIEHQKVVKGNQKRLESLRELAGKENLEYPSVTLPPQPHTKEGVDAYNEVIARVRMWVNLNLWQKLKLSRDDAKPLLRLKGFPSFPLVERQANEVDWWDMVCNVKKLINEKKEDGKVFWQNLAGYKRQEALRPYLSSEEDRKKGKKFARYQLGDLLLHLEKKHGEDWGKVYDEAWERIDKKVEGLSKHIKLEEERRSEDAQSKAALTDWLRAKASFVIEGLKEADKDEFCRCELKLQKWYGDLRGKPFAIEAENSILDISGFSKQYNCAFIWQKDGVKKLNLYLIINYFKGGKLRFKKIKPEAFEANRFYTVINKKSGEIVPMEVNFNFDDPNLIILPLAFGKRQGREFIWNDLLSLETGSLKLANGRVIEKTLYNRRTRQDEPALFVALTFERREVLDSSNIKPMNLIGVDRGENIPAVIALTDPEGCPLSRFKDSLGNPTHILRMGESYKQKQRTIQAKKEVEQRRAGGYSRKYASKAKNLADDMVRNTARDLLYYAVTQDAMLIFENLSRGFGRQGKRTFMAERQYTRMEDWLTAKLAYEGLPSKTYLSKTLAQYTSKTCSNCGFTITSADYDRVLEKLKKTATGWMTTINGKELKVEGQITYYNRYKRQNVVKDLSVELDRLSEESVNNDISSWTKGRSGEALSLLKKRFSHRPVQEKFVCLNCGFETHADEQAALNIARSWLFLRSQEYKKYQTNKTTGNTDKRAFVETWQSFYRKKLKEVWKPAV

SEQ ID NO: 26014 - protein, 978 aa, synthetic construct
  REGION 1..978: note = engineered CasX variant
QEIKRINKIRRRLVKDSNTKKAGKTGPMKTLLVRVMTPDLRERLENLRKKPENIPQPISNTSRANLNKLLTDYTEMKKAILHVYWEEFQKDPVGLMSRVAQPASKKIDQNKLKPEMDEKGNLTTAGFACSQCGQPLFVYKLEQVSEKGKAYTNYFGRCNVAEHEKLILLAQLKPEKDSDEAVTYSLGKFGQRALDFYSIHVTKESTHPVKPLAQIAGNRYASGPVGKALSDACMGTIASFLSKYQDIIIEHQKVVKGNQKRLESLRELAGKENLEYPSVTLPPQPHTKEGVDAYNEVIARVRMWVNLNLWQKLKLSRDDAKPLLRLKGFPSFPLVERQANEVDWWDMVCNVKKLINEKKEDGKVFWQNLAGYKRQEALRPYLSSEEDRKKGKKFARYQLGDLLLHLEKKHGEDWGKVYDEAWERIDKKVEGLSKHIKLEEERRSEDAQSKAALTDWLRAKASFVIEGLKEADKDEFCRCELKLQKWYGDLRGKPFAIEAENSILDISGFSKQYNCAFIWQKDGVKKLNLYLIINYFKGGKLRFKKIKPEAFEANRFYTVINKKSGEIVPMEVNFNFDDPNLIILPLAFGKRQGREFIWNDLLSLETGSLKLANGRVIEKTLYNRRTRQDEPALFVALTFERREVLDSSNIKPMNLIGVDRGENIPAVIALTDPEGCPLSRFKDSLGNPTHILRMGESYKEKQRTIQAKKEVEQRRAGGYSRKYASKAKNLADDMVRNTARDLLYYAVTQDAMLIFENLSRGFGRQGKRTFMAERQYTRMEDWLTAKLAYEGLPSKTYLSKTLAQYTSKTCSNCGFTITSADYDRVLEKLKKTATGWMTTINGKELKVEGQITYYNRYKRQNVVKDLSVELDRLSEESVNNDISSWTKGRSGEALSLLKKRFSHRPVQEKFVCLNCGFETHADEQAALNIARSWLFLRSQEYKKYQTNKTTGNTDKRAFVETWQSFYRKKLKEVWKPAV

SEQ ID NO: 26015 - protein, 978 aa, synthetic construct
  REGION 1..978: note = engineered CasX variant
QEIKRINKIRRRLVKDSNTKKAGKTGPMKTLLVRVMTPDLRERLENLRKKPENIPQPISNTSRANLNKLLTDYTEMKKAILHVYWEEFQKDPVGLMSRVAQPASKKIDQNKLKPEMDEKGNLTTAGFACSQCGQPLFVYKLEQVSEKGKAYTNYFGRCNVAEHEKLILLAQLKPEKDSDEAVTYSLGKFGQRALDFYSIHVTKESTHPVKPLAQIAGNRYASGPVGKALSDACMGTIASFLSKYQDIIIEHQKVVKGNQKRLESLRELAGKENLEYPSVTLPPQPHTKEGVDAYNEVIARVRMWVNLNLWQKLKLSRDDAKPLLRLKGFPSFPLVERQANEVDWWDMVCNVKKLINEKKEDGKVFWQNLAGYKRQEALRPYLSSEEDRKKGKKFARYQLGDLLLHLEKKHGEDWGKVYDEAWERIDKKVEGLSKHIKLEEERRSEDAQSKAALTDWLRAKASFVIEGLKEADKDEFCRCELKLQKWYGDLRGKPFAIEAENSILDISGFSKQYNCAFIWQKDGVKKLNLYLIINYFKGGKLRFKKIKPEAFEANRFYTVINKKSGEIVPMEVNFNFDDPNLIILPLAFGKRQGREFIWNDLLSLETGSLKLANGRVIEKTLYNRRTRQDEPALFVALTFERREVLDSSNIKPMNLIGVDRGENIPAVIALTDPEGCPLSRFKDSLGNPTHILRMGESYKEKQRFIQAKKEVEQRRAGGYSRKYASKAKNLADDMVRNTARDLLYYAVTQDAMLIFENLSRGFGRQGKRTFMAERQYTRMEDWLTAKLAYEGLPSKTYLSKTLAQYTSKTCSNCGFTITSADYDRVLEKLKKTATGWMTTINGKELKVEGQITYYNRYKRQNVVKDLSVELDRLSEESVNNDISSWTKGRSGEALSLLKKRFSHRPVQEKFVCLNCGFETHADEQAALNIARSWLFLRSQEYKKYQTNKTTGNTDKRAFVETWQSFYRKKLKEVWKPAV

SEQ ID NO: 26016 - protein, 978 aa, synthetic construct
  REGION 1..978: note = engineered CasX variant
QEIKRINKIRRRLVKDSNTKKAGKTGPMKTLLVRVMTPDLRERLENLRKKPENIPQPISNTSRANLNKLLTDYTEMKKAILHVYWEEFQKDPVGLMSRVAQPASKKIDQNKLKPEMDEKGNLTTAGFACSQCGQPLFVYKLEQVSEKGKAYTNYFGRCNVAEHEKLILLAQLKPEKDSDEAVTYSLGKFGQRALDFYSIHVTKESTHPVKPLAQIAGNRYASGPVGKALSDACMGTIASFLSKYQDIIIEHQKVVKGNQKRLESLRELAGKENLEYPSVTLPPQPHTKEGVDAYNEVIARVRMWVNLNLWQKLKLSRDDAKPLLRLKGFPSFPLVERQANEVDWWDMVCNVKKLINEKKEDGKVFWQNLAGYKRQEALRPYLSSEEDRKKGKKFARYQLGDLLLHLEKKHGEDWGKVYDEAWERIDKKVEGLSKHIKLEEERRSEDAQSKAALTDWLRAKASFVIEGLKEADKDEFCRCELKLQKWYGDLRGKPFAIEAENSILDISGFSKQYNCAFIWQKDGVKKLNLYLIINYFKGGKLRFKKIKPEAFEANRFYTVINKKSGEIVPMEVNFNFDDPNLIILPLAFGKRQGREFIWNDLLSLETGSLKLANGRVIEKTLYNRRTRQDEPALFVALTFERREVLDSSNIKPMNLIGVDRGENIPAVIALTDPEGCPLSRFKDSLGNPTHILRLGESYKEKQRTIQAKKEVLQRRAGGYSRKYASKAKNLADDMVRNTARDLLYYAVTQDAMLIFENLSRGFGRQGKRTFMAERQYTRMEDWLTAKLAYEGLPSKTYLSKTLAQYTSKTCSNCGFTITSADYDRVLEKLKKTATGWMTTINGKELKVEGQITYYNRYKRQNVVKDLSVELDRLSEESVNNDISSWTKGRSGEALSLLKKRFSHRPVQEKFVCLNCGFETHADEQAALNIARSWLFLRSQEYKKYQTNKTTGNTDKRAFVETWQSFYRKKLKEVWKPAV

SEQ ID NO: 26017 - protein, 978 aa, synthetic construct
  REGION 1..978: note = engineered CasX variant
QEIKRINKIRRRLVKDSNTKKAGKTGPMKTLLVRVMTPDLRERLENLRKKPENIPQPISNTSRANLNKLLTDYTEMKKAILHVYWEEFQKDPVGLMSRVAQPASKKIDQNKLKPEMDEKGNLTTAGFACSQCGQPLFVYKLEQVSEKGKAYTNYFGRCNVAEHEKLILLAQLKPEKDSDEAVTYSLGKFGQRALDFYSIHVTKESTHPVKPLAQIAGNRYASGPVGKALSDACMGTIASFLSKYQDIIIEHQKVVKGNQKRLESLRELAGKENLEYPSVTLPPQPHTKEGVDAYNEVIARVRMWVNLNLWQKLKLSRDDAKPLLRLKGFPSFPLVERQANEVDWWDMVCNVKKLINEKKEDGKVFWQNLAGYKRQEALRPYLSSEEDRKKGKKFARYQLGDLLLHLEKKHGEDWGKVYDEAWERIDKKVEGLSKHIKLEEERRSEDAQSKAALTDWLRAKASFVIEGLKEADKDEFCRCELKLQKWYGDLRGKPFAIEAENSILDISGFSKQYNCAFIWQKDGVKKLNLYLIINYFKGGKLRFKKIKPEAFEANRFYTVINKKSGEIVPMEVNFNFDDPNLIILPLAFGKRQGREFIWNDLLSLETGSLKLANGRVIEKTLYNRRTRQDEPALFVALTFERREVLDSSNIKPMNLIGVDRGENIPAVIALTDPEGCPLSRFKDSLGNPTHILRLGESYKEKQRTIQAKKEVLQRGAGGYSRKYASKAKNLADDMVRNTARDLLYYAVTQDAMLIFENLSRGFGRQGKRTFMAERQYTRMEDWLTAKLAYEGLPSKTYLSKTLAQYTSKTCSNCGFTITSADYDRVLEKLKKTATGWMTTINGKELKVEGQITYYNRYKRQNVVKDLSVELDRLSEESVNNDISSWTKGRSGEALSLLKKRFSHRPVQEKFVCLNCGFETHADEQAALNIARSWLFLRSQEYKKYQTNKTTGNTDKRAFVETWQSFYRKKLKEVWKPAV

SEQ ID NO: 26018 - protein, 978 aa, synthetic construct
  REGION 1..978: note = engineered CasX variant
QEIKRINKIRRRLVKDSNTKKAGKTGPMKTLLVRVMTPDLRERLENLRKKPENIPQPISNTSRANLNKLLTDYTEMKKAILHVYWEEFQKDPVGLMSRVAQPASKKIDQNKLKPEMDEKGNLTTAGFACSQCGQPLFVYKLEQVSEKGKAYTNYFGRCNVAEHEKLILLAQLKPEKDSDEAVTYSLGKFGQRALDFYSIHVTKESTHPVKPLAQIAGNRYASGPVGKALSDACMGTIASFLSKYQDIIIEHQKVVKGNQKRLESLRELAGKENLEYPSVTLPPQPHTKEGVDAYNEVIARVRMWVNLNLWQKLKLSRDDAKPLLRLKGFPSFPLVERQANEVDWWDMVCNVKKLINEKKEDGKVFWQNLAGYKRQEALRPYLSSEEDRKKGKKFARYQLGDLLLHLEKKHGEDWGKVYDEAWERIDKKVEGLSKHIKLEEERRSEDAQSKAALTDWLRAKASFVIEGLKEADKDEFCRCELKLQKWYGDLRGKPFAIEAENSILDISGFSKQYNCAFIWQKDGVKKLNLYLIINYFKGGKLRFKKIKPEAFEANRFYTVINKKSGEIVPMEVNFNFDDPNLIILPLAFGKRQGREFIWNDLLSLETGSLKLANGRVIEKTLYNRRTRQDEPALFVALTFERREVLDSSNIKPMNLIGVDRGENIPAVIALTDPEGCPLSRFKDSLGNPTHILRLGESYKEKQRTIQAKKEVEQRRAGGYSRKYASKAKNLADDMVRNTARDLLYYAVTQDAMLIFENLSRGFGRQGKRTFMAERQYTRMEDWLTAKLAYEGLPSKTYLSKTLAQYTSKTCSNCGFTITSADYDRVLEKLKKTATGWMTTINGKELKVEGQITYYNRYKRQNVVKDLSVELDRLSEESVNNDISSWTKGRSGEALSLLKKRFSHRPVQEKFVCLNCGFETHADEQAALNIARSWLFLRSQEYKKYQTNKTTGNTDKRAFVETWQSFYRKKLKEVWKPAV

SEQ ID NO: 26019 - protein, 978 aa, synthetic construct
  REGION 1..978: note = engineered CasX variant
QEIKRINKIRRRLVKDSNTKKAGKTGPMKTLLVRVMTPDLRERLENLRKKPENIPQPISNTSRANLNKLLTDYTEMKKAILHVYWEEFQKDPVGLMSRVAQPASKKIDQNKLKPEMDEKGNLTTAGFACSQCGQPLFVYKLEQVSEKGKAYTNYFGRCNVAEHEKLILLAQLKPEKDSDEAVTYSLGKFGQRALDFYSIHVTKESTHPVKPLAQIAGNRYASGPVGKALSDACMGTIASFLSKYQDIIIEHQKVVKGNQKRLESLRELAGKENLEYPSVTLPPQPHTKEGVDAYNEVIARVRMWVNLNLWQKLKLSRDDAKPLLRLKGFPSFPLVERQANEVDWWDMVCNVKKLINEKKEDGKVFWQNLAGYKRQEALRPYLSSEEDRKKGKKFARYQLGDLLLHLEKKHGEDWGKVYDEAWERIDKKVEGLSKHIKLEEERRSEDAQSKAALTDWLRAKASFVIEGLKEADKDEFCRCELKLQKWYGDLRGKPFAIEAENSILDISGFSKQYNCAFIWQKDGVKKLNLYLIINYFKGGKLRFKKIKPEAFEANRFYTVINKKSGEIVPMEVNFNFDDPNLIILPLAFGKRQGREFIWNDLLSLETGSLKLANGRVIEKTLYNRRTRQDEPALFVALTFERREVLDSSNIKPMNLIGVDRGENIPAVIALTDPEGCPLSRFKDSLGNPTHILRLGESYKEKQRTIQAKKEVEQRGAGGYSRKYASKAKNLADDMVRNTARDLLYYAVTQDAMLIFENLSRGFGRQGKRTFMAERQYTRMEDWLTAKLAYEGLPSKTYLSKTLAQYTSKTCSNCGFTITSADYDRVLEKLKKTATGWMTTINGKELKVEGQITYYNRYKRQNVVKDLSVELDRLSEESVNNDISSWTKGRSGEALSLLKKRFSHRPVQEKFVCLNCGFETHADEQAALNIARSWLFLRSQEYKKYQTNKTTGNTDKRAFVETWQSFYRKKLKEVWKPAV

SEQ ID NO: 26020 - protein, 978 aa, synthetic construct
  REGION 1..978: note = engineered CasX variant
QEIKRINKIRRRLVKDSNTKKAGKTGPMKTLLVRVMTPDLRERLENLRKKPENIPQPISNTSRANLNKLLTDYTEMKKAILHVYWEEFQKDPVGLMSRVAQPASKKIDQNKLKPEMDEKGNLTTAGFACSQCGQPLFVYKLEQVSEKGKAYTNYFGRCNVAEHEKLILLAQLKPEKDSDEAVTYSLGKFGQRALDFYSIHVTKESTHPVKPLAQIAGNRYASGPVGKALSDACMGTIASFLSKYQDIIIEHQKVVKGNQKRLESLRELAGKENLEYPSVTLPPQPHTKEGVDAYNEVIARVRMWVNLNLWQKLKLSRDDAKPLLRLKGFPSFPLVERQANEVDWWDMVCNVKKLINEKKEDGKVFWQNLAGYKRQEALRPYLSSEEDRKKGKKFARYQLGDLLLHLEKKHGEDWGKVYDEAWERIDKKVEGLSKHIKLEEERRSEDAQSKAALTDWLRAKASFVIEGLKEADKDEFCRCELKLQKWYGDLRGKPFAIEAENSILDISGFSKQYNCAFIWQKDGVKKLNLYLIINYFKGGKLRFKKIKPEAFEANRFYTVINKKSGEIVPMEVNFNFDDPNLIILPLAFGKRQGREFIWNDLLSLETGSLKLANGRVIEKTLYNRRTRQDEPALFVALTFERREVLDSSNIKPMNLIGVDRGENIPAVIALTDPEGCPLSRFKDSLGNPTHILRLGESYKEKQRTIQAFKEVEQRRAGGYSRKYASKAKNLADDMVRNTARDLLYYAVTQDAMLIFENLSRGFGRQGKRTFMAERQYTRMEDWLTAKLAYEGLPSKTYLSKTLAQYTSKTCSNCGFTITSADYDRVLEKLKKTATGWMTTINGKELKVEGQITYYNRYKRQNVVKDLSVELDRLSEESVNNDISSWTKGRSGEALSLLKKRFSHRPVQEKFVCLNCGFETHADEQAALNIARSWLFLRSQEYKKYQTNKTTGNTDKRAFVETWQSFYRKKLKEVWKPAV

SEQ ID NO: 26021 - protein, 978 aa, synthetic construct
  REGION 1..978: note = engineered CasX variant
QEIKRINKIRRRLVKDSNTKKAGKTGPMKTLLVRVMTPDLRERLENLRKKPENIPQPISNTSRANLNKLLTDYTEMKKAILHVYWEEFQKDPVGLMSRVAQPASKKIDQNKLKPEMDEKGNLTTAGFACSQCGQPLFVYKLEQVSEKGKAYTNYFGRCNVAEHEKLILLAQLKPEKDSDEAVTYSLGKFGQRALDFYSIHVTKESTHPVKPLAQIAGNRYASGPVGKALSDACMGTIASFLSKYQDIIIEHQKVVKGNQKRLESLRELAGKENLEYPSVTLPPQPHTKEGVDAYNEVIARVRMWVNLNLWQKLKLSRDDAKPLLRLKGFPSFPLVERQANEVDWWDMVCNVKKLINEKKEDGKVFWQNLAGYKRQEALRPYLSSEEDRKKGKKFARYQLGDLLLHLEKKHGEDWGKVYDEAWERIDKKVEGLSKHIKLEEERRSEDAQSKAALTDWLRAKASFVIEGLKEADKDEFCRCELKLQKWYGDLRGKPFAIEAENSILDISGFSKQYNCAFIWQKDGVKKLNLYLIINYFKGGKLRFKKIKPEAFEANRFYTVINKKSGEIVPMEVNFNFDDPNLIILPLAFGKRQGREFIWNDLLSLETGSLKLANGRVIEKTLYNRRTRQDEPALFVALTFERREVLDSSNIKPMNLIGVDRGENIPAVIALTDPEGCPLSRFKDSLGNPTHILRIYESYKEKQRTIQAKKEVEQRRAGGYSRKYASKAKNLADDMVRNTARDLLYYAVTQDAMLIFENLSRGFGRQGKRTFMAERQYTRMEDWLTAKLAYEGLPSKTYLSKTLAQYTSKTCSNCGFTITSADYDRVLEKLKKTATGWMTTINGKELKVEGQITYYNRYKRQNVVKDLSVELDRLSEESVNNDISSWTKGRSGEALSLLKKRFSHRPVQEKFVCLNCGFETHADEQAALNIARSWLFLRSQEYKKYQTNKTTGNTDKRAFVETWQSFYRKKLKEVWKPAV

SEQ ID NO: 26022 - protein, 978 aa, synthetic construct
  REGION 1..978: note = engineered CasX variant
QEIKRINKIRRRLVKDSNTKKAGKTGPMKTLLVRVMTPDLRERLENLRKKPENIPQPISNTSRANLNKLLTDYTEMKKAILHVYWEEFQKDPVGLMSRVAQPASKKIDQNKLKPEMDEKGNLTTAGFACSQCGQPLFVYKLEQVSEKGKAYTNYFGRCNVAEHEKLILLAQLKPEKDSDEAVTYSLGKFGQRALDFYSIHVTKESTHPVKPLAQIAGNRYASGPVGKALSDACMGTIASFLSKYQDIIIEHQKVVKGNQKRLESLRELAGKENLEYPSVTLPPQPHTKEGVDAYNEVIARVRMWVNLNLWQKLKLSRDDAKPLLRLKGFPSFPLVERQANEVDWWDMVCNVKKLINEKKEDGKVFWQNLAGYKRQEALRPYLSSEEDRKKGKKFARYQLGDLLLHLEKKHGEDWGKVYDEAWERIDKKVEGLSKHIKLEEERRSEDAQSKAALTDWLRAKASFVIEGLKEADKDEFCRCELKLQKWYGDLRGKPFAIEAENSILDISGFSKQYNCAFIWQKDGVKKLNLYLIINYFKGGKLRFKKIKPEAFEANRFYTVINKKSGEIVPMEVNFNFDDPNLIILPLAFGKRQGREFIWNDLLSLETGSLKLANGRVIEKTLYNRRTRQDEPALFVALTFERREVLDSSNIKPMNLIGVDRGENIPAVIALTDPEGCPLSRFKDSLGNPTHILRIYESYKEKQRTIQAKKEKEQRRAGGYSRKYASKAKNLADDMVRNTARDLLYYAVTQDAMLIFENLSRGFGRQGKRTFMAERQYTRMEDWLTAKLAYEGLPSKTYLSKTLAQYTSKTCSNCGFTITSADYDRVLEKLKKTATGWMTTINGKELKVEGQITYYNRYKRQNVVKDLSVELDRLSEESVNNDISSWTKGRSGEALSLLKKRFSHRPVQEKFVCLNCGFETHADEQAALNIARSWLFLRSQEYKKYQTNKTTGNTDKRAFVETWQSFYRKKLKEVWKPAV

SEQ ID NO: 26023 - protein, 978 aa, synthetic construct
  REGION 1..978: note = engineered CasX variant
QEIKRINKIRRRLVKDSNTKKAGKTGPMKTLLVRVMTPDLRERLENLRKKPENIPQPISNTSRANLNKLLTDYTEMKKAILHVYWEEFQKDPVGLMSRVAQPASKKIDQNKLKPEMDEKGNLTTAGFACSQCGQPLFVYKLEQVSEKGKAYTNYFGRCNVAEHEKLILLAQLKPEKDSDEAVTYSLGKFGQRALDFYSIHVTKESTHPVKPLAQIAGNRYASGPVGKALSDACMGTIASFLSKYQDIIIEHQKVVKGNQKRLESLRELAGKENLEYPSVTLPPQPHTKEGVDAYNEVIARVRMWVNLNLWQKLKLSRDDAKPLLRLKGFPSFPLVERQANEVDWWDMVCNVKKLINEKKEDGKVFWQNLAGYKRQEALRPYLSSEEDRKKGKKFARYQLGDLLLHLEKKHGEDWGKVYDEAWERIDKKVEGLSKHIKLEEERRSEDAQSKAALTDWLRAKASFVIEGLKEADKDEFCRCELKLQKWYGDLRGKPFAIEAENSILDISGFSKQYNCAFIWQKDGVKKLNLYLIINYFKGGKLRFKKIKPEAFEANRFYTVINKKSGEIVPMEVNFNFDDPNLIILPLAFGKRQGREFIWNDLLSLETGSLKLANGRVIEKTLYNRRTRQDEPALFVALTFERREVLDSSNIKPMNLIGVDRGENIPAVIALTDPEGCPLSRFKDSLGNPTHILRIVESYKEKQRTTQAKKEVEQRRAGGYSRKYASKAKNLADDMVRNTARDLLYYAVTQDAMLIFENLSRGFGRQGKRTFMAERQYTRMEDWLTAKLAYEGLPSKTYLSKTLAQYTSKTCSNCGFTITSADYDRVLEKLKKTATGWMTTINGKELKVEGQITYYNRYKRQNVVKDLSVELDRLSEESVNNDISSWTKGRSGEALSLLKKRFSHRPVQEKFVCLNCGFETHADEQAALNIARSWLFLRSQEYKKYQTNKTTGNTDKRAFVETWQSFYRKKLKEVWKPAV

SEQ ID NO: 26024 - protein, 978 aa, synthetic construct
  REGION 1..978: note = engineered CasX variant
QEIKRINKIRRRLVKDSNTKKAGKTGPMKTLLVRVMTPDLRERLENLRKKPENIPQPISNTSRANLNKLLTDYTEMKKAILHVYWEEFQKDPVGLMSRVAQPASKKIDQNKLKPEMDEKGNLTTAGFACSQCGQPLFVYKLEQVSEKGKAYTNYFGRCNVAEHEKLILLAQLKPEKDSDEAVTYSLGKFGQRALDFYSIHVTKESTHPVKPLAQIAGNRYASGPVGKALSDACMGTIASFLSKYQDIIIEHQKVVKGNQKRLESLRELAGKENLEYPSVTLPPQPHTKEGVDAYNEVIARVRMWVNLNLWQKLKLSRDDAKPLLRLKGFPSFPLVERQANEVDWWDMVCNVKKLINEKKEDGKVFWQNLAGYKRQEALRPYLSSEEDRKKGKKFARYQLGDLLLHLEKKHGEDWGKVYDEAWERIDKKVEGLSKHIKLEEERRSEDAQSKAALTDWLRAKASFVIEGLKEADKDEFCRCELKLQKWYGDLRGKPFAIEAENSILDISGFSKQYNCAFIWQKDGVKKLNLYLIINYFKGGKLRFKKIKPEAFEANRFYTVINKKSGEIVPMEVNFNFDDPNLIILPLAFGKRQGREFIWNDLLSLETGSLKLANGRVIEKTLYNRRTRQDEPALFVALTFERREVLDSSNIKPMNLIGVDRGENIPAVIALTDPEGCPLSRFKDSLGNPTHILRIVESYKEKQRTIQAKKEVEQRRAGGYSRKYASKAKNLADDMVRNTARDLLYYAVTQDAMLIFENLSRGFGRQGKRTFMAERQYTRMEDWLTAKLAYEGLPSKTYLSKTLAQYTSKTCSNCGFTITSADYDRVLEKLKKTATGWMTTINGKELKVEGQITYYNRYKRQNVVKDLSVELDRLSEESVNNDISSWTKGRSGEALSLLKKRFSHRPVQEKFVCLNCGFETHADEQAALNIARSWLFLRSQEYKKYQTNKTTGNTDKRAFVETWQSFYRKKLKEVWKPAV

SEQ ID NO: 26025 - protein, 978 aa, synthetic construct
  REGION 1..978: note = engineered CasX variant
QEIKRINKIRRRLVKDSNTKKAGKTGPMKTLLVRVMTPDLRERLENLRKKPENIPQPISNTSRANLNKLLTDYTEMKKAILHVYWEEFQKDPVGLMSRVAQPASKKIDQNKLKPEMDEKGNLTTAGFACSQCGQPLFVYKLEQVSEKGKAYTNYFGRCNVAEHEKLILLAQLKPEKDSDEAVTYSLGKFGQRALDFYSIHVTKESTHPVKPLAQIAGNRYASGPVGKALSDACMGTIASFLSKYQDIIIEHQKVVKGNQKRLESLRELAGKENLEYPSVTLPPQPHTKEGVDAYNEVIARVRMWVNLNLWQKLKLSRDDAKPLLRLKGFPSFPLVERQANEVDWWDMVCNVKKLINEKKEDGKVFWQNLAGYKRQEALRPYLSSEEDRKKGKKFARYQLGDLLLHLEKKHGEDWGKVYDEAWERIDKKVEGLSKHIKLEEERRSEDAQSKAALTDWLRAKASFVIEGLKEADKDEFCRCELKLQKWYGDLRGKPFAIEAENSILDISGFSKQYNCAFIWQKDGVKKLNLYLIINYFKGGKLRFKKIKPEAFEANRFYTVINKKSGEIVPMEVNFNFDDPNLIILPLAFGKRQGREFIWNDLLSLETGSLKLANGRVIEKTLYNRRTRQDEPALFVALTFERREVLDSSNIKPMNLIGVDRGENIPAVIALTDPEGCPLSRFKDSLGNPTHILRIVESYKEKQRTIQAKKEVEQRRAFGYSRKYASKAKNLADDMVRNTARDLLYYAVTQDAMLIFENLSRGFGRQGKRTFMAERQYTRMEDWLTAKLAYEGLPSKTYLSKTLAQYTSKTCSNCGFTITSADYDRVLEKLKKTATGWMTTINGKELKVEGQITYYNRYKRQNVVKDLSVELDRLSEESVNNDISSWTKGRSGEALSLLKKRFSHRPVQEKFVCLNCGFETHADEQAALNIARSWLFLRSQEYKKYQTNKTTGNTDKRAFVETWQSFYRKKLKEVWKPAV

SEQ ID NO: 26026 - protein, 978 aa, synthetic construct
  REGION 1..978: note = engineered CasX variant
QEIKRINKIRRRLVKDSNTKKAGKTGPMKTLLVRVMTPDLRERLENLRKKPENIPQPISNTSRANLNKLLTDYTEMKKAILHVYWEEFQKDPVGLMSRVAQPASKKIDQNKLKPEMDEKGNLTTAGFACSQCGQPLFVYKLEQVSEKGKAYTNYFGRCNVAEHEKLILLAQLKPEKDSDEAVTYSLGKFGQRALDFYSIHVTKESTHPVKPLAQIAGNRYASGPVGKALSDACMGTIASFLSKYQDIIIEHQKVVKGNQKRLESLRELAGKENLEYPSVTLPPQPHTKEGVDAYNEVIARVRMWVNLNLWQKLKLSRDDAKPLLRLKGFPSFPLVERQANEVDWWDMVCNVKKLINEKKEDGKVFWQNLAGYKRQEALRPYLSSEEDRKKGKKFARYQLGDLLLHLEKKHGEDWGKVYDEAWERIDKKVEGLSKHIKLEEERRSEDAQSKAALTDWLRAKASFVIEGLKEADKDEFCRCELKLQKWYGDLRGKPFAIEAENSILDISGFSKQYNCAFIWQKDGVKKLNLYLIINYFKGGKLRFKKIKPEAFEANRFYTVINKKSGEIVPMEVNFNFDDPNLIILPLAFGKRQGREFIWNDLLSLETGSLKLANGRVIEKTLYNRRTRQDEPALFVALTFERREVLDSSNIKPMNLIGVDRGENIPAVIALTDPEGCPLSRFKDSLGNPTHILRITESYKNKQRTIQAKKEVEQRRAGGYSRKYASKAKNLADDMVRNTARDLLYYAVTQDAMLIFENLSRGFGRQGKRTFMAERQYTRMEDWLTAKLAYEGLPSKTYLSKTLAQYTSKTCSNCGFTITSADYDRVLEKLKKTATGWMTTINGKELKVEGQITYYNRYKRQNVVKDLSVELDRLSEESVNNDISSWTKGRSGEALSLLKKRFSHRPVQEKFVCLNCGFETHADEQAALNIARSWLFLRSQEYKKYQTNKTTGNTDKRAFVETWQSFYRKKLKEVWKPAV

SEQ ID NO: 26027 - protein, 978 aa, synthetic construct
  REGION 1..978: note = engineered CasX variant
QEIKRINKIRRRLVKDSNTKKAGKTGPMKTLLVRVMTPDLRERLENLRKKPENIPQPISNTSRANLNKLLTDYTEMKKAILHVYWEEFQKDPVGLMSRVAQPASKKIDQNKLKPEMDEKGNLTTAGFACSQCGQPLFVYKLEQVSEKGKAYTNYFGRCNVAEHEKLILLAQLKPEKDSDEAVTYSLGKFGQRALDFYSIHVTKESTHPVKPLAQIAGNRYASGPVGKALSDACMGTIASFLSKYQDIIIEHQKVVKGNQKRLESLRELAGKENLEYPSVTLPPQPHTKEGVDAYNEVIARVRMWVNLNLWQKLKLSRDDAKPLLRLKGFPSFPLVERQANEVDWWDMVCNVKKLINEKKEDGKVFWQNLAGYKRQEALRPYLSSEEDRKKGKKFARYQLGDLLLHLEKKHGEDWGKVYDEAWERIDKKVEGLSKHIKLEEERRSEDAQSKAALTDWLRAKASFVIEGLKEADKDEFCRCELKLQKWYGDLRGKPFAIEAENSILDISGFSKQYNCAFIWQKDGVKKLNLYLIINYFKGGKLRFKKIKPEAFEANRFYTVINKKSGEIVPMEVNFNFDDPNLIILPLAFGKRQGREFIWNDLLSLETGSLKLANGRVIEKTLYNRRTRQDEPALFVALTFERREVLDSSNIKPMNLIGVDRGENIPAVIALTDPEGCPLSRFKDSLGNPTHILRITESYKEKQRTIQAKKEVEQRRAGGYSRKYASKAKNLADDMVRNTARDLLYYAVTQDAMLIFENLSRGFGRQGKRTFMAERQYTRMEDWLTAKLAYEGLPSKTYLSKTLAQYTSKTCSNCGFTITSADYDRVLEKLKKTATGWMTTINGKELKVEGQITYYNRYKRQNVVKDLSVELDRLSEESVNNDISSWTKGRSGEALSLLKKRFSHRPVQEKFVCLNCGFETHADEQAALNIARSWLFLRSQEYKKYQTNKTTGNTDKRAFVETWQSFYRKKLKEVWKPAV

SEQ ID NO: 26028 - protein, 978 aa, synthetic construct
  REGION 1..978: note = engineered CasX variant
QEIKRINKIRRRLVKDSNTKKAGKTGPMKTLLVRVMTPDLRERLENLRKKPENIPQPISNTSRANLNKLLTDYTEMKKAILHVYWEEFQKDPVGLMSRVAQPASKKIDQNKLKPEMDEKGNLTTAGFACSQCGQPLFVYKLEQVSEKGKAYTNYFGRCNVAEHEKLILLAQLKPEKDSDEAVTYSLGKFGQRALDFYSIHVTKESTHPVKPLAQIAGNRYASGPVGKALSDACMGTIASFLSKYQDIIIEHQKVVKGNQKRLESLRELAGKENLEYPSVTLPPQPHTKEGVDAYNEVIARVRMWVNLNLWQKLKLSRDDAKPLLRLKGFPSFPLVERQANEVDWWDMVCNVKKLINEKKEDGKVFWQNLAGYKRQEALRPYLSSEEDRKKGKKFARYQLGDLLLHLEKKHGEDWGKVYDEAWERIDKKVEGLSKHIKLEEERRSEDAQSKAALTDWLRAKASFVIEGLKEADKDEFCRCELKLQKWYGDLRGKPFAIEAENSILDISGFSKQYNCAFIWQKDGVKKLNLYLIINYFKGGKLRFKKIKPEAFEANRFYTVINKKSGEIVPMEVNFNFDDPNLIILPLAFGKRQGREFIWNDLLSLETGSLKLANGRVIEKTLYNRRTRQDEPALFVALTFERREVLDSSNIKPMNLIGVDRGENIPAVIALTDPEGCPLSRFKDSLGNPTHILRITESYKEKQRTIQAKKEVEQKRAGGYSRKYASKAKNLADDMVRNTARDLLYYAVTQDAMLIFENLSRGFGRQGKRTFMAERQYTRMEDWLTAKLAYEGLPSKTYLSKTLAQYTSKTCSNCGFTITSADYDRVLEKLKKTATGWMTTINGKELKVEGQITYYNRYKRQNVVKDLSVELDRLSEESVNNDISSWTKGRSGEALSLLKKRFSHRPVQEKFVCLNCGFETHADEQAALNIARSWLFLRSQEYKKYQTNKTTGNTDKRAFVETWQSFYRKKLKEVWKPAV

SEQ ID NO: 26029 - protein, 978 aa, synthetic construct
  REGION 1..978: note = engineered CasX variant
QEIKRINKIRRRLVKDSNTKKAGKTGPMKTLLVRVMTPDLRERLENLRKKPENIPQPISNTSRANLNKLLTDYTEMKKAILHVYWEEFQKDPVGLMSRVAQPASKKIDQNKLKPEMDEKGNLTTAGFACSQCGQPLFVYKLEQVSEKGKAYTNYFGRCNVAEHEKLILLAQLKPEKDSDEAVTYSLGKFGQRALDFYSIHVTKESTHPVKPLAQIAGNRYASGPVGKALSDACMGTIASFLSKYQDIIIEHQKVVKGNQKRLESLRELAGKENLEYPSVTLPPQPHTKEGVDAYNEVIARVRMWVNLNLWQKLKLSRDDAKPLLRLKGFPSFPLVERQANEVDWWDMVCNVKKLINEKKEDGKVFWQNLAGYKRQEALRPYLSSEEDRKKGKKFARYQLGDLLLHLEKKHGEDWGKVYDEAWERIDKKVEGLSKHIKLEEERRSEDAQSKAALTDWLRAKASFVIEGLKEADKDEFCRCELKLQKWYGDLRGKPFAIEAENSILDISGFSKQYNCAFIWQKDGVKKLNLYLIINYFKGGKLRFKKIKPEAFEANRFYTVINKKSGEIVPMEVNFNFDDPNLIILPLAFGKRQGREFIWNDLLSLETGSLKLANGRVIEKTLYNRRTRQDEPALFVALTFERREVLDSSNIKPMNLIGVDRGENIPAVIALTDPEGCPLSRFKDSLGNPTHILRITESYKEKQREIQAKKEVEQRRAGGYSRKYASKAKNLADDMVRNTARDLLYYAVTQDAMLIFENLSRGFGRQGKRTFMAERQYTRMEDWLTAKLAYEGLPSKTYLSKTLAQYTSKTCSNCGFTITSADYDRVLEKLKKTATGWMTTINGKELKVEGQITYYNRYKRQNVVKDLSVELDRLSEESVNNDISSWTKGRSGEALSLLKKRFSHRPVQEKFVCLNCGFETHADEQAALNIARSWLFLRSQEYKKYQTNKTTGNTDKRAFVETWQSFYRKKLKEVWKPAV

SEQ ID NO: 26030 - protein, 978 aa, synthetic construct
  REGION 1..978: note = engineered CasX variant
QEIKRINKIRRRLVKDSNTKKAGKTGPMKTLLVRVMTPDLRERLENLRKKPENIPQPISNTSRANLNKLLTDYTEMKKAILHVYWEEFQKDPVGLMSRVAQPASKKIDQNKLKPEMDEKGNLTTAGFACSQCGQPLFVYKLEQVSEKGKAYTNYFGRCNVAEHEKLILLAQLKPEKDSDEAVTYSLGKFGQRALDFYSIHVTKESTHPVKPLAQIAGNRYASGPVGKALSDACMGTIASFLSKYQDIIIEHQKVVKGNQKRLESLRELAGKENLEYPSVTLPPQPHTKEGVDAYNEVIARVRMWVNLNLWQKLKLSRDDAKPLLRLKGFPSFPLVERQANEVDWWDMVCNVKKLINEKKEDGKVFWQNLAGYKRQEALRPYLSSEEDRKKGKKFARYQLGDLLLHLEKKHGEDWGKVYDEAWERIDKKVEGLSKHIKLEEERRSEDAQSKAALTDWLRAKASFVIEGLKEADKDEFCRCELKLQKWYGDLRGKPFAIEAENSILDISGFSKQYNCAFIWQKDGVKKLNLYLIINYFKGGKLRFKKIKPEAFEANRFYTVINKKSGEIVPMEVNFNFDDPNLIILPLAFGKRQGREFIWNDLLSLETGSLKLANGRVIEKTLYNRRTRQDEPALFVALTFERREVLDSSNIKPMNLIGVDRGENIPAVIALTDPEGCPLSRFKDSLGNPTHILRITESYKEKQREIQAKKEVEQKRAGGYSRKYASKAKNLADDMVRNTARDLLYYAVTQDAMLIFENLSRGFGRQGKRTFMAERQYTRMEDWLTAKLAYEGLPSKTYLSKTLAQYTSKTCSNCGFTITSADYDRVLEKLKKTATGWMTTINGKELKVEGQITYYNRYKRQNVVKDLSVELDRLSEESVNNDISSWTKGRSGEALSLLKKRFSHRPVQEKFVCLNCGFETHADEQAALNIARSWLFLRSQEYKKYQTNKTTGNTDKRAFVETWQSFYRKKLKEVWKPAV

SEQ ID NO: 26031 - protein, 978 aa, synthetic construct
  REGION 1..978: note = engineered CasX variant
QEIKRINKIRRRLVKDSNTKKAGKTGPMKTLLVRVMTPDLRERLENLRKKPENIPQPISNTSRANLNKLLTDYTEMKKAILHVYWEEFQKDPVGLMSRVAQPASKKIDQNKLKPEMDEKGNLTTAGFACSQCGQPLFVYKLEQVSEKGKAYTNYFGRCNVAEHEKLILLAQLKPEKDSDEAVTYSLGKFGQRALDFYSIHVTKESTHPVKPLAQIAGNRYASGPVGKALSDACMGTIASFLSKYQDIIIEHQKVVKGNQKRLESLRELAGKENLEYPSVTLPPQPHTKEGVDAYNEVIARVRMWVNLNLWQKLKLSRDDAKPLLRLKGFPSFPLVERQANEVDWWDMVCNVKKLINEKKEDGKVFWQNLAGYKRQEALRPYLSSEEDRKKGKKFARYQLGDLLLHLEKKHGEDWGKVYDEAWERIDKKVEGLSKHIKLEEERRSEDAQSKAALTDWLRAKASFVIEGLKEADKDEFCRCELKLQKWYGDLRGKPFAIEAENSILDISGFSKQYNCAFIWQKDGVKKLNLYLIINYFKGGKLRFKKIKPEAFEANRFYTVINKKSGEIVPMEVNFNFDDPNLIILPLAFGKRQGREFIWNDLLSLETGSLKLANGRVIEKTLYNRRTRQDEPALFVALTFERREVLDSSNIKPMNLIGVDRGENIPAVIALTDPEGCPLSRFKDSLGNPTHILRISESYKEKQRTIQAKKEVEQRRAGGYSRKYASKAKNLADDMVRNTARDLLYYAVTQDAMLIFENLSRGFGRQGKRTFMAERQYTRMEDWLTAKLAYEGLPSKTYLSKTLAQYTSKTCSNCGFTITSADYDRVLEKLKKTATGWMTTINGKELKVEGQITYYNRYKRQNVVKDLSVELDRLSEESVNNDISSWTKGRSGEALSLLKKRFSHRPVQEKFVCLNCGFETHADEQAALNIARSWLFLRSQEYKKYQTNKTTGNTDKRAFVETWQSFYRKKLKEVWKPAV

SEQ ID NO: 26032 - protein, 978 aa, synthetic construct
  REGION 1..978: note = engineered CasX variant
QEIKRINKIRRRLVKDSNTKKAGKTGPMKTLLVRVMTPDLRERLENLRKKPENIPQPISNTSRANLNKLLTDYTEMKKAILHVYWEEFQKDPVGLMSRVAQPASKKIDQNKLKPEMDEKGNLTTAGFACSQCGQPLFVYKLEQVSEKGKAYTNYFGRCNVAEHEKLILLAQLKPEKDSDEAVTYSLGKFGQRALDFYSIHVTKESTHPVKPLAQIAGNRYASGPVGKALSDACMGTIASFLSKYQDIIIEHQKVVKGNQKRLESLRELAGKENLEYPSVTLPPQPHTKEGVDAYNEVIARVRMWVNLNLWQKLKLSRDDAKPLLRLKGFPSFPLVERQANEVDWWDMVCNVKKLINEKKEDGKVFWQNLAGYKRQEALRPYLSSEEDRKKGKKFARYQLGDLLLHLEKKHGEDWGKVYDEAWERIDKKVEGLSKHIKLEEERRSEDAQSKAALTDWLRAKASFVIEGLKEADKDEFCRCELKLQKWYGDLRGKPFAIEAENSILDISGFSKQYNCAFIWQKDGVKKLNLYLIINYFKGGKLRFKKIKPEAFEANRFYTVINKKSGEIVPMEVNFNFDDPNLIILPLAFGKRQGREFIWNDLLSLETGSLKLANGRVIEKTLYNRRTRQDEPALFVALTFERREVLDSSNIKPMNLIGVDRGENIPAVIALTDPEGCPLSRFKDSLGNPTHILRISESYKEKQRTIQAKKEVEQRRAGFYSRKYASKAKNLADDMVRNTARDLLYYAVTQDAMLIFENLSRGFGRQGKRTFMAERQYTRMEDWLTAKLAYEGLPSKTYLSKTLAQYTSKTCSNCGFTITSADYDRVLEKLKKTATGWMTTINGKELKVEGQITYYNRYKRQNVVKDLSVELDRLSEESVNNDISSWTKGRSGEALSLLKKRFSHRPVQEKFVCLNCGFETHADEQAALNIARSWLFLRSQEYKKYQTNKTTGNTDKRAFVETWQSFYRKKLKEVWKPAV

SEQ ID NO: 26033 - protein, 978 aa, synthetic construct
  REGION 1..978: note = engineered CasX variant
QEIKRINKIRRRLVKDSNTKKAGKTGPMKTLLVRVMTPDLRERLENLRKKPENIPQPISNTSRANLNKLLTDYTEMKKAILHVYWEEFQKDPVGLMSRVAQPASKKIDQNKLKPEMDEKGNLTTAGFACSQCGQPLFVYKLEQVSEKGKAYTNYFGRCNVAEHEKLILLAQLKPEKDSDEAVTYSLGKFGQRALDFYSIHVTKESTHPVKPLAQIAGNRYASGPVGKALSDACMGTIASFLSKYQDIIIEHQKVVKGNQKRLESLRELAGKENLEYPSVTLPPQPHTKEGVDAYNEVIARVRMWVNLNLWQKLKLSRDDAKPLLRLKGFPSFPLVERQANEVDWWDMVCNVKKLINEKKEDGKVFWQNLAGYKRQEALRPYLSSEEDRKKGKKFARYQLGDLLLHLEKKHGEDWGKVYDEAWERIDKKVEGLSKHIKLEEERRSEDAQSKAALTDWLRAKASFVIEGLKEADKDEFCRCELKLQKWYGDLRGKPFAIEAENSILDISGFSKQYNCAFIWQKDGVKKLNLYLIINYFKGGKLRFKKIKPEAFEANRFYTVINKKSGEIVPMEVNFNFDDPNLIILPLAFGKRQGREFIWNDLLSLETGSLKLANGRVIEKTLYNRRTRQDEPALFVALTFERREVLDSSNIKPMNLIGVDRGENIPAVIALTDPEGCPLSRFKDSLGNPTHILRIRESYKEYQRTIQAKKEVEQRRAGIYSRKYASKAKNLADDMVRNTARDLLYYAVTQDAMLIFENLSRGFGRQGKRTFMAERQYTRMEDWLTAKLAYEGLPSKTYLSKTLAQYTSKTCSNCGFTITSADYDRVLEKLKKTATGWMTTINGKELKVEGQITYYNRYKRQNVVKDLSVELDRLSEESVNNDISSWTKGRSGEALSLLKKRFSHRPVQEKFVCLNCGFETHADEQAALNIARSWLFLRSQEYKKYQTNKTTGNTDKRAFVETWQSFYRKKLKEVWKPAV

SEQ ID NO: 26034 - protein, 978 aa, synthetic construct
  REGION 1..978: note = engineered CasX variant
QEIKRINKIRRRLVKDSNTKKAGKTGPMKTLLVRVMTPDLRERLENLRKKPENIPQPISNTSRANLNKLLTDYTEMKKAILHVYWEEFQKDPVGLMSRVAQPASKKIDQNKLKPEMDEKGNLTTAGFACSQCGQPLFVYKLEQVSEKGKAYTNYFGRCNVAEHEKLILLAQLKPEKDSDEAVTYSLGKFGQRALDFYSIHVTKESTHPVKPLAQIAGNRYASGPVGKALSDACMGTIASFLSKYQDIIIEHQKVVKGNQKRLESLRELAGKENLEYPSVTLPPQPHTKEGVDAYNEVIARVRMWVNLNLWQKLKLSRDDAKPLLRLKGFPSFPLVERQANEVDWWDMVCNVKKLINEKKEDGKVFWQNLAGYKRQEALRPYLSSEEDRKKGKKFARYQLGDLLLHLEKKHGEDWGKVYDEAWERIDKKVEGLSKHIKLEEERRSEDAQSKAALTDWLRAKASFVIEGLKEADKDEFCRCELKLQKWYGDLRGKPFAIEAENSILDISGFSKQYNCAFIWQKDGVKKLNLYLIINYFKGGKLRFKKIKPEAFEANRFYTVINKKSGEIVPMEVNFNFDDPNLIILPLAFGKRQGREFIWNDLLSLETGSLKLANGRVIEKTLYNRRTRQDEPALFVALTFERREVLDSSNIKPMNLIGVDRGENIPAVIALTDPEGCPLSRFKDSLGNPTHILRIRESYKEYQRTIQAKKEVEQRRAGGYSRKYASKAKNLADDMVRNTARDLLYYAVTQDAMLIFENLSRGFGRQGKRTFMAERQYTRMEDWLTAKLAYEGLPSKTYLSKTLAQYTSKTCSNCGFTITSADYDRVLEKLKKTATGWMTTINGKELKVEGQITYYNRYKRQNVVKDLSVELDRLSEESVNNDISSWTKGRSGEALSLLKKRFSHRPVQEKFVCLNCGFETHADEQAALNIARSWLFLRSQEYKKYQTNKTTGNTDKRAFVETWQSFYRKKLKEVWKPAV

SEQ ID NO: 26035 - protein, 978 aa, synthetic construct
  REGION 1..978: note = engineered CasX variant
QEIKRINKIRRRLVKDSNTKKAGKTGPMKTLLVRVMTPDLRERLENLRKKPENIPQPISNTSRANLNKLLTDYTEMKKAILHVYWEEFQKDPVGLMSRVAQPASKKIDQNKLKPEMDEKGNLTTAGFACSQCGQPLFVYKLEQVSEKGKAYTNYFGRCNVAEHEKLILLAQLKPEKDSDEAVTYSLGKFGQRALDFYSIHVTKESTHPVKPLAQIAGNRYASGPVGKALSDACMGTIASFLSKYQDIIIEHQKVVKGNQKRLESLRELAGKENLEYPSVTLPPQPHTKEGVDAYNEVIARVRMWVNLNLWQKLKLSRDDAKPLLRLKGFPSFPLVERQANEVDWWDMVCNVKKLINEKKEDGKVFWQNLAGYKRQEALRPYLSSEEDRKKGKKFARYQLGDLLLHLEKKHGEDWGKVYDEAWERIDKKVEGLSKHIKLEEERRSEDAQSKAALTDWLRAKASFVIEGLKEADKDEFCRCELKLQKWYGDLRGKPFAIEAENSILDISGFSKQYNCAFIWQKDGVKKLNLYLIINYFKGGKLRFKKIKPEAFEANRFYTVINKKSGEIVPMEVNFNFDDPNLIILPLAFGKRQGREFIWNDLLSLETGSLKLANGRVIEKTLYNRRTRQDEPALFVALTFERREVLDSSNIKPMNLIGVDRGENIPAVIALTDPEGCPLSRFKDSLGNPTHILRIRESYKEKQRTYQAKKVVEQRRAGGYSRKYASKAKNLADDMVRNTARDLLYYAVTQDAMLIFENLSRGFGRQGKRTFMAERQYTRMEDWLTAKLAYEGLPSKTYLSKTLAQYTSKTCSNCGFTITSADYDRVLEKLKKTATGWMTTINGKELKVEGQITYYNRYKRQNVVKDLSVELDRLSEESVNNDISSWTKGRSGEALSLLKKRFSHRPVQEKFVCLNCGFETHADEQAALNIARSWLFLRSQEYKKYQTNKTTGNTDKRAFVETWQSFYRKKLKEVWKPAV

SEQ ID NO: 26036 - protein, 978 aa, synthetic construct
  REGION 1..978: note = engineered CasX variant
QEIKRINKIRRRLVKDSNTKKAGKTGPMKTLLVRVMTPDLRERLENLRKKPENIPQPISNTSRANLNKLLTDYTEMKKAILHVYWEEFQKDPVGLMSRVAQPASKKIDQNKLKPEMDEKGNLTTAGFACSQCGQPLFVYKLEQVSEKGKAYTNYFGRCNVAEHEKLILLAQLKPEKDSDEAVTYSLGKFGQRALDFYSIHVTKESTHPVKPLAQIAGNRYASGPVGKALSDACMGTIASFLSKYQDIIIEHQKVVKGNQKRLESLRELAGKENLEYPSVTLPPQPHTKEGVDAYNEVIARVRMWVNLNLWQKLKLSRDDAKPLLRLKGFPSFPLVERQANEVDWWDMVCNVKKLINEKKEDGKVFWQNLAGYKRQEALRPYLSSEEDRKKGKKFARYQLGDLLLHLEKKHGEDWGKVYDEAWERIDKKVEGLSKHIKLEEERRSEDAQSKAALTDWLRAKASFVIEGLKEADKDEFCRCELKLQKWYGDLRGKPFAIEAENSILDISGFSKQYNCAFIWQKDGVKKLNLYLIINYFKGGKLRFKKIKPEAFEANRFYTVINKKSGEIVPMEVNFNFDDPNLIILPLAFGKRQGREFIWNDLLSLETGSLKLANGRVIEKTLYNRRTRQDEPALFVALTFERREVLDSSNIKPMNLIGVDRGENIPAVIALTDPEGCPLSRFKDSLGNPTHILRIRESYKEKQRTYQAKKEVEQRRAGGYSRKYASKAKNLADDMVRNTARDLLYYAVTQDAMLIFENLSRGFGRQGKRTFMAERQYTRMEDWLTAKLAYEGLPSKTYLSKTLAQYTSKTCSNCGFTITSADYDRVLEKLKKTATGWMTTINGKELKVEGQITYYNRYKRQNVVKDLSVELDRLSEESVNNDISSWTKGRSGEALSLLKKRFSHRPVQEKFVCLNCGFETHADEQAALNIARSWLFLRSQEYKKYQTNKTTGNTDKRAFVETWQSFYRKKLKEVWKPAV

SEQ ID NO: 26037 - protein, 978 aa, synthetic construct
  REGION 1..978: note = engineered CasX variant
QEIKRINKIRRRLVKDSNTKKAGKTGPMKTLLVRVMTPDLRERLENLRKKPENIPQPISNTSRANLNKLLTDYTEMKKAILHVYWEEFQKDPVGLMSRVAQPASKKIDQNKLKPEMDEKGNLTTAGFACSQCGQPLFVYKLEQVSEKGKAYTNYFGRCNVAEHEKLILLAQLKPEKDSDEAVTYSLGKFGQRALDFYSIHVTKESTHPVKPLAQIAGNRYASGPVGKALSDACMGTIASFLSKYQDIIIEHQKVVKGNQKRLESLRELAGKENLEYPSVTLPPQPHTKEGVDAYNEVIARVRMWVNLNLWQKLKLSRDDAKPLLRLKGFPSFPLVERQANEVDWWDMVCNVKKLINEKKEDGKVFWQNLAGYKRQEALRPYLSSEEDRKKGKKFARYQLGDLLLHLEKKHGEDWGKVYDEAWERIDKKVEGLSKHIKLEEERRSEDAQSKAALTDWLRAKASFVIEGLKEADKDEFCRCELKLQKWYGDLRGKPFAIEAENSILDISGFSKQYNCAFIWQKDGVKKLNLYLIINYFKGGKLRFKKIKPEAFEANRFYTVINKKSGEIVPMEVNFNFDDPNLIILPLAFGKRQGREFIWNDLLSLETGSLKLANGRVIEKTLYNRRTRQDEPALFVALTFERREVLDSSNIKPMNLIGVDRGENIPAVIALTDPEGCPLSRFKDSLGNPTHILRIRESYKEKQRTIQAKKVVEQRRAGGYSRKYASKAKNLADDMVRNTARDLLYYAVTQDAMLIFENLSRGFGRQGKRTFMAERQYTRMEDWLTAKLAYEGLPSKTYLSKTLAQYTSKTCSNCGFTITSADYDRVLEKLKKTATGWMTTINGKELKVEGQITYYNRYKRQNVVKDLSVELDRLSEESVNNDISSWTKGRSGEALSLLKKRFSHRPVQEKFVCLNCGFETHADEQAALNIARSWLFLRSQEYKKYQTNKTTGNTDKRAFVETWQSFYRKKLKEVWKPAV

SEQ ID NO: 26038 - protein, 978 aa, synthetic construct
  REGION 1..978: note = engineered CasX variant
QEIKRINKIRRRLVKDSNTKKAGKTGPMKTLLVRVMTPDLRERLENLRKKPENIPQPISNTSRANLNKLLTDYTEMKKAILHVYWEEFQKDPVGLMSRVAQPASKKIDQNKLKPEMDEKGNLTTAGFACSQCGQPLFVYKLEQVSEKGKAYTNYFGRCNVAEHEKLILLAQLKPEKDSDEAVTYSLGKFGQRALDFYSIHVTKESTHPVKPLAQIAGNRYASGPVGKALSDACMGTIASFLSKYQDIIIEHQKVVKGNQKRLESLRELAGKENLEYPSVTLPPQPHTKEGVDAYNEVIARVRMWVNLNLWQKLKLSRDDAKPLLRLKGFPSFPLVERQANEVDWWDMVCNVKKLINEKKEDGKVFWQNLAGYKRQEALRPYLSSEEDRKKGKKFARYQLGDLLLHLEKKHGEDWGKVYDEAWERIDKKVEGLSKHIKLEEERRSEDAQSKAALTDWLRAKASFVIEGLKEADKDEFCRCELKLQKWYGDLRGKPFAIEAENSILDISGFSKQYNCAFIWQKDGVKKLNLYLIINYFKGGKLRFKKIKPEAFEANRFYTVINKKSGEIVPMEVNFNFDDPNLIILPLAFGKRQGREFIWNDLLSLETGSLKLANGRVIEKTLYNRRTRQDEPALFVALTFERREVLDSSNIKPMNLIGVDRGENIPAVIALTDPEGCPLSRFKDSLGNPTHILRIRESYKEKQRTIQAKKEVEQRRAGIYSRKYASKAKNLADDMVRNTARDLLYYAVTQDAMLIFENLSRGFGRQGKRTFMAERQYTRMEDWLTAKLAYEGLPSKTYLSKTLAQYTSKTCSNCGFTITSADYDRVLEKLKKTATGWMTTINGKELKVEGQITYYNRYKRQNVVKDLSVELDRLSEESVNNDISSWTKGRSGEALSLLKKRFSHRPVQEKFVCLNCGFETHADEQAALNIARSWLFLRSQEYKKYQTNKTTGNTDKRAFVETWQSFYRKKLKEVWKPAV

SEQ ID NO: 26039 - protein, 978 aa, synthetic construct
  REGION 1..978: note = engineered CasX variant
QEIKRINKIRRRLVKDSNTKKAGKTGPMKTLLVRVMTPDLRERLENLRKKPENIPQPISNTSRANLNKLLTDYTEMKKAILHVYWEEFQKDPVGLMSRVAQPASKKIDQNKLKPEMDEKGNLTTAGFACSQCGQPLFVYKLEQVSEKGKAYTNYFGRCNVAEHEKLILLAQLKPEKDSDEAVTYSLGKFGQRALDFYSIHVTKESTHPVKPLAQIAGNRYASGPVGKALSDACMGTIASFLSKYQDIIIEHQKVVKGNQKRLESLRELAGKENLEYPSVTLPPQPHTKEGVDAYNEVIARVRMWVNLNLWQKLKLSRDDAKPLLRLKGFPSFPLVERQANEVDWWDMVCNVKKLINEKKEDGKVFWQNLAGYKRQEALRPYLSSEEDRKKGKKFARYQLGDLLLHLEKKHGEDWGKVYDEAWERIDKKVEGLSKHIKLEEERRSEDAQSKAALTDWLRAKASFVIEGLKEADKDEFCRCELKLQKWYGDLRGKPFAIEAENSILDISGFSKQYNCAFIWQKDGVKKLNLYLIINYFKGGKLRFKKIKPEAFEANRFYTVINKKSGEIVPMEVNFNFDDPNLIILPLAFGKRQGREFIWNDLLSLETGSLKLANGRVIEKTLYNRRTRQDEPALFVALTFERREVLDSSNIKPMNLIGVDRGENIPAVIALTDPEGCPLSRFKDSLGNPTHILRIRESYKEKQRTIQAKKEVEQRRAGGYSRKYASKAKNLADDMVRNTARDLLYYAVTQDAMLIFENLSRGFGRQGKRTFMAERQYTRMEDWLTAKLAYEGLPSKTYLSKTLAQYTSKTCSNCGFTITSADYDRVLEKLKKTATGWMTTINGKELKVEGQITYYNRYKRQNVVKDLSVELDRLSEESVNNDISSWTKGRSGEALSLLKKRFSHRPVQEKFVCLNCGFETHADEQAALNIARSWLFLRSQEYKKYQTNKTTGNTDKRAFVETWQSFYRKKLKEVWKPAV

SEQ ID NO: 26040 - protein, 978 aa, synthetic construct
  REGION 1..978: note = engineered CasX variant
QEIKRINKIRRRLVKDSNTKKAGKTGPMKTLLVRVMTPDLRERLENLRKKPENIPQPISNTSRANLNKLLTDYTEMKKAILHVYWEEFQKDPVGLMSRVAQPASKKIDQNKLKPEMDEKGNLTTAGFACSQCGQPLFVYKLEQVSEKGKAYTNYFGRCNVAEHEKLILLAQLKPEKDSDEAVTYSLGKFGQRALDFYSIHVTKESTHPVKPLAQIAGNRYASGPVGKALSDACMGTIASFLSKYQDIIIEHQKVVKGNQKRLESLRELAGKENLEYPSVTLPPQPHTKEGVDAYNEVIARVRMWVNLNLWQKLKLSRDDAKPLLRLKGFPSFPLVERQANEVDWWDMVCNVKKLINEKKEDGKVFWQNLAGYKRQEALRPYLSSEEDRKKGKKFARYQLGDLLLHLEKKHGEDWGKVYDEAWERIDKKVEGLSKHIKLEEERRSEDAQSKAALTDWLRAKASFVIEGLKEADKDEFCRCELKLQKWYGDLRGKPFAIEAENSILDISGFSKQYNCAFIWQKDGVKKLNLYLIINYFKGGKLRFKKIKPEAFEANRFYTVINKKSGEIVPMEVNFNFDDPNLIILPLAFGKRQGREFIWNDLLSLETGSLKLANGRVIEKTLYNRRTRQDEPALFVALTFERREVLDSSNIKPMNLIGVDRGENIPAVIALTDPEGCPLSRFKDSLGNPTHILRIRESYKEKQRTIQAKAEVEQRRAGGYSRKYASKAKNLADDMVRNTARDLLYYAVTQDAMLIFENLSRGFGRQGKRTFMAERQYTRMEDWLTAKLAYEGLPSKTYLSKTLAQYTSKTCSNCGFTITSADYDRVLEKLKKTATGWMTTINGKELKVEGQITYYNRYKRQNVVKDLSVELDRLSEESVNNDISSWTKGRSGEALSLLKKRFSHRPVQEKFVCLNCGFETHADEQAALNIARSWLFLRSQEYKKYQTNKTTGNTDKRAFVETWQSFYRKKLKEVWKPAV

SEQ ID NO: 26041 - protein, 978 aa, synthetic construct
  REGION 1..978: note = engineered CasX variant
QEIKRINKIRRRLVKDSNTKKAGKTGPMKTLLVRVMTPDLRERLENLRKKPENIPQPISNTSRANLNKLLTDYTEMKKAILHVYWEEFQKDPVGLMSRVAQPASKKIDQNKLKPEMDEKGNLTTAGFACSQCGQPLFVYKLEQVSEKGKAYTNYFGRCNVAEHEKLILLAQLKPEKDSDEAVTYSLGKFGQRALDFYSIHVTKESTHPVKPLAQIAGNRYASGPVGKALSDACMGTIASFLSKYQDIIIEHQKVVKGNQKRLESLRELAGKENLEYPSVTLPPQPHTKEGVDAYNEVIARVRMWVNLNLWQKLKLSRDDAKPLLRLKGFPSFPLVERQANEVDWWDMVCNVKKLINEKKEDGKVFWQNLAGYKRQEALRPYLSSEEDRKKGKKFARYQLGDLLLHLEKKHGEDWGKVYDEAWERIDKKVEGLSKHIKLEEERRSEDAQSKAALTDWLRAKASFVIEGLKEADKDEFCRCELKLQKWYGDLRGKPFAIEAENSILDISGFSKQYNCAFIWQKDGVKKLNLYLIINYFKGGKLRFKKIKPEAFEANRFYTVINKKSGEIVPMEVNFNFDDPNLIILPLAFGKRQGREFIWNDLLSLETGSLKLANGRVIEKTLYNRRTRQDEPALFVALTFERREVLDSSNIKPMNLIGVDRGENIPAVIALTDPEGCPLSRFKDSLGNPTHILRIQESYKEKQRTIQAKKTVEQRRAGGYSRKYASKAKNLADDMVRNTARDLLYYAVTQDAMLIFENLSRGFGRQGKRTFMAERQYTRMEDWLTAKLAYEGLPSKTYLSKTLAQYTSKTCSNCGFTITSADYDRVLEKLKKTATGWMTTINGKELKVEGQITYYNRYKRQNVVKDLSVELDRLSEESVNNDISSWTKGRSGEALSLLKKRFSHRPVQEKFVCLNCGFETHADEQAALNIARSWLFLRSQEYKKYQTNKTTGNTDKRAFVETWQSFYRKKLKEVWKPAV

SEQ ID NO: 26042 - protein, 978 aa, synthetic construct
  REGION 1..978: note = engineered CasX variant
QEIKRINKIRRRLVKDSNTKKAGKTGPMKTLLVRVMTPDLRERLENLRKKPENIPQPISNTSRANLNKLLTDYTEMKKAILHVYWEEFQKDPVGLMSRVAQPASKKIDQNKLKPEMDEKGNLTTAGFACSQCGQPLFVYKLEQVSEKGKAYTNYFGRCNVAEHEKLILLAQLKPEKDSDEAVTYSLGKFGQRALDFYSIHVTKESTHPVKPLAQIAGNRYASGPVGKALSDACMGTIASFLSKYQDIIIEHQKVVKGNQKRLESLRELAGKENLEYPSVTLPPQPHTKEGVDAYNEVIARVRMWVNLNLWQKLKLSRDDAKPLLRLKGFPSFPLVERQANEVDWWDMVCNVKKLINEKKEDGKVFWQNLAGYKRQEALRPYLSSEEDRKKGKKFARYQLGDLLLHLEKKHGEDWGKVYDEAWERIDKKVEGLSKHIKLEEERRSEDAQSKAALTDWLRAKASFVIEGLKEADKDEFCRCELKLQKWYGDLRGKPFAIEAENSILDISGFSKQYNCAFIWQKDGVKKLNLYLIINYFKGGKLRFKKIKPEAFEANRFYTVINKKSGEIVPMEVNFNFDDPNLIILPLAFGKRQGREFIWNDLLSLETGSLKLANGRVIEKTLYNRRTRQDEPALFVALTFERREVLDSSNIKPMNLIGVDRGENIPAVIALTDPEGCPLSRFKDSLGNPTHILRIQESYKEKQRTIQAKKEVEQRREGGYSRKYASKAKNLADDMVRNTARDLLYYAVTQDAMLIFENLSRGFGRQGKRTFMAERQYTRMEDWLTAKLAYEGLPSKTYLSKTLAQYTSKTCSNCGFTITSADYDRVLEKLKKTATGWMTTINGKELKVEGQITYYNRYKRQNVVKDLSVELDRLSEESVNNDISSWTKGRSGEALSLLKKRFSHRPVQEKFVCLNCGFETHADEQAALNIARSWLFLRSQEYKKYQTNKTTGNTDKRAFVETWQSFYRKKLKEVWKPAV

SEQ ID NO: 26043 - protein, 978 aa, synthetic construct
  REGION 1..978: note = engineered CasX variant
QEIKRINKIRRRLVKDSNTKKAGKTGPMKTLLVRVMTPDLRERLENLRKKPENIPQPISNTSRANLNKLLTDYTEMKKAILHVYWEEFQKDPVGLMSRVAQPASKKIDQNKLKPEMDEKGNLTTAGFACSQCGQPLFVYKLEQVSEKGKAYTNYFGRCNVAEHEKLILLAQLKPEKDSDEAVTYSLGKFGQRALDFYSIHVTKESTHPVKPLAQIAGNRYASGPVGKALSDACMGTIASFLSKYQDIIIEHQKVVKGNQKRLESLRELAGKENLEYPSVTLPPQPHTKEGVDAYNEVIARVRMWVNLNLWQKLKLSRDDAKPLLRLKGFPSFPLVERQANEVDWWDMVCNVKKLINEKKEDGKVFWQNLAGYKRQEALRPYLSSEEDRKKGKKFARYQLGDLLLHLEKKHGEDWGKVYDEAWERIDKKVEGLSKHIKLEEERRSEDAQSKAALTDWLRAKASFVIEGLKEADKDEFCRCELKLQKWYGDLRGKPFAIEAENSILDISGFSKQYNCAFIWQKDGVKKLNLYLIINYFKGGKLRFKKIKPEAFEANRFYTVINKKSGEIVPMEVNFNFDDPNLIILPLAFGKRQGREFIWNDLLSLETGSLKLANGRVIEKTLYNRRTRQDEPALFVALTFERREVLDSSNIKPMNLIGVDRGENIPAVIALTDPEGCPLSRFKDSLGNPTHILRIQESYKEKQRTIQAKKEVEQRRAYGYSRKYASKAKNLADDMVRNTARDLLYYAVTQDAMLIFENLSRGFGRQGKRTFMAERQYTRMEDWLTAKLAYEGLPSKTYLSKTLAQYTSKTCSNCGFTITSADYDRVLEKLKKTATGWMTTINGKELKVEGQITYYNRYKRQNVVKDLSVELDRLSEESVNNDISSWTKGRSGEALSLLKKRFSHRPVQEKFVCLNCGFETHADEQAALNIARSWLFLRSQEYKKYQTNKTTGNTDKRAFVETWQSFYRKKLKEVWKPAV

SEQ ID NO: 26044 - protein, 978 aa, synthetic construct
  REGION 1..978: note = engineered CasX variant
QEIKRINKIRRRLVKDSNTKKAGKTGPMKTLLVRVMTPDLRERLENLRKKPENIPQPISNTSRANLNKLLTDYTEMKKAILHVYWEEFQKDPVGLMSRVAQPASKKIDQNKLKPEMDEKGNLTTAGFACSQCGQPLFVYKLEQVSEKGKAYTNYFGRCNVAEHEKLILLAQLKPEKDSDEAVTYSLGKFGQRALDFYSIHVTKESTHPVKPLAQIAGNRYASGPVGKALSDACMGTIASFLSKYQDIIIEHQKVVKGNQKRLESLRELAGKENLEYPSVTLPPQPHTKEGVDAYNEVIARVRMWVNLNLWQKLKLSRDDAKPLLRLKGFPSFPLVERQANEVDWWDMVCNVKKLINEKKEDGKVFWQNLAGYKRQEALRPYLSSEEDRKKGKKFARYQLGDLLLHLEKKHGEDWGKVYDEAWERIDKKVEGLSKHIKLEEERRSEDAQSKAALTDWLRAKASFVIEGLKEADKDEFCRCELKLQKWYGDLRGKPFAIEAENSILDISGFSKQYNCAFIWQKDGVKKLNLYLIINYFKGGKLRFKKIKPEAFEANRFYTVINKKSGEIVPMEVNFNFDDPNLIILPLAFGKRQGREFIWNDLLSLETGSLKLANGRVIEKTLYNRRTRQDEPALFVALTFERREVLDSSNIKPMNLIGVDRGENIPAVIALTDPEGCPLSRFKDSLGNPTHILRIQESYKEKQRTIQAKKEVEQRRAGGYSRKYASKAKNLADDMVRNTARDLLYYAVTQDAMLIFENLSRGFGRQGKRTFMAERQYTRMEDWLTAKLAYEGLPSKTYLSKTLAQYTSKTCSNCGFTITSADYDRVLEKLKKTATGWMTTINGKELKVEGQITYYNRYKRQNVVKDLSVELDRLSEESVNNDISSWTKGRSGEALSLLKKRFSHRPVQEKFVCLNCGFETHADEQAALNIARSWLFLRSQEYKKYQTNKTTGNTDKRAFVETWQSFYRKKLKEVWKPAV

SEQ ID NO: 26045 - protein, 978 aa, synthetic construct
  REGION 1..978: note = engineered CasX variant
QEIKRINKIRRRLVKDSNTKKAGKTGPMKTLLVRVMTPDLRERLENLRKKPENIPQPISNTSRANLNKLLTDYTEMKKAILHVYWEEFQKDPVGLMSRVAQPASKKIDQNKLKPEMDEKGNLTTAGFACSQCGQPLFVYKLEQVSEKGKAYTNYFGRCNVAEHEKLILLAQLKPEKDSDEAVTYSLGKFGQRALDFYSIHVTKESTHPVKPLAQIAGNRYASGPVGKALSDACMGTIASFLSKYQDIIIEHQKVVKGNQKRLESLRELAGKENLEYPSVTLPPQPHTKEGVDAYNEVIARVRMWVNLNLWQKLKLSRDDAKPLLRLKGFPSFPLVERQANEVDWWDMVCNVKKLINEKKEDGKVFWQNLAGYKRQEALRPYLSSEEDRKKGKKFARYQLGDLLLHLEKKHGEDWGKVYDEAWERIDKKVEGLSKHIKLEEERRSEDAQSKAALTDWLRAKASFVIEGLKEADKDEFCRCELKLQKWYGDLRGKPFAIEAENSILDISGFSKQYNCAFIWQKDGVKKLNLYLIINYFKGGKLRFKKIKPEAFEANRFYTVINKKSGEIVPMEVNFNFDDPNLIILPLAFGKRQGREFIWNDLLSLETGSLKLANGRVIEKTLYNRRTRQDEPALFVALTFERREVLDSSNIKPMNLIGVDRGENIPAVIALTDPEGCPLSRFKDSLGNPTHILRIQESYKEKQRTIQAKKESEQRRAYGYSRKYASKAKNLADDMVRNTARDLLYYAVTQDAMLIFENLSRGFGRQGKRTFMAERQYTRMEDWLTAKLAYEGLPSKTYLSKTLAQYTSKTCSNCGFTITSADYDRVLEKLKKTATGWMTTINGKELKVEGQITYYNRYKRQNVVKDLSVELDRLSEESVNNDISSWTKGRSGEALSLLKKRFSHRPVQEKFVCLNCGFETHADEQAALNIARSWLFLRSQEYKKYQTNKTTGNTDKRAFVETWQSFYRKKLKEVWKPAV

SEQ ID NO: 26046 - protein, 978 aa, synthetic construct
  REGION 1..978: note = engineered CasX variant
QEIKRINKIRRRLVKDSNTKKAGKTGPMKTLLVRVMTPDLRERLENLRKKPENIPQPISNTSRANLNKLLTDYTEMKKAILHVYWEEFQKDPVGLMSRVAQPASKKIDQNKLKPEMDEKGNLTTAGFACSQCGQPLFVYKLEQVSEKGKAYTNYFGRCNVAEHEKLILLAQLKPEKDSDEAVTYSLGKFGQRALDFYSIHVTKESTHPVKPLAQIAGNRYASGPVGKALSDACMGTIASFLSKYQDIIIEHQKVVKGNQKRLESLRELAGKENLEYPSVTLPPQPHTKEGVDAYNEVIARVRMWVNLNLWQKLKLSRDDAKPLLRLKGFPSFPLVERQANEVDWWDMVCNVKKLINEKKEDGKVFWQNLAGYKRQEALRPYLSSEEDRKKGKKFARYQLGDLLLHLEKKHGEDWGKVYDEAWERIDKKVEGLSKHIKLEEERRSEDAQSKAALTDWLRAKASFVIEGLKEADKDEFCRCELKLQKWYGDLRGKPFAIEAENSILDISGFSKQYNCAFIWQKDGVKKLNLYLIINYFKGGKLRFKKIKPEAFEANRFYTVINKKSGEIVPMEVNFNFDDPNLIILPLAFGKRQGREFIWNDLLSLETGSLKLANGRVIEKTLYNRRTRQDEPALFVALTFERREVLDSSNIKPMNLIGVDRGENIPAVIALTDPEGCPLSRFKDSLGNPTHILRIQESYKEKQRTIQAKKESEQRRAGGYSRKYASKAKNLADDMVRNTARDLLYYAVTQDAMLIFENLSRGFGRQGKRTFMAERQYTRMEDWLTAKLAYEGLPSKTYLSKTLAQYTSKTCSNCGFTITSADYDRVLEKLKKTATGWMTTINGKELKVEGQITYYNRYKRQNVVKDLSVELDRLSEESVNNDISSWTKGRSGEALSLLKKRFSHRPVQEKFVCLNCGFETHADEQAALNIARSWLFLRSQEYKKYQTNKTTGNTDKRAFVETWQSFYRKKLKEVWKPAV

SEQ ID NO: 26047 - protein, 978 aa, synthetic construct
  REGION 1..978: note = engineered CasX variant
QEIKRINKIRRRLVKDSNTKKAGKTGPMKTLLVRVMTPDLRERLENLRKKPENIPQPISNTSRANLNKLLTDYTEMKKAILHVYWEEFQKDPVGLMSRVAQPASKKIDQNKLKPEMDEKGNLTTAGFACSQCGQPLFVYKLEQVSEKGKAYTNYFGRCNVAEHEKLILLAQLKPEKDSDEAVTYSLGKFGQRALDFYSIHVTKESTHPVKPLAQIAGNRYASGPVGKALSDACMGTIASFLSKYQDIIIEHQKVVKGNQKRLESLRELAGKENLEYPSVTLPPQPHTKEGVDAYNEVIARVRMWVNLNLWQKLKLSRDDAKPLLRLKGFPSFPLVERQANEVDWWDMVCNVKKLINEKKEDGKVFWQNLAGYKRQEALRPYLSSEEDRKKGKKFARYQLGDLLLHLEKKHGEDWGKVYDEAWERIDKKVEGLSKHIKLEEERRSEDAQSKAALTDWLRAKASFVIEGLKEADKDEFCRCELKLQKWYGDLRGKPFAIEAENSILDISGFSKQYNCAFIWQKDGVKKLNLYLIINYFKGGKLRFKKIKPEAFEANRFYTVINKKSGEIVPMEVNFNFDDPNLIILPLAFGKRQGREFIWNDLLSLETGSLKLANGRVIEKTLYNRRTRQDEPALFVALTFERREVLDSSNIKPMNLIGVDRGENIPAVIALTDPEGCPLSRFKDSLGNPTHILRIQESYKEKQRTIQAHKEVEQRRAGGYSRKYASKAKNLADDMVRNTARDLLYYAVTQDAMLIFENLSRGFGRQGKRTFMAERQYTRMEDWLTAKLAYEGLPSKTYLSKTLAQYTSKTCSNCGFTITSADYDRVLEKLKKTATGWMTTINGKELKVEGQITYYNRYKRQNVVKDLSVELDRLSEESVNNDISSWTKGRSGEALSLLKKRFSHRPVQEKFVCLNCGFETHADEQAALNIARSWLFLRSQEYKKYQTNKTTGNTDKRAFVETWQSFYRKKLKEVWKPAV

SEQ ID NO: 26048 - protein, 978 aa, synthetic construct
  REGION 1..978: note = engineered CasX variant
QEIKRINKIRRRLVKDSNTKKAGKTGPMKTLLVRVMTPDLRERLENLRKKPENIPQPISNTSRANLNKLLTDYTEMKKAILHVYWEEFQKDPVGLMSRVAQPASKKIDQNKLKPEMDEKGNLTTAGFACSQCGQPLFVYKLEQVSEKGKAYTNYFGRCNVAEHEKLILLAQLKPEKDSDEAVTYSLGKFGQRALDFYSIHVTKESTHPVKPLAQIAGNRYASGPVGKALSDACMGTIASFLSKYQDIIIEHQKVVKGNQKRLESLRELAGKENLEYPSVTLPPQPHTKEGVDAYNEVIARVRMWVNLNLWQKLKLSRDDAKPLLRLKGFPSFPLVERQANEVDWWDMVCNVKKLINEKKEDGKVFWQNLAGYKRQEALRPYLSSEEDRKKGKKFARYQLGDLLLHLEKKHGEDWGKVYDEAWERIDKKVEGLSKHIKLEEERRSEDAQSKAALTDWLRAKASFVIEGLKEADKDEFCRCELKLQKWYGDLRGKPFAIEAENSILDISGFSKQYNCAFIWQKDGVKKLNLYLIINYFKGGKLRFKKIKPEAFEANRFYTVINKKSGEIVPMEVNFNFDDPNLIILPLAFGKRQGREFIWNDLLSLETGSLKLANGRVIEKTLYNRRTRQDEPALFVALTFERREVLDSSNIKPMNLIGVDRGENIPAVIALTDPEGCPLSRFKDSLGNPTHILRIQESYKEKQRTFQAKKEVEQRRAGGYSRKYASKAKNLADDMVRNTARDLLYYAVTQDAMLIFENLSRGFGRQGKRTFMAERQYTRMEDWLTAKLAYEGLPSKTYLSKTLAQYTSKTCSNCGFTITSADYDRVLEKLKKTATGWMTTINGKELKVEGQITYYNRYKRQNVVKDLSVELDRLSEESVNNDISSWTKGRSGEALSLLKKRFSHRPVQEKFVCLNCGFETHADEQAALNIARSWLFLRSQEYKKYQTNKTTGNTDKRAFVETWQSFYRKKLKEVWKPAV

SEQ ID NO: 26049 - protein, 978 aa, synthetic construct
  REGION 1..978: note = engineered CasX variant
QEIKRINKIRRRLVKDSNTKKAGKTGPMKTLLVRVMTPDLRERLENLRKKPENIPQPISNTSRANLNKLLTDYTEMKKAILHVYWEEFQKDPVGLMSRVAQPASKKIDQNKLKPEMDEKGNLTTAGFACSQCGQPLFVYKLEQVSEKGKAYTNYFGRCNVAEHEKLILLAQLKPEKDSDEAVTYSLGKFGQRALDFYSIHVTKESTHPVKPLAQIAGNRYASGPVGKALSDACMGTIASFLSKYQDIIIEHQKVVKGNQKRLESLRELAGKENLEYPSVTLPPQPHTKEGVDAYNEVIARVRMWVNLNLWQKLKLSRDDAKPLLRLKGFPSFPLVERQANEVDWWDMVCNVKKLINEKKEDGKVFWQNLAGYKRQEALRPYLSSEEDRKKGKKFARYQLGDLLLHLEKKHGEDWGKVYDEAWERIDKKVEGLSKHIKLEEERRSEDAQSKAALTDWLRAKASFVIEGLKEADKDEFCRCELKLQKWYGDLRGKPFAIEAENSILDISGFSKQYNCAFIWQKDGVKKLNLYLIINYFKGGKLRFKKIKPEAFEANRFYTVINKKSGEIVPMEVNFNFDDPNLIILPLAFGKRQGREFIWNDLLSLETGSLKLANGRVIEKTLYNRRTRQDEPALFVALTFERREVLDSSNIKPMNLIGVDRGENIPAVIALTDPEGCPLSRFKDSLGNPTHILRIQERYKEKQRTIQAKKEVEQRREGGYSRKYASKAKNLADDMVRNTARDLLYYAVTQDAMLIFENLSRGFGRQGKRTFMAERQYTRMEDWLTAKLAYEGLPSKTYLSKTLAQYTSKTCSNCGFTITSADYDRVLEKLKKTATGWMTTINGKELKVEGQITYYNRYKRQNVVKDLSVELDRLSEESVNNDISSWTKGRSGEALSLLKKRFSHRPVQEKFVCLNCGFETHADEQAALNIARSWLFLRSQEYKKYQTNKTTGNTDKRAFVETWQSFYRKKLKEVWKPAV

SEQ ID NO: 26050 - protein, 978 aa, synthetic construct
  REGION 1..978: note = engineered CasX variant
QEIKRINKIRRRLVKDSNTKKAGKTGPMKTLLVRVMTPDLRERLENLRKKPENIPQPISNTSRANLNKLLTDYTEMKKAILHVYWEEFQKDPVGLMSRVAQPASKKIDQNKLKPEMDEKGNLTTAGFACSQCGQPLFVYKLEQVSEKGKAYTNYFGRCNVAEHEKLILLAQLKPEKDSDEAVTYSLGKFGQRALDFYSIHVTKESTHPVKPLAQIAGNRYASGPVGKALSDACMGTIASFLSKYQDIIIEHQKVVKGNQKRLESLRELAGKENLEYPSVTLPPQPHTKEGVDAYNEVIARVRMWVNLNLWQKLKLSRDDAKPLLRLKGFPSFPLVERQANEVDWWDMVCNVKKLINEKKEDGKVFWQNLAGYKRQEALRPYLSSEEDRKKGKKFARYQLGDLLLHLEKKHGEDWGKVYDEAWERIDKKVEGLSKHIKLEEERRSEDAQSKAALTDWLRAKASFVIEGLKEADKDEFCRCELKLQKWYGDLRGKPFAIEAENSILDISGFSKQYNCAFIWQKDGVKKLNLYLIINYFKGGKLRFKKIKPEAFEANRFYTVINKKSGEIVPMEVNFNFDDPNLIILPLAFGKRQGREFIWNDLLSLETGSLKLANGRVIEKTLYNRRTRQDEPALFVALTFERREVLDSSNIKPMNLIGVDRGENIPAVIALTDPEGCPLSRFKDSLGNPTHILRIQERYKEKQRTIQAKKEVEQRRAGGYSRKYASKAKNLADDMVRNTARDLLYYAVTQDAMLIFENLSRGFGRQGKRTFMAERQYTRMEDWLTAKLAYEGLPSKTYLSKTLAQYTSKTCSNCGFTITSADYDRVLEKLKKTATGWMTTINGKELKVEGQITYYNRYKRQNVVKDLSVELDRLSEESVNNDISSWTKGRSGEALSLLKKRFSHRPVQEKFVCLNCGFETHADEQAALNIARSWLFLRSQEYKKYQTNKTTGNTDKRAFVETWQSFYRKKLKEVWKPAV

SEQ ID NO: 26051 - protein, 978 aa, synthetic construct
  REGION 1..978: note = engineered CasX variant
QEIKRINKIRRRLVKDSNTKKAGKTGPMKTLLVRVMTPDLRERLENLRKKPENIPQPISNTSRANLNKLLTDYTEMKKAILHVYWEEFQKDPVGLMSRVAQPASKKIDQNKLKPEMDEKGNLTTAGFACSQCGQPLFVYKLEQVSEKGKAYTNYFGRCNVAEHEKLILLAQLKPEKDSDEAVTYSLGKFGQRALDFYSIHVTKESTHPVKPLAQIAGNRYASGPVGKALSDACMGTIASFLSKYQDIIIEHQKVVKGNQKRLESLRELAGKENLEYPSVTLPPQPHTKEGVDAYNEVIARVRMWVNLNLWQKLKLSRDDAKPLLRLKGFPSFPLVERQANEVDWWDMVCNVKKLINEKKEDGKVFWQNLAGYKRQEALRPYLSSEEDRKKGKKFARYQLGDLLLHLEKKHGEDWGKVYDEAWERIDKKVEGLSKHIKLEEERRSEDAQSKAALTDWLRAKASFVIEGLKEADKDEFCRCELKLQKWYGDLRGKPFAIEAENSILDISGFSKQYNCAFIWQKDGVKKLNLYLIINYFKGGKLRFKKIKPEAFEANRFYTVINKKSGEIVPMEVNFNFDDPNLIILPLAFGKRQGREFIWNDLLSLETGSLKLANGRVIEKTLYNRRTRQDEPALFVALTFERREVLDSSNIKPMNLIGVDRGENIPAVIALTDPEGCPLSRFKDSLGNPTHILRIPESYKEKQRTIQAKKEVEQRRAGGYSRKYASKAKNLADDMVRNTARDLLYYAVTQDAMLIFENLSRGFGRQGKRTFMAERQYTRMEDWLTAKLAYEGLPSKTYLSKTLAQYTSKTCSNCGFTITSADYDRVLEKLKKTATGWMTTINGKELKVEGQITYYNRYKRQNVVKDLSVELDRLSEESVNNDISSWTKGRSGEALSLLKKRFSHRPVQEKFVCLNCGFETHADEQAALNIARSWLFLRSQEYKKYQTNKTTGNTDKRAFVETWQSFYRKKLKEVWKPAV

SEQ ID NO: 26052 - protein, 978 aa, synthetic construct
  REGION 1..978: note = engineered CasX variant
QEIKRINKIRRRLVKDSNTKKAGKTGPMKTLLVRVMTPDLRERLENLRKKPENIPQPISNTSRANLNKLLTDYTEMKKAILHVYWEEFQKDPVGLMSRVAQPASKKIDQNKLKPEMDEKGNLTTAGFACSQCGQPLFVYKLEQVSEKGKAYTNYFGRCNVAEHEKLILLAQLKPEKDSDEAVTYSLGKFGQRALDFYSIHVTKESTHPVKPLAQIAGNRYASGPVGKALSDACMGTIASFLSKYQDIIIEHQKVVKGNQKRLESLRELAGKENLEYPSVTLPPQPHTKEGVDAYNEVIARVRMWVNLNLWQKLKLSRDDAKPLLRLKGFPSFPLVERQANEVDWWDMVCNVKKLINEKKEDGKVFWQNLAGYKRQEALRPYLSSEEDRKKGKKFARYQLGDLLLHLEKKHGEDWGKVYDEAWERIDKKVEGLSKHIKLEEERRSEDAQSKAALTDWLRAKASFVIEGLKEADKDEFCRCELKLQKWYGDLRGKPFAIEAENSILDISGFSKQYNCAFIWQKDGVKKLNLYLIINYFKGGKLRFKKIKPEAFEANRFYTVINKKSGEIVPMEVNFNFDDPNLIILPLAFGKRQGREFIWNDLLSLETGSLKLANGRVIEKTLYNRRTRQDEPALFVALTFERREVLDSSNIKPMNLIGVDRGENIPAVIALTDPEGCPLSRFKDSLGNPTHILRINESYKEKQRTIQAKKEVEQRRAGGYSRKYASKAKNLADDMVRNTARDLLYYAVTQDAMLIFENLSRGFGRQGKRTFMAERQYTRMEDWLTAKLAYEGLPSKTYLSKTLAQYTSKTCSNCGFTITSADYDRVLEKLKKTATGWMTTINGKELKVEGQITYYNRYKRQNVVKDLSVELDRLSEESVNNDISSWTKGRSGEALSLLKKRFSHRPVQEKFVCLNCGFETHADEQAALNIARSWLFLRSQEYKKYQTNKTTGNTDKRAFVETWQSFYRKKLKEVWKPAV

SEQ ID NO: 26053 - protein, 978 aa, synthetic construct
  REGION 1..978: note = engineered CasX variant
QEIKRINKIRRRLVKDSNTKKAGKTGPMKTLLVRVMTPDLRERLENLRKKPENIPQPISNTSRANLNKLLTDYTEMKKAILHVYWEEFQKDPVGLMSRVAQPASKKIDQNKLKPEMDEKGNLTTAGFACSQCGQPLFVYKLEQVSEKGKAYTNYFGRCNVAEHEKLILLAQLKPEKDSDEAVTYSLGKFGQRALDFYSIHVTKESTHPVKPLAQIAGNRYASGPVGKALSDACMGTIASFLSKYQDIIIEHQKVVKGNQKRLESLRELAGKENLEYPSVTLPPQPHTKEGVDAYNEVIARVRMWVNLNLWQKLKLSRDDAKPLLRLKGFPSFPLVERQANEVDWWDMVCNVKKLINEKKEDGKVFWQNLAGYKRQEALRPYLSSEEDRKKGKKFARYQLGDLLLHLEKKHGEDWGKVYDEAWERIDKKVEGLSKHIKLEEERRSEDAQSKAALTDWLRAKASFVIEGLKEADKDEFCRCELKLQKWYGDLRGKPFAIEAENSILDISGFSKQYNCAFIWQKDGVKKLNLYLIINYFKGGKLRFKKIKPEAFEANRFYTVINKKSGEIVPMEVNFNFDDPNLIILPLAFGKRQGREFIWNDLLSLETGSLKLANGRVIEKTLYNRRTRQDEPALFVALTFERREVLDSSNIKPMNLIGVDRGENIPAVIALTDPEGCPLSRFKDSLGNPTHILRINESYKAKQRTIQAKKEVEQRRAGGYSRKYASKAKNLADDMVRNTARDLLYYAVTQDAMLIFENLSRGFGRQGKRTFMAERQYTRMEDWLTAKLAYEGLPSKTYLSKTLAQYTSKTCSNCGFTITSADYDRVLEKLKKTATGWMTTINGKELKVEGQITYYNRYKRQNVVKDLSVELDRLSEESVNNDISSWTKGRSGEALSLLKKRFSHRPVQEKFVCLNCGFETHADEQAALNIARSWLFLRSQEYKKYQTNKTTGNTDKRAFVETWQSFYRKKLKEVWKPAV

SEQ ID NO: 26054 - protein, 978 aa, synthetic construct
  REGION 1..978: note = engineered CasX variant
QEIKRINKIRRRLVKDSNTKKAGKTGPMKTLLVRVMTPDLRERLENLRKKPENIPQPISNTSRANLNKLLTDYTEMKKAILHVYWEEFQKDPVGLMSRVAQPASKKIDQNKLKPEMDEKGNLTTAGFACSQCGQPLFVYKLEQVSEKGKAYTNYFGRCNVAEHEKLILLAQLKPEKDSDEAVTYSLGKFGQRALDFYSIHVTKESTHPVKPLAQIAGNRYASGPVGKALSDACMGTIASFLSKYQDIIIEHQKVVKGNQKRLESLRELAGKENLEYPSVTLPPQPHTKEGVDAYNEVIARVRMWVNLNLWQKLKLSRDDAKPLLRLKGFPSFPLVERQANEVDWWDMVCNVKKLINEKKEDGKVFWQNLAGYKRQEALRPYLSSEEDRKKGKKFARYQLGDLLLHLEKKHGEDWGKVYDEAWERIDKKVEGLSKHIKLEEERRSEDAQSKAALTDWLRAKASFVIEGLKEADKDEFCRCELKLQKWYGDLRGKPFAIEAENSILDISGFSKQYNCAFIWQKDGVKKLNLYLIINYFKGGKLRFKKIKPEAFEANRFYTVINKKSGEIVPMEVNFNFDDPNLIILPLAFGKRQGREFIWNDLLSLETGSLKLANGRVIEKTLYNRRTRQDEPALFVALTFERREVLDSSNIKPMNLIGVDRGENIPAVIALTDPEGCPLSRFKDSLGNPTHILRINESMKEKQRTIQAKKEVEQRRAGGYSRKYASKAKNLADDMVRNTARDLLYYAVTQDAMLIFENLSRGFGRQGKRTFMAERQYTRMEDWLTAKLAYEGLPSKTYLSKTLAQYTSKTCSNCGFTITSADYDRVLEKLKKTATGWMTTINGKELKVEGQITYYNRYKRQNVVKDLSVELDRLSEESVNNDISSWTKGRSGEALSLLKKRFSHRPVQEKFVCLNCGFETHADEQAALNIARSWLFLRSQEYKKYQTNKTTGNTDKRAFVETWQSFYRKKLKEVWKPAV

SEQ ID NO: 26055 - protein, 978 aa, synthetic construct
  REGION 1..978: note = engineered CasX variant
QEIKRINKIRRRLVKDSNTKKAGKTGPMKTLLVRVMTPDLRERLENLRKKPENIPQPISNTSRANLNKLLTDYTEMKKAILHVYWEEFQKDPVGLMSRVAQPASKKIDQNKLKPEMDEKGNLTTAGFACSQCGQPLFVYKLEQVSEKGKAYTNYFGRCNVAEHEKLILLAQLKPEKDSDEAVTYSLGKFGQRALDFYSIHVTKESTHPVKPLAQIAGNRYASGPVGKALSDACMGTIASFLSKYQDIIIEHQKVVKGNQKRLESLRELAGKENLEYPSVTLPPQPHTKEGVDAYNEVIARVRMWVNLNLWQKLKLSRDDAKPLLRLKGFPSFPLVERQANEVDWWDMVCNVKKLINEKKEDGKVFWQNLAGYKRQEALRPYLSSEEDRKKGKKFARYQLGDLLLHLEKKHGEDWGKVYDEAWERIDKKVEGLSKHIKLEEERRSEDAQSKAALTDWLRAKASFVIEGLKEADKDEFCRCELKLQKWYGDLRGKPFAIEAENSILDISGFSKQYNCAFIWQKDGVKKLNLYLIINYFKGGKLRFKKIKPEAFEANRFYTVINKKSGEIVPMEVNFNFDDPNLIILPLAFGKRQGREFIWNDLLSLETGSLKLANGRVIEKTLYNRRTRQDEPALFVALTFERREVLDSSNIKPMNLIGVDRGENIPAVIALTDPEGCPLSRFKDSLGNPTHILRINEKYKEKQRTIQAKKEVEQRRAGGYSRKYASKAKNLADDMVRNTARDLLYYAVTQDAMLIFENLSRGFGRQGKRTFMAERQYTRMEDWLTAKLAYEGLPSKTYLSKTLAQYTSKTCSNCGFTITSADYDRVLEKLKKTATGWMTTINGKELKVEGQITYYNRYKRQNVVKDLSVELDRLSEESVNNDISSWTKGRSGEALSLLKKRFSHRPVQEKFVCLNCGFETHADEQAALNIARSWLFLRSQEYKKYQTNKTTGNTDKRAFVETWQSFYRKKLKEVWKPAV

SEQ ID NO: 26056 - protein, 978 aa, synthetic construct
  REGION 1..978: note = engineered CasX variant
QEIKRINKIRRRLVKDSNTKKAGKTGPMKTLLVRVMTPDLRERLENLRKKPENIPQPISNTSRANLNKLLTDYTEMKKAILHVYWEEFQKDPVGLMSRVAQPASKKIDQNKLKPEMDEKGNLTTAGFACSQCGQPLFVYKLEQVSEKGKAYTNYFGRCNVAEHEKLILLAQLKPEKDSDEAVTYSLGKFGQRALDFYSIHVTKESTHPVKPLAQIAGNRYASGPVGKALSDACMGTIASFLSKYQDIIIEHQKVVKGNQKRLESLRELAGKENLEYPSVTLPPQPHTKEGVDAYNEVIARVRMWVNLNLWQKLKLSRDDAKPLLRLKGFPSFPLVERQANEVDWWDMVCNVKKLINEKKEDGKVFWQNLAGYKRQEALRPYLSSEEDRKKGKKFARYQLGDLLLHLEKKHGEDWGKVYDEAWERIDKKVEGLSKHIKLEEERRSEDAQSKAALTDWLRAKASFVIEGLKEADKDEFCRCELKLQKWYGDLRGKPFAIEAENSILDISGFSKQYNCAFIWQKDGVKKLNLYLIINYFKGGKLRFKKIKPEAFEANRFYTVINKKSGEIVPMEVNFNFDDPNLIILPLAFGKRQGREFIWNDLLSLETGSLKLANGRVIEKTLYNRRTRQDEPALFVALTFERREVLDSSNIKPMNLIGVDRGENIPAVIALTDPEGCPLSRFKDSLGNPTHILRIKESYKEKQRTIQAKKEVEQRRAGGYSRKYASKAKNLADDMVRNTARDLLYYAVTQDAMLIFENLSRGFGRQGKRTFMAERQYTRMEDWLTAKLAYEGLPSKTYLSKTLAQYTSKTCSNCGFTITSADYDRVLEKLKKTATGWMTTINGKELKVEGQITYYNRYKRQNVVKDLSVELDRLSEESVNNDISSWTKGRSGEALSLLKKRFSHRPVQEKFVCLNCGFETHADEQAALNIARSWLFLRSQEYKKYQTNKTTGNTDKRAFVETWQSFYRKKLKEVWKPAV

SEQ ID NO: 26057 - protein, 978 aa, synthetic construct
  REGION 1..978: note = engineered CasX variant
QEIKRINKIRRRLVKDSNTKKAGKTGPMKTLLVRVMTPDLRERLENLRKKPENIPQPISNTSRANLNKLLTDYTEMKKAILHVYWEEFQKDPVGLMSRVAQPASKKIDQNKLKPEMDEKGNLTTAGFACSQCGQPLFVYKLEQVSEKGKAYTNYFGRCNVAEHEKLILLAQLKPEKDSDEAVTYSLGKFGQRALDFYSIHVTKESTHPVKPLAQIAGNRYASGPVGKALSDACMGTIASFLSKYQDIIIEHQKVVKGNQKRLESLRELAGKENLEYPSVTLPPQPHTKEGVDAYNEVIARVRMWVNLNLWQKLKLSRDDAKPLLRLKGFPSFPLVERQANEVDWWDMVCNVKKLINEKKEDGKVFWQNLAGYKRQEALRPYLSSEEDRKKGKKFARYQLGDLLLHLEKKHGEDWGKVYDEAWERIDKKVEGLSKHIKLEEERRSEDAQSKAALTDWLRAKASFVIEGLKEADKDEFCRCELKLQKWYGDLRGKPFAIEAENSILDISGFSKQYNCAFIWQKDGVKKLNLYLIINYFKGGKLRFKKIKPEAFEANRFYTVINKKSGEIVPMEVNFNFDDPNLIILPLAFGKRQGREFIWNDLLSLETGSLKLANGRVIEKTLYNRRTRQDEPALFVALTFERREVLDSSNIKPMNLIGVDRGENIPAVIALTDPEGCPLSRFKDSLGNPTHILRIKESYKEKQQTIQAKKEVEQRRAGGYSRKYASKAKNLADDMVRNTARDLLYYAVTQDAMLIFENLSRGFGRQGKRTFMAERQYTRMEDWLTAKLAYEGLPSKTYLSKTLAQYTSKTCSNCGFTITSADYDRVLEKLKKTATGWMTTINGKELKVEGQITYYNRYKRQNVVKDLSVELDRLSEESVNNDISSWTKGRSGEALSLLKKRFSHRPVQEKFVCLNCGFETHADEQAALNIARSWLFLRSQEYKKYQTNKTTGNTDKRAFVETWQSFYRKKLKEVWKPAV

SEQ ID NO: 26058 - protein, 978 aa, synthetic construct
  REGION 1..978: note = engineered CasX variant
QEIKRINKIRRRLVKDSNTKKAGKTGPMKTLLVRVMTPDLRERLENLRKKPENIPQPISNTSRANLNKLLTDYTEMKKAILHVYWEEFQKDPVGLMSRVAQPASKKIDQNKLKPEMDEKGNLTTAGFACSQCGQPLFVYKLEQVSEKGKAYTNYFGRCNVAEHEKLILLAQLKPEKDSDEAVTYSLGKFGQRALDFYSIHVTKESTHPVKPLAQIAGNRYASGPVGKALSDACMGTIASFLSKYQDIIIEHQKVVKGNQKRLESLRELAGKENLEYPSVTLPPQPHTKEGVDAYNEVIARVRMWVNLNLWQKLKLSRDDAKPLLRLKGFPSFPLVERQANEVDWWDMVCNVKKLINEKKEDGKVFWQNLAGYKRQEALRPYLSSEEDRKKGKKFARYQLGDLLLHLEKKHGEDWGKVYDEAWERIDKKVEGLSKHIKLEEERRSEDAQSKAALTDWLRAKASFVIEGLKEADKDEFCRCELKLQKWYGDLRGKPFAIEAENSILDISGFSKQYNCAFIWQKDGVKKLNLYLIINYFKGGKLRFKKIKPEAFEANRFYTVINKKSGEIVPMEVNFNFDDPNLIILPLAFGKRQGREFIWNDLLSLETGSLKLANGRVIEKTLYNRRTRQDEPALFVALTFERREVLDSSNIKPMNLIGVDRGENIPAVIALTDPEGCPLSRFKDSLGNPTHILRIHESYKEKQRTIQAKKEVEQRRAGGYSRKYASKAKNLADDMVRNTARDLLYYAVTQDAMLIFENLSRGFGRQGKRTFMAERQYTRMEDWLTAKLAYEGLPSKTYLSKTLAQYTSKTCSNCGFTITSADYDRVLEKLKKTATGWMTTINGKELKVEGQITYYNRYKRQNVVKDLSVELDRLSEESVNNDISSWTKGRSGEALSLLKKRFSHRPVQEKFVCLNCGFETHADEQAALNIARSWLFLRSQEYKKYQTNKTTGNTDKRAFVETWQSFYRKKLKEVWKPAV

SEQ ID NO: 26059 - protein, 978 aa, synthetic construct
  REGION 1..978: note = engineered CasX variant
QEIKRINKIRRRLVKDSNTKKAGKTGPMKTLLVRVMTPDLRERLENLRKKPENIPQPISNTSRANLNKLLTDYTEMKKAILHVYWEEFQKDPVGLMSRVAQPASKKIDQNKLKPEMDEKGNLTTAGFACSQCGQPLFVYKLEQVSEKGKAYTNYFGRCNVAEHEKLILLAQLKPEKDSDEAVTYSLGKFGQRALDFYSIHVTKESTHPVKPLAQIAGNRYASGPVGKALSDACMGTIASFLSKYQDIIIEHQKVVKGNQKRLESLRELAGKENLEYPSVTLPPQPHTKEGVDAYNEVIARVRMWVNLNLWQKLKLSRDDAKPLLRLKGFPSFPLVERQANEVDWWDMVCNVKKLINEKKEDGKVFWQNLAGYKRQEALRPYLSSEEDRKKGKKFARYQLGDLLLHLEKKHGEDWGKVYDEAWERIDKKVEGLSKHIKLEEERRSEDAQSKAALTDWLRAKASFVIEGLKEADKDEFCRCELKLQKWYGDLRGKPFAIEAENSILDISGFSKQYNCAFIWQKDGVKKLNLYLIINYFKGGKLRFKKIKPEAFEANRFYTVINKKSGEIVPMEVNFNFDDPNLIILPLAFGKRQGREFIWNDLLSLETGSLKLANGRVIEKTLYNRRTRQDEPALFVALTFERREVLDSSNIKPMNLIGVDRGENIPAVIALTDPEGCPLSRFKDSLGNPTHILRIHESFKEKQRTIQAKKEVEQRRAGGYSRKYASKAKNLADDMVRNTARDLLYYAVTQDAMLIFENLSRGFGRQGKRTFMAERQYTRMEDWLTAKLAYEGLPSKTYLSKTLAQYTSKTCSNCGFTITSADYDRVLEKLKKTATGWMTTINGKELKVEGQITYYNRYKRQNVVKDLSVELDRLSEESVNNDISSWTKGRSGEALSLLKKRFSHRPVQEKFVCLNCGFETHADEQAALNIARSWLFLRSQEYKKYQTNKTTGNTDKRAFVETWQSFYRKKLKEVWKPAV

SEQ ID NO: 26060 - protein, 978 aa, synthetic construct
  REGION 1..978: note = engineered CasX variant
QEIKRINKIRRRLVKDSNTKKAGKTGPMKTLLVRVMTPDLRERLENLRKKPENIPQPISNTSRANLNKLLTDYTEMKKAILHVYWEEFQKDPVGLMSRVAQPASKKIDQNKLKPEMDEKGNLTTAGFACSQCGQPLFVYKLEQVSEKGKAYTNYFGRCNVAEHEKLILLAQLKPEKDSDEAVTYSLGKFGQRALDFYSIHVTKESTHPVKPLAQIAGNRYASGPVGKALSDACMGTIASFLSKYQDIIIEHQKVVKGNQKRLESLRELAGKENLEYPSVTLPPQPHTKEGVDAYNEVIARVRMWVNLNLWQKLKLSRDDAKPLLRLKGFPSFPLVERQANEVDWWDMVCNVKKLINEKKEDGKVFWQNLAGYKRQEALRPYLSSEEDRKKGKKFARYQLGDLLLHLEKKHGEDWGKVYDEAWERIDKKVEGLSKHIKLEEERRSEDAQSKAALTDWLRAKASFVIEGLKEADKDEFCRCELKLQKWYGDLRGKPFAIEAENSILDISGFSKQYNCAFIWQKDGVKKLNLYLIINYFKGGKLRFKKIKPEAFEANRFYTVINKKSGEIVPMEVNFNFDDPNLIILPLAFGKRQGREFIWNDLLSLETGSLKLANGRVIEKTLYNRRTRQDEPALFVALTFERREVLDSSNIKPMNLIGVDRGENIPAVIALTDPEGCPLSRFKDSLGNPTHILRIGYSYKEKQRTIQAKKEVEQRRAGGYSRKYASKAKNLADDMVRNTARDLLYYAVTQDAMLIFENLSRGFGRQGKRTFMAERQYTRMEDWLTAKLAYEGLPSKTYLSKTLAQYTSKTCSNCGFTITSADYDRVLEKLKKTATGWMTTINGKELKVEGQITYYNRYKRQNVVKDLSVELDRLSEESVNNDISSWTKGRSGEALSLLKKRFSHRPVQEKFVCLNCGFETHADEQAALNIARSWLFLRSQEYKKYQTNKTTGNTDKRAFVETWQSFYRKKLKEVWKPAV

SEQ ID NO: 26061 - protein, 978 aa, synthetic construct
  REGION 1..978: note = engineered CasX variant
QEIKRINKIRRRLVKDSNTKKAGKTGPMKTLLVRVMTPDLRERLENLRKKPENIPQPISNTSRANLNKLLTDYTEMKKAILHVYWEEFQKDPVGLMSRVAQPASKKIDQNKLKPEMDEKGNLTTAGFACSQCGQPLFVYKLEQVSEKGKAYTNYFGRCNVAEHEKLILLAQLKPEKDSDEAVTYSLGKFGQRALDFYSIHVTKESTHPVKPLAQIAGNRYASGPVGKALSDACMGTIASFLSKYQDIIIEHQKVVKGNQKRLESLRELAGKENLEYPSVTLPPQPHTKEGVDAYNEVIARVRMWVNLNLWQKLKLSRDDAKPLLRLKGFPSFPLVERQANEVDWWDMVCNVKKLINEKKEDGKVFWQNLAGYKRQEALRPYLSSEEDRKKGKKFARYQLGDLLLHLEKKHGEDWGKVYDEAWERIDKKVEGLSKHIKLEEERRSEDAQSKAALTDWLRAKASFVIEGLKEADKDEFCRCELKLQKWYGDLRGKPFAIEAENSILDISGFSKQYNCAFIWQKDGVKKLNLYLIINYFKGGKLRFKKIKPEAFEANRFYTVINKKSGEIVPMEVNFNFDDPNLIILPLAFGKRQGREFIWNDLLSLETGSLKLANGRVIEKTLYNRRTRQDEPALFVALTFERREVLDSSNIKPMNLIGVDRGENIPAVIALTDPEGCPLSRFKDSLGNPTHILRIGYSYKEKQRTIQAKKELEQRRAGGYSRKYASKAKNLADDMVRNTARDLLYYAVTQDAMLIFENLSRGFGRQGKRTFMAERQYTRMEDWLTAKLAYEGLPSKTYLSKTLAQYTSKTCSNCGFTITSADYDRVLEKLKKTATGWMTTINGKELKVEGQITYYNRYKRQNVVKDLSVELDRLSEESVNNDISSWTKGRSGEALSLLKKRFSHRPVQEKFVCLNCGFETHADEQAALNIARSWLFLRSQEYKKYQTNKTTGNTDKRAFVETWQSFYRKKLKEVWKPAV

SEQ ID NO: 26062 - protein, 978 aa, synthetic construct
  REGION 1..978: note = engineered CasX variant
QEIKRINKIRRRLVKDSNTKKAGKTGPMKTLLVRVMTPDLRERLENLRKKPENIPQPISNTSRANLNKLLTDYTEMKKAILHVYWEEFQKDPVGLMSRVAQPASKKIDQNKLKPEMDEKGNLTTAGFACSQCGQPLFVYKLEQVSEKGKAYTNYFGRCNVAEHEKLILLAQLKPEKDSDEAVTYSLGKFGQRALDFYSIHVTKESTHPVKPLAQIAGNRYASGPVGKALSDACMGTIASFLSKYQDIIIEHQKVVKGNQKRLESLRELAGKENLEYPSVTLPPQPHTKEGVDAYNEVIARVRMWVNLNLWQKLKLSRDDAKPLLRLKGFPSFPLVERQANEVDWWDMVCNVKKLINEKKEDGKVFWQNLAGYKRQEALRPYLSSEEDRKKGKKFARYQLGDLLLHLEKKHGEDWGKVYDEAWERIDKKVEGLSKHIKLEEERRSEDAQSKAALTDWLRAKASFVIEGLKEADKDEFCRCELKLQKWYGDLRGKPFAIEAENSILDISGFSKQYNCAFIWQKDGVKKLNLYLIINYFKGGKLRFKKIKPEAFEANRFYTVINKKSGEIVPMEVNFNFDDPNLIILPLAFGKRQGREFIWNDLLSLETGSLKLANGRVIEKTLYNRRTRQDEPALFVALTFERREVLDSSNIKPMNLIGVDRGENIPAVIALTDPEGCPLSRFKDSLGNPTHILRIGYSYKEKQRTFQAKKEVEQRRAGGYSRKYASKAKNLADDMVRNTARDLLYYAVTQDAMLIFENLSRGFGRQGKRTFMAERQYTRMEDWLTAKLAYEGLPSKTYLSKTLAQYTSKTCSNCGFTITSADYDRVLEKLKKTATGWMTTINGKELKVEGQITYYNRYKRQNVVKDLSVELDRLSEESVNNDISSWTKGRSGEALSLLKKRFSHRPVQEKFVCLNCGFETHADEQAALNIARSWLFLRSQEYKKYQTNKTTGNTDKRAFVETWQSFYRKKLKEVWKPAV

SEQ ID NO: 26063 - protein, 978 aa, synthetic construct
  REGION 1..978: note = engineered CasX variant
QEIKRINKIRRRLVKDSNTKKAGKTGPMKTLLVRVMTPDLRERLENLRKKPENIPQPISNTSRANLNKLLTDYTEMKKAILHVYWEEFQKDPVGLMSRVAQPASKKIDQNKLKPEMDEKGNLTTAGFACSQCGQPLFVYKLEQVSEKGKAYTNYFGRCNVAEHEKLILLAQLKPEKDSDEAVTYSLGKFGQRALDFYSIHVTKESTHPVKPLAQIAGNRYASGPVGKALSDACMGTIASFLSKYQDIIIEHQKVVKGNQKRLESLRELAGKENLEYPSVTLPPQPHTKEGVDAYNEVIARVRMWVNLNLWQKLKLSRDDAKPLLRLKGFPSFPLVERQANEVDWWDMVCNVKKLINEKKEDGKVFWQNLAGYKRQEALRPYLSSEEDRKKGKKFARYQLGDLLLHLEKKHGEDWGKVYDEAWERIDKKVEGLSKHIKLEEERRSEDAQSKAALTDWLRAKASFVIEGLKEADKDEFCRCELKLQKWYGDLRGKPFAIEAENSILDISGFSKQYNCAFIWQKDGVKKLNLYLIINYFKGGKLRFKKIKPEAFEANRFYTVINKKSGEIVPMEVNFNFDDPNLIILPLAFGKRQGREFIWNDLLSLETGSLKLANGRVIEKTLYNRRTRQDEPALFVALTFERREVLDSSNIKPMNLIGVDRGENIPAVIALTDPEGCPLSRFKDSLGNPTHILRIGVSYKEWQRTIQAKKEVEQRRAGGYSRKYASKAKNLADDMVRNTARDLLYYAVTQDAMLIFENLSRGFGRQGKRTFMAERQYTRMEDWLTAKLAYEGLPSKTYLSKTLAQYTSKTCSNCGFTITSADYDRVLEKLKKTATGWMTTINGKELKVEGQITYYNRYKRQNVVKDLSVELDRLSEESVNNDISSWTKGRSGEALSLLKKRFSHRPVQEKFVCLNCGFETHADEQAALNIARSWLFLRSQEYKKYQTNKTTGNTDKRAFVETWQSFYRKKLKEVWKPAV

SEQ ID NO: 26064 - protein, 978 aa, synthetic construct
  REGION 1..978: note = engineered CasX variant
QEIKRINKIRRRLVKDSNTKKAGKTGPMKTLLVRVMTPDLRERLENLRKKPENIPQPISNTSRANLNKLLTDYTEMKKAILHVYWEEFQKDPVGLMSRVAQPASKKIDQNKLKPEMDEKGNLTTAGFACSQCGQPLFVYKLEQVSEKGKAYTNYFGRCNVAEHEKLILLAQLKPEKDSDEAVTYSLGKFGQRALDFYSIHVTKESTHPVKPLAQIAGNRYASGPVGKALSDACMGTIASFLSKYQDIIIEHQKVVKGNQKRLESLRELAGKENLEYPSVTLPPQPHTKEGVDAYNEVIARVRMWVNLNLWQKLKLSRDDAKPLLRLKGFPSFPLVERQANEVDWWDMVCNVKKLINEKKEDGKVFWQNLAGYKRQEALRPYLSSEEDRKKGKKFARYQLGDLLLHLEKKHGEDWGKVYDEAWERIDKKVEGLSKHIKLEEERRSEDAQSKAALTDWLRAKASFVIEGLKEADKDEFCRCELKLQKWYGDLRGKPFAIEAENSILDISGFSKQYNCAFIWQKDGVKKLNLYLIINYFKGGKLRFKKIKPEAFEANRFYTVINKKSGEIVPMEVNFNFDDPNLIILPLAFGKRQGREFIWNDLLSLETGSLKLANGRVIEKTLYNRRTRQDEPALFVALTFERREVLDSSNIKPMNLIGVDRGENIPAVIALTDPEGCPLSRFKDSLGNPTHILRIGVSYKEKQRTIQAKKEVEQRRAGGYSRKYASKAKNLADDMVRNTARDLLYYAVTQDAMLIFENLSRGFGRQGKRTFMAERQYTRMEDWLTAKLAYEGLPSKTYLSKTLAQYTSKTCSNCGFTITSADYDRVLEKLKKTATGWMTTINGKELKVEGQITYYNRYKRQNVVKDLSVELDRLSEESVNNDISSWTKGRSGEALSLLKKRFSHRPVQEKFVCLNCGFETHADEQAALNIARSWLFLRSQEYKKYQTNKTTGNTDKRAFVETWQSFYRKKLKEVWKPAV

SEQ ID NO: 26065 - protein, 978 aa, synthetic construct
  REGION 1..978: note = engineered CasX variant
QEIKRINKIRRRLVKDSNTKKAGKTGPMKTLLVRVMTPDLRERLENLRKKPENIPQPISNTSRANLNKLLTDYTEMKKAILHVYWEEFQKDPVGLMSRVAQPASKKIDQNKLKPEMDEKGNLTTAGFACSQCGQPLFVYKLEQVSEKGKAYTNYFGRCNVAEHEKLILLAQLKPEKDSDEAVTYSLGKFGQRALDFYSIHVTKESTHPVKPLAQIAGNRYASGPVGKALSDACMGTIASFLSKYQDIIIEHQKVVKGNQKRLESLRELAGKENLEYPSVTLPPQPHTKEGVDAYNEVIARVRMWVNLNLWQKLKLSRDDAKPLLRLKGFPSFPLVERQANEVDWWDMVCNVKKLINEKKEDGKVFWQNLAGYKRQEALRPYLSSEEDRKKGKKFARYQLGDLLLHLEKKHGEDWGKVYDEAWERIDKKVEGLSKHIKLEEERRSEDAQSKAALTDWLRAKASFVIEGLKEADKDEFCRCELKLQKWYGDLRGKPFAIEAENSILDISGFSKQYNCAFIWQKDGVKKLNLYLIINYFKGGKLRFKKIKPEAFEANRFYTVINKKSGEIVPMEVNFNFDDPNLIILPLAFGKRQGREFIWNDLLSLETGSLKLANGRVIEKTLYNRRTRQDEPALFVALTFERREVLDSSNIKPMNLIGVDRGENIPAVIALTDPEGCPLSRFKDSLGNPTHILRIGTSYKEKQRTIQAKKQVEQRRAGGYSRKYASKAKNLADDMVRNTARDLLYYAVTQDAMLIFENLSRGFGRQGKRTFMAERQYTRMEDWLTAKLAYEGLPSKTYLSKTLAQYTSKTCSNCGFTITSADYDRVLEKLKKTATGWMTTINGKELKVEGQITYYNRYKRQNVVKDLSVELDRLSEESVNNDISSWTKGRSGEALSLLKKRFSHRPVQEKFVCLNCGFETHADEQAALNIARSWLFLRSQEYKKYQTNKTTGNTDKRAFVETWQSFYRKKLKEVWKPAV

SEQ ID NO: 26066 - protein, 978 aa, synthetic construct
  REGION 1..978: note = engineered CasX variant
QEIKRINKIRRRLVKDSNTKKAGKTGPMKTLLVRVMTPDLRERLENLRKKPENIPQPISNTSRANLNKLLTDYTEMKKAILHVYWEEFQKDPVGLMSRVAQPASKKIDQNKLKPEMDEKGNLTTAGFACSQCGQPLFVYKLEQVSEKGKAYTNYFGRCNVAEHEKLILLAQLKPEKDSDEAVTYSLGKFGQRALDFYSIHVTKESTHPVKPLAQIAGNRYASGPVGKALSDACMGTIASFLSKYQDIIIEHQKVVKGNQKRLESLRELAGKENLEYPSVTLPPQPHTKEGVDAYNEVIARVRMWVNLNLWQKLKLSRDDAKPLLRLKGFPSFPLVERQANEVDWWDMVCNVKKLINEKKEDGKVFWQNLAGYKRQEALRPYLSSEEDRKKGKKFARYQLGDLLLHLEKKHGEDWGKVYDEAWERIDKKVEGLSKHIKLEEERRSEDAQSKAALTDWLRAKASFVIEGLKEADKDEFCRCELKLQKWYGDLRGKPFAIEAENSILDISGFSKQYNCAFIWQKDGVKKLNLYLIINYFKGGKLRFKKIKPEAFEANRFYTVINKKSGEIVPMEVNFNFDDPNLIILPLAFGKRQGREFIWNDLLSLETGSLKLANGRVIEKTLYNRRTRQDEPALFVALTFERREVLDSSNIKPMNLIGVDRGENIPAVIALTDPEGCPLSRFKDSLGNPTHILRIGTSYKEKQRTIQAKKEVEQRRKGGYSRKYASKAKNLADDMVRNTARDLLYYAVTQDAMLIFENLSRGFGRQGKRTFMAERQYTRMEDWLTAKLAYEGLPSKTYLSKTLAQYTSKTCSNCGFTITSADYDRVLEKLKKTATGWMTTINGKELKVEGQITYYNRYKRQNVVKDLSVELDRLSEESVNNDISSWTKGRSGEALSLLKKRFSHRPVQEKFVCLNCGFETHADEQAALNIARSWLFLRSQEYKKYQTNKTTGNTDKRAFVETWQSFYRKKLKEVWKPAV

SEQ ID NO: 26067 - protein, 978 aa, synthetic construct
  REGION 1..978: note = engineered CasX variant
QEIKRINKIRRRLVKDSNTKKAGKTGPMKTLLVRVMTPDLRERLENLRKKPENIPQPISNTSRANLNKLLTDYTEMKKAILHVYWEEFQKDPVGLMSRVAQPASKKIDQNKLKPEMDEKGNLTTAGFACSQCGQPLFVYKLEQVSEKGKAYTNYFGRCNVAEHEKLILLAQLKPEKDSDEAVTYSLGKFGQRALDFYSIHVTKESTHPVKPLAQIAGNRYASGPVGKALSDACMGTIASFLSKYQDIIIEHQKVVKGNQKRLESLRELAGKENLEYPSVTLPPQPHTKEGVDAYNEVIARVRMWVNLNLWQKLKLSRDDAKPLLRLKGFPSFPLVERQANEVDWWDMVCNVKKLINEKKEDGKVFWQNLAGYKRQEALRPYLSSEEDRKKGKKFARYQLGDLLLHLEKKHGEDWGKVYDEAWERIDKKVEGLSKHIKLEEERRSEDAQSKAALTDWLRAKASFVIEGLKEADKDEFCRCELKLQKWYGDLRGKPFAIEAENSILDISGFSKQYNCAFIWQKDGVKKLNLYLIINYFKGGKLRFKKIKPEAFEANRFYTVINKKSGEIVPMEVNFNFDDPNLIILPLAFGKRQGREFIWNDLLSLETGSLKLANGRVIEKTLYNRRTRQDEPALFVALTFERREVLDSSNIKPMNLIGVDRGENIPAVIALTDPEGCPLSRFKDSLGNPTHILRIGTSYKEKQRTIQAKKEVEQRRAGGYSRKYASKAKNLADDMVRNTARDLLYYAVTQDAMLIFENLSRGFGRQGKRTFMAERQYTRMEDWLTAKLAYEGLPSKTYLSKTLAQYTSKTCSNCGFTITSADYDRVLEKLKKTATGWMTTINGKELKVEGQITYYNRYKRQNVVKDLSVELDRLSEESVNNDISSWTKGRSGEALSLLKKRFSHRPVQEKFVCLNCGFETHADEQAALNIARSWLFLRSQEYKKYQTNKTTGNTDKRAFVETWQSFYRKKLKEVWKPAV

SEQ ID NO: 26068 - protein, 978 aa, synthetic construct
  REGION 1..978: note = engineered CasX variant
QEIKRINKIRRRLVKDSNTKKAGKTGPMKTLLVRVMTPDLRERLENLRKKPENIPQPISNTSRANLNKLLTDYTEMKKAILHVYWEEFQKDPVGLMSRVAQPASKKIDQNKLKPEMDEKGNLTTAGFACSQCGQPLFVYKLEQVSEKGKAYTNYFGRCNVAEHEKLILLAQLKPEKDSDEAVTYSLGKFGQRALDFYSIHVTKESTHPVKPLAQIAGNRYASGPVGKALSDACMGTIASFLSKYQDIIIEHQKVVKGNQKRLESLRELAGKENLEYPSVTLPPQPHTKEGVDAYNEVIARVRMWVNLNLWQKLKLSRDDAKPLLRLKGFPSFPLVERQANEVDWWDMVCNVKKLINEKKEDGKVFWQNLAGYKRQEALRPYLSSEEDRKKGKKFARYQLGDLLLHLEKKHGEDWGKVYDEAWERIDKKVEGLSKHIKLEEERRSEDAQSKAALTDWLRAKASFVIEGLKEADKDEFCRCELKLQKWYGDLRGKPFAIEAENSILDISGFSKQYNCAFIWQKDGVKKLNLYLIINYFKGGKLRFKKIKPEAFEANRFYTVINKKSGEIVPMEVNFNFDDPNLIILPLAFGKRQGREFIWNDLLSLETGSLKLANGRVIEKTLYNRRTRQDEPALFVALTFERREVLDSSNIKPMNLIGVDRGENIPAVIALTDPEGCPLSRFKDSLGNPTHILRIGTSYKEKQRTIQAKKEVEQRGAGGYSRKYASKAKNLADDMVRNTARDLLYYAVTQDAMLIFENLSRGFGRQGKRTFMAERQYTRMEDWLTAKLAYEGLPSKTYLSKTLAQYTSKTCSNCGFTITSADYDRVLEKLKKTATGWMTTINGKELKVEGQITYYNRYKRQNVVKDLSVELDRLSEESVNNDISSWTKGRSGEALSLLKKRFSHRPVQEKFVCLNCGFETHADEQAALNIARSWLFLRSQEYKKYQTNKTTGNTDKRAFVETWQSFYRKKLKEVWKPAV

SEQ ID NO: 26069 - protein, 978 aa, synthetic construct
  REGION 1..978: note = engineered CasX variant
QEIKRINKIRRRLVKDSNTKKAGKTGPMKTLLVRVMTPDLRERLENLRKKPENIPQPISNTSRANLNKLLTDYTEMKKAILHVYWEEFQKDPVGLMSRVAQPASKKIDQNKLKPEMDEKGNLTTAGFACSQCGQPLFVYKLEQVSEKGKAYTNYFGRCNVAEHEKLILLAQLKPEKDSDEAVTYSLGKFGQRALDFYSIHVTKESTHPVKPLAQIAGNRYASGPVGKALSDACMGTIASFLSKYQDIIIEHQKVVKGNQKRLESLRELAGKENLEYPSVTLPPQPHTKEGVDAYNEVIARVRMWVNLNLWQKLKLSRDDAKPLLRLKGFPSFPLVERQANEVDWWDMVCNVKKLINEKKEDGKVFWQNLAGYKRQEALRPYLSSEEDRKKGKKFARYQLGDLLLHLEKKHGEDWGKVYDEAWERIDKKVEGLSKHIKLEEERRSEDAQSKAALTDWLRAKASFVIEGLKEADKDEFCRCELKLQKWYGDLRGKPFAIEAENSILDISGFSKQYNCAFIWQKDGVKKLNLYLIINYFKGGKLRFKKIKPEAFEANRFYTVINKKSGEIVPMEVNFNFDDPNLIILPLAFGKRQGREFIWNDLLSLETGSLKLANGRVIEKTLYNRRTRQDEPALFVALTFERREVLDSSNIKPMNLIGVDRGENIPAVIALTDPEGCPLSRFKDSLGNPTHILRIGTSYKEKNRTIQAKKEVEQRRAGGYSRKYASKAKNLADDMVRNTARDLLYYAVTQDAMLIFENLSRGFGRQGKRTFMAERQYTRMEDWLTAKLAYEGLPSKTYLSKTLAQYTSKTCSNCGFTITSADYDRVLEKLKKTATGWMTTINGKELKVEGQITYYNRYKRQNVVKDLSVELDRLSEESVNNDISSWTKGRSGEALSLLKKRFSHRPVQEKFVCLNCGFETHADEQAALNIARSWLFLRSQEYKKYQTNKTTGNTDKRAFVETWQSFYRKKLKEVWKPAV

SEQ ID NO: 26070 - protein, 978 aa, synthetic construct
  REGION 1..978: note = engineered CasX variant
QEIKRINKIRRRLVKDSNTKKAGKTGPMKTLLVRVMTPDLRERLENLRKKPENIPQPISNTSRANLNKLLTDYTEMKKAILHVYWEEFQKDPVGLMSRVAQPASKKIDQNKLKPEMDEKGNLTTAGFACSQCGQPLFVYKLEQVSEKGKAYTNYFGRCNVAEHEKLILLAQLKPEKDSDEAVTYSLGKFGQRALDFYSIHVTKESTHPVKPLAQIAGNRYASGPVGKALSDACMGTIASFLSKYQDIIIEHQKVVKGNQKRLESLRELAGKENLEYPSVTLPPQPHTKEGVDAYNEVIARVRMWVNLNLWQKLKLSRDDAKPLLRLKGFPSFPLVERQANEVDWWDMVCNVKKLINEKKEDGKVFWQNLAGYKRQEALRPYLSSEEDRKKGKKFARYQLGDLLLHLEKKHGEDWGKVYDEAWERIDKKVEGLSKHIKLEEERRSEDAQSKAALTDWLRAKASFVIEGLKEADKDEFCRCELKLQKWYGDLRGKPFAIEAENSILDISGFSKQYNCAFIWQKDGVKKLNLYLIINYFKGGKLRFKKIKPEAFEANRFYTVINKKSGEIVPMEVNFNFDDPNLIILPLAFGKRQGREFIWNDLLSLETGSLKLANGRVIEKTLYNRRTRQDEPALFVALTFERREVLDSSNIKPMNLIGVDRGENIPAVIALTDPEGCPLSRFKDSLGNPTHILRIGSSYKEKQRTIQQKKEVEQRRAGGYSRKYASKAKNLADDMVRNTARDLLYYAVTQDAMLIFENLSRGFGRQGKRTFMAERQYTRMEDWLTAKLAYEGLPSKTYLSKTLAQYTSKTCSNCGFTITSADYDRVLEKLKKTATGWMTTINGKELKVEGQITYYNRYKRQNVVKDLSVELDRLSEESVNNDISSWTKGRSGEALSLLKKRFSHRPVQEKFVCLNCGFETHADEQAALNIARSWLFLRSQEYKKYQTNKTTGNTDKRAFVETWQSFYRKKLKEVWKPAV

SEQ ID NO: 26071 - protein, 978 aa, synthetic construct
  REGION 1..978: note = engineered CasX variant
QEIKRINKIRRRLVKDSNTKKAGKTGPMKTLLVRVMTPDLRERLENLRKKPENIPQPISNTSRANLNKLLTDYTEMKKAILHVYWEEFQKDPVGLMSRVAQPASKKIDQNKLKPEMDEKGNLTTAGFACSQCGQPLFVYKLEQVSEKGKAYTNYFGRCNVAEHEKLILLAQLKPEKDSDEAVTYSLGKFGQRALDFYSIHVTKESTHPVKPLAQIAGNRYASGPVGKALSDACMGTIASFLSKYQDIIIEHQKVVKGNQKRLESLRELAGKENLEYPSVTLPPQPHTKEGVDAYNEVIARVRMWVNLNLWQKLKLSRDDAKPLLRLKGFPSFPLVERQANEVDWWDMVCNVKKLINEKKEDGKVFWQNLAGYKRQEALRPYLSSEEDRKKGKKFARYQLGDLLLHLEKKHGEDWGKVYDEAWERIDKKVEGLSKHIKLEEERRSEDAQSKAALTDWLRAKASFVIEGLKEADKDEFCRCELKLQKWYGDLRGKPFAIEAENSILDISGFSKQYNCAFIWQKDGVKKLNLYLIINYFKGGKLRFKKIKPEAFEANRFYTVINKKSGEIVPMEVNFNFDDPNLIILPLAFGKRQGREFIWNDLLSLETGSLKLANGRVIEKTLYNRRTRQDEPALFVALTFERREVLDSSNIKPMNLIGVDRGENIPAVIALTDPEGCPLSRFKDSLGNPTHILRIGSSYKEKQRTIQAKKNVEQRRAGGYSRKYASKAKNLADDMVRNTARDLLYYAVTQDAMLIFENLSRGFGRQGKRTFMAERQYTRMEDWLTAKLAYEGLPSKTYLSKTLAQYTSKTCSNCGFTITSADYDRVLEKLKKTATGWMTTINGKELKVEGQITYYNRYKRQNVVKDLSVELDRLSEESVNNDISSWTKGRSGEALSLLKKRFSHRPVQEKFVCLNCGFETHADEQAALNIARSWLFLRSQEYKKYQTNKTTGNTDKRAFVETWQSFYRKKLKEVWKPAV

SEQ ID NO: 26072 - protein, 978 aa, synthetic construct
  REGION 1..978: note = engineered CasX variant
QEIKRINKIRRRLVKDSNTKKAGKTGPMKTLLVRVMTPDLRERLENLRKKPENIPQPISNTSRANLNKLLTDYTEMKKAILHVYWEEFQKDPVGLMSRVAQPASKKIDQNKLKPEMDEKGNLTTAGFACSQCGQPLFVYKLEQVSEKGKAYTNYFGRCNVAEHEKLILLAQLKPEKDSDEAVTYSLGKFGQRALDFYSIHVTKESTHPVKPLAQIAGNRYASGPVGKALSDACMGTIASFLSKYQDIIIEHQKVVKGNQKRLESLRELAGKENLEYPSVTLPPQPHTKEGVDAYNEVIARVRMWVNLNLWQKLKLSRDDAKPLLRLKGFPSFPLVERQANEVDWWDMVCNVKKLINEKKEDGKVFWQNLAGYKRQEALRPYLSSEEDRKKGKKFARYQLGDLLLHLEKKHGEDWGKVYDEAWERIDKKVEGLSKHIKLEEERRSEDAQSKAALTDWLRAKASFVIEGLKEADKDEFCRCELKLQKWYGDLRGKPFAIEAENSILDISGFSKQYNCAFIWQKDGVKKLNLYLIINYFKGGKLRFKKIKPEAFEANRFYTVINKKSGEIVPMEVNFNFDDPNLIILPLAFGKRQGREFIWNDLLSLETGSLKLANGRVIEKTLYNRRTRQDEPALFVALTFERREVLDSSNIKPMNLIGVDRGENIPAVIALTDPEGCPLSRFKDSLGNPTHILRIGSSYKEKQRTIQAKKNVEQRIAGGYSRKYASKAKNLADDMVRNTARDLLYYAVTQDAMLIFENLSRGFGRQGKRTFMAERQYTRMEDWLTAKLAYEGLPSKTYLSKTLAQYTSKTCSNCGFTITSADYDRVLEKLKKTATGWMTTINGKELKVEGQITYYNRYKRQNVVKDLSVELDRLSEESVNNDISSWTKGRSGEALSLLKKRFSHRPVQEKFVCLNCGFETHADEQAALNIARSWLFLRSQEYKKYQTNKTTGNTDKRAFVETWQSFYRKKLKEVWKPAV

SEQ ID NO: 26073 - protein, 978 aa, synthetic construct
  REGION 1..978: note = engineered CasX variant
QEIKRINKIRRRLVKDSNTKKAGKTGPMKTLLVRVMTPDLRERLENLRKKPENIPQPISNTSRANLNKLLTDYTEMKKAILHVYWEEFQKDPVGLMSRVAQPASKKIDQNKLKPEMDEKGNLTTAGFACSQCGQPLFVYKLEQVSEKGKAYTNYFGRCNVAEHEKLILLAQLKPEKDSDEAVTYSLGKFGQRALDFYSIHVTKESTHPVKPLAQIAGNRYASGPVGKALSDACMGTIASFLSKYQDIIIEHQKVVKGNQKRLESLRELAGKENLEYPSVTLPPQPHTKEGVDAYNEVIARVRMWVNLNLWQKLKLSRDDAKPLLRLKGFPSFPLVERQANEVDWWDMVCNVKKLINEKKEDGKVFWQNLAGYKRQEALRPYLSSEEDRKKGKKFARYQLGDLLLHLEKKHGEDWGKVYDEAWERIDKKVEGLSKHIKLEEERRSEDAQSKAALTDWLRAKASFVIEGLKEADKDEFCRCELKLQKWYGDLRGKPFAIEAENSILDISGFSKQYNCAFIWQKDGVKKLNLYLIINYFKGGKLRFKKIKPEAFEANRFYTVINKKSGEIVPMEVNFNFDDPNLIILPLAFGKRQGREFIWNDLLSLETGSLKLANGRVIEKTLYNRRTRQDEPALFVALTFERREVLDSSNIKPMNLIGVDRGENIPAVIALTDPEGCPLSRFKDSLGNPTHILRIGSSYKEKQRTIQAKKEVEQRRAGGYSRKYASKAKNLADDMVRNTARDLLYYAVTQDAMLIFENLSRGFGRQGKRTFMAERQYTRMEDWLTAKLAYEGLPSKTYLSKTLAQYTSKTCSNCGFTITSADYDRVLEKLKKTATGWMTTINGKELKVEGQITYYNRYKRQNVVKDLSVELDRLSEESVNNDISSWTKGRSGEALSLLKKRFSHRPVQEKFVCLNCGFETHADEQAALNIARSWLFLRSQEYKKYQTNKTTGNTDKRAFVETWQSFYRKKLKEVWKPAV

SEQ ID NO: 26074 - protein, 978 aa, synthetic construct
  REGION 1..978: note = engineered CasX variant
QEIKRINKIRRRLVKDSNTKKAGKTGPMKTLLVRVMTPDLRERLENLRKKPENIPQPISNTSRANLNKLLTDYTEMKKAILHVYWEEFQKDPVGLMSRVAQPASKKIDQNKLKPEMDEKGNLTTAGFACSQCGQPLFVYKLEQVSEKGKAYTNYFGRCNVAEHEKLILLAQLKPEKDSDEAVTYSLGKFGQRALDFYSIHVTKESTHPVKPLAQIAGNRYASGPVGKALSDACMGTIASFLSKYQDIIIEHQKVVKGNQKRLESLRELAGKENLEYPSVTLPPQPHTKEGVDAYNEVIARVRMWVNLNLWQKLKLSRDDAKPLLRLKGFPSFPLVERQANEVDWWDMVCNVKKLINEKKEDGKVFWQNLAGYKRQEALRPYLSSEEDRKKGKKFARYQLGDLLLHLEKKHGEDWGKVYDEAWERIDKKVEGLSKHIKLEEERRSEDAQSKAALTDWLRAKASFVIEGLKEADKDEFCRCELKLQKWYGDLRGKPFAIEAENSILDISGFSKQYNCAFIWQKDGVKKLNLYLIINYFKGGKLRFKKIKPEAFEANRFYTVINKKSGEIVPMEVNFNFDDPNLIILPLAFGKRQGREFIWNDLLSLETGSLKLANGRVIEKTLYNRRTRQDEPALFVALTFERREVLDSSNIKPMNLIGVDRGENIPAVIALTDPEGCPLSRFKDSLGNPTHILRIGSSYKEKQRTIQAKKEVEQRIAGGYSRKYASKAKNLADDMVRNTARDLLYYAVTQDAMLIFENLSRGFGRQGKRTFMAERQYTRMEDWLTAKLAYEGLPSKTYLSKTLAQYTSKTCSNCGFTITSADYDRVLEKLKKTATGWMTTINGKELKVEGQITYYNRYKRQNVVKDLSVELDRLSEESVNNDISSWTKGRSGEALSLLKKRFSHRPVQEKFVCLNCGFETHADEQAALNIARSWLFLRSQEYKKYQTNKTTGNTDKRAFVETWQSFYRKKLKEVWKPAV

SEQ ID NO: 26075 - protein, 978 aa, synthetic construct
  REGION 1..978: note = engineered CasX variant
QEIKRINKIRRRLVKDSNTKKAGKTGPMKTLLVRVMTPDLRERLENLRKKPENIPQPISNTSRANLNKLLTDYTEMKKAILHVYWEEFQKDPVGLMSRVAQPASKKIDQNKLKPEMDEKGNLTTAGFACSQCGQPLFVYKLEQVSEKGKAYTNYFGRCNVAEHEKLILLAQLKPEKDSDEAVTYSLGKFGQRALDFYSIHVTKESTHPVKPLAQIAGNRYASGPVGKALSDACMGTIASFLSKYQDIIIEHQKVVKGNQKRLESLRELAGKENLEYPSVTLPPQPHTKEGVDAYNEVIARVRMWVNLNLWQKLKLSRDDAKPLLRLKGFPSFPLVERQANEVDWWDMVCNVKKLINEKKEDGKVFWQNLAGYKRQEALRPYLSSEEDRKKGKKFARYQLGDLLLHLEKKHGEDWGKVYDEAWERIDKKVEGLSKHIKLEEERRSEDAQSKAALTDWLRAKASFVIEGLKEADKDEFCRCELKLQKWYGDLRGKPFAIEAENSILDISGFSKQYNCAFIWQKDGVKKLNLYLIINYFKGGKLRFKKIKPEAFEANRFYTVINKKSGEIVPMEVNFNFDDPNLIILPLAFGKRQGREFIWNDLLSLETGSLKLANGRVIEKTLYNRRTRQDEPALFVALTFERREVLDSSNIKPMNLIGVDRGENIPAVIALTDPEGCPLSRFKDSLGNPTHILRIGRSYKEKQRTIQAKKEVEQRRAGGYSRKYASKAKNLADDMVRNTARDLLYYAVTQDAMLIFENLSRGFGRQGKRTFMAERQYTRMEDWLTAKLAYEGLPSKTYLSKTLAQYTSKTCSNCGFTITSADYDRVLEKLKKTATGWMTTINGKELKVEGQITYYNRYKRQNVVKDLSVELDRLSEESVNNDISSWTKGRSGEALSLLKKRFSHRPVQEKFVCLNCGFETHADEQAALNIARSWLFLRSQEYKKYQTNKTTGNTDKRAFVETWQSFYRKKLKEVWKPAV

SEQ ID NO: 26076 - protein, 978 aa, synthetic construct
  REGION 1..978: note = engineered CasX variant
QEIKRINKIRRRLVKDSNTKKAGKTGPMKTLLVRVMTPDLRERLENLRKKPENIPQPISNTSRANLNKLLTDYTEMKKAILHVYWEEFQKDPVGLMSRVAQPASKKIDQNKLKPEMDEKGNLTTAGFACSQCGQPLFVYKLEQVSEKGKAYTNYFGRCNVAEHEKLILLAQLKPEKDSDEAVTYSLGKFGQRALDFYSIHVTKESTHPVKPLAQIAGNRYASGPVGKALSDACMGTIASFLSKYQDIIIEHQKVVKGNQKRLESLRELAGKENLEYPSVTLPPQPHTKEGVDAYNEVIARVRMWVNLNLWQKLKLSRDDAKPLLRLKGFPSFPLVERQANEVDWWDMVCNVKKLINEKKEDGKVFWQNLAGYKRQEALRPYLSSEEDRKKGKKFARYQLGDLLLHLEKKHGEDWGKVYDEAWERIDKKVEGLSKHIKLEEERRSEDAQSKAALTDWLRAKASFVIEGLKEADKDEFCRCELKLQKWYGDLRGKPFAIEAENSILDISGFSKQYNCAFIWQKDGVKKLNLYLIINYFKGGKLRFKKIKPEAFEANRFYTVINKKSGEIVPMEVNFNFDDPNLIILPLAFGKRQGREFIWNDLLSLETGSLKLANGRVIEKTLYNRRTRQDEPALFVALTFERREVLDSSNIKPMNLIGVDRGENIPAVIALTDPEGCPLSRFKDSLGNPTHILRIGQTYKEKQRTIQAKKEVEQRRAGGYSRKYASKAKNLADDMVRNTARDLLYYAVTQDAMLIFENLSRGFGRQGKRTFMAERQYTRMEDWLTAKLAYEGLPSKTYLSKTLAQYTSKTCSNCGFTITSADYDRVLEKLKKTATGWMTTINGKELKVEGQITYYNRYKRQNVVKDLSVELDRLSEESVNNDISSWTKGRSGEALSLLKKRFSHRPVQEKFVCLNCGFETHADEQAALNIARSWLFLRSQEYKKYQTNKTTGNTDKRAFVETWQSFYRKKLKEVWKPAV

SEQ ID NO: 26077 - protein, 978 aa, synthetic construct
  REGION 1..978: note = engineered CasX variant
QEIKRINKIRRRLVKDSNTKKAGKTGPMKTLLVRVMTPDLRERLENLRKKPENIPQPISNTSRANLNKLLTDYTEMKKAILHVYWEEFQKDPVGLMSRVAQPASKKIDQNKLKPEMDEKGNLTTAGFACSQCGQPLFVYKLEQVSEKGKAYTNYFGRCNVAEHEKLILLAQLKPEKDSDEAVTYSLGKFGQRALDFYSIHVTKESTHPVKPLAQIAGNRYASGPVGKALSDACMGTIASFLSKYQDIIIEHQKVVKGNQKRLESLRELAGKENLEYPSVTLPPQPHTKEGVDAYNEVIARVRMWVNLNLWQKLKLSRDDAKPLLRLKGFPSFPLVERQANEVDWWDMVCNVKKLINEKKEDGKVFWQNLAGYKRQEALRPYLSSEEDRKKGKKFARYQLGDLLLHLEKKHGEDWGKVYDEAWERIDKKVEGLSKHIKLEEERRSEDAQSKAALTDWLRAKASFVIEGLKEADKDEFCRCELKLQKWYGDLRGKPFAIEAENSILDISGFSKQYNCAFIWQKDGVKKLNLYLIINYFKGGKLRFKKIKPEAFEANRFYTVINKKSGEIVPMEVNFNFDDPNLIILPLAFGKRQGREFIWNDLLSLETGSLKLANGRVIEKTLYNRRTRQDEPALFVALTFERREVLDSSNIKPMNLIGVDRGENIPAVIALTDPEGCPLSRFKDSLGNPTHILRIGQSYKEKQRTIQAKKEVEQRRAGVYSRKYASKAKNLADDMVRNTARDLLYYAVTQDAMLIFENLSRGFGRQGKRTFMAERQYTRMEDWLTAKLAYEGLPSKTYLSKTLAQYTSKTCSNCGFTITSADYDRVLEKLKKTATGWMTTINGKELKVEGQITYYNRYKRQNVVKDLSVELDRLSEESVNNDISSWTKGRSGEALSLLKKRFSHRPVQEKFVCLNCGFETHADEQAALNIARSWLFLRSQEYKKYQTNKTTGNTDKRAFVETWQSFYRKKLKEVWKPAV

SEQ ID NO: 26078 - protein, 978 aa, synthetic construct
  REGION 1..978: note = engineered CasX variant
QEIKRINKIRRRLVKDSNTKKAGKTGPMKTLLVRVMTPDLRERLENLRKKPENIPQPISNTSRANLNKLLTDYTEMKKAILHVYWEEFQKDPVGLMSRVAQPASKKIDQNKLKPEMDEKGNLTTAGFACSQCGQPLFVYKLEQVSEKGKAYTNYFGRCNVAEHEKLILLAQLKPEKDSDEAVTYSLGKFGQRALDFYSIHVTKESTHPVKPLAQIAGNRYASGPVGKALSDACMGTIASFLSKYQDIIIEHQKVVKGNQKRLESLRELAGKENLEYPSVTLPPQPHTKEGVDAYNEVIARVRMWVNLNLWQKLKLSRDDAKPLLRLKGFPSFPLVERQANEVDWWDMVCNVKKLINEKKEDGKVFWQNLAGYKRQEALRPYLSSEEDRKKGKKFARYQLGDLLLHLEKKHGEDWGKVYDEAWERIDKKVEGLSKHIKLEEERRSEDAQSKAALTDWLRAKASFVIEGLKEADKDEFCRCELKLQKWYGDLRGKPFAIEAENSILDISGFSKQYNCAFIWQKDGVKKLNLYLIINYFKGGKLRFKKIKPEAFEANRFYTVINKKSGEIVPMEVNFNFDDPNLIILPLAFGKRQGREFIWNDLLSLETGSLKLANGRVIEKTLYNRRTRQDEPALFVALTFERREVLDSSNIKPMNLIGVDRGENIPAVIALTDPEGCPLSRFKDSLGNPTHILRIGQSYKEKQRTIQAKKEVEQRRAGGYSRKYASKAKNLADDMVRNTARDLLYYAVTQDAMLIFENLSRGFGRQGKRTFMAERQYTRMEDWLTAKLAYEGLPSKTYLSKTLAQYTSKTCSNCGFTITSADYDRVLEKLKKTATGWMTTINGKELKVEGQITYYNRYKRQNVVKDLSVELDRLSEESVNNDISSWTKGRSGEALSLLKKRFSHRPVQEKFVCLNCGFETHADEQAALNIARSWLFLRSQEYKKYQTNKTTGNTDKRAFVETWQSFYRKKLKEVWKPAV

SEQ ID NO: 26079 - protein, 978 aa, synthetic construct
  REGION 1..978: note = engineered CasX variant
QEIKRINKIRRRLVKDSNTKKAGKTGPMKTLLVRVMTPDLRERLENLRKKPENIPQPISNTSRANLNKLLTDYTEMKKAILHVYWEEFQKDPVGLMSRVAQPASKKIDQNKLKPEMDEKGNLTTAGFACSQCGQPLFVYKLEQVSEKGKAYTNYFGRCNVAEHEKLILLAQLKPEKDSDEAVTYSLGKFGQRALDFYSIHVTKESTHPVKPLAQIAGNRYASGPVGKALSDACMGTIASFLSKYQDIIIEHQKVVKGNQKRLESLRELAGKENLEYPSVTLPPQPHTKEGVDAYNEVIARVRMWVNLNLWQKLKLSRDDAKPLLRLKGFPSFPLVERQANEVDWWDMVCNVKKLINEKKEDGKVFWQNLAGYKRQEALRPYLSSEEDRKKGKKFARYQLGDLLLHLEKKHGEDWGKVYDEAWERIDKKVEGLSKHIKLEEERRSEDAQSKAALTDWLRAKASFVIEGLKEADKDEFCRCELKLQKWYGDLRGKPFAIEAENSILDISGFSKQYNCAFIWQKDGVKKLNLYLIINYFKGGKLRFKKIKPEAFEANRFYTVINKKSGEIVPMEVNFNFDDPNLIILPLAFGKRQGREFIWNDLLSLETGSLKLANGRVIEKTLYNRRTRQDEPALFVALTFERREVLDSSNIKPMNLIGVDRGENIPAVIALTDPEGCPLSRFKDSLGNPTHILRIGQSYKEKQRTIQAKKEVDQRRAGGYSRKYASKAKNLADDMVRNTARDLLYYAVTQDAMLIFENLSRGFGRQGKRTFMAERQYTRMEDWLTAKLAYEGLPSKTYLSKTLAQYTSKTCSNCGFTITSADYDRVLEKLKKTATGWMTTINGKELKVEGQITYYNRYKRQNVVKDLSVELDRLSEESVNNDISSWTKGRSGEALSLLKKRFSHRPVQEKFVCLNCGFETHADEQAALNIARSWLFLRSQEYKKYQTNKTTGNTDKRAFVETWQSFYRKKLKEVWKPAV

SEQ ID NO: 26080 - protein, 978 aa, synthetic construct
  REGION 1..978: note = engineered CasX variant
QEIKRINKIRRRLVKDSNTKKAGKTGPMKTLLVRVMTPDLRERLENLRKKPENIPQPISNTSRANLNKLLTDYTEMKKAILHVYWEEFQKDPVGLMSRVAQPASKKIDQNKLKPEMDEKGNLTTAGFACSQCGQPLFVYKLEQVSEKGKAYTNYFGRCNVAEHEKLILLAQLKPEKDSDEAVTYSLGKFGQRALDFYSIHVTKESTHPVKPLAQIAGNRYASGPVGKALSDACMGTIASFLSKYQDIIIEHQKVVKGNQKRLESLRELAGKENLEYPSVTLPPQPHTKEGVDAYNEVIARVRMWVNLNLWQKLKLSRDDAKPLLRLKGFPSFPLVERQANEVDWWDMVCNVKKLINEKKEDGKVFWQNLAGYKRQEALRPYLSSEEDRKKGKKFARYQLGDLLLHLEKKHGEDWGKVYDEAWERIDKKVEGLSKHIKLEEERRSEDAQSKAALTDWLRAKASFVIEGLKEADKDEFCRCELKLQKWYGDLRGKPFAIEAENSILDISGFSKQYNCAFIWQKDGVKKLNLYLIINYFKGGKLRFKKIKPEAFEANRFYTVINKKSGEIVPMEVNFNFDDPNLIILPLAFGKRQGREFIWNDLLSLETGSLKLANGRVIEKTLYNRRTRQDEPALFVALTFERREVLDSSNIKPMNLIGVDRGENIPAVIALTDPEGCPLSRFKDSLGNPTHILRIGNSYKEKQRTIQRKKEVEQRRAGGYSRKYASKAKNLADDMVRNTARDLLYYAVTQDAMLIFENLSRGFGRQGKRTFMAERQYTRMEDWLTAKLAYEGLPSKTYLSKTLAQYTSKTCSNCGFTITSADYDRVLEKLKKTATGWMTTINGKELKVEGQITYYNRYKRQNVVKDLSVELDRLSEESVNNDISSWTKGRSGEALSLLKKRFSHRPVQEKFVCLNCGFETHADEQAALNIARSWLFLRSQEYKKYQTNKTTGNTDKRAFVETWQSFYRKKLKEVWKPAV

SEQ ID NO: 26081 - protein, 978 aa, synthetic construct
  REGION 1..978: note = engineered CasX variant
QEIKRINKIRRRLVKDSNTKKAGKTGPMKTLLVRVMTPDLRERLENLRKKPENIPQPISNTSRANLNKLLTDYTEMKKAILHVYWEEFQKDPVGLMSRVAQPASKKIDQNKLKPEMDEKGNLTTAGFACSQCGQPLFVYKLEQVSEKGKAYTNYFGRCNVAEHEKLILLAQLKPEKDSDEAVTYSLGKFGQRALDFYSIHVTKESTHPVKPLAQIAGNRYASGPVGKALSDACMGTIASFLSKYQDIIIEHQKVVKGNQKRLESLRELAGKENLEYPSVTLPPQPHTKEGVDAYNEVIARVRMWVNLNLWQKLKLSRDDAKPLLRLKGFPSFPLVERQANEVDWWDMVCNVKKLINEKKEDGKVFWQNLAGYKRQEALRPYLSSEEDRKKGKKFARYQLGDLLLHLEKKHGEDWGKVYDEAWERIDKKVEGLSKHIKLEEERRSEDAQSKAALTDWLRAKASFVIEGLKEADKDEFCRCELKLQKWYGDLRGKPFAIEAENSILDISGFSKQYNCAFIWQKDGVKKLNLYLIINYFKGGKLRFKKIKPEAFEANRFYTVINKKSGEIVPMEVNFNFDDPNLIILPLAFGKRQGREFIWNDLLSLETGSLKLANGRVIEKTLYNRRTRQDEPALFVALTFERREVLDSSNIKPMNLIGVDRGENIPAVIALTDPEGCPLSRFKDSLGNPTHILRIGNSYKEKQRTIQATKEVEQRRAGGYSRKYASKAKNLADDMVRNTARDLLYYAVTQDAMLIFENLSRGFGRQGKRTFMAERQYTRMEDWLTAKLAYEGLPSKTYLSKTLAQYTSKTCSNCGFTITSADYDRVLEKLKKTATGWMTTINGKELKVEGQITYYNRYKRQNVVKDLSVELDRLSEESVNNDISSWTKGRSGEALSLLKKRFSHRPVQEKFVCLNCGFETHADEQAALNIARSWLFLRSQEYKKYQTNKTTGNTDKRAFVETWQSFYRKKLKEVWKPAV

SEQ ID NO: 26082 - protein, 978 aa, synthetic construct
  REGION 1..978: note = engineered CasX variant
QEIKRINKIRRRLVKDSNTKKAGKTGPMKTLLVRVMTPDLRERLENLRKKPENIPQPISNTSRANLNKLLTDYTEMKKAILHVYWEEFQKDPVGLMSRVAQPASKKIDQNKLKPEMDEKGNLTTAGFACSQCGQPLFVYKLEQVSEKGKAYTNYFGRCNVAEHEKLILLAQLKPEKDSDEAVTYSLGKFGQRALDFYSIHVTKESTHPVKPLAQIAGNRYASGPVGKALSDACMGTIASFLSKYQDIIIEHQKVVKGNQKRLESLRELAGKENLEYPSVTLPPQPHTKEGVDAYNEVIARVRMWVNLNLWQKLKLSRDDAKPLLRLKGFPSFPLVERQANEVDWWDMVCNVKKLINEKKEDGKVFWQNLAGYKRQEALRPYLSSEEDRKKGKKFARYQLGDLLLHLEKKHGEDWGKVYDEAWERIDKKVEGLSKHIKLEEERRSEDAQSKAALTDWLRAKASFVIEGLKEADKDEFCRCELKLQKWYGDLRGKPFAIEAENSILDISGFSKQYNCAFIWQKDGVKKLNLYLIINYFKGGKLRFKKIKPEAFEANRFYTVINKKSGEIVPMEVNFNFDDPNLIILPLAFGKRQGREFIWNDLLSLETGSLKLANGRVIEKTLYNRRTRQDEPALFVALTFERREVLDSSNIKPMNLIGVDRGENIPAVIALTDPEGCPLSRFKDSLGNPTHILRIGNSYKEKQRTIQAKKEVEQRRAGGYSRKYASKAKNLADDMVRNTARDLLYYAVTQDAMLIFENLSRGFGRQGKRTFMAERQYTRMEDWLTAKLAYEGLPSKTYLSKTLAQYTSKTCSNCGFTITSADYDRVLEKLKKTATGWMTTINGKELKVEGQITYYNRYKRQNVVKDLSVELDRLSEESVNNDISSWTKGRSGEALSLLKKRFSHRPVQEKFVCLNCGFETHADEQAALNIARSWLFLRSQEYKKYQTNKTTGNTDKRAFVETWQSFYRKKLKEVWKPAV

SEQ ID NO: 26083 - protein, 978 aa, synthetic construct
  REGION 1..978: note = engineered CasX variant
QEIKRINKIRRRLVKDSNTKKAGKTGPMKTLLVRVMTPDLRERLENLRKKPENIPQPISNTSRANLNKLLTDYTEMKKAILHVYWEEFQKDPVGLMSRVAQPASKKIDQNKLKPEMDEKGNLTTAGFACSQCGQPLFVYKLEQVSEKGKAYTNYFGRCNVAEHEKLILLAQLKPEKDSDEAVTYSLGKFGQRALDFYSIHVTKESTHPVKPLAQIAGNRYASGPVGKALSDACMGTIASFLSKYQDIIIEHQKVVKGNQKRLESLRELAGKENLEYPSVTLPPQPHTKEGVDAYNEVIARVRMWVNLNLWQKLKLSRDDAKPLLRLKGFPSFPLVERQANEVDWWDMVCNVKKLINEKKEDGKVFWQNLAGYKRQEALRPYLSSEEDRKKGKKFARYQLGDLLLHLEKKHGEDWGKVYDEAWERIDKKVEGLSKHIKLEEERRSEDAQSKAALTDWLRAKASFVIEGLKEADKDEFCRCELKLQKWYGDLRGKPFAIEAENSILDISGFSKQYNCAFIWQKDGVKKLNLYLIINYFKGGKLRFKKIKPEAFEANRFYTVINKKSGEIVPMEVNFNFDDPNLIILPLAFGKRQGREFIWNDLLSLETGSLKLANGRVIEKTLYNRRTRQDEPALFVALTFERREVLDSSNIKPMNLIGVDRGENIPAVIALTDPEGCPLSRFKDSLGNPTHILRIGNSYKEKQRTIHAKKEVEQRRAGGYSRKYASKAKNLADDMVRNTARDLLYYAVTQDAMLIFENLSRGFGRQGKRTFMAERQYTRMEDWLTAKLAYEGLPSKTYLSKTLAQYTSKTCSNCGFTITSADYDRVLEKLKKTATGWMTTINGKELKVEGQITYYNRYKRQNVVKDLSVELDRLSEESVNNDISSWTKGRSGEALSLLKKRFSHRPVQEKFVCLNCGFETHADEQAALNIARSWLFLRSQEYKKYQTNKTTGNTDKRAFVETWQSFYRKKLKEVWKPAV

SEQ ID NO: 26084 - protein, 978 aa, synthetic construct
  REGION 1..978: note = engineered CasX variant
QEIKRINKIRRRLVKDSNTKKAGKTGPMKTLLVRVMTPDLRERLENLRKKPENIPQPISNTSRANLNKLLTDYTEMKKAILHVYWEEFQKDPVGLMSRVAQPASKKIDQNKLKPEMDEKGNLTTAGFACSQCGQPLFVYKLEQVSEKGKAYTNYFGRCNVAEHEKLILLAQLKPEKDSDEAVTYSLGKFGQRALDFYSIHVTKESTHPVKPLAQIAGNRYASGPVGKALSDACMGTIASFLSKYQDIIIEHQKVVKGNQKRLESLRELAGKENLEYPSVTLPPQPHTKEGVDAYNEVIARVRMWVNLNLWQKLKLSRDDAKPLLRLKGFPSFPLVERQANEVDWWDMVCNVKKLINEKKEDGKVFWQNLAGYKRQEALRPYLSSEEDRKKGKKFARYQLGDLLLHLEKKHGEDWGKVYDEAWERIDKKVEGLSKHIKLEEERRSEDAQSKAALTDWLRAKASFVIEGLKEADKDEFCRCELKLQKWYGDLRGKPFAIEAENSILDISGFSKQYNCAFIWQKDGVKKLNLYLIINYFKGGKLRFKKIKPEAFEANRFYTVINKKSGEIVPMEVNFNFDDPNLIILPLAFGKRQGREFIWNDLLSLETGSLKLANGRVIEKTLYNRRTRQDEPALFVALTFERREVLDSSNIKPMNLIGVDRGENIPAVIALTDPEGCPLSRFKDSLGNPTHILRIGNSYKEGQRTIQAKKEVEQRRAGGYSRKYASKAKNLADDMVRNTARDLLYYAVTQDAMLIFENLSRGFGRQGKRTFMAERQYTRMEDWLTAKLAYEGLPSKTYLSKTLAQYTSKTCSNCGFTITSADYDRVLEKLKKTATGWMTTINGKELKVEGQITYYNRYKRQNVVKDLSVELDRLSEESVNNDISSWTKGRSGEALSLLKKRFSHRPVQEKFVCLNCGFETHADEQAALNIARSWLFLRSQEYKKYQTNKTTGNTDKRAFVETWQSFYRKKLKEVWKPAV

SEQ ID NO: 26085 - protein, 978 aa, synthetic construct
  REGION 1..978: note = engineered CasX variant
QEIKRINKIRRRLVKDSNTKKAGKTGPMKTLLVRVMTPDLRERLENLRKKPENIPQPISNTSRANLNKLLTDYTEMKKAILHVYWEEFQKDPVGLMSRVAQPASKKIDQNKLKPEMDEKGNLTTAGFACSQCGQPLFVYKLEQVSEKGKAYTNYFGRCNVAEHEKLILLAQLKPEKDSDEAVTYSLGKFGQRALDFYSIHVTKESTHPVKPLAQIAGNRYASGPVGKALSDACMGTIASFLSKYQDIIIEHQKVVKGNQKRLESLRELAGKENLEYPSVTLPPQPHTKEGVDAYNEVIARVRMWVNLNLWQKLKLSRDDAKPLLRLKGFPSFPLVERQANEVDWWDMVCNVKKLINEKKEDGKVFWQNLAGYKRQEALRPYLSSEEDRKKGKKFARYQLGDLLLHLEKKHGEDWGKVYDEAWERIDKKVEGLSKHIKLEEERRSEDAQSKAALTDWLRAKASFVIEGLKEADKDEFCRCELKLQKWYGDLRGKPFAIEAENSILDISGFSKQYNCAFIWQKDGVKKLNLYLIINYFKGGKLRFKKIKPEAFEANRFYTVINKKSGEIVPMEVNFNFDDPNLIILPLAFGKRQGREFIWNDLLSLETGSLKLANGRVIEKTLYNRRTRQDEPALFVALTFERREVLDSSNIKPMNLIGVDRGENIPAVIALTDPEGCPLSRFKDSLGNPTHILRIGNSYKEGQRTIHAKKEVEQRRAGGYSRKYASKAKNLADDMVRNTARDLLYYAVTQDAMLIFENLSRGFGRQGKRTFMAERQYTRMEDWLTAKLAYEGLPSKTYLSKTLAQYTSKTCSNCGFTITSADYDRVLEKLKKTATGWMTTINGKELKVEGQITYYNRYKRQNVVKDLSVELDRLSEESVNNDISSWTKGRSGEALSLLKKRFSHRPVQEKFVCLNCGFETHADEQAALNIARSWLFLRSQEYKKYQTNKTTGNTDKRAFVETWQSFYRKKLKEVWKPAV

SEQ ID NO: 26086 - protein, 978 aa, synthetic construct
  REGION 1..978: note = engineered CasX variant
QEIKRINKIRRRLVKDSNTKKAGKTGPMKTLLVRVMTPDLRERLENLRKKPENIPQPISNTSRANLNKLLTDYTEMKKAILHVYWEEFQKDPVGLMSRVAQPASKKIDQNKLKPEMDEKGNLTTAGFACSQCGQPLFVYKLEQVSEKGKAYTNYFGRCNVAEHEKLILLAQLKPEKDSDEAVTYSLGKFGQRALDFYSIHVTKESTHPVKPLAQIAGNRYASGPVGKALSDACMGTIASFLSKYQDIIIEHQKVVKGNQKRLESLRELAGKENLEYPSVTLPPQPHTKEGVDAYNEVIARVRMWVNLNLWQKLKLSRDDAKPLLRLKGFPSFPLVERQANEVDWWDMVCNVKKLINEKKEDGKVFWQNLAGYKRQEALRPYLSSEEDRKKGKKFARYQLGDLLLHLEKKHGEDWGKVYDEAWERIDKKVEGLSKHIKLEEERRSEDAQSKAALTDWLRAKASFVIEGLKEADKDEFCRCELKLQKWYGDLRGKPFAIEAENSILDISGFSKQYNCAFIWQKDGVKKLNLYLIINYFKGGKLRFKKIKPEAFEANRFYTVINKKSGEIVPMEVNFNFDDPNLIILPLAFGKRQGREFIWNDLLSLETGSLKLANGRVIEKTLYNRRTRQDEPALFVALTFERREVLDSSNIKPMNLIGVDRGENIPAVIALTDPEGCPLSRFKDSLGNPTHILRIGMSYKEKQRTIQAKKEVEQRRAGWYSRKYASKAKNLADDMVRNTARDLLYYAVTQDAMLIFENLSRGFGRQGKRTFMAERQYTRMEDWLTAKLAYEGLPSKTYLSKTLAQYTSKTCSNCGFTITSADYDRVLEKLKKTATGWMTTINGKELKVEGQITYYNRYKRQNVVKDLSVELDRLSEESVNNDISSWTKGRSGEALSLLKKRFSHRPVQEKFVCLNCGFETHADEQAALNIARSWLFLRSQEYKKYQTNKTTGNTDKRAFVETWQSFYRKKLKEVWKPAV

SEQ ID NO: 26087 - protein, 978 aa, synthetic construct
  REGION 1..978: note = engineered CasX variant
QEIKRINKIRRRLVKDSNTKKAGKTGPMKTLLVRVMTPDLRERLENLRKKPENIPQPISNTSRANLNKLLTDYTEMKKAILHVYWEEFQKDPVGLMSRVAQPASKKIDQNKLKPEMDEKGNLTTAGFACSQCGQPLFVYKLEQVSEKGKAYTNYFGRCNVAEHEKLILLAQLKPEKDSDEAVTYSLGKFGQRALDFYSIHVTKESTHPVKPLAQIAGNRYASGPVGKALSDACMGTIASFLSKYQDIIIEHQKVVKGNQKRLESLRELAGKENLEYPSVTLPPQPHTKEGVDAYNEVIARVRMWVNLNLWQKLKLSRDDAKPLLRLKGFPSFPLVERQANEVDWWDMVCNVKKLINEKKEDGKVFWQNLAGYKRQEALRPYLSSEEDRKKGKKFARYQLGDLLLHLEKKHGEDWGKVYDEAWERIDKKVEGLSKHIKLEEERRSEDAQSKAALTDWLRAKASFVIEGLKEADKDEFCRCELKLQKWYGDLRGKPFAIEAENSILDISGFSKQYNCAFIWQKDGVKKLNLYLIINYFKGGKLRFKKIKPEAFEANRFYTVINKKSGEIVPMEVNFNFDDPNLIILPLAFGKRQGREFIWNDLLSLETGSLKLANGRVIEKTLYNRRTRQDEPALFVALTFERREVLDSSNIKPMNLIGVDRGENIPAVIALTDPEGCPLSRFKDSLGNPTHILRIGMSYKEKQRTIQAKKEVEQRRAGGYSRKYASKAKNLADDMVRNTARDLLYYAVTQDAMLIFENLSRGFGRQGKRTFMAERQYTRMEDWLTAKLAYEGLPSKTYLSKTLAQYTSKTCSNCGFTITSADYDRVLEKLKKTATGWMTTINGKELKVEGQITYYNRYKRQNVVKDLSVELDRLSEESVNNDISSWTKGRSGEALSLLKKRFSHRPVQEKFVCLNCGFETHADEQAALNIARSWLFLRSQEYKKYQTNKTTGNTDKRAFVETWQSFYRKKLKEVWKPAV

SEQ ID NO: 26088 - protein, 978 aa, synthetic construct
  REGION 1..978: note = engineered CasX variant
QEIKRINKIRRRLVKDSNTKKAGKTGPMKTLLVRVMTPDLRERLENLRKKPENIPQPISNTSRANLNKLLTDYTEMKKAILHVYWEEFQKDPVGLMSRVAQPASKKIDQNKLKPEMDEKGNLTTAGFACSQCGQPLFVYKLEQVSEKGKAYTNYFGRCNVAEHEKLILLAQLKPEKDSDEAVTYSLGKFGQRALDFYSIHVTKESTHPVKPLAQIAGNRYASGPVGKALSDACMGTIASFLSKYQDIIIEHQKVVKGNQKRLESLRELAGKENLEYPSVTLPPQPHTKEGVDAYNEVIARVRMWVNLNLWQKLKLSRDDAKPLLRLKGFPSFPLVERQANEVDWWDMVCNVKKLINEKKEDGKVFWQNLAGYKRQEALRPYLSSEEDRKKGKKFARYQLGDLLLHLEKKHGEDWGKVYDEAWERIDKKVEGLSKHIKLEEERRSEDAQSKAALTDWLRAKASFVIEGLKEADKDEFCRCELKLQKWYGDLRGKPFAIEAENSILDISGFSKQYNCAFIWQKDGVKKLNLYLIINYFKGGKLRFKKIKPEAFEANRFYTVINKKSGEIVPMEVNFNFDDPNLIILPLAFGKRQGREFIWNDLLSLETGSLKLANGRVIEKTLYNRRTRQDEPALFVALTFERREVLDSSNIKPMNLIGVDRGENIPAVIALTDPEGCPLSRFKDSLGNPTHILRIGLSYKEKQRTIQAKKEVEQRRAGGYSRKYASKAKNLADDMVRNTARDLLYYAVTQDAMLIFENLSRGFGRQGKRTFMAERQYTRMEDWLTAKLAYEGLPSKTYLSKTLAQYTSKTCSNCGFTITSADYDRVLEKLKKTATGWMTTINGKELKVEGQITYYNRYKRQNVVKDLSVELDRLSEESVNNDISSWTKGRSGEALSLLKKRFSHRPVQEKFVCLNCGFETHADEQAALNIARSWLFLRSQEYKKYQTNKTTGNTDKRAFVETWQSFYRKKLKEVWKPAV

SEQ ID NO: 26089 - protein, 978 aa, synthetic construct
  REGION 1..978: note = engineered CasX variant
QEIKRINKIRRRLVKDSNTKKAGKTGPMKTLLVRVMTPDLRERLENLRKKPENIPQPISNTSRANLNKLLTDYTEMKKAILHVYWEEFQKDPVGLMSRVAQPASKKIDQNKLKPEMDEKGNLTTAGFACSQCGQPLFVYKLEQVSEKGKAYTNYFGRCNVAEHEKLILLAQLKPEKDSDEAVTYSLGKFGQRALDFYSIHVTKESTHPVKPLAQIAGNRYASGPVGKALSDACMGTIASFLSKYQDIIIEHQKVVKGNQKRLESLRELAGKENLEYPSVTLPPQPHTKEGVDAYNEVIARVRMWVNLNLWQKLKLSRDDAKPLLRLKGFPSFPLVERQANEVDWWDMVCNVKKLINEKKEDGKVFWQNLAGYKRQEALRPYLSSEEDRKKGKKFARYQLGDLLLHLEKKHGEDWGKVYDEAWERIDKKVEGLSKHIKLEEERRSEDAQSKAALTDWLRAKASFVIEGLKEADKDEFCRCELKLQKWYGDLRGKPFAIEAENSILDISGFSKQYNCAFIWQKDGVKKLNLYLIINYFKGGKLRFKKIKPEAFEANRFYTVINKKSGEIVPMEVNFNFDDPNLIILPLAFGKRQGREFIWNDLLSLETGSLKLANGRVIEKTLYNRRTRQDEPALFVALTFERREVLDSSNIKPMNLIGVDRGENIPAVIALTDPEGCPLSRFKDSLGNPTHILRIGKSYKEKQRTIQAKKEVEQRRAGGYSRKYASKAKNLADDMVRNTARDLLYYAVTQDAMLIFENLSRGFGRQGKRTFMAERQYTRMEDWLTAKLAYEGLPSKTYLSKTLAQYTSKTCSNCGFTITSADYDRVLEKLKKTATGWMTTINGKELKVEGQITYYNRYKRQNVVKDLSVELDRLSEESVNNDISSWTKGRSGEALSLLKKRFSHRPVQEKFVCLNCGFETHADEQAALNIARSWLFLRSQEYKKYQTNKTTGNTDKRAFVETWQSFYRKKLKEVWKPAV

SEQ ID NO: 26090 - protein, 978 aa, synthetic construct
  REGION 1..978: note = engineered CasX variant
QEIKRINKIRRRLVKDSNTKKAGKTGPMKTLLVRVMTPDLRERLENLRKKPENIPQPISNTSRANLNKLLTDYTEMKKAILHVYWEEFQKDPVGLMSRVAQPASKKIDQNKLKPEMDEKGNLTTAGFACSQCGQPLFVYKLEQVSEKGKAYTNYFGRCNVAEHEKLILLAQLKPEKDSDEAVTYSLGKFGQRALDFYSIHVTKESTHPVKPLAQIAGNRYASGPVGKALSDACMGTIASFLSKYQDIIIEHQKVVKGNQKRLESLRELAGKENLEYPSVTLPPQPHTKEGVDAYNEVIARVRMWVNLNLWQKLKLSRDDAKPLLRLKGFPSFPLVERQANEVDWWDMVCNVKKLINEKKEDGKVFWQNLAGYKRQEALRPYLSSEEDRKKGKKFARYQLGDLLLHLEKKHGEDWGKVYDEAWERIDKKVEGLSKHIKLEEERRSEDAQSKAALTDWLRAKASFVIEGLKEADKDEFCRCELKLQKWYGDLRGKPFAIEAENSILDISGFSKQYNCAFIWQKDGVKKLNLYLIINYFKGGKLRFKKIKPEAFEANRFYTVINKKSGEIVPMEVNFNFDDPNLIILPLAFGKRQGREFIWNDLLSLETGSLKLANGRVIEKTLYNRRTRQDEPALFVALTFERREVLDSSNIKPMNLIGVDRGENIPAVIALTDPEGCPLSRFKDSLGNPTHILRIGHSYKEKQRTIQAKKEVEQRRAGGYSRKYASKAKNLADDMVRNTARDLLYYAVTQDAMLIFENLSRGFGRQGKRTFMAERQYTRMEDWLTAKLAYEGLPSKTYLSKTLAQYTSKTCSNCGFTITSADYDRVLEKLKKTATGWMTTINGKELKVEGQITYYNRYKRQNVVKDLSVELDRLSEESVNNDISSWTKGRSGEALSLLKKRFSHRPVQEKFVCLNCGFETHADEQAALNIARSWLFLRSQEYKKYQTNKTTGNTDKRAFVETWQSFYRKKLKEVWKPAV

SEQ ID NO: 26091 - protein, 978 aa, synthetic construct
  REGION 1..978: note = engineered CasX variant
QEIKRINKIRRRLVKDSNTKKAGKTGPMKTLLVRVMTPDLRERLENLRKKPENIPQPISNTSRANLNKLLTDYTEMKKAILHVYWEEFQKDPVGLMSRVAQPASKKIDQNKLKPEMDEKGNLTTAGFACSQCGQPLFVYKLEQVSEKGKAYTNYFGRCNVAEHEKLILLAQLKPEKDSDEAVTYSLGKFGQRALDFYSIHVTKESTHPVKPLAQIAGNRYASGPVGKALSDACMGTIASFLSKYQDIIIEHQKVVKGNQKRLESLRELAGKENLEYPSVTLPPQPHTKEGVDAYNEVIARVRMWVNLNLWQKLKLSRDDAKPLLRLKGFPSFPLVERQANEVDWWDMVCNVKKLINEKKEDGKVFWQNLAGYKRQEALRPYLSSEEDRKKGKKFARYQLGDLLLHLEKKHGEDWGKVYDEAWERIDKKVEGLSKHIKLEEERRSEDAQSKAALTDWLRAKASFVIEGLKEADKDEFCRCELKLQKWYGDLRGKPFAIEAENSILDISGFSKQYNCAFIWQKDGVKKLNLYLIINYFKGGKLRFKKIKPEAFEANRFYTVINKKSGEIVPMEVNFNFDDPNLIILPLAFGKRQGREFIWNDLLSLETGSLKLANGRVIEKTLYNRRTRQDEPALFVALTFERREVLDSSNIKPMNLIGVDRGENIPAVIALTDPEGCPLSRFKDSLGNPTHILRIGGSYKEKQRTIQAKKEVEQRRAGGYSRKYASKAKNLADDMVRNTARDLLYYAVTQDAMLIFENLSRGFGRQGKRTFMAERQYTRMEDWLTAKLAYEGLPSKTYLSKTLAQYTSKTCSNCGFTITSADYDRVLEKLKKTATGWMTTINGKELKVEGQITYYNRYKRQNVVKDLSVELDRLSEESVNNDISSWTKGRSGEALSLLKKRFSHRPVQEKFVCLNCGFETHADEQAALNIARSWLFLRSQEYKKYQTNKTTGNTDKRAFVETWQSFYRKKLKEVWKPAV

SEQ ID NO: 26092 - protein, 978 aa, synthetic construct
  REGION 1..978: note = engineered CasX variant
QEIKRINKIRRRLVKDSNTKKAGKTGPMKTLLVRVMTPDLRERLENLRKKPENIPQPISNTSRANLNKLLTDYTEMKKAILHVYWEEFQKDPVGLMSRVAQPASKKIDQNKLKPEMDEKGNLTTAGFACSQCGQPLFVYKLEQVSEKGKAYTNYFGRCNVAEHEKLILLAQLKPEKDSDEAVTYSLGKFGQRALDFYSIHVTKESTHPVKPLAQIAGNRYASGPVGKALSDACMGTIASFLSKYQDIIIEHQKVVKGNQKRLESLRELAGKENLEYPSVTLPPQPHTKEGVDAYNEVIARVRMWVNLNLWQKLKLSRDDAKPLLRLKGFPSFPLVERQANEVDWWDMVCNVKKLINEKKEDGKVFWQNLAGYKRQEALRPYLSSEEDRKKGKKFARYQLGDLLLHLEKKHGEDWGKVYDEAWERIDKKVEGLSKHIKLEEERRSEDAQSKAALTDWLRAKASFVIEGLKEADKDEFCRCELKLQKWYGDLRGKPFAIEAENSILDISGFSKQYNCAFIWQKDGVKKLNLYLIINYFKGGKLRFKKIKPEAFEANRFYTVINKKSGEIVPMEVNFNFDDPNLIILPLAFGKRQGREFIWNDLLSLETGSLKLANGRVIEKTLYNRRTRQDEPALFVALTFERREVLDSSNIKPMNLIGVDRGENIPAVIALTDPEGCPLSRFKDSLGNPTHILRIGEYYKEKQRTIQCKKEVVQRRAGGYSRKYASKAKNLADDMVRNTARDLLYYAVTQDAMLIFENLSRGFGRQGKRTFMAERQYTRMEDWLTAKLAYEGLPSKTYLSKTLAQYTSKTCSNCGFTITSADYDRVLEKLKKTATGWMTTINGKELKVEGQITYYNRYKRQNVVKDLSVELDRLSEESVNNDISSWTKGRSGEALSLLKKRFSHRPVQEKFVCLNCGFETHADEQAALNIARSWLFLRSQEYKKYQTNKTTGNTDKRAFVETWQSFYRKKLKEVWKPAV

SEQ ID NO: 26093 - protein, 978 aa, synthetic construct
  REGION 1..978: note = engineered CasX variant
QEIKRINKIRRRLVKDSNTKKAGKTGPMKTLLVRVMTPDLRERLENLRKKPENIPQPISNTSRANLNKLLTDYTEMKKAILHVYWEEFQKDPVGLMSRVAQPASKKIDQNKLKPEMDEKGNLTTAGFACSQCGQPLFVYKLEQVSEKGKAYTNYFGRCNVAEHEKLILLAQLKPEKDSDEAVTYSLGKFGQRALDFYSIHVTKESTHPVKPLAQIAGNRYASGPVGKALSDACMGTIASFLSKYQDIIIEHQKVVKGNQKRLESLRELAGKENLEYPSVTLPPQPHTKEGVDAYNEVIARVRMWVNLNLWQKLKLSRDDAKPLLRLKGFPSFPLVERQANEVDWWDMVCNVKKLINEKKEDGKVFWQNLAGYKRQEALRPYLSSEEDRKKGKKFARYQLGDLLLHLEKKHGEDWGKVYDEAWERIDKKVEGLSKHIKLEEERRSEDAQSKAALTDWLRAKASFVIEGLKEADKDEFCRCELKLQKWYGDLRGKPFAIEAENSILDISGFSKQYNCAFIWQKDGVKKLNLYLIINYFKGGKLRFKKIKPEAFEANRFYTVINKKSGEIVPMEVNFNFDDPNLIILPLAFGKRQGREFIWNDLLSLETGSLKLANGRVIEKTLYNRRTRQDEPALFVALTFERREVLDSSNIKPMNLIGVDRGENIPAVIALTDPEGCPLSRFKDSLGNPTHILRIGEYYKEKQRTIQCKKEVEQRRAGGYSRKYASKAKNLADDMVRNTARDLLYYAVTQDAMLIFENLSRGFGRQGKRTFMAERQYTRMEDWLTAKLAYEGLPSKTYLSKTLAQYTSKTCSNCGFTITSADYDRVLEKLKKTATGWMTTINGKELKVEGQITYYNRYKRQNVVKDLSVELDRLSEESVNNDISSWTKGRSGEALSLLKKRFSHRPVQEKFVCLNCGFETHADEQAALNIARSWLFLRSQEYKKYQTNKTTGNTDKRAFVETWQSFYRKKLKEVWKPAV

SEQ ID NO: 26094 - protein, 978 aa, synthetic construct
  REGION 1..978: note = engineered CasX variant
QEIKRINKIRRRLVKDSNTKKAGKTGPMKTLLVRVMTPDLRERLENLRKKPENIPQPISNTSRANLNKLLTDYTEMKKAILHVYWEEFQKDPVGLMSRVAQPASKKIDQNKLKPEMDEKGNLTTAGFACSQCGQPLFVYKLEQVSEKGKAYTNYFGRCNVAEHEKLILLAQLKPEKDSDEAVTYSLGKFGQRALDFYSIHVTKESTHPVKPLAQIAGNRYASGPVGKALSDACMGTIASFLSKYQDIIIEHQKVVKGNQKRLESLRELAGKENLEYPSVTLPPQPHTKEGVDAYNEVIARVRMWVNLNLWQKLKLSRDDAKPLLRLKGFPSFPLVERQANEVDWWDMVCNVKKLINEKKEDGKVFWQNLAGYKRQEALRPYLSSEEDRKKGKKFARYQLGDLLLHLEKKHGEDWGKVYDEAWERIDKKVEGLSKHIKLEEERRSEDAQSKAALTDWLRAKASFVIEGLKEADKDEFCRCELKLQKWYGDLRGKPFAIEAENSILDISGFSKQYNCAFIWQKDGVKKLNLYLIINYFKGGKLRFKKIKPEAFEANRFYTVINKKSGEIVPMEVNFNFDDPNLIILPLAFGKRQGREFIWNDLLSLETGSLKLANGRVIEKTLYNRRTRQDEPALFVALTFERREVLDSSNIKPMNLIGVDRGENIPAVIALTDPEGCPLSRFKDSLGNPTHILRIGEYYKEKQRTIQAKKEVVQRRAGGYSRKYASKAKNLADDMVRNTARDLLYYAVTQDAMLIFENLSRGFGRQGKRTFMAERQYTRMEDWLTAKLAYEGLPSKTYLSKTLAQYTSKTCSNCGFTITSADYDRVLEKLKKTATGWMTTINGKELKVEGQITYYNRYKRQNVVKDLSVELDRLSEESVNNDISSWTKGRSGEALSLLKKRFSHRPVQEKFVCLNCGFETHADEQAALNIARSWLFLRSQEYKKYQTNKTTGNTDKRAFVETWQSFYRKKLKEVWKPAV

SEQ ID NO: 26095 - protein, 978 aa, synthetic construct
  REGION 1..978: note = engineered CasX variant
QEIKRINKIRRRLVKDSNTKKAGKTGPMKTLLVRVMTPDLRERLENLRKKPENIPQPISNTSRANLNKLLTDYTEMKKAILHVYWEEFQKDPVGLMSRVAQPASKKIDQNKLKPEMDEKGNLTTAGFACSQCGQPLFVYKLEQVSEKGKAYTNYFGRCNVAEHEKLILLAQLKPEKDSDEAVTYSLGKFGQRALDFYSIHVTKESTHPVKPLAQIAGNRYASGPVGKALSDACMGTIASFLSKYQDIIIEHQKVVKGNQKRLESLRELAGKENLEYPSVTLPPQPHTKEGVDAYNEVIARVRMWVNLNLWQKLKLSRDDAKPLLRLKGFPSFPLVERQANEVDWWDMVCNVKKLINEKKEDGKVFWQNLAGYKRQEALRPYLSSEEDRKKGKKFARYQLGDLLLHLEKKHGEDWGKVYDEAWERIDKKVEGLSKHIKLEEERRSEDAQSKAALTDWLRAKASFVIEGLKEADKDEFCRCELKLQKWYGDLRGKPFAIEAENSILDISGFSKQYNCAFIWQKDGVKKLNLYLIINYFKGGKLRFKKIKPEAFEANRFYTVINKKSGEIVPMEVNFNFDDPNLIILPLAFGKRQGREFIWNDLLSLETGSLKLANGRVIEKTLYNRRTRQDEPALFVALTFERREVLDSSNIKPMNLIGVDRGENIPAVIALTDPEGCPLSRFKDSLGNPTHILRIGEYYKEKQRTIQAKKEVEQRRAGQYSRKYASKAKNLADDMVRNTARDLLYYAVTQDAMLIFENLSRGFGRQGKRTFMAERQYTRMEDWLTAKLAYEGLPSKTYLSKTLAQYTSKTCSNCGFTITSADYDRVLEKLKKTATGWMTTINGKELKVEGQITYYNRYKRQNVVKDLSVELDRLSEESVNNDISSWTKGRSGEALSLLKKRFSHRPVQEKFVCLNCGFETHADEQAALNIARSWLFLRSQEYKKYQTNKTTGNTDKRAFVETWQSFYRKKLKEVWKPAV

SEQ ID NO: 26096 - protein, 978 aa, synthetic construct
  REGION 1..978: note = engineered CasX variant
QEIKRINKIRRRLVKDSNTKKAGKTGPMKTLLVRVMTPDLRERLENLRKKPENIPQPISNTSRANLNKLLTDYTEMKKAILHVYWEEFQKDPVGLMSRVAQPASKKIDQNKLKPEMDEKGNLTTAGFACSQCGQPLFVYKLEQVSEKGKAYTNYFGRCNVAEHEKLILLAQLKPEKDSDEAVTYSLGKFGQRALDFYSIHVTKESTHPVKPLAQIAGNRYASGPVGKALSDACMGTIASFLSKYQDIIIEHQKVVKGNQKRLESLRELAGKENLEYPSVTLPPQPHTKEGVDAYNEVIARVRMWVNLNLWQKLKLSRDDAKPLLRLKGFPSFPLVERQANEVDWWDMVCNVKKLINEKKEDGKVFWQNLAGYKRQEALRPYLSSEEDRKKGKKFARYQLGDLLLHLEKKHGEDWGKVYDEAWERIDKKVEGLSKHIKLEEERRSEDAQSKAALTDWLRAKASFVIEGLKEADKDEFCRCELKLQKWYGDLRGKPFAIEAENSILDISGFSKQYNCAFIWQKDGVKKLNLYLIINYFKGGKLRFKKIKPEAFEANRFYTVINKKSGEIVPMEVNFNFDDPNLIILPLAFGKRQGREFIWNDLLSLETGSLKLANGRVIEKTLYNRRTRQDEPALFVALTFERREVLDSSNIKPMNLIGVDRGENIPAVIALTDPEGCPLSRFKDSLGNPTHILRIGEYYKEKQRTIQAKKEVEQRRAGGYSRKYASKAKNLADDMVRNTARDLLYYAVTQDAMLIFENLSRGFGRQGKRTFMAERQYTRMEDWLTAKLAYEGLPSKTYLSKTLAQYTSKTCSNCGFTITSADYDRVLEKLKKTATGWMTTINGKELKVEGQITYYNRYKRQNVVKDLSVELDRLSEESVNNDISSWTKGRSGEALSLLKKRFSHRPVQEKFVCLNCGFETHADEQAALNIARSWLFLRSQEYKKYQTNKTTGNTDKRAFVETWQSFYRKKLKEVWKPAV

SEQ ID NO: 26097 - protein, 978 aa, synthetic construct
  REGION 1..978: note = engineered CasX variant
QEIKRINKIRRRLVKDSNTKKAGKTGPMKTLLVRVMTPDLRERLENLRKKPENIPQPISNTSRANLNKLLTDYTEMKKAILHVYWEEFQKDPVGLMSRVAQPASKKIDQNKLKPEMDEKGNLTTAGFACSQCGQPLFVYKLEQVSEKGKAYTNYFGRCNVAEHEKLILLAQLKPEKDSDEAVTYSLGKFGQRALDFYSIHVTKESTHPVKPLAQIAGNRYASGPVGKALSDACMGTIASFLSKYQDIIIEHQKVVKGNQKRLESLRELAGKENLEYPSVTLPPQPHTKEGVDAYNEVIARVRMWVNLNLWQKLKLSRDDAKPLLRLKGFPSFPLVERQANEVDWWDMVCNVKKLINEKKEDGKVFWQNLAGYKRQEALRPYLSSEEDRKKGKKFARYQLGDLLLHLEKKHGEDWGKVYDEAWERIDKKVEGLSKHIKLEEERRSEDAQSKAALTDWLRAKASFVIEGLKEADKDEFCRCELKLQKWYGDLRGKPFAIEAENSILDISGFSKQYNCAFIWQKDGVKKLNLYLIINYFKGGKLRFKKIKPEAFEANRFYTVINKKSGEIVPMEVNFNFDDPNLIILPLAFGKRQGREFIWNDLLSLETGSLKLANGRVIEKTLYNRRTRQDEPALFVALTFERREVLDSSNIKPMNLIGVDRGENIPAVIALTDPEGCPLSRFKDSLGNPTHILRIGEYYKEGQRTIQAKKEVEQRRAGGYSRKYASKAKNLADDMVRNTARDLLYYAVTQDAMLIFENLSRGFGRQGKRTFMAERQYTRMEDWLTAKLAYEGLPSKTYLSKTLAQYTSKTCSNCGFTITSADYDRVLEKLKKTATGWMTTINGKELKVEGQITYYNRYKRQNVVKDLSVELDRLSEESVNNDISSWTKGRSGEALSLLKKRFSHRPVQEKFVCLNCGFETHADEQAALNIARSWLFLRSQEYKKYQTNKTTGNTDKRAFVETWQSFYRKKLKEVWKPAV

SEQ ID NO: 26098 - protein, 978 aa, synthetic construct
  REGION 1..978: note = engineered CasX variant
QEIKRINKIRRRLVKDSNTKKAGKTGPMKTLLVRVMTPDLRERLENLRKKPENIPQPISNTSRANLNKLLTDYTEMKKAILHVYWEEFQKDPVGLMSRVAQPASKKIDQNKLKPEMDEKGNLTTAGFACSQCGQPLFVYKLEQVSEKGKAYTNYFGRCNVAEHEKLILLAQLKPEKDSDEAVTYSLGKFGQRALDFYSIHVTKESTHPVKPLAQIAGNRYASGPVGKALSDACMGTIASFLSKYQDIIIEHQKVVKGNQKRLESLRELAGKENLEYPSVTLPPQPHTKEGVDAYNEVIARVRMWVNLNLWQKLKLSRDDAKPLLRLKGFPSFPLVERQANEVDWWDMVCNVKKLINEKKEDGKVFWQNLAGYKRQEALRPYLSSEEDRKKGKKFARYQLGDLLLHLEKKHGEDWGKVYDEAWERIDKKVEGLSKHIKLEEERRSEDAQSKAALTDWLRAKASFVIEGLKEADKDEFCRCELKLQKWYGDLRGKPFAIEAENSILDISGFSKQYNCAFIWQKDGVKKLNLYLIINYFKGGKLRFKKIKPEAFEANRFYTVINKKSGEIVPMEVNFNFDDPNLIILPLAFGKRQGREFIWNDLLSLETGSLKLANGRVIEKTLYNRRTRQDEPALFVALTFERREVLDSSNIKPMNLIGVDRGENIPAVIALTDPEGCPLSRFKDSLGNPTHILRIGEWYKEKQRTIQAKKEVEQRRAGGYSRKYASKAKNLADDMVRNTARDLLYYAVTQDAMLIFENLSRGFGRQGKRTFMAERQYTRMEDWLTAKLAYEGLPSKTYLSKTLAQYTSKTCSNCGFTITSADYDRVLEKLKKTATGWMTTINGKELKVEGQITYYNRYKRQNVVKDLSVELDRLSEESVNNDISSWTKGRSGEALSLLKKRFSHRPVQEKFVCLNCGFETHADEQAALNIARSWLFLRSQEYKKYQTNKTTGNTDKRAFVETWQSFYRKKLKEVWKPAV

SEQ ID NO: 26099 - protein, 978 aa, synthetic construct
  REGION 1..978: note = engineered CasX variant
QEIKRINKIRRRLVKDSNTKKAGKTGPMKTLLVRVMTPDLRERLENLRKKPENIPQPISNTSRANLNKLLTDYTEMKKAILHVYWEEFQKDPVGLMSRVAQPASKKIDQNKLKPEMDEKGNLTTAGFACSQCGQPLFVYKLEQVSEKGKAYTNYFGRCNVAEHEKLILLAQLKPEKDSDEAVTYSLGKFGQRALDFYSIHVTKESTHPVKPLAQIAGNRYASGPVGKALSDACMGTIASFLSKYQDIIIEHQKVVKGNQKRLESLRELAGKENLEYPSVTLPPQPHTKEGVDAYNEVIARVRMWVNLNLWQKLKLSRDDAKPLLRLKGFPSFPLVERQANEVDWWDMVCNVKKLINEKKEDGKVFWQNLAGYKRQEALRPYLSSEEDRKKGKKFARYQLGDLLLHLEKKHGEDWGKVYDEAWERIDKKVEGLSKHIKLEEERRSEDAQSKAALTDWLRAKASFVIEGLKEADKDEFCRCELKLQKWYGDLRGKPFAIEAENSILDISGFSKQYNCAFIWQKDGVKKLNLYLIINYFKGGKLRFKKIKPEAFEANRFYTVINKKSGEIVPMEVNFNFDDPNLIILPLAFGKRQGREFIWNDLLSLETGSLKLANGRVIEKTLYNRRTRQDEPALFVALTFERREVLDSSNIKPMNLIGVDRGENIPAVIALTDPEGCPLSRFKDSLGNPTHILRIGEWYKCKQRTIQAKKEVEQRRAGGYSRKYASKAKNLADDMVRNTARDLLYYAVTQDAMLIFENLSRGFGRQGKRTFMAERQYTRMEDWLTAKLAYEGLPSKTYLSKTLAQYTSKTCSNCGFTITSADYDRVLEKLKKTATGWMTTINGKELKVEGQITYYNRYKRQNVVKDLSVELDRLSEESVNNDISSWTKGRSGEALSLLKKRFSHRPVQEKFVCLNCGFETHADEQAALNIARSWLFLRSQEYKKYQTNKTTGNTDKRAFVETWQSFYRKKLKEVWKPAV

SEQ ID NO: 26100 - protein, 978 aa, synthetic construct
  REGION 1..978: note = engineered CasX variant
QEIKRINKIRRRLVKDSNTKKAGKTGPMKTLLVRVMTPDLRERLENLRKKPENIPQPISNTSRANLNKLLTDYTEMKKAILHVYWEEFQKDPVGLMSRVAQPASKKIDQNKLKPEMDEKGNLTTAGFACSQCGQPLFVYKLEQVSEKGKAYTNYFGRCNVAEHEKLILLAQLKPEKDSDEAVTYSLGKFGQRALDFYSIHVTKESTHPVKPLAQIAGNRYASGPVGKALSDACMGTIASFLSKYQDIIIEHQKVVKGNQKRLESLRELAGKENLEYPSVTLPPQPHTKEGVDAYNEVIARVRMWVNLNLWQKLKLSRDDAKPLLRLKGFPSFPLVERQANEVDWWDMVCNVKKLINEKKEDGKVFWQNLAGYKRQEALRPYLSSEEDRKKGKKFARYQLGDLLLHLEKKHGEDWGKVYDEAWERIDKKVEGLSKHIKLEEERRSEDAQSKAALTDWLRAKASFVIEGLKEADKDEFCRCELKLQKWYGDLRGKPFAIEAENSILDISGFSKQYNCAFIWQKDGVKKLNLYLIINYFKGGKLRFKKIKPEAFEANRFYTVINKKSGEIVPMEVNFNFDDPNLIILPLAFGKRQGREFIWNDLLSLETGSLKLANGRVIEKTLYNRRTRQDEPALFVALTFERREVLDSSNIKPMNLIGVDRGENIPAVIALTDPEGCPLSRFKDSLGNPTHILRIGEVYKEKQRTIQAYKEVEQRRAGGYSRKYASKAKNLADDMVRNTARDLLYYAVTQDAMLIFENLSRGFGRQGKRTFMAERQYTRMEDWLTAKLAYEGLPSKTYLSKTLAQYTSKTCSNCGFTITSADYDRVLEKLKKTATGWMTTINGKELKVEGQITYYNRYKRQNVVKDLSVELDRLSEESVNNDISSWTKGRSGEALSLLKKRFSHRPVQEKFVCLNCGFETHADEQAALNIARSWLFLRSQEYKKYQTNKTTGNTDKRAFVETWQSFYRKKLKEVWKPAV

SEQ ID NO: 26101 - protein, 978 aa, synthetic construct
  REGION 1..978: note = engineered CasX variant
QEIKRINKIRRRLVKDSNTKKAGKTGPMKTLLVRVMTPDLRERLENLRKKPENIPQPISNTSRANLNKLLTDYTEMKKAILHVYWEEFQKDPVGLMSRVAQPASKKIDQNKLKPEMDEKGNLTTAGFACSQCGQPLFVYKLEQVSEKGKAYTNYFGRCNVAEHEKLILLAQLKPEKDSDEAVTYSLGKFGQRALDFYSIHVTKESTHPVKPLAQIAGNRYASGPVGKALSDACMGTIASFLSKYQDIIIEHQKVVKGNQKRLESLRELAGKENLEYPSVTLPPQPHTKEGVDAYNEVIARVRMWVNLNLWQKLKLSRDDAKPLLRLKGFPSFPLVERQANEVDWWDMVCNVKKLINEKKEDGKVFWQNLAGYKRQEALRPYLSSEEDRKKGKKFARYQLGDLLLHLEKKHGEDWGKVYDEAWERIDKKVEGLSKHIKLEEERRSEDAQSKAALTDWLRAKASFVIEGLKEADKDEFCRCELKLQKWYGDLRGKPFAIEAENSILDISGFSKQYNCAFIWQKDGVKKLNLYLIINYFKGGKLRFKKIKPEAFEANRFYTVINKKSGEIVPMEVNFNFDDPNLIILPLAFGKRQGREFIWNDLLSLETGSLKLANGRVIEKTLYNRRTRQDEPALFVALTFERREVLDSSNIKPMNLIGVDRGENIPAVIALTDPEGCPLSRFKDSLGNPTHILRIGEVYKEKQRTIQAKKEVEQRRAGGYSRKYASKAKNLADDMVRNTARDLLYYAVTQDAMLIFENLSRGFGRQGKRTFMAERQYTRMEDWLTAKLAYEGLPSKTYLSKTLAQYTSKTCSNCGFTITSADYDRVLEKLKKTATGWMTTINGKELKVEGQITYYNRYKRQNVVKDLSVELDRLSEESVNNDISSWTKGRSGEALSLLKKRFSHRPVQEKFVCLNCGFETHADEQAALNIARSWLFLRSQEYKKYQTNKTTGNTDKRAFVETWQSFYRKKLKEVWKPAV

SEQ ID NO: 26102 - protein, 978 aa, synthetic construct
  REGION 1..978: note = engineered CasX variant
QEIKRINKIRRRLVKDSNTKKAGKTGPMKTLLVRVMTPDLRERLENLRKKPENIPQPISNTSRANLNKLLTDYTEMKKAILHVYWEEFQKDPVGLMSRVAQPASKKIDQNKLKPEMDEKGNLTTAGFACSQCGQPLFVYKLEQVSEKGKAYTNYFGRCNVAEHEKLILLAQLKPEKDSDEAVTYSLGKFGQRALDFYSIHVTKESTHPVKPLAQIAGNRYASGPVGKALSDACMGTIASFLSKYQDIIIEHQKVVKGNQKRLESLRELAGKENLEYPSVTLPPQPHTKEGVDAYNEVIARVRMWVNLNLWQKLKLSRDDAKPLLRLKGFPSFPLVERQANEVDWWDMVCNVKKLINEKKEDGKVFWQNLAGYKRQEALRPYLSSEEDRKKGKKFARYQLGDLLLHLEKKHGEDWGKVYDEAWERIDKKVEGLSKHIKLEEERRSEDAQSKAALTDWLRAKASFVIEGLKEADKDEFCRCELKLQKWYGDLRGKPFAIEAENSILDISGFSKQYNCAFIWQKDGVKKLNLYLIINYFKGGKLRFKKIKPEAFEANRFYTVINKKSGEIVPMEVNFNFDDPNLIILPLAFGKRQGREFIWNDLLSLETGSLKLANGRVIEKTLYNRRTRQDEPALFVALTFERREVLDSSNIKPMNLIGVDRGENIPAVIALTDPEGCPLSRFKDSLGNPTHILRIGETYKNKQRTIQAKKEVEQRRAGGYSRKYASKAKNLADDMVRNTARDLLYYAVTQDAMLIFENLSRGFGRQGKRTFMAERQYTRMEDWLTAKLAYEGLPSKTYLSKTLAQYTSKTCSNCGFTITSADYDRVLEKLKKTATGWMTTINGKELKVEGQITYYNRYKRQNVVKDLSVELDRLSEESVNNDISSWTKGRSGEALSLLKKRFSHRPVQEKFVCLNCGFETHADEQAALNIARSWLFLRSQEYKKYQTNKTTGNTDKRAFVETWQSFYRKKLKEVWKPAV

SEQ ID NO: 26103 - protein, 978 aa, synthetic construct
  REGION 1..978: note = engineered CasX variant
QEIKRINKIRRRLVKDSNTKKAGKTGPMKTLLVRVMTPDLRERLENLRKKPENIPQPISNTSRANLNKLLTDYTEMKKAILHVYWEEFQKDPVGLMSRVAQPASKKIDQNKLKPEMDEKGNLTTAGFACSQCGQPLFVYKLEQVSEKGKAYTNYFGRCNVAEHEKLILLAQLKPEKDSDEAVTYSLGKFGQRALDFYSIHVTKESTHPVKPLAQIAGNRYASGPVGKALSDACMGTIASFLSKYQDIIIEHQKVVKGNQKRLESLRELAGKENLEYPSVTLPPQPHTKEGVDAYNEVIARVRMWVNLNLWQKLKLSRDDAKPLLRLKGFPSFPLVERQANEVDWWDMVCNVKKLINEKKEDGKVFWQNLAGYKRQEALRPYLSSEEDRKKGKKFARYQLGDLLLHLEKKHGEDWGKVYDEAWERIDKKVEGLSKHIKLEEERRSEDAQSKAALTDWLRAKASFVIEGLKEADKDEFCRCELKLQKWYGDLRGKPFAIEAENSILDISGFSKQYNCAFIWQKDGVKKLNLYLIINYFKGGKLRFKKIKPEAFEANRFYTVINKKSGEIVPMEVNFNFDDPNLIILPLAFGKRQGREFIWNDLLSLETGSLKLANGRVIEKTLYNRRTRQDEPALFVALTFERREVLDSSNIKPMNLIGVDRGENIPAVIALTDPEGCPLSRFKDSLGNPTHILRIGETYKEKQRTIQAKKEVEQRRAGGYSRKYASKAKNLADDMVRNTARDLLYYAVTQDAMLIFENLSRGFGRQGKRTFMAERQYTRMEDWLTAKLAYEGLPSKTYLSKTLAQYTSKTCSNCGFTITSADYDRVLEKLKKTATGWMTTINGKELKVEGQITYYNRYKRQNVVKDLSVELDRLSEESVNNDISSWTKGRSGEALSLLKKRFSHRPVQEKFVCLNCGFETHADEQAALNIARSWLFLRSQEYKKYQTNKTTGNTDKRAFVETWQSFYRKKLKEVWKPAV

SEQ ID NO: 26104 - protein, 978 aa, synthetic construct
  REGION 1..978: note = engineered CasX variant
QEIKRINKIRRRLVKDSNTKKAGKTGPMKTLLVRVMTPDLRERLENLRKKPENIPQPISNTSRANLNKLLTDYTEMKKAILHVYWEEFQKDPVGLMSRVAQPASKKIDQNKLKPEMDEKGNLTTAGFACSQCGQPLFVYKLEQVSEKGKAYTNYFGRCNVAEHEKLILLAQLKPEKDSDEAVTYSLGKFGQRALDFYSIHVTKESTHPVKPLAQIAGNRYASGPVGKALSDACMGTIASFLSKYQDIIIEHQKVVKGNQKRLESLRELAGKENLEYPSVTLPPQPHTKEGVDAYNEVIARVRMWVNLNLWQKLKLSRDDAKPLLRLKGFPSFPLVERQANEVDWWDMVCNVKKLINEKKEDGKVFWQNLAGYKRQEALRPYLSSEEDRKKGKKFARYQLGDLLLHLEKKHGEDWGKVYDEAWERIDKKVEGLSKHIKLEEERRSEDAQSKAALTDWLRAKASFVIEGLKEADKDEFCRCELKLQKWYGDLRGKPFAIEAENSILDISGFSKQYNCAFIWQKDGVKKLNLYLIINYFKGGKLRFKKIKPEAFEANRFYTVINKKSGEIVPMEVNFNFDDPNLIILPLAFGKRQGREFIWNDLLSLETGSLKLANGRVIEKTLYNRRTRQDEPALFVALTFERREVLDSSNIKPMNLIGVDRGENIPAVIALTDPEGCPLSRFKDSLGNPTHILRIGETYKEKQRSIQAKKEVEQRRAGGYSRKYASKAKNLADDMVRNTARDLLYYAVTQDAMLIFENLSRGFGRQGKRTFMAERQYTRMEDWLTAKLAYEGLPSKTYLSKTLAQYTSKTCSNCGFTITSADYDRVLEKLKKTATGWMTTINGKELKVEGQITYYNRYKRQNVVKDLSVELDRLSEESVNNDISSWTKGRSGEALSLLKKRFSHRPVQEKFVCLNCGFETHADEQAALNIARSWLFLRSQEYKKYQTNKTTGNTDKRAFVETWQSFYRKKLKEVWKPAV

SEQ ID NO: 26105 - protein, 978 aa, synthetic construct
  REGION 1..978: note = engineered CasX variant
QEIKRINKIRRRLVKDSNTKKAGKTGPMKTLLVRVMTPDLRERLENLRKKPENIPQPISNTSRANLNKLLTDYTEMKKAILHVYWEEFQKDPVGLMSRVAQPASKKIDQNKLKPEMDEKGNLTTAGFACSQCGQPLFVYKLEQVSEKGKAYTNYFGRCNVAEHEKLILLAQLKPEKDSDEAVTYSLGKFGQRALDFYSIHVTKESTHPVKPLAQIAGNRYASGPVGKALSDACMGTIASFLSKYQDIIIEHQKVVKGNQKRLESLRELAGKENLEYPSVTLPPQPHTKEGVDAYNEVIARVRMWVNLNLWQKLKLSRDDAKPLLRLKGFPSFPLVERQANEVDWWDMVCNVKKLINEKKEDGKVFWQNLAGYKRQEALRPYLSSEEDRKKGKKFARYQLGDLLLHLEKKHGEDWGKVYDEAWERIDKKVEGLSKHIKLEEERRSEDAQSKAALTDWLRAKASFVIEGLKEADKDEFCRCELKLQKWYGDLRGKPFAIEAENSILDISGFSKQYNCAFIWQKDGVKKLNLYLIINYFKGGKLRFKKIKPEAFEANRFYTVINKKSGEIVPMEVNFNFDDPNLIILPLAFGKRQGREFIWNDLLSLETGSLKLANGRVIEKTLYNRRTRQDEPALFVALTFERREVLDSSNIKPMNLIGVDRGENIPAVIALTDPEGCPLSRFKDSLGNPTHILRIGESYREKTRTIQAKKEVEQRRAGGYSRKYASKAKNLADDMVRNTARDLLYYAVTQDAMLIFENLSRGFGRQGKRTFMAERQYTRMEDWLTAKLAYEGLPSKTYLSKTLAQYTSKTCSNCGFTITSADYDRVLEKLKKTATGWMTTINGKELKVEGQITYYNRYKRQNVVKDLSVELDRLSEESVNNDISSWTKGRSGEALSLLKKRFSHRPVQEKFVCLNCGFETHADEQAALNIARSWLFLRSQEYKKYQTNKTTGNTDKRAFVETWQSFYRKKLKEVWKPAV

SEQ ID NO: 26106 - protein, 978 aa, synthetic construct
  REGION 1..978: note = engineered CasX variant
QEIKRINKIRRRLVKDSNTKKAGKTGPMKTLLVRVMTPDLRERLENLRKKPENIPQPISNTSRANLNKLLTDYTEMKKAILHVYWEEFQKDPVGLMSRVAQPASKKIDQNKLKPEMDEKGNLTTAGFACSQCGQPLFVYKLEQVSEKGKAYTNYFGRCNVAEHEKLILLAQLKPEKDSDEAVTYSLGKFGQRALDFYSIHVTKESTHPVKPLAQIAGNRYASGPVGKALSDACMGTIASFLSKYQDIIIEHQKVVKGNQKRLESLRELAGKENLEYPSVTLPPQPHTKEGVDAYNEVIARVRMWVNLNLWQKLKLSRDDAKPLLRLKGFPSFPLVERQANEVDWWDMVCNVKKLINEKKEDGKVFWQNLAGYKRQEALRPYLSSEEDRKKGKKFARYQLGDLLLHLEKKHGEDWGKVYDEAWERIDKKVEGLSKHIKLEEERRSEDAQSKAALTDWLRAKASFVIEGLKEADKDEFCRCELKLQKWYGDLRGKPFAIEAENSILDISGFSKQYNCAFIWQKDGVKKLNLYLIINYFKGGKLRFKKIKPEAFEANRFYTVINKKSGEIVPMEVNFNFDDPNLIILPLAFGKRQGREFIWNDLLSLETGSLKLANGRVIEKTLYNRRTRQDEPALFVALTFERREVLDSSNIKPMNLIGVDRGENIPAVIALTDPEGCPLSRFKDSLGNPTHILRIGESYREKQRTIQAKKEVEQRRAGTYSRKYASKAKNLADDMVRNTARDLLYYAVTQDAMLIFENLSRGFGRQGKRTFMAERQYTRMEDWLTAKLAYEGLPSKTYLSKTLAQYTSKTCSNCGFTITSADYDRVLEKLKKTATGWMTTINGKELKVEGQITYYNRYKRQNVVKDLSVELDRLSEESVNNDISSWTKGRSGEALSLLKKRFSHRPVQEKFVCLNCGFETHADEQAALNIARSWLFLRSQEYKKYQTNKTTGNTDKRAFVETWQSFYRKKLKEVWKPAV

SEQ ID NO: 26107 - protein, 978 aa, synthetic construct
  REGION 1..978: note = engineered CasX variant
QEIKRINKIRRRLVKDSNTKKAGKTGPMKTLLVRVMTPDLRERLENLRKKPENIPQPISNTSRANLNKLLTDYTEMKKAILHVYWEEFQKDPVGLMSRVAQPASKKIDQNKLKPEMDEKGNLTTAGFACSQCGQPLFVYKLEQVSEKGKAYTNYFGRCNVAEHEKLILLAQLKPEKDSDEAVTYSLGKFGQRALDFYSIHVTKESTHPVKPLAQIAGNRYASGPVGKALSDACMGTIASFLSKYQDIIIEHQKVVKGNQKRLESLRELAGKENLEYPSVTLPPQPHTKEGVDAYNEVIARVRMWVNLNLWQKLKLSRDDAKPLLRLKGFPSFPLVERQANEVDWWDMVCNVKKLINEKKEDGKVFWQNLAGYKRQEALRPYLSSEEDRKKGKKFARYQLGDLLLHLEKKHGEDWGKVYDEAWERIDKKVEGLSKHIKLEEERRSEDAQSKAALTDWLRAKASFVIEGLKEADKDEFCRCELKLQKWYGDLRGKPFAIEAENSILDISGFSKQYNCAFIWQKDGVKKLNLYLIINYFKGGKLRFKKIKPEAFEANRFYTVINKKSGEIVPMEVNFNFDDPNLIILPLAFGKRQGREFIWNDLLSLETGSLKLANGRVIEKTLYNRRTRQDEPALFVALTFERREVLDSSNIKPMNLIGVDRGENIPAVIALTDPEGCPLSRFKDSLGNPTHILRIGESYREKQRTIQAKKEVEQRRAGAYSRKYASKAKNLADDMVRNTARDLLYYAVTQDAMLIFENLSRGFGRQGKRTFMAERQYTRMEDWLTAKLAYEGLPSKTYLSKTLAQYTSKTCSNCGFTITSADYDRVLEKLKKTATGWMTTINGKELKVEGQITYYNRYKRQNVVKDLSVELDRLSEESVNNDISSWTKGRSGEALSLLKKRFSHRPVQEKFVCLNCGFETHADEQAALNIARSWLFLRSQEYKKYQTNKTTGNTDKRAFVETWQSFYRKKLKEVWKPAV

SEQ ID NO: 26108 - protein, 978 aa, synthetic construct
  REGION 1..978: note = engineered CasX variant
QEIKRINKIRRRLVKDSNTKKAGKTGPMKTLLVRVMTPDLRERLENLRKKPENIPQPISNTSRANLNKLLTDYTEMKKAILHVYWEEFQKDPVGLMSRVAQPASKKIDQNKLKPEMDEKGNLTTAGFACSQCGQPLFVYKLEQVSEKGKAYTNYFGRCNVAEHEKLILLAQLKPEKDSDEAVTYSLGKFGQRALDFYSIHVTKESTHPVKPLAQIAGNRYASGPVGKALSDACMGTIASFLSKYQDIIIEHQKVVKGNQKRLESLRELAGKENLEYPSVTLPPQPHTKEGVDAYNEVIARVRMWVNLNLWQKLKLSRDDAKPLLRLKGFPSFPLVERQANEVDWWDMVCNVKKLINEKKEDGKVFWQNLAGYKRQEALRPYLSSEEDRKKGKKFARYQLGDLLLHLEKKHGEDWGKVYDEAWERIDKKVEGLSKHIKLEEERRSEDAQSKAALTDWLRAKASFVIEGLKEADKDEFCRCELKLQKWYGDLRGKPFAIEAENSILDISGFSKQYNCAFIWQKDGVKKLNLYLIINYFKGGKLRFKKIKPEAFEANRFYTVINKKSGEIVPMEVNFNFDDPNLIILPLAFGKRQGREFIWNDLLSLETGSLKLANGRVIEKTLYNRRTRQDEPALFVALTFERREVLDSSNIKPMNLIGVDRGENIPAVIALTDPEGCPLSRFKDSLGNPTHILRIGESYQKKQRTIQAKKEVEQRRLGGYSRKYASKAKNLADDMVRNTARDLLYYAVTQDAMLIFENLSRGFGRQGKRTFMAERQYTRMEDWLTAKLAYEGLPSKTYLSKTLAQYTSKTCSNCGFTITSADYDRVLEKLKKTATGWMTTINGKELKVEGQITYYNRYKRQNVVKDLSVELDRLSEESVNNDISSWTKGRSGEALSLLKKRFSHRPVQEKFVCLNCGFETHADEQAALNIARSWLFLRSQEYKKYQTNKTTGNTDKRAFVETWQSFYRKKLKEVWKPAV

SEQ ID NO: 26109 - protein, 978 aa, synthetic construct
  REGION 1..978: note = engineered CasX variant
QEIKRINKIRRRLVKDSNTKKAGKTGPMKTLLVRVMTPDLRERLENLRKKPENIPQPISNTSRANLNKLLTDYTEMKKAILHVYWEEFQKDPVGLMSRVAQPASKKIDQNKLKPEMDEKGNLTTAGFACSQCGQPLFVYKLEQVSEKGKAYTNYFGRCNVAEHEKLILLAQLKPEKDSDEAVTYSLGKFGQRALDFYSIHVTKESTHPVKPLAQIAGNRYASGPVGKALSDACMGTIASFLSKYQDIIIEHQKVVKGNQKRLESLRELAGKENLEYPSVTLPPQPHTKEGVDAYNEVIARVRMWVNLNLWQKLKLSRDDAKPLLRLKGFPSFPLVERQANEVDWWDMVCNVKKLINEKKEDGKVFWQNLAGYKRQEALRPYLSSEEDRKKGKKFARYQLGDLLLHLEKKHGEDWGKVYDEAWERIDKKVEGLSKHIKLEEERRSEDAQSKAALTDWLRAKASFVIEGLKEADKDEFCRCELKLQKWYGDLRGKPFAIEAENSILDISGFSKQYNCAFIWQKDGVKKLNLYLIINYFKGGKLRFKKIKPEAFEANRFYTVINKKSGEIVPMEVNFNFDDPNLIILPLAFGKRQGREFIWNDLLSLETGSLKLANGRVIEKTLYNRRTRQDEPALFVALTFERREVLDSSNIKPMNLIGVDRGENIPAVIALTDPEGCPLSRFKDSLGNPTHILRIGESYQKKQRTIQAKKEVEQRRAGGYSRKYASKAKNLADDMVRNTARDLLYYAVTQDAMLIFENLSRGFGRQGKRTFMAERQYTRMEDWLTAKLAYEGLPSKTYLSKTLAQYTSKTCSNCGFTITSADYDRVLEKLKKTATGWMTTINGKELKVEGQITYYNRYKRQNVVKDLSVELDRLSEESVNNDISSWTKGRSGEALSLLKKRFSHRPVQEKFVCLNCGFETHADEQAALNIARSWLFLRSQEYKKYQTNKTTGNTDKRAFVETWQSFYRKKLKEVWKPAV

SEQ ID NO: 26110 - protein, 978 aa, synthetic construct
  REGION 1..978: note = engineered CasX variant
QEIKRINKIRRRLVKDSNTKKAGKTGPMKTLLVRVMTPDLRERLENLRKKPENIPQPISNTSRANLNKLLTDYTEMKKAILHVYWEEFQKDPVGLMSRVAQPASKKIDQNKLKPEMDEKGNLTTAGFACSQCGQPLFVYKLEQVSEKGKAYTNYFGRCNVAEHEKLILLAQLKPEKDSDEAVTYSLGKFGQRALDFYSIHVTKESTHPVKPLAQIAGNRYASGPVGKALSDACMGTIASFLSKYQDIIIEHQKVVKGNQKRLESLRELAGKENLEYPSVTLPPQPHTKEGVDAYNEVIARVRMWVNLNLWQKLKLSRDDAKPLLRLKGFPSFPLVERQANEVDWWDMVCNVKKLINEKKEDGKVFWQNLAGYKRQEALRPYLSSEEDRKKGKKFARYQLGDLLLHLEKKHGEDWGKVYDEAWERIDKKVEGLSKHIKLEEERRSEDAQSKAALTDWLRAKASFVIEGLKEADKDEFCRCELKLQKWYGDLRGKPFAIEAENSILDISGFSKQYNCAFIWQKDGVKKLNLYLIINYFKGGKLRFKKIKPEAFEANRFYTVINKKSGEIVPMEVNFNFDDPNLIILPLAFGKRQGREFIWNDLLSLETGSLKLANGRVIEKTLYNRRTRQDEPALFVALTFERREVLDSSNIKPMNLIGVDRGENIPAVIALTDPEGCPLSRFKDSLGNPTHILRIGESYQEKQRTIQAKKEVEQRRLGGYSRKYASKAKNLADDMVRNTARDLLYYAVTQDAMLIFENLSRGFGRQGKRTFMAERQYTRMEDWLTAKLAYEGLPSKTYLSKTLAQYTSKTCSNCGFTITSADYDRVLEKLKKTATGWMTTINGKELKVEGQITYYNRYKRQNVVKDLSVELDRLSEESVNNDISSWTKGRSGEALSLLKKRFSHRPVQEKFVCLNCGFETHADEQAALNIARSWLFLRSQEYKKYQTNKTTGNTDKRAFVETWQSFYRKKLKEVWKPAV

SEQ ID NO: 26111 - protein, 978 aa, synthetic construct
  REGION 1..978: note = engineered CasX variant
QEIKRINKIRRRLVKDSNTKKAGKTGPMKTLLVRVMTPDLRERLENLRKKPENIPQPISNTSRANLNKLLTDYTEMKKAILHVYWEEFQKDPVGLMSRVAQPASKKIDQNKLKPEMDEKGNLTTAGFACSQCGQPLFVYKLEQVSEKGKAYTNYFGRCNVAEHEKLILLAQLKPEKDSDEAVTYSLGKFGQRALDFYSIHVTKESTHPVKPLAQIAGNRYASGPVGKALSDACMGTIASFLSKYQDIIIEHQKVVKGNQKRLESLRELAGKENLEYPSVTLPPQPHTKEGVDAYNEVIARVRMWVNLNLWQKLKLSRDDAKPLLRLKGFPSFPLVERQANEVDWWDMVCNVKKLINEKKEDGKVFWQNLAGYKRQEALRPYLSSEEDRKKGKKFARYQLGDLLLHLEKKHGEDWGKVYDEAWERIDKKVEGLSKHIKLEEERRSEDAQSKAALTDWLRAKASFVIEGLKEADKDEFCRCELKLQKWYGDLRGKPFAIEAENSILDISGFSKQYNCAFIWQKDGVKKLNLYLIINYFKGGKLRFKKIKPEAFEANRFYTVINKKSGEIVPMEVNFNFDDPNLIILPLAFGKRQGREFIWNDLLSLETGSLKLANGRVIEKTLYNRRTRQDEPALFVALTFERREVLDSSNIKPMNLIGVDRGENIPAVIALTDPEGCPLSRFKDSLGNPTHILRIGESYKYKQRTIQAKKEVEQRRQGLYSRKYASKAKNLADDMVRNTARDLLYYAVTQDAMLIFENLSRGFGRQGKRTFMAERQYTRMEDWLTAKLAYEGLPSKTYLSKTLAQYTSKTCSNCGFTITSADYDRVLEKLKKTATGWMTTINGKELKVEGQITYYNRYKRQNVVKDLSVELDRLSEESVNNDISSWTKGRSGEALSLLKKRFSHRPVQEKFVCLNCGFETHADEQAALNIARSWLFLRSQEYKKYQTNKTTGNTDKRAFVETWQSFYRKKLKEVWKPAV

SEQ ID NO: 26112 - protein, 978 aa, synthetic construct
  REGION 1..978: note = engineered CasX variant
QEIKRINKIRRRLVKDSNTKKAGKTGPMKTLLVRVMTPDLRERLENLRKKPENIPQPISNTSRANLNKLLTDYTEMKKAILHVYWEEFQKDPVGLMSRVAQPASKKIDQNKLKPEMDEKGNLTTAGFACSQCGQPLFVYKLEQVSEKGKAYTNYFGRCNVAEHEKLILLAQLKPEKDSDEAVTYSLGKFGQRALDFYSIHVTKESTHPVKPLAQIAGNRYASGPVGKALSDACMGTIASFLSKYQDIIIEHQKVVKGNQKRLESLRELAGKENLEYPSVTLPPQPHTKEGVDAYNEVIARVRMWVNLNLWQKLKLSRDDAKPLLRLKGFPSFPLVERQANEVDWWDMVCNVKKLINEKKEDGKVFWQNLAGYKRQEALRPYLSSEEDRKKGKKFARYQLGDLLLHLEKKHGEDWGKVYDEAWERIDKKVEGLSKHIKLEEERRSEDAQSKAALTDWLRAKASFVIEGLKEADKDEFCRCELKLQKWYGDLRGKPFAIEAENSILDISGFSKQYNCAFIWQKDGVKKLNLYLIINYFKGGKLRFKKIKPEAFEANRFYTVINKKSGEIVPMEVNFNFDDPNLIILPLAFGKRQGREFIWNDLLSLETGSLKLANGRVIEKTLYNRRTRQDEPALFVALTFERREVLDSSNIKPMNLIGVDRGENIPAVIALTDPEGCPLSRFKDSLGNPTHILRIGESYKYKQRTIQAKKEVEQRRQGGYSRKYASKAKNLADDMVRNTARDLLYYAVTQDAMLIFENLSRGFGRQGKRTFMAERQYTRMEDWLTAKLAYEGLPSKTYLSKTLAQYTSKTCSNCGFTITSADYDRVLEKLKKTATGWMTTINGKELKVEGQITYYNRYKRQNVVKDLSVELDRLSEESVNNDISSWTKGRSGEALSLLKKRFSHRPVQEKFVCLNCGFETHADEQAALNIARSWLFLRSQEYKKYQTNKTTGNTDKRAFVETWQSFYRKKLKEVWKPAV

SEQ ID NO: 26113 - protein, 978 aa, synthetic construct
  REGION 1..978: note = engineered CasX variant
QEIKRINKIRRRLVKDSNTKKAGKTGPMKTLLVRVMTPDLRERLENLRKKPENIPQPISNTSRANLNKLLTDYTEMKKAILHVYWEEFQKDPVGLMSRVAQPASKKIDQNKLKPEMDEKGNLTTAGFACSQCGQPLFVYKLEQVSEKGKAYTNYFGRCNVAEHEKLILLAQLKPEKDSDEAVTYSLGKFGQRALDFYSIHVTKESTHPVKPLAQIAGNRYASGPVGKALSDACMGTIASFLSKYQDIIIEHQKVVKGNQKRLESLRELAGKENLEYPSVTLPPQPHTKEGVDAYNEVIARVRMWVNLNLWQKLKLSRDDAKPLLRLKGFPSFPLVERQANEVDWWDMVCNVKKLINEKKEDGKVFWQNLAGYKRQEALRPYLSSEEDRKKGKKFARYQLGDLLLHLEKKHGEDWGKVYDEAWERIDKKVEGLSKHIKLEEERRSEDAQSKAALTDWLRAKASFVIEGLKEADKDEFCRCELKLQKWYGDLRGKPFAIEAENSILDISGFSKQYNCAFIWQKDGVKKLNLYLIINYFKGGKLRFKKIKPEAFEANRFYTVINKKSGEIVPMEVNFNFDDPNLIILPLAFGKRQGREFIWNDLLSLETGSLKLANGRVIEKTLYNRRTRQDEPALFVALTFERREVLDSSNIKPMNLIGVDRGENIPAVIALTDPEGCPLSRFKDSLGNPTHILRIGESYKYKQRTIQAKKEVEQRRAGLYSRKYASKAKNLADDMVRNTARDLLYYAVTQDAMLIFENLSRGFGRQGKRTFMAERQYTRMEDWLTAKLAYEGLPSKTYLSKTLAQYTSKTCSNCGFTITSADYDRVLEKLKKTATGWMTTINGKELKVEGQITYYNRYKRQNVVKDLSVELDRLSEESVNNDISSWTKGRSGEALSLLKKRFSHRPVQEKFVCLNCGFETHADEQAALNIARSWLFLRSQEYKKYQTNKTTGNTDKRAFVETWQSFYRKKLKEVWKPAV

SEQ ID NO: 26114 - protein, 978 aa, synthetic construct
  REGION 1..978: note = engineered CasX variant
QEIKRINKIRRRLVKDSNTKKAGKTGPMKTLLVRVMTPDLRERLENLRKKPENIPQPISNTSRANLNKLLTDYTEMKKAILHVYWEEFQKDPVGLMSRVAQPASKKIDQNKLKPEMDEKGNLTTAGFACSQCGQPLFVYKLEQVSEKGKAYTNYFGRCNVAEHEKLILLAQLKPEKDSDEAVTYSLGKFGQRALDFYSIHVTKESTHPVKPLAQIAGNRYASGPVGKALSDACMGTIASFLSKYQDIIIEHQKVVKGNQKRLESLRELAGKENLEYPSVTLPPQPHTKEGVDAYNEVIARVRMWVNLNLWQKLKLSRDDAKPLLRLKGFPSFPLVERQANEVDWWDMVCNVKKLINEKKEDGKVFWQNLAGYKRQEALRPYLSSEEDRKKGKKFARYQLGDLLLHLEKKHGEDWGKVYDEAWERIDKKVEGLSKHIKLEEERRSEDAQSKAALTDWLRAKASFVIEGLKEADKDEFCRCELKLQKWYGDLRGKPFAIEAENSILDISGFSKQYNCAFIWQKDGVKKLNLYLIINYFKGGKLRFKKIKPEAFEANRFYTVINKKSGEIVPMEVNFNFDDPNLIILPLAFGKRQGREFIWNDLLSLETGSLKLANGRVIEKTLYNRRTRQDEPALFVALTFERREVLDSSNIKPMNLIGVDRGENIPAVIALTDPEGCPLSRFKDSLGNPTHILRIGESYKYKQRTIQAKKEVEQRRAGGYSRKYASKAKNLADDMVRNTARDLLYYAVTQDAMLIFENLSRGFGRQGKRTFMAERQYTRMEDWLTAKLAYEGLPSKTYLSKTLAQYTSKTCSNCGFTITSADYDRVLEKLKKTATGWMTTINGKELKVEGQITYYNRYKRQNVVKDLSVELDRLSEESVNNDISSWTKGRSGEALSLLKKRFSHRPVQEKFVCLNCGFETHADEQAALNIARSWLFLRSQEYKKYQTNKTTGNTDKRAFVETWQSFYRKKLKEVWKPAV

SEQ ID NO: 26115 - protein, 978 aa, synthetic construct
  REGION 1..978: note = engineered CasX variant
QEIKRINKIRRRLVKDSNTKKAGKTGPMKTLLVRVMTPDLRERLENLRKKPENIPQPISNTSRANLNKLLTDYTEMKKAILHVYWEEFQKDPVGLMSRVAQPASKKIDQNKLKPEMDEKGNLTTAGFACSQCGQPLFVYKLEQVSEKGKAYTNYFGRCNVAEHEKLILLAQLKPEKDSDEAVTYSLGKFGQRALDFYSIHVTKESTHPVKPLAQIAGNRYASGPVGKALSDACMGTIASFLSKYQDIIIEHQKVVKGNQKRLESLRELAGKENLEYPSVTLPPQPHTKEGVDAYNEVIARVRMWVNLNLWQKLKLSRDDAKPLLRLKGFPSFPLVERQANEVDWWDMVCNVKKLINEKKEDGKVFWQNLAGYKRQEALRPYLSSEEDRKKGKKFARYQLGDLLLHLEKKHGEDWGKVYDEAWERIDKKVEGLSKHIKLEEERRSEDAQSKAALTDWLRAKASFVIEGLKEADKDEFCRCELKLQKWYGDLRGKPFAIEAENSILDISGFSKQYNCAFIWQKDGVKKLNLYLIINYFKGGKLRFKKIKPEAFEANRFYTVINKKSGEIVPMEVNFNFDDPNLIILPLAFGKRQGREFIWNDLLSLETGSLKLANGRVIEKTLYNRRTRQDEPALFVALTFERREVLDSSNIKPMNLIGVDRGENIPAVIALTDPEGCPLSRFKDSLGNPTHILRIGESYKWKQRTIQAKKEVEQRRAGGYSRKYASKAKNLADDMVRNTARDLLYYAVTQDAMLIFENLSRGFGRQGKRTFMAERQYTRMEDWLTAKLAYEGLPSKTYLSKTLAQYTSKTCSNCGFTITSADYDRVLEKLKKTATGWMTTINGKELKVEGQITYYNRYKRQNVVKDLSVELDRLSEESVNNDISSWTKGRSGEALSLLKKRFSHRPVQEKFVCLNCGFETHADEQAALNIARSWLFLRSQEYKKYQTNKTTGNTDKRAFVETWQSFYRKKLKEVWKPAV

SEQ ID NO: 26116 - protein, 978 aa, synthetic construct
  REGION 1..978: note = engineered CasX variant
QEIKRINKIRRRLVKDSNTKKAGKTGPMKTLLVRVMTPDLRERLENLRKKPENIPQPISNTSRANLNKLLTDYTEMKKAILHVYWEEFQKDPVGLMSRVAQPASKKIDQNKLKPEMDEKGNLTTAGFACSQCGQPLFVYKLEQVSEKGKAYTNYFGRCNVAEHEKLILLAQLKPEKDSDEAVTYSLGKFGQRALDFYSIHVTKESTHPVKPLAQIAGNRYASGPVGKALSDACMGTIASFLSKYQDIIIEHQKVVKGNQKRLESLRELAGKENLEYPSVTLPPQPHTKEGVDAYNEVIARVRMWVNLNLWQKLKLSRDDAKPLLRLKGFPSFPLVERQANEVDWWDMVCNVKKLINEKKEDGKVFWQNLAGYKRQEALRPYLSSEEDRKKGKKFARYQLGDLLLHLEKKHGEDWGKVYDEAWERIDKKVEGLSKHIKLEEERRSEDAQSKAALTDWLRAKASFVIEGLKEADKDEFCRCELKLQKWYGDLRGKPFAIEAENSILDISGFSKQYNCAFIWQKDGVKKLNLYLIINYFKGGKLRFKKIKPEAFEANRFYTVINKKSGEIVPMEVNFNFDDPNLIILPLAFGKRQGREFIWNDLLSLETGSLKLANGRVIEKTLYNRRTRQDEPALFVALTFERREVLDSSNIKPMNLIGVDRGENIPAVIALTDPEGCPLSRFKDSLGNPTHILRIGESYKWKQRTIQAKKEVCQRRAGGYSRKYASKAKNLADDMVRNTARDLLYYAVTQDAMLIFENLSRGFGRQGKRTFMAERQYTRMEDWLTAKLAYEGLPSKTYLSKTLAQYTSKTCSNCGFTITSADYDRVLEKLKKTATGWMTTINGKELKVEGQITYYNRYKRQNVVKDLSVELDRLSEESVNNDISSWTKGRSGEALSLLKKRFSHRPVQEKFVCLNCGFETHADEQAALNIARSWLFLRSQEYKKYQTNKTTGNTDKRAFVETWQSFYRKKLKEVWKPAV

SEQ ID NO: 26117 - protein, 978 aa, synthetic construct
  REGION 1..978: note = engineered CasX variant
QEIKRINKIRRRLVKDSNTKKAGKTGPMKTLLVRVMTPDLRERLENLRKKPENIPQPISNTSRANLNKLLTDYTEMKKAILHVYWEEFQKDPVGLMSRVAQPASKKIDQNKLKPEMDEKGNLTTAGFACSQCGQPLFVYKLEQVSEKGKAYTNYFGRCNVAEHEKLILLAQLKPEKDSDEAVTYSLGKFGQRALDFYSIHVTKESTHPVKPLAQIAGNRYASGPVGKALSDACMGTIASFLSKYQDIIIEHQKVVKGNQKRLESLRELAGKENLEYPSVTLPPQPHTKEGVDAYNEVIARVRMWVNLNLWQKLKLSRDDAKPLLRLKGFPSFPLVERQANEVDWWDMVCNVKKLINEKKEDGKVFWQNLAGYKRQEALRPYLSSEEDRKKGKKFARYQLGDLLLHLEKKHGEDWGKVYDEAWERIDKKVEGLSKHIKLEEERRSEDAQSKAALTDWLRAKASFVIEGLKEADKDEFCRCELKLQKWYGDLRGKPFAIEAENSILDISGFSKQYNCAFIWQKDGVKKLNLYLIINYFKGGKLRFKKIKPEAFEANRFYTVINKKSGEIVPMEVNFNFDDPNLIILPLAFGKRQGREFIWNDLLSLETGSLKLANGRVIEKTLYNRRTRQDEPALFVALTFERREVLDSSNIKPMNLIGVDRGENIPAVIALTDPEGCPLSRFKDSLGNPTHILRIGESYKVKQRTIQAKKEVEQRRAGGYSRKYASKAKNLADDMVRNTARDLLYYAVTQDAMLIFENLSRGFGRQGKRTFMAERQYTRMEDWLTAKLAYEGLPSKTYLSKTLAQYTSKTCSNCGFTITSADYDRVLEKLKKTATGWMTTINGKELKVEGQITYYNRYKRQNVVKDLSVELDRLSEESVNNDISSWTKGRSGEALSLLKKRFSHRPVQEKFVCLNCGFETHADEQAALNIARSWLFLRSQEYKKYQTNKTTGNTDKRAFVETWQSFYRKKLKEVWKPAV

SEQ ID NO: 26118 - protein, 978 aa, synthetic construct
  REGION 1..978: note = engineered CasX variant
QEIKRINKIRRRLVKDSNTKKAGKTGPMKTLLVRVMTPDLRERLENLRKKPENIPQPISNTSRANLNKLLTDYTEMKKAILHVYWEEFQKDPVGLMSRVAQPASKKIDQNKLKPEMDEKGNLTTAGFACSQCGQPLFVYKLEQVSEKGKAYTNYFGRCNVAEHEKLILLAQLKPEKDSDEAVTYSLGKFGQRALDFYSIHVTKESTHPVKPLAQIAGNRYASGPVGKALSDACMGTIASFLSKYQDIIIEHQKVVKGNQKRLESLRELAGKENLEYPSVTLPPQPHTKEGVDAYNEVIARVRMWVNLNLWQKLKLSRDDAKPLLRLKGFPSFPLVERQANEVDWWDMVCNVKKLINEKKEDGKVFWQNLAGYKRQEALRPYLSSEEDRKKGKKFARYQLGDLLLHLEKKHGEDWGKVYDEAWERIDKKVEGLSKHIKLEEERRSEDAQSKAALTDWLRAKASFVIEGLKEADKDEFCRCELKLQKWYGDLRGKPFAIEAENSILDISGFSKQYNCAFIWQKDGVKKLNLYLIINYFKGGKLRFKKIKPEAFEANRFYTVINKKSGEIVPMEVNFNFDDPNLIILPLAFGKRQGREFIWNDLLSLETGSLKLANGRVIEKTLYNRRTRQDEPALFVALTFERREVLDSSNIKPMNLIGVDRGENIPAVIALTDPEGCPLSRFKDSLGNPTHILRIGESYKTYQRTIQAKKEVEQRRAGGYSRKYASKAKNLADDMVRNTARDLLYYAVTQDAMLIFENLSRGFGRQGKRTFMAERQYTRMEDWLTAKLAYEGLPSKTYLSKTLAQYTSKTCSNCGFTITSADYDRVLEKLKKTATGWMTTINGKELKVEGQITYYNRYKRQNVVKDLSVELDRLSEESVNNDISSWTKGRSGEALSLLKKRFSHRPVQEKFVCLNCGFETHADEQAALNIARSWLFLRSQEYKKYQTNKTTGNTDKRAFVETWQSFYRKKLKEVWKPAV

SEQ ID NO: 26119 - protein, 978 aa, synthetic construct
  REGION 1..978: note = engineered CasX variant
QEIKRINKIRRRLVKDSNTKKAGKTGPMKTLLVRVMTPDLRERLENLRKKPENIPQPISNTSRANLNKLLTDYTEMKKAILHVYWEEFQKDPVGLMSRVAQPASKKIDQNKLKPEMDEKGNLTTAGFACSQCGQPLFVYKLEQVSEKGKAYTNYFGRCNVAEHEKLILLAQLKPEKDSDEAVTYSLGKFGQRALDFYSIHVTKESTHPVKPLAQIAGNRYASGPVGKALSDACMGTIASFLSKYQDIIIEHQKVVKGNQKRLESLRELAGKENLEYPSVTLPPQPHTKEGVDAYNEVIARVRMWVNLNLWQKLKLSRDDAKPLLRLKGFPSFPLVERQANEVDWWDMVCNVKKLINEKKEDGKVFWQNLAGYKRQEALRPYLSSEEDRKKGKKFARYQLGDLLLHLEKKHGEDWGKVYDEAWERIDKKVEGLSKHIKLEEERRSEDAQSKAALTDWLRAKASFVIEGLKEADKDEFCRCELKLQKWYGDLRGKPFAIEAENSILDISGFSKQYNCAFIWQKDGVKKLNLYLIINYFKGGKLRFKKIKPEAFEANRFYTVINKKSGEIVPMEVNFNFDDPNLIILPLAFGKRQGREFIWNDLLSLETGSLKLANGRVIEKTLYNRRTRQDEPALFVALTFERREVLDSSNIKPMNLIGVDRGENIPAVIALTDPEGCPLSRFKDSLGNPTHILRIGESYKTKQRTIQAKKEVSQRRAGGYSRKYASKAKNLADDMVRNTARDLLYYAVTQDAMLIFENLSRGFGRQGKRTFMAERQYTRMEDWLTAKLAYEGLPSKTYLSKTLAQYTSKTCSNCGFTITSADYDRVLEKLKKTATGWMTTINGKELKVEGQITYYNRYKRQNVVKDLSVELDRLSEESVNNDISSWTKGRSGEALSLLKKRFSHRPVQEKFVCLNCGFETHADEQAALNIARSWLFLRSQEYKKYQTNKTTGNTDKRAFVETWQSFYRKKLKEVWKPAV

SEQ ID NO: 26120 - protein, 978 aa, synthetic construct
  REGION 1..978: note = engineered CasX variant
QEIKRINKIRRRLVKDSNTKKAGKTGPMKTLLVRVMTPDLRERLENLRKKPENIPQPISNTSRANLNKLLTDYTEMKKAILHVYWEEFQKDPVGLMSRVAQPASKKIDQNKLKPEMDEKGNLTTAGFACSQCGQPLFVYKLEQVSEKGKAYTNYFGRCNVAEHEKLILLAQLKPEKDSDEAVTYSLGKFGQRALDFYSIHVTKESTHPVKPLAQIAGNRYASGPVGKALSDACMGTIASFLSKYQDIIIEHQKVVKGNQKRLESLRELAGKENLEYPSVTLPPQPHTKEGVDAYNEVIARVRMWVNLNLWQKLKLSRDDAKPLLRLKGFPSFPLVERQANEVDWWDMVCNVKKLINEKKEDGKVFWQNLAGYKRQEALRPYLSSEEDRKKGKKFARYQLGDLLLHLEKKHGEDWGKVYDEAWERIDKKVEGLSKHIKLEEERRSEDAQSKAALTDWLRAKASFVIEGLKEADKDEFCRCELKLQKWYGDLRGKPFAIEAENSILDISGFSKQYNCAFIWQKDGVKKLNLYLIINYFKGGKLRFKKIKPEAFEANRFYTVINKKSGEIVPMEVNFNFDDPNLIILPLAFGKRQGREFIWNDLLSLETGSLKLANGRVIEKTLYNRRTRQDEPALFVALTFERREVLDSSNIKPMNLIGVDRGENIPAVIALTDPEGCPLSRFKDSLGNPTHILRIGESYKTKQRTIQAKKEVRQRRAGGYSRKYASKAKNLADDMVRNTARDLLYYAVTQDAMLIFENLSRGFGRQGKRTFMAERQYTRMEDWLTAKLAYEGLPSKTYLSKTLAQYTSKTCSNCGFTITSADYDRVLEKLKKTATGWMTTINGKELKVEGQITYYNRYKRQNVVKDLSVELDRLSEESVNNDISSWTKGRSGEALSLLKKRFSHRPVQEKFVCLNCGFETHADEQAALNIARSWLFLRSQEYKKYQTNKTTGNTDKRAFVETWQSFYRKKLKEVWKPAV

SEQ ID NO: 26121 - protein, 978 aa, synthetic construct
  REGION 1..978: note = engineered CasX variant
QEIKRINKIRRRLVKDSNTKKAGKTGPMKTLLVRVMTPDLRERLENLRKKPENIPQPISNTSRANLNKLLTDYTEMKKAILHVYWEEFQKDPVGLMSRVAQPASKKIDQNKLKPEMDEKGNLTTAGFACSQCGQPLFVYKLEQVSEKGKAYTNYFGRCNVAEHEKLILLAQLKPEKDSDEAVTYSLGKFGQRALDFYSIHVTKESTHPVKPLAQIAGNRYASGPVGKALSDACMGTIASFLSKYQDIIIEHQKVVKGNQKRLESLRELAGKENLEYPSVTLPPQPHTKEGVDAYNEVIARVRMWVNLNLWQKLKLSRDDAKPLLRLKGFPSFPLVERQANEVDWWDMVCNVKKLINEKKEDGKVFWQNLAGYKRQEALRPYLSSEEDRKKGKKFARYQLGDLLLHLEKKHGEDWGKVYDEAWERIDKKVEGLSKHIKLEEERRSEDAQSKAALTDWLRAKASFVIEGLKEADKDEFCRCELKLQKWYGDLRGKPFAIEAENSILDISGFSKQYNCAFIWQKDGVKKLNLYLIINYFKGGKLRFKKIKPEAFEANRFYTVINKKSGEIVPMEVNFNFDDPNLIILPLAFGKRQGREFIWNDLLSLETGSLKLANGRVIEKTLYNRRTRQDEPALFVALTFERREVLDSSNIKPMNLIGVDRGENIPAVIALTDPEGCPLSRFKDSLGNPTHILRIGESYKTKQRTIQAKKEVEQRRAGKYSRKYASKAKNLADDMVRNTARDLLYYAVTQDAMLIFENLSRGFGRQGKRTFMAERQYTRMEDWLTAKLAYEGLPSKTYLSKTLAQYTSKTCSNCGFTITSADYDRVLEKLKKTATGWMTTINGKELKVEGQITYYNRYKRQNVVKDLSVELDRLSEESVNNDISSWTKGRSGEALSLLKKRFSHRPVQEKFVCLNCGFETHADEQAALNIARSWLFLRSQEYKKYQTNKTTGNTDKRAFVETWQSFYRKKLKEVWKPAV

SEQ ID NO: 26122 - protein, 978 aa, synthetic construct
  REGION 1..978: note = engineered CasX variant
QEIKRINKIRRRLVKDSNTKKAGKTGPMKTLLVRVMTPDLRERLENLRKKPENIPQPISNTSRANLNKLLTDYTEMKKAILHVYWEEFQKDPVGLMSRVAQPASKKIDQNKLKPEMDEKGNLTTAGFACSQCGQPLFVYKLEQVSEKGKAYTNYFGRCNVAEHEKLILLAQLKPEKDSDEAVTYSLGKFGQRALDFYSIHVTKESTHPVKPLAQIAGNRYASGPVGKALSDACMGTIASFLSKYQDIIIEHQKVVKGNQKRLESLRELAGKENLEYPSVTLPPQPHTKEGVDAYNEVIARVRMWVNLNLWQKLKLSRDDAKPLLRLKGFPSFPLVERQANEVDWWDMVCNVKKLINEKKEDGKVFWQNLAGYKRQEALRPYLSSEEDRKKGKKFARYQLGDLLLHLEKKHGEDWGKVYDEAWERIDKKVEGLSKHIKLEEERRSEDAQSKAALTDWLRAKASFVIEGLKEADKDEFCRCELKLQKWYGDLRGKPFAIEAENSILDISGFSKQYNCAFIWQKDGVKKLNLYLIINYFKGGKLRFKKIKPEAFEANRFYTVINKKSGEIVPMEVNFNFDDPNLIILPLAFGKRQGREFIWNDLLSLETGSLKLANGRVIEKTLYNRRTRQDEPALFVALTFERREVLDSSNIKPMNLIGVDRGENIPAVIALTDPEGCPLSRFKDSLGNPTHILRIGESYKTKQRTIQAKKEVEQRRAGGYSRKYASKAKNLADDMVRNTARDLLYYAVTQDAMLIFENLSRGFGRQGKRTFMAERQYTRMEDWLTAKLAYEGLPSKTYLSKTLAQYTSKTCSNCGFTITSADYDRVLEKLKKTATGWMTTINGKELKVEGQITYYNRYKRQNVVKDLSVELDRLSEESVNNDISSWTKGRSGEALSLLKKRFSHRPVQEKFVCLNCGFETHADEQAALNIARSWLFLRSQEYKKYQTNKTTGNTDKRAFVETWQSFYRKKLKEVWKPAV

SEQ ID NO: 26123 - protein, 978 aa, synthetic construct
  REGION 1..978: note = engineered CasX variant
QEIKRINKIRRRLVKDSNTKKAGKTGPMKTLLVRVMTPDLRERLENLRKKPENIPQPISNTSRANLNKLLTDYTEMKKAILHVYWEEFQKDPVGLMSRVAQPASKKIDQNKLKPEMDEKGNLTTAGFACSQCGQPLFVYKLEQVSEKGKAYTNYFGRCNVAEHEKLILLAQLKPEKDSDEAVTYSLGKFGQRALDFYSIHVTKESTHPVKPLAQIAGNRYASGPVGKALSDACMGTIASFLSKYQDIIIEHQKVVKGNQKRLESLRELAGKENLEYPSVTLPPQPHTKEGVDAYNEVIARVRMWVNLNLWQKLKLSRDDAKPLLRLKGFPSFPLVERQANEVDWWDMVCNVKKLINEKKEDGKVFWQNLAGYKRQEALRPYLSSEEDRKKGKKFARYQLGDLLLHLEKKHGEDWGKVYDEAWERIDKKVEGLSKHIKLEEERRSEDAQSKAALTDWLRAKASFVIEGLKEADKDEFCRCELKLQKWYGDLRGKPFAIEAENSILDISGFSKQYNCAFIWQKDGVKKLNLYLIINYFKGGKLRFKKIKPEAFEANRFYTVINKKSGEIVPMEVNFNFDDPNLIILPLAFGKRQGREFIWNDLLSLETGSLKLANGRVIEKTLYNRRTRQDEPALFVALTFERREVLDSSNIKPMNLIGVDRGENIPAVIALTDPEGCPLSRFKDSLGNPTHILRIGESYKTKQRTIQAKKESRQRRAGGYSRKYASKAKNLADDMVRNTARDLLYYAVTQDAMLIFENLSRGFGRQGKRTFMAERQYTRMEDWLTAKLAYEGLPSKTYLSKTLAQYTSKTCSNCGFTITSADYDRVLEKLKKTATGWMTTINGKELKVEGQITYYNRYKRQNVVKDLSVELDRLSEESVNNDISSWTKGRSGEALSLLKKRFSHRPVQEKFVCLNCGFETHADEQAALNIARSWLFLRSQEYKKYQTNKTTGNTDKRAFVETWQSFYRKKLKEVWKPAV

SEQ ID NO: 26124 - protein, 978 aa, synthetic construct
  REGION 1..978: note = engineered CasX variant
QEIKRINKIRRRLVKDSNTKKAGKTGPMKTLLVRVMTPDLRERLENLRKKPENIPQPISNTSRANLNKLLTDYTEMKKAILHVYWEEFQKDPVGLMSRVAQPASKKIDQNKLKPEMDEKGNLTTAGFACSQCGQPLFVYKLEQVSEKGKAYTNYFGRCNVAEHEKLILLAQLKPEKDSDEAVTYSLGKFGQRALDFYSIHVTKESTHPVKPLAQIAGNRYASGPVGKALSDACMGTIASFLSKYQDIIIEHQKVVKGNQKRLESLRELAGKENLEYPSVTLPPQPHTKEGVDAYNEVIARVRMWVNLNLWQKLKLSRDDAKPLLRLKGFPSFPLVERQANEVDWWDMVCNVKKLINEKKEDGKVFWQNLAGYKRQEALRPYLSSEEDRKKGKKFARYQLGDLLLHLEKKHGEDWGKVYDEAWERIDKKVEGLSKHIKLEEERRSEDAQSKAALTDWLRAKASFVIEGLKEADKDEFCRCELKLQKWYGDLRGKPFAIEAENSILDISGFSKQYNCAFIWQKDGVKKLNLYLIINYFKGGKLRFKKIKPEAFEANRFYTVINKKSGEIVPMEVNFNFDDPNLIILPLAFGKRQGREFIWNDLLSLETGSLKLANGRVIEKTLYNRRTRQDEPALFVALTFERREVLDSSNIKPMNLIGVDRGENIPAVIALTDPEGCPLSRFKDSLGNPTHILRIGESYKTKQRTIQAKKESEQRRAGGYSRKYASKAKNLADDMVRNTARDLLYYAVTQDAMLIFENLSRGFGRQGKRTFMAERQYTRMEDWLTAKLAYEGLPSKTYLSKTLAQYTSKTCSNCGFTITSADYDRVLEKLKKTATGWMTTINGKELKVEGQITYYNRYKRQNVVKDLSVELDRLSEESVNNDISSWTKGRSGEALSLLKKRFSHRPVQEKFVCLNCGFETHADEQAALNIARSWLFLRSQEYKKYQTNKTTGNTDKRAFVETWQSFYRKKLKEVWKPAV

SEQ ID NO: 26125 - protein, 978 aa, synthetic construct
  REGION 1..978: note = engineered CasX variant
QEIKRINKIRRRLVKDSNTKKAGKTGPMKTLLVRVMTPDLRERLENLRKKPENIPQPISNTSRANLNKLLTDYTEMKKAILHVYWEEFQKDPVGLMSRVAQPASKKIDQNKLKPEMDEKGNLTTAGFACSQCGQPLFVYKLEQVSEKGKAYTNYFGRCNVAEHEKLILLAQLKPEKDSDEAVTYSLGKFGQRALDFYSIHVTKESTHPVKPLAQIAGNRYASGPVGKALSDACMGTIASFLSKYQDIIIEHQKVVKGNQKRLESLRELAGKENLEYPSVTLPPQPHTKEGVDAYNEVIARVRMWVNLNLWQKLKLSRDDAKPLLRLKGFPSFPLVERQANEVDWWDMVCNVKKLINEKKEDGKVFWQNLAGYKRQEALRPYLSSEEDRKKGKKFARYQLGDLLLHLEKKHGEDWGKVYDEAWERIDKKVEGLSKHIKLEEERRSEDAQSKAALTDWLRAKASFVIEGLKEADKDEFCRCELKLQKWYGDLRGKPFAIEAENSILDISGFSKQYNCAFIWQKDGVKKLNLYLIINYFKGGKLRFKKIKPEAFEANRFYTVINKKSGEIVPMEVNFNFDDPNLIILPLAFGKRQGREFIWNDLLSLETGSLKLANGRVIEKTLYNRRTRQDEPALFVALTFERREVLDSSNIKPMNLIGVDRGENIPAVIALTDPEGCPLSRFKDSLGNPTHILRIGESYKSKQRTIQASKEVEQRRAGGYSRKYASKAKNLADDMVRNTARDLLYYAVTQDAMLIFENLSRGFGRQGKRTFMAERQYTRMEDWLTAKLAYEGLPSKTYLSKTLAQYTSKTCSNCGFTITSADYDRVLEKLKKTATGWMTTINGKELKVEGQITYYNRYKRQNVVKDLSVELDRLSEESVNNDISSWTKGRSGEALSLLKKRFSHRPVQEKFVCLNCGFETHADEQAALNIARSWLFLRSQEYKKYQTNKTTGNTDKRAFVETWQSFYRKKLKEVWKPAV

SEQ ID NO: 26126 - protein, 978 aa, synthetic construct
  REGION 1..978: note = engineered CasX variant
QEIKRINKIRRRLVKDSNTKKAGKTGPMKTLLVRVMTPDLRERLENLRKKPENIPQPISNTSRANLNKLLTDYTEMKKAILHVYWEEFQKDPVGLMSRVAQPASKKIDQNKLKPEMDEKGNLTTAGFACSQCGQPLFVYKLEQVSEKGKAYTNYFGRCNVAEHEKLILLAQLKPEKDSDEAVTYSLGKFGQRALDFYSIHVTKESTHPVKPLAQIAGNRYASGPVGKALSDACMGTIASFLSKYQDIIIEHQKVVKGNQKRLESLRELAGKENLEYPSVTLPPQPHTKEGVDAYNEVIARVRMWVNLNLWQKLKLSRDDAKPLLRLKGFPSFPLVERQANEVDWWDMVCNVKKLINEKKEDGKVFWQNLAGYKRQEALRPYLSSEEDRKKGKKFARYQLGDLLLHLEKKHGEDWGKVYDEAWERIDKKVEGLSKHIKLEEERRSEDAQSKAALTDWLRAKASFVIEGLKEADKDEFCRCELKLQKWYGDLRGKPFAIEAENSILDISGFSKQYNCAFIWQKDGVKKLNLYLIINYFKGGKLRFKKIKPEAFEANRFYTVINKKSGEIVPMEVNFNFDDPNLIILPLAFGKRQGREFIWNDLLSLETGSLKLANGRVIEKTLYNRRTRQDEPALFVALTFERREVLDSSNIKPMNLIGVDRGENIPAVIALTDPEGCPLSRFKDSLGNPTHILRIGESYKSKQRTIQAKKEVEQRRAGGYSRKYASKAKNLADDMVRNTARDLLYYAVTQDAMLIFENLSRGFGRQGKRTFMAERQYTRMEDWLTAKLAYEGLPSKTYLSKTLAQYTSKTCSNCGFTITSADYDRVLEKLKKTATGWMTTINGKELKVEGQITYYNRYKRQNVVKDLSVELDRLSEESVNNDISSWTKGRSGEALSLLKKRFSHRPVQEKFVCLNCGFETHADEQAALNIARSWLFLRSQEYKKYQTNKTTGNTDKRAFVETWQSFYRKKLKEVWKPAV

SEQ ID NO: 26127 - protein, 978 aa, synthetic construct
  REGION 1..978: note = engineered CasX variant
QEIKRINKIRRRLVKDSNTKKAGKTGPMKTLLVRVMTPDLRERLENLRKKPENIPQPISNTSRANLNKLLTDYTEMKKAILHVYWEEFQKDPVGLMSRVAQPASKKIDQNKLKPEMDEKGNLTTAGFACSQCGQPLFVYKLEQVSEKGKAYTNYFGRCNVAEHEKLILLAQLKPEKDSDEAVTYSLGKFGQRALDFYSIHVTKESTHPVKPLAQIAGNRYASGPVGKALSDACMGTIASFLSKYQDIIIEHQKVVKGNQKRLESLRELAGKENLEYPSVTLPPQPHTKEGVDAYNEVIARVRMWVNLNLWQKLKLSRDDAKPLLRLKGFPSFPLVERQANEVDWWDMVCNVKKLINEKKEDGKVFWQNLAGYKRQEALRPYLSSEEDRKKGKKFARYQLGDLLLHLEKKHGEDWGKVYDEAWERIDKKVEGLSKHIKLEEERRSEDAQSKAALTDWLRAKASFVIEGLKEADKDEFCRCELKLQKWYGDLRGKPFAIEAENSILDISGFSKQYNCAFIWQKDGVKKLNLYLIINYFKGGKLRFKKIKPEAFEANRFYTVINKKSGEIVPMEVNFNFDDPNLIILPLAFGKRQGREFIWNDLLSLETGSLKLANGRVIEKTLYNRRTRQDEPALFVALTFERREVLDSSNIKPMNLIGVDRGENIPAVIALTDPEGCPLSRFKDSLGNPTHILRIGESYKSKQRTIQAIKEVEQRRAGGYSRKYASKAKNLADDMVRNTARDLLYYAVTQDAMLIFENLSRGFGRQGKRTFMAERQYTRMEDWLTAKLAYEGLPSKTYLSKTLAQYTSKTCSNCGFTITSADYDRVLEKLKKTATGWMTTINGKELKVEGQITYYNRYKRQNVVKDLSVELDRLSEESVNNDISSWTKGRSGEALSLLKKRFSHRPVQEKFVCLNCGFETHADEQAALNIARSWLFLRSQEYKKYQTNKTTGNTDKRAFVETWQSFYRKKLKEVWKPAV

SEQ ID NO: 26128 - protein, 978 aa, synthetic construct
  REGION 1..978: note = engineered CasX variant
QEIKRINKIRRRLVKDSNTKKAGKTGPMKTLLVRVMTPDLRERLENLRKKPENIPQPISNTSRANLNKLLTDYTEMKKAILHVYWEEFQKDPVGLMSRVAQPASKKIDQNKLKPEMDEKGNLTTAGFACSQCGQPLFVYKLEQVSEKGKAYTNYFGRCNVAEHEKLILLAQLKPEKDSDEAVTYSLGKFGQRALDFYSIHVTKESTHPVKPLAQIAGNRYASGPVGKALSDACMGTIASFLSKYQDIIIEHQKVVKGNQKRLESLRELAGKENLEYPSVTLPPQPHTKEGVDAYNEVIARVRMWVNLNLWQKLKLSRDDAKPLLRLKGFPSFPLVERQANEVDWWDMVCNVKKLINEKKEDGKVFWQNLAGYKRQEALRPYLSSEEDRKKGKKFARYQLGDLLLHLEKKHGEDWGKVYDEAWERIDKKVEGLSKHIKLEEERRSEDAQSKAALTDWLRAKASFVIEGLKEADKDEFCRCELKLQKWYGDLRGKPFAIEAENSILDISGFSKQYNCAFIWQKDGVKKLNLYLIINYFKGGKLRFKKIKPEAFEANRFYTVINKKSGEIVPMEVNFNFDDPNLIILPLAFGKRQGREFIWNDLLSLETGSLKLANGRVIEKTLYNRRTRQDEPALFVALTFERREVLDSSNIKPMNLIGVDRGENIPAVIALTDPEGCPLSRFKDSLGNPTHILRIGESYKSKQRTIQACKEVEQRRAGGYSRKYASKAKNLADDMVRNTARDLLYYAVTQDAMLIFENLSRGFGRQGKRTFMAERQYTRMEDWLTAKLAYEGLPSKTYLSKTLAQYTSKTCSNCGFTITSADYDRVLEKLKKTATGWMTTINGKELKVEGQITYYNRYKRQNVVKDLSVELDRLSEESVNNDISSWTKGRSGEALSLLKKRFSHRPVQEKFVCLNCGFETHADEQAALNIARSWLFLRSQEYKKYQTNKTTGNTDKRAFVETWQSFYRKKLKEVWKPAV

SEQ ID NO: 26129 - protein, 978 aa, synthetic construct
  REGION 1..978: note = engineered CasX variant
QEIKRINKIRRRLVKDSNTKKAGKTGPMKTLLVRVMTPDLRERLENLRKKPENIPQPISNTSRANLNKLLTDYTEMKKAILHVYWEEFQKDPVGLMSRVAQPASKKIDQNKLKPEMDEKGNLTTAGFACSQCGQPLFVYKLEQVSEKGKAYTNYFGRCNVAEHEKLILLAQLKPEKDSDEAVTYSLGKFGQRALDFYSIHVTKESTHPVKPLAQIAGNRYASGPVGKALSDACMGTIASFLSKYQDIIIEHQKVVKGNQKRLESLRELAGKENLEYPSVTLPPQPHTKEGVDAYNEVIARVRMWVNLNLWQKLKLSRDDAKPLLRLKGFPSFPLVERQANEVDWWDMVCNVKKLINEKKEDGKVFWQNLAGYKRQEALRPYLSSEEDRKKGKKFARYQLGDLLLHLEKKHGEDWGKVYDEAWERIDKKVEGLSKHIKLEEERRSEDAQSKAALTDWLRAKASFVIEGLKEADKDEFCRCELKLQKWYGDLRGKPFAIEAENSILDISGFSKQYNCAFIWQKDGVKKLNLYLIINYFKGGKLRFKKIKPEAFEANRFYTVINKKSGEIVPMEVNFNFDDPNLIILPLAFGKRQGREFIWNDLLSLETGSLKLANGRVIEKTLYNRRTRQDEPALFVALTFERREVLDSSNIKPMNLIGVDRGENIPAVIALTDPEGCPLSRFKDSLGNPTHILRIGESYKRKQRTIQAKKRVEQRRAGGYSRKYASKAKNLADDMVRNTARDLLYYAVTQDAMLIFENLSRGFGRQGKRTFMAERQYTRMEDWLTAKLAYEGLPSKTYLSKTLAQYTSKTCSNCGFTITSADYDRVLEKLKKTATGWMTTINGKELKVEGQITYYNRYKRQNVVKDLSVELDRLSEESVNNDISSWTKGRSGEALSLLKKRFSHRPVQEKFVCLNCGFETHADEQAALNIARSWLFLRSQEYKKYQTNKTTGNTDKRAFVETWQSFYRKKLKEVWKPAV

SEQ ID NO: 26130 - protein, 978 aa, synthetic construct
  REGION 1..978: note = engineered CasX variant
QEIKRINKIRRRLVKDSNTKKAGKTGPMKTLLVRVMTPDLRERLENLRKKPENIPQPISNTSRANLNKLLTDYTEMKKAILHVYWEEFQKDPVGLMSRVAQPASKKIDQNKLKPEMDEKGNLTTAGFACSQCGQPLFVYKLEQVSEKGKAYTNYFGRCNVAEHEKLILLAQLKPEKDSDEAVTYSLGKFGQRALDFYSIHVTKESTHPVKPLAQIAGNRYASGPVGKALSDACMGTIASFLSKYQDIIIEHQKVVKGNQKRLESLRELAGKENLEYPSVTLPPQPHTKEGVDAYNEVIARVRMWVNLNLWQKLKLSRDDAKPLLRLKGFPSFPLVERQANEVDWWDMVCNVKKLINEKKEDGKVFWQNLAGYKRQEALRPYLSSEEDRKKGKKFARYQLGDLLLHLEKKHGEDWGKVYDEAWERIDKKVEGLSKHIKLEEERRSEDAQSKAALTDWLRAKASFVIEGLKEADKDEFCRCELKLQKWYGDLRGKPFAIEAENSILDISGFSKQYNCAFIWQKDGVKKLNLYLIINYFKGGKLRFKKIKPEAFEANRFYTVINKKSGEIVPMEVNFNFDDPNLIILPLAFGKRQGREFIWNDLLSLETGSLKLANGRVIEKTLYNRRTRQDEPALFVALTFERREVLDSSNIKPMNLIGVDRGENIPAVIALTDPEGCPLSRFKDSLGNPTHILRIGESYKRKQRTIQAKKEVEQRRAGGYSRKYASKAKNLADDMVRNTARDLLYYAVTQDAMLIFENLSRGFGRQGKRTFMAERQYTRMEDWLTAKLAYEGLPSKTYLSKTLAQYTSKTCSNCGFTITSADYDRVLEKLKKTATGWMTTINGKELKVEGQITYYNRYKRQNVVKDLSVELDRLSEESVNNDISSWTKGRSGEALSLLKKRFSHRPVQEKFVCLNCGFETHADEQAALNIARSWLFLRSQEYKKYQTNKTTGNTDKRAFVETWQSFYRKKLKEVWKPAV

SEQ ID NO: 26131 - protein, 978 aa, synthetic construct
  REGION 1..978: note = engineered CasX variant
QEIKRINKIRRRLVKDSNTKKAGKTGPMKTLLVRVMTPDLRERLENLRKKPENIPQPISNTSRANLNKLLTDYTEMKKAILHVYWEEFQKDPVGLMSRVAQPASKKIDQNKLKPEMDEKGNLTTAGFACSQCGQPLFVYKLEQVSEKGKAYTNYFGRCNVAEHEKLILLAQLKPEKDSDEAVTYSLGKFGQRALDFYSIHVTKESTHPVKPLAQIAGNRYASGPVGKALSDACMGTIASFLSKYQDIIIEHQKVVKGNQKRLESLRELAGKENLEYPSVTLPPQPHTKEGVDAYNEVIARVRMWVNLNLWQKLKLSRDDAKPLLRLKGFPSFPLVERQANEVDWWDMVCNVKKLINEKKEDGKVFWQNLAGYKRQEALRPYLSSEEDRKKGKKFARYQLGDLLLHLEKKHGEDWGKVYDEAWERIDKKVEGLSKHIKLEEERRSEDAQSKAALTDWLRAKASFVIEGLKEADKDEFCRCELKLQKWYGDLRGKPFAIEAENSILDISGFSKQYNCAFIWQKDGVKKLNLYLIINYFKGGKLRFKKIKPEAFEANRFYTVINKKSGEIVPMEVNFNFDDPNLIILPLAFGKRQGREFIWNDLLSLETGSLKLANGRVIEKTLYNRRTRQDEPALFVALTFERREVLDSSNIKPMNLIGVDRGENIPAVIALTDPEGCPLSRFKDSLGNPTHILRIGESYKQKQRTVQAKKEVEQRSAGGYSRKYASKAKNLADDMVRNTARDLLYYAVTQDAMLIFENLSRGFGRQGKRTFMAERQYTRMEDWLTAKLAYEGLPSKTYLSKTLAQYTSKTCSNCGFTITSADYDRVLEKLKKTATGWMTTINGKELKVEGQITYYNRYKRQNVVKDLSVELDRLSEESVNNDISSWTKGRSGEALSLLKKRFSHRPVQEKFVCLNCGFETHADEQAALNIARSWLFLRSQEYKKYQTNKTTGNTDKRAFVETWQSFYRKKLKEVWKPAV

SEQ ID NO: 26132 - protein, 978 aa, synthetic construct
  REGION 1..978: note = engineered CasX variant
QEIKRINKIRRRLVKDSNTKKAGKTGPMKTLLVRVMTPDLRERLENLRKKPENIPQPISNTSRANLNKLLTDYTEMKKAILHVYWEEFQKDPVGLMSRVAQPASKKIDQNKLKPEMDEKGNLTTAGFACSQCGQPLFVYKLEQVSEKGKAYTNYFGRCNVAEHEKLILLAQLKPEKDSDEAVTYSLGKFGQRALDFYSIHVTKESTHPVKPLAQIAGNRYASGPVGKALSDACMGTIASFLSKYQDIIIEHQKVVKGNQKRLESLRELAGKENLEYPSVTLPPQPHTKEGVDAYNEVIARVRMWVNLNLWQKLKLSRDDAKPLLRLKGFPSFPLVERQANEVDWWDMVCNVKKLINEKKEDGKVFWQNLAGYKRQEALRPYLSSEEDRKKGKKFARYQLGDLLLHLEKKHGEDWGKVYDEAWERIDKKVEGLSKHIKLEEERRSEDAQSKAALTDWLRAKASFVIEGLKEADKDEFCRCELKLQKWYGDLRGKPFAIEAENSILDISGFSKQYNCAFIWQKDGVKKLNLYLIINYFKGGKLRFKKIKPEAFEANRFYTVINKKSGEIVPMEVNFNFDDPNLIILPLAFGKRQGREFIWNDLLSLETGSLKLANGRVIEKTLYNRRTRQDEPALFVALTFERREVLDSSNIKPMNLIGVDRGENIPAVIALTDPEGCPLSRFKDSLGNPTHILRIGESYKQKQRTVQAKKEVEQRRAGGYSRKYASKAKNLADDMVRNTARDLLYYAVTQDAMLIFENLSRGFGRQGKRTFMAERQYTRMEDWLTAKLAYEGLPSKTYLSKTLAQYTSKTCSNCGFTITSADYDRVLEKLKKTATGWMTTINGKELKVEGQITYYNRYKRQNVVKDLSVELDRLSEESVNNDISSWTKGRSGEALSLLKKRFSHRPVQEKFVCLNCGFETHADEQAALNIARSWLFLRSQEYKKYQTNKTTGNTDKRAFVETWQSFYRKKLKEVWKPAV

SEQ ID NO: 26133 - protein, 978 aa, synthetic construct
  REGION 1..978: note = engineered CasX variant
QEIKRINKIRRRLVKDSNTKKAGKTGPMKTLLVRVMTPDLRERLENLRKKPENIPQPISNTSRANLNKLLTDYTEMKKAILHVYWEEFQKDPVGLMSRVAQPASKKIDQNKLKPEMDEKGNLTTAGFACSQCGQPLFVYKLEQVSEKGKAYTNYFGRCNVAEHEKLILLAQLKPEKDSDEAVTYSLGKFGQRALDFYSIHVTKESTHPVKPLAQIAGNRYASGPVGKALSDACMGTIASFLSKYQDIIIEHQKVVKGNQKRLESLRELAGKENLEYPSVTLPPQPHTKEGVDAYNEVIARVRMWVNLNLWQKLKLSRDDAKPLLRLKGFPSFPLVERQANEVDWWDMVCNVKKLINEKKEDGKVFWQNLAGYKRQEALRPYLSSEEDRKKGKKFARYQLGDLLLHLEKKHGEDWGKVYDEAWERIDKKVEGLSKHIKLEEERRSEDAQSKAALTDWLRAKASFVIEGLKEADKDEFCRCELKLQKWYGDLRGKPFAIEAENSILDISGFSKQYNCAFIWQKDGVKKLNLYLIINYFKGGKLRFKKIKPEAFEANRFYTVINKKSGEIVPMEVNFNFDDPNLIILPLAFGKRQGREFIWNDLLSLETGSLKLANGRVIEKTLYNRRTRQDEPALFVALTFERREVLDSSNIKPMNLIGVDRGENIPAVIALTDPEGCPLSRFKDSLGNPTHILRIGESYKQKQRTLQAKKEVEQRRAGGYSRKYASKAKNLADDMVRNTARDLLYYAVTQDAMLIFENLSRGFGRQGKRTFMAERQYTRMEDWLTAKLAYEGLPSKTYLSKTLAQYTSKTCSNCGFTITSADYDRVLEKLKKTATGWMTTINGKELKVEGQITYYNRYKRQNVVKDLSVELDRLSEESVNNDISSWTKGRSGEALSLLKKRFSHRPVQEKFVCLNCGFETHADEQAALNIARSWLFLRSQEYKKYQTNKTTGNTDKRAFVETWQSFYRKKLKEVWKPAV

SEQ ID NO: 26134 - protein, 978 aa, synthetic construct
  REGION 1..978: note = engineered CasX variant
QEIKRINKIRRRLVKDSNTKKAGKTGPMKTLLVRVMTPDLRERLENLRKKPENIPQPISNTSRANLNKLLTDYTEMKKAILHVYWEEFQKDPVGLMSRVAQPASKKIDQNKLKPEMDEKGNLTTAGFACSQCGQPLFVYKLEQVSEKGKAYTNYFGRCNVAEHEKLILLAQLKPEKDSDEAVTYSLGKFGQRALDFYSIHVTKESTHPVKPLAQIAGNRYASGPVGKALSDACMGTIASFLSKYQDIIIEHQKVVKGNQKRLESLRELAGKENLEYPSVTLPPQPHTKEGVDAYNEVIARVRMWVNLNLWQKLKLSRDDAKPLLRLKGFPSFPLVERQANEVDWWDMVCNVKKLINEKKEDGKVFWQNLAGYKRQEALRPYLSSEEDRKKGKKFARYQLGDLLLHLEKKHGEDWGKVYDEAWERIDKKVEGLSKHIKLEEERRSEDAQSKAALTDWLRAKASFVIEGLKEADKDEFCRCELKLQKWYGDLRGKPFAIEAENSILDISGFSKQYNCAFIWQKDGVKKLNLYLIINYFKGGKLRFKKIKPEAFEANRFYTVINKKSGEIVPMEVNFNFDDPNLIILPLAFGKRQGREFIWNDLLSLETGSLKLANGRVIEKTLYNRRTRQDEPALFVALTFERREVLDSSNIKPMNLIGVDRGENIPAVIALTDPEGCPLSRFKDSLGNPTHILRIGESYKQKQRTIQAKKEVEQRSAGGYSRKYASKAKNLADDMVRNTARDLLYYAVTQDAMLIFENLSRGFGRQGKRTFMAERQYTRMEDWLTAKLAYEGLPSKTYLSKTLAQYTSKTCSNCGFTITSADYDRVLEKLKKTATGWMTTINGKELKVEGQITYYNRYKRQNVVKDLSVELDRLSEESVNNDISSWTKGRSGEALSLLKKRFSHRPVQEKFVCLNCGFETHADEQAALNIARSWLFLRSQEYKKYQTNKTTGNTDKRAFVETWQSFYRKKLKEVWKPAV

SEQ ID NO: 26135 - protein, 978 aa, synthetic construct
  REGION 1..978: note = engineered CasX variant
QEIKRINKIRRRLVKDSNTKKAGKTGPMKTLLVRVMTPDLRERLENLRKKPENIPQPISNTSRANLNKLLTDYTEMKKAILHVYWEEFQKDPVGLMSRVAQPASKKIDQNKLKPEMDEKGNLTTAGFACSQCGQPLFVYKLEQVSEKGKAYTNYFGRCNVAEHEKLILLAQLKPEKDSDEAVTYSLGKFGQRALDFYSIHVTKESTHPVKPLAQIAGNRYASGPVGKALSDACMGTIASFLSKYQDIIIEHQKVVKGNQKRLESLRELAGKENLEYPSVTLPPQPHTKEGVDAYNEVIARVRMWVNLNLWQKLKLSRDDAKPLLRLKGFPSFPLVERQANEVDWWDMVCNVKKLINEKKEDGKVFWQNLAGYKRQEALRPYLSSEEDRKKGKKFARYQLGDLLLHLEKKHGEDWGKVYDEAWERIDKKVEGLSKHIKLEEERRSEDAQSKAALTDWLRAKASFVIEGLKEADKDEFCRCELKLQKWYGDLRGKPFAIEAENSILDISGFSKQYNCAFIWQKDGVKKLNLYLIINYFKGGKLRFKKIKPEAFEANRFYTVINKKSGEIVPMEVNFNFDDPNLIILPLAFGKRQGREFIWNDLLSLETGSLKLANGRVIEKTLYNRRTRQDEPALFVALTFERREVLDSSNIKPMNLIGVDRGENIPAVIALTDPEGCPLSRFKDSLGNPTHILRIGESYKQKQRTIQAKKEVEQRRAGGYSRKYASKAKNLADDMVRNTARDLLYYAVTQDAMLIFENLSRGFGRQGKRTFMAERQYTRMEDWLTAKLAYEGLPSKTYLSKTLAQYTSKTCSNCGFTITSADYDRVLEKLKKTATGWMTTINGKELKVEGQITYYNRYKRQNVVKDLSVELDRLSEESVNNDISSWTKGRSGEALSLLKKRFSHRPVQEKFVCLNCGFETHADEQAALNIARSWLFLRSQEYKKYQTNKTTGNTDKRAFVETWQSFYRKKLKEVWKPAV

SEQ ID NO: 26136 - protein, 978 aa, synthetic construct
  REGION 1..978: note = engineered CasX variant
QEIKRINKIRRRLVKDSNTKKAGKTGPMKTLLVRVMTPDLRERLENLRKKPENIPQPISNTSRANLNKLLTDYTEMKKAILHVYWEEFQKDPVGLMSRVAQPASKKIDQNKLKPEMDEKGNLTTAGFACSQCGQPLFVYKLEQVSEKGKAYTNYFGRCNVAEHEKLILLAQLKPEKDSDEAVTYSLGKFGQRALDFYSIHVTKESTHPVKPLAQIAGNRYASGPVGKALSDACMGTIASFLSKYQDIIIEHQKVVKGNQKRLESLRELAGKENLEYPSVTLPPQPHTKEGVDAYNEVIARVRMWVNLNLWQKLKLSRDDAKPLLRLKGFPSFPLVERQANEVDWWDMVCNVKKLINEKKEDGKVFWQNLAGYKRQEALRPYLSSEEDRKKGKKFARYQLGDLLLHLEKKHGEDWGKVYDEAWERIDKKVEGLSKHIKLEEERRSEDAQSKAALTDWLRAKASFVIEGLKEADKDEFCRCELKLQKWYGDLRGKPFAIEAENSILDISGFSKQYNCAFIWQKDGVKKLNLYLIINYFKGGKLRFKKIKPEAFEANRFYTVINKKSGEIVPMEVNFNFDDPNLIILPLAFGKRQGREFIWNDLLSLETGSLKLANGRVIEKTLYNRRTRQDEPALFVALTFERREVLDSSNIKPMNLIGVDRGENIPAVIALTDPEGCPLSRFKDSLGNPTHILRIGESYKQKQRCIQAKKEVEQRRAGGYSRKYASKAKNLADDMVRNTARDLLYYAVTQDAMLIFENLSRGFGRQGKRTFMAERQYTRMEDWLTAKLAYEGLPSKTYLSKTLAQYTSKTCSNCGFTITSADYDRVLEKLKKTATGWMTTINGKELKVEGQITYYNRYKRQNVVKDLSVELDRLSEESVNNDISSWTKGRSGEALSLLKKRFSHRPVQEKFVCLNCGFETHADEQAALNIARSWLFLRSQEYKKYQTNKTTGNTDKRAFVETWQSFYRKKLKEVWKPAV

SEQ ID NO: 26137 - protein, 978 aa, synthetic construct
  REGION 1..978: note = engineered CasX variant
QEIKRINKIRRRLVKDSNTKKAGKTGPMKTLLVRVMTPDLRERLENLRKKPENIPQPISNTSRANLNKLLTDYTEMKKAILHVYWEEFQKDPVGLMSRVAQPASKKIDQNKLKPEMDEKGNLTTAGFACSQCGQPLFVYKLEQVSEKGKAYTNYFGRCNVAEHEKLILLAQLKPEKDSDEAVTYSLGKFGQRALDFYSIHVTKESTHPVKPLAQIAGNRYASGPVGKALSDACMGTIASFLSKYQDIIIEHQKVVKGNQKRLESLRELAGKENLEYPSVTLPPQPHTKEGVDAYNEVIARVRMWVNLNLWQKLKLSRDDAKPLLRLKGFPSFPLVERQANEVDWWDMVCNVKKLINEKKEDGKVFWQNLAGYKRQEALRPYLSSEEDRKKGKKFARYQLGDLLLHLEKKHGEDWGKVYDEAWERIDKKVEGLSKHIKLEEERRSEDAQSKAALTDWLRAKASFVIEGLKEADKDEFCRCELKLQKWYGDLRGKPFAIEAENSILDISGFSKQYNCAFIWQKDGVKKLNLYLIINYFKGGKLRFKKIKPEAFEANRFYTVINKKSGEIVPMEVNFNFDDPNLIILPLAFGKRQGREFIWNDLLSLETGSLKLANGRVIEKTLYNRRTRQDEPALFVALTFERREVLDSSNIKPMNLIGVDRGENIPAVIALTDPEGCPLSRFKDSLGNPTHILRIGESYKNKQRTIQAKKEVEQRRAGGYSRKYASKAKNLADDMVRNTARDLLYYAVTQDAMLIFENLSRGFGRQGKRTFMAERQYTRMEDWLTAKLAYEGLPSKTYLSKTLAQYTSKTCSNCGFTITSADYDRVLEKLKKTATGWMTTINGKELKVEGQITYYNRYKRQNVVKDLSVELDRLSEESVNNDISSWTKGRSGEALSLLKKRFSHRPVQEKFVCLNCGFETHADEQAALNIARSWLFLRSQEYKKYQTNKTTGNTDKRAFVETWQSFYRKKLKEVWKPAV

SEQ ID NO: 26138 - protein, 978 aa, synthetic construct
  REGION 1..978: note = engineered CasX variant
QEIKRINKIRRRLVKDSNTKKAGKTGPMKTLLVRVMTPDLRERLENLRKKPENIPQPISNTSRANLNKLLTDYTEMKKAILHVYWEEFQKDPVGLMSRVAQPASKKIDQNKLKPEMDEKGNLTTAGFACSQCGQPLFVYKLEQVSEKGKAYTNYFGRCNVAEHEKLILLAQLKPEKDSDEAVTYSLGKFGQRALDFYSIHVTKESTHPVKPLAQIAGNRYASGPVGKALSDACMGTIASFLSKYQDIIIEHQKVVKGNQKRLESLRELAGKENLEYPSVTLPPQPHTKEGVDAYNEVIARVRMWVNLNLWQKLKLSRDDAKPLLRLKGFPSFPLVERQANEVDWWDMVCNVKKLINEKKEDGKVFWQNLAGYKRQEALRPYLSSEEDRKKGKKFARYQLGDLLLHLEKKHGEDWGKVYDEAWERIDKKVEGLSKHIKLEEERRSEDAQSKAALTDWLRAKASFVIEGLKEADKDEFCRCELKLQKWYGDLRGKPFAIEAENSILDISGFSKQYNCAFIWQKDGVKKLNLYLIINYFKGGKLRFKKIKPEAFEANRFYTVINKKSGEIVPMEVNFNFDDPNLIILPLAFGKRQGREFIWNDLLSLETGSLKLANGRVIEKTLYNRRTRQDEPALFVALTFERREVLDSSNIKPMNLIGVDRGENIPAVIALTDPEGCPLSRFKDSLGNPTHILRIGESYKNKQRTIQACKEVEQRRAGGYSRKYASKAKNLADDMVRNTARDLLYYAVTQDAMLIFENLSRGFGRQGKRTFMAERQYTRMEDWLTAKLAYEGLPSKTYLSKTLAQYTSKTCSNCGFTITSADYDRVLEKLKKTATGWMTTINGKELKVEGQITYYNRYKRQNVVKDLSVELDRLSEESVNNDISSWTKGRSGEALSLLKKRFSHRPVQEKFVCLNCGFETHADEQAALNIARSWLFLRSQEYKKYQTNKTTGNTDKRAFVETWQSFYRKKLKEVWKPAV

SEQ ID NO: 26139 - protein, 978 aa, synthetic construct
  REGION 1..978: note = engineered CasX variant
QEIKRINKIRRRLVKDSNTKKAGKTGPMKTLLVRVMTPDLRERLENLRKKPENIPQPISNTSRANLNKLLTDYTEMKKAILHVYWEEFQKDPVGLMSRVAQPASKKIDQNKLKPEMDEKGNLTTAGFACSQCGQPLFVYKLEQVSEKGKAYTNYFGRCNVAEHEKLILLAQLKPEKDSDEAVTYSLGKFGQRALDFYSIHVTKESTHPVKPLAQIAGNRYASGPVGKALSDACMGTIASFLSKYQDIIIEHQKVVKGNQKRLESLRELAGKENLEYPSVTLPPQPHTKEGVDAYNEVIARVRMWVNLNLWQKLKLSRDDAKPLLRLKGFPSFPLVERQANEVDWWDMVCNVKKLINEKKEDGKVFWQNLAGYKRQEALRPYLSSEEDRKKGKKFARYQLGDLLLHLEKKHGEDWGKVYDEAWERIDKKVEGLSKHIKLEEERRSEDAQSKAALTDWLRAKASFVIEGLKEADKDEFCRCELKLQKWYGDLRGKPFAIEAENSILDISGFSKQYNCAFIWQKDGVKKLNLYLIINYFKGGKLRFKKIKPEAFEANRFYTVINKKSGEIVPMEVNFNFDDPNLIILPLAFGKRQGREFIWNDLLSLETGSLKLANGRVIEKTLYNRRTRQDEPALFVALTFERREVLDSSNIKPMNLIGVDRGENIPAVIALTDPEGCPLSRFKDSLGNPTHILRIGESYKMKQRTIQAKQEVEQRRAGGYSRKYASKAKNLADDMVRNTARDLLYYAVTQDAMLIFENLSRGFGRQGKRTFMAERQYTRMEDWLTAKLAYEGLPSKTYLSKTLAQYTSKTCSNCGFTITSADYDRVLEKLKKTATGWMTTINGKELKVEGQITYYNRYKRQNVVKDLSVELDRLSEESVNNDISSWTKGRSGEALSLLKKRFSHRPVQEKFVCLNCGFETHADEQAALNIARSWLFLRSQEYKKYQTNKTTGNTDKRAFVETWQSFYRKKLKEVWKPAV

SEQ ID NO: 26140 - protein, 978 aa, synthetic construct
  REGION 1..978: note = engineered CasX variant
QEIKRINKIRRRLVKDSNTKKAGKTGPMKTLLVRVMTPDLRERLENLRKKPENIPQPISNTSRANLNKLLTDYTEMKKAILHVYWEEFQKDPVGLMSRVAQPASKKIDQNKLKPEMDEKGNLTTAGFACSQCGQPLFVYKLEQVSEKGKAYTNYFGRCNVAEHEKLILLAQLKPEKDSDEAVTYSLGKFGQRALDFYSIHVTKESTHPVKPLAQIAGNRYASGPVGKALSDACMGTIASFLSKYQDIIIEHQKVVKGNQKRLESLRELAGKENLEYPSVTLPPQPHTKEGVDAYNEVIARVRMWVNLNLWQKLKLSRDDAKPLLRLKGFPSFPLVERQANEVDWWDMVCNVKKLINEKKEDGKVFWQNLAGYKRQEALRPYLSSEEDRKKGKKFARYQLGDLLLHLEKKHGEDWGKVYDEAWERIDKKVEGLSKHIKLEEERRSEDAQSKAALTDWLRAKASFVIEGLKEADKDEFCRCELKLQKWYGDLRGKPFAIEAENSILDISGFSKQYNCAFIWQKDGVKKLNLYLIINYFKGGKLRFKKIKPEAFEANRFYTVINKKSGEIVPMEVNFNFDDPNLIILPLAFGKRQGREFIWNDLLSLETGSLKLANGRVIEKTLYNRRTRQDEPALFVALTFERREVLDSSNIKPMNLIGVDRGENIPAVIALTDPEGCPLSRFKDSLGNPTHILRIGESYKMKQRTIQAKKEVEQRRAGGYSRKYASKAKNLADDMVRNTARDLLYYAVTQDAMLIFENLSRGFGRQGKRTFMAERQYTRMEDWLTAKLAYEGLPSKTYLSKTLAQYTSKTCSNCGFTITSADYDRVLEKLKKTATGWMTTINGKELKVEGQITYYNRYKRQNVVKDLSVELDRLSEESVNNDISSWTKGRSGEALSLLKKRFSHRPVQEKFVCLNCGFETHADEQAALNIARSWLFLRSQEYKKYQTNKTTGNTDKRAFVETWQSFYRKKLKEVWKPAV

SEQ ID NO: 26141 - protein, 978 aa, synthetic construct
  REGION 1..978: note = engineered CasX variant
QEIKRINKIRRRLVKDSNTKKAGKTGPMKTLLVRVMTPDLRERLENLRKKPENIPQPISNTSRANLNKLLTDYTEMKKAILHVYWEEFQKDPVGLMSRVAQPASKKIDQNKLKPEMDEKGNLTTAGFACSQCGQPLFVYKLEQVSEKGKAYTNYFGRCNVAEHEKLILLAQLKPEKDSDEAVTYSLGKFGQRALDFYSIHVTKESTHPVKPLAQIAGNRYASGPVGKALSDACMGTIASFLSKYQDIIIEHQKVVKGNQKRLESLRELAGKENLEYPSVTLPPQPHTKEGVDAYNEVIARVRMWVNLNLWQKLKLSRDDAKPLLRLKGFPSFPLVERQANEVDWWDMVCNVKKLINEKKEDGKVFWQNLAGYKRQEALRPYLSSEEDRKKGKKFARYQLGDLLLHLEKKHGEDWGKVYDEAWERIDKKVEGLSKHIKLEEERRSEDAQSKAALTDWLRAKASFVIEGLKEADKDEFCRCELKLQKWYGDLRGKPFAIEAENSILDISGFSKQYNCAFIWQKDGVKKLNLYLIINYFKGGKLRFKKIKPEAFEANRFYTVINKKSGEIVPMEVNFNFDDPNLIILPLAFGKRQGREFIWNDLLSLETGSLKLANGRVIEKTLYNRRTRQDEPALFVALTFERREVLDSSNIKPMNLIGVDRGENIPAVIALTDPEGCPLSRFKDSLGNPTHILRIGESYKLKQRTIQAKKEVEQRRAMMYSRKYASKAKNLADDMVRNTARDLLYYAVTQDAMLIFENLSRGFGRQGKRTFMAERQYTRMEDWLTAKLAYEGLPSKTYLSKTLAQYTSKTCSNCGFTITSADYDRVLEKLKKTATGWMTTINGKELKVEGQITYYNRYKRQNVVKDLSVELDRLSEESVNNDISSWTKGRSGEALSLLKKRFSHRPVQEKFVCLNCGFETHADEQAALNIARSWLFLRSQEYKKYQTNKTTGNTDKRAFVETWQSFYRKKLKEVWKPAV

SEQ ID NO: 26142 - protein, 978 aa, synthetic construct
  REGION 1..978: note = engineered CasX variant
QEIKRINKIRRRLVKDSNTKKAGKTGPMKTLLVRVMTPDLRERLENLRKKPENIPQPISNTSRANLNKLLTDYTEMKKAILHVYWEEFQKDPVGLMSRVAQPASKKIDQNKLKPEMDEKGNLTTAGFACSQCGQPLFVYKLEQVSEKGKAYTNYFGRCNVAEHEKLILLAQLKPEKDSDEAVTYSLGKFGQRALDFYSIHVTKESTHPVKPLAQIAGNRYASGPVGKALSDACMGTIASFLSKYQDIIIEHQKVVKGNQKRLESLRELAGKENLEYPSVTLPPQPHTKEGVDAYNEVIARVRMWVNLNLWQKLKLSRDDAKPLLRLKGFPSFPLVERQANEVDWWDMVCNVKKLINEKKEDGKVFWQNLAGYKRQEALRPYLSSEEDRKKGKKFARYQLGDLLLHLEKKHGEDWGKVYDEAWERIDKKVEGLSKHIKLEEERRSEDAQSKAALTDWLRAKASFVIEGLKEADKDEFCRCELKLQKWYGDLRGKPFAIEAENSILDISGFSKQYNCAFIWQKDGVKKLNLYLIINYFKGGKLRFKKIKPEAFEANRFYTVINKKSGEIVPMEVNFNFDDPNLIILPLAFGKRQGREFIWNDLLSLETGSLKLANGRVIEKTLYNRRTRQDEPALFVALTFERREVLDSSNIKPMNLIGVDRGENIPAVIALTDPEGCPLSRFKDSLGNPTHILRIGESYKLKQRTIQAKKEVEQRRAMGYSRKYASKAKNLADDMVRNTARDLLYYAVTQDAMLIFENLSRGFGRQGKRTFMAERQYTRMEDWLTAKLAYEGLPSKTYLSKTLAQYTSKTCSNCGFTITSADYDRVLEKLKKTATGWMTTINGKELKVEGQITYYNRYKRQNVVKDLSVELDRLSEESVNNDISSWTKGRSGEALSLLKKRFSHRPVQEKFVCLNCGFETHADEQAALNIARSWLFLRSQEYKKYQTNKTTGNTDKRAFVETWQSFYRKKLKEVWKPAV

SEQ ID NO: 26143 - protein, 978 aa, synthetic construct
  REGION 1..978: note = engineered CasX variant
QEIKRINKIRRRLVKDSNTKKAGKTGPMKTLLVRVMTPDLRERLENLRKKPENIPQPISNTSRANLNKLLTDYTEMKKAILHVYWEEFQKDPVGLMSRVAQPASKKIDQNKLKPEMDEKGNLTTAGFACSQCGQPLFVYKLEQVSEKGKAYTNYFGRCNVAEHEKLILLAQLKPEKDSDEAVTYSLGKFGQRALDFYSIHVTKESTHPVKPLAQIAGNRYASGPVGKALSDACMGTIASFLSKYQDIIIEHQKVVKGNQKRLESLRELAGKENLEYPSVTLPPQPHTKEGVDAYNEVIARVRMWVNLNLWQKLKLSRDDAKPLLRLKGFPSFPLVERQANEVDWWDMVCNVKKLINEKKEDGKVFWQNLAGYKRQEALRPYLSSEEDRKKGKKFARYQLGDLLLHLEKKHGEDWGKVYDEAWERIDKKVEGLSKHIKLEEERRSEDAQSKAALTDWLRAKASFVIEGLKEADKDEFCRCELKLQKWYGDLRGKPFAIEAENSILDISGFSKQYNCAFIWQKDGVKKLNLYLIINYFKGGKLRFKKIKPEAFEANRFYTVINKKSGEIVPMEVNFNFDDPNLIILPLAFGKRQGREFIWNDLLSLETGSLKLANGRVIEKTLYNRRTRQDEPALFVALTFERREVLDSSNIKPMNLIGVDRGENIPAVIALTDPEGCPLSRFKDSLGNPTHILRIGESYKLKQRTIQAKKEVEQRRAGMYSRKYASKAKNLADDMVRNTARDLLYYAVTQDAMLIFENLSRGFGRQGKRTFMAERQYTRMEDWLTAKLAYEGLPSKTYLSKTLAQYTSKTCSNCGFTITSADYDRVLEKLKKTATGWMTTINGKELKVEGQITYYNRYKRQNVVKDLSVELDRLSEESVNNDISSWTKGRSGEALSLLKKRFSHRPVQEKFVCLNCGFETHADEQAALNIARSWLFLRSQEYKKYQTNKTTGNTDKRAFVETWQSFYRKKLKEVWKPAV

SEQ ID NO: 26144 - protein, 978 aa, synthetic construct
  REGION 1..978: note = engineered CasX variant
QEIKRINKIRRRLVKDSNTKKAGKTGPMKTLLVRVMTPDLRERLENLRKKPENIPQPISNTSRANLNKLLTDYTEMKKAILHVYWEEFQKDPVGLMSRVAQPASKKIDQNKLKPEMDEKGNLTTAGFACSQCGQPLFVYKLEQVSEKGKAYTNYFGRCNVAEHEKLILLAQLKPEKDSDEAVTYSLGKFGQRALDFYSIHVTKESTHPVKPLAQIAGNRYASGPVGKALSDACMGTIASFLSKYQDIIIEHQKVVKGNQKRLESLRELAGKENLEYPSVTLPPQPHTKEGVDAYNEVIARVRMWVNLNLWQKLKLSRDDAKPLLRLKGFPSFPLVERQANEVDWWDMVCNVKKLINEKKEDGKVFWQNLAGYKRQEALRPYLSSEEDRKKGKKFARYQLGDLLLHLEKKHGEDWGKVYDEAWERIDKKVEGLSKHIKLEEERRSEDAQSKAALTDWLRAKASFVIEGLKEADKDEFCRCELKLQKWYGDLRGKPFAIEAENSILDISGFSKQYNCAFIWQKDGVKKLNLYLIINYFKGGKLRFKKIKPEAFEANRFYTVINKKSGEIVPMEVNFNFDDPNLIILPLAFGKRQGREFIWNDLLSLETGSLKLANGRVIEKTLYNRRTRQDEPALFVALTFERREVLDSSNIKPMNLIGVDRGENIPAVIALTDPEGCPLSRFKDSLGNPTHILRIGESYKLKQRTIQAKKEVEQRRAGGYSRKYASKAKNLADDMVRNTARDLLYYAVTQDAMLIFENLSRGFGRQGKRTFMAERQYTRMEDWLTAKLAYEGLPSKTYLSKTLAQYTSKTCSNCGFTITSADYDRVLEKLKKTATGWMTTINGKELKVEGQITYYNRYKRQNVVKDLSVELDRLSEESVNNDISSWTKGRSGEALSLLKKRFSHRPVQEKFVCLNCGFETHADEQAALNIARSWLFLRSQEYKKYQTNKTTGNTDKRAFVETWQSFYRKKLKEVWKPAV

SEQ ID NO: 26145 - protein, 978 aa, synthetic construct
  REGION 1..978: note = engineered CasX variant
QEIKRINKIRRRLVKDSNTKKAGKTGPMKTLLVRVMTPDLRERLENLRKKPENIPQPISNTSRANLNKLLTDYTEMKKAILHVYWEEFQKDPVGLMSRVAQPASKKIDQNKLKPEMDEKGNLTTAGFACSQCGQPLFVYKLEQVSEKGKAYTNYFGRCNVAEHEKLILLAQLKPEKDSDEAVTYSLGKFGQRALDFYSIHVTKESTHPVKPLAQIAGNRYASGPVGKALSDACMGTIASFLSKYQDIIIEHQKVVKGNQKRLESLRELAGKENLEYPSVTLPPQPHTKEGVDAYNEVIARVRMWVNLNLWQKLKLSRDDAKPLLRLKGFPSFPLVERQANEVDWWDMVCNVKKLINEKKEDGKVFWQNLAGYKRQEALRPYLSSEEDRKKGKKFARYQLGDLLLHLEKKHGEDWGKVYDEAWERIDKKVEGLSKHIKLEEERRSEDAQSKAALTDWLRAKASFVIEGLKEADKDEFCRCELKLQKWYGDLRGKPFAIEAENSILDISGFSKQYNCAFIWQKDGVKKLNLYLIINYFKGGKLRFKKIKPEAFEANRFYTVINKKSGEIVPMEVNFNFDDPNLIILPLAFGKRQGREFIWNDLLSLETGSLKLANGRVIEKTLYNRRTRQDEPALFVALTFERREVLDSSNIKPMNLIGVDRGENIPAVIALTDPEGCPLSRFKDSLGNPTHILRIGESYKKKQRTIQAKKEVEQRRLGGYSRKYASKAKNLADDMVRNTARDLLYYAVTQDAMLIFENLSRGFGRQGKRTFMAERQYTRMEDWLTAKLAYEGLPSKTYLSKTLAQYTSKTCSNCGFTITSADYDRVLEKLKKTATGWMTTINGKELKVEGQITYYNRYKRQNVVKDLSVELDRLSEESVNNDISSWTKGRSGEALSLLKKRFSHRPVQEKFVCLNCGFETHADEQAALNIARSWLFLRSQEYKKYQTNKTTGNTDKRAFVETWQSFYRKKLKEVWKPAV

SEQ ID NO: 26146 - protein, 978 aa, synthetic construct
  REGION 1..978: note = engineered CasX variant
QEIKRINKIRRRLVKDSNTKKAGKTGPMKTLLVRVMTPDLRERLENLRKKPENIPQPISNTSRANLNKLLTDYTEMKKAILHVYWEEFQKDPVGLMSRVAQPASKKIDQNKLKPEMDEKGNLTTAGFACSQCGQPLFVYKLEQVSEKGKAYTNYFGRCNVAEHEKLILLAQLKPEKDSDEAVTYSLGKFGQRALDFYSIHVTKESTHPVKPLAQIAGNRYASGPVGKALSDACMGTIASFLSKYQDIIIEHQKVVKGNQKRLESLRELAGKENLEYPSVTLPPQPHTKEGVDAYNEVIARVRMWVNLNLWQKLKLSRDDAKPLLRLKGFPSFPLVERQANEVDWWDMVCNVKKLINEKKEDGKVFWQNLAGYKRQEALRPYLSSEEDRKKGKKFARYQLGDLLLHLEKKHGEDWGKVYDEAWERIDKKVEGLSKHIKLEEERRSEDAQSKAALTDWLRAKASFVIEGLKEADKDEFCRCELKLQKWYGDLRGKPFAIEAENSILDISGFSKQYNCAFIWQKDGVKKLNLYLIINYFKGGKLRFKKIKPEAFEANRFYTVINKKSGEIVPMEVNFNFDDPNLIILPLAFGKRQGREFIWNDLLSLETGSLKLANGRVIEKTLYNRRTRQDEPALFVALTFERREVLDSSNIKPMNLIGVDRGENIPAVIALTDPEGCPLSRFKDSLGNPTHILRIGESYKKKQRTIQAKKEVEQRRAGGYSRKYASKAKNLADDMVRNTARDLLYYAVTQDAMLIFENLSRGFGRQGKRTFMAERQYTRMEDWLTAKLAYEGLPSKTYLSKTLAQYTSKTCSNCGFTITSADYDRVLEKLKKTATGWMTTINGKELKVEGQITYYNRYKRQNVVKDLSVELDRLSEESVNNDISSWTKGRSGEALSLLKKRFSHRPVQEKFVCLNCGFETHADEQAALNIARSWLFLRSQEYKKYQTNKTTGNTDKRAFVETWQSFYRKKLKEVWKPAV

SEQ ID NO: 26147 - protein, 978 aa, synthetic construct
  REGION 1..978: note = engineered CasX variant
QEIKRINKIRRRLVKDSNTKKAGKTGPMKTLLVRVMTPDLRERLENLRKKPENIPQPISNTSRANLNKLLTDYTEMKKAILHVYWEEFQKDPVGLMSRVAQPASKKIDQNKLKPEMDEKGNLTTAGFACSQCGQPLFVYKLEQVSEKGKAYTNYFGRCNVAEHEKLILLAQLKPEKDSDEAVTYSLGKFGQRALDFYSIHVTKESTHPVKPLAQIAGNRYASGPVGKALSDACMGTIASFLSKYQDIIIEHQKVVKGNQKRLESLRELAGKENLEYPSVTLPPQPHTKEGVDAYNEVIARVRMWVNLNLWQKLKLSRDDAKPLLRLKGFPSFPLVERQANEVDWWDMVCNVKKLINEKKEDGKVFWQNLAGYKRQEALRPYLSSEEDRKKGKKFARYQLGDLLLHLEKKHGEDWGKVYDEAWERIDKKVEGLSKHIKLEEERRSEDAQSKAALTDWLRAKASFVIEGLKEADKDEFCRCELKLQKWYGDLRGKPFAIEAENSILDISGFSKQYNCAFIWQKDGVKKLNLYLIINYFKGGKLRFKKIKPEAFEANRFYTVINKKSGEIVPMEVNFNFDDPNLIILPLAFGKRQGREFIWNDLLSLETGSLKLANGRVIEKTLYNRRTRQDEPALFVALTFERREVLDSSNIKPMNLIGVDRGENIPAVIALTDPEGCPLSRFKDSLGNPTHILRIGESYKIKQRTIQAKKEVEQRRAGGYSRKYASKAKNLADDMVRNTARDLLYYAVTQDAMLIFENLSRGFGRQGKRTFMAERQYTRMEDWLTAKLAYEGLPSKTYLSKTLAQYTSKTCSNCGFTITSADYDRVLEKLKKTATGWMTTINGKELKVEGQITYYNRYKRQNVVKDLSVELDRLSEESVNNDISSWTKGRSGEALSLLKKRFSHRPVQEKFVCLNCGFETHADEQAALNIARSWLFLRSQEYKKYQTNKTTGNTDKRAFVETWQSFYRKKLKEVWKPAV

SEQ ID NO: 26148 - protein, 978 aa, synthetic construct
  REGION 1..978: note = engineered CasX variant
QEIKRINKIRRRLVKDSNTKKAGKTGPMKTLLVRVMTPDLRERLENLRKKPENIPQPISNTSRANLNKLLTDYTEMKKAILHVYWEEFQKDPVGLMSRVAQPASKKIDQNKLKPEMDEKGNLTTAGFACSQCGQPLFVYKLEQVSEKGKAYTNYFGRCNVAEHEKLILLAQLKPEKDSDEAVTYSLGKFGQRALDFYSIHVTKESTHPVKPLAQIAGNRYASGPVGKALSDACMGTIASFLSKYQDIIIEHQKVVKGNQKRLESLRELAGKENLEYPSVTLPPQPHTKEGVDAYNEVIARVRMWVNLNLWQKLKLSRDDAKPLLRLKGFPSFPLVERQANEVDWWDMVCNVKKLINEKKEDGKVFWQNLAGYKRQEALRPYLSSEEDRKKGKKFARYQLGDLLLHLEKKHGEDWGKVYDEAWERIDKKVEGLSKHIKLEEERRSEDAQSKAALTDWLRAKASFVIEGLKEADKDEFCRCELKLQKWYGDLRGKPFAIEAENSILDISGFSKQYNCAFIWQKDGVKKLNLYLIINYFKGGKLRFKKIKPEAFEANRFYTVINKKSGEIVPMEVNFNFDDPNLIILPLAFGKRQGREFIWNDLLSLETGSLKLANGRVIEKTLYNRRTRQDEPALFVALTFERREVLDSSNIKPMNLIGVDRGENIPAVIALTDPEGCPLSRFKDSLGNPTHILRIGESYKHRQRTIQAKKEVEQRRAGGYSRKYASKAKNLADDMVRNTARDLLYYAVTQDAMLIFENLSRGFGRQGKRTFMAERQYTRMEDWLTAKLAYEGLPSKTYLSKTLAQYTSKTCSNCGFTITSADYDRVLEKLKKTATGWMTTINGKELKVEGQITYYNRYKRQNVVKDLSVELDRLSEESVNNDISSWTKGRSGEALSLLKKRFSHRPVQEKFVCLNCGFETHADEQAALNIARSWLFLRSQEYKKYQTNKTTGNTDKRAFVETWQSFYRKKLKEVWKPAV

SEQ ID NO: 26149 - protein, 978 aa, synthetic construct
  REGION 1..978: note = engineered CasX variant
QEIKRINKIRRRLVKDSNTKKAGKTGPMKTLLVRVMTPDLRERLENLRKKPENIPQPISNTSRANLNKLLTDYTEMKKAILHVYWEEFQKDPVGLMSRVAQPASKKIDQNKLKPEMDEKGNLTTAGFACSQCGQPLFVYKLEQVSEKGKAYTNYFGRCNVAEHEKLILLAQLKPEKDSDEAVTYSLGKFGQRALDFYSIHVTKESTHPVKPLAQIAGNRYASGPVGKALSDACMGTIASFLSKYQDIIIEHQKVVKGNQKRLESLRELAGKENLEYPSVTLPPQPHTKEGVDAYNEVIARVRMWVNLNLWQKLKLSRDDAKPLLRLKGFPSFPLVERQANEVDWWDMVCNVKKLINEKKEDGKVFWQNLAGYKRQEALRPYLSSEEDRKKGKKFARYQLGDLLLHLEKKHGEDWGKVYDEAWERIDKKVEGLSKHIKLEEERRSEDAQSKAALTDWLRAKASFVIEGLKEADKDEFCRCELKLQKWYGDLRGKPFAIEAENSILDISGFSKQYNCAFIWQKDGVKKLNLYLIINYFKGGKLRFKKIKPEAFEANRFYTVINKKSGEIVPMEVNFNFDDPNLIILPLAFGKRQGREFIWNDLLSLETGSLKLANGRVIEKTLYNRRTRQDEPALFVALTFERREVLDSSNIKPMNLIGVDRGENIPAVIALTDPEGCPLSRFKDSLGNPTHILRIGESYKHKTRTIQAKKEVEQRRAGGYSRKYASKAKNLADDMVRNTARDLLYYAVTQDAMLIFENLSRGFGRQGKRTFMAERQYTRMEDWLTAKLAYEGLPSKTYLSKTLAQYTSKTCSNCGFTITSADYDRVLEKLKKTATGWMTTINGKELKVEGQITYYNRYKRQNVVKDLSVELDRLSEESVNNDISSWTKGRSGEALSLLKKRFSHRPVQEKFVCLNCGFETHADEQAALNIARSWLFLRSQEYKKYQTNKTTGNTDKRAFVETWQSFYRKKLKEVWKPAV

SEQ ID NO: 26150 - protein, 978 aa, synthetic construct
  REGION 1..978: note = engineered CasX variant
QEIKRINKIRRRLVKDSNTKKAGKTGPMKTLLVRVMTPDLRERLENLRKKPENIPQPISNTSRANLNKLLTDYTEMKKAILHVYWEEFQKDPVGLMSRVAQPASKKIDQNKLKPEMDEKGNLTTAGFACSQCGQPLFVYKLEQVSEKGKAYTNYFGRCNVAEHEKLILLAQLKPEKDSDEAVTYSLGKFGQRALDFYSIHVTKESTHPVKPLAQIAGNRYASGPVGKALSDACMGTIASFLSKYQDIIIEHQKVVKGNQKRLESLRELAGKENLEYPSVTLPPQPHTKEGVDAYNEVIARVRMWVNLNLWQKLKLSRDDAKPLLRLKGFPSFPLVERQANEVDWWDMVCNVKKLINEKKEDGKVFWQNLAGYKRQEALRPYLSSEEDRKKGKKFARYQLGDLLLHLEKKHGEDWGKVYDEAWERIDKKVEGLSKHIKLEEERRSEDAQSKAALTDWLRAKASFVIEGLKEADKDEFCRCELKLQKWYGDLRGKPFAIEAENSILDISGFSKQYNCAFIWQKDGVKKLNLYLIINYFKGGKLRFKKIKPEAFEANRFYTVINKKSGEIVPMEVNFNFDDPNLIILPLAFGKRQGREFIWNDLLSLETGSLKLANGRVIEKTLYNRRTRQDEPALFVALTFERREVLDSSNIKPMNLIGVDRGENIPAVIALTDPEGCPLSRFKDSLGNPTHILRIGESYKHKTRTIQAKKCVEQRRAGGYSRKYASKAKNLADDMVRNTARDLLYYAVTQDAMLIFENLSRGFGRQGKRTFMAERQYTRMEDWLTAKLAYEGLPSKTYLSKTLAQYTSKTCSNCGFTITSADYDRVLEKLKKTATGWMTTINGKELKVEGQITYYNRYKRQNVVKDLSVELDRLSEESVNNDISSWTKGRSGEALSLLKKRFSHRPVQEKFVCLNCGFETHADEQAALNIARSWLFLRSQEYKKYQTNKTTGNTDKRAFVETWQSFYRKKLKEVWKPAV

SEQ ID NO: 26151 - protein, 978 aa, synthetic construct; identical to SEQ ID NO: 500
  REGION 1..978: note = engineered CasX variant

SEQ ID NO: 26152 - protein, 978 aa, synthetic construct; identical to SEQ ID NO: 498
  REGION 1..978: note = engineered CasX variant

SEQ ID NO: 26153 - protein, 978 aa, synthetic construct
  REGION 1..978: note = engineered CasX variant
QEIKRINKIRRRLVKDSNTKKAGKTGPMKTLLVRVMTPDLRERLENLRKKPENIPQPISNTSRANLNKLLTDYTEMKKAILHVYWEEFQKDPVGLMSRVAQPASKKIDQNKLKPEMDEKGNLTTAGFACSQCGQPLFVYKLEQVSEKGKAYTNYFGRCNVAEHEKLILLAQLKPEKDSDEAVTYSLGKFGQRALDFYSIHVTKESTHPVKPLAQIAGNRYASGPVGKALSDACMGTIASFLSKYQDIIIEHQKVVKGNQKRLESLRELAGKENLEYPSVTLPPQPHTKEGVDAYNEVIARVRMWVNLNLWQKLKLSRDDAKPLLRLKGFPSFPLVERQANEVDWWDMVCNVKKLINEKKEDGKVFWQNLAGYKRQEALRPYLSSEEDRKKGKKFARYQLGDLLLHLEKKHGEDWGKVYDEAWERIDKKVEGLSKHIKLEEERRSEDAQSKAALTDWLRAKASFVIEGLKEADKDEFCRCELKLQKWYGDLRGKPFAIEAENSILDISGFSKQYNCAFIWQKDGVKKLNLYLIINYFKGGKLRFKKIKPEAFEANRFYTVINKKSGEIVPMEVNFNFDDPNLIILPLAFGKRQGREFIWNDLLSLETGSLKLANGRVIEKTLYNRRTRQDEPALFVALTFERREVLDSSNIKPMNLIGVDRGENIPAVIALTDPEGCPLSRFKDSLGNPTHILRIGESYKHKQRTIQAKKCVEQRRAGGYSRKYASKAKNLADDMVRNTARDLLYYAVTQDAMLIFENLSRGFGRQGKRTFMAERQYTRMEDWLTAKLAYEGLPSKTYLSKTLAQYTSKTCSNCGFTITSADYDRVLEKLKKTATGWMTTINGKELKVEGQITYYNRYKRQNVVKDLSVELDRLSEESVNNDISSWTKGRSGEALSLLKKRFSHRPVQEKFVCLNCGFETHADEQAALNIARSWLFLRSQEYKKYQTNKTTGNTDKRAFVETWQSFYRKKLKEVWKPAV

SEQ ID NO: 26154 - protein, 978 aa, synthetic construct
  REGION 1..978: note = engineered CasX variant
QEIKRINKIRRRLVKDSNTKKAGKTGPMKTLLVRVMTPDLRERLENLRKKPENIPQPISNTSRANLNKLLTDYTEMKKAILHVYWEEFQKDPVGLMSRVAQPASKKIDQNKLKPEMDEKGNLTTAGFACSQCGQPLFVYKLEQVSEKGKAYTNYFGRCNVAEHEKLILLAQLKPEKDSDEAVTYSLGKFGQRALDFYSIHVTKESTHPVKPLAQIAGNRYASGPVGKALSDACMGTIASFLSKYQDIIIEHQKVVKGNQKRLESLRELAGKENLEYPSVTLPPQPHTKEGVDAYNEVIARVRMWVNLNLWQKLKLSRDDAKPLLRLKGFPSFPLVERQANEVDWWDMVCNVKKLINEKKEDGKVFWQNLAGYKRQEALRPYLSSEEDRKKGKKFARYQLGDLLLHLEKKHGEDWGKVYDEAWERIDKKVEGLSKHIKLEEERRSEDAQSKAALTDWLRAKASFVIEGLKEADKDEFCRCELKLQKWYGDLRGKPFAIEAENSILDISGFSKQYNCAFIWQKDGVKKLNLYLIINYFKGGKLRFKKIKPEAFEANRFYTVINKKSGEIVPMEVNFNFDDPNLIILPLAFGKRQGREFIWNDLLSLETGSLKLANGRVIEKTLYNRRTRQDEPALFVALTFERREVLDSSNIKPMNLIGVDRGENIPAVIALTDPEGCPLSRFKDSLGNPTHILRIGESYKHKQRCIQAKKEVEQRRAGGYSRKYASKAKNLADDMVRNTARDLLYYAVTQDAMLIFENLSRGFGRQGKRTFMAERQYTRMEDWLTAKLAYEGLPSKTYLSKTLAQYTSKTCSNCGFTITSADYDRVLEKLKKTATGWMTTINGKELKVEGQITYYNRYKRQNVVKDLSVELDRLSEESVNNDISSWTKGRSGEALSLLKKRFSHRPVQEKFVCLNCGFETHADEQAALNIARSWLFLRSQEYKKYQTNKTTGNTDKRAFVETWQSFYRKKLKEVWKPAV

SEQ ID NO: 26155 - protein, 978 aa, synthetic construct
  REGION 1..978: note = engineered CasX variant
QEIKRINKIRRRLVKDSNTKKAGKTGPMKTLLVRVMTPDLRERLENLRKKPENIPQPISNTSRANLNKLLTDYTEMKKAILHVYWEEFQKDPVGLMSRVAQPASKKIDQNKLKPEMDEKGNLTTAGFACSQCGQPLFVYKLEQVSEKGKAYTNYFGRCNVAEHEKLILLAQLKPEKDSDEAVTYSLGKFGQRALDFYSIHVTKESTHPVKPLAQIAGNRYASGPVGKALSDACMGTIASFLSKYQDIIIEHQKVVKGNQKRLESLRELAGKENLEYPSVTLPPQPHTKEGVDAYNEVIARVRMWVNLNLWQKLKLSRDDAKPLLRLKGFPSFPLVERQANEVDWWDMVCNVKKLINEKKEDGKVFWQNLAGYKRQEALRPYLSSEEDRKKGKKFARYQLGDLLLHLEKKHGEDWGKVYDEAWERIDKKVEGLSKHIKLEEERRSEDAQSKAALTDWLRAKASFVIEGLKEADKDEFCRCELKLQKWYGDLRGKPFAIEAENSILDISGFSKQYNCAFIWQKDGVKKLNLYLIINYFKGGKLRFKKIKPEAFEANRFYTVINKKSGEIVPMEVNFNFDDPNLIILPLAFGKRQGREFIWNDLLSLETGSLKLANGRVIEKTLYNRRTRQDEPALFVALTFERREVLDSSNIKPMNLIGVDRGENIPAVIALTDPEGCPLSRFKDSLGNPTHILRIGESYKHCQRTIQAKKEVEQRRAGGYSRKYASKAKNLADDMVRNTARDLLYYAVTQDAMLIFENLSRGFGRQGKRTFMAERQYTRMEDWLTAKLAYEGLPSKTYLSKTLAQYTSKTCSNCGFTITSADYDRVLEKLKKTATGWMTTINGKELKVEGQITYYNRYKRQNVVKDLSVELDRLSEESVNNDISSWTKGRSGEALSLLKKRFSHRPVQEKFVCLNCGFETHADEQAALNIARSWLFLRSQEYKKYQTNKTTGNTDKRAFVETWQSFYRKKLKEVWKPAV

SEQ ID NO: 26156 - protein, 978 aa, synthetic construct
  REGION 1..978: note = engineered CasX variant
QEIKRINKIRRRLVKDSNTKKAGKTGPMKTLLVRVMTPDLRERLENLRKKPENIPQPISNTSRANLNKLLTDYTEMKKAILHVYWEEFQKDPVGLMSRVAQPASKKIDQNKLKPEMDEKGNLTTAGFACSQCGQPLFVYKLEQVSEKGKAYTNYFGRCNVAEHEKLILLAQLKPEKDSDEAVTYSLGKFGQRALDFYSIHVTKESTHPVKPLAQIAGNRYASGPVGKALSDACMGTIASFLSKYQDIIIEHQKVVKGNQKRLESLRELAGKENLEYPSVTLPPQPHTKEGVDAYNEVIARVRMWVNLNLWQKLKLSRDDAKPLLRLKGFPSFPLVERQANEVDWWDMVCNVKKLINEKKEDGKVFWQNLAGYKRQEALRPYLSSEEDRKKGKKFARYQLGDLLLHLEKKHGEDWGKVYDEAWERIDKKVEGLSKHIKLEEERRSEDAQSKAALTDWLRAKASFVIEGLKEADKDEFCRCELKLQKWYGDLRGKPFAIEAENSILDISGFSKQYNCAFIWQKDGVKKLNLYLIINYFKGGKLRFKKIKPEAFEANRFYTVINKKSGEIVPMEVNFNFDDPNLIILPLAFGKRQGREFIWNDLLSLETGSLKLANGRVIEKTLYNRRTRQDEPALFVALTFERREVLDSSNIKPMNLIGVDRGENIPAVIALTDPEGCPLSRFKDSLGNPTHILRIGESYKGKQRTIQAKKEVEQRRAGGYSRKYASKAKNLADDMVRNTARDLLYYAVTQDAMLIFENLSRGFGRQGKRTFMAERQYTRMEDWLTAKLAYEGLPSKTYLSKTLAQYTSKTCSNCGFTITSADYDRVLEKLKKTATGWMTTINGKELKVEGQITYYNRYKRQNVVKDLSVELDRLSEESVNNDISSWTKGRSGEALSLLKKRFSHRPVQEKFVCLNCGFETHADEQAALNIARSWLFLRSQEYKKYQTNKTTGNTDKRAFVETWQSFYRKKLKEVWKPAV

SEQ ID NO: 26157 - protein, 978 aa, synthetic construct
  REGION 1..978: note = engineered CasX variant
QEIKRINKIRRRLVKDSNTKKAGKTGPMKTLLVRVMTPDLRERLENLRKKPENIPQPISNTSRANLNKLLTDYTEMKKAILHVYWEEFQKDPVGLMSRVAQPASKKIDQNKLKPEMDEKGNLTTAGFACSQCGQPLFVYKLEQVSEKGKAYTNYFGRCNVAEHEKLILLAQLKPEKDSDEAVTYSLGKFGQRALDFYSIHVTKESTHPVKPLAQIAGNRYASGPVGKALSDACMGTIASFLSKYQDIIIEHQKVVKGNQKRLESLRELAGKENLEYPSVTLPPQPHTKEGVDAYNEVIARVRMWVNLNLWQKLKLSRDDAKPLLRLKGFPSFPLVERQANEVDWWDMVCNVKKLINEKKEDGKVFWQNLAGYKRQEALRPYLSSEEDRKKGKKFARYQLGDLLLHLEKKHGEDWGKVYDEAWERIDKKVEGLSKHIKLEEERRSEDAQSKAALTDWLRAKASFVIEGLKEADKDEFCRCELKLQKWYGDLRGKPFAIEAENSILDISGFSKQYNCAFIWQKDGVKKLNLYLIINYFKGGKLRFKKIKPEAFEANRFYTVINKKSGEIVPMEVNFNFDDPNLIILPLAFGKRQGREFIWNDLLSLETGSLKLANGRVIEKTLYNRRTRQDEPALFVALTFERREVLDSSNIKPMNLIGVDRGENIPAVIALTDPEGCPLSRFKDSLGNPTHILRIGESYKFKQRTIQAKKEVEQRRAGGYSRKYASKAKNLADDMVRNTARDLLYYAVTQDAMLIFENLSRGFGRQGKRTFMAERQYTRMEDWLTAKLAYEGLPSKTYLSKTLAQYTSKTCSNCGFTITSADYDRVLEKLKKTATGWMTTINGKELKVEGQITYYNRYKRQNVVKDLSVELDRLSEESVNNDISSWTKGRSGEALSLLKKRFSHRPVQEKFVCLNCGFETHADEQAALNIARSWLFLRSQEYKKYQTNKTTGNTDKRAFVETWQSFYRKKLKEVWKPAV

SEQ ID NO: 26158 - protein, 978 aa, synthetic construct
  REGION 1..978: note = engineered CasX variant
QEIKRINKIRRRLVKDSNTKKAGKTGPMKTLLVRVMTPDLRERLENLRKKPENIPQPISNTSRANLNKLLTDYTEMKKAILHVYWEEFQKDPVGLMSRVAQPASKKIDQNKLKPEMDEKGNLTTAGFACSQCGQPLFVYKLEQVSEKGKAYTNYFGRCNVAEHEKLILLAQLKPEKDSDEAVTYSLGKFGQRALDFYSIHVTKESTHPVKPLAQIAGNRYASGPVGKALSDACMGTIASFLSKYQDIIIEHQKVVKGNQKRLESLRELAGKENLEYPSVTLPPQPHTKEGVDAYNEVIARVRMWVNLNLWQKLKLSRDDAKPLLRLKGFPSFPLVERQANEVDWWDMVCNVKKLINEKKEDGKVFWQNLAGYKRQEALRPYLSSEEDRKKGKKFARYQLGDLLLHLEKKHGEDWGKVYDEAWERIDKKVEGLSKHIKLEEERRSEDAQSKAALTDWLRAKASFVIEGLKEADKDEFCRCELKLQKWYGDLRGKPFAIEAENSILDISGFSKQYNCAFIWQKDGVKKLNLYLIINYFKGGKLRFKKIKPEAFEANRFYTVINKKSGEIVPMEVNFNFDDPNLIILPLAFGKRQGREFIWNDLLSLETGSLKLANGRVIEKTLYNRRTRQDEPALFVALTFERREVLDSSNIKPMNLIGVDRGENIPAVIALTDPEGCPLSRFKDSLGNPTHILRIGESYKEYQRTIQAKKEVEQRRAGIYSRKYASKAKNLADDMVRNTARDLLYYAVTQDAMLIFENLSRGFGRQGKRTFMAERQYTRMEDWLTAKLAYEGLPSKTYLSKTLAQYTSKTCSNCGFTITSADYDRVLEKLKKTATGWMTTINGKELKVEGQITYYNRYKRQNVVKDLSVELDRLSEESVNNDISSWTKGRSGEALSLLKKRFSHRPVQEKFVCLNCGFETHADEQAALNIARSWLFLRSQEYKKYQTNKTTGNTDKRAFVETWQSFYRKKLKEVWKPAV

SEQ ID NO: 26159 - protein, 978 aa, synthetic construct
  REGION 1..978: note = engineered CasX variant
QEIKRINKIRRRLVKDSNTKKAGKTGPMKTLLVRVMTPDLRERLENLRKKPENIPQPISNTSRANLNKLLTDYTEMKKAILHVYWEEFQKDPVGLMSRVAQPASKKIDQNKLKPEMDEKGNLTTAGFACSQCGQPLFVYKLEQVSEKGKAYTNYFGRCNVAEHEKLILLAQLKPEKDSDEAVTYSLGKFGQRALDFYSIHVTKESTHPVKPLAQIAGNRYASGPVGKALSDACMGTIASFLSKYQDIIIEHQKVVKGNQKRLESLRELAGKENLEYPSVTLPPQPHTKEGVDAYNEVIARVRMWVNLNLWQKLKLSRDDAKPLLRLKGFPSFPLVERQANEVDWWDMVCNVKKLINEKKEDGKVFWQNLAGYKRQEALRPYLSSEEDRKKGKKFARYQLGDLLLHLEKKHGEDWGKVYDEAWERIDKKVEGLSKHIKLEEERRSEDAQSKAALTDWLRAKASFVIEGLKEADKDEFCRCELKLQKWYGDLRGKPFAIEAENSILDISGFSKQYNCAFIWQKDGVKKLNLYLIINYFKGGKLRFKKIKPEAFEANRFYTVINKKSGEIVPMEVNFNFDDPNLIILPLAFGKRQGREFIWNDLLSLETGSLKLANGRVIEKTLYNRRTRQDEPALFVALTFERREVLDSSNIKPMNLIGVDRGENIPAVIALTDPEGCPLSRFKDSLGNPTHILRIGESYKEYQRTIQAKKEVEQRRAGGYSRKYASKAKNLADDMVRNTARDLLYYAVTQDAMLIFENLSRGFGRQGKRTFMAERQYTRMEDWLTAKLAYEGLPSKTYLSKTLAQYTSKTCSNCGFTITSADYDRVLEKLKKTATGWMTTINGKELKVEGQITYYNRYKRQNVVKDLSVELDRLSEESVNNDISSWTKGRSGEALSLLKKRFSHRPVQEKFVCLNCGFETHADEQAALNIARSWLFLRSQEYKKYQTNKTTGNTDKRAFVETWQSFYRKKLKEVWKPAV

SEQ ID NO: 26160 - protein, 978 aa, synthetic construct
  REGION 1..978: note = engineered CasX variant
QEIKRINKIRRRLVKDSNTKKAGKTGPMKTLLVRVMTPDLRERLENLRKKPENIPQPISNTSRANLNKLLTDYTEMKKAILHVYWEEFQKDPVGLMSRVAQPASKKIDQNKLKPEMDEKGNLTTAGFACSQCGQPLFVYKLEQVSEKGKAYTNYFGRCNVAEHEKLILLAQLKPEKDSDEAVTYSLGKFGQRALDFYSIHVTKESTHPVKPLAQIAGNRYASGPVGKALSDACMGTIASFLSKYQDIIIEHQKVVKGNQKRLESLRELAGKENLEYPSVTLPPQPHTKEGVDAYNEVIARVRMWVNLNLWQKLKLSRDDAKPLLRLKGFPSFPLVERQANEVDWWDMVCNVKKLINEKKEDGKVFWQNLAGYKRQEALRPYLSSEEDRKKGKKFARYQLGDLLLHLEKKHGEDWGKVYDEAWERIDKKVEGLSKHIKLEEERRSEDAQSKAALTDWLRAKASFVIEGLKEADKDEFCRCELKLQKWYGDLRGKPFAIEAENSILDISGFSKQYNCAFIWQKDGVKKLNLYLIINYFKGGKLRFKKIKPEAFEANRFYTVINKKSGEIVPMEVNFNFDDPNLIILPLAFGKRQGREFIWNDLLSLETGSLKLANGRVIEKTLYNRRTRQDEPALFVALTFERREVLDSSNIKPMNLIGVDRGENIPAVIALTDPEGCPLSRFKDSLGNPTHILRIGESYKEWQRTIQAKKLVEQRRAGGYSRKYASKAKNLADDMVRNTARDLLYYAVTQDAMLIFENLSRGFGRQGKRTFMAERQYTRMEDWLTAKLAYEGLPSKTYLSKTLAQYTSKTCSNCGFTITSADYDRVLEKLKKTATGWMTTINGKELKVEGQITYYNRYKRQNVVKDLSVELDRLSEESVNNDISSWTKGRSGEALSLLKKRFSHRPVQEKFVCLNCGFETHADEQAALNIARSWLFLRSQEYKKYQTNKTTGNTDKRAFVETWQSFYRKKLKEVWKPAV

SEQ ID NO: 26161 - protein, 978 aa, synthetic construct
  REGION 1..978: note = engineered CasX variant
QEIKRINKIRRRLVKDSNTKKAGKTGPMKTLLVRVMTPDLRERLENLRKKPENIPQPISNTSRANLNKLLTDYTEMKKAILHVYWEEFQKDPVGLMSRVAQPASKKIDQNKLKPEMDEKGNLTTAGFACSQCGQPLFVYKLEQVSEKGKAYTNYFGRCNVAEHEKLILLAQLKPEKDSDEAVTYSLGKFGQRALDFYSIHVTKESTHPVKPLAQIAGNRYASGPVGKALSDACMGTIASFLSKYQDIIIEHQKVVKGNQKRLESLRELAGKENLEYPSVTLPPQPHTKEGVDAYNEVIARVRMWVNLNLWQKLKLSRDDAKPLLRLKGFPSFPLVERQANEVDWWDMVCNVKKLINEKKEDGKVFWQNLAGYKRQEALRPYLSSEEDRKKGKKFARYQLGDLLLHLEKKHGEDWGKVYDEAWERIDKKVEGLSKHIKLEEERRSEDAQSKAALTDWLRAKASFVIEGLKEADKDEFCRCELKLQKWYGDLRGKPFAIEAENSILDISGFSKQYNCAFIWQKDGVKKLNLYLIINYFKGGKLRFKKIKPEAFEANRFYTVINKKSGEIVPMEVNFNFDDPNLIILPLAFGKRQGREFIWNDLLSLETGSLKLANGRVIEKTLYNRRTRQDEPALFVALTFERREVLDSSNIKPMNLIGVDRGENIPAVIALTDPEGCPLSRFKDSLGNPTHILRIGESYKEWQRTIQAKKEVEQRRKGGYSRKYASKAKNLADDMVRNTARDLLYYAVTQDAMLIFENLSRGFGRQGKRTFMAERQYTRMEDWLTAKLAYEGLPSKTYLSKTLAQYTSKTCSNCGFTITSADYDRVLEKLKKTATGWMTTINGKELKVEGQITYYNRYKRQNVVKDLSVELDRLSEESVNNDISSWTKGRSGEALSLLKKRFSHRPVQEKFVCLNCGFETHADEQAALNIARSWLFLRSQEYKKYQTNKTTGNTDKRAFVETWQSFYRKKLKEVWKPAV

SEQ ID NO: 26162 - protein, 978 aa, synthetic construct
  REGION 1..978: note = engineered CasX variant
QEIKRINKIRRRLVKDSNTKKAGKTGPMKTLLVRVMTPDLRERLENLRKKPENIPQPISNTSRANLNKLLTDYTEMKKAILHVYWEEFQKDPVGLMSRVAQPASKKIDQNKLKPEMDEKGNLTTAGFACSQCGQPLFVYKLEQVSEKGKAYTNYFGRCNVAEHEKLILLAQLKPEKDSDEAVTYSLGKFGQRALDFYSIHVTKESTHPVKPLAQIAGNRYASGPVGKALSDACMGTIASFLSKYQDIIIEHQKVVKGNQKRLESLRELAGKENLEYPSVTLPPQPHTKEGVDAYNEVIARVRMWVNLNLWQKLKLSRDDAKPLLRLKGFPSFPLVERQANEVDWWDMVCNVKKLINEKKEDGKVFWQNLAGYKRQEALRPYLSSEEDRKKGKKFARYQLGDLLLHLEKKHGEDWGKVYDEAWERIDKKVEGLSKHIKLEEERRSEDAQSKAALTDWLRAKASFVIEGLKEADKDEFCRCELKLQKWYGDLRGKPFAIEAENSILDISGFSKQYNCAFIWQKDGVKKLNLYLIINYFKGGKLRFKKIKPEAFEANRFYTVINKKSGEIVPMEVNFNFDDPNLIILPLAFGKRQGREFIWNDLLSLETGSLKLANGRVIEKTLYNRRTRQDEPALFVALTFERREVLDSSNIKPMNLIGVDRGENIPAVIALTDPEGCPLSRFKDSLGNPTHILRIGESYKEWQRTIQAKKEVEQRRAGGYSRKYASKAKNLADDMVRNTARDLLYYAVTQDAMLIFENLSRGFGRQGKRTFMAERQYTRMEDWLTAKLAYEGLPSKTYLSKTLAQYTSKTCSNCGFTITSADYDRVLEKLKKTATGWMTTINGKELKVEGQITYYNRYKRQNVVKDLSVELDRLSEESVNNDISSWTKGRSGEALSLLKKRFSHRPVQEKFVCLNCGFETHADEQAALNIARSWLFLRSQEYKKYQTNKTTGNTDKRAFVETWQSFYRKKLKEVWKPAV

SEQ ID NO: 26163 - protein, 978 aa, synthetic construct
  REGION 1..978: note = engineered CasX variant
QEIKRINKIRRRLVKDSNTKKAGKTGPMKTLLVRVMTPDLRERLENLRKKPENIPQPISNTSRANLNKLLTDYTEMKKAILHVYWEEFQKDPVGLMSRVAQPASKKIDQNKLKPEMDEKGNLTTAGFACSQCGQPLFVYKLEQVSEKGKAYTNYFGRCNVAEHEKLILLAQLKPEKDSDEAVTYSLGKFGQRALDFYSIHVTKESTHPVKPLAQIAGNRYASGPVGKALSDACMGTIASFLSKYQDIIIEHQKVVKGNQKRLESLRELAGKENLEYPSVTLPPQPHTKEGVDAYNEVIARVRMWVNLNLWQKLKLSRDDAKPLLRLKGFPSFPLVERQANEVDWWDMVCNVKKLINEKKEDGKVFWQNLAGYKRQEALRPYLSSEEDRKKGKKFARYQLGDLLLHLEKKHGEDWGKVYDEAWERIDKKVEGLSKHIKLEEERRSEDAQSKAALTDWLRAKASFVIEGLKEADKDEFCRCELKLQKWYGDLRGKPFAIEAENSILDISGFSKQYNCAFIWQKDGVKKLNLYLIINYFKGGKLRFKKIKPEAFEANRFYTVINKKSGEIVPMEVNFNFDDPNLIILPLAFGKRQGREFIWNDLLSLETGSLKLANGRVIEKTLYNRRTRQDEPALFVALTFERREVLDSSNIKPMNLIGVDRGENIPAVIALTDPEGCPLSRFKDSLGNPTHILRIGESYKEVQRTIQAKKEVEQRRATGYSRKYASKAKNLADDMVRNTARDLLYYAVTQDAMLIFENLSRGFGRQGKRTFMAERQYTRMEDWLTAKLAYEGLPSKTYLSKTLAQYTSKTCSNCGFTITSADYDRVLEKLKKTATGWMTTINGKELKVEGQITYYNRYKRQNVVKDLSVELDRLSEESVNNDISSWTKGRSGEALSLLKKRFSHRPVQEKFVCLNCGFETHADEQAALNIARSWLFLRSQEYKKYQTNKTTGNTDKRAFVETWQSFYRKKLKEVWKPAV

SEQ ID NO: 26164 - protein, 978 aa, synthetic construct
  REGION 1..978: note = engineered CasX variant
QEIKRINKIRRRLVKDSNTKKAGKTGPMKTLLVRVMTPDLRERLENLRKKPENIPQPISNTSRANLNKLLTDYTEMKKAILHVYWEEFQKDPVGLMSRVAQPASKKIDQNKLKPEMDEKGNLTTAGFACSQCGQPLFVYKLEQVSEKGKAYTNYFGRCNVAEHEKLILLAQLKPEKDSDEAVTYSLGKFGQRALDFYSIHVTKESTHPVKPLAQIAGNRYASGPVGKALSDACMGTIASFLSKYQDIIIEHQKVVKGNQKRLESLRELAGKENLEYPSVTLPPQPHTKEGVDAYNEVIARVRMWVNLNLWQKLKLSRDDAKPLLRLKGFPSFPLVERQANEVDWWDMVCNVKKLINEKKEDGKVFWQNLAGYKRQEALRPYLSSEEDRKKGKKFARYQLGDLLLHLEKKHGEDWGKVYDEAWERIDKKVEGLSKHIKLEEERRSEDAQSKAALTDWLRAKASFVIEGLKEADKDEFCRCELKLQKWYGDLRGKPFAIEAENSILDISGFSKQYNCAFIWQKDGVKKLNLYLIINYFKGGKLRFKKIKPEAFEANRFYTVINKKSGEIVPMEVNFNFDDPNLIILPLAFGKRQGREFIWNDLLSLETGSLKLANGRVIEKTLYNRRTRQDEPALFVALTFERREVLDSSNIKPMNLIGVDRGENIPAVIALTDPEGCPLSRFKDSLGNPTHILRIGESYKEVQRTIQAKKEVEQRRAGGYSRKYASKAKNLADDMVRNTARDLLYYAVTQDAMLIFENLSRGFGRQGKRTFMAERQYTRMEDWLTAKLAYEGLPSKTYLSKTLAQYTSKTCSNCGFTITSADYDRVLEKLKKTATGWMTTINGKELKVEGQITYYNRYKRQNVVKDLSVELDRLSEESVNNDISSWTKGRSGEALSLLKKRFSHRPVQEKFVCLNCGFETHADEQAALNIARSWLFLRSQEYKKYQTNKTTGNTDKRAFVETWQSFYRKKLKEVWKPAV

SEQ ID NO: 26165 - protein, 978 aa, synthetic construct
  REGION 1..978: note = engineered CasX variant
QEIKRINKIRRRLVKDSNTKKAGKTGPMKTLLVRVMTPDLRERLENLRKKPENIPQPISNTSRANLNKLLTDYTEMKKAILHVYWEEFQKDPVGLMSRVAQPASKKIDQNKLKPEMDEKGNLTTAGFACSQCGQPLFVYKLEQVSEKGKAYTNYFGRCNVAEHEKLILLAQLKPEKDSDEAVTYSLGKFGQRALDFYSIHVTKESTHPVKPLAQIAGNRYASGPVGKALSDACMGTIASFLSKYQDIIIEHQKVVKGNQKRLESLRELAGKENLEYPSVTLPPQPHTKEGVDAYNEVIARVRMWVNLNLWQKLKLSRDDAKPLLRLKGFPSFPLVERQANEVDWWDMVCNVKKLINEKKEDGKVFWQNLAGYKRQEALRPYLSSEEDRKKGKKFARYQLGDLLLHLEKKHGEDWGKVYDEAWERIDKKVEGLSKHIKLEEERRSEDAQSKAALTDWLRAKASFVIEGLKEADKDEFCRCELKLQKWYGDLRGKPFAIEAENSILDISGFSKQYNCAFIWQKDGVKKLNLYLIINYFKGGKLRFKKIKPEAFEANRFYTVINKKSGEIVPMEVNFNFDDPNLIILPLAFGKRQGREFIWNDLLSLETGSLKLANGRVIEKTLYNRRTRQDEPALFVALTFERREVLDSSNIKPMNLIGVDRGENIPAVIALTDPEGCPLSRFKDSLGNPTHILRIGESYKETQRTIQAKKEVEQRRAGGYSRKYASKAKNLADDMVRNTARDLLYYAVTQDAMLIFENLSRGFGRQGKRTFMAERQYTRMEDWLTAKLAYEGLPSKTYLSKTLAQYTSKTCSNCGFTITSADYDRVLEKLKKTATGWMTTINGKELKVEGQITYYNRYKRQNVVKDLSVELDRLSEESVNNDISSWTKGRSGEALSLLKKRFSHRPVQEKFVCLNCGFETHADEQAALNIARSWLFLRSQEYKKYQTNKTTGNTDKRAFVETWQSFYRKKLKEVWKPAV

SEQ ID NO: 26166 - protein, 978 aa, synthetic construct
  REGION 1..978: note = engineered CasX variant
QEIKRINKIRRRLVKDSNTKKAGKTGPMKTLLVRVMTPDLRERLENLRKKPENIPQPISNTSRANLNKLLTDYTEMKKAILHVYWEEFQKDPVGLMSRVAQPASKKIDQNKLKPEMDEKGNLTTAGFACSQCGQPLFVYKLEQVSEKGKAYTNYFGRCNVAEHEKLILLAQLKPEKDSDEAVTYSLGKFGQRALDFYSIHVTKESTHPVKPLAQIAGNRYASGPVGKALSDACMGTIASFLSKYQDIIIEHQKVVKGNQKRLESLRELAGKENLEYPSVTLPPQPHTKEGVDAYNEVIARVRMWVNLNLWQKLKLSRDDAKPLLRLKGFPSFPLVERQANEVDWWDMVCNVKKLINEKKEDGKVFWQNLAGYKRQEALRPYLSSEEDRKKGKKFARYQLGDLLLHLEKKHGEDWGKVYDEAWERIDKKVEGLSKHIKLEEERRSEDAQSKAALTDWLRAKASFVIEGLKEADKDEFCRCELKLQKWYGDLRGKPFAIEAENSILDISGFSKQYNCAFIWQKDGVKKLNLYLIINYFKGGKLRFKKIKPEAFEANRFYTVINKKSGEIVPMEVNFNFDDPNLIILPLAFGKRQGREFIWNDLLSLETGSLKLANGRVIEKTLYNRRTRQDEPALFVALTFERREVLDSSNIKPMNLIGVDRGENIPAVIALTDPEGCPLSRFKDSLGNPTHILRIGESYKETQRTIQAKKEAEQRRAGGYSRKYASKAKNLADDMVRNTARDLLYYAVTQDAMLIFENLSRGFGRQGKRTFMAERQYTRMEDWLTAKLAYEGLPSKTYLSKTLAQYTSKTCSNCGFTITSADYDRVLEKLKKTATGWMTTINGKELKVEGQITYYNRYKRQNVVKDLSVELDRLSEESVNNDISSWTKGRSGEALSLLKKRFSHRPVQEKFVCLNCGFETHADEQAALNIARSWLFLRSQEYKKYQTNKTTGNTDKRAFVETWQSFYRKKLKEVWKPAV

SEQ ID NO: 26167 - protein, 978 aa, synthetic construct
  REGION 1..978: note = engineered CasX variant
QEIKRINKIRRRLVKDSNTKKAGKTGPMKTLLVRVMTPDLRERLENLRKKPENIPQPISNTSRANLNKLLTDYTEMKKAILHVYWEEFQKDPVGLMSRVAQPASKKIDQNKLKPEMDEKGNLTTAGFACSQCGQPLFVYKLEQVSEKGKAYTNYFGRCNVAEHEKLILLAQLKPEKDSDEAVTYSLGKFGQRALDFYSIHVTKESTHPVKPLAQIAGNRYASGPVGKALSDACMGTIASFLSKYQDIIIEHQKVVKGNQKRLESLRELAGKENLEYPSVTLPPQPHTKEGVDAYNEVIARVRMWVNLNLWQKLKLSRDDAKPLLRLKGFPSFPLVERQANEVDWWDMVCNVKKLINEKKEDGKVFWQNLAGYKRQEALRPYLSSEEDRKKGKKFARYQLGDLLLHLEKKHGEDWGKVYDEAWERIDKKVEGLSKHIKLEEERRSEDAQSKAALTDWLRAKASFVIEGLKEADKDEFCRCELKLQKWYGDLRGKPFAIEAENSILDISGFSKQYNCAFIWQKDGVKKLNLYLIINYFKGGKLRFKKIKPEAFEANRFYTVINKKSGEIVPMEVNFNFDDPNLIILPLAFGKRQGREFIWNDLLSLETGSLKLANGRVIEKTLYNRRTRQDEPALFVALTFERREVLDSSNIKPMNLIGVDRGENIPAVIALTDPEGCPLSRFKDSLGNPTHILRIGESYKESQRTIQAKKHVEQRRAGGYSRKYASKAKNLADDMVRNTARDLLYYAVTQDAMLIFENLSRGFGRQGKRTFMAERQYTRMEDWLTAKLAYEGLPSKTYLSKTLAQYTSKTCSNCGFTITSADYDRVLEKLKKTATGWMTTINGKELKVEGQITYYNRYKRQNVVKDLSVELDRLSEESVNNDISSWTKGRSGEALSLLKKRFSHRPVQEKFVCLNCGFETHADEQAALNIARSWLFLRSQEYKKYQTNKTTGNTDKRAFVETWQSFYRKKLKEVWKPAV

SEQ ID NO: 26168 - protein, 978 aa, synthetic construct
  REGION 1..978: note = engineered CasX variant
QEIKRINKIRRRLVKDSNTKKAGKTGPMKTLLVRVMTPDLRERLENLRKKPENIPQPISNTSRANLNKLLTDYTEMKKAILHVYWEEFQKDPVGLMSRVAQPASKKIDQNKLKPEMDEKGNLTTAGFACSQCGQPLFVYKLEQVSEKGKAYTNYFGRCNVAEHEKLILLAQLKPEKDSDEAVTYSLGKFGQRALDFYSIHVTKESTHPVKPLAQIAGNRYASGPVGKALSDACMGTIASFLSKYQDIIIEHQKVVKGNQKRLESLRELAGKENLEYPSVTLPPQPHTKEGVDAYNEVIARVRMWVNLNLWQKLKLSRDDAKPLLRLKGFPSFPLVERQANEVDWWDMVCNVKKLINEKKEDGKVFWQNLAGYKRQEALRPYLSSEEDRKKGKKFARYQLGDLLLHLEKKHGEDWGKVYDEAWERIDKKVEGLSKHIKLEEERRSEDAQSKAALTDWLRAKASFVIEGLKEADKDEFCRCELKLQKWYGDLRGKPFAIEAENSILDISGFSKQYNCAFIWQKDGVKKLNLYLIINYFKGGKLRFKKIKPEAFEANRFYTVINKKSGEIVPMEVNFNFDDPNLIILPLAFGKRQGREFIWNDLLSLETGSLKLANGRVIEKTLYNRRTRQDEPALFVALTFERREVLDSSNIKPMNLIGVDRGENIPAVIALTDPEGCPLSRFKDSLGNPTHILRIGESYKESQRTIQAKKEVEQRRAGGYSRKYASKAKNLADDMVRNTARDLLYYAVTQDAMLIFENLSRGFGRQGKRTFMAERQYTRMEDWLTAKLAYEGLPSKTYLSKTLAQYTSKTCSNCGFTITSADYDRVLEKLKKTATGWMTTINGKELKVEGQITYYNRYKRQNVVKDLSVELDRLSEESVNNDISSWTKGRSGEALSLLKKRFSHRPVQEKFVCLNCGFETHADEQAALNIARSWLFLRSQEYKKYQTNKTTGNTDKRAFVETWQSFYRKKLKEVWKPAV

SEQ ID NO: 26169 - protein, 978 aa, synthetic construct
  REGION 1..978: note = engineered CasX variant
QEIKRINKIRRRLVKDSNTKKAGKTGPMKTLLVRVMTPDLRERLENLRKKPENIPQPISNTSRANLNKLLTDYTEMKKAILHVYWEEFQKDPVGLMSRVAQPASKKIDQNKLKPEMDEKGNLTTAGFACSQCGQPLFVYKLEQVSEKGKAYTNYFGRCNVAEHEKLILLAQLKPEKDSDEAVTYSLGKFGQRALDFYSIHVTKESTHPVKPLAQIAGNRYASGPVGKALSDACMGTIASFLSKYQDIIIEHQKVVKGNQKRLESLRELAGKENLEYPSVTLPPQPHTKEGVDAYNEVIARVRMWVNLNLWQKLKLSRDDAKPLLRLKGFPSFPLVERQANEVDWWDMVCNVKKLINEKKEDGKVFWQNLAGYKRQEALRPYLSSEEDRKKGKKFARYQLGDLLLHLEKKHGEDWGKVYDEAWERIDKKVEGLSKHIKLEEERRSEDAQSKAALTDWLRAKASFVIEGLKEADKDEFCRCELKLQKWYGDLRGKPFAIEAENSILDISGFSKQYNCAFIWQKDGVKKLNLYLIINYFKGGKLRFKKIKPEAFEANRFYTVINKKSGEIVPMEVNFNFDDPNLIILPLAFGKRQGREFIWNDLLSLETGSLKLANGRVIEKTLYNRRTRQDEPALFVALTFERREVLDSSNIKPMNLIGVDRGENIPAVIALTDPEGCPLSRFKDSLGNPTHILRIGESYKERQRTIQAKKEVEQRRAGGYSRKYASKAKNLADDMVRNTARDLLYYAVTQDAMLIFENLSRGFGRQGKRTFMAERQYTRMEDWLTAKLAYEGLPSKTYLSKTLAQYTSKTCSNCGFTITSADYDRVLEKLKKTATGWMTTINGKELKVEGQITYYNRYKRQNVVKDLSVELDRLSEESVNNDISSWTKGRSGEALSLLKKRFSHRPVQEKFVCLNCGFETHADEQAALNIARSWLFLRSQEYKKYQTNKTTGNTDKRAFVETWQSFYRKKLKEVWKPAV

SEQ ID NO: 26170 - protein, 978 aa, synthetic construct
  REGION 1..978: note = engineered CasX variant
QEIKRINKIRRRLVKDSNTKKAGKTGPMKTLLVRVMTPDLRERLENLRKKPENIPQPISNTSRANLNKLLTDYTEMKKAILHVYWEEFQKDPVGLMSRVAQPASKKIDQNKLKPEMDEKGNLTTAGFACSQCGQPLFVYKLEQVSEKGKAYTNYFGRCNVAEHEKLILLAQLKPEKDSDEAVTYSLGKFGQRALDFYSIHVTKESTHPVKPLAQIAGNRYASGPVGKALSDACMGTIASFLSKYQDIIIEHQKVVKGNQKRLESLRELAGKENLEYPSVTLPPQPHTKEGVDAYNEVIARVRMWVNLNLWQKLKLSRDDAKPLLRLKGFPSFPLVERQANEVDWWDMVCNVKKLINEKKEDGKVFWQNLAGYKRQEALRPYLSSEEDRKKGKKFARYQLGDLLLHLEKKHGEDWGKVYDEAWERIDKKVEGLSKHIKLEEERRSEDAQSKAALTDWLRAKASFVIEGLKEADKDEFCRCELKLQKWYGDLRGKPFAIEAENSILDISGFSKQYNCAFIWQKDGVKKLNLYLIINYFKGGKLRFKKIKPEAFEANRFYTVINKKSGEIVPMEVNFNFDDPNLIILPLAFGKRQGREFIWNDLLSLETGSLKLANGRVIEKTLYNRRTRQDEPALFVALTFERREVLDSSNIKPMNLIGVDRGENIPAVIALTDPEGCPLSRFKDSLGNPTHILRIGESYKERQRTIQAFKEVEQRRAGGYSRKYASKAKNLADDMVRNTARDLLYYAVTQDAMLIFENLSRGFGRQGKRTFMAERQYTRMEDWLTAKLAYEGLPSKTYLSKTLAQYTSKTCSNCGFTITSADYDRVLEKLKKTATGWMTTINGKELKVEGQITYYNRYKRQNVVKDLSVELDRLSEESVNNDISSWTKGRSGEALSLLKKRFSHRPVQEKFVCLNCGFETHADEQAALNIARSWLFLRSQEYKKYQTNKTTGNTDKRAFVETWQSFYRKKLKEVWKPAV

SEQ ID NO: 26171 - protein, 978 aa, synthetic construct
  REGION 1..978: note = engineered CasX variant
QEIKRINKIRRRLVKDSNTKKAGKTGPMKTLLVRVMTPDLRERLENLRKKPENIPQPISNTSRANLNKLLTDYTEMKKAILHVYWEEFQKDPVGLMSRVAQPASKKIDQNKLKPEMDEKGNLTTAGFACSQCGQPLFVYKLEQVSEKGKAYTNYFGRCNVAEHEKLILLAQLKPEKDSDEAVTYSLGKFGQRALDFYSIHVTKESTHPVKPLAQIAGNRYASGPVGKALSDACMGTIASFLSKYQDIIIEHQKVVKGNQKRLESLRELAGKENLEYPSVTLPPQPHTKEGVDAYNEVIARVRMWVNLNLWQKLKLSRDDAKPLLRLKGFPSFPLVERQANEVDWWDMVCNVKKLINEKKEDGKVFWQNLAGYKRQEALRPYLSSEEDRKKGKKFARYQLGDLLLHLEKKHGEDWGKVYDEAWERIDKKVEGLSKHIKLEEERRSEDAQSKAALTDWLRAKASFVIEGLKEADKDEFCRCELKLQKWYGDLRGKPFAIEAENSILDISGFSKQYNCAFIWQKDGVKKLNLYLIINYFKGGKLRFKKIKPEAFEANRFYTVINKKSGEIVPMEVNFNFDDPNLIILPLAFGKRQGREFIWNDLLSLETGSLKLANGRVIEKTLYNRRTRQDEPALFVALTFERREVLDSSNIKPMNLIGVDRGENIPAVIALTDPEGCPLSRFKDSLGNPTHILRIGESYKEQQRTIQAKKEVEQRRAGGYSRKYASKAKNLADDMVRNTARDLLYYAVTQDAMLIFENLSRGFGRQGKRTFMAERQYTRMEDWLTAKLAYEGLPSKTYLSKTLAQYTSKTCSNCGFTITSADYDRVLEKLKKTATGWMTTINGKELKVEGQITYYNRYKRQNVVKDLSVELDRLSEESVNNDISSWTKGRSGEALSLLKKRFSHRPVQEKFVCLNCGFETHADEQAALNIARSWLFLRSQEYKKYQTNKTTGNTDKRAFVETWQSFYRKKLKEVWKPAV

SEQ ID NO: 26172 - protein, 978 aa, synthetic construct
  REGION 1..978: note = engineered CasX variant
QEIKRINKIRRRLVKDSNTKKAGKTGPMKTLLVRVMTPDLRERLENLRKKPENIPQPISNTSRANLNKLLTDYTEMKKAILHVYWEEFQKDPVGLMSRVAQPASKKIDQNKLKPEMDEKGNLTTAGFACSQCGQPLFVYKLEQVSEKGKAYTNYFGRCNVAEHEKLILLAQLKPEKDSDEAVTYSLGKFGQRALDFYSIHVTKESTHPVKPLAQIAGNRYASGPVGKALSDACMGTIASFLSKYQDIIIEHQKVVKGNQKRLESLRELAGKENLEYPSVTLPPQPHTKEGVDAYNEVIARVRMWVNLNLWQKLKLSRDDAKPLLRLKGFPSFPLVERQANEVDWWDMVCNVKKLINEKKEDGKVFWQNLAGYKRQEALRPYLSSEEDRKKGKKFARYQLGDLLLHLEKKHGEDWGKVYDEAWERIDKKVEGLSKHIKLEEERRSEDAQSKAALTDWLRAKASFVIEGLKEADKDEFCRCELKLQKWYGDLRGKPFAIEAENSILDISGFSKQYNCAFIWQKDGVKKLNLYLIINYFKGGKLRFKKIKPEAFEANRFYTVINKKSGEIVPMEVNFNFDDPNLIILPLAFGKRQGREFIWNDLLSLETGSLKLANGRVIEKTLYNRRTRQDEPALFVALTFERREVLDSSNIKPMNLIGVDRGENIPAVIALTDPEGCPLSRFKDSLGNPTHILRIGESYKEQQRTIQAKKEVEMRRAGGYSRKYASKAKNLADDMVRNTARDLLYYAVTQDAMLIFENLSRGFGRQGKRTFMAERQYTRMEDWLTAKLAYEGLPSKTYLSKTLAQYTSKTCSNCGFTITSADYDRVLEKLKKTATGWMTTINGKELKVEGQITYYNRYKRQNVVKDLSVELDRLSEESVNNDISSWTKGRSGEALSLLKKRFSHRPVQEKFVCLNCGFETHADEQAALNIARSWLFLRSQEYKKYQTNKTTGNTDKRAFVETWQSFYRKKLKEVWKPAV

SEQ ID NO: 26173 - protein, 978 aa, synthetic construct
  REGION 1..978: note = engineered CasX variant
QEIKRINKIRRRLVKDSNTKKAGKTGPMKTLLVRVMTPDLRERLENLRKKPENIPQPISNTSRANLNKLLTDYTEMKKAILHVYWEEFQKDPVGLMSRVAQPASKKIDQNKLKPEMDEKGNLTTAGFACSQCGQPLFVYKLEQVSEKGKAYTNYFGRCNVAEHEKLILLAQLKPEKDSDEAVTYSLGKFGQRALDFYSIHVTKESTHPVKPLAQIAGNRYASGPVGKALSDACMGTIASFLSKYQDIIIEHQKVVKGNQKRLESLRELAGKENLEYPSVTLPPQPHTKEGVDAYNEVIARVRMWVNLNLWQKLKLSRDDAKPLLRLKGFPSFPLVERQANEVDWWDMVCNVKKLINEKKEDGKVFWQNLAGYKRQEALRPYLSSEEDRKKGKKFARYQLGDLLLHLEKKHGEDWGKVYDEAWERIDKKVEGLSKHIKLEEERRSEDAQSKAALTDWLRAKASFVIEGLKEADKDEFCRCELKLQKWYGDLRGKPFAIEAENSILDISGFSKQYNCAFIWQKDGVKKLNLYLIINYFKGGKLRFKKIKPEAFEANRFYTVINKKSGEIVPMEVNFNFDDPNLIILPLAFGKRQGREFIWNDLLSLETGSLKLANGRVIEKTLYNRRTRQDEPALFVALTFERREVLDSSNIKPMNLIGVDRGENIPAVIALTDPEGCPLSRFKDSLGNPTHILRIGESYKEQQRTIQAKKEREQRRAGGYSRKYASKAKNLADDMVRNTARDLLYYAVTQDAMLIFENLSRGFGRQGKRTFMAERQYTRMEDWLTAKLAYEGLPSKTYLSKTLAQYTSKTCSNCGFTITSADYDRVLEKLKKTATGWMTTINGKELKVEGQITYYNRYKRQNVVKDLSVELDRLSEESVNNDISSWTKGRSGEALSLLKKRFSHRPVQEKFVCLNCGFETHADEQAALNIARSWLFLRSQEYKKYQTNKTTGNTDKRAFVETWQSFYRKKLKEVWKPAV

SEQ ID NO: 26174 - protein, 978 aa, synthetic construct
  REGION 1..978: note = engineered CasX variant
QEIKRINKIRRRLVKDSNTKKAGKTGPMKTLLVRVMTPDLRERLENLRKKPENIPQPISNTSRANLNKLLTDYTEMKKAILHVYWEEFQKDPVGLMSRVAQPASKKIDQNKLKPEMDEKGNLTTAGFACSQCGQPLFVYKLEQVSEKGKAYTNYFGRCNVAEHEKLILLAQLKPEKDSDEAVTYSLGKFGQRALDFYSIHVTKESTHPVKPLAQIAGNRYASGPVGKALSDACMGTIASFLSKYQDIIIEHQKVVKGNQKRLESLRELAGKENLEYPSVTLPPQPHTKEGVDAYNEVIARVRMWVNLNLWQKLKLSRDDAKPLLRLKGFPSFPLVERQANEVDWWDMVCNVKKLINEKKEDGKVFWQNLAGYKRQEALRPYLSSEEDRKKGKKFARYQLGDLLLHLEKKHGEDWGKVYDEAWERIDKKVEGLSKHIKLEEERRSEDAQSKAALTDWLRAKASFVIEGLKEADKDEFCRCELKLQKWYGDLRGKPFAIEAENSILDISGFSKQYNCAFIWQKDGVKKLNLYLIINYFKGGKLRFKKIKPEAFEANRFYTVINKKSGEIVPMEVNFNFDDPNLIILPLAFGKRQGREFIWNDLLSLETGSLKLANGRVIEKTLYNRRTRQDEPALFVALTFERREVLDSSNIKPMNLIGVDRGENIPAVIALTDPEGCPLSRFKDSLGNPTHILRIGESYKEQQRTFQAKKEVEQRRAGGYSRKYASKAKNLADDMVRNTARDLLYYAVTQDAMLIFENLSRGFGRQGKRTFMAERQYTRMEDWLTAKLAYEGLPSKTYLSKTLAQYTSKTCSNCGFTITSADYDRVLEKLKKTATGWMTTINGKELKVEGQITYYNRYKRQNVVKDLSVELDRLSEESVNNDISSWTKGRSGEALSLLKKRFSHRPVQEKFVCLNCGFETHADEQAALNIARSWLFLRSQEYKKYQTNKTTGNTDKRAFVETWQSFYRKKLKEVWKPAV

SEQ ID NO: 26175 - protein, 978 aa, synthetic construct
  REGION 1..978: note = engineered CasX variant
QEIKRINKIRRRLVKDSNTKKAGKTGPMKTLLVRVMTPDLRERLENLRKKPENIPQPISNTSRANLNKLLTDYTEMKKAILHVYWEEFQKDPVGLMSRVAQPASKKIDQNKLKPEMDEKGNLTTAGFACSQCGQPLFVYKLEQVSEKGKAYTNYFGRCNVAEHEKLILLAQLKPEKDSDEAVTYSLGKFGQRALDFYSIHVTKESTHPVKPLAQIAGNRYASGPVGKALSDACMGTIASFLSKYQDIIIEHQKVVKGNQKRLESLRELAGKENLEYPSVTLPPQPHTKEGVDAYNEVIARVRMWVNLNLWQKLKLSRDDAKPLLRLKGFPSFPLVERQANEVDWWDMVCNVKKLINEKKEDGKVFWQNLAGYKRQEALRPYLSSEEDRKKGKKFARYQLGDLLLHLEKKHGEDWGKVYDEAWERIDKKVEGLSKHIKLEEERRSEDAQSKAALTDWLRAKASFVIEGLKEADKDEFCRCELKLQKWYGDLRGKPFAIEAENSILDISGFSKQYNCAFIWQKDGVKKLNLYLIINYFKGGKLRFKKIKPEAFEANRFYTVINKKSGEIVPMEVNFNFDDPNLIILPLAFGKRQGREFIWNDLLSLETGSLKLANGRVIEKTLYNRRTRQDEPALFVALTFERREVLDSSNIKPMNLIGVDRGENIPAVIALTDPEGCPLSRFKDSLGNPTHILRIGESYKEQQRIIQAKKEVEQRRAGGYSRKYASKAKNLADDMVRNTARDLLYYAVTQDAMLIFENLSRGFGRQGKRTFMAERQYTRMEDWLTAKLAYEGLPSKTYLSKTLAQYTSKTCSNCGFTITSADYDRVLEKLKKTATGWMTTINGKELKVEGQITYYNRYKRQNVVKDLSVELDRLSEESVNNDISSWTKGRSGEALSLLKKRFSHRPVQEKFVCLNCGFETHADEQAALNIARSWLFLRSQEYKKYQTNKTTGNTDKRAFVETWQSFYRKKLKEVWKPAV

SEQ ID NO: 26176 - protein, 978 aa, synthetic construct
  REGION 1..978: note = engineered CasX variant
QEIKRINKIRRRLVKDSNTKKAGKTGPMKTLLVRVMTPDLRERLENLRKKPENIPQPISNTSRANLNKLLTDYTEMKKAILHVYWEEFQKDPVGLMSRVAQPASKKIDQNKLKPEMDEKGNLTTAGFACSQCGQPLFVYKLEQVSEKGKAYTNYFGRCNVAEHEKLILLAQLKPEKDSDEAVTYSLGKFGQRALDFYSIHVTKESTHPVKPLAQIAGNRYASGPVGKALSDACMGTIASFLSKYQDIIIEHQKVVKGNQKRLESLRELAGKENLEYPSVTLPPQPHTKEGVDAYNEVIARVRMWVNLNLWQKLKLSRDDAKPLLRLKGFPSFPLVERQANEVDWWDMVCNVKKLINEKKEDGKVFWQNLAGYKRQEALRPYLSSEEDRKKGKKFARYQLGDLLLHLEKKHGEDWGKVYDEAWERIDKKVEGLSKHIKLEEERRSEDAQSKAALTDWLRAKASFVIEGLKEADKDEFCRCELKLQKWYGDLRGKPFAIEAENSILDISGFSKQYNCAFIWQKDGVKKLNLYLIINYFKGGKLRFKKIKPEAFEANRFYTVINKKSGEIVPMEVNFNFDDPNLIILPLAFGKRQGREFIWNDLLSLETGSLKLANGRVIEKTLYNRRTRQDEPALFVALTFERREVLDSSNIKPMNLIGVDRGENIPAVIALTDPEGCPLSRFKDSLGNPTHILRIGESYKENQRTIQAKKEVEQRRAGGYSRKYASKAKNLADDMVRNTARDLLYYAVTQDAMLIFENLSRGFGRQGKRTFMAERQYTRMEDWLTAKLAYEGLPSKTYLSKTLAQYTSKTCSNCGFTITSADYDRVLEKLKKTATGWMTTINGKELKVEGQITYYNRYKRQNVVKDLSVELDRLSEESVNNDISSWTKGRSGEALSLLKKRFSHRPVQEKFVCLNCGFETHADEQAALNIARSWLFLRSQEYKKYQTNKTTGNTDKRAFVETWQSFYRKKLKEVWKPAV

SEQ ID NO: 26177 - protein, 978 aa, synthetic construct
  REGION 1..978: note = engineered CasX variant
QEIKRINKIRRRLVKDSNTKKAGKTGPMKTLLVRVMTPDLRERLENLRKKPENIPQPISNTSRANLNKLLTDYTEMKKAILHVYWEEFQKDPVGLMSRVAQPASKKIDQNKLKPEMDEKGNLTTAGFACSQCGQPLFVYKLEQVSEKGKAYTNYFGRCNVAEHEKLILLAQLKPEKDSDEAVTYSLGKFGQRALDFYSIHVTKESTHPVKPLAQIAGNRYASGPVGKALSDACMGTIASFLSKYQDIIIEHQKVVKGNQKRLESLRELAGKENLEYPSVTLPPQPHTKEGVDAYNEVIARVRMWVNLNLWQKLKLSRDDAKPLLRLKGFPSFPLVERQANEVDWWDMVCNVKKLINEKKEDGKVFWQNLAGYKRQEALRPYLSSEEDRKKGKKFARYQLGDLLLHLEKKHGEDWGKVYDEAWERIDKKVEGLSKHIKLEEERRSEDAQSKAALTDWLRAKASFVIEGLKEADKDEFCRCELKLQKWYGDLRGKPFAIEAENSILDISGFSKQYNCAFIWQKDGVKKLNLYLIINYFKGGKLRFKKIKPEAFEANRFYTVINKKSGEIVPMEVNFNFDDPNLIILPLAFGKRQGREFIWNDLLSLETGSLKLANGRVIEKTLYNRRTRQDEPALFVALTFERREVLDSSNIKPMNLIGVDRGENIPAVIALTDPEGCPLSRFKDSLGNPTHILRIGESYKENQQTIQAKKEVEQRRAGGYSRKYASKAKNLADDMVRNTARDLLYYAVTQDAMLIFENLSRGFGRQGKRTFMAERQYTRMEDWLTAKLAYEGLPSKTYLSKTLAQYTSKTCSNCGFTITSADYDRVLEKLKKTATGWMTTINGKELKVEGQITYYNRYKRQNVVKDLSVELDRLSEESVNNDISSWTKGRSGEALSLLKKRFSHRPVQEKFVCLNCGFETHADEQAALNIARSWLFLRSQEYKKYQTNKTTGNTDKRAFVETWQSFYRKKLKEVWKPAV

SEQ ID NO: 26178 - protein, 978 aa, synthetic construct
  REGION 1..978: note = engineered CasX variant
QEIKRINKIRRRLVKDSNTKKAGKTGPMKTLLVRVMTPDLRERLENLRKKPENIPQPISNTSRANLNKLLTDYTEMKKAILHVYWEEFQKDPVGLMSRVAQPASKKIDQNKLKPEMDEKGNLTTAGFACSQCGQPLFVYKLEQVSEKGKAYTNYFGRCNVAEHEKLILLAQLKPEKDSDEAVTYSLGKFGQRALDFYSIHVTKESTHPVKPLAQIAGNRYASGPVGKALSDACMGTIASFLSKYQDIIIEHQKVVKGNQKRLESLRELAGKENLEYPSVTLPPQPHTKEGVDAYNEVIARVRMWVNLNLWQKLKLSRDDAKPLLRLKGFPSFPLVERQANEVDWWDMVCNVKKLINEKKEDGKVFWQNLAGYKRQEALRPYLSSEEDRKKGKKFARYQLGDLLLHLEKKHGEDWGKVYDEAWERIDKKVEGLSKHIKLEEERRSEDAQSKAALTDWLRAKASFVIEGLKEADKDEFCRCELKLQKWYGDLRGKPFAIEAENSILDISGFSKQYNCAFIWQKDGVKKLNLYLIINYFKGGKLRFKKIKPEAFEANRFYTVINKKSGEIVPMEVNFNFDDPNLIILPLAFGKRQGREFIWNDLLSLETGSLKLANGRVIEKTLYNRRTRQDEPALFVALTFERREVLDSSNIKPMNLIGVDRGENIPAVIALTDPEGCPLSRFKDSLGNPTHILRIGESYKEMQRTIQAKKEVEQRSAGGYSRKYASKAKNLADDMVRNTARDLLYYAVTQDAMLIFENLSRGFGRQGKRTFMAERQYTRMEDWLTAKLAYEGLPSKTYLSKTLAQYTSKTCSNCGFTITSADYDRVLEKLKKTATGWMTTINGKELKVEGQITYYNRYKRQNVVKDLSVELDRLSEESVNNDISSWTKGRSGEALSLLKKRFSHRPVQEKFVCLNCGFETHADEQAALNIARSWLFLRSQEYKKYQTNKTTGNTDKRAFVETWQSFYRKKLKEVWKPAV

SEQ ID NO: 26179 - protein, 978 aa, synthetic construct
  REGION 1..978: note = engineered CasX variant
QEIKRINKIRRRLVKDSNTKKAGKTGPMKTLLVRVMTPDLRERLENLRKKPENIPQPISNTSRANLNKLLTDYTEMKKAILHVYWEEFQKDPVGLMSRVAQPASKKIDQNKLKPEMDEKGNLTTAGFACSQCGQPLFVYKLEQVSEKGKAYTNYFGRCNVAEHEKLILLAQLKPEKDSDEAVTYSLGKFGQRALDFYSIHVTKESTHPVKPLAQIAGNRYASGPVGKALSDACMGTIASFLSKYQDIIIEHQKVVKGNQKRLESLRELAGKENLEYPSVTLPPQPHTKEGVDAYNEVIARVRMWVNLNLWQKLKLSRDDAKPLLRLKGFPSFPLVERQANEVDWWDMVCNVKKLINEKKEDGKVFWQNLAGYKRQEALRPYLSSEEDRKKGKKFARYQLGDLLLHLEKKHGEDWGKVYDEAWERIDKKVEGLSKHIKLEEERRSEDAQSKAALTDWLRAKASFVIEGLKEADKDEFCRCELKLQKWYGDLRGKPFAIEAENSILDISGFSKQYNCAFIWQKDGVKKLNLYLIINYFKGGKLRFKKIKPEAFEANRFYTVINKKSGEIVPMEVNFNFDDPNLIILPLAFGKRQGREFIWNDLLSLETGSLKLANGRVIEKTLYNRRTRQDEPALFVALTFERREVLDSSNIKPMNLIGVDRGENIPAVIALTDPEGCPLSRFKDSLGNPTHILRIGESYKEMQRTIQAKKEVEQRRAGGYSRKYASKAKNLADDMVRNTARDLLYYAVTQDAMLIFENLSRGFGRQGKRTFMAERQYTRMEDWLTAKLAYEGLPSKTYLSKTLAQYTSKTCSNCGFTITSADYDRVLEKLKKTATGWMTTINGKELKVEGQITYYNRYKRQNVVKDLSVELDRLSEESVNNDISSWTKGRSGEALSLLKKRFSHRPVQEKFVCLNCGFETHADEQAALNIARSWLFLRSQEYKKYQTNKTTGNTDKRAFVETWQSFYRKKLKEVWKPAV

SEQ ID NO: 26180 - protein, 978 aa, synthetic construct
  REGION 1..978: note = engineered CasX variant
QEIKRINKIRRRLVKDSNTKKAGKTGPMKTLLVRVMTPDLRERLENLRKKPENIPQPISNTSRANLNKLLTDYTEMKKAILHVYWEEFQKDPVGLMSRVAQPASKKIDQNKLKPEMDEKGNLTTAGFACSQCGQPLFVYKLEQVSEKGKAYTNYFGRCNVAEHEKLILLAQLKPEKDSDEAVTYSLGKFGQRALDFYSIHVTKESTHPVKPLAQIAGNRYASGPVGKALSDACMGTIASFLSKYQDIIIEHQKVVKGNQKRLESLRELAGKENLEYPSVTLPPQPHTKEGVDAYNEVIARVRMWVNLNLWQKLKLSRDDAKPLLRLKGFPSFPLVERQANEVDWWDMVCNVKKLINEKKEDGKVFWQNLAGYKRQEALRPYLSSEEDRKKGKKFARYQLGDLLLHLEKKHGEDWGKVYDEAWERIDKKVEGLSKHIKLEEERRSEDAQSKAALTDWLRAKASFVIEGLKEADKDEFCRCELKLQKWYGDLRGKPFAIEAENSILDISGFSKQYNCAFIWQKDGVKKLNLYLIINYFKGGKLRFKKIKPEAFEANRFYTVINKKSGEIVPMEVNFNFDDPNLIILPLAFGKRQGREFIWNDLLSLETGSLKLANGRVIEKTLYNRRTRQDEPALFVALTFERREVLDSSNIKPMNLIGVDRGENIPAVIALTDPEGCPLSRFKDSLGNPTHILRIGESYKELQRTIQAKKEVEQRRAGGYSRKYASKAKNLADDMVRNTARDLLYYAVTQDAMLIFENLSRGFGRQGKRTFMAERQYTRMEDWLTAKLAYEGLPSKTYLSKTLAQYTSKTCSNCGFTITSADYDRVLEKLKKTATGWMTTINGKELKVEGQITYYNRYKRQNVVKDLSVELDRLSEESVNNDISSWTKGRSGEALSLLKKRFSHRPVQEKFVCLNCGFETHADEQAALNIARSWLFLRSQEYKKYQTNKTTGNTDKRAFVETWQSFYRKKLKEVWKPAV

SEQ ID NO: 26181 - protein, 978 aa, synthetic construct
  REGION 1..978: note = engineered CasX variant
QEIKRINKIRRRLVKDSNTKKAGKTGPMKTLLVRVMTPDLRERLENLRKKPENIPQPISNTSRANLNKLLTDYTEMKKAILHVYWEEFQKDPVGLMSRVAQPASKKIDQNKLKPEMDEKGNLTTAGFACSQCGQPLFVYKLEQVSEKGKAYTNYFGRCNVAEHEKLILLAQLKPEKDSDEAVTYSLGKFGQRALDFYSIHVTKESTHPVKPLAQIAGNRYASGPVGKALSDACMGTIASFLSKYQDIIIEHQKVVKGNQKRLESLRELAGKENLEYPSVTLPPQPHTKEGVDAYNEVIARVRMWVNLNLWQKLKLSRDDAKPLLRLKGFPSFPLVERQANEVDWWDMVCNVKKLINEKKEDGKVFWQNLAGYKRQEALRPYLSSEEDRKKGKKFARYQLGDLLLHLEKKHGEDWGKVYDEAWERIDKKVEGLSKHIKLEEERRSEDAQSKAALTDWLRAKASFVIEGLKEADKDEFCRCELKLQKWYGDLRGKPFAIEAENSILDISGFSKQYNCAFIWQKDGVKKLNLYLIINYFKGGKLRFKKIKPEAFEANRFYTVINKKSGEIVPMEVNFNFDDPNLIILPLAFGKRQGREFIWNDLLSLETGSLKLANGRVIEKTLYNRRTRQDEPALFVALTFERREVLDSSNIKPMNLIGVDRGENIPAVIALTDPEGCPLSRFKDSLGNPTHILRIGESYKELQRTIQAKKEVEQIRAGGYSRKYASKAKNLADDMVRNTARDLLYYAVTQDAMLIFENLSRGFGRQGKRTFMAERQYTRMEDWLTAKLAYEGLPSKTYLSKTLAQYTSKTCSNCGFTITSADYDRVLEKLKKTATGWMTTINGKELKVEGQITYYNRYKRQNVVKDLSVELDRLSEESVNNDISSWTKGRSGEALSLLKKRFSHRPVQEKFVCLNCGFETHADEQAALNIARSWLFLRSQEYKKYQTNKTTGNTDKRAFVETWQSFYRKKLKEVWKPAV

SEQ ID NO: 26182 - protein, 978 aa, synthetic construct
  REGION 1..978: note = engineered CasX variant
QEIKRINKIRRRLVKDSNTKKAGKTGPMKTLLVRVMTPDLRERLENLRKKPENIPQPISNTSRANLNKLLTDYTEMKKAILHVYWEEFQKDPVGLMSRVAQPASKKIDQNKLKPEMDEKGNLTTAGFACSQCGQPLFVYKLEQVSEKGKAYTNYFGRCNVAEHEKLILLAQLKPEKDSDEAVTYSLGKFGQRALDFYSIHVTKESTHPVKPLAQIAGNRYASGPVGKALSDACMGTIASFLSKYQDIIIEHQKVVKGNQKRLESLRELAGKENLEYPSVTLPPQPHTKEGVDAYNEVIARVRMWVNLNLWQKLKLSRDDAKPLLRLKGFPSFPLVERQANEVDWWDMVCNVKKLINEKKEDGKVFWQNLAGYKRQEALRPYLSSEEDRKKGKKFARYQLGDLLLHLEKKHGEDWGKVYDEAWERIDKKVEGLSKHIKLEEERRSEDAQSKAALTDWLRAKASFVIEGLKEADKDEFCRCELKLQKWYGDLRGKPFAIEAENSILDISGFSKQYNCAFIWQKDGVKKLNLYLIINYFKGGKLRFKKIKPEAFEANRFYTVINKKSGEIVPMEVNFNFDDPNLIILPLAFGKRQGREFIWNDLLSLETGSLKLANGRVIEKTLYNRRTRQDEPALFVALTFERREVLDSSNIKPMNLIGVDRGENIPAVIALTDPEGCPLSRFKDSLGNPTHILRIGESYKEKYRTIQAKKEVEQRRAGGYSRKYASKAKNLADDMVRNTARDLLYYAVTQDAMLIFENLSRGFGRQGKRTFMAERQYTRMEDWLTAKLAYEGLPSKTYLSKTLAQYTSKTCSNCGFTITSADYDRVLEKLKKTATGWMTTINGKELKVEGQITYYNRYKRQNVVKDLSVELDRLSEESVNNDISSWTKGRSGEALSLLKKRFSHRPVQEKFVCLNCGFETHADEQAALNIARSWLFLRSQEYKKYQTNKTTGNTDKRAFVETWQSFYRKKLKEVWKPAV

SEQ ID NO: 26183 - protein, 978 aa, synthetic construct
  REGION 1..978: note = engineered CasX variant
QEIKRINKIRRRLVKDSNTKKAGKTGPMKTLLVRVMTPDLRERLENLRKKPENIPQPISNTSRANLNKLLTDYTEMKKAILHVYWEEFQKDPVGLMSRVAQPASKKIDQNKLKPEMDEKGNLTTAGFACSQCGQPLFVYKLEQVSEKGKAYTNYFGRCNVAEHEKLILLAQLKPEKDSDEAVTYSLGKFGQRALDFYSIHVTKESTHPVKPLAQIAGNRYASGPVGKALSDACMGTIASFLSKYQDIIIEHQKVVKGNQKRLESLRELAGKENLEYPSVTLPPQPHTKEGVDAYNEVIARVRMWVNLNLWQKLKLSRDDAKPLLRLKGFPSFPLVERQANEVDWWDMVCNVKKLINEKKEDGKVFWQNLAGYKRQEALRPYLSSEEDRKKGKKFARYQLGDLLLHLEKKHGEDWGKVYDEAWERIDKKVEGLSKHIKLEEERRSEDAQSKAALTDWLRAKASFVIEGLKEADKDEFCRCELKLQKWYGDLRGKPFAIEAENSILDISGFSKQYNCAFIWQKDGVKKLNLYLIINYFKGGKLRFKKIKPEAFEANRFYTVINKKSGEIVPMEVNFNFDDPNLIILPLAFGKRQGREFIWNDLLSLETGSLKLANGRVIEKTLYNRRTRQDEPALFVALTFERREVLDSSNIKPMNLIGVDRGENIPAVIALTDPEGCPLSRFKDSLGNPTHILRIGESYKEKWRTIQAKKEVEQRRAGGYSRKYASKAKNLADDMVRNTARDLLYYAVTQDAMLIFENLSRGFGRQGKRTFMAERQYTRMEDWLTAKLAYEGLPSKTYLSKTLAQYTSKTCSNCGFTITSADYDRVLEKLKKTATGWMTTINGKELKVEGQITYYNRYKRQNVVKDLSVELDRLSEESVNNDISSWTKGRSGEALSLLKKRFSHRPVQEKFVCLNCGFETHADEQAALNIARSWLFLRSQEYKKYQTNKTTGNTDKRAFVETWQSFYRKKLKEVWKPAV

SEQ ID NO: 26184 - protein, 978 aa, synthetic construct
  REGION 1..978: note = engineered CasX variant
QEIKRINKIRRRLVKDSNTKKAGKTGPMKTLLVRVMTPDLRERLENLRKKPENIPQPISNTSRANLNKLLTDYTEMKKAILHVYWEEFQKDPVGLMSRVAQPASKKIDQNKLKPEMDEKGNLTTAGFACSQCGQPLFVYKLEQVSEKGKAYTNYFGRCNVAEHEKLILLAQLKPEKDSDEAVTYSLGKFGQRALDFYSIHVTKESTHPVKPLAQIAGNRYASGPVGKALSDACMGTIASFLSKYQDIIIEHQKVVKGNQKRLESLRELAGKENLEYPSVTLPPQPHTKEGVDAYNEVIARVRMWVNLNLWQKLKLSRDDAKPLLRLKGFPSFPLVERQANEVDWWDMVCNVKKLINEKKEDGKVFWQNLAGYKRQEALRPYLSSEEDRKKGKKFARYQLGDLLLHLEKKHGEDWGKVYDEAWERIDKKVEGLSKHIKLEEERRSEDAQSKAALTDWLRAKASFVIEGLKEADKDEFCRCELKLQKWYGDLRGKPFAIEAENSILDISGFSKQYNCAFIWQKDGVKKLNLYLIINYFKGGKLRFKKIKPEAFEANRFYTVINKKSGEIVPMEVNFNFDDPNLIILPLAFGKRQGREFIWNDLLSLETGSLKLANGRVIEKTLYNRRTRQDEPALFVALTFERREVLDSSNIKPMNLIGVDRGENIPAVIALTDPEGCPLSRFKDSLGNPTHILRIGESYKEKTRTIQAKKEVEQRRMGGYSRKYASKAKNLADDMVRNTARDLLYYAVTQDAMLIFENLSRGFGRQGKRTFMAERQYTRMEDWLTAKLAYEGLPSKTYLSKTLAQYTSKTCSNCGFTITSADYDRVLEKLKKTATGWMTTINGKELKVEGQITYYNRYKRQNVVKDLSVELDRLSEESVNNDISSWTKGRSGEALSLLKKRFSHRPVQEKFVCLNCGFETHADEQAALNIARSWLFLRSQEYKKYQTNKTTGNTDKRAFVETWQSFYRKKLKEVWKPAV

SEQ ID NO: 26185 - protein, 978 aa, synthetic construct
  REGION 1..978: note = engineered CasX variant
QEIKRINKIRRRLVKDSNTKKAGKTGPMKTLLVRVMTPDLRERLENLRKKPENIPQPISNTSRANLNKLLTDYTEMKKAILHVYWEEFQKDPVGLMSRVAQPASKKIDQNKLKPEMDEKGNLTTAGFACSQCGQPLFVYKLEQVSEKGKAYTNYFGRCNVAEHEKLILLAQLKPEKDSDEAVTYSLGKFGQRALDFYSIHVTKESTHPVKPLAQIAGNRYASGPVGKALSDACMGTIASFLSKYQDIIIEHQKVVKGNQKRLESLRELAGKENLEYPSVTLPPQPHTKEGVDAYNEVIARVRMWVNLNLWQKLKLSRDDAKPLLRLKGFPSFPLVERQANEVDWWDMVCNVKKLINEKKEDGKVFWQNLAGYKRQEALRPYLSSEEDRKKGKKFARYQLGDLLLHLEKKHGEDWGKVYDEAWERIDKKVEGLSKHIKLEEERRSEDAQSKAALTDWLRAKASFVIEGLKEADKDEFCRCELKLQKWYGDLRGKPFAIEAENSILDISGFSKQYNCAFIWQKDGVKKLNLYLIINYFKGGKLRFKKIKPEAFEANRFYTVINKKSGEIVPMEVNFNFDDPNLIILPLAFGKRQGREFIWNDLLSLETGSLKLANGRVIEKTLYNRRTRQDEPALFVALTFERREVLDSSNIKPMNLIGVDRGENIPAVIALTDPEGCPLSRFKDSLGNPTHILRIGESYKEKTRTIQAKKEVEQRRAGGYSRKYASKAKNLADDMVRNTARDLLYYAVTQDAMLIFENLSRGFGRQGKRTFMAERQYTRMEDWLTAKLAYEGLPSKTYLSKTLAQYTSKTCSNCGFTITSADYDRVLEKLKKTATGWMTTINGKELKVEGQITYYNRYKRQNVVKDLSVELDRLSEESVNNDISSWTKGRSGEALSLLKKRFSHRPVQEKFVCLNCGFETHADEQAALNIARSWLFLRSQEYKKYQTNKTTGNTDKRAFVETWQSFYRKKLKEVWKPAV

SEQ ID NO: 26186 - protein, 978 aa, synthetic construct
  REGION 1..978: note = engineered CasX variant
QEIKRINKIRRRLVKDSNTKKAGKTGPMKTLLVRVMTPDLRERLENLRKKPENIPQPISNTSRANLNKLLTDYTEMKKAILHVYWEEFQKDPVGLMSRVAQPASKKIDQNKLKPEMDEKGNLTTAGFACSQCGQPLFVYKLEQVSEKGKAYTNYFGRCNVAEHEKLILLAQLKPEKDSDEAVTYSLGKFGQRALDFYSIHVTKESTHPVKPLAQIAGNRYASGPVGKALSDACMGTIASFLSKYQDIIIEHQKVVKGNQKRLESLRELAGKENLEYPSVTLPPQPHTKEGVDAYNEVIARVRMWVNLNLWQKLKLSRDDAKPLLRLKGFPSFPLVERQANEVDWWDMVCNVKKLINEKKEDGKVFWQNLAGYKRQEALRPYLSSEEDRKKGKKFARYQLGDLLLHLEKKHGEDWGKVYDEAWERIDKKVEGLSKHIKLEEERRSEDAQSKAALTDWLRAKASFVIEGLKEADKDEFCRCELKLQKWYGDLRGKPFAIEAENSILDISGFSKQYNCAFIWQKDGVKKLNLYLIINYFKGGKLRFKKIKPEAFEANRFYTVINKKSGEIVPMEVNFNFDDPNLIILPLAFGKRQGREFIWNDLLSLETGSLKLANGRVIEKTLYNRRTRQDEPALFVALTFERREVLDSSNIKPMNLIGVDRGENIPAVIALTDPEGCPLSRFKDSLGNPTHILRIGESYKEKTRTIQAKKCVEQRRAGGYSRKYASKAKNLADDMVRNTARDLLYYAVTQDAMLIFENLSRGFGRQGKRTFMAERQYTRMEDWLTAKLAYEGLPSKTYLSKTLAQYTSKTCSNCGFTITSADYDRVLEKLKKTATGWMTTINGKELKVEGQITYYNRYKRQNVVKDLSVELDRLSEESVNNDISSWTKGRSGEALSLLKKRFSHRPVQEKFVCLNCGFETHADEQAALNIARSWLFLRSQEYKKYQTNKTTGNTDKRAFVETWQSFYRKKLKEVWKPAV

SEQ ID NO: 26187 - protein, 978 aa, synthetic construct
  REGION 1..978: note = engineered CasX variant
QEIKRINKIRRRLVKDSNTKKAGKTGPMKTLLVRVMTPDLRERLENLRKKPENIPQPISNTSRANLNKLLTDYTEMKKAILHVYWEEFQKDPVGLMSRVAQPASKKIDQNKLKPEMDEKGNLTTAGFACSQCGQPLFVYKLEQVSEKGKAYTNYFGRCNVAEHEKLILLAQLKPEKDSDEAVTYSLGKFGQRALDFYSIHVTKESTHPVKPLAQIAGNRYASGPVGKALSDACMGTIASFLSKYQDIIIEHQKVVKGNQKRLESLRELAGKENLEYPSVTLPPQPHTKEGVDAYNEVIARVRMWVNLNLWQKLKLSRDDAKPLLRLKGFPSFPLVERQANEVDWWDMVCNVKKLINEKKEDGKVFWQNLAGYKRQEALRPYLSSEEDRKKGKKFARYQLGDLLLHLEKKHGEDWGKVYDEAWERIDKKVEGLSKHIKLEEERRSEDAQSKAALTDWLRAKASFVIEGLKEADKDEFCRCELKLQKWYGDLRGKPFAIEAENSILDISGFSKQYNCAFIWQKDGVKKLNLYLIINYFKGGKLRFKKIKPEAFEANRFYTVINKKSGEIVPMEVNFNFDDPNLIILPLAFGKRQGREFIWNDLLSLETGSLKLANGRVIEKTLYNRRTRQDEPALFVALTFERREVLDSSNIKPMNLIGVDRGENIPAVIALTDPEGCPLSRFKDSLGNPTHILRIGESYKEKQYTIQAKKEVEQRRAGGYSRKYASKAKNLADDMVRNTARDLLYYAVTQDAMLIFENLSRGFGRQGKRTFMAERQYTRMEDWLTAKLAYEGLPSKTYLSKTLAQYTSKTCSNCGFTITSADYDRVLEKLKKTATGWMTTINGKELKVEGQITYYNRYKRQNVVKDLSVELDRLSEESVNNDISSWTKGRSGEALSLLKKRFSHRPVQEKFVCLNCGFETHADEQAALNIARSWLFLRSQEYKKYQTNKTTGNTDKRAFVETWQSFYRKKLKEVWKPAV

SEQ ID NO: 26188 - protein, 978 aa, synthetic construct
  REGION 1..978: note = engineered CasX variant
QEIKRINKIRRRLVKDSNTKKAGKTGPMKTLLVRVMTPDLRERLENLRKKPENIPQPISNTSRANLNKLLTDYTEMKKAILHVYWEEFQKDPVGLMSRVAQPASKKIDQNKLKPEMDEKGNLTTAGFACSQCGQPLFVYKLEQVSEKGKAYTNYFGRCNVAEHEKLILLAQLKPEKDSDEAVTYSLGKFGQRALDFYSIHVTKESTHPVKPLAQIAGNRYASGPVGKALSDACMGTIASFLSKYQDIIIEHQKVVKGNQKRLESLRELAGKENLEYPSVTLPPQPHTKEGVDAYNEVIARVRMWVNLNLWQKLKLSRDDAKPLLRLKGFPSFPLVERQANEVDWWDMVCNVKKLINEKKEDGKVFWQNLAGYKRQEALRPYLSSEEDRKKGKKFARYQLGDLLLHLEKKHGEDWGKVYDEAWERIDKKVEGLSKHIKLEEERRSEDAQSKAALTDWLRAKASFVIEGLKEADKDEFCRCELKLQKWYGDLRGKPFAIEAENSILDISGFSKQYNCAFIWQKDGVKKLNLYLIINYFKGGKLRFKKIKPEAFEANRFYTVINKKSGEIVPMEVNFNFDDPNLIILPLAFGKRQGREFIWNDLLSLETGSLKLANGRVIEKTLYNRRTRQDEPALFVALTFERREVLDSSNIKPMNLIGVDRGENIPAVIALTDPEGCPLSRFKDSLGNPTHILRIGESYKEKQWTIQAKKEVEQRRAGGYSRKYASKAKNLADDMVRNTARDLLYYAVTQDAMLIFENLSRGFGRQGKRTFMAERQYTRMEDWLTAKLAYEGLPSKTYLSKTLAQYTSKTCSNCGFTITSADYDRVLEKLKKTATGWMTTINGKELKVEGQITYYNRYKRQNVVKDLSVELDRLSEESVNNDISSWTKGRSGEALSLLKKRFSHRPVQEKFVCLNCGFETHADEQAALNIARSWLFLRSQEYKKYQTNKTTGNTDKRAFVETWQSFYRKKLKEVWKPAV

SEQ ID NO: 26189 - protein, 978 aa, synthetic construct
  REGION 1..978: note = engineered CasX variant
QEIKRINKIRRRLVKDSNTKKAGKTGPMKTLLVRVMTPDLRERLENLRKKPENIPQPISNTSRANLNKLLTDYTEMKKAILHVYWEEFQKDPVGLMSRVAQPASKKIDQNKLKPEMDEKGNLTTAGFACSQCGQPLFVYKLEQVSEKGKAYTNYFGRCNVAEHEKLILLAQLKPEKDSDEAVTYSLGKFGQRALDFYSIHVTKESTHPVKPLAQIAGNRYASGPVGKALSDACMGTIASFLSKYQDIIIEHQKVVKGNQKRLESLRELAGKENLEYPSVTLPPQPHTKEGVDAYNEVIARVRMWVNLNLWQKLKLSRDDAKPLLRLKGFPSFPLVERQANEVDWWDMVCNVKKLINEKKEDGKVFWQNLAGYKRQEALRPYLSSEEDRKKGKKFARYQLGDLLLHLEKKHGEDWGKVYDEAWERIDKKVEGLSKHIKLEEERRSEDAQSKAALTDWLRAKASFVIEGLKEADKDEFCRCELKLQKWYGDLRGKPFAIEAENSILDISGFSKQYNCAFIWQKDGVKKLNLYLIINYFKGGKLRFKKIKPEAFEANRFYTVINKKSGEIVPMEVNFNFDDPNLIILPLAFGKRQGREFIWNDLLSLETGSLKLANGRVIEKTLYNRRTRQDEPALFVALTFERREVLDSSNIKPMNLIGVDRGENIPAVIALTDPEGCPLSRFKDSLGNPTHILRIGESYKEKQTTIQAKKEVEQRRAGGYSRKYASKAKNLADDMVRNTARDLLYYAVTQDAMLIFENLSRGFGRQGKRTFMAERQYTRMEDWLTAKLAYEGLPSKTYLSKTLAQYTSKTCSNCGFTITSADYDRVLEKLKKTATGWMTTINGKELKVEGQITYYNRYKRQNVVKDLSVELDRLSEESVNNDISSWTKGRSGEALSLLKKRFSHRPVQEKFVCLNCGFETHADEQAALNIARSWLFLRSQEYKKYQTNKTTGNTDKRAFVETWQSFYRKKLKEVWKPAV

SEQ ID NO: 26190 - protein, 978 aa, synthetic construct
  REGION 1..978: note = engineered CasX variant
QEIKRINKIRRRLVKDSNTKKAGKTGPMKTLLVRVMTPDLRERLENLRKKPENIPQPISNTSRANLNKLLTDYTEMKKAILHVYWEEFQKDPVGLMSRVAQPASKKIDQNKLKPEMDEKGNLTTAGFACSQCGQPLFVYKLEQVSEKGKAYTNYFGRCNVAEHEKLILLAQLKPEKDSDEAVTYSLGKFGQRALDFYSIHVTKESTHPVKPLAQIAGNRYASGPVGKALSDACMGTIASFLSKYQDIIIEHQKVVKGNQKRLESLRELAGKENLEYPSVTLPPQPHTKEGVDAYNEVIARVRMWVNLNLWQKLKLSRDDAKPLLRLKGFPSFPLVERQANEVDWWDMVCNVKKLINEKKEDGKVFWQNLAGYKRQEALRPYLSSEEDRKKGKKFARYQLGDLLLHLEKKHGEDWGKVYDEAWERIDKKVEGLSKHIKLEEERRSEDAQSKAALTDWLRAKASFVIEGLKEADKDEFCRCELKLQKWYGDLRGKPFAIEAENSILDISGFSKQYNCAFIWQKDGVKKLNLYLIINYFKGGKLRFKKIKPEAFEANRFYTVINKKSGEIVPMEVNFNFDDPNLIILPLAFGKRQGREFIWNDLLSLETGSLKLANGRVIEKTLYNRRTRQDEPALFVALTFERREVLDSSNIKPMNLIGVDRGENIPAVIALTDPEGCPLSRFKDSLGNPTHILRIGESYKEKQSTNQAKKEVEQRRAGGYSRKYASKAKNLADDMVRNTARDLLYYAVTQDAMLIFENLSRGFGRQGKRTFMAERQYTRMEDWLTAKLAYEGLPSKTYLSKTLAQYTSKTCSNCGFTITSADYDRVLEKLKKTATGWMTTINGKELKVEGQITYYNRYKRQNVVKDLSVELDRLSEESVNNDISSWTKGRSGEALSLLKKRFSHRPVQEKFVCLNCGFETHADEQAALNIARSWLFLRSQEYKKYQTNKTTGNTDKRAFVETWQSFYRKKLKEVWKPAV

SEQ ID NO: 26191 - protein, 978 aa, synthetic construct
  REGION 1..978: note = engineered CasX variant
QEIKRINKIRRRLVKDSNTKKAGKTGPMKTLLVRVMTPDLRERLENLRKKPENIPQPISNTSRANLNKLLTDYTEMKKAILHVYWEEFQKDPVGLMSRVAQPASKKIDQNKLKPEMDEKGNLTTAGFACSQCGQPLFVYKLEQVSEKGKAYTNYFGRCNVAEHEKLILLAQLKPEKDSDEAVTYSLGKFGQRALDFYSIHVTKESTHPVKPLAQIAGNRYASGPVGKALSDACMGTIASFLSKYQDIIIEHQKVVKGNQKRLESLRELAGKENLEYPSVTLPPQPHTKEGVDAYNEVIARVRMWVNLNLWQKLKLSRDDAKPLLRLKGFPSFPLVERQANEVDWWDMVCNVKKLINEKKEDGKVFWQNLAGYKRQEALRPYLSSEEDRKKGKKFARYQLGDLLLHLEKKHGEDWGKVYDEAWERIDKKVEGLSKHIKLEEERRSEDAQSKAALTDWLRAKASFVIEGLKEADKDEFCRCELKLQKWYGDLRGKPFAIEAENSILDISGFSKQYNCAFIWQKDGVKKLNLYLIINYFKGGKLRFKKIKPEAFEANRFYTVINKKSGEIVPMEVNFNFDDPNLIILPLAFGKRQGREFIWNDLLSLETGSLKLANGRVIEKTLYNRRTRQDEPALFVALTFERREVLDSSNIKPMNLIGVDRGENIPAVIALTDPEGCPLSRFKDSLGNPTHILRIGESYKEKQSTIQAKKEVEQRRAGGYSRKYASKAKNLADDMVRNTARDLLYYAVTQDAMLIFENLSRGFGRQGKRTFMAERQYTRMEDWLTAKLAYEGLPSKTYLSKTLAQYTSKTCSNCGFTITSADYDRVLEKLKKTATGWMTTINGKELKVEGQITYYNRYKRQNVVKDLSVELDRLSEESVNNDISSWTKGRSGEALSLLKKRFSHRPVQEKFVCLNCGFETHADEQAALNIARSWLFLRSQEYKKYQTNKTTGNTDKRAFVETWQSFYRKKLKEVWKPAV

SEQ ID NO: 26192 - protein, 978 aa, synthetic construct
  REGION 1..978: note = engineered CasX variant
QEIKRINKIRRRLVKDSNTKKAGKTGPMKTLLVRVMTPDLRERLENLRKKPENIPQPISNTSRANLNKLLTDYTEMKKAILHVYWEEFQKDPVGLMSRVAQPASKKIDQNKLKPEMDEKGNLTTAGFACSQCGQPLFVYKLEQVSEKGKAYTNYFGRCNVAEHEKLILLAQLKPEKDSDEAVTYSLGKFGQRALDFYSIHVTKESTHPVKPLAQIAGNRYASGPVGKALSDACMGTIASFLSKYQDIIIEHQKVVKGNQKRLESLRELAGKENLEYPSVTLPPQPHTKEGVDAYNEVIARVRMWVNLNLWQKLKLSRDDAKPLLRLKGFPSFPLVERQANEVDWWDMVCNVKKLINEKKEDGKVFWQNLAGYKRQEALRPYLSSEEDRKKGKKFARYQLGDLLLHLEKKHGEDWGKVYDEAWERIDKKVEGLSKHIKLEEERRSEDAQSKAALTDWLRAKASFVIEGLKEADKDEFCRCELKLQKWYGDLRGKPFAIEAENSILDISGFSKQYNCAFIWQKDGVKKLNLYLIINYFKGGKLRFKKIKPEAFEANRFYTVINKKSGEIVPMEVNFNFDDPNLIILPLAFGKRQGREFIWNDLLSLETGSLKLANGRVIEKTLYNRRTRQDEPALFVALTFERREVLDSSNIKPMNLIGVDRGENIPAVIALTDPEGCPLSRFKDSLGNPTHILRIGESYKEKQRYIQAKKEVTQRRAGGYSRKYASKAKNLADDMVRNTARDLLYYAVTQDAMLIFENLSRGFGRQGKRTFMAERQYTRMEDWLTAKLAYEGLPSKTYLSKTLAQYTSKTCSNCGFTITSADYDRVLEKLKKTATGWMTTINGKELKVEGQITYYNRYKRQNVVKDLSVELDRLSEESVNNDISSWTKGRSGEALSLLKKRFSHRPVQEKFVCLNCGFETHADEQAALNIARSWLFLRSQEYKKYQTNKTTGNTDKRAFVETWQSFYRKKLKEVWKPAV

SEQ ID NO: 26193 - protein, 978 aa, synthetic construct
  REGION 1..978: note = engineered CasX variant
QEIKRINKIRRRLVKDSNTKKAGKTGPMKTLLVRVMTPDLRERLENLRKKPENIPQPISNTSRANLNKLLTDYTEMKKAILHVYWEEFQKDPVGLMSRVAQPASKKIDQNKLKPEMDEKGNLTTAGFACSQCGQPLFVYKLEQVSEKGKAYTNYFGRCNVAEHEKLILLAQLKPEKDSDEAVTYSLGKFGQRALDFYSIHVTKESTHPVKPLAQIAGNRYASGPVGKALSDACMGTIASFLSKYQDIIIEHQKVVKGNQKRLESLRELAGKENLEYPSVTLPPQPHTKEGVDAYNEVIARVRMWVNLNLWQKLKLSRDDAKPLLRLKGFPSFPLVERQANEVDWWDMVCNVKKLINEKKEDGKVFWQNLAGYKRQEALRPYLSSEEDRKKGKKFARYQLGDLLLHLEKKHGEDWGKVYDEAWERIDKKVEGLSKHIKLEEERRSEDAQSKAALTDWLRAKASFVIEGLKEADKDEFCRCELKLQKWYGDLRGKPFAIEAENSILDISGFSKQYNCAFIWQKDGVKKLNLYLIINYFKGGKLRFKKIKPEAFEANRFYTVINKKSGEIVPMEVNFNFDDPNLIILPLAFGKRQGREFIWNDLLSLETGSLKLANGRVIEKTLYNRRTRQDEPALFVALTFERREVLDSSNIKPMNLIGVDRGENIPAVIALTDPEGCPLSRFKDSLGNPTHILRIGESYKEKQRYIQAKKEVEQRRAGGYSRKYASKAKNLADDMVRNTARDLLYYAVTQDAMLIFENLSRGFGRQGKRTFMAERQYTRMEDWLTAKLAYEGLPSKTYLSKTLAQYTSKTCSNCGFTITSADYDRVLEKLKKTATGWMTTINGKELKVEGQITYYNRYKRQNVVKDLSVELDRLSEESVNNDISSWTKGRSGEALSLLKKRFSHRPVQEKFVCLNCGFETHADEQAALNIARSWLFLRSQEYKKYQTNKTTGNTDKRAFVETWQSFYRKKLKEVWKPAV

SEQ ID NO: 26194 - protein, 978 aa, synthetic construct
  REGION 1..978: note = engineered CasX variant
QEIKRINKIRRRLVKDSNTKKAGKTGPMKTLLVRVMTPDLRERLENLRKKPENIPQPISNTSRANLNKLLTDYTEMKKAILHVYWEEFQKDPVGLMSRVAQPASKKIDQNKLKPEMDEKGNLTTAGFACSQCGQPLFVYKLEQVSEKGKAYTNYFGRCNVAEHEKLILLAQLKPEKDSDEAVTYSLGKFGQRALDFYSIHVTKESTHPVKPLAQIAGNRYASGPVGKALSDACMGTIASFLSKYQDIIIEHQKVVKGNQKRLESLRELAGKENLEYPSVTLPPQPHTKEGVDAYNEVIARVRMWVNLNLWQKLKLSRDDAKPLLRLKGFPSFPLVERQANEVDWWDMVCNVKKLINEKKEDGKVFWQNLAGYKRQEALRPYLSSEEDRKKGKKFARYQLGDLLLHLEKKHGEDWGKVYDEAWERIDKKVEGLSKHIKLEEERRSEDAQSKAALTDWLRAKASFVIEGLKEADKDEFCRCELKLQKWYGDLRGKPFAIEAENSILDISGFSKQYNCAFIWQKDGVKKLNLYLIINYFKGGKLRFKKIKPEAFEANRFYTVINKKSGEIVPMEVNFNFDDPNLIILPLAFGKRQGREFIWNDLLSLETGSLKLANGRVIEKTLYNRRTRQDEPALFVALTFERREVLDSSNIKPMNLIGVDRGENIPAVIALTDPEGCPLSRFKDSLGNPTHILRIGESYKEKQRWIQAKKEVEQRRAQGYSRKYASKAKNLADDMVRNTARDLLYYAVTQDAMLIFENLSRGFGRQGKRTFMAERQYTRMEDWLTAKLAYEGLPSKTYLSKTLAQYTSKTCSNCGFTITSADYDRVLEKLKKTATGWMTTINGKELKVEGQITYYNRYKRQNVVKDLSVELDRLSEESVNNDISSWTKGRSGEALSLLKKRFSHRPVQEKFVCLNCGFETHADEQAALNIARSWLFLRSQEYKKYQTNKTTGNTDKRAFVETWQSFYRKKLKEVWKPAV

SEQ ID NO: 26195 - protein, 978 aa, synthetic construct
  REGION 1..978: note = engineered CasX variant
QEIKRINKIRRRLVKDSNTKKAGKTGPMKTLLVRVMTPDLRERLENLRKKPENIPQPISNTSRANLNKLLTDYTEMKKAILHVYWEEFQKDPVGLMSRVAQPASKKIDQNKLKPEMDEKGNLTTAGFACSQCGQPLFVYKLEQVSEKGKAYTNYFGRCNVAEHEKLILLAQLKPEKDSDEAVTYSLGKFGQRALDFYSIHVTKESTHPVKPLAQIAGNRYASGPVGKALSDACMGTIASFLSKYQDIIIEHQKVVKGNQKRLESLRELAGKENLEYPSVTLPPQPHTKEGVDAYNEVIARVRMWVNLNLWQKLKLSRDDAKPLLRLKGFPSFPLVERQANEVDWWDMVCNVKKLINEKKEDGKVFWQNLAGYKRQEALRPYLSSEEDRKKGKKFARYQLGDLLLHLEKKHGEDWGKVYDEAWERIDKKVEGLSKHIKLEEERRSEDAQSKAALTDWLRAKASFVIEGLKEADKDEFCRCELKLQKWYGDLRGKPFAIEAENSILDISGFSKQYNCAFIWQKDGVKKLNLYLIINYFKGGKLRFKKIKPEAFEANRFYTVINKKSGEIVPMEVNFNFDDPNLIILPLAFGKRQGREFIWNDLLSLETGSLKLANGRVIEKTLYNRRTRQDEPALFVALTFERREVLDSSNIKPMNLIGVDRGENIPAVIALTDPEGCPLSRFKDSLGNPTHILRIGESYKEKQRWIQAKKEVEQRRAGGYSRKYASKAKNLADDMVRNTARDLLYYAVTQDAMLIFENLSRGFGRQGKRTFMAERQYTRMEDWLTAKLAYEGLPSKTYLSKTLAQYTSKTCSNCGFTITSADYDRVLEKLKKTATGWMTTINGKELKVEGQITYYNRYKRQNVVKDLSVELDRLSEESVNNDISSWTKGRSGEALSLLKKRFSHRPVQEKFVCLNCGFETHADEQAALNIARSWLFLRSQEYKKYQTNKTTGNTDKRAFVETWQSFYRKKLKEVWKPAV

SEQ ID NO: 26196 - protein, 978 aa, synthetic construct
  REGION 1..978: note = engineered CasX variant
QEIKRINKIRRRLVKDSNTKKAGKTGPMKTLLVRVMTPDLRERLENLRKKPENIPQPISNTSRANLNKLLTDYTEMKKAILHVYWEEFQKDPVGLMSRVAQPASKKIDQNKLKPEMDEKGNLTTAGFACSQCGQPLFVYKLEQVSEKGKAYTNYFGRCNVAEHEKLILLAQLKPEKDSDEAVTYSLGKFGQRALDFYSIHVTKESTHPVKPLAQIAGNRYASGPVGKALSDACMGTIASFLSKYQDIIIEHQKVVKGNQKRLESLRELAGKENLEYPSVTLPPQPHTKEGVDAYNEVIARVRMWVNLNLWQKLKLSRDDAKPLLRLKGFPSFPLVERQANEVDWWDMVCNVKKLINEKKEDGKVFWQNLAGYKRQEALRPYLSSEEDRKKGKKFARYQLGDLLLHLEKKHGEDWGKVYDEAWERIDKKVEGLSKHIKLEEERRSEDAQSKAALTDWLRAKASFVIEGLKEADKDEFCRCELKLQKWYGDLRGKPFAIEAENSILDISGFSKQYNCAFIWQKDGVKKLNLYLIINYFKGGKLRFKKIKPEAFEANRFYTVINKKSGEIVPMEVNFNFDDPNLIILPLAFGKRQGREFIWNDLLSLETGSLKLANGRVIEKTLYNRRTRQDEPALFVALTFERREVLDSSNIKPMNLIGVDRGENIPAVIALTDPEGCPLSRFKDSLGNPTHILRIGESYKEKQRVIQAKKEVEQRRAGGYSRKYASKAKNLADDMVRNTARDLLYYAVTQDAMLIFENLSRGFGRQGKRTFMAERQYTRMEDWLTAKLAYEGLPSKTYLSKTLAQYTSKTCSNCGFTITSADYDRVLEKLKKTATGWMTTINGKELKVEGQITYYNRYKRQNVVKDLSVELDRLSEESVNNDISSWTKGRSGEALSLLKKRFSHRPVQEKFVCLNCGFETHADEQAALNIARSWLFLRSQEYKKYQTNKTTGNTDKRAFVETWQSFYRKKLKEVWKPAV

SEQ ID NO: 26197 - protein, 978 aa, synthetic construct
  REGION 1..978: note = engineered CasX variant
QEIKRINKIRRRLVKDSNTKKAGKTGPMKTLLVRVMTPDLRERLENLRKKPENIPQPISNTSRANLNKLLTDYTEMKKAILHVYWEEFQKDPVGLMSRVAQPASKKIDQNKLKPEMDEKGNLTTAGFACSQCGQPLFVYKLEQVSEKGKAYTNYFGRCNVAEHEKLILLAQLKPEKDSDEAVTYSLGKFGQRALDFYSIHVTKESTHPVKPLAQIAGNRYASGPVGKALSDACMGTIASFLSKYQDIIIEHQKVVKGNQKRLESLRELAGKENLEYPSVTLPPQPHTKEGVDAYNEVIARVRMWVNLNLWQKLKLSRDDAKPLLRLKGFPSFPLVERQANEVDWWDMVCNVKKLINEKKEDGKVFWQNLAGYKRQEALRPYLSSEEDRKKGKKFARYQLGDLLLHLEKKHGEDWGKVYDEAWERIDKKVEGLSKHIKLEEERRSEDAQSKAALTDWLRAKASFVIEGLKEADKDEFCRCELKLQKWYGDLRGKPFAIEAENSILDISGFSKQYNCAFIWQKDGVKKLNLYLIINYFKGGKLRFKKIKPEAFEANRFYTVINKKSGEIVPMEVNFNFDDPNLIILPLAFGKRQGREFIWNDLLSLETGSLKLANGRVIEKTLYNRRTRQDEPALFVALTFERREVLDSSNIKPMNLIGVDRGENIPAVIALTDPEGCPLSRFKDSLGNPTHILRIGESYKEKQRTYQAKKVVEQRRAGGYSRKYASKAKNLADDMVRNTARDLLYYAVTQDAMLIFENLSRGFGRQGKRTFMAERQYTRMEDWLTAKLAYEGLPSKTYLSKTLAQYTSKTCSNCGFTITSADYDRVLEKLKKTATGWMTTINGKELKVEGQITYYNRYKRQNVVKDLSVELDRLSEESVNNDISSWTKGRSGEALSLLKKRFSHRPVQEKFVCLNCGFETHADEQAALNIARSWLFLRSQEYKKYQTNKTTGNTDKRAFVETWQSFYRKKLKEVWKPAV

SEQ ID NO: 26198 - protein, 978 aa, synthetic construct
  REGION 1..978: note = engineered CasX variant
QEIKRINKIRRRLVKDSNTKKAGKTGPMKTLLVRVMTPDLRERLENLRKKPENIPQPISNTSRANLNKLLTDYTEMKKAILHVYWEEFQKDPVGLMSRVAQPASKKIDQNKLKPEMDEKGNLTTAGFACSQCGQPLFVYKLEQVSEKGKAYTNYFGRCNVAEHEKLILLAQLKPEKDSDEAVTYSLGKFGQRALDFYSIHVTKESTHPVKPLAQIAGNRYASGPVGKALSDACMGTIASFLSKYQDIIIEHQKVVKGNQKRLESLRELAGKENLEYPSVTLPPQPHTKEGVDAYNEVIARVRMWVNLNLWQKLKLSRDDAKPLLRLKGFPSFPLVERQANEVDWWDMVCNVKKLINEKKEDGKVFWQNLAGYKRQEALRPYLSSEEDRKKGKKFARYQLGDLLLHLEKKHGEDWGKVYDEAWERIDKKVEGLSKHIKLEEERRSEDAQSKAALTDWLRAKASFVIEGLKEADKDEFCRCELKLQKWYGDLRGKPFAIEAENSILDISGFSKQYNCAFIWQKDGVKKLNLYLIINYFKGGKLRFKKIKPEAFEANRFYTVINKKSGEIVPMEVNFNFDDPNLIILPLAFGKRQGREFIWNDLLSLETGSLKLANGRVIEKTLYNRRTRQDEPALFVALTFERREVLDSSNIKPMNLIGVDRGENIPAVIALTDPEGCPLSRFKDSLGNPTHILRIGESYKEKQRTYQAKKEVEQRRAGGYSRKYASKAKNLADDMVRNTARDLLYYAVTQDAMLIFENLSRGFGRQGKRTFMAERQYTRMEDWLTAKLAYEGLPSKTYLSKTLAQYTSKTCSNCGFTITSADYDRVLEKLKKTATGWMTTINGKELKVEGQITYYNRYKRQNVVKDLSVELDRLSEESVNNDISSWTKGRSGEALSLLKKRFSHRPVQEKFVCLNCGFETHADEQAALNIARSWLFLRSQEYKKYQTNKTTGNTDKRAFVETWQSFYRKKLKEVWKPAV

SEQ ID NO: 26199 - protein, 978 aa, synthetic construct
  REGION 1..978: note = engineered CasX variant
QEIKRINKIRRRLVKDSNTKKAGKTGPMKTLLVRVMTPDLRERLENLRKKPENIPQPISNTSRANLNKLLTDYTEMKKAILHVYWEEFQKDPVGLMSRVAQPASKKIDQNKLKPEMDEKGNLTTAGFACSQCGQPLFVYKLEQVSEKGKAYTNYFGRCNVAEHEKLILLAQLKPEKDSDEAVTYSLGKFGQRALDFYSIHVTKESTHPVKPLAQIAGNRYASGPVGKALSDACMGTIASFLSKYQDIIIEHQKVVKGNQKRLESLRELAGKENLEYPSVTLPPQPHTKEGVDAYNEVIARVRMWVNLNLWQKLKLSRDDAKPLLRLKGFPSFPLVERQANEVDWWDMVCNVKKLINEKKEDGKVFWQNLAGYKRQEALRPYLSSEEDRKKGKKFARYQLGDLLLHLEKKHGEDWGKVYDEAWERIDKKVEGLSKHIKLEEERRSEDAQSKAALTDWLRAKASFVIEGLKEADKDEFCRCELKLQKWYGDLRGKPFAIEAENSILDISGFSKQYNCAFIWQKDGVKKLNLYLIINYFKGGKLRFKKIKPEAFEANRFYTVINKKSGEIVPMEVNFNFDDPNLIILPLAFGKRQGREFIWNDLLSLETGSLKLANGRVIEKTLYNRRTRQDEPALFVALTFERREVLDSSNIKPMNLIGVDRGENIPAVIALTDPEGCPLSRFKDSLGNPTHILRIGESYKEKQRTWQAKKEVLQRRAGWYSRKYASKAKNLADDMVRNTARDLLYYAVTQDAMLIFENLSRGFGRQGKRTFMAERQYTRMEDWLTAKLAYEGLPSKTYLSKTLAQYTSKTCSNCGFTITSADYDRVLEKLKKTATGWMTTINGKELKVEGQITYYNRYKRQNVVKDLSVELDRLSEESVNNDISSWTKGRSGEALSLLKKRFSHRPVQEKFVCLNCGFETHADEQAALNIARSWLFLRSQEYKKYQTNKTTGNTDKRAFVETWQSFYRKKLKEVWKPAV

SEQ ID NO: 26200 - protein, 978 aa, synthetic construct
  REGION 1..978: note = engineered CasX variant
QEIKRINKIRRRLVKDSNTKKAGKTGPMKTLLVRVMTPDLRERLENLRKKPENIPQPISNTSRANLNKLLTDYTEMKKAILHVYWEEFQKDPVGLMSRVAQPASKKIDQNKLKPEMDEKGNLTTAGFACSQCGQPLFVYKLEQVSEKGKAYTNYFGRCNVAEHEKLILLAQLKPEKDSDEAVTYSLGKFGQRALDFYSIHVTKESTHPVKPLAQIAGNRYASGPVGKALSDACMGTIASFLSKYQDIIIEHQKVVKGNQKRLESLRELAGKENLEYPSVTLPPQPHTKEGVDAYNEVIARVRMWVNLNLWQKLKLSRDDAKPLLRLKGFPSFPLVERQANEVDWWDMVCNVKKLINEKKEDGKVFWQNLAGYKRQEALRPYLSSEEDRKKGKKFARYQLGDLLLHLEKKHGEDWGKVYDEAWERIDKKVEGLSKHIKLEEERRSEDAQSKAALTDWLRAKASFVIEGLKEADKDEFCRCELKLQKWYGDLRGKPFAIEAENSILDISGFSKQYNCAFIWQKDGVKKLNLYLIINYFKGGKLRFKKIKPEAFEANRFYTVINKKSGEIVPMEVNFNFDDPNLIILPLAFGKRQGREFIWNDLLSLETGSLKLANGRVIEKTLYNRRTRQDEPALFVALTFERREVLDSSNIKPMNLIGVDRGENIPAVIALTDPEGCPLSRFKDSLGNPTHILRIGESYKEKQRTWQAKKEVLQRRAGGYSRKYASKAKNLADDMVRNTARDLLYYAVTQDAMLIFENLSRGFGRQGKRTFMAERQYTRMEDWLTAKLAYEGLPSKTYLSKTLAQYTSKTCSNCGFTITSADYDRVLEKLKKTATGWMTTINGKELKVEGQITYYNRYKRQNVVKDLSVELDRLSEESVNNDISSWTKGRSGEALSLLKKRFSHRPVQEKFVCLNCGFETHADEQAALNIARSWLFLRSQEYKKYQTNKTTGNTDKRAFVETWQSFYRKKLKEVWKPAV

SEQ ID NO: 26201 - protein, 978 aa, synthetic construct
  REGION 1..978: note = engineered CasX variant
QEIKRINKIRRRLVKDSNTKKAGKTGPMKTLLVRVMTPDLRERLENLRKKPENIPQPISNTSRANLNKLLTDYTEMKKAILHVYWEEFQKDPVGLMSRVAQPASKKIDQNKLKPEMDEKGNLTTAGFACSQCGQPLFVYKLEQVSEKGKAYTNYFGRCNVAEHEKLILLAQLKPEKDSDEAVTYSLGKFGQRALDFYSIHVTKESTHPVKPLAQIAGNRYASGPVGKALSDACMGTIASFLSKYQDIIIEHQKVVKGNQKRLESLRELAGKENLEYPSVTLPPQPHTKEGVDAYNEVIARVRMWVNLNLWQKLKLSRDDAKPLLRLKGFPSFPLVERQANEVDWWDMVCNVKKLINEKKEDGKVFWQNLAGYKRQEALRPYLSSEEDRKKGKKFARYQLGDLLLHLEKKHGEDWGKVYDEAWERIDKKVEGLSKHIKLEEERRSEDAQSKAALTDWLRAKASFVIEGLKEADKDEFCRCELKLQKWYGDLRGKPFAIEAENSILDISGFSKQYNCAFIWQKDGVKKLNLYLIINYFKGGKLRFKKIKPEAFEANRFYTVINKKSGEIVPMEVNFNFDDPNLIILPLAFGKRQGREFIWNDLLSLETGSLKLANGRVIEKTLYNRRTRQDEPALFVALTFERREVLDSSNIKPMNLIGVDRGENIPAVIALTDPEGCPLSRFKDSLGNPTHILRIGESYKEKQRTWQAKKEVEQRRAGWYSRKYASKAKNLADDMVRNTARDLLYYAVTQDAMLIFENLSRGFGRQGKRTFMAERQYTRMEDWLTAKLAYEGLPSKTYLSKTLAQYTSKTCSNCGFTITSADYDRVLEKLKKTATGWMTTINGKELKVEGQITYYNRYKRQNVVKDLSVELDRLSEESVNNDISSWTKGRSGEALSLLKKRFSHRPVQEKFVCLNCGFETHADEQAALNIARSWLFLRSQEYKKYQTNKTTGNTDKRAFVETWQSFYRKKLKEVWKPAV

SEQ ID NO: 26202 - protein, 978 aa, synthetic construct
  REGION 1..978: note = engineered CasX variant
QEIKRINKIRRRLVKDSNTKKAGKTGPMKTLLVRVMTPDLRERLENLRKKPENIPQPISNTSRANLNKLLTDYTEMKKAILHVYWEEFQKDPVGLMSRVAQPASKKIDQNKLKPEMDEKGNLTTAGFACSQCGQPLFVYKLEQVSEKGKAYTNYFGRCNVAEHEKLILLAQLKPEKDSDEAVTYSLGKFGQRALDFYSIHVTKESTHPVKPLAQIAGNRYASGPVGKALSDACMGTIASFLSKYQDIIIEHQKVVKGNQKRLESLRELAGKENLEYPSVTLPPQPHTKEGVDAYNEVIARVRMWVNLNLWQKLKLSRDDAKPLLRLKGFPSFPLVERQANEVDWWDMVCNVKKLINEKKEDGKVFWQNLAGYKRQEALRPYLSSEEDRKKGKKFARYQLGDLLLHLEKKHGEDWGKVYDEAWERIDKKVEGLSKHIKLEEERRSEDAQSKAALTDWLRAKASFVIEGLKEADKDEFCRCELKLQKWYGDLRGKPFAIEAENSILDISGFSKQYNCAFIWQKDGVKKLNLYLIINYFKGGKLRFKKIKPEAFEANRFYTVINKKSGEIVPMEVNFNFDDPNLIILPLAFGKRQGREFIWNDLLSLETGSLKLANGRVIEKTLYNRRTRQDEPALFVALTFERREVLDSSNIKPMNLIGVDRGENIPAVIALTDPEGCPLSRFKDSLGNPTHILRIGESYKEKQRTWQAKKEVEQRRAGGYSRKYASKAKNLADDMVRNTARDLLYYAVTQDAMLIFENLSRGFGRQGKRTFMAERQYTRMEDWLTAKLAYEGLPSKTYLSKTLAQYTSKTCSNCGFTITSADYDRVLEKLKKTATGWMTTINGKELKVEGQITYYNRYKRQNVVKDLSVELDRLSEESVNNDISSWTKGRSGEALSLLKKRFSHRPVQEKFVCLNCGFETHADEQAALNIARSWLFLRSQEYKKYQTNKTTGNTDKRAFVETWQSFYRKKLKEVWKPAV

SEQ ID NO: 26203 - protein, 978 aa, synthetic construct
  REGION 1..978: note = engineered CasX variant
QEIKRINKIRRRLVKDSNTKKAGKTGPMKTLLVRVMTPDLRERLENLRKKPENIPQPISNTSRANLNKLLTDYTEMKKAILHVYWEEFQKDPVGLMSRVAQPASKKIDQNKLKPEMDEKGNLTTAGFACSQCGQPLFVYKLEQVSEKGKAYTNYFGRCNVAEHEKLILLAQLKPEKDSDEAVTYSLGKFGQRALDFYSIHVTKESTHPVKPLAQIAGNRYASGPVGKALSDACMGTIASFLSKYQDIIIEHQKVVKGNQKRLESLRELAGKENLEYPSVTLPPQPHTKEGVDAYNEVIARVRMWVNLNLWQKLKLSRDDAKPLLRLKGFPSFPLVERQANEVDWWDMVCNVKKLINEKKEDGKVFWQNLAGYKRQEALRPYLSSEEDRKKGKKFARYQLGDLLLHLEKKHGEDWGKVYDEAWERIDKKVEGLSKHIKLEEERRSEDAQSKAALTDWLRAKASFVIEGLKEADKDEFCRCELKLQKWYGDLRGKPFAIEAENSILDISGFSKQYNCAFIWQKDGVKKLNLYLIINYFKGGKLRFKKIKPEAFEANRFYTVINKKSGEIVPMEVNFNFDDPNLIILPLAFGKRQGREFIWNDLLSLETGSLKLANGRVIEKTLYNRRTRQDEPALFVALTFERREVLDSSNIKPMNLIGVDRGENIPAVIALTDPEGCPLSRFKDSLGNPTHILRIGESYKEKQRTVQAYKEVEQRRAGGYSRKYASKAKNLADDMVRNTARDLLYYAVTQDAMLIFENLSRGFGRQGKRTFMAERQYTRMEDWLTAKLAYEGLPSKTYLSKTLAQYTSKTCSNCGFTITSADYDRVLEKLKKTATGWMTTINGKELKVEGQITYYNRYKRQNVVKDLSVELDRLSEESVNNDISSWTKGRSGEALSLLKKRFSHRPVQEKFVCLNCGFETHADEQAALNIARSWLFLRSQEYKKYQTNKTTGNTDKRAFVETWQSFYRKKLKEVWKPAV

SEQ ID NO: 26204 - protein, 978 aa, synthetic construct
  REGION 1..978: note = engineered CasX variant
QEIKRINKIRRRLVKDSNTKKAGKTGPMKTLLVRVMTPDLRERLENLRKKPENIPQPISNTSRANLNKLLTDYTEMKKAILHVYWEEFQKDPVGLMSRVAQPASKKIDQNKLKPEMDEKGNLTTAGFACSQCGQPLFVYKLEQVSEKGKAYTNYFGRCNVAEHEKLILLAQLKPEKDSDEAVTYSLGKFGQRALDFYSIHVTKESTHPVKPLAQIAGNRYASGPVGKALSDACMGTIASFLSKYQDIIIEHQKVVKGNQKRLESLRELAGKENLEYPSVTLPPQPHTKEGVDAYNEVIARVRMWVNLNLWQKLKLSRDDAKPLLRLKGFPSFPLVERQANEVDWWDMVCNVKKLINEKKEDGKVFWQNLAGYKRQEALRPYLSSEEDRKKGKKFARYQLGDLLLHLEKKHGEDWGKVYDEAWERIDKKVEGLSKHIKLEEERRSEDAQSKAALTDWLRAKASFVIEGLKEADKDEFCRCELKLQKWYGDLRGKPFAIEAENSILDISGFSKQYNCAFIWQKDGVKKLNLYLIINYFKGGKLRFKKIKPEAFEANRFYTVINKKSGEIVPMEVNFNFDDPNLIILPLAFGKRQGREFIWNDLLSLETGSLKLANGRVIEKTLYNRRTRQDEPALFVALTFERREVLDSSNIKPMNLIGVDRGENIPAVIALTDPEGCPLSRFKDSLGNPTHILRIGESYKEKQRTVQAKKEVEQRSAGGYSRKYASKAKNLADDMVRNTARDLLYYAVTQDAMLIFENLSRGFGRQGKRTFMAERQYTRMEDWLTAKLAYEGLPSKTYLSKTLAQYTSKTCSNCGFTITSADYDRVLEKLKKTATGWMTTINGKELKVEGQITYYNRYKRQNVVKDLSVELDRLSEESVNNDISSWTKGRSGEALSLLKKRFSHRPVQEKFVCLNCGFETHADEQAALNIARSWLFLRSQEYKKYQTNKTTGNTDKRAFVETWQSFYRKKLKEVWKPAV

SEQ ID NO: 26205 - protein, 978 aa, synthetic construct
  REGION 1..978: note = engineered CasX variant
QEIKRINKIRRRLVKDSNTKKAGKTGPMKTLLVRVMTPDLRERLENLRKKPENIPQPISNTSRANLNKLLTDYTEMKKAILHVYWEEFQKDPVGLMSRVAQPASKKIDQNKLKPEMDEKGNLTTAGFACSQCGQPLFVYKLEQVSEKGKAYTNYFGRCNVAEHEKLILLAQLKPEKDSDEAVTYSLGKFGQRALDFYSIHVTKESTHPVKPLAQIAGNRYASGPVGKALSDACMGTIASFLSKYQDIIIEHQKVVKGNQKRLESLRELAGKENLEYPSVTLPPQPHTKEGVDAYNEVIARVRMWVNLNLWQKLKLSRDDAKPLLRLKGFPSFPLVERQANEVDWWDMVCNVKKLINEKKEDGKVFWQNLAGYKRQEALRPYLSSEEDRKKGKKFARYQLGDLLLHLEKKHGEDWGKVYDEAWERIDKKVEGLSKHIKLEEERRSEDAQSKAALTDWLRAKASFVIEGLKEADKDEFCRCELKLQKWYGDLRGKPFAIEAENSILDISGFSKQYNCAFIWQKDGVKKLNLYLIINYFKGGKLRFKKIKPEAFEANRFYTVINKKSGEIVPMEVNFNFDDPNLIILPLAFGKRQGREFIWNDLLSLETGSLKLANGRVIEKTLYNRRTRQDEPALFVALTFERREVLDSSNIKPMNLIGVDRGENIPAVIALTDPEGCPLSRFKDSLGNPTHILRIGESYKEKQRTVQAKKEVEQRRAGGYSRKYASKAKNLADDMVRNTARDLLYYAVTQDAMLIFENLSRGFGRQGKRTFMAERQYTRMEDWLTAKLAYEGLPSKTYLSKTLAQYTSKTCSNCGFTITSADYDRVLEKLKKTATGWMTTINGKELKVEGQITYYNRYKRQNVVKDLSVELDRLSEESVNNDISSWTKGRSGEALSLLKKRFSHRPVQEKFVCLNCGFETHADEQAALNIARSWLFLRSQEYKKYQTNKTTGNTDKRAFVETWQSFYRKKLKEVWKPAV

SEQ ID NO: 26206 - protein, 978 aa, synthetic construct
  REGION 1..978: note = engineered CasX variant
QEIKRINKIRRRLVKDSNTKKAGKTGPMKTLLVRVMTPDLRERLENLRKKPENIPQPISNTSRANLNKLLTDYTEMKKAILHVYWEEFQKDPVGLMSRVAQPASKKIDQNKLKPEMDEKGNLTTAGFACSQCGQPLFVYKLEQVSEKGKAYTNYFGRCNVAEHEKLILLAQLKPEKDSDEAVTYSLGKFGQRALDFYSIHVTKESTHPVKPLAQIAGNRYASGPVGKALSDACMGTIASFLSKYQDIIIEHQKVVKGNQKRLESLRELAGKENLEYPSVTLPPQPHTKEGVDAYNEVIARVRMWVNLNLWQKLKLSRDDAKPLLRLKGFPSFPLVERQANEVDWWDMVCNVKKLINEKKEDGKVFWQNLAGYKRQEALRPYLSSEEDRKKGKKFARYQLGDLLLHLEKKHGEDWGKVYDEAWERIDKKVEGLSKHIKLEEERRSEDAQSKAALTDWLRAKASFVIEGLKEADKDEFCRCELKLQKWYGDLRGKPFAIEAENSILDISGFSKQYNCAFIWQKDGVKKLNLYLIINYFKGGKLRFKKIKPEAFEANRFYTVINKKSGEIVPMEVNFNFDDPNLIILPLAFGKRQGREFIWNDLLSLETGSLKLANGRVIEKTLYNRRTRQDEPALFVALTFERREVLDSSNIKPMNLIGVDRGENIPAVIALTDPEGCPLSRFKDSLGNPTHILRIGESYKEKQRTTQAKKEVEQRRAGGYSRKYASKAKNLADDMVRNTARDLLYYAVTQDAMLIFENLSRGFGRQGKRTFMAERQYTRMEDWLTAKLAYEGLPSKTYLSKTLAQYTSKTCSNCGFTITSADYDRVLEKLKKTATGWMTTINGKELKVEGQITYYNRYKRQNVVKDLSVELDRLSEESVNNDISSWTKGRSGEALSLLKKRFSHRPVQEKFVCLNCGFETHADEQAALNIARSWLFLRSQEYKKYQTNKTTGNTDKRAFVETWQSFYRKKLKEVWKPAV

SEQ ID NO: 26207 - protein, 978 aa, synthetic construct
  REGION 1..978: note = engineered CasX variant
QEIKRINKIRRRLVKDSNTKKAGKTGPMKTLLVRVMTPDLRERLENLRKKPENIPQPISNTSRANLNKLLTDYTEMKKAILHVYWEEFQKDPVGLMSRVAQPASKKIDQNKLKPEMDEKGNLTTAGFACSQCGQPLFVYKLEQVSEKGKAYTNYFGRCNVAEHEKLILLAQLKPEKDSDEAVTYSLGKFGQRALDFYSIHVTKESTHPVKPLAQIAGNRYASGPVGKALSDACMGTIASFLSKYQDIIIEHQKVVKGNQKRLESLRELAGKENLEYPSVTLPPQPHTKEGVDAYNEVIARVRMWVNLNLWQKLKLSRDDAKPLLRLKGFPSFPLVERQANEVDWWDMVCNVKKLINEKKEDGKVFWQNLAGYKRQEALRPYLSSEEDRKKGKKFARYQLGDLLLHLEKKHGEDWGKVYDEAWERIDKKVEGLSKHIKLEEERRSEDAQSKAALTDWLRAKASFVIEGLKEADKDEFCRCELKLQKWYGDLRGKPFAIEAENSILDISGFSKQYNCAFIWQKDGVKKLNLYLIINYFKGGKLRFKKIKPEAFEANRFYTVINKKSGEIVPMEVNFNFDDPNLIILPLAFGKRQGREFIWNDLLSLETGSLKLANGRVIEKTLYNRRTRQDEPALFVALTFERREVLDSSNIKPMNLIGVDRGENIPAVIALTDPEGCPLSRFKDSLGNPTHILRIGESYKEKQRTSQAKKEVEQRRAGNYSRKYASKAKNLADDMVRNTARDLLYYAVTQDAMLIFENLSRGFGRQGKRTFMAERQYTRMEDWLTAKLAYEGLPSKTYLSKTLAQYTSKTCSNCGFTITSADYDRVLEKLKKTATGWMTTINGKELKVEGQITYYNRYKRQNVVKDLSVELDRLSEESVNNDISSWTKGRSGEALSLLKKRFSHRPVQEKFVCLNCGFETHADEQAALNIARSWLFLRSQEYKKYQTNKTTGNTDKRAFVETWQSFYRKKLKEVWKPAV

SEQ ID NO: 26208 - protein, 978 aa, synthetic construct
  REGION 1..978: note = engineered CasX variant
QEIKRINKIRRRLVKDSNTKKAGKTGPMKTLLVRVMTPDLRERLENLRKKPENIPQPISNTSRANLNKLLTDYTEMKKAILHVYWEEFQKDPVGLMSRVAQPASKKIDQNKLKPEMDEKGNLTTAGFACSQCGQPLFVYKLEQVSEKGKAYTNYFGRCNVAEHEKLILLAQLKPEKDSDEAVTYSLGKFGQRALDFYSIHVTKESTHPVKPLAQIAGNRYASGPVGKALSDACMGTIASFLSKYQDIIIEHQKVVKGNQKRLESLRELAGKENLEYPSVTLPPQPHTKEGVDAYNEVIARVRMWVNLNLWQKLKLSRDDAKPLLRLKGFPSFPLVERQANEVDWWDMVCNVKKLINEKKEDGKVFWQNLAGYKRQEALRPYLSSEEDRKKGKKFARYQLGDLLLHLEKKHGEDWGKVYDEAWERIDKKVEGLSKHIKLEEERRSEDAQSKAALTDWLRAKASFVIEGLKEADKDEFCRCELKLQKWYGDLRGKPFAIEAENSILDISGFSKQYNCAFIWQKDGVKKLNLYLIINYFKGGKLRFKKIKPEAFEANRFYTVINKKSGEIVPMEVNFNFDDPNLIILPLAFGKRQGREFIWNDLLSLETGSLKLANGRVIEKTLYNRRTRQDEPALFVALTFERREVLDSSNIKPMNLIGVDRGENIPAVIALTDPEGCPLSRFKDSLGNPTHILRIGESYKEKQRTSQAKKEVEQRRAGGYSRKYASKAKNLADDMVRNTARDLLYYAVTQDAMLIFENLSRGFGRQGKRTFMAERQYTRMEDWLTAKLAYEGLPSKTYLSKTLAQYTSKTCSNCGFTITSADYDRVLEKLKKTATGWMTTINGKELKVEGQITYYNRYKRQNVVKDLSVELDRLSEESVNNDISSWTKGRSGEALSLLKKRFSHRPVQEKFVCLNCGFETHADEQAALNIARSWLFLRSQEYKKYQTNKTTGNTDKRAFVETWQSFYRKKLKEVWKPAV

SEQ ID NO: 26209 - protein, 978 aa, synthetic construct
  REGION 1..978: note = engineered CasX variant
QEIKRINKIRRRLVKDSNTKKAGKTGPMKTLLVRVMTPDLRERLENLRKKPENIPQPISNTSRANLNKLLTDYTEMKKAILHVYWEEFQKDPVGLMSRVAQPASKKIDQNKLKPEMDEKGNLTTAGFACSQCGQPLFVYKLEQVSEKGKAYTNYFGRCNVAEHEKLILLAQLKPEKDSDEAVTYSLGKFGQRALDFYSIHVTKESTHPVKPLAQIAGNRYASGPVGKALSDACMGTIASFLSKYQDIIIEHQKVVKGNQKRLESLRELAGKENLEYPSVTLPPQPHTKEGVDAYNEVIARVRMWVNLNLWQKLKLSRDDAKPLLRLKGFPSFPLVERQANEVDWWDMVCNVKKLINEKKEDGKVFWQNLAGYKRQEALRPYLSSEEDRKKGKKFARYQLGDLLLHLEKKHGEDWGKVYDEAWERIDKKVEGLSKHIKLEEERRSEDAQSKAALTDWLRAKASFVIEGLKEADKDEFCRCELKLQKWYGDLRGKPFAIEAENSILDISGFSKQYNCAFIWQKDGVKKLNLYLIINYFKGGKLRFKKIKPEAFEANRFYTVINKKSGEIVPMEVNFNFDDPNLIILPLAFGKRQGREFIWNDLLSLETGSLKLANGRVIEKTLYNRRTRQDEPALFVALTFERREVLDSSNIKPMNLIGVDRGENIPAVIALTDPEGCPLSRFKDSLGNPTHILRIGESYKEKQRTQQALKEVEQRRAGGYSRKYASKAKNLADDMVRNTARDLLYYAVTQDAMLIFENLSRGFGRQGKRTFMAERQYTRMEDWLTAKLAYEGLPSKTYLSKTLAQYTSKTCSNCGFTITSADYDRVLEKLKKTATGWMTTINGKELKVEGQITYYNRYKRQNVVKDLSVELDRLSEESVNNDISSWTKGRSGEALSLLKKRFSHRPVQEKFVCLNCGFETHADEQAALNIARSWLFLRSQEYKKYQTNKTTGNTDKRAFVETWQSFYRKKLKEVWKPAV

SEQ ID NO: 26210 - protein, 978 aa, synthetic construct
  REGION 1..978: note = engineered CasX variant
QEIKRINKIRRRLVKDSNTKKAGKTGPMKTLLVRVMTPDLRERLENLRKKPENIPQPISNTSRANLNKLLTDYTEMKKAILHVYWEEFQKDPVGLMSRVAQPASKKIDQNKLKPEMDEKGNLTTAGFACSQCGQPLFVYKLEQVSEKGKAYTNYFGRCNVAEHEKLILLAQLKPEKDSDEAVTYSLGKFGQRALDFYSIHVTKESTHPVKPLAQIAGNRYASGPVGKALSDACMGTIASFLSKYQDIIIEHQKVVKGNQKRLESLRELAGKENLEYPSVTLPPQPHTKEGVDAYNEVIARVRMWVNLNLWQKLKLSRDDAKPLLRLKGFPSFPLVERQANEVDWWDMVCNVKKLINEKKEDGKVFWQNLAGYKRQEALRPYLSSEEDRKKGKKFARYQLGDLLLHLEKKHGEDWGKVYDEAWERIDKKVEGLSKHIKLEEERRSEDAQSKAALTDWLRAKASFVIEGLKEADKDEFCRCELKLQKWYGDLRGKPFAIEAENSILDISGFSKQYNCAFIWQKDGVKKLNLYLIINYFKGGKLRFKKIKPEAFEANRFYTVINKKSGEIVPMEVNFNFDDPNLIILPLAFGKRQGREFIWNDLLSLETGSLKLANGRVIEKTLYNRRTRQDEPALFVALTFERREVLDSSNIKPMNLIGVDRGENIPAVIALTDPEGCPLSRFKDSLGNPTHILRIGESYKEKQRTQQAKKEVEQRRAGGYSRKYASKAKNLADDMVRNTARDLLYYAVTQDAMLIFENLSRGFGRQGKRTFMAERQYTRMEDWLTAKLAYEGLPSKTYLSKTLAQYTSKTCSNCGFTITSADYDRVLEKLKKTATGWMTTINGKELKVEGQITYYNRYKRQNVVKDLSVELDRLSEESVNNDISSWTKGRSGEALSLLKKRFSHRPVQEKFVCLNCGFETHADEQAALNIARSWLFLRSQEYKKYQTNKTTGNTDKRAFVETWQSFYRKKLKEVWKPAV

SEQ ID NO: 26211 - protein, 978 aa, synthetic construct
  REGION 1..978: note = engineered CasX variant
QEIKRINKIRRRLVKDSNTKKAGKTGPMKTLLVRVMTPDLRERLENLRKKPENIPQPISNTSRANLNKLLTDYTEMKKAILHVYWEEFQKDPVGLMSRVAQPASKKIDQNKLKPEMDEKGNLTTAGFACSQCGQPLFVYKLEQVSEKGKAYTNYFGRCNVAEHEKLILLAQLKPEKDSDEAVTYSLGKFGQRALDFYSIHVTKESTHPVKPLAQIAGNRYASGPVGKALSDACMGTIASFLSKYQDIIIEHQKVVKGNQKRLESLRELAGKENLEYPSVTLPPQPHTKEGVDAYNEVIARVRMWVNLNLWQKLKLSRDDAKPLLRLKGFPSFPLVERQANEVDWWDMVCNVKKLINEKKEDGKVFWQNLAGYKRQEALRPYLSSEEDRKKGKKFARYQLGDLLLHLEKKHGEDWGKVYDEAWERIDKKVEGLSKHIKLEEERRSEDAQSKAALTDWLRAKASFVIEGLKEADKDEFCRCELKLQKWYGDLRGKPFAIEAENSILDISGFSKQYNCAFIWQKDGVKKLNLYLIINYFKGGKLRFKKIKPEAFEANRFYTVINKKSGEIVPMEVNFNFDDPNLIILPLAFGKRQGREFIWNDLLSLETGSLKLANGRVIEKTLYNRRTRQDEPALFVALTFERREVLDSSNIKPMNLIGVDRGENIPAVIALTDPEGCPLSRFKDSLGNPTHILRIGESYKEKQRTNQAKKEVEQRRAGGYSRKYASKAKNLADDMVRNTARDLLYYAVTQDAMLIFENLSRGFGRQGKRTFMAERQYTRMEDWLTAKLAYEGLPSKTYLSKTLAQYTSKTCSNCGFTITSADYDRVLEKLKKTATGWMTTINGKELKVEGQITYYNRYKRQNVVKDLSVELDRLSEESVNNDISSWTKGRSGEALSLLKKRFSHRPVQEKFVCLNCGFETHADEQAALNIARSWLFLRSQEYKKYQTNKTTGNTDKRAFVETWQSFYRKKLKEVWKPAV

SEQ ID NO: 26212 - protein, 978 aa, synthetic construct
  REGION 1..978: note = engineered CasX variant
QEIKRINKIRRRLVKDSNTKKAGKTGPMKTLLVRVMTPDLRERLENLRKKPENIPQPISNTSRANLNKLLTDYTEMKKAILHVYWEEFQKDPVGLMSRVAQPASKKIDQNKLKPEMDEKGNLTTAGFACSQCGQPLFVYKLEQVSEKGKAYTNYFGRCNVAEHEKLILLAQLKPEKDSDEAVTYSLGKFGQRALDFYSIHVTKESTHPVKPLAQIAGNRYASGPVGKALSDACMGTIASFLSKYQDIIIEHQKVVKGNQKRLESLRELAGKENLEYPSVTLPPQPHTKEGVDAYNEVIARVRMWVNLNLWQKLKLSRDDAKPLLRLKGFPSFPLVERQANEVDWWDMVCNVKKLINEKKEDGKVFWQNLAGYKRQEALRPYLSSEEDRKKGKKFARYQLGDLLLHLEKKHGEDWGKVYDEAWERIDKKVEGLSKHIKLEEERRSEDAQSKAALTDWLRAKASFVIEGLKEADKDEFCRCELKLQKWYGDLRGKPFAIEAENSILDISGFSKQYNCAFIWQKDGVKKLNLYLIINYFKGGKLRFKKIKPEAFEANRFYTVINKKSGEIVPMEVNFNFDDPNLIILPLAFGKRQGREFIWNDLLSLETGSLKLANGRVIEKTLYNRRTRQDEPALFVALTFERREVLDSSNIKPMNLIGVDRGENIPAVIALTDPEGCPLSRFKDSLGNPTHILRIGESYKEKQRTMQAKKEVEQRRAGGYSRKYASKAKNLADDMVRNTARDLLYYAVTQDAMLIFENLSRGFGRQGKRTFMAERQYTRMEDWLTAKLAYEGLPSKTYLSKTLAQYTSKTCSNCGFTITSADYDRVLEKLKKTATGWMTTINGKELKVEGQITYYNRYKRQNVVKDLSVELDRLSEESVNNDISSWTKGRSGEALSLLKKRFSHRPVQEKFVCLNCGFETHADEQAALNIARSWLFLRSQEYKKYQTNKTTGNTDKRAFVETWQSFYRKKLKEVWKPAV

SEQ ID NO: 26213 - protein, 978 aa, synthetic construct
  REGION 1..978: note = engineered CasX variant
QEIKRINKIRRRLVKDSNTKKAGKTGPMKTLLVRVMTPDLRERLENLRKKPENIPQPISNTSRANLNKLLTDYTEMKKAILHVYWEEFQKDPVGLMSRVAQPASKKIDQNKLKPEMDEKGNLTTAGFACSQCGQPLFVYKLEQVSEKGKAYTNYFGRCNVAEHEKLILLAQLKPEKDSDEAVTYSLGKFGQRALDFYSIHVTKESTHPVKPLAQIAGNRYASGPVGKALSDACMGTIASFLSKYQDIIIEHQKVVKGNQKRLESLRELAGKENLEYPSVTLPPQPHTKEGVDAYNEVIARVRMWVNLNLWQKLKLSRDDAKPLLRLKGFPSFPLVERQANEVDWWDMVCNVKKLINEKKEDGKVFWQNLAGYKRQEALRPYLSSEEDRKKGKKFARYQLGDLLLHLEKKHGEDWGKVYDEAWERIDKKVEGLSKHIKLEEERRSEDAQSKAALTDWLRAKASFVIEGLKEADKDEFCRCELKLQKWYGDLRGKPFAIEAENSILDISGFSKQYNCAFIWQKDGVKKLNLYLIINYFKGGKLRFKKIKPEAFEANRFYTVINKKSGEIVPMEVNFNFDDPNLIILPLAFGKRQGREFIWNDLLSLETGSLKLANGRVIEKTLYNRRTRQDEPALFVALTFERREVLDSSNIKPMNLIGVDRGENIPAVIALTDPEGCPLSRFKDSLGNPTHILRIGESYKEKQRTLQAKKEVESRRAGGYSRKYASKAKNLADDMVRNTARDLLYYAVTQDAMLIFENLSRGFGRQGKRTFMAERQYTRMEDWLTAKLAYEGLPSKTYLSKTLAQYTSKTCSNCGFTITSADYDRVLEKLKKTATGWMTTINGKELKVEGQITYYNRYKRQNVVKDLSVELDRLSEESVNNDISSWTKGRSGEALSLLKKRFSHRPVQEKFVCLNCGFETHADEQAALNIARSWLFLRSQEYKKYQTNKTTGNTDKRAFVETWQSFYRKKLKEVWKPAV

SEQ ID NO: 26214 - protein, 978 aa, synthetic construct
  REGION 1..978: note = engineered CasX variant
QEIKRINKIRRRLVKDSNTKKAGKTGPMKTLLVRVMTPDLRERLENLRKKPENIPQPISNTSRANLNKLLTDYTEMKKAILHVYWEEFQKDPVGLMSRVAQPASKKIDQNKLKPEMDEKGNLTTAGFACSQCGQPLFVYKLEQVSEKGKAYTNYFGRCNVAEHEKLILLAQLKPEKDSDEAVTYSLGKFGQRALDFYSIHVTKESTHPVKPLAQIAGNRYASGPVGKALSDACMGTIASFLSKYQDIIIEHQKVVKGNQKRLESLRELAGKENLEYPSVTLPPQPHTKEGVDAYNEVIARVRMWVNLNLWQKLKLSRDDAKPLLRLKGFPSFPLVERQANEVDWWDMVCNVKKLINEKKEDGKVFWQNLAGYKRQEALRPYLSSEEDRKKGKKFARYQLGDLLLHLEKKHGEDWGKVYDEAWERIDKKVEGLSKHIKLEEERRSEDAQSKAALTDWLRAKASFVIEGLKEADKDEFCRCELKLQKWYGDLRGKPFAIEAENSILDISGFSKQYNCAFIWQKDGVKKLNLYLIINYFKGGKLRFKKIKPEAFEANRFYTVINKKSGEIVPMEVNFNFDDPNLIILPLAFGKRQGREFIWNDLLSLETGSLKLANGRVIEKTLYNRRTRQDEPALFVALTFERREVLDSSNIKPMNLIGVDRGENIPAVIALTDPEGCPLSRFKDSLGNPTHILRIGESYKEKQRTLQAKKEVEQRRAGGYSRKYASKAKNLADDMVRNTARDLLYYAVTQDAMLIFENLSRGFGRQGKRTFMAERQYTRMEDWLTAKLAYEGLPSKTYLSKTLAQYTSKTCSNCGFTITSADYDRVLEKLKKTATGWMTTINGKELKVEGQITYYNRYKRQNVVKDLSVELDRLSEESVNNDISSWTKGRSGEALSLLKKRFSHRPVQEKFVCLNCGFETHADEQAALNIARSWLFLRSQEYKKYQTNKTTGNTDKRAFVETWQSFYRKKLKEVWKPAV

SEQ ID NO: 26215 - protein, 978 aa, synthetic construct
  REGION 1..978: note = engineered CasX variant
QEIKRINKIRRRLVKDSNTKKAGKTGPMKTLLVRVMTPDLRERLENLRKKPENIPQPISNTSRANLNKLLTDYTEMKKAILHVYWEEFQKDPVGLMSRVAQPASKKIDQNKLKPEMDEKGNLTTAGFACSQCGQPLFVYKLEQVSEKGKAYTNYFGRCNVAEHEKLILLAQLKPEKDSDEAVTYSLGKFGQRALDFYSIHVTKESTHPVKPLAQIAGNRYASGPVGKALSDACMGTIASFLSKYQDIIIEHQKVVKGNQKRLESLRELAGKENLEYPSVTLPPQPHTKEGVDAYNEVIARVRMWVNLNLWQKLKLSRDDAKPLLRLKGFPSFPLVERQANEVDWWDMVCNVKKLINEKKEDGKVFWQNLAGYKRQEALRPYLSSEEDRKKGKKFARYQLGDLLLHLEKKHGEDWGKVYDEAWERIDKKVEGLSKHIKLEEERRSEDAQSKAALTDWLRAKASFVIEGLKEADKDEFCRCELKLQKWYGDLRGKPFAIEAENSILDISGFSKQYNCAFIWQKDGVKKLNLYLIINYFKGGKLRFKKIKPEAFEANRFYTVINKKSGEIVPMEVNFNFDDPNLIILPLAFGKRQGREFIWNDLLSLETGSLKLANGRVIEKTLYNRRTRQDEPALFVALTFERREVLDSSNIKPMNLIGVDRGENIPAVIALTDPEGCPLSRFKDSLGNPTHILRIGESYKEKQRTIYAKKEVEQRRAGGYSRKYASKAKNLADDMVRNTARDLLYYAVTQDAMLIFENLSRGFGRQGKRTFMAERQYTRMEDWLTAKLAYEGLPSKTYLSKTLAQYTSKTCSNCGFTITSADYDRVLEKLKKTATGWMTTINGKELKVEGQITYYNRYKRQNVVKDLSVELDRLSEESVNNDISSWTKGRSGEALSLLKKRFSHRPVQEKFVCLNCGFETHADEQAALNIARSWLFLRSQEYKKYQTNKTTGNTDKRAFVETWQSFYRKKLKEVWKPAV

SEQ ID NO: 26216 - protein, 978 aa, synthetic construct
  REGION 1..978: note = engineered CasX variant
QEIKRINKIRRRLVKDSNTKKAGKTGPMKTLLVRVMTPDLRERLENLRKKPENIPQPISNTSRANLNKLLTDYTEMKKAILHVYWEEFQKDPVGLMSRVAQPASKKIDQNKLKPEMDEKGNLTTAGFACSQCGQPLFVYKLEQVSEKGKAYTNYFGRCNVAEHEKLILLAQLKPEKDSDEAVTYSLGKFGQRALDFYSIHVTKESTHPVKPLAQIAGNRYASGPVGKALSDACMGTIASFLSKYQDIIIEHQKVVKGNQKRLESLRELAGKENLEYPSVTLPPQPHTKEGVDAYNEVIARVRMWVNLNLWQKLKLSRDDAKPLLRLKGFPSFPLVERQANEVDWWDMVCNVKKLINEKKEDGKVFWQNLAGYKRQEALRPYLSSEEDRKKGKKFARYQLGDLLLHLEKKHGEDWGKVYDEAWERIDKKVEGLSKHIKLEEERRSEDAQSKAALTDWLRAKASFVIEGLKEADKDEFCRCELKLQKWYGDLRGKPFAIEAENSILDISGFSKQYNCAFIWQKDGVKKLNLYLIINYFKGGKLRFKKIKPEAFEANRFYTVINKKSGEIVPMEVNFNFDDPNLIILPLAFGKRQGREFIWNDLLSLETGSLKLANGRVIEKTLYNRRTRQDEPALFVALTFERREVLDSSNIKPMNLIGVDRGENIPAVIALTDPEGCPLSRFKDSLGNPTHILRIGESYKEKQRTIVAKKEVEQRRAGGYSRKYASKAKNLADDMVRNTARDLLYYAVTQDAMLIFENLSRGFGRQGKRTFMAERQYTRMEDWLTAKLAYEGLPSKTYLSKTLAQYTSKTCSNCGFTITSADYDRVLEKLKKTATGWMTTINGKELKVEGQITYYNRYKRQNVVKDLSVELDRLSEESVNNDISSWTKGRSGEALSLLKKRFSHRPVQEKFVCLNCGFETHADEQAALNIARSWLFLRSQEYKKYQTNKTTGNTDKRAFVETWQSFYRKKLKEVWKPAV

SEQ ID NO: 26217 - protein, 978 aa, synthetic construct
  REGION 1..978: note = engineered CasX variant
QEIKRINKIRRRLVKDSNTKKAGKTGPMKTLLVRVMTPDLRERLENLRKKPENIPQPISNTSRANLNKLLTDYTEMKKAILHVYWEEFQKDPVGLMSRVAQPASKKIDQNKLKPEMDEKGNLTTAGFACSQCGQPLFVYKLEQVSEKGKAYTNYFGRCNVAEHEKLILLAQLKPEKDSDEAVTYSLGKFGQRALDFYSIHVTKESTHPVKPLAQIAGNRYASGPVGKALSDACMGTIASFLSKYQDIIIEHQKVVKGNQKRLESLRELAGKENLEYPSVTLPPQPHTKEGVDAYNEVIARVRMWVNLNLWQKLKLSRDDAKPLLRLKGFPSFPLVERQANEVDWWDMVCNVKKLINEKKEDGKVFWQNLAGYKRQEALRPYLSSEEDRKKGKKFARYQLGDLLLHLEKKHGEDWGKVYDEAWERIDKKVEGLSKHIKLEEERRSEDAQSKAALTDWLRAKASFVIEGLKEADKDEFCRCELKLQKWYGDLRGKPFAIEAENSILDISGFSKQYNCAFIWQKDGVKKLNLYLIINYFKGGKLRFKKIKPEAFEANRFYTVINKKSGEIVPMEVNFNFDDPNLIILPLAFGKRQGREFIWNDLLSLETGSLKLANGRVIEKTLYNRRTRQDEPALFVALTFERREVLDSSNIKPMNLIGVDRGENIPAVIALTDPEGCPLSRFKDSLGNPTHILRIGESYKEKQRTIVAKKAVEQRRAGGYSRKYASKAKNLADDMVRNTARDLLYYAVTQDAMLIFENLSRGFGRQGKRTFMAERQYTRMEDWLTAKLAYEGLPSKTYLSKTLAQYTSKTCSNCGFTITSADYDRVLEKLKKTATGWMTTINGKELKVEGQITYYNRYKRQNVVKDLSVELDRLSEESVNNDISSWTKGRSGEALSLLKKRFSHRPVQEKFVCLNCGFETHADEQAALNIARSWLFLRSQEYKKYQTNKTTGNTDKRAFVETWQSFYRKKLKEVWKPAV

SEQ ID NO: 26218 - protein, 978 aa, synthetic construct
  REGION 1..978: note = engineered CasX variant
QEIKRINKIRRRLVKDSNTKKAGKTGPMKTLLVRVMTPDLRERLENLRKKPENIPQPISNTSRANLNKLLTDYTEMKKAILHVYWEEFQKDPVGLMSRVAQPASKKIDQNKLKPEMDEKGNLTTAGFACSQCGQPLFVYKLEQVSEKGKAYTNYFGRCNVAEHEKLILLAQLKPEKDSDEAVTYSLGKFGQRALDFYSIHVTKESTHPVKPLAQIAGNRYASGPVGKALSDACMGTIASFLSKYQDIIIEHQKVVKGNQKRLESLRELAGKENLEYPSVTLPPQPHTKEGVDAYNEVIARVRMWVNLNLWQKLKLSRDDAKPLLRLKGFPSFPLVERQANEVDWWDMVCNVKKLINEKKEDGKVFWQNLAGYKRQEALRPYLSSEEDRKKGKKFARYQLGDLLLHLEKKHGEDWGKVYDEAWERIDKKVEGLSKHIKLEEERRSEDAQSKAALTDWLRAKASFVIEGLKEADKDEFCRCELKLQKWYGDLRGKPFAIEAENSILDISGFSKQYNCAFIWQKDGVKKLNLYLIINYFKGGKLRFKKIKPEAFEANRFYTVINKKSGEIVPMEVNFNFDDPNLIILPLAFGKRQGREFIWNDLLSLETGSLKLANGRVIEKTLYNRRTRQDEPALFVALTFERREVLDSSNIKPMNLIGVDRGENIPAVIALTDPEGCPLSRFKDSLGNPTHILRIGESYKEKQRTITAKKEVEQRRAGGYSRKYASKAKNLADDMVRNTARDLLYYAVTQDAMLIFENLSRGFGRQGKRTFMAERQYTRMEDWLTAKLAYEGLPSKTYLSKTLAQYTSKTCSNCGFTITSADYDRVLEKLKKTATGWMTTINGKELKVEGQITYYNRYKRQNVVKDLSVELDRLSEESVNNDISSWTKGRSGEALSLLKKRFSHRPVQEKFVCLNCGFETHADEQAALNIARSWLFLRSQEYKKYQTNKTTGNTDKRAFVETWQSFYRKKLKEVWKPAV

SEQ ID NO: 26219 - protein, 978 aa, synthetic construct
  REGION 1..978: note = engineered CasX variant
QEIKRINKIRRRLVKDSNTKKAGKTGPMKTLLVRVMTPDLRERLENLRKKPENIPQPISNTSRANLNKLLTDYTEMKKAILHVYWEEFQKDPVGLMSRVAQPASKKIDQNKLKPEMDEKGNLTTAGFACSQCGQPLFVYKLEQVSEKGKAYTNYFGRCNVAEHEKLILLAQLKPEKDSDEAVTYSLGKFGQRALDFYSIHVTKESTHPVKPLAQIAGNRYASGPVGKALSDACMGTIASFLSKYQDIIIEHQKVVKGNQKRLESLRELAGKENLEYPSVTLPPQPHTKEGVDAYNEVIARVRMWVNLNLWQKLKLSRDDAKPLLRLKGFPSFPLVERQANEVDWWDMVCNVKKLINEKKEDGKVFWQNLAGYKRQEALRPYLSSEEDRKKGKKFARYQLGDLLLHLEKKHGEDWGKVYDEAWERIDKKVEGLSKHIKLEEERRSEDAQSKAALTDWLRAKASFVIEGLKEADKDEFCRCELKLQKWYGDLRGKPFAIEAENSILDISGFSKQYNCAFIWQKDGVKKLNLYLIINYFKGGKLRFKKIKPEAFEANRFYTVINKKSGEIVPMEVNFNFDDPNLIILPLAFGKRQGREFIWNDLLSLETGSLKLANGRVIEKTLYNRRTRQDEPALFVALTFERREVLDSSNIKPMNLIGVDRGENIPAVIALTDPEGCPLSRFKDSLGNPTHILRIGESYKEKQRTISANKEVEQRRAGGYSRKYASKAKNLADDMVRNTARDLLYYAVTQDAMLIFENLSRGFGRQGKRTFMAERQYTRMEDWLTAKLAYEGLPSKTYLSKTLAQYTSKTCSNCGFTITSADYDRVLEKLKKTATGWMTTINGKELKVEGQITYYNRYKRQNVVKDLSVELDRLSEESVNNDISSWTKGRSGEALSLLKKRFSHRPVQEKFVCLNCGFETHADEQAALNIARSWLFLRSQEYKKYQTNKTTGNTDKRAFVETWQSFYRKKLKEVWKPAV

SEQ ID NO: 26220 - protein, 978 aa, synthetic construct
  REGION 1..978: note = engineered CasX variant
QEIKRINKIRRRLVKDSNTKKAGKTGPMKTLLVRVMTPDLRERLENLRKKPENIPQPISNTSRANLNKLLTDYTEMKKAILHVYWEEFQKDPVGLMSRVAQPASKKIDQNKLKPEMDEKGNLTTAGFACSQCGQPLFVYKLEQVSEKGKAYTNYFGRCNVAEHEKLILLAQLKPEKDSDEAVTYSLGKFGQRALDFYSIHVTKESTHPVKPLAQIAGNRYASGPVGKALSDACMGTIASFLSKYQDIIIEHQKVVKGNQKRLESLRELAGKENLEYPSVTLPPQPHTKEGVDAYNEVIARVRMWVNLNLWQKLKLSRDDAKPLLRLKGFPSFPLVERQANEVDWWDMVCNVKKLINEKKEDGKVFWQNLAGYKRQEALRPYLSSEEDRKKGKKFARYQLGDLLLHLEKKHGEDWGKVYDEAWERIDKKVEGLSKHIKLEEERRSEDAQSKAALTDWLRAKASFVIEGLKEADKDEFCRCELKLQKWYGDLRGKPFAIEAENSILDISGFSKQYNCAFIWQKDGVKKLNLYLIINYFKGGKLRFKKIKPEAFEANRFYTVINKKSGEIVPMEVNFNFDDPNLIILPLAFGKRQGREFIWNDLLSLETGSLKLANGRVIEKTLYNRRTRQDEPALFVALTFERREVLDSSNIKPMNLIGVDRGENIPAVIALTDPEGCPLSRFKDSLGNPTHILRIGESYKEKQRTISAKKEVEQRRAGGYSRKYASKAKNLADDMVRNTARDLLYYAVTQDAMLIFENLSRGFGRQGKRTFMAERQYTRMEDWLTAKLAYEGLPSKTYLSKTLAQYTSKTCSNCGFTITSADYDRVLEKLKKTATGWMTTINGKELKVEGQITYYNRYKRQNVVKDLSVELDRLSEESVNNDISSWTKGRSGEALSLLKKRFSHRPVQEKFVCLNCGFETHADEQAALNIARSWLFLRSQEYKKYQTNKTTGNTDKRAFVETWQSFYRKKLKEVWKPAV

SEQ ID NO: 26221 - protein, 978 aa, synthetic construct
  REGION 1..978: note = engineered CasX variant
QEIKRINKIRRRLVKDSNTKKAGKTGPMKTLLVRVMTPDLRERLENLRKKPENIPQPISNTSRANLNKLLTDYTEMKKAILHVYWEEFQKDPVGLMSRVAQPASKKIDQNKLKPEMDEKGNLTTAGFACSQCGQPLFVYKLEQVSEKGKAYTNYFGRCNVAEHEKLILLAQLKPEKDSDEAVTYSLGKFGQRALDFYSIHVTKESTHPVKPLAQIAGNRYASGPVGKALSDACMGTIASFLSKYQDIIIEHQKVVKGNQKRLESLRELAGKENLEYPSVTLPPQPHTKEGVDAYNEVIARVRMWVNLNLWQKLKLSRDDAKPLLRLKGFPSFPLVERQANEVDWWDMVCNVKKLINEKKEDGKVFWQNLAGYKRQEALRPYLSSEEDRKKGKKFARYQLGDLLLHLEKKHGEDWGKVYDEAWERIDKKVEGLSKHIKLEEERRSEDAQSKAALTDWLRAKASFVIEGLKEADKDEFCRCELKLQKWYGDLRGKPFAIEAENSILDISGFSKQYNCAFIWQKDGVKKLNLYLIINYFKGGKLRFKKIKPEAFEANRFYTVINKKSGEIVPMEVNFNFDDPNLIILPLAFGKRQGREFIWNDLLSLETGSLKLANGRVIEKTLYNRRTRQDEPALFVALTFERREVLDSSNIKPMNLIGVDRGENIPAVIALTDPEGCPLSRFKDSLGNPTHILRIGESYKEKQRTISAKKEVEQRFAGGYSRKYASKAKNLADDMVRNTARDLLYYAVTQDAMLIFENLSRGFGRQGKRTFMAERQYTRMEDWLTAKLAYEGLPSKTYLSKTLAQYTSKTCSNCGFTITSADYDRVLEKLKKTATGWMTTINGKELKVEGQITYYNRYKRQNVVKDLSVELDRLSEESVNNDISSWTKGRSGEALSLLKKRFSHRPVQEKFVCLNCGFETHADEQAALNIARSWLFLRSQEYKKYQTNKTTGNTDKRAFVETWQSFYRKKLKEVWKPAV

SEQ ID NO: 26222 - protein, 978 aa, synthetic construct
  REGION 1..978: note = engineered CasX variant
QEIKRINKIRRRLVKDSNTKKAGKTGPMKTLLVRVMTPDLRERLENLRKKPENIPQPISNTSRANLNKLLTDYTEMKKAILHVYWEEFQKDPVGLMSRVAQPASKKIDQNKLKPEMDEKGNLTTAGFACSQCGQPLFVYKLEQVSEKGKAYTNYFGRCNVAEHEKLILLAQLKPEKDSDEAVTYSLGKFGQRALDFYSIHVTKESTHPVKPLAQIAGNRYASGPVGKALSDACMGTIASFLSKYQDIIIEHQKVVKGNQKRLESLRELAGKENLEYPSVTLPPQPHTKEGVDAYNEVIARVRMWVNLNLWQKLKLSRDDAKPLLRLKGFPSFPLVERQANEVDWWDMVCNVKKLINEKKEDGKVFWQNLAGYKRQEALRPYLSSEEDRKKGKKFARYQLGDLLLHLEKKHGEDWGKVYDEAWERIDKKVEGLSKHIKLEEERRSEDAQSKAALTDWLRAKASFVIEGLKEADKDEFCRCELKLQKWYGDLRGKPFAIEAENSILDISGFSKQYNCAFIWQKDGVKKLNLYLIINYFKGGKLRFKKIKPEAFEANRFYTVINKKSGEIVPMEVNFNFDDPNLIILPLAFGKRQGREFIWNDLLSLETGSLKLANGRVIEKTLYNRRTRQDEPALFVALTFERREVLDSSNIKPMNLIGVDRGENIPAVIALTDPEGCPLSRFKDSLGNPTHILRIGESYKEKQRTIRAKKEVEQARAGGYSRKYASKAKNLADDMVRNTARDLLYYAVTQDAMLIFENLSRGFGRQGKRTFMAERQYTRMEDWLTAKLAYEGLPSKTYLSKTLAQYTSKTCSNCGFTITSADYDRVLEKLKKTATGWMTTINGKELKVEGQITYYNRYKRQNVVKDLSVELDRLSEESVNNDISSWTKGRSGEALSLLKKRFSHRPVQEKFVCLNCGFETHADEQAALNIARSWLFLRSQEYKKYQTNKTTGNTDKRAFVETWQSFYRKKLKEVWKPAV

SEQ ID NO: 26223 - protein, 978 aa, synthetic construct
  REGION 1..978: note = engineered CasX variant
QEIKRINKIRRRLVKDSNTKKAGKTGPMKTLLVRVMTPDLRERLENLRKKPENIPQPISNTSRANLNKLLTDYTEMKKAILHVYWEEFQKDPVGLMSRVAQPASKKIDQNKLKPEMDEKGNLTTAGFACSQCGQPLFVYKLEQVSEKGKAYTNYFGRCNVAEHEKLILLAQLKPEKDSDEAVTYSLGKFGQRALDFYSIHVTKESTHPVKPLAQIAGNRYASGPVGKALSDACMGTIASFLSKYQDIIIEHQKVVKGNQKRLESLRELAGKENLEYPSVTLPPQPHTKEGVDAYNEVIARVRMWVNLNLWQKLKLSRDDAKPLLRLKGFPSFPLVERQANEVDWWDMVCNVKKLINEKKEDGKVFWQNLAGYKRQEALRPYLSSEEDRKKGKKFARYQLGDLLLHLEKKHGEDWGKVYDEAWERIDKKVEGLSKHIKLEEERRSEDAQSKAALTDWLRAKASFVIEGLKEADKDEFCRCELKLQKWYGDLRGKPFAIEAENSILDISGFSKQYNCAFIWQKDGVKKLNLYLIINYFKGGKLRFKKIKPEAFEANRFYTVINKKSGEIVPMEVNFNFDDPNLIILPLAFGKRQGREFIWNDLLSLETGSLKLANGRVIEKTLYNRRTRQDEPALFVALTFERREVLDSSNIKPMNLIGVDRGENIPAVIALTDPEGCPLSRFKDSLGNPTHILRIGESYKEKQRTIQWKKEVEQRRAGYYSRKYASKAKNLADDMVRNTARDLLYYAVTQDAMLIFENLSRGFGRQGKRTFMAERQYTRMEDWLTAKLAYEGLPSKTYLSKTLAQYTSKTCSNCGFTITSADYDRVLEKLKKTATGWMTTINGKELKVEGQITYYNRYKRQNVVKDLSVELDRLSEESVNNDISSWTKGRSGEALSLLKKRFSHRPVQEKFVCLNCGFETHADEQAALNIARSWLFLRSQEYKKYQTNKTTGNTDKRAFVETWQSFYRKKLKEVWKPAV

SEQ ID NO: 26224 - protein, 978 aa, synthetic construct
  REGION 1..978: note = engineered CasX variant
QEIKRINKIRRRLVKDSNTKKAGKTGPMKTLLVRVMTPDLRERLENLRKKPENIPQPISNTSRANLNKLLTDYTEMKKAILHVYWEEFQKDPVGLMSRVAQPASKKIDQNKLKPEMDEKGNLTTAGFACSQCGQPLFVYKLEQVSEKGKAYTNYFGRCNVAEHEKLILLAQLKPEKDSDEAVTYSLGKFGQRALDFYSIHVTKESTHPVKPLAQIAGNRYASGPVGKALSDACMGTIASFLSKYQDIIIEHQKVVKGNQKRLESLRELAGKENLEYPSVTLPPQPHTKEGVDAYNEVIARVRMWVNLNLWQKLKLSRDDAKPLLRLKGFPSFPLVERQANEVDWWDMVCNVKKLINEKKEDGKVFWQNLAGYKRQEALRPYLSSEEDRKKGKKFARYQLGDLLLHLEKKHGEDWGKVYDEAWERIDKKVEGLSKHIKLEEERRSEDAQSKAALTDWLRAKASFVIEGLKEADKDEFCRCELKLQKWYGDLRGKPFAIEAENSILDISGFSKQYNCAFIWQKDGVKKLNLYLIINYFKGGKLRFKKIKPEAFEANRFYTVINKKSGEIVPMEVNFNFDDPNLIILPLAFGKRQGREFIWNDLLSLETGSLKLANGRVIEKTLYNRRTRQDEPALFVALTFERREVLDSSNIKPMNLIGVDRGENIPAVIALTDPEGCPLSRFKDSLGNPTHILRIGESYKEKQRTIQWKKEVEQRRAGGYSRKYASKAKNLADDMVRNTARDLLYYAVTQDAMLIFENLSRGFGRQGKRTFMAERQYTRMEDWLTAKLAYEGLPSKTYLSKTLAQYTSKTCSNCGFTITSADYDRVLEKLKKTATGWMTTINGKELKVEGQITYYNRYKRQNVVKDLSVELDRLSEESVNNDISSWTKGRSGEALSLLKKRFSHRPVQEKFVCLNCGFETHADEQAALNIARSWLFLRSQEYKKYQTNKTTGNTDKRAFVETWQSFYRKKLKEVWKPAV

SEQ ID NO: 26225 - protein, 978 aa, synthetic construct
  REGION 1..978: note = engineered CasX variant
QEIKRINKIRRRLVKDSNTKKAGKTGPMKTLLVRVMTPDLRERLENLRKKPENIPQPISNTSRANLNKLLTDYTEMKKAILHVYWEEFQKDPVGLMSRVAQPASKKIDQNKLKPEMDEKGNLTTAGFACSQCGQPLFVYKLEQVSEKGKAYTNYFGRCNVAEHEKLILLAQLKPEKDSDEAVTYSLGKFGQRALDFYSIHVTKESTHPVKPLAQIAGNRYASGPVGKALSDACMGTIASFLSKYQDIIIEHQKVVKGNQKRLESLRELAGKENLEYPSVTLPPQPHTKEGVDAYNEVIARVRMWVNLNLWQKLKLSRDDAKPLLRLKGFPSFPLVERQANEVDWWDMVCNVKKLINEKKEDGKVFWQNLAGYKRQEALRPYLSSEEDRKKGKKFARYQLGDLLLHLEKKHGEDWGKVYDEAWERIDKKVEGLSKHIKLEEERRSEDAQSKAALTDWLRAKASFVIEGLKEADKDEFCRCELKLQKWYGDLRGKPFAIEAENSILDISGFSKQYNCAFIWQKDGVKKLNLYLIINYFKGGKLRFKKIKPEAFEANRFYTVINKKSGEIVPMEVNFNFDDPNLIILPLAFGKRQGREFIWNDLLSLETGSLKLANGRVIEKTLYNRRTRQDEPALFVALTFERREVLDSSNIKPMNLIGVDRGENIPAVIALTDPEGCPLSRFKDSLGNPTHILRIGESYKEKQRTIQVKKEVEQRRAGGYSRKYASKAKNLADDMVRNTARDLLYYAVTQDAMLIFENLSRGFGRQGKRTFMAERQYTRMEDWLTAKLAYEGLPSKTYLSKTLAQYTSKTCSNCGFTITSADYDRVLEKLKKTATGWMTTINGKELKVEGQITYYNRYKRQNVVKDLSVELDRLSEESVNNDISSWTKGRSGEALSLLKKRFSHRPVQEKFVCLNCGFETHADEQAALNIARSWLFLRSQEYKKYQTNKTTGNTDKRAFVETWQSFYRKKLKEVWKPAV

SEQ ID NO: 26226 - protein, 978 aa, synthetic construct
  REGION 1..978: note = engineered CasX variant
QEIKRINKIRRRLVKDSNTKKAGKTGPMKTLLVRVMTPDLRERLENLRKKPENIPQPISNTSRANLNKLLTDYTEMKKAILHVYWEEFQKDPVGLMSRVAQPASKKIDQNKLKPEMDEKGNLTTAGFACSQCGQPLFVYKLEQVSEKGKAYTNYFGRCNVAEHEKLILLAQLKPEKDSDEAVTYSLGKFGQRALDFYSIHVTKESTHPVKPLAQIAGNRYASGPVGKALSDACMGTIASFLSKYQDIIIEHQKVVKGNQKRLESLRELAGKENLEYPSVTLPPQPHTKEGVDAYNEVIARVRMWVNLNLWQKLKLSRDDAKPLLRLKGFPSFPLVERQANEVDWWDMVCNVKKLINEKKEDGKVFWQNLAGYKRQEALRPYLSSEEDRKKGKKFARYQLGDLLLHLEKKHGEDWGKVYDEAWERIDKKVEGLSKHIKLEEERRSEDAQSKAALTDWLRAKASFVIEGLKEADKDEFCRCELKLQKWYGDLRGKPFAIEAENSILDISGFSKQYNCAFIWQKDGVKKLNLYLIINYFKGGKLRFKKIKPEAFEANRFYTVINKKSGEIVPMEVNFNFDDPNLIILPLAFGKRQGREFIWNDLLSLETGSLKLANGRVIEKTLYNRRTRQDEPALFVALTFERREVLDSSNIKPMNLIGVDRGENIPAVIALTDPEGCPLSRFKDSLGNPTHILRIGESYKEKQRTIQTKKEVEQRRAGGYSRKYASKAKNLADDMVRNTARDLLYYAVTQDAMLIFENLSRGFGRQGKRTFMAERQYTRMEDWLTAKLAYEGLPSKTYLSKTLAQYTSKTCSNCGFTITSADYDRVLEKLKKTATGWMTTINGKELKVEGQITYYNRYKRQNVVKDLSVELDRLSEESVNNDISSWTKGRSGEALSLLKKRFSHRPVQEKFVCLNCGFETHADEQAALNIARSWLFLRSQEYKKYQTNKTTGNTDKRAFVETWQSFYRKKLKEVWKPAV

SEQ ID NO: 26227 - protein, 978 aa, synthetic construct
  REGION 1..978: note = engineered CasX variant
QEIKRINKIRRRLVKDSNTKKAGKTGPMKTLLVRVMTPDLRERLENLRKKPENIPQPISNTSRANLNKLLTDYTEMKKAILHVYWEEFQKDPVGLMSRVAQPASKKIDQNKLKPEMDEKGNLTTAGFACSQCGQPLFVYKLEQVSEKGKAYTNYFGRCNVAEHEKLILLAQLKPEKDSDEAVTYSLGKFGQRALDFYSIHVTKESTHPVKPLAQIAGNRYASGPVGKALSDACMGTIASFLSKYQDIIIEHQKVVKGNQKRLESLRELAGKENLEYPSVTLPPQPHTKEGVDAYNEVIARVRMWVNLNLWQKLKLSRDDAKPLLRLKGFPSFPLVERQANEVDWWDMVCNVKKLINEKKEDGKVFWQNLAGYKRQEALRPYLSSEEDRKKGKKFARYQLGDLLLHLEKKHGEDWGKVYDEAWERIDKKVEGLSKHIKLEEERRSEDAQSKAALTDWLRAKASFVIEGLKEADKDEFCRCELKLQKWYGDLRGKPFAIEAENSILDISGFSKQYNCAFIWQKDGVKKLNLYLIINYFKGGKLRFKKIKPEAFEANRFYTVINKKSGEIVPMEVNFNFDDPNLIILPLAFGKRQGREFIWNDLLSLETGSLKLANGRVIEKTLYNRRTRQDEPALFVALTFERREVLDSSNIKPMNLIGVDRGENIPAVIALTDPEGCPLSRFKDSLGNPTHILRIGESYKEKQRTIQSKKEVEQRRAGGYSRKYASKAKNLADDMVRNTARDLLYYAVTQDAMLIFENLSRGFGRQGKRTFMAERQYTRMEDWLTAKLAYEGLPSKTYLSKTLAQYTSKTCSNCGFTITSADYDRVLEKLKKTATGWMTTINGKELKVEGQITYYNRYKRQNVVKDLSVELDRLSEESVNNDISSWTKGRSGEALSLLKKRFSHRPVQEKFVCLNCGFETHADEQAALNIARSWLFLRSQEYKKYQTNKTTGNTDKRAFVETWQSFYRKKLKEVWKPAV

SEQ ID NO: 26228 - protein, 978 aa, synthetic construct
  REGION 1..978: note = engineered CasX variant
QEIKRINKIRRRLVKDSNTKKAGKTGPMKTLLVRVMTPDLRERLENLRKKPENIPQPISNTSRANLNKLLTDYTEMKKAILHVYWEEFQKDPVGLMSRVAQPASKKIDQNKLKPEMDEKGNLTTAGFACSQCGQPLFVYKLEQVSEKGKAYTNYFGRCNVAEHEKLILLAQLKPEKDSDEAVTYSLGKFGQRALDFYSIHVTKESTHPVKPLAQIAGNRYASGPVGKALSDACMGTIASFLSKYQDIIIEHQKVVKGNQKRLESLRELAGKENLEYPSVTLPPQPHTKEGVDAYNEVIARVRMWVNLNLWQKLKLSRDDAKPLLRLKGFPSFPLVERQANEVDWWDMVCNVKKLINEKKEDGKVFWQNLAGYKRQEALRPYLSSEEDRKKGKKFARYQLGDLLLHLEKKHGEDWGKVYDEAWERIDKKVEGLSKHIKLEEERRSEDAQSKAALTDWLRAKASFVIEGLKEADKDEFCRCELKLQKWYGDLRGKPFAIEAENSILDISGFSKQYNCAFIWQKDGVKKLNLYLIINYFKGGKLRFKKIKPEAFEANRFYTVINKKSGEIVPMEVNFNFDDPNLIILPLAFGKRQGREFIWNDLLSLETGSLKLANGRVIEKTLYNRRTRQDEPALFVALTFERREVLDSSNIKPMNLIGVDRGENIPAVIALTDPEGCPLSRFKDSLGNPTHILRIGESYKEKQRTIQRKKEVEQRRAGGYSRKYASKAKNLADDMVRNTARDLLYYAVTQDAMLIFENLSRGFGRQGKRTFMAERQYTRMEDWLTAKLAYEGLPSKTYLSKTLAQYTSKTCSNCGFTITSADYDRVLEKLKKTATGWMTTINGKELKVEGQITYYNRYKRQNVVKDLSVELDRLSEESVNNDISSWTKGRSGEALSLLKKRFSHRPVQEKFVCLNCGFETHADEQAALNIARSWLFLRSQEYKKYQTNKTTGNTDKRAFVETWQSFYRKKLKEVWKPAV

SEQ ID NO: 26229 - protein, 978 aa, synthetic construct
  REGION 1..978: note = engineered CasX variant
QEIKRINKIRRRLVKDSNTKKAGKTGPMKTLLVRVMTPDLRERLENLRKKPENIPQPISNTSRANLNKLLTDYTEMKKAILHVYWEEFQKDPVGLMSRVAQPASKKIDQNKLKPEMDEKGNLTTAGFACSQCGQPLFVYKLEQVSEKGKAYTNYFGRCNVAEHEKLILLAQLKPEKDSDEAVTYSLGKFGQRALDFYSIHVTKESTHPVKPLAQIAGNRYASGPVGKALSDACMGTIASFLSKYQDIIIEHQKVVKGNQKRLESLRELAGKENLEYPSVTLPPQPHTKEGVDAYNEVIARVRMWVNLNLWQKLKLSRDDAKPLLRLKGFPSFPLVERQANEVDWWDMVCNVKKLINEKKEDGKVFWQNLAGYKRQEALRPYLSSEEDRKKGKKFARYQLGDLLLHLEKKHGEDWGKVYDEAWERIDKKVEGLSKHIKLEEERRSEDAQSKAALTDWLRAKASFVIEGLKEADKDEFCRCELKLQKWYGDLRGKPFAIEAENSILDISGFSKQYNCAFIWQKDGVKKLNLYLIINYFKGGKLRFKKIKPEAFEANRFYTVINKKSGEIVPMEVNFNFDDPNLIILPLAFGKRQGREFIWNDLLSLETGSLKLANGRVIEKTLYNRRTRQDEPALFVALTFERREVLDSSNIKPMNLIGVDRGENIPAVIALTDPEGCPLSRFKDSLGNPTHILRIGESYKEKQRTIQQKKEVEQRRAIGYSRKYASKAKNLADDMVRNTARDLLYYAVTQDAMLIFENLSRGFGRQGKRTFMAERQYTRMEDWLTAKLAYEGLPSKTYLSKTLAQYTSKTCSNCGFTITSADYDRVLEKLKKTATGWMTTINGKELKVEGQITYYNRYKRQNVVKDLSVELDRLSEESVNNDISSWTKGRSGEALSLLKKRFSHRPVQEKFVCLNCGFETHADEQAALNIARSWLFLRSQEYKKYQTNKTTGNTDKRAFVETWQSFYRKKLKEVWKPAV

SEQ ID NO: 26230 - protein, 978 aa, synthetic construct
  REGION 1..978: note = engineered CasX variant
QEIKRINKIRRRLVKDSNTKKAGKTGPMKTLLVRVMTPDLRERLENLRKKPENIPQPISNTSRANLNKLLTDYTEMKKAILHVYWEEFQKDPVGLMSRVAQPASKKIDQNKLKPEMDEKGNLTTAGFACSQCGQPLFVYKLEQVSEKGKAYTNYFGRCNVAEHEKLILLAQLKPEKDSDEAVTYSLGKFGQRALDFYSIHVTKESTHPVKPLAQIAGNRYASGPVGKALSDACMGTIASFLSKYQDIIIEHQKVVKGNQKRLESLRELAGKENLEYPSVTLPPQPHTKEGVDAYNEVIARVRMWVNLNLWQKLKLSRDDAKPLLRLKGFPSFPLVERQANEVDWWDMVCNVKKLINEKKEDGKVFWQNLAGYKRQEALRPYLSSEEDRKKGKKFARYQLGDLLLHLEKKHGEDWGKVYDEAWERIDKKVEGLSKHIKLEEERRSEDAQSKAALTDWLRAKASFVIEGLKEADKDEFCRCELKLQKWYGDLRGKPFAIEAENSILDISGFSKQYNCAFIWQKDGVKKLNLYLIINYFKGGKLRFKKIKPEAFEANRFYTVINKKSGEIVPMEVNFNFDDPNLIILPLAFGKRQGREFIWNDLLSLETGSLKLANGRVIEKTLYNRRTRQDEPALFVALTFERREVLDSSNIKPMNLIGVDRGENIPAVIALTDPEGCPLSRFKDSLGNPTHILRIGESYKEKQRTIQQKKEVEQRRAGGYSRKYASKAKNLADDMVRNTARDLLYYAVTQDAMLIFENLSRGFGRQGKRTFMAERQYTRMEDWLTAKLAYEGLPSKTYLSKTLAQYTSKTCSNCGFTITSADYDRVLEKLKKTATGWMTTINGKELKVEGQITYYNRYKRQNVVKDLSVELDRLSEESVNNDISSWTKGRSGEALSLLKKRFSHRPVQEKFVCLNCGFETHADEQAALNIARSWLFLRSQEYKKYQTNKTTGNTDKRAFVETWQSFYRKKLKEVWKPAV

SEQ ID NO: 26231 - protein, 978 aa, synthetic construct
  REGION 1..978: note = engineered CasX variant
QEIKRINKIRRRLVKDSNTKKAGKTGPMKTLLVRVMTPDLRERLENLRKKPENIPQPISNTSRANLNKLLTDYTEMKKAILHVYWEEFQKDPVGLMSRVAQPASKKIDQNKLKPEMDEKGNLTTAGFACSQCGQPLFVYKLEQVSEKGKAYTNYFGRCNVAEHEKLILLAQLKPEKDSDEAVTYSLGKFGQRALDFYSIHVTKESTHPVKPLAQIAGNRYASGPVGKALSDACMGTIASFLSKYQDIIIEHQKVVKGNQKRLESLRELAGKENLEYPSVTLPPQPHTKEGVDAYNEVIARVRMWVNLNLWQKLKLSRDDAKPLLRLKGFPSFPLVERQANEVDWWDMVCNVKKLINEKKEDGKVFWQNLAGYKRQEALRPYLSSEEDRKKGKKFARYQLGDLLLHLEKKHGEDWGKVYDEAWERIDKKVEGLSKHIKLEEERRSEDAQSKAALTDWLRAKASFVIEGLKEADKDEFCRCELKLQKWYGDLRGKPFAIEAENSILDISGFSKQYNCAFIWQKDGVKKLNLYLIINYFKGGKLRFKKIKPEAFEANRFYTVINKKSGEIVPMEVNFNFDDPNLIILPLAFGKRQGREFIWNDLLSLETGSLKLANGRVIEKTLYNRRTRQDEPALFVALTFERREVLDSSNIKPMNLIGVDRGENIPAVIALTDPEGCPLSRFKDSLGNPTHILRIGESYKEKQRTIQQFKEVEQRRAGGYSRKYASKAKNLADDMVRNTARDLLYYAVTQDAMLIFENLSRGFGRQGKRTFMAERQYTRMEDWLTAKLAYEGLPSKTYLSKTLAQYTSKTCSNCGFTITSADYDRVLEKLKKTATGWMTTINGKELKVEGQITYYNRYKRQNVVKDLSVELDRLSEESVNNDISSWTKGRSGEALSLLKKRFSHRPVQEKFVCLNCGFETHADEQAALNIARSWLFLRSQEYKKYQTNKTTGNTDKRAFVETWQSFYRKKLKEVWKPAV

SEQ ID NO: 26232 - protein, 978 aa, synthetic construct
  REGION 1..978: note = engineered CasX variant
QEIKRINKIRRRLVKDSNTKKAGKTGPMKTLLVRVMTPDLRERLENLRKKPENIPQPISNTSRANLNKLLTDYTEMKKAILHVYWEEFQKDPVGLMSRVAQPASKKIDQNKLKPEMDEKGNLTTAGFACSQCGQPLFVYKLEQVSEKGKAYTNYFGRCNVAEHEKLILLAQLKPEKDSDEAVTYSLGKFGQRALDFYSIHVTKESTHPVKPLAQIAGNRYASGPVGKALSDACMGTIASFLSKYQDIIIEHQKVVKGNQKRLESLRELAGKENLEYPSVTLPPQPHTKEGVDAYNEVIARVRMWVNLNLWQKLKLSRDDAKPLLRLKGFPSFPLVERQANEVDWWDMVCNVKKLINEKKEDGKVFWQNLAGYKRQEALRPYLSSEEDRKKGKKFARYQLGDLLLHLEKKHGEDWGKVYDEAWERIDKKVEGLSKHIKLEEERRSEDAQSKAALTDWLRAKASFVIEGLKEADKDEFCRCELKLQKWYGDLRGKPFAIEAENSILDISGFSKQYNCAFIWQKDGVKKLNLYLIINYFKGGKLRFKKIKPEAFEANRFYTVINKKSGEIVPMEVNFNFDDPNLIILPLAFGKRQGREFIWNDLLSLETGSLKLANGRVIEKTLYNRRTRQDEPALFVALTFERREVLDSSNIKPMNLIGVDRGENIPAVIALTDPEGCPLSRFKDSLGNPTHILRIGESYKEKQRTIQNKKEVEQRRAGGYSRKYASKAKNLADDMVRNTARDLLYYAVTQDAMLIFENLSRGFGRQGKRTFMAERQYTRMEDWLTAKLAYEGLPSKTYLSKTLAQYTSKTCSNCGFTITSADYDRVLEKLKKTATGWMTTINGKELKVEGQITYYNRYKRQNVVKDLSVELDRLSEESVNNDISSWTKGRSGEALSLLKKRFSHRPVQEKFVCLNCGFETHADEQAALNIARSWLFLRSQEYKKYQTNKTTGNTDKRAFVETWQSFYRKKLKEVWKPAV

SEQ ID NO: 26233 - protein, 978 aa, synthetic construct
  REGION 1..978: note = engineered CasX variant
QEIKRINKIRRRLVKDSNTKKAGKTGPMKTLLVRVMTPDLRERLENLRKKPENIPQPISNTSRANLNKLLTDYTEMKKAILHVYWEEFQKDPVGLMSRVAQPASKKIDQNKLKPEMDEKGNLTTAGFACSQCGQPLFVYKLEQVSEKGKAYTNYFGRCNVAEHEKLILLAQLKPEKDSDEAVTYSLGKFGQRALDFYSIHVTKESTHPVKPLAQIAGNRYASGPVGKALSDACMGTIASFLSKYQDIIIEHQKVVKGNQKRLESLRELAGKENLEYPSVTLPPQPHTKEGVDAYNEVIARVRMWVNLNLWQKLKLSRDDAKPLLRLKGFPSFPLVERQANEVDWWDMVCNVKKLINEKKEDGKVFWQNLAGYKRQEALRPYLSSEEDRKKGKKFARYQLGDLLLHLEKKHGEDWGKVYDEAWERIDKKVEGLSKHIKLEEERRSEDAQSKAALTDWLRAKASFVIEGLKEADKDEFCRCELKLQKWYGDLRGKPFAIEAENSILDISGFSKQYNCAFIWQKDGVKKLNLYLIINYFKGGKLRFKKIKPEAFEANRFYTVINKKSGEIVPMEVNFNFDDPNLIILPLAFGKRQGREFIWNDLLSLETGSLKLANGRVIEKTLYNRRTRQDEPALFVALTFERREVLDSSNIKPMNLIGVDRGENIPAVIALTDPEGCPLSRFKDSLGNPTHILRIGESYKEKQRTIQNKKEVEERRAGGYSRKYASKAKNLADDMVRNTARDLLYYAVTQDAMLIFENLSRGFGRQGKRTFMAERQYTRMEDWLTAKLAYEGLPSKTYLSKTLAQYTSKTCSNCGFTITSADYDRVLEKLKKTATGWMTTINGKELKVEGQITYYNRYKRQNVVKDLSVELDRLSEESVNNDISSWTKGRSGEALSLLKKRFSHRPVQEKFVCLNCGFETHADEQAALNIARSWLFLRSQEYKKYQTNKTTGNTDKRAFVETWQSFYRKKLKEVWKPAV

SEQ ID NO: 26234 - protein, 978 aa, synthetic construct
  REGION 1..978: note = engineered CasX variant
QEIKRINKIRRRLVKDSNTKKAGKTGPMKTLLVRVMTPDLRERLENLRKKPENIPQPISNTSRANLNKLLTDYTEMKKAILHVYWEEFQKDPVGLMSRVAQPASKKIDQNKLKPEMDEKGNLTTAGFACSQCGQPLFVYKLEQVSEKGKAYTNYFGRCNVAEHEKLILLAQLKPEKDSDEAVTYSLGKFGQRALDFYSIHVTKESTHPVKPLAQIAGNRYASGPVGKALSDACMGTIASFLSKYQDIIIEHQKVVKGNQKRLESLRELAGKENLEYPSVTLPPQPHTKEGVDAYNEVIARVRMWVNLNLWQKLKLSRDDAKPLLRLKGFPSFPLVERQANEVDWWDMVCNVKKLINEKKEDGKVFWQNLAGYKRQEALRPYLSSEEDRKKGKKFARYQLGDLLLHLEKKHGEDWGKVYDEAWERIDKKVEGLSKHIKLEEERRSEDAQSKAALTDWLRAKASFVIEGLKEADKDEFCRCELKLQKWYGDLRGKPFAIEAENSILDISGFSKQYNCAFIWQKDGVKKLNLYLIINYFKGGKLRFKKIKPEAFEANRFYTVINKKSGEIVPMEVNFNFDDPNLIILPLAFGKRQGREFIWNDLLSLETGSLKLANGRVIEKTLYNRRTRQDEPALFVALTFERREVLDSSNIKPMNLIGVDRGENIPAVIALTDPEGCPLSRFKDSLGNPTHILRIGESYKEKQRTIQNKKEREQRRAGGYSRKYASKAKNLADDMVRNTARDLLYYAVTQDAMLIFENLSRGFGRQGKRTFMAERQYTRMEDWLTAKLAYEGLPSKTYLSKTLAQYTSKTCSNCGFTITSADYDRVLEKLKKTATGWMTTINGKELKVEGQITYYNRYKRQNVVKDLSVELDRLSEESVNNDISSWTKGRSGEALSLLKKRFSHRPVQEKFVCLNCGFETHADEQAALNIARSWLFLRSQEYKKYQTNKTTGNTDKRAFVETWQSFYRKKLKEVWKPAV

SEQ ID NO: 26235 - protein, 978 aa, synthetic construct
  REGION 1..978: note = engineered CasX variant
QEIKRINKIRRRLVKDSNTKKAGKTGPMKTLLVRVMTPDLRERLENLRKKPENIPQPISNTSRANLNKLLTDYTEMKKAILHVYWEEFQKDPVGLMSRVAQPASKKIDQNKLKPEMDEKGNLTTAGFACSQCGQPLFVYKLEQVSEKGKAYTNYFGRCNVAEHEKLILLAQLKPEKDSDEAVTYSLGKFGQRALDFYSIHVTKESTHPVKPLAQIAGNRYASGPVGKALSDACMGTIASFLSKYQDIIIEHQKVVKGNQKRLESLRELAGKENLEYPSVTLPPQPHTKEGVDAYNEVIARVRMWVNLNLWQKLKLSRDDAKPLLRLKGFPSFPLVERQANEVDWWDMVCNVKKLINEKKEDGKVFWQNLAGYKRQEALRPYLSSEEDRKKGKKFARYQLGDLLLHLEKKHGEDWGKVYDEAWERIDKKVEGLSKHIKLEEERRSEDAQSKAALTDWLRAKASFVIEGLKEADKDEFCRCELKLQKWYGDLRGKPFAIEAENSILDISGFSKQYNCAFIWQKDGVKKLNLYLIINYFKGGKLRFKKIKPEAFEANRFYTVINKKSGEIVPMEVNFNFDDPNLIILPLAFGKRQGREFIWNDLLSLETGSLKLANGRVIEKTLYNRRTRQDEPALFVALTFERREVLDSSNIKPMNLIGVDRGENIPAVIALTDPEGCPLSRFKDSLGNPTHILRIGESYKEKQRTIQNKKEREERRAGGYSRKYASKAKNLADDMVRNTARDLLYYAVTQDAMLIFENLSRGFGRQGKRTFMAERQYTRMEDWLTAKLAYEGLPSKTYLSKTLAQYTSKTCSNCGFTITSADYDRVLEKLKKTATGWMTTINGKELKVEGQITYYNRYKRQNVVKDLSVELDRLSEESVNNDISSWTKGRSGEALSLLKKRFSHRPVQEKFVCLNCGFETHADEQAALNIARSWLFLRSQEYKKYQTNKTTGNTDKRAFVETWQSFYRKKLKEVWKPAV

SEQ ID NO: 26236 - protein, 978 aa, synthetic construct
  REGION 1..978: note = engineered CasX variant
QEIKRINKIRRRLVKDSNTKKAGKTGPMKTLLVRVMTPDLRERLENLRKKPENIPQPISNTSRANLNKLLTDYTEMKKAILHVYWEEFQKDPVGLMSRVAQPASKKIDQNKLKPEMDEKGNLTTAGFACSQCGQPLFVYKLEQVSEKGKAYTNYFGRCNVAEHEKLILLAQLKPEKDSDEAVTYSLGKFGQRALDFYSIHVTKESTHPVKPLAQIAGNRYASGPVGKALSDACMGTIASFLSKYQDIIIEHQKVVKGNQKRLESLRELAGKENLEYPSVTLPPQPHTKEGVDAYNEVIARVRMWVNLNLWQKLKLSRDDAKPLLRLKGFPSFPLVERQANEVDWWDMVCNVKKLINEKKEDGKVFWQNLAGYKRQEALRPYLSSEEDRKKGKKFARYQLGDLLLHLEKKHGEDWGKVYDEAWERIDKKVEGLSKHIKLEEERRSEDAQSKAALTDWLRAKASFVIEGLKEADKDEFCRCELKLQKWYGDLRGKPFAIEAENSILDISGFSKQYNCAFIWQKDGVKKLNLYLIINYFKGGKLRFKKIKPEAFEANRFYTVINKKSGEIVPMEVNFNFDDPNLIILPLAFGKRQGREFIWNDLLSLETGSLKLANGRVIEKTLYNRRTRQDEPALFVALTFERREVLDSSNIKPMNLIGVDRGENIPAVIALTDPEGCPLSRFKDSLGNPTHILRIGESYKEKQRTIQMKKEVEQRRLGGYSRKYASKAKNLADDMVRNTARDLLYYAVTQDAMLIFENLSRGFGRQGKRTFMAERQYTRMEDWLTAKLAYEGLPSKTYLSKTLAQYTSKTCSNCGFTITSADYDRVLEKLKKTATGWMTTINGKELKVEGQITYYNRYKRQNVVKDLSVELDRLSEESVNNDISSWTKGRSGEALSLLKKRFSHRPVQEKFVCLNCGFETHADEQAALNIARSWLFLRSQEYKKYQTNKTTGNTDKRAFVETWQSFYRKKLKEVWKPAV

SEQ ID NO: 26237 - protein, 978 aa, synthetic construct
  REGION 1..978: note = engineered CasX variant
QEIKRINKIRRRLVKDSNTKKAGKTGPMKTLLVRVMTPDLRERLENLRKKPENIPQPISNTSRANLNKLLTDYTEMKKAILHVYWEEFQKDPVGLMSRVAQPASKKIDQNKLKPEMDEKGNLTTAGFACSQCGQPLFVYKLEQVSEKGKAYTNYFGRCNVAEHEKLILLAQLKPEKDSDEAVTYSLGKFGQRALDFYSIHVTKESTHPVKPLAQIAGNRYASGPVGKALSDACMGTIASFLSKYQDIIIEHQKVVKGNQKRLESLRELAGKENLEYPSVTLPPQPHTKEGVDAYNEVIARVRMWVNLNLWQKLKLSRDDAKPLLRLKGFPSFPLVERQANEVDWWDMVCNVKKLINEKKEDGKVFWQNLAGYKRQEALRPYLSSEEDRKKGKKFARYQLGDLLLHLEKKHGEDWGKVYDEAWERIDKKVEGLSKHIKLEEERRSEDAQSKAALTDWLRAKASFVIEGLKEADKDEFCRCELKLQKWYGDLRGKPFAIEAENSILDISGFSKQYNCAFIWQKDGVKKLNLYLIINYFKGGKLRFKKIKPEAFEANRFYTVINKKSGEIVPMEVNFNFDDPNLIILPLAFGKRQGREFIWNDLLSLETGSLKLANGRVIEKTLYNRRTRQDEPALFVALTFERREVLDSSNIKPMNLIGVDRGENIPAVIALTDPEGCPLSRFKDSLGNPTHILRIGESYKEKQRTIQMKKEVEQRRAGGYSRKYASKAKNLADDMVRNTARDLLYYAVTQDAMLIFENLSRGFGRQGKRTFMAERQYTRMEDWLTAKLAYEGLPSKTYLSKTLAQYTSKTCSNCGFTITSADYDRVLEKLKKTATGWMTTINGKELKVEGQITYYNRYKRQNVVKDLSVELDRLSEESVNNDISSWTKGRSGEALSLLKKRFSHRPVQEKFVCLNCGFETHADEQAALNIARSWLFLRSQEYKKYQTNKTTGNTDKRAFVETWQSFYRKKLKEVWKPAV

SEQ ID NO: 26238 - protein, 978 aa, synthetic construct
  REGION 1..978: note = engineered CasX variant
QEIKRINKIRRRLVKDSNTKKAGKTGPMKTLLVRVMTPDLRERLENLRKKPENIPQPISNTSRANLNKLLTDYTEMKKAILHVYWEEFQKDPVGLMSRVAQPASKKIDQNKLKPEMDEKGNLTTAGFACSQCGQPLFVYKLEQVSEKGKAYTNYFGRCNVAEHEKLILLAQLKPEKDSDEAVTYSLGKFGQRALDFYSIHVTKESTHPVKPLAQIAGNRYASGPVGKALSDACMGTIASFLSKYQDIIIEHQKVVKGNQKRLESLRELAGKENLEYPSVTLPPQPHTKEGVDAYNEVIARVRMWVNLNLWQKLKLSRDDAKPLLRLKGFPSFPLVERQANEVDWWDMVCNVKKLINEKKEDGKVFWQNLAGYKRQEALRPYLSSEEDRKKGKKFARYQLGDLLLHLEKKHGEDWGKVYDEAWERIDKKVEGLSKHIKLEEERRSEDAQSKAALTDWLRAKASFVIEGLKEADKDEFCRCELKLQKWYGDLRGKPFAIEAENSILDISGFSKQYNCAFIWQKDGVKKLNLYLIINYFKGGKLRFKKIKPEAFEANRFYTVINKKSGEIVPMEVNFNFDDPNLIILPLAFGKRQGREFIWNDLLSLETGSLKLANGRVIEKTLYNRRTRQDEPALFVALTFERREVLDSSNIKPMNLIGVDRGENIPAVIALTDPEGCPLSRFKDSLGNPTHILRIGESYKEKQRTIQLKKEVEQRRSGGYSRKYASKAKNLADDMVRNTARDLLYYAVTQDAMLIFENLSRGFGRQGKRTFMAERQYTRMEDWLTAKLAYEGLPSKTYLSKTLAQYTSKTCSNCGFTITSADYDRVLEKLKKTATGWMTTINGKELKVEGQITYYNRYKRQNVVKDLSVELDRLSEESVNNDISSWTKGRSGEALSLLKKRFSHRPVQEKFVCLNCGFETHADEQAALNIARSWLFLRSQEYKKYQTNKTTGNTDKRAFVETWQSFYRKKLKEVWKPAV

SEQ ID NO: 26239 - protein, 978 aa, synthetic construct
  REGION 1..978: note = engineered CasX variant
QEIKRINKIRRRLVKDSNTKKAGKTGPMKTLLVRVMTPDLRERLENLRKKPENIPQPISNTSRANLNKLLTDYTEMKKAILHVYWEEFQKDPVGLMSRVAQPASKKIDQNKLKPEMDEKGNLTTAGFACSQCGQPLFVYKLEQVSEKGKAYTNYFGRCNVAEHEKLILLAQLKPEKDSDEAVTYSLGKFGQRALDFYSIHVTKESTHPVKPLAQIAGNRYASGPVGKALSDACMGTIASFLSKYQDIIIEHQKVVKGNQKRLESLRELAGKENLEYPSVTLPPQPHTKEGVDAYNEVIARVRMWVNLNLWQKLKLSRDDAKPLLRLKGFPSFPLVERQANEVDWWDMVCNVKKLINEKKEDGKVFWQNLAGYKRQEALRPYLSSEEDRKKGKKFARYQLGDLLLHLEKKHGEDWGKVYDEAWERIDKKVEGLSKHIKLEEERRSEDAQSKAALTDWLRAKASFVIEGLKEADKDEFCRCELKLQKWYGDLRGKPFAIEAENSILDISGFSKQYNCAFIWQKDGVKKLNLYLIINYFKGGKLRFKKIKPEAFEANRFYTVINKKSGEIVPMEVNFNFDDPNLIILPLAFGKRQGREFIWNDLLSLETGSLKLANGRVIEKTLYNRRTRQDEPALFVALTFERREVLDSSNIKPMNLIGVDRGENIPAVIALTDPEGCPLSRFKDSLGNPTHILRIGESYKEKQRTIQLKKEVEQRRAGGYSRKYASKAKNLADDMVRNTARDLLYYAVTQDAMLIFENLSRGFGRQGKRTFMAERQYTRMEDWLTAKLAYEGLPSKTYLSKTLAQYTSKTCSNCGFTITSADYDRVLEKLKKTATGWMTTINGKELKVEGQITYYNRYKRQNVVKDLSVELDRLSEESVNNDISSWTKGRSGEALSLLKKRFSHRPVQEKFVCLNCGFETHADEQAALNIARSWLFLRSQEYKKYQTNKTTGNTDKRAFVETWQSFYRKKLKEVWKPAV

SEQ ID NO: 26240 - protein, 978 aa, synthetic construct
  REGION 1..978: note = engineered CasX variant
QEIKRINKIRRRLVKDSNTKKAGKTGPMKTLLVRVMTPDLRERLENLRKKPENIPQPISNTSRANLNKLLTDYTEMKKAILHVYWEEFQKDPVGLMSRVAQPASKKIDQNKLKPEMDEKGNLTTAGFACSQCGQPLFVYKLEQVSEKGKAYTNYFGRCNVAEHEKLILLAQLKPEKDSDEAVTYSLGKFGQRALDFYSIHVTKESTHPVKPLAQIAGNRYASGPVGKALSDACMGTIASFLSKYQDIIIEHQKVVKGNQKRLESLRELAGKENLEYPSVTLPPQPHTKEGVDAYNEVIARVRMWVNLNLWQKLKLSRDDAKPLLRLKGFPSFPLVERQANEVDWWDMVCNVKKLINEKKEDGKVFWQNLAGYKRQEALRPYLSSEEDRKKGKKFARYQLGDLLLHLEKKHGEDWGKVYDEAWERIDKKVEGLSKHIKLEEERRSEDAQSKAALTDWLRAKASFVIEGLKEADKDEFCRCELKLQKWYGDLRGKPFAIEAENSILDISGFSKQYNCAFIWQKDGVKKLNLYLIINYFKGGKLRFKKIKPEAFEANRFYTVINKKSGEIVPMEVNFNFDDPNLIILPLAFGKRQGREFIWNDLLSLETGSLKLANGRVIEKTLYNRRTRQDEPALFVALTFERREVLDSSNIKPMNLIGVDRGENIPAVIALTDPEGCPLSRFKDSLGNPTHILRIGESYKEKQRTIQKKREVEQRRAGGYSRKYASKAKNLADDMVRNTARDLLYYAVTQDAMLIFENLSRGFGRQGKRTFMAERQYTRMEDWLTAKLAYEGLPSKTYLSKTLAQYTSKTCSNCGFTITSADYDRVLEKLKKTATGWMTTINGKELKVEGQITYYNRYKRQNVVKDLSVELDRLSEESVNNDISSWTKGRSGEALSLLKKRFSHRPVQEKFVCLNCGFETHADEQAALNIARSWLFLRSQEYKKYQTNKTTGNTDKRAFVETWQSFYRKKLKEVWKPAV

SEQ ID NO: 26241 - protein, 978 aa, synthetic construct
  REGION 1..978: note = engineered CasX variant
QEIKRINKIRRRLVKDSNTKKAGKTGPMKTLLVRVMTPDLRERLENLRKKPENIPQPISNTSRANLNKLLTDYTEMKKAILHVYWEEFQKDPVGLMSRVAQPASKKIDQNKLKPEMDEKGNLTTAGFACSQCGQPLFVYKLEQVSEKGKAYTNYFGRCNVAEHEKLILLAQLKPEKDSDEAVTYSLGKFGQRALDFYSIHVTKESTHPVKPLAQIAGNRYASGPVGKALSDACMGTIASFLSKYQDIIIEHQKVVKGNQKRLESLRELAGKENLEYPSVTLPPQPHTKEGVDAYNEVIARVRMWVNLNLWQKLKLSRDDAKPLLRLKGFPSFPLVERQANEVDWWDMVCNVKKLINEKKEDGKVFWQNLAGYKRQEALRPYLSSEEDRKKGKKFARYQLGDLLLHLEKKHGEDWGKVYDEAWERIDKKVEGLSKHIKLEEERRSEDAQSKAALTDWLRAKASFVIEGLKEADKDEFCRCELKLQKWYGDLRGKPFAIEAENSILDISGFSKQYNCAFIWQKDGVKKLNLYLIINYFKGGKLRFKKIKPEAFEANRFYTVINKKSGEIVPMEVNFNFDDPNLIILPLAFGKRQGREFIWNDLLSLETGSLKLANGRVIEKTLYNRRTRQDEPALFVALTFERREVLDSSNIKPMNLIGVDRGENIPAVIALTDPEGCPLSRFKDSLGNPTHILRIGESYKEKQRTIQKKKEVEQRRAGGYSRKYASKAKNLADDMVRNTARDLLYYAVTQDAMLIFENLSRGFGRQGKRTFMAERQYTRMEDWLTAKLAYEGLPSKTYLSKTLAQYTSKTCSNCGFTITSADYDRVLEKLKKTATGWMTTINGKELKVEGQITYYNRYKRQNVVKDLSVELDRLSEESVNNDISSWTKGRSGEALSLLKKRFSHRPVQEKFVCLNCGFETHADEQAALNIARSWLFLRSQEYKKYQTNKTTGNTDKRAFVETWQSFYRKKLKEVWKPAV

SEQ ID NO: 26242 - protein, 978 aa, synthetic construct
  REGION 1..978: note = engineered CasX variant
QEIKRINKIRRRLVKDSNTKKAGKTGPMKTLLVRVMTPDLRERLENLRKKPENIPQPISNTSRANLNKLLTDYTEMKKAILHVYWEEFQKDPVGLMSRVAQPASKKIDQNKLKPEMDEKGNLTTAGFACSQCGQPLFVYKLEQVSEKGKAYTNYFGRCNVAEHEKLILLAQLKPEKDSDEAVTYSLGKFGQRALDFYSIHVTKESTHPVKPLAQIAGNRYASGPVGKALSDACMGTIASFLSKYQDIIIEHQKVVKGNQKRLESLRELAGKENLEYPSVTLPPQPHTKEGVDAYNEVIARVRMWVNLNLWQKLKLSRDDAKPLLRLKGFPSFPLVERQANEVDWWDMVCNVKKLINEKKEDGKVFWQNLAGYKRQEALRPYLSSEEDRKKGKKFARYQLGDLLLHLEKKHGEDWGKVYDEAWERIDKKVEGLSKHIKLEEERRSEDAQSKAALTDWLRAKASFVIEGLKEADKDEFCRCELKLQKWYGDLRGKPFAIEAENSILDISGFSKQYNCAFIWQKDGVKKLNLYLIINYFKGGKLRFKKIKPEAFEANRFYTVINKKSGEIVPMEVNFNFDDPNLIILPLAFGKRQGREFIWNDLLSLETGSLKLANGRVIEKTLYNRRTRQDEPALFVALTFERREVLDSSNIKPMNLIGVDRGENIPAVIALTDPEGCPLSRFKDSLGNPTHILRIGESYKEKQRTIQHKKEVEQRRAGGYSRKYASKAKNLADDMVRNTARDLLYYAVTQDAMLIFENLSRGFGRQGKRTFMAERQYTRMEDWLTAKLAYEGLPSKTYLSKTLAQYTSKTCSNCGFTITSADYDRVLEKLKKTATGWMTTINGKELKVEGQITYYNRYKRQNVVKDLSVELDRLSEESVNNDISSWTKGRSGEALSLLKKRFSHRPVQEKFVCLNCGFETHADEQAALNIARSWLFLRSQEYKKYQTNKTTGNTDKRAFVETWQSFYRKKLKEVWKPAV

SEQ ID NO: 26243 - protein, 978 aa, synthetic construct
  REGION 1..978: note = engineered CasX variant
QEIKRINKIRRRLVKDSNTKKAGKTGPMKTLLVRVMTPDLRERLENLRKKPENIPQPISNTSRANLNKLLTDYTEMKKAILHVYWEEFQKDPVGLMSRVAQPASKKIDQNKLKPEMDEKGNLTTAGFACSQCGQPLFVYKLEQVSEKGKAYTNYFGRCNVAEHEKLILLAQLKPEKDSDEAVTYSLGKFGQRALDFYSIHVTKESTHPVKPLAQIAGNRYASGPVGKALSDACMGTIASFLSKYQDIIIEHQKVVKGNQKRLESLRELAGKENLEYPSVTLPPQPHTKEGVDAYNEVIARVRMWVNLNLWQKLKLSRDDAKPLLRLKGFPSFPLVERQANEVDWWDMVCNVKKLINEKKEDGKVFWQNLAGYKRQEALRPYLSSEEDRKKGKKFARYQLGDLLLHLEKKHGEDWGKVYDEAWERIDKKVEGLSKHIKLEEERRSEDAQSKAALTDWLRAKASFVIEGLKEADKDEFCRCELKLQKWYGDLRGKPFAIEAENSILDISGFSKQYNCAFIWQKDGVKKLNLYLIINYFKGGKLRFKKIKPEAFEANRFYTVINKKSGEIVPMEVNFNFDDPNLIILPLAFGKRQGREFIWNDLLSLETGSLKLANGRVIEKTLYNRRTRQDEPALFVALTFERREVLDSSNIKPMNLIGVDRGENIPAVIALTDPEGCPLSRFKDSLGNPTHILRIGESYKEKQRTIQGKKEVEQRRAGGYSRKYASKAKNLADDMVRNTARDLLYYAVTQDAMLIFENLSRGFGRQGKRTFMAERQYTRMEDWLTAKLAYEGLPSKTYLSKTLAQYTSKTCSNCGFTITSADYDRVLEKLKKTATGWMTTINGKELKVEGQITYYNRYKRQNVVKDLSVELDRLSEESVNNDISSWTKGRSGEALSLLKKRFSHRPVQEKFVCLNCGFETHADEQAALNIARSWLFLRSQEYKKYQTNKTTGNTDKRAFVETWQSFYRKKLKEVWKPAV

SEQ ID NO: 26244 - protein, 978 aa, synthetic construct
  REGION 1..978: note = engineered CasX variant
QEIKRINKIRRRLVKDSNTKKAGKTGPMKTLLVRVMTPDLRERLENLRKKPENIPQPISNTSRANLNKLLTDYTEMKKAILHVYWEEFQKDPVGLMSRVAQPASKKIDQNKLKPEMDEKGNLTTAGFACSQCGQPLFVYKLEQVSEKGKAYTNYFGRCNVAEHEKLILLAQLKPEKDSDEAVTYSLGKFGQRALDFYSIHVTKESTHPVKPLAQIAGNRYASGPVGKALSDACMGTIASFLSKYQDIIIEHQKVVKGNQKRLESLRELAGKENLEYPSVTLPPQPHTKEGVDAYNEVIARVRMWVNLNLWQKLKLSRDDAKPLLRLKGFPSFPLVERQANEVDWWDMVCNVKKLINEKKEDGKVFWQNLAGYKRQEALRPYLSSEEDRKKGKKFARYQLGDLLLHLEKKHGEDWGKVYDEAWERIDKKVEGLSKHIKLEEERRSEDAQSKAALTDWLRAKASFVIEGLKEADKDEFCRCELKLQKWYGDLRGKPFAIEAENSILDISGFSKQYNCAFIWQKDGVKKLNLYLIINYFKGGKLRFKKIKPEAFEANRFYTVINKKSGEIVPMEVNFNFDDPNLIILPLAFGKRQGREFIWNDLLSLETGSLKLANGRVIEKTLYNRRTRQDEPALFVALTFERREVLDSSNIKPMNLIGVDRGENIPAVIALTDPEGCPLSRFKDSLGNPTHILRIGESYKEKQRTIQFKKEVEQYRAGGYSRKYASKAKNLADDMVRNTARDLLYYAVTQDAMLIFENLSRGFGRQGKRTFMAERQYTRMEDWLTAKLAYEGLPSKTYLSKTLAQYTSKTCSNCGFTITSADYDRVLEKLKKTATGWMTTINGKELKVEGQITYYNRYKRQNVVKDLSVELDRLSEESVNNDISSWTKGRSGEALSLLKKRFSHRPVQEKFVCLNCGFETHADEQAALNIARSWLFLRSQEYKKYQTNKTTGNTDKRAFVETWQSFYRKKLKEVWKPAV

SEQ ID NO: 26245 - protein, 978 aa, synthetic construct
  REGION 1..978: note = engineered CasX variant
QEIKRINKIRRRLVKDSNTKKAGKTGPMKTLLVRVMTPDLRERLENLRKKPENIPQPISNTSRANLNKLLTDYTEMKKAILHVYWEEFQKDPVGLMSRVAQPASKKIDQNKLKPEMDEKGNLTTAGFACSQCGQPLFVYKLEQVSEKGKAYTNYFGRCNVAEHEKLILLAQLKPEKDSDEAVTYSLGKFGQRALDFYSIHVTKESTHPVKPLAQIAGNRYASGPVGKALSDACMGTIASFLSKYQDIIIEHQKVVKGNQKRLESLRELAGKENLEYPSVTLPPQPHTKEGVDAYNEVIARVRMWVNLNLWQKLKLSRDDAKPLLRLKGFPSFPLVERQANEVDWWDMVCNVKKLINEKKEDGKVFWQNLAGYKRQEALRPYLSSEEDRKKGKKFARYQLGDLLLHLEKKHGEDWGKVYDEAWERIDKKVEGLSKHIKLEEERRSEDAQSKAALTDWLRAKASFVIEGLKEADKDEFCRCELKLQKWYGDLRGKPFAIEAENSILDISGFSKQYNCAFIWQKDGVKKLNLYLIINYFKGGKLRFKKIKPEAFEANRFYTVINKKSGEIVPMEVNFNFDDPNLIILPLAFGKRQGREFIWNDLLSLETGSLKLANGRVIEKTLYNRRTRQDEPALFVALTFERREVLDSSNIKPMNLIGVDRGENIPAVIALTDPEGCPLSRFKDSLGNPTHILRIGESYKEKQRTIQFKKEVEQRRAGGYSRKYASKAKNLADDMVRNTARDLLYYAVTQDAMLIFENLSRGFGRQGKRTFMAERQYTRMEDWLTAKLAYEGLPSKTYLSKTLAQYTSKTCSNCGFTITSADYDRVLEKLKKTATGWMTTINGKELKVEGQITYYNRYKRQNVVKDLSVELDRLSEESVNNDISSWTKGRSGEALSLLKKRFSHRPVQEKFVCLNCGFETHADEQAALNIARSWLFLRSQEYKKYQTNKTTGNTDKRAFVETWQSFYRKKLKEVWKPAV

SEQ ID NO: 26246 - protein, 978 aa, synthetic construct
  REGION 1..978: note = engineered CasX variant
QEIKRINKIRRRLVKDSNTKKAGKTGPMKTLLVRVMTPDLRERLENLRKKPENIPQPISNTSRANLNKLLTDYTEMKKAILHVYWEEFQKDPVGLMSRVAQPASKKIDQNKLKPEMDEKGNLTTAGFACSQCGQPLFVYKLEQVSEKGKAYTNYFGRCNVAEHEKLILLAQLKPEKDSDEAVTYSLGKFGQRALDFYSIHVTKESTHPVKPLAQIAGNRYASGPVGKALSDACMGTIASFLSKYQDIIIEHQKVVKGNQKRLESLRELAGKENLEYPSVTLPPQPHTKEGVDAYNEVIARVRMWVNLNLWQKLKLSRDDAKPLLRLKGFPSFPLVERQANEVDWWDMVCNVKKLINEKKEDGKVFWQNLAGYKRQEALRPYLSSEEDRKKGKKFARYQLGDLLLHLEKKHGEDWGKVYDEAWERIDKKVEGLSKHIKLEEERRSEDAQSKAALTDWLRAKASFVIEGLKEADKDEFCRCELKLQKWYGDLRGKPFAIEAENSILDISGFSKQYNCAFIWQKDGVKKLNLYLIINYFKGGKLRFKKIKPEAFEANRFYTVINKKSGEIVPMEVNFNFDDPNLIILPLAFGKRQGREFIWNDLLSLETGSLKLANGRVIEKTLYNRRTRQDEPALFVALTFERREVLDSSNIKPMNLIGVDRGENIPAVIALTDPEGCPLSRFKDSLGNPTHILRIGESYKEKQRTIQEKKEVEQRRAGGYSRKYASKAKNLADDMVRNTARDLLYYAVTQDAMLIFENLSRGFGRQGKRTFMAERQYTRMEDWLTAKLAYEGLPSKTYLSKTLAQYTSKTCSNCGFTITSADYDRVLEKLKKTATGWMTTINGKELKVEGQITYYNRYKRQNVVKDLSVELDRLSEESVNNDISSWTKGRSGEALSLLKKRFSHRPVQEKFVCLNCGFETHADEQAALNIARSWLFLRSQEYKKYQTNKTTGNTDKRAFVETWQSFYRKKLKEVWKPAV

SEQ ID NO: 26247 - protein, 978 aa, synthetic construct
  REGION 1..978: note = engineered CasX variant
QEIKRINKIRRRLVKDSNTKKAGKTGPMKTLLVRVMTPDLRERLENLRKKPENIPQPISNTSRANLNKLLTDYTEMKKAILHVYWEEFQKDPVGLMSRVAQPASKKIDQNKLKPEMDEKGNLTTAGFACSQCGQPLFVYKLEQVSEKGKAYTNYFGRCNVAEHEKLILLAQLKPEKDSDEAVTYSLGKFGQRALDFYSIHVTKESTHPVKPLAQIAGNRYASGPVGKALSDACMGTIASFLSKYQDIIIEHQKVVKGNQKRLESLRELAGKENLEYPSVTLPPQPHTKEGVDAYNEVIARVRMWVNLNLWQKLKLSRDDAKPLLRLKGFPSFPLVERQANEVDWWDMVCNVKKLINEKKEDGKVFWQNLAGYKRQEALRPYLSSEEDRKKGKKFARYQLGDLLLHLEKKHGEDWGKVYDEAWERIDKKVEGLSKHIKLEEERRSEDAQSKAALTDWLRAKASFVIEGLKEADKDEFCRCELKLQKWYGDLRGKPFAIEAENSILDISGFSKQYNCAFIWQKDGVKKLNLYLIINYFKGGKLRFKKIKPEAFEANRFYTVINKKSGEIVPMEVNFNFDDPNLIILPLAFGKRQGREFIWNDLLSLETGSLKLANGRVIEKTLYNRRTRQDEPALFVALTFERREVLDSSNIKPMNLIGVDRGENIPAVIALTDPEGCPLSRFKDSLGNPTHILRIGESYKEKQRTIQEKKEVAQRRAGGYSRKYASKAKNLADDMVRNTARDLLYYAVTQDAMLIFENLSRGFGRQGKRTFMAERQYTRMEDWLTAKLAYEGLPSKTYLSKTLAQYTSKTCSNCGFTITSADYDRVLEKLKKTATGWMTTINGKELKVEGQITYYNRYKRQNVVKDLSVELDRLSEESVNNDISSWTKGRSGEALSLLKKRFSHRPVQEKFVCLNCGFETHADEQAALNIARSWLFLRSQEYKKYQTNKTTGNTDKRAFVETWQSFYRKKLKEVWKPAV

SEQ ID NO: 26248 - protein, 978 aa, synthetic construct
  REGION 1..978: note = engineered CasX variant
QEIKRINKIRRRLVKDSNTKKAGKTGPMKTLLVRVMTPDLRERLENLRKKPENIPQPISNTSRANLNKLLTDYTEMKKAILHVYWEEFQKDPVGLMSRVAQPASKKIDQNKLKPEMDEKGNLTTAGFACSQCGQPLFVYKLEQVSEKGKAYTNYFGRCNVAEHEKLILLAQLKPEKDSDEAVTYSLGKFGQRALDFYSIHVTKESTHPVKPLAQIAGNRYASGPVGKALSDACMGTIASFLSKYQDIIIEHQKVVKGNQKRLESLRELAGKENLEYPSVTLPPQPHTKEGVDAYNEVIARVRMWVNLNLWQKLKLSRDDAKPLLRLKGFPSFPLVERQANEVDWWDMVCNVKKLINEKKEDGKVFWQNLAGYKRQEALRPYLSSEEDRKKGKKFARYQLGDLLLHLEKKHGEDWGKVYDEAWERIDKKVEGLSKHIKLEEERRSEDAQSKAALTDWLRAKASFVIEGLKEADKDEFCRCELKLQKWYGDLRGKPFAIEAENSILDISGFSKQYNCAFIWQKDGVKKLNLYLIINYFKGGKLRFKKIKPEAFEANRFYTVINKKSGEIVPMEVNFNFDDPNLIILPLAFGKRQGREFIWNDLLSLETGSLKLANGRVIEKTLYNRRTRQDEPALFVALTFERREVLDSSNIKPMNLIGVDRGENIPAVIALTDPEGCPLSRFKDSLGNPTHILRIGESYKEKQRTIQDKKEVEQRRAGGYSRKYASKAKNLADDMVRNTARDLLYYAVTQDAMLIFENLSRGFGRQGKRTFMAERQYTRMEDWLTAKLAYEGLPSKTYLSKTLAQYTSKTCSNCGFTITSADYDRVLEKLKKTATGWMTTINGKELKVEGQITYYNRYKRQNVVKDLSVELDRLSEESVNNDISSWTKGRSGEALSLLKKRFSHRPVQEKFVCLNCGFETHADEQAALNIARSWLFLRSQEYKKYQTNKTTGNTDKRAFVETWQSFYRKKLKEVWKPAV

SEQ ID NO: 26249 - protein, 978 aa, synthetic construct
  REGION 1..978: note = engineered CasX variant
QEIKRINKIRRRLVKDSNTKKAGKTGPMKTLLVRVMTPDLRERLENLRKKPENIPQPISNTSRANLNKLLTDYTEMKKAILHVYWEEFQKDPVGLMSRVAQPASKKIDQNKLKPEMDEKGNLTTAGFACSQCGQPLFVYKLEQVSEKGKAYTNYFGRCNVAEHEKLILLAQLKPEKDSDEAVTYSLGKFGQRALDFYSIHVTKESTHPVKPLAQIAGNRYASGPVGKALSDACMGTIASFLSKYQDIIIEHQKVVKGNQKRLESLRELAGKENLEYPSVTLPPQPHTKEGVDAYNEVIARVRMWVNLNLWQKLKLSRDDAKPLLRLKGFPSFPLVERQANEVDWWDMVCNVKKLINEKKEDGKVFWQNLAGYKRQEALRPYLSSEEDRKKGKKFARYQLGDLLLHLEKKHGEDWGKVYDEAWERIDKKVEGLSKHIKLEEERRSEDAQSKAALTDWLRAKASFVIEGLKEADKDEFCRCELKLQKWYGDLRGKPFAIEAENSILDISGFSKQYNCAFIWQKDGVKKLNLYLIINYFKGGKLRFKKIKPEAFEANRFYTVINKKSGEIVPMEVNFNFDDPNLIILPLAFGKRQGREFIWNDLLSLETGSLKLANGRVIEKTLYNRRTRQDEPALFVALTFERREVLDSSNIKPMNLIGVDRGENIPAVIALTDPEGCPLSRFKDSLGNPTHILRIGESYKEKQRTIQCKKEVVQRRAGGYSRKYASKAKNLADDMVRNTARDLLYYAVTQDAMLIFENLSRGFGRQGKRTFMAERQYTRMEDWLTAKLAYEGLPSKTYLSKTLAQYTSKTCSNCGFTITSADYDRVLEKLKKTATGWMTTINGKELKVEGQITYYNRYKRQNVVKDLSVELDRLSEESVNNDISSWTKGRSGEALSLLKKRFSHRPVQEKFVCLNCGFETHADEQAALNIARSWLFLRSQEYKKYQTNKTTGNTDKRAFVETWQSFYRKKLKEVWKPAV

SEQ ID NO: 26250 - protein, 978 aa, synthetic construct
  REGION 1..978: note = engineered CasX variant
QEIKRINKIRRRLVKDSNTKKAGKTGPMKTLLVRVMTPDLRERLENLRKKPENIPQPISNTSRANLNKLLTDYTEMKKAILHVYWEEFQKDPVGLMSRVAQPASKKIDQNKLKPEMDEKGNLTTAGFACSQCGQPLFVYKLEQVSEKGKAYTNYFGRCNVAEHEKLILLAQLKPEKDSDEAVTYSLGKFGQRALDFYSIHVTKESTHPVKPLAQIAGNRYASGPVGKALSDACMGTIASFLSKYQDIIIEHQKVVKGNQKRLESLRELAGKENLEYPSVTLPPQPHTKEGVDAYNEVIARVRMWVNLNLWQKLKLSRDDAKPLLRLKGFPSFPLVERQANEVDWWDMVCNVKKLINEKKEDGKVFWQNLAGYKRQEALRPYLSSEEDRKKGKKFARYQLGDLLLHLEKKHGEDWGKVYDEAWERIDKKVEGLSKHIKLEEERRSEDAQSKAALTDWLRAKASFVIEGLKEADKDEFCRCELKLQKWYGDLRGKPFAIEAENSILDISGFSKQYNCAFIWQKDGVKKLNLYLIINYFKGGKLRFKKIKPEAFEANRFYTVINKKSGEIVPMEVNFNFDDPNLIILPLAFGKRQGREFIWNDLLSLETGSLKLANGRVIEKTLYNRRTRQDEPALFVALTFERREVLDSSNIKPMNLIGVDRGENIPAVIALTDPEGCPLSRFKDSLGNPTHILRIGESYKEKQRTIQCKKEVEQRRAGGYSRKYASKAKNLADDMVRNTARDLLYYAVTQDAMLIFENLSRGFGRQGKRTFMAERQYTRMEDWLTAKLAYEGLPSKTYLSKTLAQYTSKTCSNCGFTITSADYDRVLEKLKKTATGWMTTINGKELKVEGQITYYNRYKRQNVVKDLSVELDRLSEESVNNDISSWTKGRSGEALSLLKKRFSHRPVQEKFVCLNCGFETHADEQAALNIARSWLFLRSQEYKKYQTNKTTGNTDKRAFVETWQSFYRKKLKEVWKPAV

SEQ ID NO: 26251 - protein, 978 aa, synthetic construct; identical to SEQ ID NO: 499
  REGION 1..978: note = engineered CasX variant

SEQ ID NO: 26252 - protein, 978 aa, synthetic construct
  REGION 1..978: note = engineered CasX variant
QEIKRINKIRRRLVKDSNTKKAGKTGPMKTLLVRVMTPDLRERLENLRKKPENIPQPISNTSRANLNKLLTDYTEMKKAILHVYWEEFQKDPVGLMSRVAQPASKKIDQNKLKPEMDEKGNLTTAGFACSQCGQPLFVYKLEQVSEKGKAYTNYFGRCNVAEHEKLILLAQLKPEKDSDEAVTYSLGKFGQRALDFYSIHVTKESTHPVKPLAQIAGNRYASGPVGKALSDACMGTIASFLSKYQDIIIEHQKVVKGNQKRLESLRELAGKENLEYPSVTLPPQPHTKEGVDAYNEVIARVRMWVNLNLWQKLKLSRDDAKPLLRLKGFPSFPLVERQANEVDWWDMVCNVKKLINEKKEDGKVFWQNLAGYKRQEALRPYLSSEEDRKKGKKFARYQLGDLLLHLEKKHGEDWGKVYDEAWERIDKKVEGLSKHIKLEEERRSEDAQSKAALTDWLRAKASFVIEGLKEADKDEFCRCELKLQKWYGDLRGKPFAIEAENSILDISGFSKQYNCAFIWQKDGVKKLNLYLIINYFKGGKLRFKKIKPEAFEANRFYTVINKKSGEIVPMEVNFNFDDPNLIILPLAFGKRQGREFIWNDLLSLETGSLKLANGRVIEKTLYNRRTRQDEPALFVALTFERREVLDSSNIKPMNLIGVDRGENIPAVIALTDPEGCPLSRFKDSLGNPTHILRIGESYKEKQRTIQAWKEVEQRRAGGYSRKYASKAKNLADDMVRNTARDLLYYAVTQDAMLIFENLSRGFGRQGKRTFMAERQYTRMEDWLTAKLAYEGLPSKTYLSKTLAQYTSKTCSNCGFTITSADYDRVLEKLKKTATGWMTTINGKELKVEGQITYYNRYKRQNVVKDLSVELDRLSEESVNNDISSWTKGRSGEALSLLKKRFSHRPVQEKFVCLNCGFETHADEQAALNIARSWLFLRSQEYKKYQTNKTTGNTDKRAFVETWQSFYRKKLKEVWKPAV

SEQ ID NO: 26253 - protein, 978 aa, synthetic construct
  REGION 1..978: note = engineered CasX variant
QEIKRINKIRRRLVKDSNTKKAGKTGPMKTLLVRVMTPDLRERLENLRKKPENIPQPISNTSRANLNKLLTDYTEMKKAILHVYWEEFQKDPVGLMSRVAQPASKKIDQNKLKPEMDEKGNLTTAGFACSQCGQPLFVYKLEQVSEKGKAYTNYFGRCNVAEHEKLILLAQLKPEKDSDEAVTYSLGKFGQRALDFYSIHVTKESTHPVKPLAQIAGNRYASGPVGKALSDACMGTIASFLSKYQDIIIEHQKVVKGNQKRLESLRELAGKENLEYPSVTLPPQPHTKEGVDAYNEVIARVRMWVNLNLWQKLKLSRDDAKPLLRLKGFPSFPLVERQANEVDWWDMVCNVKKLINEKKEDGKVFWQNLAGYKRQEALRPYLSSEEDRKKGKKFARYQLGDLLLHLEKKHGEDWGKVYDEAWERIDKKVEGLSKHIKLEEERRSEDAQSKAALTDWLRAKASFVIEGLKEADKDEFCRCELKLQKWYGDLRGKPFAIEAENSILDISGFSKQYNCAFIWQKDGVKKLNLYLIINYFKGGKLRFKKIKPEAFEANRFYTVINKKSGEIVPMEVNFNFDDPNLIILPLAFGKRQGREFIWNDLLSLETGSLKLANGRVIEKTLYNRRTRQDEPALFVALTFERREVLDSSNIKPMNLIGVDRGENIPAVIALTDPEGCPLSRFKDSLGNPTHILRIGESYKEKQRTIQAVKEVEQRRAGGYSRKYASKAKNLADDMVRNTARDLLYYAVTQDAMLIFENLSRGFGRQGKRTFMAERQYTRMEDWLTAKLAYEGLPSKTYLSKTLAQYTSKTCSNCGFTITSADYDRVLEKLKKTATGWMTTINGKELKVEGQITYYNRYKRQNVVKDLSVELDRLSEESVNNDISSWTKGRSGEALSLLKKRFSHRPVQEKFVCLNCGFETHADEQAALNIARSWLFLRSQEYKKYQTNKTTGNTDKRAFVETWQSFYRKKLKEVWKPAV

SEQ ID NO: 26254 - protein, 978 aa, synthetic construct
  REGION 1..978: note = engineered CasX variant
QEIKRINKIRRRLVKDSNTKKAGKTGPMKTLLVRVMTPDLRERLENLRKKPENIPQPISNTSRANLNKLLTDYTEMKKAILHVYWEEFQKDPVGLMSRVAQPASKKIDQNKLKPEMDEKGNLTTAGFACSQCGQPLFVYKLEQVSEKGKAYTNYFGRCNVAEHEKLILLAQLKPEKDSDEAVTYSLGKFGQRALDFYSIHVTKESTHPVKPLAQIAGNRYASGPVGKALSDACMGTIASFLSKYQDIIIEHQKVVKGNQKRLESLRELAGKENLEYPSVTLPPQPHTKEGVDAYNEVIARVRMWVNLNLWQKLKLSRDDAKPLLRLKGFPSFPLVERQANEVDWWDMVCNVKKLINEKKEDGKVFWQNLAGYKRQEALRPYLSSEEDRKKGKKFARYQLGDLLLHLEKKHGEDWGKVYDEAWERIDKKVEGLSKHIKLEEERRSEDAQSKAALTDWLRAKASFVIEGLKEADKDEFCRCELKLQKWYGDLRGKPFAIEAENSILDISGFSKQYNCAFIWQKDGVKKLNLYLIINYFKGGKLRFKKIKPEAFEANRFYTVINKKSGEIVPMEVNFNFDDPNLIILPLAFGKRQGREFIWNDLLSLETGSLKLANGRVIEKTLYNRRTRQDEPALFVALTFERREVLDSSNIKPMNLIGVDRGENIPAVIALTDPEGCPLSRFKDSLGNPTHILRIGESYKEKQRTIQATKEVEQRRAGGYSRKYASKAKNLADDMVRNTARDLLYYAVTQDAMLIFENLSRGFGRQGKRTFMAERQYTRMEDWLTAKLAYEGLPSKTYLSKTLAQYTSKTCSNCGFTITSADYDRVLEKLKKTATGWMTTINGKELKVEGQITYYNRYKRQNVVKDLSVELDRLSEESVNNDISSWTKGRSGEALSLLKKRFSHRPVQEKFVCLNCGFETHADEQAALNIARSWLFLRSQEYKKYQTNKTTGNTDKRAFVETWQSFYRKKLKEVWKPAV

SEQ ID NO: 26255 - protein, 978 aa, synthetic construct
  REGION 1..978: note = engineered CasX variant
QEIKRINKIRRRLVKDSNTKKAGKTGPMKTLLVRVMTPDLRERLENLRKKPENIPQPISNTSRANLNKLLTDYTEMKKAILHVYWEEFQKDPVGLMSRVAQPASKKIDQNKLKPEMDEKGNLTTAGFACSQCGQPLFVYKLEQVSEKGKAYTNYFGRCNVAEHEKLILLAQLKPEKDSDEAVTYSLGKFGQRALDFYSIHVTKESTHPVKPLAQIAGNRYASGPVGKALSDACMGTIASFLSKYQDIIIEHQKVVKGNQKRLESLRELAGKENLEYPSVTLPPQPHTKEGVDAYNEVIARVRMWVNLNLWQKLKLSRDDAKPLLRLKGFPSFPLVERQANEVDWWDMVCNVKKLINEKKEDGKVFWQNLAGYKRQEALRPYLSSEEDRKKGKKFARYQLGDLLLHLEKKHGEDWGKVYDEAWERIDKKVEGLSKHIKLEEERRSEDAQSKAALTDWLRAKASFVIEGLKEADKDEFCRCELKLQKWYGDLRGKPFAIEAENSILDISGFSKQYNCAFIWQKDGVKKLNLYLIINYFKGGKLRFKKIKPEAFEANRFYTVINKKSGEIVPMEVNFNFDDPNLIILPLAFGKRQGREFIWNDLLSLETGSLKLANGRVIEKTLYNRRTRQDEPALFVALTFERREVLDSSNIKPMNLIGVDRGENIPAVIALTDPEGCPLSRFKDSLGNPTHILRIGESYKEKQRTIQATKEVENRRAGGYSRKYASKAKNLADDMVRNTARDLLYYAVTQDAMLIFENLSRGFGRQGKRTFMAERQYTRMEDWLTAKLAYEGLPSKTYLSKTLAQYTSKTCSNCGFTITSADYDRVLEKLKKTATGWMTTINGKELKVEGQITYYNRYKRQNVVKDLSVELDRLSEESVNNDISSWTKGRSGEALSLLKKRFSHRPVQEKFVCLNCGFETHADEQAALNIARSWLFLRSQEYKKYQTNKTTGNTDKRAFVETWQSFYRKKLKEVWKPAV

SEQ ID NO: 26256 - protein, 978 aa, synthetic construct
  REGION 1..978: note = engineered CasX variant
QEIKRINKIRRRLVKDSNTKKAGKTGPMKTLLVRVMTPDLRERLENLRKKPENIPQPISNTSRANLNKLLTDYTEMKKAILHVYWEEFQKDPVGLMSRVAQPASKKIDQNKLKPEMDEKGNLTTAGFACSQCGQPLFVYKLEQVSEKGKAYTNYFGRCNVAEHEKLILLAQLKPEKDSDEAVTYSLGKFGQRALDFYSIHVTKESTHPVKPLAQIAGNRYASGPVGKALSDACMGTIASFLSKYQDIIIEHQKVVKGNQKRLESLRELAGKENLEYPSVTLPPQPHTKEGVDAYNEVIARVRMWVNLNLWQKLKLSRDDAKPLLRLKGFPSFPLVERQANEVDWWDMVCNVKKLINEKKEDGKVFWQNLAGYKRQEALRPYLSSEEDRKKGKKFARYQLGDLLLHLEKKHGEDWGKVYDEAWERIDKKVEGLSKHIKLEEERRSEDAQSKAALTDWLRAKASFVIEGLKEADKDEFCRCELKLQKWYGDLRGKPFAIEAENSILDISGFSKQYNCAFIWQKDGVKKLNLYLIINYFKGGKLRFKKIKPEAFEANRFYTVINKKSGEIVPMEVNFNFDDPNLIILPLAFGKRQGREFIWNDLLSLETGSLKLANGRVIEKTLYNRRTRQDEPALFVALTFERREVLDSSNIKPMNLIGVDRGENIPAVIALTDPEGCPLSRFKDSLGNPTHILRIGESYKEKQRTIQATKEEEQRRAGGYSRKYASKAKNLADDMVRNTARDLLYYAVTQDAMLIFENLSRGFGRQGKRTFMAERQYTRMEDWLTAKLAYEGLPSKTYLSKTLAQYTSKTCSNCGFTITSADYDRVLEKLKKTATGWMTTINGKELKVEGQITYYNRYKRQNVVKDLSVELDRLSEESVNNDISSWTKGRSGEALSLLKKRFSHRPVQEKFVCLNCGFETHADEQAALNIARSWLFLRSQEYKKYQTNKTTGNTDKRAFVETWQSFYRKKLKEVWKPAV

SEQ ID NO: 26257 - protein, 978 aa, synthetic construct
  REGION 1..978: note = engineered CasX variant
QEIKRINKIRRRLVKDSNTKKAGKTGPMKTLLVRVMTPDLRERLENLRKKPENIPQPISNTSRANLNKLLTDYTEMKKAILHVYWEEFQKDPVGLMSRVAQPASKKIDQNKLKPEMDEKGNLTTAGFACSQCGQPLFVYKLEQVSEKGKAYTNYFGRCNVAEHEKLILLAQLKPEKDSDEAVTYSLGKFGQRALDFYSIHVTKESTHPVKPLAQIAGNRYASGPVGKALSDACMGTIASFLSKYQDIIIEHQKVVKGNQKRLESLRELAGKENLEYPSVTLPPQPHTKEGVDAYNEVIARVRMWVNLNLWQKLKLSRDDAKPLLRLKGFPSFPLVERQANEVDWWDMVCNVKKLINEKKEDGKVFWQNLAGYKRQEALRPYLSSEEDRKKGKKFARYQLGDLLLHLEKKHGEDWGKVYDEAWERIDKKVEGLSKHIKLEEERRSEDAQSKAALTDWLRAKASFVIEGLKEADKDEFCRCELKLQKWYGDLRGKPFAIEAENSILDISGFSKQYNCAFIWQKDGVKKLNLYLIINYFKGGKLRFKKIKPEAFEANRFYTVINKKSGEIVPMEVNFNFDDPNLIILPLAFGKRQGREFIWNDLLSLETGSLKLANGRVIEKTLYNRRTRQDEPALFVALTFERREVLDSSNIKPMNLIGVDRGENIPAVIALTDPEGCPLSRFKDSLGNPTHILRIGESYKEKQRTIQATKEEENRRAGGYSRKYASKAKNLADDMVRNTARDLLYYAVTQDAMLIFENLSRGFGRQGKRTFMAERQYTRMEDWLTAKLAYEGLPSKTYLSKTLAQYTSKTCSNCGFTITSADYDRVLEKLKKTATGWMTTINGKELKVEGQITYYNRYKRQNVVKDLSVELDRLSEESVNNDISSWTKGRSGEALSLLKKRFSHRPVQEKFVCLNCGFETHADEQAALNIARSWLFLRSQEYKKYQTNKTTGNTDKRAFVETWQSFYRKKLKEVWKPAV

SEQ ID NO: 26258 - protein, 978 aa, synthetic construct
  REGION 1..978: note = engineered CasX variant
QEIKRINKIRRRLVKDSNTKKAGKTGPMKTLLVRVMTPDLRERLENLRKKPENIPQPISNTSRANLNKLLTDYTEMKKAILHVYWEEFQKDPVGLMSRVAQPASKKIDQNKLKPEMDEKGNLTTAGFACSQCGQPLFVYKLEQVSEKGKAYTNYFGRCNVAEHEKLILLAQLKPEKDSDEAVTYSLGKFGQRALDFYSIHVTKESTHPVKPLAQIAGNRYASGPVGKALSDACMGTIASFLSKYQDIIIEHQKVVKGNQKRLESLRELAGKENLEYPSVTLPPQPHTKEGVDAYNEVIARVRMWVNLNLWQKLKLSRDDAKPLLRLKGFPSFPLVERQANEVDWWDMVCNVKKLINEKKEDGKVFWQNLAGYKRQEALRPYLSSEEDRKKGKKFARYQLGDLLLHLEKKHGEDWGKVYDEAWERIDKKVEGLSKHIKLEEERRSEDAQSKAALTDWLRAKASFVIEGLKEADKDEFCRCELKLQKWYGDLRGKPFAIEAENSILDISGFSKQYNCAFIWQKDGVKKLNLYLIINYFKGGKLRFKKIKPEAFEANRFYTVINKKSGEIVPMEVNFNFDDPNLIILPLAFGKRQGREFIWNDLLSLETGSLKLANGRVIEKTLYNRRTRQDEPALFVALTFERREVLDSSNIKPMNLIGVDRGENIPAVIALTDPEGCPLSRFKDSLGNPTHILRIGESYKEKQRTIQASKQVEQRRAGGYSRKYASKAKNLADDMVRNTARDLLYYAVTQDAMLIFENLSRGFGRQGKRTFMAERQYTRMEDWLTAKLAYEGLPSKTYLSKTLAQYTSKTCSNCGFTITSADYDRVLEKLKKTATGWMTTINGKELKVEGQITYYNRYKRQNVVKDLSVELDRLSEESVNNDISSWTKGRSGEALSLLKKRFSHRPVQEKFVCLNCGFETHADEQAALNIARSWLFLRSQEYKKYQTNKTTGNTDKRAFVETWQSFYRKKLKEVWKPAV

SEQ ID NO: 26259 - protein, 978 aa, synthetic construct
  REGION 1..978: note = engineered CasX variant
QEIKRINKIRRRLVKDSNTKKAGKTGPMKTLLVRVMTPDLRERLENLRKKPENIPQPISNTSRANLNKLLTDYTEMKKAILHVYWEEFQKDPVGLMSRVAQPASKKIDQNKLKPEMDEKGNLTTAGFACSQCGQPLFVYKLEQVSEKGKAYTNYFGRCNVAEHEKLILLAQLKPEKDSDEAVTYSLGKFGQRALDFYSIHVTKESTHPVKPLAQIAGNRYASGPVGKALSDACMGTIASFLSKYQDIIIEHQKVVKGNQKRLESLRELAGKENLEYPSVTLPPQPHTKEGVDAYNEVIARVRMWVNLNLWQKLKLSRDDAKPLLRLKGFPSFPLVERQANEVDWWDMVCNVKKLINEKKEDGKVFWQNLAGYKRQEALRPYLSSEEDRKKGKKFARYQLGDLLLHLEKKHGEDWGKVYDEAWERIDKKVEGLSKHIKLEEERRSEDAQSKAALTDWLRAKASFVIEGLKEADKDEFCRCELKLQKWYGDLRGKPFAIEAENSILDISGFSKQYNCAFIWQKDGVKKLNLYLIINYFKGGKLRFKKIKPEAFEANRFYTVINKKSGEIVPMEVNFNFDDPNLIILPLAFGKRQGREFIWNDLLSLETGSLKLANGRVIEKTLYNRRTRQDEPALFVALTFERREVLDSSNIKPMNLIGVDRGENIPAVIALTDPEGCPLSRFKDSLGNPTHILRIGESYKEKQRTIQASKEVEQRRAGGYSRKYASKAKNLADDMVRNTARDLLYYAVTQDAMLIFENLSRGFGRQGKRTFMAERQYTRMEDWLTAKLAYEGLPSKTYLSKTLAQYTSKTCSNCGFTITSADYDRVLEKLKKTATGWMTTINGKELKVEGQITYYNRYKRQNVVKDLSVELDRLSEESVNNDISSWTKGRSGEALSLLKKRFSHRPVQEKFVCLNCGFETHADEQAALNIARSWLFLRSQEYKKYQTNKTTGNTDKRAFVETWQSFYRKKLKEVWKPAV

SEQ ID NO: 26260 - protein, 978 aa, synthetic construct
  REGION 1..978: note = engineered CasX variant
QEIKRINKIRRRLVKDSNTKKAGKTGPMKTLLVRVMTPDLRERLENLRKKPENIPQPISNTSRANLNKLLTDYTEMKKAILHVYWEEFQKDPVGLMSRVAQPASKKIDQNKLKPEMDEKGNLTTAGFACSQCGQPLFVYKLEQVSEKGKAYTNYFGRCNVAEHEKLILLAQLKPEKDSDEAVTYSLGKFGQRALDFYSIHVTKESTHPVKPLAQIAGNRYASGPVGKALSDACMGTIASFLSKYQDIIIEHQKVVKGNQKRLESLRELAGKENLEYPSVTLPPQPHTKEGVDAYNEVIARVRMWVNLNLWQKLKLSRDDAKPLLRLKGFPSFPLVERQANEVDWWDMVCNVKKLINEKKEDGKVFWQNLAGYKRQEALRPYLSSEEDRKKGKKFARYQLGDLLLHLEKKHGEDWGKVYDEAWERIDKKVEGLSKHIKLEEERRSEDAQSKAALTDWLRAKASFVIEGLKEADKDEFCRCELKLQKWYGDLRGKPFAIEAENSILDISGFSKQYNCAFIWQKDGVKKLNLYLIINYFKGGKLRFKKIKPEAFEANRFYTVINKKSGEIVPMEVNFNFDDPNLIILPLAFGKRQGREFIWNDLLSLETGSLKLANGRVIEKTLYNRRTRQDEPALFVALTFERREVLDSSNIKPMNLIGVDRGENIPAVIALTDPEGCPLSRFKDSLGNPTHILRIGESYKEKQRTIQARKEVEQRRAGGYSRKYASKAKNLADDMVRNTARDLLYYAVTQDAMLIFENLSRGFGRQGKRTFMAERQYTRMEDWLTAKLAYEGLPSKTYLSKTLAQYTSKTCSNCGFTITSADYDRVLEKLKKTATGWMTTINGKELKVEGQITYYNRYKRQNVVKDLSVELDRLSEESVNNDISSWTKGRSGEALSLLKKRFSHRPVQEKFVCLNCGFETHADEQAALNIARSWLFLRSQEYKKYQTNKTTGNTDKRAFVETWQSFYRKKLKEVWKPAV

SEQ ID NO: 26261 - protein, 978 aa, synthetic construct
  REGION 1..978: note = engineered CasX variant
QEIKRINKIRRRLVKDSNTKKAGKTGPMKTLLVRVMTPDLRERLENLRKKPENIPQPISNTSRANLNKLLTDYTEMKKAILHVYWEEFQKDPVGLMSRVAQPASKKIDQNKLKPEMDEKGNLTTAGFACSQCGQPLFVYKLEQVSEKGKAYTNYFGRCNVAEHEKLILLAQLKPEKDSDEAVTYSLGKFGQRALDFYSIHVTKESTHPVKPLAQIAGNRYASGPVGKALSDACMGTIASFLSKYQDIIIEHQKVVKGNQKRLESLRELAGKENLEYPSVTLPPQPHTKEGVDAYNEVIARVRMWVNLNLWQKLKLSRDDAKPLLRLKGFPSFPLVERQANEVDWWDMVCNVKKLINEKKEDGKVFWQNLAGYKRQEALRPYLSSEEDRKKGKKFARYQLGDLLLHLEKKHGEDWGKVYDEAWERIDKKVEGLSKHIKLEEERRSEDAQSKAALTDWLRAKASFVIEGLKEADKDEFCRCELKLQKWYGDLRGKPFAIEAENSILDISGFSKQYNCAFIWQKDGVKKLNLYLIINYFKGGKLRFKKIKPEAFEANRFYTVINKKSGEIVPMEVNFNFDDPNLIILPLAFGKRQGREFIWNDLLSLETGSLKLANGRVIEKTLYNRRTRQDEPALFVALTFERREVLDSSNIKPMNLIGVDRGENIPAVIALTDPEGCPLSRFKDSLGNPTHILRIGESYKEKQRTIQANKEVYQRRAGGYSRKYASKAKNLADDMVRNTARDLLYYAVTQDAMLIFENLSRGFGRQGKRTFMAERQYTRMEDWLTAKLAYEGLPSKTYLSKTLAQYTSKTCSNCGFTITSADYDRVLEKLKKTATGWMTTINGKELKVEGQITYYNRYKRQNVVKDLSVELDRLSEESVNNDISSWTKGRSGEALSLLKKRFSHRPVQEKFVCLNCGFETHADEQAALNIARSWLFLRSQEYKKYQTNKTTGNTDKRAFVETWQSFYRKKLKEVWKPAV

SEQ ID NO: 26262 - protein, 978 aa, synthetic construct
  REGION 1..978: note = engineered CasX variant
QEIKRINKIRRRLVKDSNTKKAGKTGPMKTLLVRVMTPDLRERLENLRKKPENIPQPISNTSRANLNKLLTDYTEMKKAILHVYWEEFQKDPVGLMSRVAQPASKKIDQNKLKPEMDEKGNLTTAGFACSQCGQPLFVYKLEQVSEKGKAYTNYFGRCNVAEHEKLILLAQLKPEKDSDEAVTYSLGKFGQRALDFYSIHVTKESTHPVKPLAQIAGNRYASGPVGKALSDACMGTIASFLSKYQDIIIEHQKVVKGNQKRLESLRELAGKENLEYPSVTLPPQPHTKEGVDAYNEVIARVRMWVNLNLWQKLKLSRDDAKPLLRLKGFPSFPLVERQANEVDWWDMVCNVKKLINEKKEDGKVFWQNLAGYKRQEALRPYLSSEEDRKKGKKFARYQLGDLLLHLEKKHGEDWGKVYDEAWERIDKKVEGLSKHIKLEEERRSEDAQSKAALTDWLRAKASFVIEGLKEADKDEFCRCELKLQKWYGDLRGKPFAIEAENSILDISGFSKQYNCAFIWQKDGVKKLNLYLIINYFKGGKLRFKKIKPEAFEANRFYTVINKKSGEIVPMEVNFNFDDPNLIILPLAFGKRQGREFIWNDLLSLETGSLKLANGRVIEKTLYNRRTRQDEPALFVALTFERREVLDSSNIKPMNLIGVDRGENIPAVIALTDPEGCPLSRFKDSLGNPTHILRIGESYKEKQRTIQANKEVTQRRAGGYSRKYASKAKNLADDMVRNTARDLLYYAVTQDAMLIFENLSRGFGRQGKRTFMAERQYTRMEDWLTAKLAYEGLPSKTYLSKTLAQYTSKTCSNCGFTITSADYDRVLEKLKKTATGWMTTINGKELKVEGQITYYNRYKRQNVVKDLSVELDRLSEESVNNDISSWTKGRSGEALSLLKKRFSHRPVQEKFVCLNCGFETHADEQAALNIARSWLFLRSQEYKKYQTNKTTGNTDKRAFVETWQSFYRKKLKEVWKPAV

SEQ ID NO: 26263 - protein, 978 aa, synthetic construct
  REGION 1..978: note = engineered CasX variant
QEIKRINKIRRRLVKDSNTKKAGKTGPMKTLLVRVMTPDLRERLENLRKKPENIPQPISNTSRANLNKLLTDYTEMKKAILHVYWEEFQKDPVGLMSRVAQPASKKIDQNKLKPEMDEKGNLTTAGFACSQCGQPLFVYKLEQVSEKGKAYTNYFGRCNVAEHEKLILLAQLKPEKDSDEAVTYSLGKFGQRALDFYSIHVTKESTHPVKPLAQIAGNRYASGPVGKALSDACMGTIASFLSKYQDIIIEHQKVVKGNQKRLESLRELAGKENLEYPSVTLPPQPHTKEGVDAYNEVIARVRMWVNLNLWQKLKLSRDDAKPLLRLKGFPSFPLVERQANEVDWWDMVCNVKKLINEKKEDGKVFWQNLAGYKRQEALRPYLSSEEDRKKGKKFARYQLGDLLLHLEKKHGEDWGKVYDEAWERIDKKVEGLSKHIKLEEERRSEDAQSKAALTDWLRAKASFVIEGLKEADKDEFCRCELKLQKWYGDLRGKPFAIEAENSILDISGFSKQYNCAFIWQKDGVKKLNLYLIINYFKGGKLRFKKIKPEAFEANRFYTVINKKSGEIVPMEVNFNFDDPNLIILPLAFGKRQGREFIWNDLLSLETGSLKLANGRVIEKTLYNRRTRQDEPALFVALTFERREVLDSSNIKPMNLIGVDRGENIPAVIALTDPEGCPLSRFKDSLGNPTHILRIGESYKEKQRTIQANKEVEQRRAGGYSRKYASKAKNLADDMVRNTARDLLYYAVTQDAMLIFENLSRGFGRQGKRTFMAERQYTRMEDWLTAKLAYEGLPSKTYLSKTLAQYTSKTCSNCGFTITSADYDRVLEKLKKTATGWMTTINGKELKVEGQITYYNRYKRQNVVKDLSVELDRLSEESVNNDISSWTKGRSGEALSLLKKRFSHRPVQEKFVCLNCGFETHADEQAALNIARSWLFLRSQEYKKYQTNKTTGNTDKRAFVETWQSFYRKKLKEVWKPAV

SEQ ID NO: 26264 - protein, 978 aa, synthetic construct
  REGION 1..978: note = engineered CasX variant
QEIKRINKIRRRLVKDSNTKKAGKTGPMKTLLVRVMTPDLRERLENLRKKPENIPQPISNTSRANLNKLLTDYTEMKKAILHVYWEEFQKDPVGLMSRVAQPASKKIDQNKLKPEMDEKGNLTTAGFACSQCGQPLFVYKLEQVSEKGKAYTNYFGRCNVAEHEKLILLAQLKPEKDSDEAVTYSLGKFGQRALDFYSIHVTKESTHPVKPLAQIAGNRYASGPVGKALSDACMGTIASFLSKYQDIIIEHQKVVKGNQKRLESLRELAGKENLEYPSVTLPPQPHTKEGVDAYNEVIARVRMWVNLNLWQKLKLSRDDAKPLLRLKGFPSFPLVERQANEVDWWDMVCNVKKLINEKKEDGKVFWQNLAGYKRQEALRPYLSSEEDRKKGKKFARYQLGDLLLHLEKKHGEDWGKVYDEAWERIDKKVEGLSKHIKLEEERRSEDAQSKAALTDWLRAKASFVIEGLKEADKDEFCRCELKLQKWYGDLRGKPFAIEAENSILDISGFSKQYNCAFIWQKDGVKKLNLYLIINYFKGGKLRFKKIKPEAFEANRFYTVINKKSGEIVPMEVNFNFDDPNLIILPLAFGKRQGREFIWNDLLSLETGSLKLANGRVIEKTLYNRRTRQDEPALFVALTFERREVLDSSNIKPMNLIGVDRGENIPAVIALTDPEGCPLSRFKDSLGNPTHILRIGESYKEKQRTIQAMKEVEQRRAGGYSRKYASKAKNLADDMVRNTARDLLYYAVTQDAMLIFENLSRGFGRQGKRTFMAERQYTRMEDWLTAKLAYEGLPSKTYLSKTLAQYTSKTCSNCGFTITSADYDRVLEKLKKTATGWMTTINGKELKVEGQITYYNRYKRQNVVKDLSVELDRLSEESVNNDISSWTKGRSGEALSLLKKRFSHRPVQEKFVCLNCGFETHADEQAALNIARSWLFLRSQEYKKYQTNKTTGNTDKRAFVETWQSFYRKKLKEVWKPAV

SEQ ID NO: 26265 - protein, 978 aa, synthetic construct
  REGION 1..978: note = engineered CasX variant
QEIKRINKIRRRLVKDSNTKKAGKTGPMKTLLVRVMTPDLRERLENLRKKPENIPQPISNTSRANLNKLLTDYTEMKKAILHVYWEEFQKDPVGLMSRVAQPASKKIDQNKLKPEMDEKGNLTTAGFACSQCGQPLFVYKLEQVSEKGKAYTNYFGRCNVAEHEKLILLAQLKPEKDSDEAVTYSLGKFGQRALDFYSIHVTKESTHPVKPLAQIAGNRYASGPVGKALSDACMGTIASFLSKYQDIIIEHQKVVKGNQKRLESLRELAGKENLEYPSVTLPPQPHTKEGVDAYNEVIARVRMWVNLNLWQKLKLSRDDAKPLLRLKGFPSFPLVERQANEVDWWDMVCNVKKLINEKKEDGKVFWQNLAGYKRQEALRPYLSSEEDRKKGKKFARYQLGDLLLHLEKKHGEDWGKVYDEAWERIDKKVEGLSKHIKLEEERRSEDAQSKAALTDWLRAKASFVIEGLKEADKDEFCRCELKLQKWYGDLRGKPFAIEAENSILDISGFSKQYNCAFIWQKDGVKKLNLYLIINYFKGGKLRFKKIKPEAFEANRFYTVINKKSGEIVPMEVNFNFDDPNLIILPLAFGKRQGREFIWNDLLSLETGSLKLANGRVIEKTLYNRRTRQDEPALFVALTFERREVLDSSNIKPMNLIGVDRGENIPAVIALTDPEGCPLSRFKDSLGNPTHILRIGESYKEKQRTIQAMKEVEDRRAGGYSRKYASKAKNLADDMVRNTARDLLYYAVTQDAMLIFENLSRGFGRQGKRTFMAERQYTRMEDWLTAKLAYEGLPSKTYLSKTLAQYTSKTCSNCGFTITSADYDRVLEKLKKTATGWMTTINGKELKVEGQITYYNRYKRQNVVKDLSVELDRLSEESVNNDISSWTKGRSGEALSLLKKRFSHRPVQEKFVCLNCGFETHADEQAALNIARSWLFLRSQEYKKYQTNKTTGNTDKRAFVETWQSFYRKKLKEVWKPAV

SEQ ID NO: 26266 - protein, 978 aa, synthetic construct
  REGION 1..978: note = engineered CasX variant
QEIKRINKIRRRLVKDSNTKKAGKTGPMKTLLVRVMTPDLRERLENLRKKPENIPQPISNTSRANLNKLLTDYTEMKKAILHVYWEEFQKDPVGLMSRVAQPASKKIDQNKLKPEMDEKGNLTTAGFACSQCGQPLFVYKLEQVSEKGKAYTNYFGRCNVAEHEKLILLAQLKPEKDSDEAVTYSLGKFGQRALDFYSIHVTKESTHPVKPLAQIAGNRYASGPVGKALSDACMGTIASFLSKYQDIIIEHQKVVKGNQKRLESLRELAGKENLEYPSVTLPPQPHTKEGVDAYNEVIARVRMWVNLNLWQKLKLSRDDAKPLLRLKGFPSFPLVERQANEVDWWDMVCNVKKLINEKKEDGKVFWQNLAGYKRQEALRPYLSSEEDRKKGKKFARYQLGDLLLHLEKKHGEDWGKVYDEAWERIDKKVEGLSKHIKLEEERRSEDAQSKAALTDWLRAKASFVIEGLKEADKDEFCRCELKLQKWYGDLRGKPFAIEAENSILDISGFSKQYNCAFIWQKDGVKKLNLYLIINYFKGGKLRFKKIKPEAFEANRFYTVINKKSGEIVPMEVNFNFDDPNLIILPLAFGKRQGREFIWNDLLSLETGSLKLANGRVIEKTLYNRRTRQDEPALFVALTFERREVLDSSNIKPMNLIGVDRGENIPAVIALTDPEGCPLSRFKDSLGNPTHILRIGESYKEKQRTIQALKGVEQRRAGGYSRKYASKAKNLADDMVRNTARDLLYYAVTQDAMLIFENLSRGFGRQGKRTFMAERQYTRMEDWLTAKLAYEGLPSKTYLSKTLAQYTSKTCSNCGFTITSADYDRVLEKLKKTATGWMTTINGKELKVEGQITYYNRYKRQNVVKDLSVELDRLSEESVNNDISSWTKGRSGEALSLLKKRFSHRPVQEKFVCLNCGFETHADEQAALNIARSWLFLRSQEYKKYQTNKTTGNTDKRAFVETWQSFYRKKLKEVWKPAV

SEQ ID NO: 26267 - protein, 978 aa, synthetic construct
  REGION 1..978: note = engineered CasX variant
QEIKRINKIRRRLVKDSNTKKAGKTGPMKTLLVRVMTPDLRERLENLRKKPENIPQPISNTSRANLNKLLTDYTEMKKAILHVYWEEFQKDPVGLMSRVAQPASKKIDQNKLKPEMDEKGNLTTAGFACSQCGQPLFVYKLEQVSEKGKAYTNYFGRCNVAEHEKLILLAQLKPEKDSDEAVTYSLGKFGQRALDFYSIHVTKESTHPVKPLAQIAGNRYASGPVGKALSDACMGTIASFLSKYQDIIIEHQKVVKGNQKRLESLRELAGKENLEYPSVTLPPQPHTKEGVDAYNEVIARVRMWVNLNLWQKLKLSRDDAKPLLRLKGFPSFPLVERQANEVDWWDMVCNVKKLINEKKEDGKVFWQNLAGYKRQEALRPYLSSEEDRKKGKKFARYQLGDLLLHLEKKHGEDWGKVYDEAWERIDKKVEGLSKHIKLEEERRSEDAQSKAALTDWLRAKASFVIEGLKEADKDEFCRCELKLQKWYGDLRGKPFAIEAENSILDISGFSKQYNCAFIWQKDGVKKLNLYLIINYFKGGKLRFKKIKPEAFEANRFYTVINKKSGEIVPMEVNFNFDDPNLIILPLAFGKRQGREFIWNDLLSLETGSLKLANGRVIEKTLYNRRTRQDEPALFVALTFERREVLDSSNIKPMNLIGVDRGENIPAVIALTDPEGCPLSRFKDSLGNPTHILRIGESYKEKQRTIQALKEVEQRRAGQYSRKYASKAKNLADDMVRNTARDLLYYAVTQDAMLIFENLSRGFGRQGKRTFMAERQYTRMEDWLTAKLAYEGLPSKTYLSKTLAQYTSKTCSNCGFTITSADYDRVLEKLKKTATGWMTTINGKELKVEGQITYYNRYKRQNVVKDLSVELDRLSEESVNNDISSWTKGRSGEALSLLKKRFSHRPVQEKFVCLNCGFETHADEQAALNIARSWLFLRSQEYKKYQTNKTTGNTDKRAFVETWQSFYRKKLKEVWKPAV

SEQ ID NO: 26268 - protein, 978 aa, synthetic construct
  REGION 1..978: note = engineered CasX variant
QEIKRINKIRRRLVKDSNTKKAGKTGPMKTLLVRVMTPDLRERLENLRKKPENIPQPISNTSRANLNKLLTDYTEMKKAILHVYWEEFQKDPVGLMSRVAQPASKKIDQNKLKPEMDEKGNLTTAGFACSQCGQPLFVYKLEQVSEKGKAYTNYFGRCNVAEHEKLILLAQLKPEKDSDEAVTYSLGKFGQRALDFYSIHVTKESTHPVKPLAQIAGNRYASGPVGKALSDACMGTIASFLSKYQDIIIEHQKVVKGNQKRLESLRELAGKENLEYPSVTLPPQPHTKEGVDAYNEVIARVRMWVNLNLWQKLKLSRDDAKPLLRLKGFPSFPLVERQANEVDWWDMVCNVKKLINEKKEDGKVFWQNLAGYKRQEALRPYLSSEEDRKKGKKFARYQLGDLLLHLEKKHGEDWGKVYDEAWERIDKKVEGLSKHIKLEEERRSEDAQSKAALTDWLRAKASFVIEGLKEADKDEFCRCELKLQKWYGDLRGKPFAIEAENSILDISGFSKQYNCAFIWQKDGVKKLNLYLIINYFKGGKLRFKKIKPEAFEANRFYTVINKKSGEIVPMEVNFNFDDPNLIILPLAFGKRQGREFIWNDLLSLETGSLKLANGRVIEKTLYNRRTRQDEPALFVALTFERREVLDSSNIKPMNLIGVDRGENIPAVIALTDPEGCPLSRFKDSLGNPTHILRIGESYKEKQRTIQALKEVEQRRAGGYSRKYASKAKNLADDMVRNTARDLLYYAVTQDAMLIFENLSRGFGRQGKRTFMAERQYTRMEDWLTAKLAYEGLPSKTYLSKTLAQYTSKTCSNCGFTITSADYDRVLEKLKKTATGWMTTINGKELKVEGQITYYNRYKRQNVVKDLSVELDRLSEESVNNDISSWTKGRSGEALSLLKKRFSHRPVQEKFVCLNCGFETHADEQAALNIARSWLFLRSQEYKKYQTNKTTGNTDKRAFVETWQSFYRKKLKEVWKPAV

SEQ ID NO: 26269 - protein, 978 aa, synthetic construct
  REGION 1..978: note = engineered CasX variant
QEIKRINKIRRRLVKDSNTKKAGKTGPMKTLLVRVMTPDLRERLENLRKKPENIPQPISNTSRANLNKLLTDYTEMKKAILHVYWEEFQKDPVGLMSRVAQPASKKIDQNKLKPEMDEKGNLTTAGFACSQCGQPLFVYKLEQVSEKGKAYTNYFGRCNVAEHEKLILLAQLKPEKDSDEAVTYSLGKFGQRALDFYSIHVTKESTHPVKPLAQIAGNRYASGPVGKALSDACMGTIASFLSKYQDIIIEHQKVVKGNQKRLESLRELAGKENLEYPSVTLPPQPHTKEGVDAYNEVIARVRMWVNLNLWQKLKLSRDDAKPLLRLKGFPSFPLVERQANEVDWWDMVCNVKKLINEKKEDGKVFWQNLAGYKRQEALRPYLSSEEDRKKGKKFARYQLGDLLLHLEKKHGEDWGKVYDEAWERIDKKVEGLSKHIKLEEERRSEDAQSKAALTDWLRAKASFVIEGLKEADKDEFCRCELKLQKWYGDLRGKPFAIEAENSILDISGFSKQYNCAFIWQKDGVKKLNLYLIINYFKGGKLRFKKIKPEAFEANRFYTVINKKSGEIVPMEVNFNFDDPNLIILPLAFGKRQGREFIWNDLLSLETGSLKLANGRVIEKTLYNRRTRQDEPALFVALTFERREVLDSSNIKPMNLIGVDRGENIPAVIALTDPEGCPLSRFKDSLGNPTHILRIGESYKEKQRTIQALKEVEQGRAGGYSRKYASKAKNLADDMVRNTARDLLYYAVTQDAMLIFENLSRGFGRQGKRTFMAERQYTRMEDWLTAKLAYEGLPSKTYLSKTLAQYTSKTCSNCGFTITSADYDRVLEKLKKTATGWMTTINGKELKVEGQITYYNRYKRQNVVKDLSVELDRLSEESVNNDISSWTKGRSGEALSLLKKRFSHRPVQEKFVCLNCGFETHADEQAALNIARSWLFLRSQEYKKYQTNKTTGNTDKRAFVETWQSFYRKKLKEVWKPAV

SEQ ID NO: 26270 - protein, 978 aa, synthetic construct
  REGION 1..978: note = engineered CasX variant
QEIKRINKIRRRLVKDSNTKKAGKTGPMKTLLVRVMTPDLRERLENLRKKPENIPQPISNTSRANLNKLLTDYTEMKKAILHVYWEEFQKDPVGLMSRVAQPASKKIDQNKLKPEMDEKGNLTTAGFACSQCGQPLFVYKLEQVSEKGKAYTNYFGRCNVAEHEKLILLAQLKPEKDSDEAVTYSLGKFGQRALDFYSIHVTKESTHPVKPLAQIAGNRYASGPVGKALSDACMGTIASFLSKYQDIIIEHQKVVKGNQKRLESLRELAGKENLEYPSVTLPPQPHTKEGVDAYNEVIARVRMWVNLNLWQKLKLSRDDAKPLLRLKGFPSFPLVERQANEVDWWDMVCNVKKLINEKKEDGKVFWQNLAGYKRQEALRPYLSSEEDRKKGKKFARYQLGDLLLHLEKKHGEDWGKVYDEAWERIDKKVEGLSKHIKLEEERRSEDAQSKAALTDWLRAKASFVIEGLKEADKDEFCRCELKLQKWYGDLRGKPFAIEAENSILDISGFSKQYNCAFIWQKDGVKKLNLYLIINYFKGGKLRFKKIKPEAFEANRFYTVINKKSGEIVPMEVNFNFDDPNLIILPLAFGKRQGREFIWNDLLSLETGSLKLANGRVIEKTLYNRRTRQDEPALFVALTFERREVLDSSNIKPMNLIGVDRGENIPAVIALTDPEGCPLSRFKDSLGNPTHILRIGESYKEKQRTIQAKVEVEQRRSGGYSRKYASKAKNLADDMVRNTARDLLYYAVTQDAMLIFENLSRGFGRQGKRTFMAERQYTRMEDWLTAKLAYEGLPSKTYLSKTLAQYTSKTCSNCGFTITSADYDRVLEKLKKTATGWMTTINGKELKVEGQITYYNRYKRQNVVKDLSVELDRLSEESVNNDISSWTKGRSGEALSLLKKRFSHRPVQEKFVCLNCGFETHADEQAALNIARSWLFLRSQEYKKYQTNKTTGNTDKRAFVETWQSFYRKKLKEVWKPAV

SEQ ID NO: 26271 - protein, 978 aa, synthetic construct
  REGION 1..978: note = engineered CasX variant
QEIKRINKIRRRLVKDSNTKKAGKTGPMKTLLVRVMTPDLRERLENLRKKPENIPQPISNTSRANLNKLLTDYTEMKKAILHVYWEEFQKDPVGLMSRVAQPASKKIDQNKLKPEMDEKGNLTTAGFACSQCGQPLFVYKLEQVSEKGKAYTNYFGRCNVAEHEKLILLAQLKPEKDSDEAVTYSLGKFGQRALDFYSIHVTKESTHPVKPLAQIAGNRYASGPVGKALSDACMGTIASFLSKYQDIIIEHQKVVKGNQKRLESLRELAGKENLEYPSVTLPPQPHTKEGVDAYNEVIARVRMWVNLNLWQKLKLSRDDAKPLLRLKGFPSFPLVERQANEVDWWDMVCNVKKLINEKKEDGKVFWQNLAGYKRQEALRPYLSSEEDRKKGKKFARYQLGDLLLHLEKKHGEDWGKVYDEAWERIDKKVEGLSKHIKLEEERRSEDAQSKAALTDWLRAKASFVIEGLKEADKDEFCRCELKLQKWYGDLRGKPFAIEAENSILDISGFSKQYNCAFIWQKDGVKKLNLYLIINYFKGGKLRFKKIKPEAFEANRFYTVINKKSGEIVPMEVNFNFDDPNLIILPLAFGKRQGREFIWNDLLSLETGSLKLANGRVIEKTLYNRRTRQDEPALFVALTFERREVLDSSNIKPMNLIGVDRGENIPAVIALTDPEGCPLSRFKDSLGNPTHILRIGESYKEKQRTIQAKVEVEQRRAGGYSRKYASKAKNLADDMVRNTARDLLYYAVTQDAMLIFENLSRGFGRQGKRTFMAERQYTRMEDWLTAKLAYEGLPSKTYLSKTLAQYTSKTCSNCGFTITSADYDRVLEKLKKTATGWMTTINGKELKVEGQITYYNRYKRQNVVKDLSVELDRLSEESVNNDISSWTKGRSGEALSLLKKRFSHRPVQEKFVCLNCGFETHADEQAALNIARSWLFLRSQEYKKYQTNKTTGNTDKRAFVETWQSFYRKKLKEVWKPAV

SEQ ID NO: 26272 - protein, 978 aa, synthetic construct
  REGION 1..978: note = engineered CasX variant
QEIKRINKIRRRLVKDSNTKKAGKTGPMKTLLVRVMTPDLRERLENLRKKPENIPQPISNTSRANLNKLLTDYTEMKKAILHVYWEEFQKDPVGLMSRVAQPASKKIDQNKLKPEMDEKGNLTTAGFACSQCGQPLFVYKLEQVSEKGKAYTNYFGRCNVAEHEKLILLAQLKPEKDSDEAVTYSLGKFGQRALDFYSIHVTKESTHPVKPLAQIAGNRYASGPVGKALSDACMGTIASFLSKYQDIIIEHQKVVKGNQKRLESLRELAGKENLEYPSVTLPPQPHTKEGVDAYNEVIARVRMWVNLNLWQKLKLSRDDAKPLLRLKGFPSFPLVERQANEVDWWDMVCNVKKLINEKKEDGKVFWQNLAGYKRQEALRPYLSSEEDRKKGKKFARYQLGDLLLHLEKKHGEDWGKVYDEAWERIDKKVEGLSKHIKLEEERRSEDAQSKAALTDWLRAKASFVIEGLKEADKDEFCRCELKLQKWYGDLRGKPFAIEAENSILDISGFSKQYNCAFIWQKDGVKKLNLYLIINYFKGGKLRFKKIKPEAFEANRFYTVINKKSGEIVPMEVNFNFDDPNLIILPLAFGKRQGREFIWNDLLSLETGSLKLANGRVIEKTLYNRRTRQDEPALFVALTFERREVLDSSNIKPMNLIGVDRGENIPAVIALTDPEGCPLSRFKDSLGNPTHILRIGESYKEKQRTIQAKREVEQRRAGGYSRKYASKAKNLADDMVRNTARDLLYYAVTQDAMLIFENLSRGFGRQGKRTFMAERQYTRMEDWLTAKLAYEGLPSKTYLSKTLAQYTSKTCSNCGFTITSADYDRVLEKLKKTATGWMTTINGKELKVEGQITYYNRYKRQNVVKDLSVELDRLSEESVNNDISSWTKGRSGEALSLLKKRFSHRPVQEKFVCLNCGFETHADEQAALNIARSWLFLRSQEYKKYQTNKTTGNTDKRAFVETWQSFYRKKLKEVWKPAV

SEQ ID NO: 26273 - protein, 978 aa, synthetic construct
  REGION 1..978: note = engineered CasX variant
QEIKRINKIRRRLVKDSNTKKAGKTGPMKTLLVRVMTPDLRERLENLRKKPENIPQPISNTSRANLNKLLTDYTEMKKAILHVYWEEFQKDPVGLMSRVAQPASKKIDQNKLKPEMDEKGNLTTAGFACSQCGQPLFVYKLEQVSEKGKAYTNYFGRCNVAEHEKLILLAQLKPEKDSDEAVTYSLGKFGQRALDFYSIHVTKESTHPVKPLAQIAGNRYASGPVGKALSDACMGTIASFLSKYQDIIIEHQKVVKGNQKRLESLRELAGKENLEYPSVTLPPQPHTKEGVDAYNEVIARVRMWVNLNLWQKLKLSRDDAKPLLRLKGFPSFPLVERQANEVDWWDMVCNVKKLINEKKEDGKVFWQNLAGYKRQEALRPYLSSEEDRKKGKKFARYQLGDLLLHLEKKHGEDWGKVYDEAWERIDKKVEGLSKHIKLEEERRSEDAQSKAALTDWLRAKASFVIEGLKEADKDEFCRCELKLQKWYGDLRGKPFAIEAENSILDISGFSKQYNCAFIWQKDGVKKLNLYLIINYFKGGKLRFKKIKPEAFEANRFYTVINKKSGEIVPMEVNFNFDDPNLIILPLAFGKRQGREFIWNDLLSLETGSLKLANGRVIEKTLYNRRTRQDEPALFVALTFERREVLDSSNIKPMNLIGVDRGENIPAVIALTDPEGCPLSRFKDSLGNPTHILRIGESYKEKQRTIQAKQEVEQRRAGGYSRKYASKAKNLADDMVRNTARDLLYYAVTQDAMLIFENLSRGFGRQGKRTFMAERQYTRMEDWLTAKLAYEGLPSKTYLSKTLAQYTSKTCSNCGFTITSADYDRVLEKLKKTATGWMTTINGKELKVEGQITYYNRYKRQNVVKDLSVELDRLSEESVNNDISSWTKGRSGEALSLLKKRFSHRPVQEKFVCLNCGFETHADEQAALNIARSWLFLRSQEYKKYQTNKTTGNTDKRAFVETWQSFYRKKLKEVWKPAV

SEQ ID NO: 26274 - protein, 978 aa, synthetic construct
  REGION 1..978: note = engineered CasX variant
QEIKRINKIRRRLVKDSNTKKAGKTGPMKTLLVRVMTPDLRERLENLRKKPENIPQPISNTSRANLNKLLTDYTEMKKAILHVYWEEFQKDPVGLMSRVAQPASKKIDQNKLKPEMDEKGNLTTAGFACSQCGQPLFVYKLEQVSEKGKAYTNYFGRCNVAEHEKLILLAQLKPEKDSDEAVTYSLGKFGQRALDFYSIHVTKESTHPVKPLAQIAGNRYASGPVGKALSDACMGTIASFLSKYQDIIIEHQKVVKGNQKRLESLRELAGKENLEYPSVTLPPQPHTKEGVDAYNEVIARVRMWVNLNLWQKLKLSRDDAKPLLRLKGFPSFPLVERQANEVDWWDMVCNVKKLINEKKEDGKVFWQNLAGYKRQEALRPYLSSEEDRKKGKKFARYQLGDLLLHLEKKHGEDWGKVYDEAWERIDKKVEGLSKHIKLEEERRSEDAQSKAALTDWLRAKASFVIEGLKEADKDEFCRCELKLQKWYGDLRGKPFAIEAENSILDISGFSKQYNCAFIWQKDGVKKLNLYLIINYFKGGKLRFKKIKPEAFEANRFYTVINKKSGEIVPMEVNFNFDDPNLIILPLAFGKRQGREFIWNDLLSLETGSLKLANGRVIEKTLYNRRTRQDEPALFVALTFERREVLDSSNIKPMNLIGVDRGENIPAVIALTDPEGCPLSRFKDSLGNPTHILRIGESYKEKQRTIQAKMEVEQRRAGGYSRKYASKAKNLADDMVRNTARDLLYYAVTQDAMLIFENLSRGFGRQGKRTFMAERQYTRMEDWLTAKLAYEGLPSKTYLSKTLAQYTSKTCSNCGFTITSADYDRVLEKLKKTATGWMTTINGKELKVEGQITYYNRYKRQNVVKDLSVELDRLSEESVNNDISSWTKGRSGEALSLLKKRFSHRPVQEKFVCLNCGFETHADEQAALNIARSWLFLRSQEYKKYQTNKTTGNTDKRAFVETWQSFYRKKLKEVWKPAV

SEQ ID NO: 26275 - protein, 978 aa, synthetic construct
  REGION 1..978: note = engineered CasX variant
QEIKRINKIRRRLVKDSNTKKAGKTGPMKTLLVRVMTPDLRERLENLRKKPENIPQPISNTSRANLNKLLTDYTEMKKAILHVYWEEFQKDPVGLMSRVAQPASKKIDQNKLKPEMDEKGNLTTAGFACSQCGQPLFVYKLEQVSEKGKAYTNYFGRCNVAEHEKLILLAQLKPEKDSDEAVTYSLGKFGQRALDFYSIHVTKESTHPVKPLAQIAGNRYASGPVGKALSDACMGTIASFLSKYQDIIIEHQKVVKGNQKRLESLRELAGKENLEYPSVTLPPQPHTKEGVDAYNEVIARVRMWVNLNLWQKLKLSRDDAKPLLRLKGFPSFPLVERQANEVDWWDMVCNVKKLINEKKEDGKVFWQNLAGYKRQEALRPYLSSEEDRKKGKKFARYQLGDLLLHLEKKHGEDWGKVYDEAWERIDKKVEGLSKHIKLEEERRSEDAQSKAALTDWLRAKASFVIEGLKEADKDEFCRCELKLQKWYGDLRGKPFAIEAENSILDISGFSKQYNCAFIWQKDGVKKLNLYLIINYFKGGKLRFKKIKPEAFEANRFYTVINKKSGEIVPMEVNFNFDDPNLIILPLAFGKRQGREFIWNDLLSLETGSLKLANGRVIEKTLYNRRTRQDEPALFVALTFERREVLDSSNIKPMNLIGVDRGENIPAVIALTDPEGCPLSRFKDSLGNPTHILRIGESYKEKQRTIQAKLEVEQRRAGGYSRKYASKAKNLADDMVRNTARDLLYYAVTQDAMLIFENLSRGFGRQGKRTFMAERQYTRMEDWLTAKLAYEGLPSKTYLSKTLAQYTSKTCSNCGFTITSADYDRVLEKLKKTATGWMTTINGKELKVEGQITYYNRYKRQNVVKDLSVELDRLSEESVNNDISSWTKGRSGEALSLLKKRFSHRPVQEKFVCLNCGFETHADEQAALNIARSWLFLRSQEYKKYQTNKTTGNTDKRAFVETWQSFYRKKLKEVWKPAV

SEQ ID NO: 26276 - protein, 978 aa, synthetic construct
  REGION 1..978: note = engineered CasX variant
QEIKRINKIRRRLVKDSNTKKAGKTGPMKTLLVRVMTPDLRERLENLRKKPENIPQPISNTSRANLNKLLTDYTEMKKAILHVYWEEFQKDPVGLMSRVAQPASKKIDQNKLKPEMDEKGNLTTAGFACSQCGQPLFVYKLEQVSEKGKAYTNYFGRCNVAEHEKLILLAQLKPEKDSDEAVTYSLGKFGQRALDFYSIHVTKESTHPVKPLAQIAGNRYASGPVGKALSDACMGTIASFLSKYQDIIIEHQKVVKGNQKRLESLRELAGKENLEYPSVTLPPQPHTKEGVDAYNEVIARVRMWVNLNLWQKLKLSRDDAKPLLRLKGFPSFPLVERQANEVDWWDMVCNVKKLINEKKEDGKVFWQNLAGYKRQEALRPYLSSEEDRKKGKKFARYQLGDLLLHLEKKHGEDWGKVYDEAWERIDKKVEGLSKHIKLEEERRSEDAQSKAALTDWLRAKASFVIEGLKEADKDEFCRCELKLQKWYGDLRGKPFAIEAENSILDISGFSKQYNCAFIWQKDGVKKLNLYLIINYFKGGKLRFKKIKPEAFEANRFYTVINKKSGEIVPMEVNFNFDDPNLIILPLAFGKRQGREFIWNDLLSLETGSLKLANGRVIEKTLYNRRTRQDEPALFVALTFERREVLDSSNIKPMNLIGVDRGENIPAVIALTDPEGCPLSRFKDSLGNPTHILRIGESYKEKQRTIQAKKYVEQRRAGGYSRKYASKAKNLADDMVRNTARDLLYYAVTQDAMLIFENLSRGFGRQGKRTFMAERQYTRMEDWLTAKLAYEGLPSKTYLSKTLAQYTSKTCSNCGFTITSADYDRVLEKLKKTATGWMTTINGKELKVEGQITYYNRYKRQNVVKDLSVELDRLSEESVNNDISSWTKGRSGEALSLLKKRFSHRPVQEKFVCLNCGFETHADEQAALNIARSWLFLRSQEYKKYQTNKTTGNTDKRAFVETWQSFYRKKLKEVWKPAV

SEQ ID NO: 26277 - protein, 978 aa, synthetic construct
  REGION 1..978: note = engineered CasX variant
QEIKRINKIRRRLVKDSNTKKAGKTGPMKTLLVRVMTPDLRERLENLRKKPENIPQPISNTSRANLNKLLTDYTEMKKAILHVYWEEFQKDPVGLMSRVAQPASKKIDQNKLKPEMDEKGNLTTAGFACSQCGQPLFVYKLEQVSEKGKAYTNYFGRCNVAEHEKLILLAQLKPEKDSDEAVTYSLGKFGQRALDFYSIHVTKESTHPVKPLAQIAGNRYASGPVGKALSDACMGTIASFLSKYQDIIIEHQKVVKGNQKRLESLRELAGKENLEYPSVTLPPQPHTKEGVDAYNEVIARVRMWVNLNLWQKLKLSRDDAKPLLRLKGFPSFPLVERQANEVDWWDMVCNVKKLINEKKEDGKVFWQNLAGYKRQEALRPYLSSEEDRKKGKKFARYQLGDLLLHLEKKHGEDWGKVYDEAWERIDKKVEGLSKHIKLEEERRSEDAQSKAALTDWLRAKASFVIEGLKEADKDEFCRCELKLQKWYGDLRGKPFAIEAENSILDISGFSKQYNCAFIWQKDGVKKLNLYLIINYFKGGKLRFKKIKPEAFEANRFYTVINKKSGEIVPMEVNFNFDDPNLIILPLAFGKRQGREFIWNDLLSLETGSLKLANGRVIEKTLYNRRTRQDEPALFVALTFERREVLDSSNIKPMNLIGVDRGENIPAVIALTDPEGCPLSRFKDSLGNPTHILRIGESYKEKQRTIQAKKVVEQRRAGGYSRKYASKAKNLADDMVRNTARDLLYYAVTQDAMLIFENLSRGFGRQGKRTFMAERQYTRMEDWLTAKLAYEGLPSKTYLSKTLAQYTSKTCSNCGFTITSADYDRVLEKLKKTATGWMTTINGKELKVEGQITYYNRYKRQNVVKDLSVELDRLSEESVNNDISSWTKGRSGEALSLLKKRFSHRPVQEKFVCLNCGFETHADEQAALNIARSWLFLRSQEYKKYQTNKTTGNTDKRAFVETWQSFYRKKLKEVWKPAV

SEQ ID NO: 26278 - protein, 978 aa, synthetic construct
  REGION 1..978: note = engineered CasX variant
QEIKRINKIRRRLVKDSNTKKAGKTGPMKTLLVRVMTPDLRERLENLRKKPENIPQPISNTSRANLNKLLTDYTEMKKAILHVYWEEFQKDPVGLMSRVAQPASKKIDQNKLKPEMDEKGNLTTAGFACSQCGQPLFVYKLEQVSEKGKAYTNYFGRCNVAEHEKLILLAQLKPEKDSDEAVTYSLGKFGQRALDFYSIHVTKESTHPVKPLAQIAGNRYASGPVGKALSDACMGTIASFLSKYQDIIIEHQKVVKGNQKRLESLRELAGKENLEYPSVTLPPQPHTKEGVDAYNEVIARVRMWVNLNLWQKLKLSRDDAKPLLRLKGFPSFPLVERQANEVDWWDMVCNVKKLINEKKEDGKVFWQNLAGYKRQEALRPYLSSEEDRKKGKKFARYQLGDLLLHLEKKHGEDWGKVYDEAWERIDKKVEGLSKHIKLEEERRSEDAQSKAALTDWLRAKASFVIEGLKEADKDEFCRCELKLQKWYGDLRGKPFAIEAENSILDISGFSKQYNCAFIWQKDGVKKLNLYLIINYFKGGKLRFKKIKPEAFEANRFYTVINKKSGEIVPMEVNFNFDDPNLIILPLAFGKRQGREFIWNDLLSLETGSLKLANGRVIEKTLYNRRTRQDEPALFVALTFERREVLDSSNIKPMNLIGVDRGENIPAVIALTDPEGCPLSRFKDSLGNPTHILRIGESYKEKQRTIQAKKTVEQRRAGGYSRKYASKAKNLADDMVRNTARDLLYYAVTQDAMLIFENLSRGFGRQGKRTFMAERQYTRMEDWLTAKLAYEGLPSKTYLSKTLAQYTSKTCSNCGFTITSADYDRVLEKLKKTATGWMTTINGKELKVEGQITYYNRYKRQNVVKDLSVELDRLSEESVNNDISSWTKGRSGEALSLLKKRFSHRPVQEKFVCLNCGFETHADEQAALNIARSWLFLRSQEYKKYQTNKTTGNTDKRAFVETWQSFYRKKLKEVWKPAV

SEQ ID NO: 26279 - protein, 978 aa, synthetic construct
  REGION 1..978: note = engineered CasX variant
QEIKRINKIRRRLVKDSNTKKAGKTGPMKTLLVRVMTPDLRERLENLRKKPENIPQPISNTSRANLNKLLTDYTEMKKAILHVYWEEFQKDPVGLMSRVAQPASKKIDQNKLKPEMDEKGNLTTAGFACSQCGQPLFVYKLEQVSEKGKAYTNYFGRCNVAEHEKLILLAQLKPEKDSDEAVTYSLGKFGQRALDFYSIHVTKESTHPVKPLAQIAGNRYASGPVGKALSDACMGTIASFLSKYQDIIIEHQKVVKGNQKRLESLRELAGKENLEYPSVTLPPQPHTKEGVDAYNEVIARVRMWVNLNLWQKLKLSRDDAKPLLRLKGFPSFPLVERQANEVDWWDMVCNVKKLINEKKEDGKVFWQNLAGYKRQEALRPYLSSEEDRKKGKKFARYQLGDLLLHLEKKHGEDWGKVYDEAWERIDKKVEGLSKHIKLEEERRSEDAQSKAALTDWLRAKASFVIEGLKEADKDEFCRCELKLQKWYGDLRGKPFAIEAENSILDISGFSKQYNCAFIWQKDGVKKLNLYLIINYFKGGKLRFKKIKPEAFEANRFYTVINKKSGEIVPMEVNFNFDDPNLIILPLAFGKRQGREFIWNDLLSLETGSLKLANGRVIEKTLYNRRTRQDEPALFVALTFERREVLDSSNIKPMNLIGVDRGENIPAVIALTDPEGCPLSRFKDSLGNPTHILRIGESYKEKQRTIQAKKTVEQRNAGGYSRKYASKAKNLADDMVRNTARDLLYYAVTQDAMLIFENLSRGFGRQGKRTFMAERQYTRMEDWLTAKLAYEGLPSKTYLSKTLAQYTSKTCSNCGFTITSADYDRVLEKLKKTATGWMTTINGKELKVEGQITYYNRYKRQNVVKDLSVELDRLSEESVNNDISSWTKGRSGEALSLLKKRFSHRPVQEKFVCLNCGFETHADEQAALNIARSWLFLRSQEYKKYQTNKTTGNTDKRAFVETWQSFYRKKLKEVWKPAV

SEQ ID NO: 26280 - protein, 978 aa, synthetic construct
  REGION 1..978: note = engineered CasX variant
QEIKRINKIRRRLVKDSNTKKAGKTGPMKTLLVRVMTPDLRERLENLRKKPENIPQPISNTSRANLNKLLTDYTEMKKAILHVYWEEFQKDPVGLMSRVAQPASKKIDQNKLKPEMDEKGNLTTAGFACSQCGQPLFVYKLEQVSEKGKAYTNYFGRCNVAEHEKLILLAQLKPEKDSDEAVTYSLGKFGQRALDFYSIHVTKESTHPVKPLAQIAGNRYASGPVGKALSDACMGTIASFLSKYQDIIIEHQKVVKGNQKRLESLRELAGKENLEYPSVTLPPQPHTKEGVDAYNEVIARVRMWVNLNLWQKLKLSRDDAKPLLRLKGFPSFPLVERQANEVDWWDMVCNVKKLINEKKEDGKVFWQNLAGYKRQEALRPYLSSEEDRKKGKKFARYQLGDLLLHLEKKHGEDWGKVYDEAWERIDKKVEGLSKHIKLEEERRSEDAQSKAALTDWLRAKASFVIEGLKEADKDEFCRCELKLQKWYGDLRGKPFAIEAENSILDISGFSKQYNCAFIWQKDGVKKLNLYLIINYFKGGKLRFKKIKPEAFEANRFYTVINKKSGEIVPMEVNFNFDDPNLIILPLAFGKRQGREFIWNDLLSLETGSLKLANGRVIEKTLYNRRTRQDEPALFVALTFERREVLDSSNIKPMNLIGVDRGENIPAVIALTDPEGCPLSRFKDSLGNPTHILRIGESYKEKQRTIQAKKSVEQRRAGGYSRKYASKAKNLADDMVRNTARDLLYYAVTQDAMLIFENLSRGFGRQGKRTFMAERQYTRMEDWLTAKLAYEGLPSKTYLSKTLAQYTSKTCSNCGFTITSADYDRVLEKLKKTATGWMTTINGKELKVEGQITYYNRYKRQNVVKDLSVELDRLSEESVNNDISSWTKGRSGEALSLLKKRFSHRPVQEKFVCLNCGFETHADEQAALNIARSWLFLRSQEYKKYQTNKTTGNTDKRAFVETWQSFYRKKLKEVWKPAV

SEQ ID NO: 26281 - protein, 978 aa, synthetic construct
  REGION 1..978: note = engineered CasX variant
QEIKRINKIRRRLVKDSNTKKAGKTGPMKTLLVRVMTPDLRERLENLRKKPENIPQPISNTSRANLNKLLTDYTEMKKAILHVYWEEFQKDPVGLMSRVAQPASKKIDQNKLKPEMDEKGNLTTAGFACSQCGQPLFVYKLEQVSEKGKAYTNYFGRCNVAEHEKLILLAQLKPEKDSDEAVTYSLGKFGQRALDFYSIHVTKESTHPVKPLAQIAGNRYASGPVGKALSDACMGTIASFLSKYQDIIIEHQKVVKGNQKRLESLRELAGKENLEYPSVTLPPQPHTKEGVDAYNEVIARVRMWVNLNLWQKLKLSRDDAKPLLRLKGFPSFPLVERQANEVDWWDMVCNVKKLINEKKEDGKVFWQNLAGYKRQEALRPYLSSEEDRKKGKKFARYQLGDLLLHLEKKHGEDWGKVYDEAWERIDKKVEGLSKHIKLEEERRSEDAQSKAALTDWLRAKASFVIEGLKEADKDEFCRCELKLQKWYGDLRGKPFAIEAENSILDISGFSKQYNCAFIWQKDGVKKLNLYLIINYFKGGKLRFKKIKPEAFEANRFYTVINKKSGEIVPMEVNFNFDDPNLIILPLAFGKRQGREFIWNDLLSLETGSLKLANGRVIEKTLYNRRTRQDEPALFVALTFERREVLDSSNIKPMNLIGVDRGENIPAVIALTDPEGCPLSRFKDSLGNPTHILRIGESYKEKQRTIQAKKRVEQRRAGGYSRKYASKAKNLADDMVRNTARDLLYYAVTQDAMLIFENLSRGFGRQGKRTFMAERQYTRMEDWLTAKLAYEGLPSKTYLSKTLAQYTSKTCSNCGFTITSADYDRVLEKLKKTATGWMTTINGKELKVEGQITYYNRYKRQNVVKDLSVELDRLSEESVNNDISSWTKGRSGEALSLLKKRFSHRPVQEKFVCLNCGFETHADEQAALNIARSWLFLRSQEYKKYQTNKTTGNTDKRAFVETWQSFYRKKLKEVWKPAV

SEQ ID NO: 26282 - protein, 978 aa, synthetic construct
  REGION 1..978: note = engineered CasX variant
QEIKRINKIRRRLVKDSNTKKAGKTGPMKTLLVRVMTPDLRERLENLRKKPENIPQPISNTSRANLNKLLTDYTEMKKAILHVYWEEFQKDPVGLMSRVAQPASKKIDQNKLKPEMDEKGNLTTAGFACSQCGQPLFVYKLEQVSEKGKAYTNYFGRCNVAEHEKLILLAQLKPEKDSDEAVTYSLGKFGQRALDFYSIHVTKESTHPVKPLAQIAGNRYASGPVGKALSDACMGTIASFLSKYQDIIIEHQKVVKGNQKRLESLRELAGKENLEYPSVTLPPQPHTKEGVDAYNEVIARVRMWVNLNLWQKLKLSRDDAKPLLRLKGFPSFPLVERQANEVDWWDMVCNVKKLINEKKEDGKVFWQNLAGYKRQEALRPYLSSEEDRKKGKKFARYQLGDLLLHLEKKHGEDWGKVYDEAWERIDKKVEGLSKHIKLEEERRSEDAQSKAALTDWLRAKASFVIEGLKEADKDEFCRCELKLQKWYGDLRGKPFAIEAENSILDISGFSKQYNCAFIWQKDGVKKLNLYLIINYFKGGKLRFKKIKPEAFEANRFYTVINKKSGEIVPMEVNFNFDDPNLIILPLAFGKRQGREFIWNDLLSLETGSLKLANGRVIEKTLYNRRTRQDEPALFVALTFERREVLDSSNIKPMNLIGVDRGENIPAVIALTDPEGCPLSRFKDSLGNPTHILRIGESYKEKQRTIQAKKQVEQRRAGGYSRKYASKAKNLADDMVRNTARDLLYYAVTQDAMLIFENLSRGFGRQGKRTFMAERQYTRMEDWLTAKLAYEGLPSKTYLSKTLAQYTSKTCSNCGFTITSADYDRVLEKLKKTATGWMTTINGKELKVEGQITYYNRYKRQNVVKDLSVELDRLSEESVNNDISSWTKGRSGEALSLLKKRFSHRPVQEKFVCLNCGFETHADEQAALNIARSWLFLRSQEYKKYQTNKTTGNTDKRAFVETWQSFYRKKLKEVWKPAV

SEQ ID NO: 26283 - protein, 978 aa, synthetic construct
  REGION 1..978: note = engineered CasX variant
QEIKRINKIRRRLVKDSNTKKAGKTGPMKTLLVRVMTPDLRERLENLRKKPENIPQPISNTSRANLNKLLTDYTEMKKAILHVYWEEFQKDPVGLMSRVAQPASKKIDQNKLKPEMDEKGNLTTAGFACSQCGQPLFVYKLEQVSEKGKAYTNYFGRCNVAEHEKLILLAQLKPEKDSDEAVTYSLGKFGQRALDFYSIHVTKESTHPVKPLAQIAGNRYASGPVGKALSDACMGTIASFLSKYQDIIIEHQKVVKGNQKRLESLRELAGKENLEYPSVTLPPQPHTKEGVDAYNEVIARVRMWVNLNLWQKLKLSRDDAKPLLRLKGFPSFPLVERQANEVDWWDMVCNVKKLINEKKEDGKVFWQNLAGYKRQEALRPYLSSEEDRKKGKKFARYQLGDLLLHLEKKHGEDWGKVYDEAWERIDKKVEGLSKHIKLEEERRSEDAQSKAALTDWLRAKASFVIEGLKEADKDEFCRCELKLQKWYGDLRGKPFAIEAENSILDISGFSKQYNCAFIWQKDGVKKLNLYLIINYFKGGKLRFKKIKPEAFEANRFYTVINKKSGEIVPMEVNFNFDDPNLIILPLAFGKRQGREFIWNDLLSLETGSLKLANGRVIEKTLYNRRTRQDEPALFVALTFERREVLDSSNIKPMNLIGVDRGENIPAVIALTDPEGCPLSRFKDSLGNPTHILRIGESYKEKQRTIQAKKNVEQYRAGGYSRKYASKAKNLADDMVRNTARDLLYYAVTQDAMLIFENLSRGFGRQGKRTFMAERQYTRMEDWLTAKLAYEGLPSKTYLSKTLAQYTSKTCSNCGFTITSADYDRVLEKLKKTATGWMTTINGKELKVEGQITYYNRYKRQNVVKDLSVELDRLSEESVNNDISSWTKGRSGEALSLLKKRFSHRPVQEKFVCLNCGFETHADEQAALNIARSWLFLRSQEYKKYQTNKTTGNTDKRAFVETWQSFYRKKLKEVWKPAV

SEQ ID NO: 26284 - protein, 978 aa, synthetic construct
  REGION 1..978: note = engineered CasX variant
QEIKRINKIRRRLVKDSNTKKAGKTGPMKTLLVRVMTPDLRERLENLRKKPENIPQPISNTSRANLNKLLTDYTEMKKAILHVYWEEFQKDPVGLMSRVAQPASKKIDQNKLKPEMDEKGNLTTAGFACSQCGQPLFVYKLEQVSEKGKAYTNYFGRCNVAEHEKLILLAQLKPEKDSDEAVTYSLGKFGQRALDFYSIHVTKESTHPVKPLAQIAGNRYASGPVGKALSDACMGTIASFLSKYQDIIIEHQKVVKGNQKRLESLRELAGKENLEYPSVTLPPQPHTKEGVDAYNEVIARVRMWVNLNLWQKLKLSRDDAKPLLRLKGFPSFPLVERQANEVDWWDMVCNVKKLINEKKEDGKVFWQNLAGYKRQEALRPYLSSEEDRKKGKKFARYQLGDLLLHLEKKHGEDWGKVYDEAWERIDKKVEGLSKHIKLEEERRSEDAQSKAALTDWLRAKASFVIEGLKEADKDEFCRCELKLQKWYGDLRGKPFAIEAENSILDISGFSKQYNCAFIWQKDGVKKLNLYLIINYFKGGKLRFKKIKPEAFEANRFYTVINKKSGEIVPMEVNFNFDDPNLIILPLAFGKRQGREFIWNDLLSLETGSLKLANGRVIEKTLYNRRTRQDEPALFVALTFERREVLDSSNIKPMNLIGVDRGENIPAVIALTDPEGCPLSRFKDSLGNPTHILRIGESYKEKQRTIQAKKNVEQRRAGGYSRKYASKAKNLADDMVRNTARDLLYYAVTQDAMLIFENLSRGFGRQGKRTFMAERQYTRMEDWLTAKLAYEGLPSKTYLSKTLAQYTSKTCSNCGFTITSADYDRVLEKLKKTATGWMTTINGKELKVEGQITYYNRYKRQNVVKDLSVELDRLSEESVNNDISSWTKGRSGEALSLLKKRFSHRPVQEKFVCLNCGFETHADEQAALNIARSWLFLRSQEYKKYQTNKTTGNTDKRAFVETWQSFYRKKLKEVWKPAV

SEQ ID NO: 26285 - protein, 978 aa, synthetic construct
  REGION 1..978: note = engineered CasX variant
QEIKRINKIRRRLVKDSNTKKAGKTGPMKTLLVRVMTPDLRERLENLRKKPENIPQPISNTSRANLNKLLTDYTEMKKAILHVYWEEFQKDPVGLMSRVAQPASKKIDQNKLKPEMDEKGNLTTAGFACSQCGQPLFVYKLEQVSEKGKAYTNYFGRCNVAEHEKLILLAQLKPEKDSDEAVTYSLGKFGQRALDFYSIHVTKESTHPVKPLAQIAGNRYASGPVGKALSDACMGTIASFLSKYQDIIIEHQKVVKGNQKRLESLRELAGKENLEYPSVTLPPQPHTKEGVDAYNEVIARVRMWVNLNLWQKLKLSRDDAKPLLRLKGFPSFPLVERQANEVDWWDMVCNVKKLINEKKEDGKVFWQNLAGYKRQEALRPYLSSEEDRKKGKKFARYQLGDLLLHLEKKHGEDWGKVYDEAWERIDKKVEGLSKHIKLEEERRSEDAQSKAALTDWLRAKASFVIEGLKEADKDEFCRCELKLQKWYGDLRGKPFAIEAENSILDISGFSKQYNCAFIWQKDGVKKLNLYLIINYFKGGKLRFKKIKPEAFEANRFYTVINKKSGEIVPMEVNFNFDDPNLIILPLAFGKRQGREFIWNDLLSLETGSLKLANGRVIEKTLYNRRTRQDEPALFVALTFERREVLDSSNIKPMNLIGVDRGENIPAVIALTDPEGCPLSRFKDSLGNPTHILRIGESYKEKQRTIQAKKNVEQRIAGGYSRKYASKAKNLADDMVRNTARDLLYYAVTQDAMLIFENLSRGFGRQGKRTFMAERQYTRMEDWLTAKLAYEGLPSKTYLSKTLAQYTSKTCSNCGFTITSADYDRVLEKLKKTATGWMTTINGKELKVEGQITYYNRYKRQNVVKDLSVELDRLSEESVNNDISSWTKGRSGEALSLLKKRFSHRPVQEKFVCLNCGFETHADEQAALNIARSWLFLRSQEYKKYQTNKTTGNTDKRAFVETWQSFYRKKLKEVWKPAV

SEQ ID NO: 26286 - protein, 978 aa, synthetic construct
  REGION 1..978: note = engineered CasX variant
QEIKRINKIRRRLVKDSNTKKAGKTGPMKTLLVRVMTPDLRERLENLRKKPENIPQPISNTSRANLNKLLTDYTEMKKAILHVYWEEFQKDPVGLMSRVAQPASKKIDQNKLKPEMDEKGNLTTAGFACSQCGQPLFVYKLEQVSEKGKAYTNYFGRCNVAEHEKLILLAQLKPEKDSDEAVTYSLGKFGQRALDFYSIHVTKESTHPVKPLAQIAGNRYASGPVGKALSDACMGTIASFLSKYQDIIIEHQKVVKGNQKRLESLRELAGKENLEYPSVTLPPQPHTKEGVDAYNEVIARVRMWVNLNLWQKLKLSRDDAKPLLRLKGFPSFPLVERQANEVDWWDMVCNVKKLINEKKEDGKVFWQNLAGYKRQEALRPYLSSEEDRKKGKKFARYQLGDLLLHLEKKHGEDWGKVYDEAWERIDKKVEGLSKHIKLEEERRSEDAQSKAALTDWLRAKASFVIEGLKEADKDEFCRCELKLQKWYGDLRGKPFAIEAENSILDISGFSKQYNCAFIWQKDGVKKLNLYLIINYFKGGKLRFKKIKPEAFEANRFYTVINKKSGEIVPMEVNFNFDDPNLIILPLAFGKRQGREFIWNDLLSLETGSLKLANGRVIEKTLYNRRTRQDEPALFVALTFERREVLDSSNIKPMNLIGVDRGENIPAVIALTDPEGCPLSRFKDSLGNPTHILRIGESYKEKQRTIQAKKMVEQRRAGGYSRKYASKAKNLADDMVRNTARDLLYYAVTQDAMLIFENLSRGFGRQGKRTFMAERQYTRMEDWLTAKLAYEGLPSKTYLSKTLAQYTSKTCSNCGFTITSADYDRVLEKLKKTATGWMTTINGKELKVEGQITYYNRYKRQNVVKDLSVELDRLSEESVNNDISSWTKGRSGEALSLLKKRFSHRPVQEKFVCLNCGFETHADEQAALNIARSWLFLRSQEYKKYQTNKTTGNTDKRAFVETWQSFYRKKLKEVWKPAV

SEQ ID NO: 26287 - protein, 978 aa, synthetic construct
  REGION 1..978: note = engineered CasX variant
QEIKRINKIRRRLVKDSNTKKAGKTGPMKTLLVRVMTPDLRERLENLRKKPENIPQPISNTSRANLNKLLTDYTEMKKAILHVYWEEFQKDPVGLMSRVAQPASKKIDQNKLKPEMDEKGNLTTAGFACSQCGQPLFVYKLEQVSEKGKAYTNYFGRCNVAEHEKLILLAQLKPEKDSDEAVTYSLGKFGQRALDFYSIHVTKESTHPVKPLAQIAGNRYASGPVGKALSDACMGTIASFLSKYQDIIIEHQKVVKGNQKRLESLRELAGKENLEYPSVTLPPQPHTKEGVDAYNEVIARVRMWVNLNLWQKLKLSRDDAKPLLRLKGFPSFPLVERQANEVDWWDMVCNVKKLINEKKEDGKVFWQNLAGYKRQEALRPYLSSEEDRKKGKKFARYQLGDLLLHLEKKHGEDWGKVYDEAWERIDKKVEGLSKHIKLEEERRSEDAQSKAALTDWLRAKASFVIEGLKEADKDEFCRCELKLQKWYGDLRGKPFAIEAENSILDISGFSKQYNCAFIWQKDGVKKLNLYLIINYFKGGKLRFKKIKPEAFEANRFYTVINKKSGEIVPMEVNFNFDDPNLIILPLAFGKRQGREFIWNDLLSLETGSLKLANGRVIEKTLYNRRTRQDEPALFVALTFERREVLDSSNIKPMNLIGVDRGENIPAVIALTDPEGCPLSRFKDSLGNPTHILRIGESYKEKQRTIQAKKLVEQRRAGGYSRKYASKAKNLADDMVRNTARDLLYYAVTQDAMLIFENLSRGFGRQGKRTFMAERQYTRMEDWLTAKLAYEGLPSKTYLSKTLAQYTSKTCSNCGFTITSADYDRVLEKLKKTATGWMTTINGKELKVEGQITYYNRYKRQNVVKDLSVELDRLSEESVNNDISSWTKGRSGEALSLLKKRFSHRPVQEKFVCLNCGFETHADEQAALNIARSWLFLRSQEYKKYQTNKTTGNTDKRAFVETWQSFYRKKLKEVWKPAV

SEQ ID NO: 26288 - protein, 978 aa, synthetic construct
  REGION 1..978: note = engineered CasX variant
QEIKRINKIRRRLVKDSNTKKAGKTGPMKTLLVRVMTPDLRERLENLRKKPENIPQPISNTSRANLNKLLTDYTEMKKAILHVYWEEFQKDPVGLMSRVAQPASKKIDQNKLKPEMDEKGNLTTAGFACSQCGQPLFVYKLEQVSEKGKAYTNYFGRCNVAEHEKLILLAQLKPEKDSDEAVTYSLGKFGQRALDFYSIHVTKESTHPVKPLAQIAGNRYASGPVGKALSDACMGTIASFLSKYQDIIIEHQKVVKGNQKRLESLRELAGKENLEYPSVTLPPQPHTKEGVDAYNEVIARVRMWVNLNLWQKLKLSRDDAKPLLRLKGFPSFPLVERQANEVDWWDMVCNVKKLINEKKEDGKVFWQNLAGYKRQEALRPYLSSEEDRKKGKKFARYQLGDLLLHLEKKHGEDWGKVYDEAWERIDKKVEGLSKHIKLEEERRSEDAQSKAALTDWLRAKASFVIEGLKEADKDEFCRCELKLQKWYGDLRGKPFAIEAENSILDISGFSKQYNCAFIWQKDGVKKLNLYLIINYFKGGKLRFKKIKPEAFEANRFYTVINKKSGEIVPMEVNFNFDDPNLIILPLAFGKRQGREFIWNDLLSLETGSLKLANGRVIEKTLYNRRTRQDEPALFVALTFERREVLDSSNIKPMNLIGVDRGENIPAVIALTDPEGCPLSRFKDSLGNPTHILRIGESYKEKQRTIQAKKHVEQRRAGGYSRKYASKAKNLADDMVRNTARDLLYYAVTQDAMLIFENLSRGFGRQGKRTFMAERQYTRMEDWLTAKLAYEGLPSKTYLSKTLAQYTSKTCSNCGFTITSADYDRVLEKLKKTATGWMTTINGKELKVEGQITYYNRYKRQNVVKDLSVELDRLSEESVNNDISSWTKGRSGEALSLLKKRFSHRPVQEKFVCLNCGFETHADEQAALNIARSWLFLRSQEYKKYQTNKTTGNTDKRAFVETWQSFYRKKLKEVWKPAV

SEQ ID NO: 26289 - protein, 978 aa, synthetic construct
  REGION 1..978: note = engineered CasX variant
QEIKRINKIRRRLVKDSNTKKAGKTGPMKTLLVRVMTPDLRERLENLRKKPENIPQPISNTSRANLNKLLTDYTEMKKAILHVYWEEFQKDPVGLMSRVAQPASKKIDQNKLKPEMDEKGNLTTAGFACSQCGQPLFVYKLEQVSEKGKAYTNYFGRCNVAEHEKLILLAQLKPEKDSDEAVTYSLGKFGQRALDFYSIHVTKESTHPVKPLAQIAGNRYASGPVGKALSDACMGTIASFLSKYQDIIIEHQKVVKGNQKRLESLRELAGKENLEYPSVTLPPQPHTKEGVDAYNEVIARVRMWVNLNLWQKLKLSRDDAKPLLRLKGFPSFPLVERQANEVDWWDMVCNVKKLINEKKEDGKVFWQNLAGYKRQEALRPYLSSEEDRKKGKKFARYQLGDLLLHLEKKHGEDWGKVYDEAWERIDKKVEGLSKHIKLEEERRSEDAQSKAALTDWLRAKASFVIEGLKEADKDEFCRCELKLQKWYGDLRGKPFAIEAENSILDISGFSKQYNCAFIWQKDGVKKLNLYLIINYFKGGKLRFKKIKPEAFEANRFYTVINKKSGEIVPMEVNFNFDDPNLIILPLAFGKRQGREFIWNDLLSLETGSLKLANGRVIEKTLYNRRTRQDEPALFVALTFERREVLDSSNIKPMNLIGVDRGENIPAVIALTDPEGCPLSRFKDSLGNPTHILRIGESYKEKQRTIQAKKGVEQRRAGGYSRKYASKAKNLADDMVRNTARDLLYYAVTQDAMLIFENLSRGFGRQGKRTFMAERQYTRMEDWLTAKLAYEGLPSKTYLSKTLAQYTSKTCSNCGFTITSADYDRVLEKLKKTATGWMTTINGKELKVEGQITYYNRYKRQNVVKDLSVELDRLSEESVNNDISSWTKGRSGEALSLLKKRFSHRPVQEKFVCLNCGFETHADEQAALNIARSWLFLRSQEYKKYQTNKTTGNTDKRAFVETWQSFYRKKLKEVWKPAV

SEQ ID NO: 26290 - protein, 978 aa, synthetic construct
  REGION 1..978: note = engineered CasX variant
QEIKRINKIRRRLVKDSNTKKAGKTGPMKTLLVRVMTPDLRERLENLRKKPENIPQPISNTSRANLNKLLTDYTEMKKAILHVYWEEFQKDPVGLMSRVAQPASKKIDQNKLKPEMDEKGNLTTAGFACSQCGQPLFVYKLEQVSEKGKAYTNYFGRCNVAEHEKLILLAQLKPEKDSDEAVTYSLGKFGQRALDFYSIHVTKESTHPVKPLAQIAGNRYASGPVGKALSDACMGTIASFLSKYQDIIIEHQKVVKGNQKRLESLRELAGKENLEYPSVTLPPQPHTKEGVDAYNEVIARVRMWVNLNLWQKLKLSRDDAKPLLRLKGFPSFPLVERQANEVDWWDMVCNVKKLINEKKEDGKVFWQNLAGYKRQEALRPYLSSEEDRKKGKKFARYQLGDLLLHLEKKHGEDWGKVYDEAWERIDKKVEGLSKHIKLEEERRSEDAQSKAALTDWLRAKASFVIEGLKEADKDEFCRCELKLQKWYGDLRGKPFAIEAENSILDISGFSKQYNCAFIWQKDGVKKLNLYLIINYFKGGKLRFKKIKPEAFEANRFYTVINKKSGEIVPMEVNFNFDDPNLIILPLAFGKRQGREFIWNDLLSLETGSLKLANGRVIEKTLYNRRTRQDEPALFVALTFERREVLDSSNIKPMNLIGVDRGENIPAVIALTDPEGCPLSRFKDSLGNPTHILRIGESYKEKQRTIQAKKFVEQRRAGGYSRKYASKAKNLADDMVRNTARDLLYYAVTQDAMLIFENLSRGFGRQGKRTFMAERQYTRMEDWLTAKLAYEGLPSKTYLSKTLAQYTSKTCSNCGFTITSADYDRVLEKLKKTATGWMTTINGKELKVEGQITYYNRYKRQNVVKDLSVELDRLSEESVNNDISSWTKGRSGEALSLLKKRFSHRPVQEKFVCLNCGFETHADEQAALNIARSWLFLRSQEYKKYQTNKTTGNTDKRAFVETWQSFYRKKLKEVWKPAV

SEQ ID NO: 26291 - protein, 978 aa, synthetic construct
  REGION 1..978: note = engineered CasX variant
QEIKRINKIRRRLVKDSNTKKAGKTGPMKTLLVRVMTPDLRERLENLRKKPENIPQPISNTSRANLNKLLTDYTEMKKAILHVYWEEFQKDPVGLMSRVAQPASKKIDQNKLKPEMDEKGNLTTAGFACSQCGQPLFVYKLEQVSEKGKAYTNYFGRCNVAEHEKLILLAQLKPEKDSDEAVTYSLGKFGQRALDFYSIHVTKESTHPVKPLAQIAGNRYASGPVGKALSDACMGTIASFLSKYQDIIIEHQKVVKGNQKRLESLRELAGKENLEYPSVTLPPQPHTKEGVDAYNEVIARVRMWVNLNLWQKLKLSRDDAKPLLRLKGFPSFPLVERQANEVDWWDMVCNVKKLINEKKEDGKVFWQNLAGYKRQEALRPYLSSEEDRKKGKKFARYQLGDLLLHLEKKHGEDWGKVYDEAWERIDKKVEGLSKHIKLEEERRSEDAQSKAALTDWLRAKASFVIEGLKEADKDEFCRCELKLQKWYGDLRGKPFAIEAENSILDISGFSKQYNCAFIWQKDGVKKLNLYLIINYFKGGKLRFKKIKPEAFEANRFYTVINKKSGEIVPMEVNFNFDDPNLIILPLAFGKRQGREFIWNDLLSLETGSLKLANGRVIEKTLYNRRTRQDEPALFVALTFERREVLDSSNIKPMNLIGVDRGENIPAVIALTDPEGCPLSRFKDSLGNPTHILRIGESYKEKQRTIQAKKEWEQRRAGGYSRKYASKAKNLADDMVRNTARDLLYYAVTQDAMLIFENLSRGFGRQGKRTFMAERQYTRMEDWLTAKLAYEGLPSKTYLSKTLAQYTSKTCSNCGFTITSADYDRVLEKLKKTATGWMTTINGKELKVEGQITYYNRYKRQNVVKDLSVELDRLSEESVNNDISSWTKGRSGEALSLLKKRFSHRPVQEKFVCLNCGFETHADEQAALNIARSWLFLRSQEYKKYQTNKTTGNTDKRAFVETWQSFYRKKLKEVWKPAV

SEQ ID NO: 26292 - protein, 978 aa, synthetic construct
  REGION 1..978: note = engineered CasX variant
QEIKRINKIRRRLVKDSNTKKAGKTGPMKTLLVRVMTPDLRERLENLRKKPENIPQPISNTSRANLNKLLTDYTEMKKAILHVYWEEFQKDPVGLMSRVAQPASKKIDQNKLKPEMDEKGNLTTAGFACSQCGQPLFVYKLEQVSEKGKAYTNYFGRCNVAEHEKLILLAQLKPEKDSDEAVTYSLGKFGQRALDFYSIHVTKESTHPVKPLAQIAGNRYASGPVGKALSDACMGTIASFLSKYQDIIIEHQKVVKGNQKRLESLRELAGKENLEYPSVTLPPQPHTKEGVDAYNEVIARVRMWVNLNLWQKLKLSRDDAKPLLRLKGFPSFPLVERQANEVDWWDMVCNVKKLINEKKEDGKVFWQNLAGYKRQEALRPYLSSEEDRKKGKKFARYQLGDLLLHLEKKHGEDWGKVYDEAWERIDKKVEGLSKHIKLEEERRSEDAQSKAALTDWLRAKASFVIEGLKEADKDEFCRCELKLQKWYGDLRGKPFAIEAENSILDISGFSKQYNCAFIWQKDGVKKLNLYLIINYFKGGKLRFKKIKPEAFEANRFYTVINKKSGEIVPMEVNFNFDDPNLIILPLAFGKRQGREFIWNDLLSLETGSLKLANGRVIEKTLYNRRTRQDEPALFVALTFERREVLDSSNIKPMNLIGVDRGENIPAVIALTDPEGCPLSRFKDSLGNPTHILRIGESYKEKQRTIQAKKEVYQRRAGGYSRKYASKAKNLADDMVRNTARDLLYYAVTQDAMLIFENLSRGFGRQGKRTFMAERQYTRMEDWLTAKLAYEGLPSKTYLSKTLAQYTSKTCSNCGFTITSADYDRVLEKLKKTATGWMTTINGKELKVEGQITYYNRYKRQNVVKDLSVELDRLSEESVNNDISSWTKGRSGEALSLLKKRFSHRPVQEKFVCLNCGFETHADEQAALNIARSWLFLRSQEYKKYQTNKTTGNTDKRAFVETWQSFYRKKLKEVWKPAV

SEQ ID NO: 26293 - protein, 978 aa, synthetic construct
  REGION 1..978: note = engineered CasX variant
QEIKRINKIRRRLVKDSNTKKAGKTGPMKTLLVRVMTPDLRERLENLRKKPENIPQPISNTSRANLNKLLTDYTEMKKAILHVYWEEFQKDPVGLMSRVAQPASKKIDQNKLKPEMDEKGNLTTAGFACSQCGQPLFVYKLEQVSEKGKAYTNYFGRCNVAEHEKLILLAQLKPEKDSDEAVTYSLGKFGQRALDFYSIHVTKESTHPVKPLAQIAGNRYASGPVGKALSDACMGTIASFLSKYQDIIIEHQKVVKGNQKRLESLRELAGKENLEYPSVTLPPQPHTKEGVDAYNEVIARVRMWVNLNLWQKLKLSRDDAKPLLRLKGFPSFPLVERQANEVDWWDMVCNVKKLINEKKEDGKVFWQNLAGYKRQEALRPYLSSEEDRKKGKKFARYQLGDLLLHLEKKHGEDWGKVYDEAWERIDKKVEGLSKHIKLEEERRSEDAQSKAALTDWLRAKASFVIEGLKEADKDEFCRCELKLQKWYGDLRGKPFAIEAENSILDISGFSKQYNCAFIWQKDGVKKLNLYLIINYFKGGKLRFKKIKPEAFEANRFYTVINKKSGEIVPMEVNFNFDDPNLIILPLAFGKRQGREFIWNDLLSLETGSLKLANGRVIEKTLYNRRTRQDEPALFVALTFERREVLDSSNIKPMNLIGVDRGENIPAVIALTDPEGCPLSRFKDSLGNPTHILRIGESYKEKQRTIQAKKEVVQRRGGGYSRKYASKAKNLADDMVRNTARDLLYYAVTQDAMLIFENLSRGFGRQGKRTFMAERQYTRMEDWLTAKLAYEGLPSKTYLSKTLAQYTSKTCSNCGFTITSADYDRVLEKLKKTATGWMTTINGKELKVEGQITYYNRYKRQNVVKDLSVELDRLSEESVNNDISSWTKGRSGEALSLLKKRFSHRPVQEKFVCLNCGFETHADEQAALNIARSWLFLRSQEYKKYQTNKTTGNTDKRAFVETWQSFYRKKLKEVWKPAV

SEQ ID NO: 26294 - protein, 978 aa, synthetic construct
  REGION 1..978: note = engineered CasX variant
QEIKRINKIRRRLVKDSNTKKAGKTGPMKTLLVRVMTPDLRERLENLRKKPENIPQPISNTSRANLNKLLTDYTEMKKAILHVYWEEFQKDPVGLMSRVAQPASKKIDQNKLKPEMDEKGNLTTAGFACSQCGQPLFVYKLEQVSEKGKAYTNYFGRCNVAEHEKLILLAQLKPEKDSDEAVTYSLGKFGQRALDFYSIHVTKESTHPVKPLAQIAGNRYASGPVGKALSDACMGTIASFLSKYQDIIIEHQKVVKGNQKRLESLRELAGKENLEYPSVTLPPQPHTKEGVDAYNEVIARVRMWVNLNLWQKLKLSRDDAKPLLRLKGFPSFPLVERQANEVDWWDMVCNVKKLINEKKEDGKVFWQNLAGYKRQEALRPYLSSEEDRKKGKKFARYQLGDLLLHLEKKHGEDWGKVYDEAWERIDKKVEGLSKHIKLEEERRSEDAQSKAALTDWLRAKASFVIEGLKEADKDEFCRCELKLQKWYGDLRGKPFAIEAENSILDISGFSKQYNCAFIWQKDGVKKLNLYLIINYFKGGKLRFKKIKPEAFEANRFYTVINKKSGEIVPMEVNFNFDDPNLIILPLAFGKRQGREFIWNDLLSLETGSLKLANGRVIEKTLYNRRTRQDEPALFVALTFERREVLDSSNIKPMNLIGVDRGENIPAVIALTDPEGCPLSRFKDSLGNPTHILRIGESYKEKQRTIQAKKEVVQRRAGGYSRKYASKAKNLADDMVRNTARDLLYYAVTQDAMLIFENLSRGFGRQGKRTFMAERQYTRMEDWLTAKLAYEGLPSKTYLSKTLAQYTSKTCSNCGFTITSADYDRVLEKLKKTATGWMTTINGKELKVEGQITYYNRYKRQNVVKDLSVELDRLSEESVNNDISSWTKGRSGEALSLLKKRFSHRPVQEKFVCLNCGFETHADEQAALNIARSWLFLRSQEYKKYQTNKTTGNTDKRAFVETWQSFYRKKLKEVWKPAV

SEQ ID NO: 26295 - protein, 978 aa, synthetic construct
  REGION 1..978: note = engineered CasX variant
QEIKRINKIRRRLVKDSNTKKAGKTGPMKTLLVRVMTPDLRERLENLRKKPENIPQPISNTSRANLNKLLTDYTEMKKAILHVYWEEFQKDPVGLMSRVAQPASKKIDQNKLKPEMDEKGNLTTAGFACSQCGQPLFVYKLEQVSEKGKAYTNYFGRCNVAEHEKLILLAQLKPEKDSDEAVTYSLGKFGQRALDFYSIHVTKESTHPVKPLAQIAGNRYASGPVGKALSDACMGTIASFLSKYQDIIIEHQKVVKGNQKRLESLRELAGKENLEYPSVTLPPQPHTKEGVDAYNEVIARVRMWVNLNLWQKLKLSRDDAKPLLRLKGFPSFPLVERQANEVDWWDMVCNVKKLINEKKEDGKVFWQNLAGYKRQEALRPYLSSEEDRKKGKKFARYQLGDLLLHLEKKHGEDWGKVYDEAWERIDKKVEGLSKHIKLEEERRSEDAQSKAALTDWLRAKASFVIEGLKEADKDEFCRCELKLQKWYGDLRGKPFAIEAENSILDISGFSKQYNCAFIWQKDGVKKLNLYLIINYFKGGKLRFKKIKPEAFEANRFYTVINKKSGEIVPMEVNFNFDDPNLIILPLAFGKRQGREFIWNDLLSLETGSLKLANGRVIEKTLYNRRTRQDEPALFVALTFERREVLDSSNIKPMNLIGVDRGENIPAVIALTDPEGCPLSRFKDSLGNPTHILRIGESYKEKQRTIQAKKEVTQRRAGGYSRKYASKAKNLADDMVRNTARDLLYYAVTQDAMLIFENLSRGFGRQGKRTFMAERQYTRMEDWLTAKLAYEGLPSKTYLSKTLAQYTSKTCSNCGFTITSADYDRVLEKLKKTATGWMTTINGKELKVEGQITYYNRYKRQNVVKDLSVELDRLSEESVNNDISSWTKGRSGEALSLLKKRFSHRPVQEKFVCLNCGFETHADEQAALNIARSWLFLRSQEYKKYQTNKTTGNTDKRAFVETWQSFYRKKLKEVWKPAV

SEQ ID NO: 26296 - protein, 978 aa, synthetic construct
  REGION 1..978: note = engineered CasX variant
QEIKRINKIRRRLVKDSNTKKAGKTGPMKTLLVRVMTPDLRERLENLRKKPENIPQPISNTSRANLNKLLTDYTEMKKAILHVYWEEFQKDPVGLMSRVAQPASKKIDQNKLKPEMDEKGNLTTAGFACSQCGQPLFVYKLEQVSEKGKAYTNYFGRCNVAEHEKLILLAQLKPEKDSDEAVTYSLGKFGQRALDFYSIHVTKESTHPVKPLAQIAGNRYASGPVGKALSDACMGTIASFLSKYQDIIIEHQKVVKGNQKRLESLRELAGKENLEYPSVTLPPQPHTKEGVDAYNEVIARVRMWVNLNLWQKLKLSRDDAKPLLRLKGFPSFPLVERQANEVDWWDMVCNVKKLINEKKEDGKVFWQNLAGYKRQEALRPYLSSEEDRKKGKKFARYQLGDLLLHLEKKHGEDWGKVYDEAWERIDKKVEGLSKHIKLEEERRSEDAQSKAALTDWLRAKASFVIEGLKEADKDEFCRCELKLQKWYGDLRGKPFAIEAENSILDISGFSKQYNCAFIWQKDGVKKLNLYLIINYFKGGKLRFKKIKPEAFEANRFYTVINKKSGEIVPMEVNFNFDDPNLIILPLAFGKRQGREFIWNDLLSLETGSLKLANGRVIEKTLYNRRTRQDEPALFVALTFERREVLDSSNIKPMNLIGVDRGENIPAVIALTDPEGCPLSRFKDSLGNPTHILRIGESYKEKQRTIQAKKEVTQGRAGGYSRKYASKAKNLADDMVRNTARDLLYYAVTQDAMLIFENLSRGFGRQGKRTFMAERQYTRMEDWLTAKLAYEGLPSKTYLSKTLAQYTSKTCSNCGFTITSADYDRVLEKLKKTATGWMTTINGKELKVEGQITYYNRYKRQNVVKDLSVELDRLSEESVNNDISSWTKGRSGEALSLLKKRFSHRPVQEKFVCLNCGFETHADEQAALNIARSWLFLRSQEYKKYQTNKTTGNTDKRAFVETWQSFYRKKLKEVWKPAV

SEQ ID NO: 26297 - protein, 978 aa, synthetic construct
  REGION 1..978: note = engineered CasX variant
QEIKRINKIRRRLVKDSNTKKAGKTGPMKTLLVRVMTPDLRERLENLRKKPENIPQPISNTSRANLNKLLTDYTEMKKAILHVYWEEFQKDPVGLMSRVAQPASKKIDQNKLKPEMDEKGNLTTAGFACSQCGQPLFVYKLEQVSEKGKAYTNYFGRCNVAEHEKLILLAQLKPEKDSDEAVTYSLGKFGQRALDFYSIHVTKESTHPVKPLAQIAGNRYASGPVGKALSDACMGTIASFLSKYQDIIIEHQKVVKGNQKRLESLRELAGKENLEYPSVTLPPQPHTKEGVDAYNEVIARVRMWVNLNLWQKLKLSRDDAKPLLRLKGFPSFPLVERQANEVDWWDMVCNVKKLINEKKEDGKVFWQNLAGYKRQEALRPYLSSEEDRKKGKKFARYQLGDLLLHLEKKHGEDWGKVYDEAWERIDKKVEGLSKHIKLEEERRSEDAQSKAALTDWLRAKASFVIEGLKEADKDEFCRCELKLQKWYGDLRGKPFAIEAENSILDISGFSKQYNCAFIWQKDGVKKLNLYLIINYFKGGKLRFKKIKPEAFEANRFYTVINKKSGEIVPMEVNFNFDDPNLIILPLAFGKRQGREFIWNDLLSLETGSLKLANGRVIEKTLYNRRTRQDEPALFVALTFERREVLDSSNIKPMNLIGVDRGENIPAVIALTDPEGCPLSRFKDSLGNPTHILRIGESYKEKQRTIQAKKEVSQRRAGGYSRKYASKAKNLADDMVRNTARDLLYYAVTQDAMLIFENLSRGFGRQGKRTFMAERQYTRMEDWLTAKLAYEGLPSKTYLSKTLAQYTSKTCSNCGFTITSADYDRVLEKLKKTATGWMTTINGKELKVEGQITYYNRYKRQNVVKDLSVELDRLSEESVNNDISSWTKGRSGEALSLLKKRFSHRPVQEKFVCLNCGFETHADEQAALNIARSWLFLRSQEYKKYQTNKTTGNTDKRAFVETWQSFYRKKLKEVWKPAV

SEQ ID NO: 26298 - protein, 978 aa, synthetic construct
  REGION 1..978: note = engineered CasX variant
QEIKRINKIRRRLVKDSNTKKAGKTGPMKTLLVRVMTPDLRERLENLRKKPENIPQPISNTSRANLNKLLTDYTEMKKAILHVYWEEFQKDPVGLMSRVAQPASKKIDQNKLKPEMDEKGNLTTAGFACSQCGQPLFVYKLEQVSEKGKAYTNYFGRCNVAEHEKLILLAQLKPEKDSDEAVTYSLGKFGQRALDFYSIHVTKESTHPVKPLAQIAGNRYASGPVGKALSDACMGTIASFLSKYQDIIIEHQKVVKGNQKRLESLRELAGKENLEYPSVTLPPQPHTKEGVDAYNEVIARVRMWVNLNLWQKLKLSRDDAKPLLRLKGFPSFPLVERQANEVDWWDMVCNVKKLINEKKEDGKVFWQNLAGYKRQEALRPYLSSEEDRKKGKKFARYQLGDLLLHLEKKHGEDWGKVYDEAWERIDKKVEGLSKHIKLEEERRSEDAQSKAALTDWLRAKASFVIEGLKEADKDEFCRCELKLQKWYGDLRGKPFAIEAENSILDISGFSKQYNCAFIWQKDGVKKLNLYLIINYFKGGKLRFKKIKPEAFEANRFYTVINKKSGEIVPMEVNFNFDDPNLIILPLAFGKRQGREFIWNDLLSLETGSLKLANGRVIEKTLYNRRTRQDEPALFVALTFERREVLDSSNIKPMNLIGVDRGENIPAVIALTDPEGCPLSRFKDSLGNPTHILRIGESYKEKQRTIQAKKEVRVRRAGGYSRKYASKAKNLADDMVRNTARDLLYYAVTQDAMLIFENLSRGFGRQGKRTFMAERQYTRMEDWLTAKLAYEGLPSKTYLSKTLAQYTSKTCSNCGFTITSADYDRVLEKLKKTATGWMTTINGKELKVEGQITYYNRYKRQNVVKDLSVELDRLSEESVNNDISSWTKGRSGEALSLLKKRFSHRPVQEKFVCLNCGFETHADEQAALNIARSWLFLRSQEYKKYQTNKTTGNTDKRAFVETWQSFYRKKLKEVWKPAV

SEQ ID NO: 26299 - protein, 978 aa, synthetic construct
  REGION 1..978: note = engineered CasX variant
QEIKRINKIRRRLVKDSNTKKAGKTGPMKTLLVRVMTPDLRERLENLRKKPENIPQPISNTSRANLNKLLTDYTEMKKAILHVYWEEFQKDPVGLMSRVAQPASKKIDQNKLKPEMDEKGNLTTAGFACSQCGQPLFVYKLEQVSEKGKAYTNYFGRCNVAEHEKLILLAQLKPEKDSDEAVTYSLGKFGQRALDFYSIHVTKESTHPVKPLAQIAGNRYASGPVGKALSDACMGTIASFLSKYQDIIIEHQKVVKGNQKRLESLRELAGKENLEYPSVTLPPQPHTKEGVDAYNEVIARVRMWVNLNLWQKLKLSRDDAKPLLRLKGFPSFPLVERQANEVDWWDMVCNVKKLINEKKEDGKVFWQNLAGYKRQEALRPYLSSEEDRKKGKKFARYQLGDLLLHLEKKHGEDWGKVYDEAWERIDKKVEGLSKHIKLEEERRSEDAQSKAALTDWLRAKASFVIEGLKEADKDEFCRCELKLQKWYGDLRGKPFAIEAENSILDISGFSKQYNCAFIWQKDGVKKLNLYLIINYFKGGKLRFKKIKPEAFEANRFYTVINKKSGEIVPMEVNFNFDDPNLIILPLAFGKRQGREFIWNDLLSLETGSLKLANGRVIEKTLYNRRTRQDEPALFVALTFERREVLDSSNIKPMNLIGVDRGENIPAVIALTDPEGCPLSRFKDSLGNPTHILRIGESYKEKQRTIQAKKEVRQRRAGGYSRKYASKAKNLADDMVRNTARDLLYYAVTQDAMLIFENLSRGFGRQGKRTFMAERQYTRMEDWLTAKLAYEGLPSKTYLSKTLAQYTSKTCSNCGFTITSADYDRVLEKLKKTATGWMTTINGKELKVEGQITYYNRYKRQNVVKDLSVELDRLSEESVNNDISSWTKGRSGEALSLLKKRFSHRPVQEKFVCLNCGFETHADEQAALNIARSWLFLRSQEYKKYQTNKTTGNTDKRAFVETWQSFYRKKLKEVWKPAV

SEQ ID NO: 26300 - protein, 978 aa, synthetic construct
  REGION 1..978: note = engineered CasX variant
QEIKRINKIRRRLVKDSNTKKAGKTGPMKTLLVRVMTPDLRERLENLRKKPENIPQPISNTSRANLNKLLTDYTEMKKAILHVYWEEFQKDPVGLMSRVAQPASKKIDQNKLKPEMDEKGNLTTAGFACSQCGQPLFVYKLEQVSEKGKAYTNYFGRCNVAEHEKLILLAQLKPEKDSDEAVTYSLGKFGQRALDFYSIHVTKESTHPVKPLAQIAGNRYASGPVGKALSDACMGTIASFLSKYQDIIIEHQKVVKGNQKRLESLRELAGKENLEYPSVTLPPQPHTKEGVDAYNEVIARVRMWVNLNLWQKLKLSRDDAKPLLRLKGFPSFPLVERQANEVDWWDMVCNVKKLINEKKEDGKVFWQNLAGYKRQEALRPYLSSEEDRKKGKKFARYQLGDLLLHLEKKHGEDWGKVYDEAWERIDKKVEGLSKHIKLEEERRSEDAQSKAALTDWLRAKASFVIEGLKEADKDEFCRCELKLQKWYGDLRGKPFAIEAENSILDISGFSKQYNCAFIWQKDGVKKLNLYLIINYFKGGKLRFKKIKPEAFEANRFYTVINKKSGEIVPMEVNFNFDDPNLIILPLAFGKRQGREFIWNDLLSLETGSLKLANGRVIEKTLYNRRTRQDEPALFVALTFERREVLDSSNIKPMNLIGVDRGENIPAVIALTDPEGCPLSRFKDSLGNPTHILRIGESYKEKQRTIQAKKEVQQRRAGGYSRKYASKAKNLADDMVRNTARDLLYYAVTQDAMLIFENLSRGFGRQGKRTFMAERQYTRMEDWLTAKLAYEGLPSKTYLSKTLAQYTSKTCSNCGFTITSADYDRVLEKLKKTATGWMTTINGKELKVEGQITYYNRYKRQNVVKDLSVELDRLSEESVNNDISSWTKGRSGEALSLLKKRFSHRPVQEKFVCLNCGFETHADEQAALNIARSWLFLRSQEYKKYQTNKTTGNTDKRAFVETWQSFYRKKLKEVWKPAV

SEQ ID NO: 26301 - protein, 978 aa, synthetic construct
  REGION 1..978: note = engineered CasX variant
QEIKRINKIRRRLVKDSNTKKAGKTGPMKTLLVRVMTPDLRERLENLRKKPENIPQPISNTSRANLNKLLTDYTEMKKAILHVYWEEFQKDPVGLMSRVAQPASKKIDQNKLKPEMDEKGNLTTAGFACSQCGQPLFVYKLEQVSEKGKAYTNYFGRCNVAEHEKLILLAQLKPEKDSDEAVTYSLGKFGQRALDFYSIHVTKESTHPVKPLAQIAGNRYASGPVGKALSDACMGTIASFLSKYQDIIIEHQKVVKGNQKRLESLRELAGKENLEYPSVTLPPQPHTKEGVDAYNEVIARVRMWVNLNLWQKLKLSRDDAKPLLRLKGFPSFPLVERQANEVDWWDMVCNVKKLINEKKEDGKVFWQNLAGYKRQEALRPYLSSEEDRKKGKKFARYQLGDLLLHLEKKHGEDWGKVYDEAWERIDKKVEGLSKHIKLEEERRSEDAQSKAALTDWLRAKASFVIEGLKEADKDEFCRCELKLQKWYGDLRGKPFAIEAENSILDISGFSKQYNCAFIWQKDGVKKLNLYLIINYFKGGKLRFKKIKPEAFEANRFYTVINKKSGEIVPMEVNFNFDDPNLIILPLAFGKRQGREFIWNDLLSLETGSLKLANGRVIEKTLYNRRTRQDEPALFVALTFERREVLDSSNIKPMNLIGVDRGENIPAVIALTDPEGCPLSRFKDSLGNPTHILRIGESYKEKQRTIQAKKEVQQNRAGGYSRKYASKAKNLADDMVRNTARDLLYYAVTQDAMLIFENLSRGFGRQGKRTFMAERQYTRMEDWLTAKLAYEGLPSKTYLSKTLAQYTSKTCSNCGFTITSADYDRVLEKLKKTATGWMTTINGKELKVEGQITYYNRYKRQNVVKDLSVELDRLSEESVNNDISSWTKGRSGEALSLLKKRFSHRPVQEKFVCLNCGFETHADEQAALNIARSWLFLRSQEYKKYQTNKTTGNTDKRAFVETWQSFYRKKLKEVWKPAV

SEQ ID NO: 26302 - protein, 978 aa, synthetic construct
  REGION 1..978: note = engineered CasX variant
QEIKRINKIRRRLVKDSNTKKAGKTGPMKTLLVRVMTPDLRERLENLRKKPENIPQPISNTSRANLNKLLTDYTEMKKAILHVYWEEFQKDPVGLMSRVAQPASKKIDQNKLKPEMDEKGNLTTAGFACSQCGQPLFVYKLEQVSEKGKAYTNYFGRCNVAEHEKLILLAQLKPEKDSDEAVTYSLGKFGQRALDFYSIHVTKESTHPVKPLAQIAGNRYASGPVGKALSDACMGTIASFLSKYQDIIIEHQKVVKGNQKRLESLRELAGKENLEYPSVTLPPQPHTKEGVDAYNEVIARVRMWVNLNLWQKLKLSRDDAKPLLRLKGFPSFPLVERQANEVDWWDMVCNVKKLINEKKEDGKVFWQNLAGYKRQEALRPYLSSEEDRKKGKKFARYQLGDLLLHLEKKHGEDWGKVYDEAWERIDKKVEGLSKHIKLEEERRSEDAQSKAALTDWLRAKASFVIEGLKEADKDEFCRCELKLQKWYGDLRGKPFAIEAENSILDISGFSKQYNCAFIWQKDGVKKLNLYLIINYFKGGKLRFKKIKPEAFEANRFYTVINKKSGEIVPMEVNFNFDDPNLIILPLAFGKRQGREFIWNDLLSLETGSLKLANGRVIEKTLYNRRTRQDEPALFVALTFERREVLDSSNIKPMNLIGVDRGENIPAVIALTDPEGCPLSRFKDSLGNPTHILRIGESYKEKQRTIQAKKEVPQRRAGGYSRKYASKAKNLADDMVRNTARDLLYYAVTQDAMLIFENLSRGFGRQGKRTFMAERQYTRMEDWLTAKLAYEGLPSKTYLSKTLAQYTSKTCSNCGFTITSADYDRVLEKLKKTATGWMTTINGKELKVEGQITYYNRYKRQNVVKDLSVELDRLSEESVNNDISSWTKGRSGEALSLLKKRFSHRPVQEKFVCLNCGFETHADEQAALNIARSWLFLRSQEYKKYQTNKTTGNTDKRAFVETWQSFYRKKLKEVWKPAV

SEQ ID NO: 26303 - protein, 978 aa, synthetic construct
  REGION 1..978: note = engineered CasX variant
QEIKRINKIRRRLVKDSNTKKAGKTGPMKTLLVRVMTPDLRERLENLRKKPENIPQPISNTSRANLNKLLTDYTEMKKAILHVYWEEFQKDPVGLMSRVAQPASKKIDQNKLKPEMDEKGNLTTAGFACSQCGQPLFVYKLEQVSEKGKAYTNYFGRCNVAEHEKLILLAQLKPEKDSDEAVTYSLGKFGQRALDFYSIHVTKESTHPVKPLAQIAGNRYASGPVGKALSDACMGTIASFLSKYQDIIIEHQKVVKGNQKRLESLRELAGKENLEYPSVTLPPQPHTKEGVDAYNEVIARVRMWVNLNLWQKLKLSRDDAKPLLRLKGFPSFPLVERQANEVDWWDMVCNVKKLINEKKEDGKVFWQNLAGYKRQEALRPYLSSEEDRKKGKKFARYQLGDLLLHLEKKHGEDWGKVYDEAWERIDKKVEGLSKHIKLEEERRSEDAQSKAALTDWLRAKASFVIEGLKEADKDEFCRCELKLQKWYGDLRGKPFAIEAENSILDISGFSKQYNCAFIWQKDGVKKLNLYLIINYFKGGKLRFKKIKPEAFEANRFYTVINKKSGEIVPMEVNFNFDDPNLIILPLAFGKRQGREFIWNDLLSLETGSLKLANGRVIEKTLYNRRTRQDEPALFVALTFERREVLDSSNIKPMNLIGVDRGENIPAVIALTDPEGCPLSRFKDSLGNPTHILRIGESYKEKQRTIQAKKEVNQRRAGGYSRKYASKAKNLADDMVRNTARDLLYYAVTQDAMLIFENLSRGFGRQGKRTFMAERQYTRMEDWLTAKLAYEGLPSKTYLSKTLAQYTSKTCSNCGFTITSADYDRVLEKLKKTATGWMTTINGKELKVEGQITYYNRYKRQNVVKDLSVELDRLSEESVNNDISSWTKGRSGEALSLLKKRFSHRPVQEKFVCLNCGFETHADEQAALNIARSWLFLRSQEYKKYQTNKTTGNTDKRAFVETWQSFYRKKLKEVWKPAV

SEQ ID NO: 26304 - protein, 978 aa, synthetic construct
  REGION 1..978: note = engineered CasX variant
QEIKRINKIRRRLVKDSNTKKAGKTGPMKTLLVRVMTPDLRERLENLRKKPENIPQPISNTSRANLNKLLTDYTEMKKAILHVYWEEFQKDPVGLMSRVAQPASKKIDQNKLKPEMDEKGNLTTAGFACSQCGQPLFVYKLEQVSEKGKAYTNYFGRCNVAEHEKLILLAQLKPEKDSDEAVTYSLGKFGQRALDFYSIHVTKESTHPVKPLAQIAGNRYASGPVGKALSDACMGTIASFLSKYQDIIIEHQKVVKGNQKRLESLRELAGKENLEYPSVTLPPQPHTKEGVDAYNEVIARVRMWVNLNLWQKLKLSRDDAKPLLRLKGFPSFPLVERQANEVDWWDMVCNVKKLINEKKEDGKVFWQNLAGYKRQEALRPYLSSEEDRKKGKKFARYQLGDLLLHLEKKHGEDWGKVYDEAWERIDKKVEGLSKHIKLEEERRSEDAQSKAALTDWLRAKASFVIEGLKEADKDEFCRCELKLQKWYGDLRGKPFAIEAENSILDISGFSKQYNCAFIWQKDGVKKLNLYLIINYFKGGKLRFKKIKPEAFEANRFYTVINKKSGEIVPMEVNFNFDDPNLIILPLAFGKRQGREFIWNDLLSLETGSLKLANGRVIEKTLYNRRTRQDEPALFVALTFERREVLDSSNIKPMNLIGVDRGENIPAVIALTDPEGCPLSRFKDSLGNPTHILRIGESYKEKQRTIQAKKEVMQRRAGGYSRKYASKAKNLADDMVRNTARDLLYYAVTQDAMLIFENLSRGFGRQGKRTFMAERQYTRMEDWLTAKLAYEGLPSKTYLSKTLAQYTSKTCSNCGFTITSADYDRVLEKLKKTATGWMTTINGKELKVEGQITYYNRYKRQNVVKDLSVELDRLSEESVNNDISSWTKGRSGEALSLLKKRFSHRPVQEKFVCLNCGFETHADEQAALNIARSWLFLRSQEYKKYQTNKTTGNTDKRAFVETWQSFYRKKLKEVWKPAV

SEQ ID NO: 26305 - protein, 978 aa, synthetic construct
  REGION 1..978: note = engineered CasX variant
QEIKRINKIRRRLVKDSNTKKAGKTGPMKTLLVRVMTPDLRERLENLRKKPENIPQPISNTSRANLNKLLTDYTEMKKAILHVYWEEFQKDPVGLMSRVAQPASKKIDQNKLKPEMDEKGNLTTAGFACSQCGQPLFVYKLEQVSEKGKAYTNYFGRCNVAEHEKLILLAQLKPEKDSDEAVTYSLGKFGQRALDFYSIHVTKESTHPVKPLAQIAGNRYASGPVGKALSDACMGTIASFLSKYQDIIIEHQKVVKGNQKRLESLRELAGKENLEYPSVTLPPQPHTKEGVDAYNEVIARVRMWVNLNLWQKLKLSRDDAKPLLRLKGFPSFPLVERQANEVDWWDMVCNVKKLINEKKEDGKVFWQNLAGYKRQEALRPYLSSEEDRKKGKKFARYQLGDLLLHLEKKHGEDWGKVYDEAWERIDKKVEGLSKHIKLEEERRSEDAQSKAALTDWLRAKASFVIEGLKEADKDEFCRCELKLQKWYGDLRGKPFAIEAENSILDISGFSKQYNCAFIWQKDGVKKLNLYLIINYFKGGKLRFKKIKPEAFEANRFYTVINKKSGEIVPMEVNFNFDDPNLIILPLAFGKRQGREFIWNDLLSLETGSLKLANGRVIEKTLYNRRTRQDEPALFVALTFERREVLDSSNIKPMNLIGVDRGENIPAVIALTDPEGCPLSRFKDSLGNPTHILRIGESYKEKQRTIQAKKEVLQRRAGWYSRKYASKAKNLADDMVRNTARDLLYYAVTQDAMLIFENLSRGFGRQGKRTFMAERQYTRMEDWLTAKLAYEGLPSKTYLSKTLAQYTSKTCSNCGFTITSADYDRVLEKLKKTATGWMTTINGKELKVEGQITYYNRYKRQNVVKDLSVELDRLSEESVNNDISSWTKGRSGEALSLLKKRFSHRPVQEKFVCLNCGFETHADEQAALNIARSWLFLRSQEYKKYQTNKTTGNTDKRAFVETWQSFYRKKLKEVWKPAV

SEQ ID NO: 26306 - protein, 978 aa, synthetic construct
  REGION 1..978: note = engineered CasX variant
QEIKRINKIRRRLVKDSNTKKAGKTGPMKTLLVRVMTPDLRERLENLRKKPENIPQPISNTSRANLNKLLTDYTEMKKAILHVYWEEFQKDPVGLMSRVAQPASKKIDQNKLKPEMDEKGNLTTAGFACSQCGQPLFVYKLEQVSEKGKAYTNYFGRCNVAEHEKLILLAQLKPEKDSDEAVTYSLGKFGQRALDFYSIHVTKESTHPVKPLAQIAGNRYASGPVGKALSDACMGTIASFLSKYQDIIIEHQKVVKGNQKRLESLRELAGKENLEYPSVTLPPQPHTKEGVDAYNEVIARVRMWVNLNLWQKLKLSRDDAKPLLRLKGFPSFPLVERQANEVDWWDMVCNVKKLINEKKEDGKVFWQNLAGYKRQEALRPYLSSEEDRKKGKKFARYQLGDLLLHLEKKHGEDWGKVYDEAWERIDKKVEGLSKHIKLEEERRSEDAQSKAALTDWLRAKASFVIEGLKEADKDEFCRCELKLQKWYGDLRGKPFAIEAENSILDISGFSKQYNCAFIWQKDGVKKLNLYLIINYFKGGKLRFKKIKPEAFEANRFYTVINKKSGEIVPMEVNFNFDDPNLIILPLAFGKRQGREFIWNDLLSLETGSLKLANGRVIEKTLYNRRTRQDEPALFVALTFERREVLDSSNIKPMNLIGVDRGENIPAVIALTDPEGCPLSRFKDSLGNPTHILRIGESYKEKQRTIQAKKEVLQRRAGGYSRKYASKAKNLADDMVRNTARDLLYYAVTQDAMLIFENLSRGFGRQGKRTFMAERQYTRMEDWLTAKLAYEGLPSKTYLSKTLAQYTSKTCSNCGFTITSADYDRVLEKLKKTATGWMTTINGKELKVEGQITYYNRYKRQNVVKDLSVELDRLSEESVNNDISSWTKGRSGEALSLLKKRFSHRPVQEKFVCLNCGFETHADEQAALNIARSWLFLRSQEYKKYQTNKTTGNTDKRAFVETWQSFYRKKLKEVWKPAV

SEQ ID NO: 26307 - protein, 978 aa, synthetic construct
  REGION 1..978: note = engineered CasX variant
QEIKRINKIRRRLVKDSNTKKAGKTGPMKTLLVRVMTPDLRERLENLRKKPENIPQPISNTSRANLNKLLTDYTEMKKAILHVYWEEFQKDPVGLMSRVAQPASKKIDQNKLKPEMDEKGNLTTAGFACSQCGQPLFVYKLEQVSEKGKAYTNYFGRCNVAEHEKLILLAQLKPEKDSDEAVTYSLGKFGQRALDFYSIHVTKESTHPVKPLAQIAGNRYASGPVGKALSDACMGTIASFLSKYQDIIIEHQKVVKGNQKRLESLRELAGKENLEYPSVTLPPQPHTKEGVDAYNEVIARVRMWVNLNLWQKLKLSRDDAKPLLRLKGFPSFPLVERQANEVDWWDMVCNVKKLINEKKEDGKVFWQNLAGYKRQEALRPYLSSEEDRKKGKKFARYQLGDLLLHLEKKHGEDWGKVYDEAWERIDKKVEGLSKHIKLEEERRSEDAQSKAALTDWLRAKASFVIEGLKEADKDEFCRCELKLQKWYGDLRGKPFAIEAENSILDISGFSKQYNCAFIWQKDGVKKLNLYLIINYFKGGKLRFKKIKPEAFEANRFYTVINKKSGEIVPMEVNFNFDDPNLIILPLAFGKRQGREFIWNDLLSLETGSLKLANGRVIEKTLYNRRTRQDEPALFVALTFERREVLDSSNIKPMNLIGVDRGENIPAVIALTDPEGCPLSRFKDSLGNPTHILRIGESYKEKQRTIQAKKEVLQRGAGGYSRKYASKAKNLADDMVRNTARDLLYYAVTQDAMLIFENLSRGFGRQGKRTFMAERQYTRMEDWLTAKLAYEGLPSKTYLSKTLAQYTSKTCSNCGFTITSADYDRVLEKLKKTATGWMTTINGKELKVEGQITYYNRYKRQNVVKDLSVELDRLSEESVNNDISSWTKGRSGEALSLLKKRFSHRPVQEKFVCLNCGFETHADEQAALNIARSWLFLRSQEYKKYQTNKTTGNTDKRAFVETWQSFYRKKLKEVWKPAV

SEQ ID NO: 26308 - protein, 978 aa, synthetic construct
  REGION 1..978: note = engineered CasX variant
QEIKRINKIRRRLVKDSNTKKAGKTGPMKTLLVRVMTPDLRERLENLRKKPENIPQPISNTSRANLNKLLTDYTEMKKAILHVYWEEFQKDPVGLMSRVAQPASKKIDQNKLKPEMDEKGNLTTAGFACSQCGQPLFVYKLEQVSEKGKAYTNYFGRCNVAEHEKLILLAQLKPEKDSDEAVTYSLGKFGQRALDFYSIHVTKESTHPVKPLAQIAGNRYASGPVGKALSDACMGTIASFLSKYQDIIIEHQKVVKGNQKRLESLRELAGKENLEYPSVTLPPQPHTKEGVDAYNEVIARVRMWVNLNLWQKLKLSRDDAKPLLRLKGFPSFPLVERQANEVDWWDMVCNVKKLINEKKEDGKVFWQNLAGYKRQEALRPYLSSEEDRKKGKKFARYQLGDLLLHLEKKHGEDWGKVYDEAWERIDKKVEGLSKHIKLEEERRSEDAQSKAALTDWLRAKASFVIEGLKEADKDEFCRCELKLQKWYGDLRGKPFAIEAENSILDISGFSKQYNCAFIWQKDGVKKLNLYLIINYFKGGKLRFKKIKPEAFEANRFYTVINKKSGEIVPMEVNFNFDDPNLIILPLAFGKRQGREFIWNDLLSLETGSLKLANGRVIEKTLYNRRTRQDEPALFVALTFERREVLDSSNIKPMNLIGVDRGENIPAVIALTDPEGCPLSRFKDSLGNPTHILRIGESYKEKQRTIQAKKEVKQRRAGGYSRKYASKAKNLADDMVRNTARDLLYYAVTQDAMLIFENLSRGFGRQGKRTFMAERQYTRMEDWLTAKLAYEGLPSKTYLSKTLAQYTSKTCSNCGFTITSADYDRVLEKLKKTATGWMTTINGKELKVEGQITYYNRYKRQNVVKDLSVELDRLSEESVNNDISSWTKGRSGEALSLLKKRFSHRPVQEKFVCLNCGFETHADEQAALNIARSWLFLRSQEYKKYQTNKTTGNTDKRAFVETWQSFYRKKLKEVWKPAV

SEQ ID NO: 26309 - protein, 978 aa, synthetic construct
  REGION 1..978: note = engineered CasX variant
QEIKRINKIRRRLVKDSNTKKAGKTGPMKTLLVRVMTPDLRERLENLRKKPENIPQPISNTSRANLNKLLTDYTEMKKAILHVYWEEFQKDPVGLMSRVAQPASKKIDQNKLKPEMDEKGNLTTAGFACSQCGQPLFVYKLEQVSEKGKAYTNYFGRCNVAEHEKLILLAQLKPEKDSDEAVTYSLGKFGQRALDFYSIHVTKESTHPVKPLAQIAGNRYASGPVGKALSDACMGTIASFLSKYQDIIIEHQKVVKGNQKRLESLRELAGKENLEYPSVTLPPQPHTKEGVDAYNEVIARVRMWVNLNLWQKLKLSRDDAKPLLRLKGFPSFPLVERQANEVDWWDMVCNVKKLINEKKEDGKVFWQNLAGYKRQEALRPYLSSEEDRKKGKKFARYQLGDLLLHLEKKHGEDWGKVYDEAWERIDKKVEGLSKHIKLEEERRSEDAQSKAALTDWLRAKASFVIEGLKEADKDEFCRCELKLQKWYGDLRGKPFAIEAENSILDISGFSKQYNCAFIWQKDGVKKLNLYLIINYFKGGKLRFKKIKPEAFEANRFYTVINKKSGEIVPMEVNFNFDDPNLIILPLAFGKRQGREFIWNDLLSLETGSLKLANGRVIEKTLYNRRTRQDEPALFVALTFERREVLDSSNIKPMNLIGVDRGENIPAVIALTDPEGCPLSRFKDSLGNPTHILRIGESYKEKQRTIQAKKEVGQRRAGGYSRKYASKAKNLADDMVRNTARDLLYYAVTQDAMLIFENLSRGFGRQGKRTFMAERQYTRMEDWLTAKLAYEGLPSKTYLSKTLAQYTSKTCSNCGFTITSADYDRVLEKLKKTATGWMTTINGKELKVEGQITYYNRYKRQNVVKDLSVELDRLSEESVNNDISSWTKGRSGEALSLLKKRFSHRPVQEKFVCLNCGFETHADEQAALNIARSWLFLRSQEYKKYQTNKTTGNTDKRAFVETWQSFYRKKLKEVWKPAV

SEQ ID NO: 26310 - protein, 978 aa, synthetic construct
  REGION 1..978: note = engineered CasX variant
QEIKRINKIRRRLVKDSNTKKAGKTGPMKTLLVRVMTPDLRERLENLRKKPENIPQPISNTSRANLNKLLTDYTEMKKAILHVYWEEFQKDPVGLMSRVAQPASKKIDQNKLKPEMDEKGNLTTAGFACSQCGQPLFVYKLEQVSEKGKAYTNYFGRCNVAEHEKLILLAQLKPEKDSDEAVTYSLGKFGQRALDFYSIHVTKESTHPVKPLAQIAGNRYASGPVGKALSDACMGTIASFLSKYQDIIIEHQKVVKGNQKRLESLRELAGKENLEYPSVTLPPQPHTKEGVDAYNEVIARVRMWVNLNLWQKLKLSRDDAKPLLRLKGFPSFPLVERQANEVDWWDMVCNVKKLINEKKEDGKVFWQNLAGYKRQEALRPYLSSEEDRKKGKKFARYQLGDLLLHLEKKHGEDWGKVYDEAWERIDKKVEGLSKHIKLEEERRSEDAQSKAALTDWLRAKASFVIEGLKEADKDEFCRCELKLQKWYGDLRGKPFAIEAENSILDISGFSKQYNCAFIWQKDGVKKLNLYLIINYFKGGKLRFKKIKPEAFEANRFYTVINKKSGEIVPMEVNFNFDDPNLIILPLAFGKRQGREFIWNDLLSLETGSLKLANGRVIEKTLYNRRTRQDEPALFVALTFERREVLDSSNIKPMNLIGVDRGENIPAVIALTDPEGCPLSRFKDSLGNPTHILRIGESYKEKQRTIQAKKEVGQRLAGGYSRKYASKAKNLADDMVRNTARDLLYYAVTQDAMLIFENLSRGFGRQGKRTFMAERQYTRMEDWLTAKLAYEGLPSKTYLSKTLAQYTSKTCSNCGFTITSADYDRVLEKLKKTATGWMTTINGKELKVEGQITYYNRYKRQNVVKDLSVELDRLSEESVNNDISSWTKGRSGEALSLLKKRFSHRPVQEKFVCLNCGFETHADEQAALNIARSWLFLRSQEYKKYQTNKTTGNTDKRAFVETWQSFYRKKLKEVWKPAV

SEQ ID NO: 26311 - protein, 978 aa, synthetic construct
  REGION 1..978: note = engineered CasX variant
QEIKRINKIRRRLVKDSNTKKAGKTGPMKTLLVRVMTPDLRERLENLRKKPENIPQPISNTSRANLNKLLTDYTEMKKAILHVYWEEFQKDPVGLMSRVAQPASKKIDQNKLKPEMDEKGNLTTAGFACSQCGQPLFVYKLEQVSEKGKAYTNYFGRCNVAEHEKLILLAQLKPEKDSDEAVTYSLGKFGQRALDFYSIHVTKESTHPVKPLAQIAGNRYASGPVGKALSDACMGTIASFLSKYQDIIIEHQKVVKGNQKRLESLRELAGKENLEYPSVTLPPQPHTKEGVDAYNEVIARVRMWVNLNLWQKLKLSRDDAKPLLRLKGFPSFPLVERQANEVDWWDMVCNVKKLINEKKEDGKVFWQNLAGYKRQEALRPYLSSEEDRKKGKKFARYQLGDLLLHLEKKHGEDWGKVYDEAWERIDKKVEGLSKHIKLEEERRSEDAQSKAALTDWLRAKASFVIEGLKEADKDEFCRCELKLQKWYGDLRGKPFAIEAENSILDISGFSKQYNCAFIWQKDGVKKLNLYLIINYFKGGKLRFKKIKPEAFEANRFYTVINKKSGEIVPMEVNFNFDDPNLIILPLAFGKRQGREFIWNDLLSLETGSLKLANGRVIEKTLYNRRTRQDEPALFVALTFERREVLDSSNIKPMNLIGVDRGENIPAVIALTDPEGCPLSRFKDSLGNPTHILRIGESYKEKQRTIQAKKEVEWRRAGGYSRKYASKAKNLADDMVRNTARDLLYYAVTQDAMLIFENLSRGFGRQGKRTFMAERQYTRMEDWLTAKLAYEGLPSKTYLSKTLAQYTSKTCSNCGFTITSADYDRVLEKLKKTATGWMTTINGKELKVEGQITYYNRYKRQNVVKDLSVELDRLSEESVNNDISSWTKGRSGEALSLLKKRFSHRPVQEKFVCLNCGFETHADEQAALNIARSWLFLRSQEYKKYQTNKTTGNTDKRAFVETWQSFYRKKLKEVWKPAV

SEQ ID NO: 26312 - protein, 978 aa, synthetic construct
  REGION 1..978: note = engineered CasX variant
QEIKRINKIRRRLVKDSNTKKAGKTGPMKTLLVRVMTPDLRERLENLRKKPENIPQPISNTSRANLNKLLTDYTEMKKAILHVYWEEFQKDPVGLMSRVAQPASKKIDQNKLKPEMDEKGNLTTAGFACSQCGQPLFVYKLEQVSEKGKAYTNYFGRCNVAEHEKLILLAQLKPEKDSDEAVTYSLGKFGQRALDFYSIHVTKESTHPVKPLAQIAGNRYASGPVGKALSDACMGTIASFLSKYQDIIIEHQKVVKGNQKRLESLRELAGKENLEYPSVTLPPQPHTKEGVDAYNEVIARVRMWVNLNLWQKLKLSRDDAKPLLRLKGFPSFPLVERQANEVDWWDMVCNVKKLINEKKEDGKVFWQNLAGYKRQEALRPYLSSEEDRKKGKKFARYQLGDLLLHLEKKHGEDWGKVYDEAWERIDKKVEGLSKHIKLEEERRSEDAQSKAALTDWLRAKASFVIEGLKEADKDEFCRCELKLQKWYGDLRGKPFAIEAENSILDISGFSKQYNCAFIWQKDGVKKLNLYLIINYFKGGKLRFKKIKPEAFEANRFYTVINKKSGEIVPMEVNFNFDDPNLIILPLAFGKRQGREFIWNDLLSLETGSLKLANGRVIEKTLYNRRTRQDEPALFVALTFERREVLDSSNIKPMNLIGVDRGENIPAVIALTDPEGCPLSRFKDSLGNPTHILRIGESYKEKQRTIQAKKEVEVRRAGGYSRKYASKAKNLADDMVRNTARDLLYYAVTQDAMLIFENLSRGFGRQGKRTFMAERQYTRMEDWLTAKLAYEGLPSKTYLSKTLAQYTSKTCSNCGFTITSADYDRVLEKLKKTATGWMTTINGKELKVEGQITYYNRYKRQNVVKDLSVELDRLSEESVNNDISSWTKGRSGEALSLLKKRFSHRPVQEKFVCLNCGFETHADEQAALNIARSWLFLRSQEYKKYQTNKTTGNTDKRAFVETWQSFYRKKLKEVWKPAV

SEQ ID NO: 26313 - protein, 978 aa, synthetic construct
  REGION 1..978: note = engineered CasX variant
QEIKRINKIRRRLVKDSNTKKAGKTGPMKTLLVRVMTPDLRERLENLRKKPENIPQPISNTSRANLNKLLTDYTEMKKAILHVYWEEFQKDPVGLMSRVAQPASKKIDQNKLKPEMDEKGNLTTAGFACSQCGQPLFVYKLEQVSEKGKAYTNYFGRCNVAEHEKLILLAQLKPEKDSDEAVTYSLGKFGQRALDFYSIHVTKESTHPVKPLAQIAGNRYASGPVGKALSDACMGTIASFLSKYQDIIIEHQKVVKGNQKRLESLRELAGKENLEYPSVTLPPQPHTKEGVDAYNEVIARVRMWVNLNLWQKLKLSRDDAKPLLRLKGFPSFPLVERQANEVDWWDMVCNVKKLINEKKEDGKVFWQNLAGYKRQEALRPYLSSEEDRKKGKKFARYQLGDLLLHLEKKHGEDWGKVYDEAWERIDKKVEGLSKHIKLEEERRSEDAQSKAALTDWLRAKASFVIEGLKEADKDEFCRCELKLQKWYGDLRGKPFAIEAENSILDISGFSKQYNCAFIWQKDGVKKLNLYLIINYFKGGKLRFKKIKPEAFEANRFYTVINKKSGEIVPMEVNFNFDDPNLIILPLAFGKRQGREFIWNDLLSLETGSLKLANGRVIEKTLYNRRTRQDEPALFVALTFERREVLDSSNIKPMNLIGVDRGENIPAVIALTDPEGCPLSRFKDSLGNPTHILRIGESYKEKQRTIQAKKEVETRRAGGYSRKYASKAKNLADDMVRNTARDLLYYAVTQDAMLIFENLSRGFGRQGKRTFMAERQYTRMEDWLTAKLAYEGLPSKTYLSKTLAQYTSKTCSNCGFTITSADYDRVLEKLKKTATGWMTTINGKELKVEGQITYYNRYKRQNVVKDLSVELDRLSEESVNNDISSWTKGRSGEALSLLKKRFSHRPVQEKFVCLNCGFETHADEQAALNIARSWLFLRSQEYKKYQTNKTTGNTDKRAFVETWQSFYRKKLKEVWKPAV

SEQ ID NO: 26314 - protein, 978 aa, synthetic construct
  REGION 1..978: note = engineered CasX variant
QEIKRINKIRRRLVKDSNTKKAGKTGPMKTLLVRVMTPDLRERLENLRKKPENIPQPISNTSRANLNKLLTDYTEMKKAILHVYWEEFQKDPVGLMSRVAQPASKKIDQNKLKPEMDEKGNLTTAGFACSQCGQPLFVYKLEQVSEKGKAYTNYFGRCNVAEHEKLILLAQLKPEKDSDEAVTYSLGKFGQRALDFYSIHVTKESTHPVKPLAQIAGNRYASGPVGKALSDACMGTIASFLSKYQDIIIEHQKVVKGNQKRLESLRELAGKENLEYPSVTLPPQPHTKEGVDAYNEVIARVRMWVNLNLWQKLKLSRDDAKPLLRLKGFPSFPLVERQANEVDWWDMVCNVKKLINEKKEDGKVFWQNLAGYKRQEALRPYLSSEEDRKKGKKFARYQLGDLLLHLEKKHGEDWGKVYDEAWERIDKKVEGLSKHIKLEEERRSEDAQSKAALTDWLRAKASFVIEGLKEADKDEFCRCELKLQKWYGDLRGKPFAIEAENSILDISGFSKQYNCAFIWQKDGVKKLNLYLIINYFKGGKLRFKKIKPEAFEANRFYTVINKKSGEIVPMEVNFNFDDPNLIILPLAFGKRQGREFIWNDLLSLETGSLKLANGRVIEKTLYNRRTRQDEPALFVALTFERREVLDSSNIKPMNLIGVDRGENIPAVIALTDPEGCPLSRFKDSLGNPTHILRIGESYKEKQRTIQAKKEVESRRYGGYSRKYASKAKNLADDMVRNTARDLLYYAVTQDAMLIFENLSRGFGRQGKRTFMAERQYTRMEDWLTAKLAYEGLPSKTYLSKTLAQYTSKTCSNCGFTITSADYDRVLEKLKKTATGWMTTINGKELKVEGQITYYNRYKRQNVVKDLSVELDRLSEESVNNDISSWTKGRSGEALSLLKKRFSHRPVQEKFVCLNCGFETHADEQAALNIARSWLFLRSQEYKKYQTNKTTGNTDKRAFVETWQSFYRKKLKEVWKPAV

SEQ ID NO: 26315 - protein, 978 aa, synthetic construct
  REGION 1..978: note = engineered CasX variant
QEIKRINKIRRRLVKDSNTKKAGKTGPMKTLLVRVMTPDLRERLENLRKKPENIPQPISNTSRANLNKLLTDYTEMKKAILHVYWEEFQKDPVGLMSRVAQPASKKIDQNKLKPEMDEKGNLTTAGFACSQCGQPLFVYKLEQVSEKGKAYTNYFGRCNVAEHEKLILLAQLKPEKDSDEAVTYSLGKFGQRALDFYSIHVTKESTHPVKPLAQIAGNRYASGPVGKALSDACMGTIASFLSKYQDIIIEHQKVVKGNQKRLESLRELAGKENLEYPSVTLPPQPHTKEGVDAYNEVIARVRMWVNLNLWQKLKLSRDDAKPLLRLKGFPSFPLVERQANEVDWWDMVCNVKKLINEKKEDGKVFWQNLAGYKRQEALRPYLSSEEDRKKGKKFARYQLGDLLLHLEKKHGEDWGKVYDEAWERIDKKVEGLSKHIKLEEERRSEDAQSKAALTDWLRAKASFVIEGLKEADKDEFCRCELKLQKWYGDLRGKPFAIEAENSILDISGFSKQYNCAFIWQKDGVKKLNLYLIINYFKGGKLRFKKIKPEAFEANRFYTVINKKSGEIVPMEVNFNFDDPNLIILPLAFGKRQGREFIWNDLLSLETGSLKLANGRVIEKTLYNRRTRQDEPALFVALTFERREVLDSSNIKPMNLIGVDRGENIPAVIALTDPEGCPLSRFKDSLGNPTHILRIGESYKEKQRTIQAKKEVESRRAGGYSRKYASKAKNLADDMVRNTARDLLYYAVTQDAMLIFENLSRGFGRQGKRTFMAERQYTRMEDWLTAKLAYEGLPSKTYLSKTLAQYTSKTCSNCGFTITSADYDRVLEKLKKTATGWMTTINGKELKVEGQITYYNRYKRQNVVKDLSVELDRLSEESVNNDISSWTKGRSGEALSLLKKRFSHRPVQEKFVCLNCGFETHADEQAALNIARSWLFLRSQEYKKYQTNKTTGNTDKRAFVETWQSFYRKKLKEVWKPAV

SEQ ID NO: 26316 - protein, 978 aa, synthetic construct
  REGION 1..978: note = engineered CasX variant
QEIKRINKIRRRLVKDSNTKKAGKTGPMKTLLVRVMTPDLRERLENLRKKPENIPQPISNTSRANLNKLLTDYTEMKKAILHVYWEEFQKDPVGLMSRVAQPASKKIDQNKLKPEMDEKGNLTTAGFACSQCGQPLFVYKLEQVSEKGKAYTNYFGRCNVAEHEKLILLAQLKPEKDSDEAVTYSLGKFGQRALDFYSIHVTKESTHPVKPLAQIAGNRYASGPVGKALSDACMGTIASFLSKYQDIIIEHQKVVKGNQKRLESLRELAGKENLEYPSVTLPPQPHTKEGVDAYNEVIARVRMWVNLNLWQKLKLSRDDAKPLLRLKGFPSFPLVERQANEVDWWDMVCNVKKLINEKKEDGKVFWQNLAGYKRQEALRPYLSSEEDRKKGKKFARYQLGDLLLHLEKKHGEDWGKVYDEAWERIDKKVEGLSKHIKLEEERRSEDAQSKAALTDWLRAKASFVIEGLKEADKDEFCRCELKLQKWYGDLRGKPFAIEAENSILDISGFSKQYNCAFIWQKDGVKKLNLYLIINYFKGGKLRFKKIKPEAFEANRFYTVINKKSGEIVPMEVNFNFDDPNLIILPLAFGKRQGREFIWNDLLSLETGSLKLANGRVIEKTLYNRRTRQDEPALFVALTFERREVLDSSNIKPMNLIGVDRGENIPAVIALTDPEGCPLSRFKDSLGNPTHILRIGESYKEKQRTIQAKKEVEQYRAGGYSRKYASKAKNLADDMVRNTARDLLYYAVTQDAMLIFENLSRGFGRQGKRTFMAERQYTRMEDWLTAKLAYEGLPSKTYLSKTLAQYTSKTCSNCGFTITSADYDRVLEKLKKTATGWMTTINGKELKVEGQITYYNRYKRQNVVKDLSVELDRLSEESVNNDISSWTKGRSGEALSLLKKRFSHRPVQEKFVCLNCGFETHADEQAALNIARSWLFLRSQEYKKYQTNKTTGNTDKRAFVETWQSFYRKKLKEVWKPAV

SEQ ID NO: 26317 - protein, 978 aa, synthetic construct
  REGION 1..978: note = engineered CasX variant
QEIKRINKIRRRLVKDSNTKKAGKTGPMKTLLVRVMTPDLRERLENLRKKPENIPQPISNTSRANLNKLLTDYTEMKKAILHVYWEEFQKDPVGLMSRVAQPASKKIDQNKLKPEMDEKGNLTTAGFACSQCGQPLFVYKLEQVSEKGKAYTNYFGRCNVAEHEKLILLAQLKPEKDSDEAVTYSLGKFGQRALDFYSIHVTKESTHPVKPLAQIAGNRYASGPVGKALSDACMGTIASFLSKYQDIIIEHQKVVKGNQKRLESLRELAGKENLEYPSVTLPPQPHTKEGVDAYNEVIARVRMWVNLNLWQKLKLSRDDAKPLLRLKGFPSFPLVERQANEVDWWDMVCNVKKLINEKKEDGKVFWQNLAGYKRQEALRPYLSSEEDRKKGKKFARYQLGDLLLHLEKKHGEDWGKVYDEAWERIDKKVEGLSKHIKLEEERRSEDAQSKAALTDWLRAKASFVIEGLKEADKDEFCRCELKLQKWYGDLRGKPFAIEAENSILDISGFSKQYNCAFIWQKDGVKKLNLYLIINYFKGGKLRFKKIKPEAFEANRFYTVINKKSGEIVPMEVNFNFDDPNLIILPLAFGKRQGREFIWNDLLSLETGSLKLANGRVIEKTLYNRRTRQDEPALFVALTFERREVLDSSNIKPMNLIGVDRGENIPAVIALTDPEGCPLSRFKDSLGNPTHILRIGESYKEKQRTIQAKKEVEQVRAGGYSRKYASKAKNLADDMVRNTARDLLYYAVTQDAMLIFENLSRGFGRQGKRTFMAERQYTRMEDWLTAKLAYEGLPSKTYLSKTLAQYTSKTCSNCGFTITSADYDRVLEKLKKTATGWMTTINGKELKVEGQITYYNRYKRQNVVKDLSVELDRLSEESVNNDISSWTKGRSGEALSLLKKRFSHRPVQEKFVCLNCGFETHADEQAALNIARSWLFLRSQEYKKYQTNKTTGNTDKRAFVETWQSFYRKKLKEVWKPAV

SEQ ID NO: 26318 - protein, 978 aa, synthetic construct
  REGION 1..978: note = engineered CasX variant
QEIKRINKIRRRLVKDSNTKKAGKTGPMKTLLVRVMTPDLRERLENLRKKPENIPQPISNTSRANLNKLLTDYTEMKKAILHVYWEEFQKDPVGLMSRVAQPASKKIDQNKLKPEMDEKGNLTTAGFACSQCGQPLFVYKLEQVSEKGKAYTNYFGRCNVAEHEKLILLAQLKPEKDSDEAVTYSLGKFGQRALDFYSIHVTKESTHPVKPLAQIAGNRYASGPVGKALSDACMGTIASFLSKYQDIIIEHQKVVKGNQKRLESLRELAGKENLEYPSVTLPPQPHTKEGVDAYNEVIARVRMWVNLNLWQKLKLSRDDAKPLLRLKGFPSFPLVERQANEVDWWDMVCNVKKLINEKKEDGKVFWQNLAGYKRQEALRPYLSSEEDRKKGKKFARYQLGDLLLHLEKKHGEDWGKVYDEAWERIDKKVEGLSKHIKLEEERRSEDAQSKAALTDWLRAKASFVIEGLKEADKDEFCRCELKLQKWYGDLRGKPFAIEAENSILDISGFSKQYNCAFIWQKDGVKKLNLYLIINYFKGGKLRFKKIKPEAFEANRFYTVINKKSGEIVPMEVNFNFDDPNLIILPLAFGKRQGREFIWNDLLSLETGSLKLANGRVIEKTLYNRRTRQDEPALFVALTFERREVLDSSNIKPMNLIGVDRGENIPAVIALTDPEGCPLSRFKDSLGNPTHILRIGESYKEKQRTIQAKKEVEQTRAGGYSRKYASKAKNLADDMVRNTARDLLYYAVTQDAMLIFENLSRGFGRQGKRTFMAERQYTRMEDWLTAKLAYEGLPSKTYLSKTLAQYTSKTCSNCGFTITSADYDRVLEKLKKTATGWMTTINGKELKVEGQITYYNRYKRQNVVKDLSVELDRLSEESVNNDISSWTKGRSGEALSLLKKRFSHRPVQEKFVCLNCGFETHADEQAALNIARSWLFLRSQEYKKYQTNKTTGNTDKRAFVETWQSFYRKKLKEVWKPAV

SEQ ID NO: 26319 - protein, 978 aa, synthetic construct
  REGION 1..978: note = engineered CasX variant
QEIKRINKIRRRLVKDSNTKKAGKTGPMKTLLVRVMTPDLRERLENLRKKPENIPQPISNTSRANLNKLLTDYTEMKKAILHVYWEEFQKDPVGLMSRVAQPASKKIDQNKLKPEMDEKGNLTTAGFACSQCGQPLFVYKLEQVSEKGKAYTNYFGRCNVAEHEKLILLAQLKPEKDSDEAVTYSLGKFGQRALDFYSIHVTKESTHPVKPLAQIAGNRYASGPVGKALSDACMGTIASFLSKYQDIIIEHQKVVKGNQKRLESLRELAGKENLEYPSVTLPPQPHTKEGVDAYNEVIARVRMWVNLNLWQKLKLSRDDAKPLLRLKGFPSFPLVERQANEVDWWDMVCNVKKLINEKKEDGKVFWQNLAGYKRQEALRPYLSSEEDRKKGKKFARYQLGDLLLHLEKKHGEDWGKVYDEAWERIDKKVEGLSKHIKLEEERRSEDAQSKAALTDWLRAKASFVIEGLKEADKDEFCRCELKLQKWYGDLRGKPFAIEAENSILDISGFSKQYNCAFIWQKDGVKKLNLYLIINYFKGGKLRFKKIKPEAFEANRFYTVINKKSGEIVPMEVNFNFDDPNLIILPLAFGKRQGREFIWNDLLSLETGSLKLANGRVIEKTLYNRRTRQDEPALFVALTFERREVLDSSNIKPMNLIGVDRGENIPAVIALTDPEGCPLSRFKDSLGNPTHILRIGESYKEKQRTIQAKKEVEQSRAGGYSRKYASKAKNLADDMVRNTARDLLYYAVTQDAMLIFENLSRGFGRQGKRTFMAERQYTRMEDWLTAKLAYEGLPSKTYLSKTLAQYTSKTCSNCGFTITSADYDRVLEKLKKTATGWMTTINGKELKVEGQITYYNRYKRQNVVKDLSVELDRLSEESVNNDISSWTKGRSGEALSLLKKRFSHRPVQEKFVCLNCGFETHADEQAALNIARSWLFLRSQEYKKYQTNKTTGNTDKRAFVETWQSFYRKKLKEVWKPAV

SEQ ID NO: 26320 - protein, 978 aa, synthetic construct
  REGION 1..978: note = engineered CasX variant
QEIKRINKIRRRLVKDSNTKKAGKTGPMKTLLVRVMTPDLRERLENLRKKPENIPQPISNTSRANLNKLLTDYTEMKKAILHVYWEEFQKDPVGLMSRVAQPASKKIDQNKLKPEMDEKGNLTTAGFACSQCGQPLFVYKLEQVSEKGKAYTNYFGRCNVAEHEKLILLAQLKPEKDSDEAVTYSLGKFGQRALDFYSIHVTKESTHPVKPLAQIAGNRYASGPVGKALSDACMGTIASFLSKYQDIIIEHQKVVKGNQKRLESLRELAGKENLEYPSVTLPPQPHTKEGVDAYNEVIARVRMWVNLNLWQKLKLSRDDAKPLLRLKGFPSFPLVERQANEVDWWDMVCNVKKLINEKKEDGKVFWQNLAGYKRQEALRPYLSSEEDRKKGKKFARYQLGDLLLHLEKKHGEDWGKVYDEAWERIDKKVEGLSKHIKLEEERRSEDAQSKAALTDWLRAKASFVIEGLKEADKDEFCRCELKLQKWYGDLRGKPFAIEAENSILDISGFSKQYNCAFIWQKDGVKKLNLYLIINYFKGGKLRFKKIKPEAFEANRFYTVINKKSGEIVPMEVNFNFDDPNLIILPLAFGKRQGREFIWNDLLSLETGSLKLANGRVIEKTLYNRRTRQDEPALFVALTFERREVLDSSNIKPMNLIGVDRGENIPAVIALTDPEGCPLSRFKDSLGNPTHILRIGESYKEKQRTIQAKKEVEQRWAGGYSRKYASKAKNLADDMVRNTARDLLYYAVTQDAMLIFENLSRGFGRQGKRTFMAERQYTRMEDWLTAKLAYEGLPSKTYLSKTLAQYTSKTCSNCGFTITSADYDRVLEKLKKTATGWMTTINGKELKVEGQITYYNRYKRQNVVKDLSVELDRLSEESVNNDISSWTKGRSGEALSLLKKRFSHRPVQEKFVCLNCGFETHADEQAALNIARSWLFLRSQEYKKYQTNKTTGNTDKRAFVETWQSFYRKKLKEVWKPAV

SEQ ID NO: 26321 - protein, 978 aa, synthetic construct
  REGION 1..978: note = engineered CasX variant
QEIKRINKIRRRLVKDSNTKKAGKTGPMKTLLVRVMTPDLRERLENLRKKPENIPQPISNTSRANLNKLLTDYTEMKKAILHVYWEEFQKDPVGLMSRVAQPASKKIDQNKLKPEMDEKGNLTTAGFACSQCGQPLFVYKLEQVSEKGKAYTNYFGRCNVAEHEKLILLAQLKPEKDSDEAVTYSLGKFGQRALDFYSIHVTKESTHPVKPLAQIAGNRYASGPVGKALSDACMGTIASFLSKYQDIIIEHQKVVKGNQKRLESLRELAGKENLEYPSVTLPPQPHTKEGVDAYNEVIARVRMWVNLNLWQKLKLSRDDAKPLLRLKGFPSFPLVERQANEVDWWDMVCNVKKLINEKKEDGKVFWQNLAGYKRQEALRPYLSSEEDRKKGKKFARYQLGDLLLHLEKKHGEDWGKVYDEAWERIDKKVEGLSKHIKLEEERRSEDAQSKAALTDWLRAKASFVIEGLKEADKDEFCRCELKLQKWYGDLRGKPFAIEAENSILDISGFSKQYNCAFIWQKDGVKKLNLYLIINYFKGGKLRFKKIKPEAFEANRFYTVINKKSGEIVPMEVNFNFDDPNLIILPLAFGKRQGREFIWNDLLSLETGSLKLANGRVIEKTLYNRRTRQDEPALFVALTFERREVLDSSNIKPMNLIGVDRGENIPAVIALTDPEGCPLSRFKDSLGNPTHILRIGESYKEKQRTIQAKKEVEQRVAGGYSRKYASKAKNLADDMVRNTARDLLYYAVTQDAMLIFENLSRGFGRQGKRTFMAERQYTRMEDWLTAKLAYEGLPSKTYLSKTLAQYTSKTCSNCGFTITSADYDRVLEKLKKTATGWMTTINGKELKVEGQITYYNRYKRQNVVKDLSVELDRLSEESVNNDISSWTKGRSGEALSLLKKRFSHRPVQEKFVCLNCGFETHADEQAALNIARSWLFLRSQEYKKYQTNKTTGNTDKRAFVETWQSFYRKKLKEVWKPAV

SEQ ID NO: 26322 - protein, 978 aa, synthetic construct
  REGION 1..978: note = engineered CasX variant
QEIKRINKIRRRLVKDSNTKKAGKTGPMKTLLVRVMTPDLRERLENLRKKPENIPQPISNTSRANLNKLLTDYTEMKKAILHVYWEEFQKDPVGLMSRVAQPASKKIDQNKLKPEMDEKGNLTTAGFACSQCGQPLFVYKLEQVSEKGKAYTNYFGRCNVAEHEKLILLAQLKPEKDSDEAVTYSLGKFGQRALDFYSIHVTKESTHPVKPLAQIAGNRYASGPVGKALSDACMGTIASFLSKYQDIIIEHQKVVKGNQKRLESLRELAGKENLEYPSVTLPPQPHTKEGVDAYNEVIARVRMWVNLNLWQKLKLSRDDAKPLLRLKGFPSFPLVERQANEVDWWDMVCNVKKLINEKKEDGKVFWQNLAGYKRQEALRPYLSSEEDRKKGKKFARYQLGDLLLHLEKKHGEDWGKVYDEAWERIDKKVEGLSKHIKLEEERRSEDAQSKAALTDWLRAKASFVIEGLKEADKDEFCRCELKLQKWYGDLRGKPFAIEAENSILDISGFSKQYNCAFIWQKDGVKKLNLYLIINYFKGGKLRFKKIKPEAFEANRFYTVINKKSGEIVPMEVNFNFDDPNLIILPLAFGKRQGREFIWNDLLSLETGSLKLANGRVIEKTLYNRRTRQDEPALFVALTFERREVLDSSNIKPMNLIGVDRGENIPAVIALTDPEGCPLSRFKDSLGNPTHILRIGESYKEKQRTIQAKKEVEQRTAGGYSRKYASKAKNLADDMVRNTARDLLYYAVTQDAMLIFENLSRGFGRQGKRTFMAERQYTRMEDWLTAKLAYEGLPSKTYLSKTLAQYTSKTCSNCGFTITSADYDRVLEKLKKTATGWMTTINGKELKVEGQITYYNRYKRQNVVKDLSVELDRLSEESVNNDISSWTKGRSGEALSLLKKRFSHRPVQEKFVCLNCGFETHADEQAALNIARSWLFLRSQEYKKYQTNKTTGNTDKRAFVETWQSFYRKKLKEVWKPAV

SEQ ID NO: 26323 - protein, 978 aa, synthetic construct
  REGION 1..978: note = engineered CasX variant
QEIKRINKIRRRLVKDSNTKKAGKTGPMKTLLVRVMTPDLRERLENLRKKPENIPQPISNTSRANLNKLLTDYTEMKKAILHVYWEEFQKDPVGLMSRVAQPASKKIDQNKLKPEMDEKGNLTTAGFACSQCGQPLFVYKLEQVSEKGKAYTNYFGRCNVAEHEKLILLAQLKPEKDSDEAVTYSLGKFGQRALDFYSIHVTKESTHPVKPLAQIAGNRYASGPVGKALSDACMGTIASFLSKYQDIIIEHQKVVKGNQKRLESLRELAGKENLEYPSVTLPPQPHTKEGVDAYNEVIARVRMWVNLNLWQKLKLSRDDAKPLLRLKGFPSFPLVERQANEVDWWDMVCNVKKLINEKKEDGKVFWQNLAGYKRQEALRPYLSSEEDRKKGKKFARYQLGDLLLHLEKKHGEDWGKVYDEAWERIDKKVEGLSKHIKLEEERRSEDAQSKAALTDWLRAKASFVIEGLKEADKDEFCRCELKLQKWYGDLRGKPFAIEAENSILDISGFSKQYNCAFIWQKDGVKKLNLYLIINYFKGGKLRFKKIKPEAFEANRFYTVINKKSGEIVPMEVNFNFDDPNLIILPLAFGKRQGREFIWNDLLSLETGSLKLANGRVIEKTLYNRRTRQDEPALFVALTFERREVLDSSNIKPMNLIGVDRGENIPAVIALTDPEGCPLSRFKDSLGNPTHILRIGESYKEKQRTIQAKKEVEQRSAGGYSRKYASKAKNLADDMVRNTARDLLYYAVTQDAMLIFENLSRGFGRQGKRTFMAERQYTRMEDWLTAKLAYEGLPSKTYLSKTLAQYTSKTCSNCGFTITSADYDRVLEKLKKTATGWMTTINGKELKVEGQITYYNRYKRQNVVKDLSVELDRLSEESVNNDISSWTKGRSGEALSLLKKRFSHRPVQEKFVCLNCGFETHADEQAALNIARSWLFLRSQEYKKYQTNKTTGNTDKRAFVETWQSFYRKKLKEVWKPAV

SEQ ID NO: 26324 - protein, 978 aa, synthetic construct
  REGION 1..978: note = engineered CasX variant
QEIKRINKIRRRLVKDSNTKKAGKTGPMKTLLVRVMTPDLRERLENLRKKPENIPQPISNTSRANLNKLLTDYTEMKKAILHVYWEEFQKDPVGLMSRVAQPASKKIDQNKLKPEMDEKGNLTTAGFACSQCGQPLFVYKLEQVSEKGKAYTNYFGRCNVAEHEKLILLAQLKPEKDSDEAVTYSLGKFGQRALDFYSIHVTKESTHPVKPLAQIAGNRYASGPVGKALSDACMGTIASFLSKYQDIIIEHQKVVKGNQKRLESLRELAGKENLEYPSVTLPPQPHTKEGVDAYNEVIARVRMWVNLNLWQKLKLSRDDAKPLLRLKGFPSFPLVERQANEVDWWDMVCNVKKLINEKKEDGKVFWQNLAGYKRQEALRPYLSSEEDRKKGKKFARYQLGDLLLHLEKKHGEDWGKVYDEAWERIDKKVEGLSKHIKLEEERRSEDAQSKAALTDWLRAKASFVIEGLKEADKDEFCRCELKLQKWYGDLRGKPFAIEAENSILDISGFSKQYNCAFIWQKDGVKKLNLYLIINYFKGGKLRFKKIKPEAFEANRFYTVINKKSGEIVPMEVNFNFDDPNLIILPLAFGKRQGREFIWNDLLSLETGSLKLANGRVIEKTLYNRRTRQDEPALFVALTFERREVLDSSNIKPMNLIGVDRGENIPAVIALTDPEGCPLSRFKDSLGNPTHILRIGESYKEKQRTIQAKKEVEQRRYGGYSRKYASKAKNLADDMVRNTARDLLYYAVTQDAMLIFENLSRGFGRQGKRTFMAERQYTRMEDWLTAKLAYEGLPSKTYLSKTLAQYTSKTCSNCGFTITSADYDRVLEKLKKTATGWMTTINGKELKVEGQITYYNRYKRQNVVKDLSVELDRLSEESVNNDISSWTKGRSGEALSLLKKRFSHRPVQEKFVCLNCGFETHADEQAALNIARSWLFLRSQEYKKYQTNKTTGNTDKRAFVETWQSFYRKKLKEVWKPAV

SEQ ID NO: 26325 - protein, 978 aa, synthetic construct
  REGION 1..978: note = engineered CasX variant
QEIKRINKIRRRLVKDSNTKKAGKTGPMKTLLVRVMTPDLRERLENLRKKPENIPQPISNTSRANLNKLLTDYTEMKKAILHVYWEEFQKDPVGLMSRVAQPASKKIDQNKLKPEMDEKGNLTTAGFACSQCGQPLFVYKLEQVSEKGKAYTNYFGRCNVAEHEKLILLAQLKPEKDSDEAVTYSLGKFGQRALDFYSIHVTKESTHPVKPLAQIAGNRYASGPVGKALSDACMGTIASFLSKYQDIIIEHQKVVKGNQKRLESLRELAGKENLEYPSVTLPPQPHTKEGVDAYNEVIARVRMWVNLNLWQKLKLSRDDAKPLLRLKGFPSFPLVERQANEVDWWDMVCNVKKLINEKKEDGKVFWQNLAGYKRQEALRPYLSSEEDRKKGKKFARYQLGDLLLHLEKKHGEDWGKVYDEAWERIDKKVEGLSKHIKLEEERRSEDAQSKAALTDWLRAKASFVIEGLKEADKDEFCRCELKLQKWYGDLRGKPFAIEAENSILDISGFSKQYNCAFIWQKDGVKKLNLYLIINYFKGGKLRFKKIKPEAFEANRFYTVINKKSGEIVPMEVNFNFDDPNLIILPLAFGKRQGREFIWNDLLSLETGSLKLANGRVIEKTLYNRRTRQDEPALFVALTFERREVLDSSNIKPMNLIGVDRGENIPAVIALTDPEGCPLSRFKDSLGNPTHILRIGESYKEKQRTIQAKKEVEQRRVGGYSRKYASKAKNLADDMVRNTARDLLYYAVTQDAMLIFENLSRGFGRQGKRTFMAERQYTRMEDWLTAKLAYEGLPSKTYLSKTLAQYTSKTCSNCGFTITSADYDRVLEKLKKTATGWMTTINGKELKVEGQITYYNRYKRQNVVKDLSVELDRLSEESVNNDISSWTKGRSGEALSLLKKRFSHRPVQEKFVCLNCGFETHADEQAALNIARSWLFLRSQEYKKYQTNKTTGNTDKRAFVETWQSFYRKKLKEVWKPAV

SEQ ID NO: 26326 - protein, 978 aa, synthetic construct
  REGION 1..978: note = engineered CasX variant
QEIKRINKIRRRLVKDSNTKKAGKTGPMKTLLVRVMTPDLRERLENLRKKPENIPQPISNTSRANLNKLLTDYTEMKKAILHVYWEEFQKDPVGLMSRVAQPASKKIDQNKLKPEMDEKGNLTTAGFACSQCGQPLFVYKLEQVSEKGKAYTNYFGRCNVAEHEKLILLAQLKPEKDSDEAVTYSLGKFGQRALDFYSIHVTKESTHPVKPLAQIAGNRYASGPVGKALSDACMGTIASFLSKYQDIIIEHQKVVKGNQKRLESLRELAGKENLEYPSVTLPPQPHTKEGVDAYNEVIARVRMWVNLNLWQKLKLSRDDAKPLLRLKGFPSFPLVERQANEVDWWDMVCNVKKLINEKKEDGKVFWQNLAGYKRQEALRPYLSSEEDRKKGKKFARYQLGDLLLHLEKKHGEDWGKVYDEAWERIDKKVEGLSKHIKLEEERRSEDAQSKAALTDWLRAKASFVIEGLKEADKDEFCRCELKLQKWYGDLRGKPFAIEAENSILDISGFSKQYNCAFIWQKDGVKKLNLYLIINYFKGGKLRFKKIKPEAFEANRFYTVINKKSGEIVPMEVNFNFDDPNLIILPLAFGKRQGREFIWNDLLSLETGSLKLANGRVIEKTLYNRRTRQDEPALFVALTFERREVLDSSNIKPMNLIGVDRGENIPAVIALTDPEGCPLSRFKDSLGNPTHILRIGESYKEKQRTIQAKKEVEQRRTGGYSRKYASKAKNLADDMVRNTARDLLYYAVTQDAMLIFENLSRGFGRQGKRTFMAERQYTRMEDWLTAKLAYEGLPSKTYLSKTLAQYTSKTCSNCGFTITSADYDRVLEKLKKTATGWMTTINGKELKVEGQITYYNRYKRQNVVKDLSVELDRLSEESVNNDISSWTKGRSGEALSLLKKRFSHRPVQEKFVCLNCGFETHADEQAALNIARSWLFLRSQEYKKYQTNKTTGNTDKRAFVETWQSFYRKKLKEVWKPAV

SEQ ID NO: 26327 - protein, 978 aa, synthetic construct
  REGION 1..978: note = engineered CasX variant
QEIKRINKIRRRLVKDSNTKKAGKTGPMKTLLVRVMTPDLRERLENLRKKPENIPQPISNTSRANLNKLLTDYTEMKKAILHVYWEEFQKDPVGLMSRVAQPASKKIDQNKLKPEMDEKGNLTTAGFACSQCGQPLFVYKLEQVSEKGKAYTNYFGRCNVAEHEKLILLAQLKPEKDSDEAVTYSLGKFGQRALDFYSIHVTKESTHPVKPLAQIAGNRYASGPVGKALSDACMGTIASFLSKYQDIIIEHQKVVKGNQKRLESLRELAGKENLEYPSVTLPPQPHTKEGVDAYNEVIARVRMWVNLNLWQKLKLSRDDAKPLLRLKGFPSFPLVERQANEVDWWDMVCNVKKLINEKKEDGKVFWQNLAGYKRQEALRPYLSSEEDRKKGKKFARYQLGDLLLHLEKKHGEDWGKVYDEAWERIDKKVEGLSKHIKLEEERRSEDAQSKAALTDWLRAKASFVIEGLKEADKDEFCRCELKLQKWYGDLRGKPFAIEAENSILDISGFSKQYNCAFIWQKDGVKKLNLYLIINYFKGGKLRFKKIKPEAFEANRFYTVINKKSGEIVPMEVNFNFDDPNLIILPLAFGKRQGREFIWNDLLSLETGSLKLANGRVIEKTLYNRRTRQDEPALFVALTFERREVLDSSNIKPMNLIGVDRGENIPAVIALTDPEGCPLSRFKDSLGNPTHILRIGESYKEKQRTIQAKKEVEQRRSGGYSRKYASKAKNLADDMVRNTARDLLYYAVTQDAMLIFENLSRGFGRQGKRTFMAERQYTRMEDWLTAKLAYEGLPSKTYLSKTLAQYTSKTCSNCGFTITSADYDRVLEKLKKTATGWMTTINGKELKVEGQITYYNRYKRQNVVKDLSVELDRLSEESVNNDISSWTKGRSGEALSLLKKRFSHRPVQEKFVCLNCGFETHADEQAALNIARSWLFLRSQEYKKYQTNKTTGNTDKRAFVETWQSFYRKKLKEVWKPAV

SEQ ID NO: 26328 - protein, 978 aa, synthetic construct
  REGION 1..978: note = engineered CasX variant
QEIKRINKIRRRLVKDSNTKKAGKTGPMKTLLVRVMTPDLRERLENLRKKPENIPQPISNTSRANLNKLLTDYTEMKKAILHVYWEEFQKDPVGLMSRVAQPASKKIDQNKLKPEMDEKGNLTTAGFACSQCGQPLFVYKLEQVSEKGKAYTNYFGRCNVAEHEKLILLAQLKPEKDSDEAVTYSLGKFGQRALDFYSIHVTKESTHPVKPLAQIAGNRYASGPVGKALSDACMGTIASFLSKYQDIIIEHQKVVKGNQKRLESLRELAGKENLEYPSVTLPPQPHTKEGVDAYNEVIARVRMWVNLNLWQKLKLSRDDAKPLLRLKGFPSFPLVERQANEVDWWDMVCNVKKLINEKKEDGKVFWQNLAGYKRQEALRPYLSSEEDRKKGKKFARYQLGDLLLHLEKKHGEDWGKVYDEAWERIDKKVEGLSKHIKLEEERRSEDAQSKAALTDWLRAKASFVIEGLKEADKDEFCRCELKLQKWYGDLRGKPFAIEAENSILDISGFSKQYNCAFIWQKDGVKKLNLYLIINYFKGGKLRFKKIKPEAFEANRFYTVINKKSGEIVPMEVNFNFDDPNLIILPLAFGKRQGREFIWNDLLSLETGSLKLANGRVIEKTLYNRRTRQDEPALFVALTFERREVLDSSNIKPMNLIGVDRGENIPAVIALTDPEGCPLSRFKDSLGNPTHILRIGESYKEKQRTIQAKKEVEQRRRGGYSRKYASKAKNLADDMVRNTARDLLYYAVTQDAMLIFENLSRGFGRQGKRTFMAERQYTRMEDWLTAKLAYEGLPSKTYLSKTLAQYTSKTCSNCGFTITSADYDRVLEKLKKTATGWMTTINGKELKVEGQITYYNRYKRQNVVKDLSVELDRLSEESVNNDISSWTKGRSGEALSLLKKRFSHRPVQEKFVCLNCGFETHADEQAALNIARSWLFLRSQEYKKYQTNKTTGNTDKRAFVETWQSFYRKKLKEVWKPAV

SEQ ID NO: 26329 - protein, 978 aa, synthetic construct
  REGION 1..978: note = engineered CasX variant
QEIKRINKIRRRLVKDSNTKKAGKTGPMKTLLVRVMTPDLRERLENLRKKPENIPQPISNTSRANLNKLLTDYTEMKKAILHVYWEEFQKDPVGLMSRVAQPASKKIDQNKLKPEMDEKGNLTTAGFACSQCGQPLFVYKLEQVSEKGKAYTNYFGRCNVAEHEKLILLAQLKPEKDSDEAVTYSLGKFGQRALDFYSIHVTKESTHPVKPLAQIAGNRYASGPVGKALSDACMGTIASFLSKYQDIIIEHQKVVKGNQKRLESLRELAGKENLEYPSVTLPPQPHTKEGVDAYNEVIARVRMWVNLNLWQKLKLSRDDAKPLLRLKGFPSFPLVERQANEVDWWDMVCNVKKLINEKKEDGKVFWQNLAGYKRQEALRPYLSSEEDRKKGKKFARYQLGDLLLHLEKKHGEDWGKVYDEAWERIDKKVEGLSKHIKLEEERRSEDAQSKAALTDWLRAKASFVIEGLKEADKDEFCRCELKLQKWYGDLRGKPFAIEAENSILDISGFSKQYNCAFIWQKDGVKKLNLYLIINYFKGGKLRFKKIKPEAFEANRFYTVINKKSGEIVPMEVNFNFDDPNLIILPLAFGKRQGREFIWNDLLSLETGSLKLANGRVIEKTLYNRRTRQDEPALFVALTFERREVLDSSNIKPMNLIGVDRGENIPAVIALTDPEGCPLSRFKDSLGNPTHILRIGESYKEKQRTIQAKKEVEQRRQGLYSRKYASKAKNLADDMVRNTARDLLYYAVTQDAMLIFENLSRGFGRQGKRTFMAERQYTRMEDWLTAKLAYEGLPSKTYLSKTLAQYTSKTCSNCGFTITSADYDRVLEKLKKTATGWMTTINGKELKVEGQITYYNRYKRQNVVKDLSVELDRLSEESVNNDISSWTKGRSGEALSLLKKRFSHRPVQEKFVCLNCGFETHADEQAALNIARSWLFLRSQEYKKYQTNKTTGNTDKRAFVETWQSFYRKKLKEVWKPAV

SEQ ID NO: 26330 - protein, 978 aa, synthetic construct
  REGION 1..978: note = engineered CasX variant
QEIKRINKIRRRLVKDSNTKKAGKTGPMKTLLVRVMTPDLRERLENLRKKPENIPQPISNTSRANLNKLLTDYTEMKKAILHVYWEEFQKDPVGLMSRVAQPASKKIDQNKLKPEMDEKGNLTTAGFACSQCGQPLFVYKLEQVSEKGKAYTNYFGRCNVAEHEKLILLAQLKPEKDSDEAVTYSLGKFGQRALDFYSIHVTKESTHPVKPLAQIAGNRYASGPVGKALSDACMGTIASFLSKYQDIIIEHQKVVKGNQKRLESLRELAGKENLEYPSVTLPPQPHTKEGVDAYNEVIARVRMWVNLNLWQKLKLSRDDAKPLLRLKGFPSFPLVERQANEVDWWDMVCNVKKLINEKKEDGKVFWQNLAGYKRQEALRPYLSSEEDRKKGKKFARYQLGDLLLHLEKKHGEDWGKVYDEAWERIDKKVEGLSKHIKLEEERRSEDAQSKAALTDWLRAKASFVIEGLKEADKDEFCRCELKLQKWYGDLRGKPFAIEAENSILDISGFSKQYNCAFIWQKDGVKKLNLYLIINYFKGGKLRFKKIKPEAFEANRFYTVINKKSGEIVPMEVNFNFDDPNLIILPLAFGKRQGREFIWNDLLSLETGSLKLANGRVIEKTLYNRRTRQDEPALFVALTFERREVLDSSNIKPMNLIGVDRGENIPAVIALTDPEGCPLSRFKDSLGNPTHILRIGESYKEKQRTIQAKKEVEQRRQGGYSRKYASKAKNLADDMVRNTARDLLYYAVTQDAMLIFENLSRGFGRQGKRTFMAERQYTRMEDWLTAKLAYEGLPSKTYLSKTLAQYTSKTCSNCGFTITSADYDRVLEKLKKTATGWMTTINGKELKVEGQITYYNRYKRQNVVKDLSVELDRLSEESVNNDISSWTKGRSGEALSLLKKRFSHRPVQEKFVCLNCGFETHADEQAALNIARSWLFLRSQEYKKYQTNKTTGNTDKRAFVETWQSFYRKKLKEVWKPAV

SEQ ID NO: 26331 - protein, 978 aa, synthetic construct
  REGION 1..978: note = engineered CasX variant
QEIKRINKIRRRLVKDSNTKKAGKTGPMKTLLVRVMTPDLRERLENLRKKPENIPQPISNTSRANLNKLLTDYTEMKKAILHVYWEEFQKDPVGLMSRVAQPASKKIDQNKLKPEMDEKGNLTTAGFACSQCGQPLFVYKLEQVSEKGKAYTNYFGRCNVAEHEKLILLAQLKPEKDSDEAVTYSLGKFGQRALDFYSIHVTKESTHPVKPLAQIAGNRYASGPVGKALSDACMGTIASFLSKYQDIIIEHQKVVKGNQKRLESLRELAGKENLEYPSVTLPPQPHTKEGVDAYNEVIARVRMWVNLNLWQKLKLSRDDAKPLLRLKGFPSFPLVERQANEVDWWDMVCNVKKLINEKKEDGKVFWQNLAGYKRQEALRPYLSSEEDRKKGKKFARYQLGDLLLHLEKKHGEDWGKVYDEAWERIDKKVEGLSKHIKLEEERRSEDAQSKAALTDWLRAKASFVIEGLKEADKDEFCRCELKLQKWYGDLRGKPFAIEAENSILDISGFSKQYNCAFIWQKDGVKKLNLYLIINYFKGGKLRFKKIKPEAFEANRFYTVINKKSGEIVPMEVNFNFDDPNLIILPLAFGKRQGREFIWNDLLSLETGSLKLANGRVIEKTLYNRRTRQDEPALFVALTFERREVLDSSNIKPMNLIGVDRGENIPAVIALTDPEGCPLSRFKDSLGNPTHILRIGESYKEKQRTIQAKKEVEQRRNGGYSRKYASKAKNLADDMVRNTARDLLYYAVTQDAMLIFENLSRGFGRQGKRTFMAERQYTRMEDWLTAKLAYEGLPSKTYLSKTLAQYTSKTCSNCGFTITSADYDRVLEKLKKTATGWMTTINGKELKVEGQITYYNRYKRQNVVKDLSVELDRLSEESVNNDISSWTKGRSGEALSLLKKRFSHRPVQEKFVCLNCGFETHADEQAALNIARSWLFLRSQEYKKYQTNKTTGNTDKRAFVETWQSFYRKKLKEVWKPAV

SEQ ID NO: 26332 - protein, 978 aa, synthetic construct
  REGION 1..978: note = engineered CasX variant
QEIKRINKIRRRLVKDSNTKKAGKTGPMKTLLVRVMTPDLRERLENLRKKPENIPQPISNTSRANLNKLLTDYTEMKKAILHVYWEEFQKDPVGLMSRVAQPASKKIDQNKLKPEMDEKGNLTTAGFACSQCGQPLFVYKLEQVSEKGKAYTNYFGRCNVAEHEKLILLAQLKPEKDSDEAVTYSLGKFGQRALDFYSIHVTKESTHPVKPLAQIAGNRYASGPVGKALSDACMGTIASFLSKYQDIIIEHQKVVKGNQKRLESLRELAGKENLEYPSVTLPPQPHTKEGVDAYNEVIARVRMWVNLNLWQKLKLSRDDAKPLLRLKGFPSFPLVERQANEVDWWDMVCNVKKLINEKKEDGKVFWQNLAGYKRQEALRPYLSSEEDRKKGKKFARYQLGDLLLHLEKKHGEDWGKVYDEAWERIDKKVEGLSKHIKLEEERRSEDAQSKAALTDWLRAKASFVIEGLKEADKDEFCRCELKLQKWYGDLRGKPFAIEAENSILDISGFSKQYNCAFIWQKDGVKKLNLYLIINYFKGGKLRFKKIKPEAFEANRFYTVINKKSGEIVPMEVNFNFDDPNLIILPLAFGKRQGREFIWNDLLSLETGSLKLANGRVIEKTLYNRRTRQDEPALFVALTFERREVLDSSNIKPMNLIGVDRGENIPAVIALTDPEGCPLSRFKDSLGNPTHILRIGESYKEKQRTIQAKKEVEQRRMGGYSRKYASKAKNLADDMVRNTARDLLYYAVTQDAMLIFENLSRGFGRQGKRTFMAERQYTRMEDWLTAKLAYEGLPSKTYLSKTLAQYTSKTCSNCGFTITSADYDRVLEKLKKTATGWMTTINGKELKVEGQITYYNRYKRQNVVKDLSVELDRLSEESVNNDISSWTKGRSGEALSLLKKRFSHRPVQEKFVCLNCGFETHADEQAALNIARSWLFLRSQEYKKYQTNKTTGNTDKRAFVETWQSFYRKKLKEVWKPAV

SEQ ID NO: 26333 - protein, 978 aa, synthetic construct
  REGION 1..978: note = engineered CasX variant
QEIKRINKIRRRLVKDSNTKKAGKTGPMKTLLVRVMTPDLRERLENLRKKPENIPQPISNTSRANLNKLLTDYTEMKKAILHVYWEEFQKDPVGLMSRVAQPASKKIDQNKLKPEMDEKGNLTTAGFACSQCGQPLFVYKLEQVSEKGKAYTNYFGRCNVAEHEKLILLAQLKPEKDSDEAVTYSLGKFGQRALDFYSIHVTKESTHPVKPLAQIAGNRYASGPVGKALSDACMGTIASFLSKYQDIIIEHQKVVKGNQKRLESLRELAGKENLEYPSVTLPPQPHTKEGVDAYNEVIARVRMWVNLNLWQKLKLSRDDAKPLLRLKGFPSFPLVERQANEVDWWDMVCNVKKLINEKKEDGKVFWQNLAGYKRQEALRPYLSSEEDRKKGKKFARYQLGDLLLHLEKKHGEDWGKVYDEAWERIDKKVEGLSKHIKLEEERRSEDAQSKAALTDWLRAKASFVIEGLKEADKDEFCRCELKLQKWYGDLRGKPFAIEAENSILDISGFSKQYNCAFIWQKDGVKKLNLYLIINYFKGGKLRFKKIKPEAFEANRFYTVINKKSGEIVPMEVNFNFDDPNLIILPLAFGKRQGREFIWNDLLSLETGSLKLANGRVIEKTLYNRRTRQDEPALFVALTFERREVLDSSNIKPMNLIGVDRGENIPAVIALTDPEGCPLSRFKDSLGNPTHILRIGESYKEKQRTIQAKKEVEQRRLGGYSRKYASKAKNLADDMVRNTARDLLYYAVTQDAMLIFENLSRGFGRQGKRTFMAERQYTRMEDWLTAKLAYEGLPSKTYLSKTLAQYTSKTCSNCGFTITSADYDRVLEKLKKTATGWMTTINGKELKVEGQITYYNRYKRQNVVKDLSVELDRLSEESVNNDISSWTKGRSGEALSLLKKRFSHRPVQEKFVCLNCGFETHADEQAALNIARSWLFLRSQEYKKYQTNKTTGNTDKRAFVETWQSFYRKKLKEVWKPAV

SEQ ID NO: 26334 - protein, 978 aa, synthetic construct
  REGION 1..978: note = engineered CasX variant
QEIKRINKIRRRLVKDSNTKKAGKTGPMKTLLVRVMTPDLRERLENLRKKPENIPQPISNTSRANLNKLLTDYTEMKKAILHVYWEEFQKDPVGLMSRVAQPASKKIDQNKLKPEMDEKGNLTTAGFACSQCGQPLFVYKLEQVSEKGKAYTNYFGRCNVAEHEKLILLAQLKPEKDSDEAVTYSLGKFGQRALDFYSIHVTKESTHPVKPLAQIAGNRYASGPVGKALSDACMGTIASFLSKYQDIIIEHQKVVKGNQKRLESLRELAGKENLEYPSVTLPPQPHTKEGVDAYNEVIARVRMWVNLNLWQKLKLSRDDAKPLLRLKGFPSFPLVERQANEVDWWDMVCNVKKLINEKKEDGKVFWQNLAGYKRQEALRPYLSSEEDRKKGKKFARYQLGDLLLHLEKKHGEDWGKVYDEAWERIDKKVEGLSKHIKLEEERRSEDAQSKAALTDWLRAKASFVIEGLKEADKDEFCRCELKLQKWYGDLRGKPFAIEAENSILDISGFSKQYNCAFIWQKDGVKKLNLYLIINYFKGGKLRFKKIKPEAFEANRFYTVINKKSGEIVPMEVNFNFDDPNLIILPLAFGKRQGREFIWNDLLSLETGSLKLANGRVIEKTLYNRRTRQDEPALFVALTFERREVLDSSNIKPMNLIGVDRGENIPAVIALTDPEGCPLSRFKDSLGNPTHILRIGESYKEKQRTIQAKKEVEQRRLFGYSRKYASKAKNLADDMVRNTARDLLYYAVTQDAMLIFENLSRGFGRQGKRTFMAERQYTRMEDWLTAKLAYEGLPSKTYLSKTLAQYTSKTCSNCGFTITSADYDRVLEKLKKTATGWMTTINGKELKVEGQITYYNRYKRQNVVKDLSVELDRLSEESVNNDISSWTKGRSGEALSLLKKRFSHRPVQEKFVCLNCGFETHADEQAALNIARSWLFLRSQEYKKYQTNKTTGNTDKRAFVETWQSFYRKKLKEVWKPAV

SEQ ID NO: 26335 - protein, 978 aa, synthetic construct
  REGION 1..978: note = engineered CasX variant
QEIKRINKIRRRLVKDSNTKKAGKTGPMKTLLVRVMTPDLRERLENLRKKPENIPQPISNTSRANLNKLLTDYTEMKKAILHVYWEEFQKDPVGLMSRVAQPASKKIDQNKLKPEMDEKGNLTTAGFACSQCGQPLFVYKLEQVSEKGKAYTNYFGRCNVAEHEKLILLAQLKPEKDSDEAVTYSLGKFGQRALDFYSIHVTKESTHPVKPLAQIAGNRYASGPVGKALSDACMGTIASFLSKYQDIIIEHQKVVKGNQKRLESLRELAGKENLEYPSVTLPPQPHTKEGVDAYNEVIARVRMWVNLNLWQKLKLSRDDAKPLLRLKGFPSFPLVERQANEVDWWDMVCNVKKLINEKKEDGKVFWQNLAGYKRQEALRPYLSSEEDRKKGKKFARYQLGDLLLHLEKKHGEDWGKVYDEAWERIDKKVEGLSKHIKLEEERRSEDAQSKAALTDWLRAKASFVIEGLKEADKDEFCRCELKLQKWYGDLRGKPFAIEAENSILDISGFSKQYNCAFIWQKDGVKKLNLYLIINYFKGGKLRFKKIKPEAFEANRFYTVINKKSGEIVPMEVNFNFDDPNLIILPLAFGKRQGREFIWNDLLSLETGSLKLANGRVIEKTLYNRRTRQDEPALFVALTFERREVLDSSNIKPMNLIGVDRGENIPAVIALTDPEGCPLSRFKDSLGNPTHILRIGESYKEKQRTIQAKKEVEQRRKGGYSRKYASKAKNLADDMVRNTARDLLYYAVTQDAMLIFENLSRGFGRQGKRTFMAERQYTRMEDWLTAKLAYEGLPSKTYLSKTLAQYTSKTCSNCGFTITSADYDRVLEKLKKTATGWMTTINGKELKVEGQITYYNRYKRQNVVKDLSVELDRLSEESVNNDISSWTKGRSGEALSLLKKRFSHRPVQEKFVCLNCGFETHADEQAALNIARSWLFLRSQEYKKYQTNKTTGNTDKRAFVETWQSFYRKKLKEVWKPAV

SEQ ID NO: 26336 - protein, 978 aa, synthetic construct
  REGION 1..978: note = engineered CasX variant
QEIKRINKIRRRLVKDSNTKKAGKTGPMKTLLVRVMTPDLRERLENLRKKPENIPQPISNTSRANLNKLLTDYTEMKKAILHVYWEEFQKDPVGLMSRVAQPASKKIDQNKLKPEMDEKGNLTTAGFACSQCGQPLFVYKLEQVSEKGKAYTNYFGRCNVAEHEKLILLAQLKPEKDSDEAVTYSLGKFGQRALDFYSIHVTKESTHPVKPLAQIAGNRYASGPVGKALSDACMGTIASFLSKYQDIIIEHQKVVKGNQKRLESLRELAGKENLEYPSVTLPPQPHTKEGVDAYNEVIARVRMWVNLNLWQKLKLSRDDAKPLLRLKGFPSFPLVERQANEVDWWDMVCNVKKLINEKKEDGKVFWQNLAGYKRQEALRPYLSSEEDRKKGKKFARYQLGDLLLHLEKKHGEDWGKVYDEAWERIDKKVEGLSKHIKLEEERRSEDAQSKAALTDWLRAKASFVIEGLKEADKDEFCRCELKLQKWYGDLRGKPFAIEAENSILDISGFSKQYNCAFIWQKDGVKKLNLYLIINYFKGGKLRFKKIKPEAFEANRFYTVINKKSGEIVPMEVNFNFDDPNLIILPLAFGKRQGREFIWNDLLSLETGSLKLANGRVIEKTLYNRRTRQDEPALFVALTFERREVLDSSNIKPMNLIGVDRGENIPAVIALTDPEGCPLSRFKDSLGNPTHILRIGESYKEKQRTIQAKKEVEQRRIGGYSRKYASKAKNLADDMVRNTARDLLYYAVTQDAMLIFENLSRGFGRQGKRTFMAERQYTRMEDWLTAKLAYEGLPSKTYLSKTLAQYTSKTCSNCGFTITSADYDRVLEKLKKTATGWMTTINGKELKVEGQITYYNRYKRQNVVKDLSVELDRLSEESVNNDISSWTKGRSGEALSLLKKRFSHRPVQEKFVCLNCGFETHADEQAALNIARSWLFLRSQEYKKYQTNKTTGNTDKRAFVETWQSFYRKKLKEVWKPAV

SEQ ID NO: 26337 - protein, 978 aa, synthetic construct
  REGION 1..978: note = engineered CasX variant
QEIKRINKIRRRLVKDSNTKKAGKTGPMKTLLVRVMTPDLRERLENLRKKPENIPQPISNTSRANLNKLLTDYTEMKKAILHVYWEEFQKDPVGLMSRVAQPASKKIDQNKLKPEMDEKGNLTTAGFACSQCGQPLFVYKLEQVSEKGKAYTNYFGRCNVAEHEKLILLAQLKPEKDSDEAVTYSLGKFGQRALDFYSIHVTKESTHPVKPLAQIAGNRYASGPVGKALSDACMGTIASFLSKYQDIIIEHQKVVKGNQKRLESLRELAGKENLEYPSVTLPPQPHTKEGVDAYNEVIARVRMWVNLNLWQKLKLSRDDAKPLLRLKGFPSFPLVERQANEVDWWDMVCNVKKLINEKKEDGKVFWQNLAGYKRQEALRPYLSSEEDRKKGKKFARYQLGDLLLHLEKKHGEDWGKVYDEAWERIDKKVEGLSKHIKLEEERRSEDAQSKAALTDWLRAKASFVIEGLKEADKDEFCRCELKLQKWYGDLRGKPFAIEAENSILDISGFSKQYNCAFIWQKDGVKKLNLYLIINYFKGGKLRFKKIKPEAFEANRFYTVINKKSGEIVPMEVNFNFDDPNLIILPLAFGKRQGREFIWNDLLSLETGSLKLANGRVIEKTLYNRRTRQDEPALFVALTFERREVLDSSNIKPMNLIGVDRGENIPAVIALTDPEGCPLSRFKDSLGNPTHILRIGESYKEKQRTIQAKKEVEQRRHGGYSRKYASKAKNLADDMVRNTARDLLYYAVTQDAMLIFENLSRGFGRQGKRTFMAERQYTRMEDWLTAKLAYEGLPSKTYLSKTLAQYTSKTCSNCGFTITSADYDRVLEKLKKTATGWMTTINGKELKVEGQITYYNRYKRQNVVKDLSVELDRLSEESVNNDISSWTKGRSGEALSLLKKRFSHRPVQEKFVCLNCGFETHADEQAALNIARSWLFLRSQEYKKYQTNKTTGNTDKRAFVETWQSFYRKKLKEVWKPAV

SEQ ID NO: 26338 - protein, 978 aa, synthetic construct
  REGION 1..978: note = engineered CasX variant
QEIKRINKIRRRLVKDSNTKKAGKTGPMKTLLVRVMTPDLRERLENLRKKPENIPQPISNTSRANLNKLLTDYTEMKKAILHVYWEEFQKDPVGLMSRVAQPASKKIDQNKLKPEMDEKGNLTTAGFACSQCGQPLFVYKLEQVSEKGKAYTNYFGRCNVAEHEKLILLAQLKPEKDSDEAVTYSLGKFGQRALDFYSIHVTKESTHPVKPLAQIAGNRYASGPVGKALSDACMGTIASFLSKYQDIIIEHQKVVKGNQKRLESLRELAGKENLEYPSVTLPPQPHTKEGVDAYNEVIARVRMWVNLNLWQKLKLSRDDAKPLLRLKGFPSFPLVERQANEVDWWDMVCNVKKLINEKKEDGKVFWQNLAGYKRQEALRPYLSSEEDRKKGKKFARYQLGDLLLHLEKKHGEDWGKVYDEAWERIDKKVEGLSKHIKLEEERRSEDAQSKAALTDWLRAKASFVIEGLKEADKDEFCRCELKLQKWYGDLRGKPFAIEAENSILDISGFSKQYNCAFIWQKDGVKKLNLYLIINYFKGGKLRFKKIKPEAFEANRFYTVINKKSGEIVPMEVNFNFDDPNLIILPLAFGKRQGREFIWNDLLSLETGSLKLANGRVIEKTLYNRRTRQDEPALFVALTFERREVLDSSNIKPMNLIGVDRGENIPAVIALTDPEGCPLSRFKDSLGNPTHILRIGESYKEKQRTIQAKKEVEQRRGGGYSRKYASKAKNLADDMVRNTARDLLYYAVTQDAMLIFENLSRGFGRQGKRTFMAERQYTRMEDWLTAKLAYEGLPSKTYLSKTLAQYTSKTCSNCGFTITSADYDRVLEKLKKTATGWMTTINGKELKVEGQITYYNRYKRQNVVKDLSVELDRLSEESVNNDISSWTKGRSGEALSLLKKRFSHRPVQEKFVCLNCGFETHADEQAALNIARSWLFLRSQEYKKYQTNKTTGNTDKRAFVETWQSFYRKKLKEVWKPAV

SEQ ID NO: 26339 - protein, 978 aa, synthetic construct
  REGION 1..978: note = engineered CasX variant
QEIKRINKIRRRLVKDSNTKKAGKTGPMKTLLVRVMTPDLRERLENLRKKPENIPQPISNTSRANLNKLLTDYTEMKKAILHVYWEEFQKDPVGLMSRVAQPASKKIDQNKLKPEMDEKGNLTTAGFACSQCGQPLFVYKLEQVSEKGKAYTNYFGRCNVAEHEKLILLAQLKPEKDSDEAVTYSLGKFGQRALDFYSIHVTKESTHPVKPLAQIAGNRYASGPVGKALSDACMGTIASFLSKYQDIIIEHQKVVKGNQKRLESLRELAGKENLEYPSVTLPPQPHTKEGVDAYNEVIARVRMWVNLNLWQKLKLSRDDAKPLLRLKGFPSFPLVERQANEVDWWDMVCNVKKLINEKKEDGKVFWQNLAGYKRQEALRPYLSSEEDRKKGKKFARYQLGDLLLHLEKKHGEDWGKVYDEAWERIDKKVEGLSKHIKLEEERRSEDAQSKAALTDWLRAKASFVIEGLKEADKDEFCRCELKLQKWYGDLRGKPFAIEAENSILDISGFSKQYNCAFIWQKDGVKKLNLYLIINYFKGGKLRFKKIKPEAFEANRFYTVINKKSGEIVPMEVNFNFDDPNLIILPLAFGKRQGREFIWNDLLSLETGSLKLANGRVIEKTLYNRRTRQDEPALFVALTFERREVLDSSNIKPMNLIGVDRGENIPAVIALTDPEGCPLSRFKDSLGNPTHILRIGESYKEKQRTIQAKKEVEQRRFGGYSRKYASKAKNLADDMVRNTARDLLYYAVTQDAMLIFENLSRGFGRQGKRTFMAERQYTRMEDWLTAKLAYEGLPSKTYLSKTLAQYTSKTCSNCGFTITSADYDRVLEKLKKTATGWMTTINGKELKVEGQITYYNRYKRQNVVKDLSVELDRLSEESVNNDISSWTKGRSGEALSLLKKRFSHRPVQEKFVCLNCGFETHADEQAALNIARSWLFLRSQEYKKYQTNKTTGNTDKRAFVETWQSFYRKKLKEVWKPAV

SEQ ID NO: 26340 - protein, 978 aa, synthetic construct
  REGION 1..978: note = engineered CasX variant
QEIKRINKIRRRLVKDSNTKKAGKTGPMKTLLVRVMTPDLRERLENLRKKPENIPQPISNTSRANLNKLLTDYTEMKKAILHVYWEEFQKDPVGLMSRVAQPASKKIDQNKLKPEMDEKGNLTTAGFACSQCGQPLFVYKLEQVSEKGKAYTNYFGRCNVAEHEKLILLAQLKPEKDSDEAVTYSLGKFGQRALDFYSIHVTKESTHPVKPLAQIAGNRYASGPVGKALSDACMGTIASFLSKYQDIIIEHQKVVKGNQKRLESLRELAGKENLEYPSVTLPPQPHTKEGVDAYNEVIARVRMWVNLNLWQKLKLSRDDAKPLLRLKGFPSFPLVERQANEVDWWDMVCNVKKLINEKKEDGKVFWQNLAGYKRQEALRPYLSSEEDRKKGKKFARYQLGDLLLHLEKKHGEDWGKVYDEAWERIDKKVEGLSKHIKLEEERRSEDAQSKAALTDWLRAKASFVIEGLKEADKDEFCRCELKLQKWYGDLRGKPFAIEAENSILDISGFSKQYNCAFIWQKDGVKKLNLYLIINYFKGGKLRFKKIKPEAFEANRFYTVINKKSGEIVPMEVNFNFDDPNLIILPLAFGKRQGREFIWNDLLSLETGSLKLANGRVIEKTLYNRRTRQDEPALFVALTFERREVLDSSNIKPMNLIGVDRGENIPAVIALTDPEGCPLSRFKDSLGNPTHILRIGESYKEKQRTIQAKKEVEQRREGGYSRKYASKAKNLADDMVRNTARDLLYYAVTQDAMLIFENLSRGFGRQGKRTFMAERQYTRMEDWLTAKLAYEGLPSKTYLSKTLAQYTSKTCSNCGFTITSADYDRVLEKLKKTATGWMTTINGKELKVEGQITYYNRYKRQNVVKDLSVELDRLSEESVNNDISSWTKGRSGEALSLLKKRFSHRPVQEKFVCLNCGFETHADEQAALNIARSWLFLRSQEYKKYQTNKTTGNTDKRAFVETWQSFYRKKLKEVWKPAV

SEQ ID NO: 26341 - protein, 978 aa, synthetic construct
  REGION 1..978: note = engineered CasX variant
QEIKRINKIRRRLVKDSNTKKAGKTGPMKTLLVRVMTPDLRERLENLRKKPENIPQPISNTSRANLNKLLTDYTEMKKAILHVYWEEFQKDPVGLMSRVAQPASKKIDQNKLKPEMDEKGNLTTAGFACSQCGQPLFVYKLEQVSEKGKAYTNYFGRCNVAEHEKLILLAQLKPEKDSDEAVTYSLGKFGQRALDFYSIHVTKESTHPVKPLAQIAGNRYASGPVGKALSDACMGTIASFLSKYQDIIIEHQKVVKGNQKRLESLRELAGKENLEYPSVTLPPQPHTKEGVDAYNEVIARVRMWVNLNLWQKLKLSRDDAKPLLRLKGFPSFPLVERQANEVDWWDMVCNVKKLINEKKEDGKVFWQNLAGYKRQEALRPYLSSEEDRKKGKKFARYQLGDLLLHLEKKHGEDWGKVYDEAWERIDKKVEGLSKHIKLEEERRSEDAQSKAALTDWLRAKASFVIEGLKEADKDEFCRCELKLQKWYGDLRGKPFAIEAENSILDISGFSKQYNCAFIWQKDGVKKLNLYLIINYFKGGKLRFKKIKPEAFEANRFYTVINKKSGEIVPMEVNFNFDDPNLIILPLAFGKRQGREFIWNDLLSLETGSLKLANGRVIEKTLYNRRTRQDEPALFVALTFERREVLDSSNIKPMNLIGVDRGENIPAVIALTDPEGCPLSRFKDSLGNPTHILRIGESYKEKQRTIQAKKEVEQRRDGGYSRKYASKAKNLADDMVRNTARDLLYYAVTQDAMLIFENLSRGFGRQGKRTFMAERQYTRMEDWLTAKLAYEGLPSKTYLSKTLAQYTSKTCSNCGFTITSADYDRVLEKLKKTATGWMTTINGKELKVEGQITYYNRYKRQNVVKDLSVELDRLSEESVNNDISSWTKGRSGEALSLLKKRFSHRPVQEKFVCLNCGFETHADEQAALNIARSWLFLRSQEYKKYQTNKTTGNTDKRAFVETWQSFYRKKLKEVWKPAV

SEQ ID NO: 26342 - protein, 978 aa, synthetic construct
  REGION 1..978: note = engineered CasX variant
QEIKRINKIRRRLVKDSNTKKAGKTGPMKTLLVRVMTPDLRERLENLRKKPENIPQPISNTSRANLNKLLTDYTEMKKAILHVYWEEFQKDPVGLMSRVAQPASKKIDQNKLKPEMDEKGNLTTAGFACSQCGQPLFVYKLEQVSEKGKAYTNYFGRCNVAEHEKLILLAQLKPEKDSDEAVTYSLGKFGQRALDFYSIHVTKESTHPVKPLAQIAGNRYASGPVGKALSDACMGTIASFLSKYQDIIIEHQKVVKGNQKRLESLRELAGKENLEYPSVTLPPQPHTKEGVDAYNEVIARVRMWVNLNLWQKLKLSRDDAKPLLRLKGFPSFPLVERQANEVDWWDMVCNVKKLINEKKEDGKVFWQNLAGYKRQEALRPYLSSEEDRKKGKKFARYQLGDLLLHLEKKHGEDWGKVYDEAWERIDKKVEGLSKHIKLEEERRSEDAQSKAALTDWLRAKASFVIEGLKEADKDEFCRCELKLQKWYGDLRGKPFAIEAENSILDISGFSKQYNCAFIWQKDGVKKLNLYLIINYFKGGKLRFKKIKPEAFEANRFYTVINKKSGEIVPMEVNFNFDDPNLIILPLAFGKRQGREFIWNDLLSLETGSLKLANGRVIEKTLYNRRTRQDEPALFVALTFERREVLDSSNIKPMNLIGVDRGENIPAVIALTDPEGCPLSRFKDSLGNPTHILRIGESYKEKQRTIQAKKEVEQRRCGGYSRKYASKAKNLADDMVRNTARDLLYYAVTQDAMLIFENLSRGFGRQGKRTFMAERQYTRMEDWLTAKLAYEGLPSKTYLSKTLAQYTSKTCSNCGFTITSADYDRVLEKLKKTATGWMTTINGKELKVEGQITYYNRYKRQNVVKDLSVELDRLSEESVNNDISSWTKGRSGEALSLLKKRFSHRPVQEKFVCLNCGFETHADEQAALNIARSWLFLRSQEYKKYQTNKTTGNTDKRAFVETWQSFYRKKLKEVWKPAV

SEQ ID NO: 26343 - protein, 978 aa, synthetic construct
  REGION 1..978: note = engineered CasX variant
QEIKRINKIRRRLVKDSNTKKAGKTGPMKTLLVRVMTPDLRERLENLRKKPENIPQPISNTSRANLNKLLTDYTEMKKAILHVYWEEFQKDPVGLMSRVAQPASKKIDQNKLKPEMDEKGNLTTAGFACSQCGQPLFVYKLEQVSEKGKAYTNYFGRCNVAEHEKLILLAQLKPEKDSDEAVTYSLGKFGQRALDFYSIHVTKESTHPVKPLAQIAGNRYASGPVGKALSDACMGTIASFLSKYQDIIIEHQKVVKGNQKRLESLRELAGKENLEYPSVTLPPQPHTKEGVDAYNEVIARVRMWVNLNLWQKLKLSRDDAKPLLRLKGFPSFPLVERQANEVDWWDMVCNVKKLINEKKEDGKVFWQNLAGYKRQEALRPYLSSEEDRKKGKKFARYQLGDLLLHLEKKHGEDWGKVYDEAWERIDKKVEGLSKHIKLEEERRSEDAQSKAALTDWLRAKASFVIEGLKEADKDEFCRCELKLQKWYGDLRGKPFAIEAENSILDISGFSKQYNCAFIWQKDGVKKLNLYLIINYFKGGKLRFKKIKPEAFEANRFYTVINKKSGEIVPMEVNFNFDDPNLIILPLAFGKRQGREFIWNDLLSLETGSLKLANGRVIEKTLYNRRTRQDEPALFVALTFERREVLDSSNIKPMNLIGVDRGENIPAVIALTDPEGCPLSRFKDSLGNPTHILRIGESYKEKQRTIQAKKEVEQRRAYGYSRKYASKAKNLADDMVRNTARDLLYYAVTQDAMLIFENLSRGFGRQGKRTFMAERQYTRMEDWLTAKLAYEGLPSKTYLSKTLAQYTSKTCSNCGFTITSADYDRVLEKLKKTATGWMTTINGKELKVEGQITYYNRYKRQNVVKDLSVELDRLSEESVNNDISSWTKGRSGEALSLLKKRFSHRPVQEKFVCLNCGFETHADEQAALNIARSWLFLRSQEYKKYQTNKTTGNTDKRAFVETWQSFYRKKLKEVWKPAV

SEQ ID NO: 26344 - protein, 978 aa, synthetic construct
  REGION 1..978: note = engineered CasX variant
QEIKRINKIRRRLVKDSNTKKAGKTGPMKTLLVRVMTPDLRERLENLRKKPENIPQPISNTSRANLNKLLTDYTEMKKAILHVYWEEFQKDPVGLMSRVAQPASKKIDQNKLKPEMDEKGNLTTAGFACSQCGQPLFVYKLEQVSEKGKAYTNYFGRCNVAEHEKLILLAQLKPEKDSDEAVTYSLGKFGQRALDFYSIHVTKESTHPVKPLAQIAGNRYASGPVGKALSDACMGTIASFLSKYQDIIIEHQKVVKGNQKRLESLRELAGKENLEYPSVTLPPQPHTKEGVDAYNEVIARVRMWVNLNLWQKLKLSRDDAKPLLRLKGFPSFPLVERQANEVDWWDMVCNVKKLINEKKEDGKVFWQNLAGYKRQEALRPYLSSEEDRKKGKKFARYQLGDLLLHLEKKHGEDWGKVYDEAWERIDKKVEGLSKHIKLEEERRSEDAQSKAALTDWLRAKASFVIEGLKEADKDEFCRCELKLQKWYGDLRGKPFAIEAENSILDISGFSKQYNCAFIWQKDGVKKLNLYLIINYFKGGKLRFKKIKPEAFEANRFYTVINKKSGEIVPMEVNFNFDDPNLIILPLAFGKRQGREFIWNDLLSLETGSLKLANGRVIEKTLYNRRTRQDEPALFVALTFERREVLDSSNIKPMNLIGVDRGENIPAVIALTDPEGCPLSRFKDSLGNPTHILRIGESYKEKQRTIQAKKEVEQRRAVGYSRKYASKAKNLADDMVRNTARDLLYYAVTQDAMLIFENLSRGFGRQGKRTFMAERQYTRMEDWLTAKLAYEGLPSKTYLSKTLAQYTSKTCSNCGFTITSADYDRVLEKLKKTATGWMTTINGKELKVEGQITYYNRYKRQNVVKDLSVELDRLSEESVNNDISSWTKGRSGEALSLLKKRFSHRPVQEKFVCLNCGFETHADEQAALNIARSWLFLRSQEYKKYQTNKTTGNTDKRAFVETWQSFYRKKLKEVWKPAV

SEQ ID NO: 26345 - protein, 978 aa, synthetic construct
  REGION 1..978: note = engineered CasX variant
QEIKRINKIRRRLVKDSNTKKAGKTGPMKTLLVRVMTPDLRERLENLRKKPENIPQPISNTSRANLNKLLTDYTEMKKAILHVYWEEFQKDPVGLMSRVAQPASKKIDQNKLKPEMDEKGNLTTAGFACSQCGQPLFVYKLEQVSEKGKAYTNYFGRCNVAEHEKLILLAQLKPEKDSDEAVTYSLGKFGQRALDFYSIHVTKESTHPVKPLAQIAGNRYASGPVGKALSDACMGTIASFLSKYQDIIIEHQKVVKGNQKRLESLRELAGKENLEYPSVTLPPQPHTKEGVDAYNEVIARVRMWVNLNLWQKLKLSRDDAKPLLRLKGFPSFPLVERQANEVDWWDMVCNVKKLINEKKEDGKVFWQNLAGYKRQEALRPYLSSEEDRKKGKKFARYQLGDLLLHLEKKHGEDWGKVYDEAWERIDKKVEGLSKHIKLEEERRSEDAQSKAALTDWLRAKASFVIEGLKEADKDEFCRCELKLQKWYGDLRGKPFAIEAENSILDISGFSKQYNCAFIWQKDGVKKLNLYLIINYFKGGKLRFKKIKPEAFEANRFYTVINKKSGEIVPMEVNFNFDDPNLIILPLAFGKRQGREFIWNDLLSLETGSLKLANGRVIEKTLYNRRTRQDEPALFVALTFERREVLDSSNIKPMNLIGVDRGENIPAVIALTDPEGCPLSRFKDSLGNPTHILRIGESYKEKQRTIQAKKEVEQRRATGYSRKYASKAKNLADDMVRNTARDLLYYAVTQDAMLIFENLSRGFGRQGKRTFMAERQYTRMEDWLTAKLAYEGLPSKTYLSKTLAQYTSKTCSNCGFTITSADYDRVLEKLKKTATGWMTTINGKELKVEGQITYYNRYKRQNVVKDLSVELDRLSEESVNNDISSWTKGRSGEALSLLKKRFSHRPVQEKFVCLNCGFETHADEQAALNIARSWLFLRSQEYKKYQTNKTTGNTDKRAFVETWQSFYRKKLKEVWKPAV

SEQ ID NO: 26346 - protein, 978 aa, synthetic construct
  REGION 1..978: note = engineered CasX variant
QEIKRINKIRRRLVKDSNTKKAGKTGPMKTLLVRVMTPDLRERLENLRKKPENIPQPISNTSRANLNKLLTDYTEMKKAILHVYWEEFQKDPVGLMSRVAQPASKKIDQNKLKPEMDEKGNLTTAGFACSQCGQPLFVYKLEQVSEKGKAYTNYFGRCNVAEHEKLILLAQLKPEKDSDEAVTYSLGKFGQRALDFYSIHVTKESTHPVKPLAQIAGNRYASGPVGKALSDACMGTIASFLSKYQDIIIEHQKVVKGNQKRLESLRELAGKENLEYPSVTLPPQPHTKEGVDAYNEVIARVRMWVNLNLWQKLKLSRDDAKPLLRLKGFPSFPLVERQANEVDWWDMVCNVKKLINEKKEDGKVFWQNLAGYKRQEALRPYLSSEEDRKKGKKFARYQLGDLLLHLEKKHGEDWGKVYDEAWERIDKKVEGLSKHIKLEEERRSEDAQSKAALTDWLRAKASFVIEGLKEADKDEFCRCELKLQKWYGDLRGKPFAIEAENSILDISGFSKQYNCAFIWQKDGVKKLNLYLIINYFKGGKLRFKKIKPEAFEANRFYTVINKKSGEIVPMEVNFNFDDPNLIILPLAFGKRQGREFIWNDLLSLETGSLKLANGRVIEKTLYNRRTRQDEPALFVALTFERREVLDSSNIKPMNLIGVDRGENIPAVIALTDPEGCPLSRFKDSLGNPTHILRIGESYKEKQRTIQAKKEVEQRRAQGYSRKYASKAKNLADDMVRNTARDLLYYAVTQDAMLIFENLSRGFGRQGKRTFMAERQYTRMEDWLTAKLAYEGLPSKTYLSKTLAQYTSKTCSNCGFTITSADYDRVLEKLKKTATGWMTTINGKELKVEGQITYYNRYKRQNVVKDLSVELDRLSEESVNNDISSWTKGRSGEALSLLKKRFSHRPVQEKFVCLNCGFETHADEQAALNIARSWLFLRSQEYKKYQTNKTTGNTDKRAFVETWQSFYRKKLKEVWKPAV

SEQ ID NO: 26347 - protein, 978 aa, synthetic construct
  REGION 1..978: note = engineered CasX variant
QEIKRINKIRRRLVKDSNTKKAGKTGPMKTLLVRVMTPDLRERLENLRKKPENIPQPISNTSRANLNKLLTDYTEMKKAILHVYWEEFQKDPVGLMSRVAQPASKKIDQNKLKPEMDEKGNLTTAGFACSQCGQPLFVYKLEQVSEKGKAYTNYFGRCNVAEHEKLILLAQLKPEKDSDEAVTYSLGKFGQRALDFYSIHVTKESTHPVKPLAQIAGNRYASGPVGKALSDACMGTIASFLSKYQDIIIEHQKVVKGNQKRLESLRELAGKENLEYPSVTLPPQPHTKEGVDAYNEVIARVRMWVNLNLWQKLKLSRDDAKPLLRLKGFPSFPLVERQANEVDWWDMVCNVKKLINEKKEDGKVFWQNLAGYKRQEALRPYLSSEEDRKKGKKFARYQLGDLLLHLEKKHGEDWGKVYDEAWERIDKKVEGLSKHIKLEEERRSEDAQSKAALTDWLRAKASFVIEGLKEADKDEFCRCELKLQKWYGDLRGKPFAIEAENSILDISGFSKQYNCAFIWQKDGVKKLNLYLIINYFKGGKLRFKKIKPEAFEANRFYTVINKKSGEIVPMEVNFNFDDPNLIILPLAFGKRQGREFIWNDLLSLETGSLKLANGRVIEKTLYNRRTRQDEPALFVALTFERREVLDSSNIKPMNLIGVDRGENIPAVIALTDPEGCPLSRFKDSLGNPTHILRIGESYKEKQRTIQAKKEVEQRRAPGYSRKYASKAKNLADDMVRNTARDLLYYAVTQDAMLIFENLSRGFGRQGKRTFMAERQYTRMEDWLTAKLAYEGLPSKTYLSKTLAQYTSKTCSNCGFTITSADYDRVLEKLKKTATGWMTTINGKELKVEGQITYYNRYKRQNVVKDLSVELDRLSEESVNNDISSWTKGRSGEALSLLKKRFSHRPVQEKFVCLNCGFETHADEQAALNIARSWLFLRSQEYKKYQTNKTTGNTDKRAFVETWQSFYRKKLKEVWKPAV

SEQ ID NO: 26348 - protein, 978 aa, synthetic construct
  REGION 1..978: note = engineered CasX variant
QEIKRINKIRRRLVKDSNTKKAGKTGPMKTLLVRVMTPDLRERLENLRKKPENIPQPISNTSRANLNKLLTDYTEMKKAILHVYWEEFQKDPVGLMSRVAQPASKKIDQNKLKPEMDEKGNLTTAGFACSQCGQPLFVYKLEQVSEKGKAYTNYFGRCNVAEHEKLILLAQLKPEKDSDEAVTYSLGKFGQRALDFYSIHVTKESTHPVKPLAQIAGNRYASGPVGKALSDACMGTIASFLSKYQDIIIEHQKVVKGNQKRLESLRELAGKENLEYPSVTLPPQPHTKEGVDAYNEVIARVRMWVNLNLWQKLKLSRDDAKPLLRLKGFPSFPLVERQANEVDWWDMVCNVKKLINEKKEDGKVFWQNLAGYKRQEALRPYLSSEEDRKKGKKFARYQLGDLLLHLEKKHGEDWGKVYDEAWERIDKKVEGLSKHIKLEEERRSEDAQSKAALTDWLRAKASFVIEGLKEADKDEFCRCELKLQKWYGDLRGKPFAIEAENSILDISGFSKQYNCAFIWQKDGVKKLNLYLIINYFKGGKLRFKKIKPEAFEANRFYTVINKKSGEIVPMEVNFNFDDPNLIILPLAFGKRQGREFIWNDLLSLETGSLKLANGRVIEKTLYNRRTRQDEPALFVALTFERREVLDSSNIKPMNLIGVDRGENIPAVIALTDPEGCPLSRFKDSLGNPTHILRIGESYKEKQRTIQAKKEVEQRRANTYSRKYASKAKNLADDMVRNTARDLLYYAVTQDAMLIFENLSRGFGRQGKRTFMAERQYTRMEDWLTAKLAYEGLPSKTYLSKTLAQYTSKTCSNCGFTITSADYDRVLEKLKKTATGWMTTINGKELKVEGQITYYNRYKRQNVVKDLSVELDRLSEESVNNDISSWTKGRSGEALSLLKKRFSHRPVQEKFVCLNCGFETHADEQAALNIARSWLFLRSQEYKKYQTNKTTGNTDKRAFVETWQSFYRKKLKEVWKPAV

SEQ ID NO: 26349 - protein, 978 aa, synthetic construct
  REGION 1..978: note = engineered CasX variant
QEIKRINKIRRRLVKDSNTKKAGKTGPMKTLLVRVMTPDLRERLENLRKKPENIPQPISNTSRANLNKLLTDYTEMKKAILHVYWEEFQKDPVGLMSRVAQPASKKIDQNKLKPEMDEKGNLTTAGFACSQCGQPLFVYKLEQVSEKGKAYTNYFGRCNVAEHEKLILLAQLKPEKDSDEAVTYSLGKFGQRALDFYSIHVTKESTHPVKPLAQIAGNRYASGPVGKALSDACMGTIASFLSKYQDIIIEHQKVVKGNQKRLESLRELAGKENLEYPSVTLPPQPHTKEGVDAYNEVIARVRMWVNLNLWQKLKLSRDDAKPLLRLKGFPSFPLVERQANEVDWWDMVCNVKKLINEKKEDGKVFWQNLAGYKRQEALRPYLSSEEDRKKGKKFARYQLGDLLLHLEKKHGEDWGKVYDEAWERIDKKVEGLSKHIKLEEERRSEDAQSKAALTDWLRAKASFVIEGLKEADKDEFCRCELKLQKWYGDLRGKPFAIEAENSILDISGFSKQYNCAFIWQKDGVKKLNLYLIINYFKGGKLRFKKIKPEAFEANRFYTVINKKSGEIVPMEVNFNFDDPNLIILPLAFGKRQGREFIWNDLLSLETGSLKLANGRVIEKTLYNRRTRQDEPALFVALTFERREVLDSSNIKPMNLIGVDRGENIPAVIALTDPEGCPLSRFKDSLGNPTHILRIGESYKEKQRTIQAKKEVEQRRANGYSRKYASKAKNLADDMVRNTARDLLYYAVTQDAMLIFENLSRGFGRQGKRTFMAERQYTRMEDWLTAKLAYEGLPSKTYLSKTLAQYTSKTCSNCGFTITSADYDRVLEKLKKTATGWMTTINGKELKVEGQITYYNRYKRQNVVKDLSVELDRLSEESVNNDISSWTKGRSGEALSLLKKRFSHRPVQEKFVCLNCGFETHADEQAALNIARSWLFLRSQEYKKYQTNKTTGNTDKRAFVETWQSFYRKKLKEVWKPAV

SEQ ID NO: 26350 - protein, 978 aa, synthetic construct
  REGION 1..978: note = engineered CasX variant
QEIKRINKIRRRLVKDSNTKKAGKTGPMKTLLVRVMTPDLRERLENLRKKPENIPQPISNTSRANLNKLLTDYTEMKKAILHVYWEEFQKDPVGLMSRVAQPASKKIDQNKLKPEMDEKGNLTTAGFACSQCGQPLFVYKLEQVSEKGKAYTNYFGRCNVAEHEKLILLAQLKPEKDSDEAVTYSLGKFGQRALDFYSIHVTKESTHPVKPLAQIAGNRYASGPVGKALSDACMGTIASFLSKYQDIIIEHQKVVKGNQKRLESLRELAGKENLEYPSVTLPPQPHTKEGVDAYNEVIARVRMWVNLNLWQKLKLSRDDAKPLLRLKGFPSFPLVERQANEVDWWDMVCNVKKLINEKKEDGKVFWQNLAGYKRQEALRPYLSSEEDRKKGKKFARYQLGDLLLHLEKKHGEDWGKVYDEAWERIDKKVEGLSKHIKLEEERRSEDAQSKAALTDWLRAKASFVIEGLKEADKDEFCRCELKLQKWYGDLRGKPFAIEAENSILDISGFSKQYNCAFIWQKDGVKKLNLYLIINYFKGGKLRFKKIKPEAFEANRFYTVINKKSGEIVPMEVNFNFDDPNLIILPLAFGKRQGREFIWNDLLSLETGSLKLANGRVIEKTLYNRRTRQDEPALFVALTFERREVLDSSNIKPMNLIGVDRGENIPAVIALTDPEGCPLSRFKDSLGNPTHILRIGESYKEKQRTIQAKKEVEQRRAMMYSRKYASKAKNLADDMVRNTARDLLYYAVTQDAMLIFENLSRGFGRQGKRTFMAERQYTRMEDWLTAKLAYEGLPSKTYLSKTLAQYTSKTCSNCGFTITSADYDRVLEKLKKTATGWMTTINGKELKVEGQITYYNRYKRQNVVKDLSVELDRLSEESVNNDISSWTKGRSGEALSLLKKRFSHRPVQEKFVCLNCGFETHADEQAALNIARSWLFLRSQEYKKYQTNKTTGNTDKRAFVETWQSFYRKKLKEVWKPAV

SEQ ID NO: 26351 - protein, 978 aa, synthetic construct
  REGION 1..978: note = engineered CasX variant
QEIKRINKIRRRLVKDSNTKKAGKTGPMKTLLVRVMTPDLRERLENLRKKPENIPQPISNTSRANLNKLLTDYTEMKKAILHVYWEEFQKDPVGLMSRVAQPASKKIDQNKLKPEMDEKGNLTTAGFACSQCGQPLFVYKLEQVSEKGKAYTNYFGRCNVAEHEKLILLAQLKPEKDSDEAVTYSLGKFGQRALDFYSIHVTKESTHPVKPLAQIAGNRYASGPVGKALSDACMGTIASFLSKYQDIIIEHQKVVKGNQKRLESLRELAGKENLEYPSVTLPPQPHTKEGVDAYNEVIARVRMWVNLNLWQKLKLSRDDAKPLLRLKGFPSFPLVERQANEVDWWDMVCNVKKLINEKKEDGKVFWQNLAGYKRQEALRPYLSSEEDRKKGKKFARYQLGDLLLHLEKKHGEDWGKVYDEAWERIDKKVEGLSKHIKLEEERRSEDAQSKAALTDWLRAKASFVIEGLKEADKDEFCRCELKLQKWYGDLRGKPFAIEAENSILDISGFSKQYNCAFIWQKDGVKKLNLYLIINYFKGGKLRFKKIKPEAFEANRFYTVINKKSGEIVPMEVNFNFDDPNLIILPLAFGKRQGREFIWNDLLSLETGSLKLANGRVIEKTLYNRRTRQDEPALFVALTFERREVLDSSNIKPMNLIGVDRGENIPAVIALTDPEGCPLSRFKDSLGNPTHILRIGESYKEKQRTIQAKKEVEQRRAMGYSRKYASKAKNLADDMVRNTARDLLYYAVTQDAMLIFENLSRGFGRQGKRTFMAERQYTRMEDWLTAKLAYEGLPSKTYLSKTLAQYTSKTCSNCGFTITSADYDRVLEKLKKTATGWMTTINGKELKVEGQITYYNRYKRQNVVKDLSVELDRLSEESVNNDISSWTKGRSGEALSLLKKRFSHRPVQEKFVCLNCGFETHADEQAALNIARSWLFLRSQEYKKYQTNKTTGNTDKRAFVETWQSFYRKKLKEVWKPAV

SEQ ID NO: 26352 - protein, 978 aa, synthetic construct
  REGION 1..978: note = engineered CasX variant
QEIKRINKIRRRLVKDSNTKKAGKTGPMKTLLVRVMTPDLRERLENLRKKPENIPQPISNTSRANLNKLLTDYTEMKKAILHVYWEEFQKDPVGLMSRVAQPASKKIDQNKLKPEMDEKGNLTTAGFACSQCGQPLFVYKLEQVSEKGKAYTNYFGRCNVAEHEKLILLAQLKPEKDSDEAVTYSLGKFGQRALDFYSIHVTKESTHPVKPLAQIAGNRYASGPVGKALSDACMGTIASFLSKYQDIIIEHQKVVKGNQKRLESLRELAGKENLEYPSVTLPPQPHTKEGVDAYNEVIARVRMWVNLNLWQKLKLSRDDAKPLLRLKGFPSFPLVERQANEVDWWDMVCNVKKLINEKKEDGKVFWQNLAGYKRQEALRPYLSSEEDRKKGKKFARYQLGDLLLHLEKKHGEDWGKVYDEAWERIDKKVEGLSKHIKLEEERRSEDAQSKAALTDWLRAKASFVIEGLKEADKDEFCRCELKLQKWYGDLRGKPFAIEAENSILDISGFSKQYNCAFIWQKDGVKKLNLYLIINYFKGGKLRFKKIKPEAFEANRFYTVINKKSGEIVPMEVNFNFDDPNLIILPLAFGKRQGREFIWNDLLSLETGSLKLANGRVIEKTLYNRRTRQDEPALFVALTFERREVLDSSNIKPMNLIGVDRGENIPAVIALTDPEGCPLSRFKDSLGNPTHILRIGESYKEKQRTIQAKKEVEQRRALGYSRKYASKAKNLADDMVRNTARDLLYYAVTQDAMLIFENLSRGFGRQGKRTFMAERQYTRMEDWLTAKLAYEGLPSKTYLSKTLAQYTSKTCSNCGFTITSADYDRVLEKLKKTATGWMTTINGKELKVEGQITYYNRYKRQNVVKDLSVELDRLSEESVNNDISSWTKGRSGEALSLLKKRFSHRPVQEKFVCLNCGFETHADEQAALNIARSWLFLRSQEYKKYQTNKTTGNTDKRAFVETWQSFYRKKLKEVWKPAV

SEQ ID NO: 26353 - protein, 978 aa, synthetic construct
  REGION 1..978: note = engineered CasX variant
QEIKRINKIRRRLVKDSNTKKAGKTGPMKTLLVRVMTPDLRERLENLRKKPENIPQPISNTSRANLNKLLTDYTEMKKAILHVYWEEFQKDPVGLMSRVAQPASKKIDQNKLKPEMDEKGNLTTAGFACSQCGQPLFVYKLEQVSEKGKAYTNYFGRCNVAEHEKLILLAQLKPEKDSDEAVTYSLGKFGQRALDFYSIHVTKESTHPVKPLAQIAGNRYASGPVGKALSDACMGTIASFLSKYQDIIIEHQKVVKGNQKRLESLRELAGKENLEYPSVTLPPQPHTKEGVDAYNEVIARVRMWVNLNLWQKLKLSRDDAKPLLRLKGFPSFPLVERQANEVDWWDMVCNVKKLINEKKEDGKVFWQNLAGYKRQEALRPYLSSEEDRKKGKKFARYQLGDLLLHLEKKHGEDWGKVYDEAWERIDKKVEGLSKHIKLEEERRSEDAQSKAALTDWLRAKASFVIEGLKEADKDEFCRCELKLQKWYGDLRGKPFAIEAENSILDISGFSKQYNCAFIWQKDGVKKLNLYLIINYFKGGKLRFKKIKPEAFEANRFYTVINKKSGEIVPMEVNFNFDDPNLIILPLAFGKRQGREFIWNDLLSLETGSLKLANGRVIEKTLYNRRTRQDEPALFVALTFERREVLDSSNIKPMNLIGVDRGENIPAVIALTDPEGCPLSRFKDSLGNPTHILRIGESYKEKQRTIQAKKEVEQRRAIGYSRKYASKAKNLADDMVRNTARDLLYYAVTQDAMLIFENLSRGFGRQGKRTFMAERQYTRMEDWLTAKLAYEGLPSKTYLSKTLAQYTSKTCSNCGFTITSADYDRVLEKLKKTATGWMTTINGKELKVEGQITYYNRYKRQNVVKDLSVELDRLSEESVNNDISSWTKGRSGEALSLLKKRFSHRPVQEKFVCLNCGFETHADEQAALNIARSWLFLRSQEYKKYQTNKTTGNTDKRAFVETWQSFYRKKLKEVWKPAV

SEQ ID NO: 26354 - protein, 978 aa, synthetic construct
  REGION 1..978: note = engineered CasX variant
QEIKRINKIRRRLVKDSNTKKAGKTGPMKTLLVRVMTPDLRERLENLRKKPENIPQPISNTSRANLNKLLTDYTEMKKAILHVYWEEFQKDPVGLMSRVAQPASKKIDQNKLKPEMDEKGNLTTAGFACSQCGQPLFVYKLEQVSEKGKAYTNYFGRCNVAEHEKLILLAQLKPEKDSDEAVTYSLGKFGQRALDFYSIHVTKESTHPVKPLAQIAGNRYASGPVGKALSDACMGTIASFLSKYQDIIIEHQKVVKGNQKRLESLRELAGKENLEYPSVTLPPQPHTKEGVDAYNEVIARVRMWVNLNLWQKLKLSRDDAKPLLRLKGFPSFPLVERQANEVDWWDMVCNVKKLINEKKEDGKVFWQNLAGYKRQEALRPYLSSEEDRKKGKKFARYQLGDLLLHLEKKHGEDWGKVYDEAWERIDKKVEGLSKHIKLEEERRSEDAQSKAALTDWLRAKASFVIEGLKEADKDEFCRCELKLQKWYGDLRGKPFAIEAENSILDISGFSKQYNCAFIWQKDGVKKLNLYLIINYFKGGKLRFKKIKPEAFEANRFYTVINKKSGEIVPMEVNFNFDDPNLIILPLAFGKRQGREFIWNDLLSLETGSLKLANGRVIEKTLYNRRTRQDEPALFVALTFERREVLDSSNIKPMNLIGVDRGENIPAVIALTDPEGCPLSRFKDSLGNPTHILRIGESYKEKQRTIQAKKEVEQRRAHGYSRKYASKAKNLADDMVRNTARDLLYYAVTQDAMLIFENLSRGFGRQGKRTFMAERQYTRMEDWLTAKLAYEGLPSKTYLSKTLAQYTSKTCSNCGFTITSADYDRVLEKLKKTATGWMTTINGKELKVEGQITYYNRYKRQNVVKDLSVELDRLSEESVNNDISSWTKGRSGEALSLLKKRFSHRPVQEKFVCLNCGFETHADEQAALNIARSWLFLRSQEYKKYQTNKTTGNTDKRAFVETWQSFYRKKLKEVWKPAV

SEQ ID NO: 26355 - protein, 978 aa, synthetic construct
  REGION 1..978: note = engineered CasX variant
QEIKRINKIRRRLVKDSNTKKAGKTGPMKTLLVRVMTPDLRERLENLRKKPENIPQPISNTSRANLNKLLTDYTEMKKAILHVYWEEFQKDPVGLMSRVAQPASKKIDQNKLKPEMDEKGNLTTAGFACSQCGQPLFVYKLEQVSEKGKAYTNYFGRCNVAEHEKLILLAQLKPEKDSDEAVTYSLGKFGQRALDFYSIHVTKESTHPVKPLAQIAGNRYASGPVGKALSDACMGTIASFLSKYQDIIIEHQKVVKGNQKRLESLRELAGKENLEYPSVTLPPQPHTKEGVDAYNEVIARVRMWVNLNLWQKLKLSRDDAKPLLRLKGFPSFPLVERQANEVDWWDMVCNVKKLINEKKEDGKVFWQNLAGYKRQEALRPYLSSEEDRKKGKKFARYQLGDLLLHLEKKHGEDWGKVYDEAWERIDKKVEGLSKHIKLEEERRSEDAQSKAALTDWLRAKASFVIEGLKEADKDEFCRCELKLQKWYGDLRGKPFAIEAENSILDISGFSKQYNCAFIWQKDGVKKLNLYLIINYFKGGKLRFKKIKPEAFEANRFYTVINKKSGEIVPMEVNFNFDDPNLIILPLAFGKRQGREFIWNDLLSLETGSLKLANGRVIEKTLYNRRTRQDEPALFVALTFERREVLDSSNIKPMNLIGVDRGENIPAVIALTDPEGCPLSRFKDSLGNPTHILRIGESYKEKQRTIQAKKEVEQRRAGYYSRKYASKAKNLADDMVRNTARDLLYYAVTQDAMLIFENLSRGFGRQGKRTFMAERQYTRMEDWLTAKLAYEGLPSKTYLSKTLAQYTSKTCSNCGFTITSADYDRVLEKLKKTATGWMTTINGKELKVEGQITYYNRYKRQNVVKDLSVELDRLSEESVNNDISSWTKGRSGEALSLLKKRFSHRPVQEKFVCLNCGFETHADEQAALNIARSWLFLRSQEYKKYQTNKTTGNTDKRAFVETWQSFYRKKLKEVWKPAV

SEQ ID NO: 26356 - protein, 978 aa, synthetic construct
  REGION 1..978: note = engineered CasX variant
QEIKRINKIRRRLVKDSNTKKAGKTGPMKTLLVRVMTPDLRERLENLRKKPENIPQPISNTSRANLNKLLTDYTEMKKAILHVYWEEFQKDPVGLMSRVAQPASKKIDQNKLKPEMDEKGNLTTAGFACSQCGQPLFVYKLEQVSEKGKAYTNYFGRCNVAEHEKLILLAQLKPEKDSDEAVTYSLGKFGQRALDFYSIHVTKESTHPVKPLAQIAGNRYASGPVGKALSDACMGTIASFLSKYQDIIIEHQKVVKGNQKRLESLRELAGKENLEYPSVTLPPQPHTKEGVDAYNEVIARVRMWVNLNLWQKLKLSRDDAKPLLRLKGFPSFPLVERQANEVDWWDMVCNVKKLINEKKEDGKVFWQNLAGYKRQEALRPYLSSEEDRKKGKKFARYQLGDLLLHLEKKHGEDWGKVYDEAWERIDKKVEGLSKHIKLEEERRSEDAQSKAALTDWLRAKASFVIEGLKEADKDEFCRCELKLQKWYGDLRGKPFAIEAENSILDISGFSKQYNCAFIWQKDGVKKLNLYLIINYFKGGKLRFKKIKPEAFEANRFYTVINKKSGEIVPMEVNFNFDDPNLIILPLAFGKRQGREFIWNDLLSLETGSLKLANGRVIEKTLYNRRTRQDEPALFVALTFERREVLDSSNIKPMNLIGVDRGENIPAVIALTDPEGCPLSRFKDSLGNPTHILRIGESYKEKQRTIQAKKEVEQRRAGWYSRKYASKAKNLADDMVRNTARDLLYYAVTQDAMLIFENLSRGFGRQGKRTFMAERQYTRMEDWLTAKLAYEGLPSKTYLSKTLAQYTSKTCSNCGFTITSADYDRVLEKLKKTATGWMTTINGKELKVEGQITYYNRYKRQNVVKDLSVELDRLSEESVNNDISSWTKGRSGEALSLLKKRFSHRPVQEKFVCLNCGFETHADEQAALNIARSWLFLRSQEYKKYQTNKTTGNTDKRAFVETWQSFYRKKLKEVWKPAV

SEQ ID NO: 26357 - protein, 978 aa, synthetic construct
  REGION 1..978: note = engineered CasX variant
QEIKRINKIRRRLVKDSNTKKAGKTGPMKTLLVRVMTPDLRERLENLRKKPENIPQPISNTSRANLNKLLTDYTEMKKAILHVYWEEFQKDPVGLMSRVAQPASKKIDQNKLKPEMDEKGNLTTAGFACSQCGQPLFVYKLEQVSEKGKAYTNYFGRCNVAEHEKLILLAQLKPEKDSDEAVTYSLGKFGQRALDFYSIHVTKESTHPVKPLAQIAGNRYASGPVGKALSDACMGTIASFLSKYQDIIIEHQKVVKGNQKRLESLRELAGKENLEYPSVTLPPQPHTKEGVDAYNEVIARVRMWVNLNLWQKLKLSRDDAKPLLRLKGFPSFPLVERQANEVDWWDMVCNVKKLINEKKEDGKVFWQNLAGYKRQEALRPYLSSEEDRKKGKKFARYQLGDLLLHLEKKHGEDWGKVYDEAWERIDKKVEGLSKHIKLEEERRSEDAQSKAALTDWLRAKASFVIEGLKEADKDEFCRCELKLQKWYGDLRGKPFAIEAENSILDISGFSKQYNCAFIWQKDGVKKLNLYLIINYFKGGKLRFKKIKPEAFEANRFYTVINKKSGEIVPMEVNFNFDDPNLIILPLAFGKRQGREFIWNDLLSLETGSLKLANGRVIEKTLYNRRTRQDEPALFVALTFERREVLDSSNIKPMNLIGVDRGENIPAVIALTDPEGCPLSRFKDSLGNPTHILRIGESYKEKQRTIQAKKEVEQRRAGVYSRKYASKAKNLADDMVRNTARDLLYYAVTQDAMLIFENLSRGFGRQGKRTFMAERQYTRMEDWLTAKLAYEGLPSKTYLSKTLAQYTSKTCSNCGFTITSADYDRVLEKLKKTATGWMTTINGKELKVEGQITYYNRYKRQNVVKDLSVELDRLSEESVNNDISSWTKGRSGEALSLLKKRFSHRPVQEKFVCLNCGFETHADEQAALNIARSWLFLRSQEYKKYQTNKTTGNTDKRAFVETWQSFYRKKLKEVWKPAV

SEQ ID NO: 26358 - protein, 978 aa, synthetic construct
  REGION 1..978: note = engineered CasX variant
QEIKRINKIRRRLVKDSNTKKAGKTGPMKTLLVRVMTPDLRERLENLRKKPENIPQPISNTSRANLNKLLTDYTEMKKAILHVYWEEFQKDPVGLMSRVAQPASKKIDQNKLKPEMDEKGNLTTAGFACSQCGQPLFVYKLEQVSEKGKAYTNYFGRCNVAEHEKLILLAQLKPEKDSDEAVTYSLGKFGQRALDFYSIHVTKESTHPVKPLAQIAGNRYASGPVGKALSDACMGTIASFLSKYQDIIIEHQKVVKGNQKRLESLRELAGKENLEYPSVTLPPQPHTKEGVDAYNEVIARVRMWVNLNLWQKLKLSRDDAKPLLRLKGFPSFPLVERQANEVDWWDMVCNVKKLINEKKEDGKVFWQNLAGYKRQEALRPYLSSEEDRKKGKKFARYQLGDLLLHLEKKHGEDWGKVYDEAWERIDKKVEGLSKHIKLEEERRSEDAQSKAALTDWLRAKASFVIEGLKEADKDEFCRCELKLQKWYGDLRGKPFAIEAENSILDISGFSKQYNCAFIWQKDGVKKLNLYLIINYFKGGKLRFKKIKPEAFEANRFYTVINKKSGEIVPMEVNFNFDDPNLIILPLAFGKRQGREFIWNDLLSLETGSLKLANGRVIEKTLYNRRTRQDEPALFVALTFERREVLDSSNIKPMNLIGVDRGENIPAVIALTDPEGCPLSRFKDSLGNPTHILRIGESYKEKQRTIQAKKEVEQRRAGTYSRKYASKAKNLADDMVRNTARDLLYYAVTQDAMLIFENLSRGFGRQGKRTFMAERQYTRMEDWLTAKLAYEGLPSKTYLSKTLAQYTSKTCSNCGFTITSADYDRVLEKLKKTATGWMTTINGKELKVEGQITYYNRYKRQNVVKDLSVELDRLSEESVNNDISSWTKGRSGEALSLLKKRFSHRPVQEKFVCLNCGFETHADEQAALNIARSWLFLRSQEYKKYQTNKTTGNTDKRAFVETWQSFYRKKLKEVWKPAV

SEQ ID NO: 26359 - protein, 978 aa, synthetic construct
  REGION 1..978: note = engineered CasX variant
QEIKRINKIRRRLVKDSNTKKAGKTGPMKTLLVRVMTPDLRERLENLRKKPENIPQPISNTSRANLNKLLTDYTEMKKAILHVYWEEFQKDPVGLMSRVAQPASKKIDQNKLKPEMDEKGNLTTAGFACSQCGQPLFVYKLEQVSEKGKAYTNYFGRCNVAEHEKLILLAQLKPEKDSDEAVTYSLGKFGQRALDFYSIHVTKESTHPVKPLAQIAGNRYASGPVGKALSDACMGTIASFLSKYQDIIIEHQKVVKGNQKRLESLRELAGKENLEYPSVTLPPQPHTKEGVDAYNEVIARVRMWVNLNLWQKLKLSRDDAKPLLRLKGFPSFPLVERQANEVDWWDMVCNVKKLINEKKEDGKVFWQNLAGYKRQEALRPYLSSEEDRKKGKKFARYQLGDLLLHLEKKHGEDWGKVYDEAWERIDKKVEGLSKHIKLEEERRSEDAQSKAALTDWLRAKASFVIEGLKEADKDEFCRCELKLQKWYGDLRGKPFAIEAENSILDISGFSKQYNCAFIWQKDGVKKLNLYLIINYFKGGKLRFKKIKPEAFEANRFYTVINKKSGEIVPMEVNFNFDDPNLIILPLAFGKRQGREFIWNDLLSLETGSLKLANGRVIEKTLYNRRTRQDEPALFVALTFERREVLDSSNIKPMNLIGVDRGENIPAVIALTDPEGCPLSRFKDSLGNPTHILRIGESYKEKQRTIQAKKEVEQRRAGRYSRKYASKAKNLADDMVRNTARDLLYYAVTQDAMLIFENLSRGFGRQGKRTFMAERQYTRMEDWLTAKLAYEGLPSKTYLSKTLAQYTSKTCSNCGFTITSADYDRVLEKLKKTATGWMTTINGKELKVEGQITYYNRYKRQNVVKDLSVELDRLSEESVNNDISSWTKGRSGEALSLLKKRFSHRPVQEKFVCLNCGFETHADEQAALNIARSWLFLRSQEYKKYQTNKTTGNTDKRAFVETWQSFYRKKLKEVWKPAV

SEQ ID NO: 26360 - protein, 978 aa, synthetic construct
  REGION 1..978: note = engineered CasX variant
QEIKRINKIRRRLVKDSNTKKAGKTGPMKTLLVRVMTPDLRERLENLRKKPENIPQPISNTSRANLNKLLTDYTEMKKAILHVYWEEFQKDPVGLMSRVAQPASKKIDQNKLKPEMDEKGNLTTAGFACSQCGQPLFVYKLEQVSEKGKAYTNYFGRCNVAEHEKLILLAQLKPEKDSDEAVTYSLGKFGQRALDFYSIHVTKESTHPVKPLAQIAGNRYASGPVGKALSDACMGTIASFLSKYQDIIIEHQKVVKGNQKRLESLRELAGKENLEYPSVTLPPQPHTKEGVDAYNEVIARVRMWVNLNLWQKLKLSRDDAKPLLRLKGFPSFPLVERQANEVDWWDMVCNVKKLINEKKEDGKVFWQNLAGYKRQEALRPYLSSEEDRKKGKKFARYQLGDLLLHLEKKHGEDWGKVYDEAWERIDKKVEGLSKHIKLEEERRSEDAQSKAALTDWLRAKASFVIEGLKEADKDEFCRCELKLQKWYGDLRGKPFAIEAENSILDISGFSKQYNCAFIWQKDGVKKLNLYLIINYFKGGKLRFKKIKPEAFEANRFYTVINKKSGEIVPMEVNFNFDDPNLIILPLAFGKRQGREFIWNDLLSLETGSLKLANGRVIEKTLYNRRTRQDEPALFVALTFERREVLDSSNIKPMNLIGVDRGENIPAVIALTDPEGCPLSRFKDSLGNPTHILRIGESYKEKQRTIQAKKEVEQRRAGQYSRKYASKAKNLADDMVRNTARDLLYYAVTQDAMLIFENLSRGFGRQGKRTFMAERQYTRMEDWLTAKLAYEGLPSKTYLSKTLAQYTSKTCSNCGFTITSADYDRVLEKLKKTATGWMTTINGKELKVEGQITYYNRYKRQNVVKDLSVELDRLSEESVNNDISSWTKGRSGEALSLLKKRFSHRPVQEKFVCLNCGFETHADEQAALNIARSWLFLRSQEYKKYQTNKTTGNTDKRAFVETWQSFYRKKLKEVWKPAV

SEQ ID NO: 26361 - protein, 978 aa, synthetic construct
  REGION 1..978: note = engineered CasX variant
QEIKRINKIRRRLVKDSNTKKAGKTGPMKTLLVRVMTPDLRERLENLRKKPENIPQPISNTSRANLNKLLTDYTEMKKAILHVYWEEFQKDPVGLMSRVAQPASKKIDQNKLKPEMDEKGNLTTAGFACSQCGQPLFVYKLEQVSEKGKAYTNYFGRCNVAEHEKLILLAQLKPEKDSDEAVTYSLGKFGQRALDFYSIHVTKESTHPVKPLAQIAGNRYASGPVGKALSDACMGTIASFLSKYQDIIIEHQKVVKGNQKRLESLRELAGKENLEYPSVTLPPQPHTKEGVDAYNEVIARVRMWVNLNLWQKLKLSRDDAKPLLRLKGFPSFPLVERQANEVDWWDMVCNVKKLINEKKEDGKVFWQNLAGYKRQEALRPYLSSEEDRKKGKKFARYQLGDLLLHLEKKHGEDWGKVYDEAWERIDKKVEGLSKHIKLEEERRSEDAQSKAALTDWLRAKASFVIEGLKEADKDEFCRCELKLQKWYGDLRGKPFAIEAENSILDISGFSKQYNCAFIWQKDGVKKLNLYLIINYFKGGKLRFKKIKPEAFEANRFYTVINKKSGEIVPMEVNFNFDDPNLIILPLAFGKRQGREFIWNDLLSLETGSLKLANGRVIEKTLYNRRTRQDEPALFVALTFERREVLDSSNIKPMNLIGVDRGENIPAVIALTDPEGCPLSRFKDSLGNPTHILRIGESYKEKQRTIQAKKEVEQRRAGPYSRKYASKAKNLADDMVRNTARDLLYYAVTQDAMLIFENLSRGFGRQGKRTFMAERQYTRMEDWLTAKLAYEGLPSKTYLSKTLAQYTSKTCSNCGFTITSADYDRVLEKLKKTATGWMTTINGKELKVEGQITYYNRYKRQNVVKDLSVELDRLSEESVNNDISSWTKGRSGEALSLLKKRFSHRPVQEKFVCLNCGFETHADEQAALNIARSWLFLRSQEYKKYQTNKTTGNTDKRAFVETWQSFYRKKLKEVWKPAV

SEQ ID NO: 26362 - protein, 978 aa, synthetic construct
  REGION 1..978: note = engineered CasX variant
QEIKRINKIRRRLVKDSNTKKAGKTGPMKTLLVRVMTPDLRERLENLRKKPENIPQPISNTSRANLNKLLTDYTEMKKAILHVYWEEFQKDPVGLMSRVAQPASKKIDQNKLKPEMDEKGNLTTAGFACSQCGQPLFVYKLEQVSEKGKAYTNYFGRCNVAEHEKLILLAQLKPEKDSDEAVTYSLGKFGQRALDFYSIHVTKESTHPVKPLAQIAGNRYASGPVGKALSDACMGTIASFLSKYQDIIIEHQKVVKGNQKRLESLRELAGKENLEYPSVTLPPQPHTKEGVDAYNEVIARVRMWVNLNLWQKLKLSRDDAKPLLRLKGFPSFPLVERQANEVDWWDMVCNVKKLINEKKEDGKVFWQNLAGYKRQEALRPYLSSEEDRKKGKKFARYQLGDLLLHLEKKHGEDWGKVYDEAWERIDKKVEGLSKHIKLEEERRSEDAQSKAALTDWLRAKASFVIEGLKEADKDEFCRCELKLQKWYGDLRGKPFAIEAENSILDISGFSKQYNCAFIWQKDGVKKLNLYLIINYFKGGKLRFKKIKPEAFEANRFYTVINKKSGEIVPMEVNFNFDDPNLIILPLAFGKRQGREFIWNDLLSLETGSLKLANGRVIEKTLYNRRTRQDEPALFVALTFERREVLDSSNIKPMNLIGVDRGENIPAVIALTDPEGCPLSRFKDSLGNPTHILRIGESYKEKQRTIQAKKEVEQRRAGNYSRKYASKAKNLADDMVRNTARDLLYYAVTQDAMLIFENLSRGFGRQGKRTFMAERQYTRMEDWLTAKLAYEGLPSKTYLSKTLAQYTSKTCSNCGFTITSADYDRVLEKLKKTATGWMTTINGKELKVEGQITYYNRYKRQNVVKDLSVELDRLSEESVNNDISSWTKGRSGEALSLLKKRFSHRPVQEKFVCLNCGFETHADEQAALNIARSWLFLRSQEYKKYQTNKTTGNTDKRAFVETWQSFYRKKLKEVWKPAV

SEQ ID NO: 26363 - protein, 978 aa, synthetic construct
  REGION 1..978: note = engineered CasX variant
QEIKRINKIRRRLVKDSNTKKAGKTGPMKTLLVRVMTPDLRERLENLRKKPENIPQPISNTSRANLNKLLTDYTEMKKAILHVYWEEFQKDPVGLMSRVAQPASKKIDQNKLKPEMDEKGNLTTAGFACSQCGQPLFVYKLEQVSEKGKAYTNYFGRCNVAEHEKLILLAQLKPEKDSDEAVTYSLGKFGQRALDFYSIHVTKESTHPVKPLAQIAGNRYASGPVGKALSDACMGTIASFLSKYQDIIIEHQKVVKGNQKRLESLRELAGKENLEYPSVTLPPQPHTKEGVDAYNEVIARVRMWVNLNLWQKLKLSRDDAKPLLRLKGFPSFPLVERQANEVDWWDMVCNVKKLINEKKEDGKVFWQNLAGYKRQEALRPYLSSEEDRKKGKKFARYQLGDLLLHLEKKHGEDWGKVYDEAWERIDKKVEGLSKHIKLEEERRSEDAQSKAALTDWLRAKASFVIEGLKEADKDEFCRCELKLQKWYGDLRGKPFAIEAENSILDISGFSKQYNCAFIWQKDGVKKLNLYLIINYFKGGKLRFKKIKPEAFEANRFYTVINKKSGEIVPMEVNFNFDDPNLIILPLAFGKRQGREFIWNDLLSLETGSLKLANGRVIEKTLYNRRTRQDEPALFVALTFERREVLDSSNIKPMNLIGVDRGENIPAVIALTDPEGCPLSRFKDSLGNPTHILRIGESYKEKQRTIQAKKEVEQRRAGMYSRKYASKAKNLADDMVRNTARDLLYYAVTQDAMLIFENLSRGFGRQGKRTFMAERQYTRMEDWLTAKLAYEGLPSKTYLSKTLAQYTSKTCSNCGFTITSADYDRVLEKLKKTATGWMTTINGKELKVEGQITYYNRYKRQNVVKDLSVELDRLSEESVNNDISSWTKGRSGEALSLLKKRFSHRPVQEKFVCLNCGFETHADEQAALNIARSWLFLRSQEYKKYQTNKTTGNTDKRAFVETWQSFYRKKLKEVWKPAV

SEQ ID NO: 26364 - protein, 978 aa, synthetic construct
  REGION 1..978: note = engineered CasX variant
QEIKRINKIRRRLVKDSNTKKAGKTGPMKTLLVRVMTPDLRERLENLRKKPENIPQPISNTSRANLNKLLTDYTEMKKAILHVYWEEFQKDPVGLMSRVAQPASKKIDQNKLKPEMDEKGNLTTAGFACSQCGQPLFVYKLEQVSEKGKAYTNYFGRCNVAEHEKLILLAQLKPEKDSDEAVTYSLGKFGQRALDFYSIHVTKESTHPVKPLAQIAGNRYASGPVGKALSDACMGTIASFLSKYQDIIIEHQKVVKGNQKRLESLRELAGKENLEYPSVTLPPQPHTKEGVDAYNEVIARVRMWVNLNLWQKLKLSRDDAKPLLRLKGFPSFPLVERQANEVDWWDMVCNVKKLINEKKEDGKVFWQNLAGYKRQEALRPYLSSEEDRKKGKKFARYQLGDLLLHLEKKHGEDWGKVYDEAWERIDKKVEGLSKHIKLEEERRSEDAQSKAALTDWLRAKASFVIEGLKEADKDEFCRCELKLQKWYGDLRGKPFAIEAENSILDISGFSKQYNCAFIWQKDGVKKLNLYLIINYFKGGKLRFKKIKPEAFEANRFYTVINKKSGEIVPMEVNFNFDDPNLIILPLAFGKRQGREFIWNDLLSLETGSLKLANGRVIEKTLYNRRTRQDEPALFVALTFERREVLDSSNIKPMNLIGVDRGENIPAVIALTDPEGCPLSRFKDSLGNPTHILRIGESYKEKQRTIQAKKEVEQRRAGLYSRKYASKAKNLADDMVRNTARDLLYYAVTQDAMLIFENLSRGFGRQGKRTFMAERQYTRMEDWLTAKLAYEGLPSKTYLSKTLAQYTSKTCSNCGFTITSADYDRVLEKLKKTATGWMTTINGKELKVEGQITYYNRYKRQNVVKDLSVELDRLSEESVNNDISSWTKGRSGEALSLLKKRFSHRPVQEKFVCLNCGFETHADEQAALNIARSWLFLRSQEYKKYQTNKTTGNTDKRAFVETWQSFYRKKLKEVWKPAV

SEQ ID NO: 26365 - protein, 978 aa, synthetic construct
  REGION 1..978: note = engineered CasX variant
QEIKRINKIRRRLVKDSNTKKAGKTGPMKTLLVRVMTPDLRERLENLRKKPENIPQPISNTSRANLNKLLTDYTEMKKAILHVYWEEFQKDPVGLMSRVAQPASKKIDQNKLKPEMDEKGNLTTAGFACSQCGQPLFVYKLEQVSEKGKAYTNYFGRCNVAEHEKLILLAQLKPEKDSDEAVTYSLGKFGQRALDFYSIHVTKESTHPVKPLAQIAGNRYASGPVGKALSDACMGTIASFLSKYQDIIIEHQKVVKGNQKRLESLRELAGKENLEYPSVTLPPQPHTKEGVDAYNEVIARVRMWVNLNLWQKLKLSRDDAKPLLRLKGFPSFPLVERQANEVDWWDMVCNVKKLINEKKEDGKVFWQNLAGYKRQEALRPYLSSEEDRKKGKKFARYQLGDLLLHLEKKHGEDWGKVYDEAWERIDKKVEGLSKHIKLEEERRSEDAQSKAALTDWLRAKASFVIEGLKEADKDEFCRCELKLQKWYGDLRGKPFAIEAENSILDISGFSKQYNCAFIWQKDGVKKLNLYLIINYFKGGKLRFKKIKPEAFEANRFYTVINKKSGEIVPMEVNFNFDDPNLIILPLAFGKRQGREFIWNDLLSLETGSLKLANGRVIEKTLYNRRTRQDEPALFVALTFERREVLDSSNIKPMNLIGVDRGENIPAVIALTDPEGCPLSRFKDSLGNPTHILRIGESYKEKQRTIQAKKEVEQRRAGKYSRKYASKAKNLADDMVRNTARDLLYYAVTQDAMLIFENLSRGFGRQGKRTFMAERQYTRMEDWLTAKLAYEGLPSKTYLSKTLAQYTSKTCSNCGFTITSADYDRVLEKLKKTATGWMTTINGKELKVEGQITYYNRYKRQNVVKDLSVELDRLSEESVNNDISSWTKGRSGEALSLLKKRFSHRPVQEKFVCLNCGFETHADEQAALNIARSWLFLRSQEYKKYQTNKTTGNTDKRAFVETWQSFYRKKLKEVWKPAV

SEQ ID NO: 26366 - protein, 978 aa, synthetic construct
  REGION 1..978: note = engineered CasX variant
QEIKRINKIRRRLVKDSNTKKAGKTGPMKTLLVRVMTPDLRERLENLRKKPENIPQPISNTSRANLNKLLTDYTEMKKAILHVYWEEFQKDPVGLMSRVAQPASKKIDQNKLKPEMDEKGNLTTAGFACSQCGQPLFVYKLEQVSEKGKAYTNYFGRCNVAEHEKLILLAQLKPEKDSDEAVTYSLGKFGQRALDFYSIHVTKESTHPVKPLAQIAGNRYASGPVGKALSDACMGTIASFLSKYQDIIIEHQKVVKGNQKRLESLRELAGKENLEYPSVTLPPQPHTKEGVDAYNEVIARVRMWVNLNLWQKLKLSRDDAKPLLRLKGFPSFPLVERQANEVDWWDMVCNVKKLINEKKEDGKVFWQNLAGYKRQEALRPYLSSEEDRKKGKKFARYQLGDLLLHLEKKHGEDWGKVYDEAWERIDKKVEGLSKHIKLEEERRSEDAQSKAALTDWLRAKASFVIEGLKEADKDEFCRCELKLQKWYGDLRGKPFAIEAENSILDISGFSKQYNCAFIWQKDGVKKLNLYLIINYFKGGKLRFKKIKPEAFEANRFYTVINKKSGEIVPMEVNFNFDDPNLIILPLAFGKRQGREFIWNDLLSLETGSLKLANGRVIEKTLYNRRTRQDEPALFVALTFERREVLDSSNIKPMNLIGVDRGENIPAVIALTDPEGCPLSRFKDSLGNPTHILRIGESYKEKQRTIQAKKEVEQRRAGIYSRKYASKAKNLADDMVRNTARDLLYYAVTQDAMLIFENLSRGFGRQGKRTFMAERQYTRMEDWLTAKLAYEGLPSKTYLSKTLAQYTSKTCSNCGFTITSADYDRVLEKLKKTATGWMTTINGKELKVEGQITYYNRYKRQNVVKDLSVELDRLSEESVNNDISSWTKGRSGEALSLLKKRFSHRPVQEKFVCLNCGFETHADEQAALNIARSWLFLRSQEYKKYQTNKTTGNTDKRAFVETWQSFYRKKLKEVWKPAV

SEQ ID NO: 26367 - protein, 978 aa, synthetic construct
  REGION 1..978: note = engineered CasX variant
QEIKRINKIRRRLVKDSNTKKAGKTGPMKTLLVRVMTPDLRERLENLRKKPENIPQPISNTSRANLNKLLTDYTEMKKAILHVYWEEFQKDPVGLMSRVAQPASKKIDQNKLKPEMDEKGNLTTAGFACSQCGQPLFVYKLEQVSEKGKAYTNYFGRCNVAEHEKLILLAQLKPEKDSDEAVTYSLGKFGQRALDFYSIHVTKESTHPVKPLAQIAGNRYASGPVGKALSDACMGTIASFLSKYQDIIIEHQKVVKGNQKRLESLRELAGKENLEYPSVTLPPQPHTKEGVDAYNEVIARVRMWVNLNLWQKLKLSRDDAKPLLRLKGFPSFPLVERQANEVDWWDMVCNVKKLINEKKEDGKVFWQNLAGYKRQEALRPYLSSEEDRKKGKKFARYQLGDLLLHLEKKHGEDWGKVYDEAWERIDKKVEGLSKHIKLEEERRSEDAQSKAALTDWLRAKASFVIEGLKEADKDEFCRCELKLQKWYGDLRGKPFAIEAENSILDISGFSKQYNCAFIWQKDGVKKLNLYLIINYFKGGKLRFKKIKPEAFEANRFYTVINKKSGEIVPMEVNFNFDDPNLIILPLAFGKRQGREFIWNDLLSLETGSLKLANGRVIEKTLYNRRTRQDEPALFVALTFERREVLDSSNIKPMNLIGVDRGENIPAVIALTDPEGCPLSRFKDSLGNPTHILRIGESYKEKQRTIQAKKEVEQRRAGFYSRKYASKAKNLADDMVRNTARDLLYYAVTQDAMLIFENLSRGFGRQGKRTFMAERQYTRMEDWLTAKLAYEGLPSKTYLSKTLAQYTSKTCSNCGFTITSADYDRVLEKLKKTATGWMTTINGKELKVEGQITYYNRYKRQNVVKDLSVELDRLSEESVNNDISSWTKGRSGEALSLLKKRFSHRPVQEKFVCLNCGFETHADEQAALNIARSWLFLRSQEYKKYQTNKTTGNTDKRAFVETWQSFYRKKLKEVWKPAV

SEQ ID NO: 26368 - protein, 978 aa, synthetic construct
  REGION 1..978: note = engineered CasX variant
QEIKRINKIRRRLVKDSNTKKAGKTGPMKTLLVRVMTPDLRERLENLRKKPENIPQPISNTSRANLNKLLTDYTEMKKAILHVYWEEFQKDPVGLMSRVAQPASKKIDQNKLKPEMDEKGNLTTAGFACSQCGQPLFVYKLEQVSEKGKAYTNYFGRCNVAEHEKLILLAQLKPEKDSDEAVTYSLGKFGQRALDFYSIHVTKESTHPVKPLAQIAGNRYASGPVGKALSDACMGTIASFLSKYQDIIIEHQKVVKGNQKRLESLRELAGKENLEYPSVTLPPQPHTKEGVDAYNEVIARVRMWVNLNLWQKLKLSRDDAKPLLRLKGFPSFPLVERQANEVDWWDMVCNVKKLINEKKEDGKVFWQNLAGYKRQEALRPYLSSEEDRKKGKKFARYQLGDLLLHLEKKHGEDWGKVYDEAWERIDKKVEGLSKHIKLEEERRSEDAQSKAALTDWLRAKASFVIEGLKEADKDEFCRCELKLQKWYGDLRGKPFAIEAENSILDISGFSKQYNCAFIWQKDGVKKLNLYLIINYFKGGKLRFKKIKPEAFEANRFYTVINKKSGEIVPMEVNFNFDDPNLIILPLAFGKRQGREFIWNDLLSLETGSLKLANGRVIEKTLYNRRTRQDEPALFVALTFERREVLDSSNIKPMNLIGVDRGENIPAVIALTDPEGCPLSRFKDSLGNPTHILRIGESYKEKQRTIQAKKEVEQRRAGEYSRKYASKAKNLADDMVRNTARDLLYYAVTQDAMLIFENLSRGFGRQGKRTFMAERQYTRMEDWLTAKLAYEGLPSKTYLSKTLAQYTSKTCSNCGFTITSADYDRVLEKLKKTATGWMTTINGKELKVEGQITYYNRYKRQNVVKDLSVELDRLSEESVNNDISSWTKGRSGEALSLLKKRFSHRPVQEKFVCLNCGFETHADEQAALNIARSWLFLRSQEYKKYQTNKTTGNTDKRAFVETWQSFYRKKLKEVWKPAV

SEQ ID NO: 26369 - protein, 978 aa, synthetic construct
  REGION 1..978: note = engineered CasX variant
QEIKRINKIRRRLVKDSNTKKAGKTGPMKTLLVRVMTPDLRERLENLRKKPENIPQPISNTSRANLNKLLTDYTEMKKAILHVYWEEFQKDPVGLMSRVAQPASKKIDQNKLKPEMDEKGNLTTAGFACSQCGQPLFVYKLEQVSEKGKAYTNYFGRCNVAEHEKLILLAQLKPEKDSDEAVTYSLGKFGQRALDFYSIHVTKESTHPVKPLAQIAGNRYASGPVGKALSDACMGTIASFLSKYQDIIIEHQKVVKGNQKRLESLRELAGKENLEYPSVTLPPQPHTKEGVDAYNEVIARVRMWVNLNLWQKLKLSRDDAKPLLRLKGFPSFPLVERQANEVDWWDMVCNVKKLINEKKEDGKVFWQNLAGYKRQEALRPYLSSEEDRKKGKKFARYQLGDLLLHLEKKHGEDWGKVYDEAWERIDKKVEGLSKHIKLEEERRSEDAQSKAALTDWLRAKASFVIEGLKEADKDEFCRCELKLQKWYGDLRGKPFAIEAENSILDISGFSKQYNCAFIWQKDGVKKLNLYLIINYFKGGKLRFKKIKPEAFEANRFYTVINKKSGEIVPMEVNFNFDDPNLIILPLAFGKRQGREFIWNDLLSLETGSLKLANGRVIEKTLYNRRTRQDEPALFVALTFERREVLDSSNIKPMNLIGVDRGENIPAVIALTDPEGCPLSRFKDSLGNPTHILRIGESYKEKQRTIQAKKEVEQRRAGDYSRKYASKAKNLADDMVRNTARDLLYYAVTQDAMLIFENLSRGFGRQGKRTFMAERQYTRMEDWLTAKLAYEGLPSKTYLSKTLAQYTSKTCSNCGFTITSADYDRVLEKLKKTATGWMTTINGKELKVEGQITYYNRYKRQNVVKDLSVELDRLSEESVNNDISSWTKGRSGEALSLLKKRFSHRPVQEKFVCLNCGFETHADEQAALNIARSWLFLRSQEYKKYQTNKTTGNTDKRAFVETWQSFYRKKLKEVWKPAV

SEQ ID NO: 26370 - protein, 978 aa, synthetic construct
  REGION 1..978: note = engineered CasX variant
QEIKRINKIRRRLVKDSNTKKAGKTGPMKTLLVRVMTPDLRERLENLRKKPENIPQPISNTSRANLNKLLTDYTEMKKAILHVYWEEFQKDPVGLMSRVAQPASKKIDQNKLKPEMDEKGNLTTAGFACSQCGQPLFVYKLEQVSEKGKAYTNYFGRCNVAEHEKLILLAQLKPEKDSDEAVTYSLGKFGQRALDFYSIHVTKESTHPVKPLAQIAGNRYASGPVGKALSDACMGTIASFLSKYQDIIIEHQKVVKGNQKRLESLRELAGKENLEYPSVTLPPQPHTKEGVDAYNEVIARVRMWVNLNLWQKLKLSRDDAKPLLRLKGFPSFPLVERQANEVDWWDMVCNVKKLINEKKEDGKVFWQNLAGYKRQEALRPYLSSEEDRKKGKKFARYQLGDLLLHLEKKHGEDWGKVYDEAWERIDKKVEGLSKHIKLEEERRSEDAQSKAALTDWLRAKASFVIEGLKEADKDEFCRCELKLQKWYGDLRGKPFAIEAENSILDISGFSKQYNCAFIWQKDGVKKLNLYLIINYFKGGKLRFKKIKPEAFEANRFYTVINKKSGEIVPMEVNFNFDDPNLIILPLAFGKRQGREFIWNDLLSLETGSLKLANGRVIEKTLYNRRTRQDEPALFVALTFERREVLDSSNIKPMNLIGVDRGENIPAVIALTDPEGCPLSRFKDSLGNPTHILRIGESYKEKQRTIQAKKEVEQRRAGAYSRKYASKAKNLADDMVRNTARDLLYYAVTQDAMLIFENLSRGFGRQGKRTFMAERQYTRMEDWLTAKLAYEGLPSKTYLSKTLAQYTSKTCSNCGFTITSADYDRVLEKLKKTATGWMTTINGKELKVEGQITYYNRYKRQNVVKDLSVELDRLSEESVNNDISSWTKGRSGEALSLLKKRFSHRPVQEKFVCLNCGFETHADEQAALNIARSWLFLRSQEYKKYQTNKTTGNTDKRAFVETWQSFYRKKLKEVWKPAV

SEQ ID NO: 26371 - protein, 978 aa, synthetic construct
  REGION 1..978: note = engineered CasX variant
QEIKRINKIRRRLVKDSNTKKAGKTGPMKTLLVRVMTPDLRERLENLRKKPENIPQPISNTSRANLNKLLTDYTEMKKAILHVYWEEFQKDPVGLMSRVAQPASKKIDQNKLKPEMDEKGNLTTAGFACSQCGQPLFVYKLEQVSEKGKAYTNYFGRCNVAEHEKLILLAQLKPEKDSDEAVTYSLGKFGQRALDFYSIHVTKESTHPVKPLAQIAGNRYASGPVGKALSDACMGTIASFLSKYQDIIIEHQKVVKGNQKRLESLRELAGKENLEYPSVTLPPQPHTKEGVDAYNEVIARVRMWVNLNLWQKLKLSRDDAKPLLRLKGFPSFPLVERQANEVDWWDMVCNVKKLINEKKEDGKVFWQNLAGYKRQEALRPYLSSEEDRKKGKKFARYQLGDLLLHLEKKHGEDWGKVYDEAWERIDKKVEGLSKHIKLEEERRSEDAQSKAALTDWLRAKASFVIEGLKEADKDEFCRCELKLQKWYGDLRGKPFAIEAENSILDISGFSKQYNCAFIWQKDGVKKLNLYLIINYFKGGKLRFKKIKPEAFEANRFYTVINKKSGEIVPMEVNFNFDDPNLIILPLAFGKRQGREFIWNDLLSLETGSLKLANGRVIEKTLYNRRTRQDEPALFVALTFERREVLDSSNIKPMNLIGVDRGENIPAVIALTDPEGCPLSRFKDSLGNPTHILRIGESYKEKQRTIQAKKEVEQRRAFGYSRKYASKAKNLADDMVRNTARDLLYYAVTQDAMLIFENLSRGFGRQGKRTFMAERQYTRMEDWLTAKLAYEGLPSKTYLSKTLAQYTSKTCSNCGFTITSADYDRVLEKLKKTATGWMTTINGKELKVEGQITYYNRYKRQNVVKDLSVELDRLSEESVNNDISSWTKGRSGEALSLLKKRFSHRPVQEKFVCLNCGFETHADEQAALNIARSWLFLRSQEYKKYQTNKTTGNTDKRAFVETWQSFYRKKLKEVWKPAV

SEQ ID NO: 26372 - protein, 978 aa, synthetic construct
  REGION 1..978: note = engineered CasX variant
QEIKRINKIRRRLVKDSNTKKAGKTGPMKTLLVRVMTPDLRERLENLRKKPENIPQPISNTSRANLNKLLTDYTEMKKAILHVYWEEFQKDPVGLMSRVAQPASKKIDQNKLKPEMDEKGNLTTAGFACSQCGQPLFVYKLEQVSEKGKAYTNYFGRCNVAEHEKLILLAQLKPEKDSDEAVTYSLGKFGQRALDFYSIHVTKESTHPVKPLAQIAGNRYASGPVGKALSDACMGTIASFLSKYQDIIIEHQKVVKGNQKRLESLRELAGKENLEYPSVTLPPQPHTKEGVDAYNEVIARVRMWVNLNLWQKLKLSRDDAKPLLRLKGFPSFPLVERQANEVDWWDMVCNVKKLINEKKEDGKVFWQNLAGYKRQEALRPYLSSEEDRKKGKKFARYQLGDLLLHLEKKHGEDWGKVYDEAWERIDKKVEGLSKHIKLEEERRSEDAQSKAALTDWLRAKASFVIEGLKEADKDEFCRCELKLQKWYGDLRGKPFAIEAENSILDISGFSKQYNCAFIWQKDGVKKLNLYLIINYFKGGKLRFKKIKPEAFEANRFYTVINKKSGEIVPMEVNFNFDDPNLIILPLAFGKRQGREFIWNDLLSLETGSLKLANGRVIEKTLYNRRTRQDEPALFVALTFERREVLDSSNIKPMNLIGVDRGENIPAVIALTDPEGCPLSRFKDSLGNPTHILRIGESYKEKQRTIQAKKEVEQRRACGYSRKYASKAKNLADDMVRNTARDLLYYAVTQDAMLIFENLSRGFGRQGKRTFMAERQYTRMEDWLTAKLAYEGLPSKTYLSKTLAQYTSKTCSNCGFTITSADYDRVLEKLKKTATGWMTTINGKELKVEGQITYYNRYKRQNVVKDLSVELDRLSEESVNNDISSWTKGRSGEALSLLKKRFSHRPVQEKFVCLNCGFETHADEQAALNIARSWLFLRSQEYKKYQTNKTTGNTDKRAFVETWQSFYRKKLKEVWKPAV

SEQ ID NO: 26373 - protein, 978 aa, synthetic construct
  REGION 1..978: note = engineered CasX variant
QEIKRINKIRRRLVKDSNTKKAGKTGPMKTLLVRVMTPDLRERLENLRKKPENIPQPISNTSRANLNKLLTDYTEMKKAILHVYWEEFQKDPVGLMSRVAQPASKKIDQNKLKPEMDEKGNLTTAGFACSQCGQPLFVYKLEQVSEKGKAYTNYFGRCNVAEHEKLILLAQLKPEKDSDEAVTYSLGKFGQRALDFYSIHVTKESTHPVKPLAQIAGNRYASGPVGKALSDACMGTIASFLSKYQDIIIEHQKVVKGNQKRLESLRELAGKENLEYPSVTLPPQPHTKEGVDAYNEVIARVRMWVNLNLWQKLKLSRDDAKPLLRLKGFPSFPLVERQANEVDWWDMVCNVKKLINEKKEDGKVFWQNLAGYKRQEALRPYLSSEEDRKKGKKFARYQLGDLLLHLEKKHGEDWGKVYDEAWERIDKKVEGLSKHIKLEEERRSEDAQSKAALTDWLRAKASFVIEGLKEADKDEFCRCELKLQKWYGDLRGKPFAIEAENSILDISGFSKQYNCAFIWQKDGVKKLNLYLIINYFKGGKLRFKKIKPEAFEANRFYTVINKKSGEIVPMEVNFNFDDPNLIILPLAFGKRQGREFIWNDLLSLETGSLKLANGRVIEKTLYNRRTRQDEPALFVALTFERREVLDSSNIKPMNLIGVDRGENIPAVIALTDPEGCPLSRFKDSLGNPTHILRIGESYKEKQRTIQAKKEVEQRRAAGYSRKYASKAKNLADDMVRNTARDLLYYAVTQDAMLIFENLSRGFGRQGKRTFMAERQYTRMEDWLTAKLAYEGLPSKTYLSKTLAQYTSKTCSNCGFTITSADYDRVLEKLKKTATGWMTTINGKELKVEGQITYYNRYKRQNVVKDLSVELDRLSEESVNNDISSWTKGRSGEALSLLKKRFSHRPVQEKFVCLNCGFETHADEQAALNIARSWLFLRSQEYKKYQTNKTTGNTDKRAFVETWQSFYRKKLKEVWKPAV

SEQ ID NO: 26374 - protein, 978 aa, synthetic construct
  REGION 1..978: note = engineered CasX variant
QEIKRINKIRRRLVKDSNTKKAGKTGPMKTLLVRVMTPDLRERLENLRKKPENIPQPISNTSRANLNKLLTDYTEMKKAILHVYWEEFQKDPVGLMSRVAQPASKKIDQNKLKPEMDEKGNLTTAGFACSQCGQPLFVYKLEQVSEKGKAYTNYFGRCNVAEHEKLILLAQLKPEKDSDEAVTYSLGKFGQRALDFYSIHVTKESTHPVKPLAQIAGNRYASGPVGKALSDACMGTIASFLSKYQDIIIEHQKVVKGNQKRLESLRELAGKENLEYPSVTLPPQPHTKEGVDAYNEVIARVRMWVNLNLWQKLKLSRDDAKPLLRLKGFPSFPLVERQANEVDWWDMVCNVKKLINEKKEDGKVFWQNLAGYKRQEALRPYLSSEEDRKKGKKFARYQLGDLLLHLEKKHGEDWGKVYDEAWERIDKKVEGLSKHIKLEEERRSEDAQSKAALTDWLRAKASFVIEGLKEADKDEFCRCELKLQKWYGDLRGKPFAIEAENSILDISGFSKQYNCAFIWQKDGVKKLNLYLIINYFKGGKLRFKKIKPEAFEANRFYTVINKKSGEIVPMEVNFNFDDPNLIILPLAFGKRQGREFIWNDLLSLETGSLKLANGRVIEKTLYNRRTRQDEPALFVALTFERREVLDSSNIKPMNLIGVDRGENIPAVIALTDPEGCPLSRFKDSLGNPTHILRIGESYKEKQRTIQAKKEVEQRQAGGYSRKYASKAKNLADDMVRNTARDLLYYAVTQDAMLIFENLSRGFGRQGKRTFMAERQYTRMEDWLTAKLAYEGLPSKTYLSKTLAQYTSKTCSNCGFTITSADYDRVLEKLKKTATGWMTTINGKELKVEGQITYYNRYKRQNVVKDLSVELDRLSEESVNNDISSWTKGRSGEALSLLKKRFSHRPVQEKFVCLNCGFETHADEQAALNIARSWLFLRSQEYKKYQTNKTTGNTDKRAFVETWQSFYRKKLKEVWKPAV

SEQ ID NO: 26375 - protein, 978 aa, synthetic construct
  REGION 1..978: note = engineered CasX variant
QEIKRINKIRRRLVKDSNTKKAGKTGPMKTLLVRVMTPDLRERLENLRKKPENIPQPISNTSRANLNKLLTDYTEMKKAILHVYWEEFQKDPVGLMSRVAQPASKKIDQNKLKPEMDEKGNLTTAGFACSQCGQPLFVYKLEQVSEKGKAYTNYFGRCNVAEHEKLILLAQLKPEKDSDEAVTYSLGKFGQRALDFYSIHVTKESTHPVKPLAQIAGNRYASGPVGKALSDACMGTIASFLSKYQDIIIEHQKVVKGNQKRLESLRELAGKENLEYPSVTLPPQPHTKEGVDAYNEVIARVRMWVNLNLWQKLKLSRDDAKPLLRLKGFPSFPLVERQANEVDWWDMVCNVKKLINEKKEDGKVFWQNLAGYKRQEALRPYLSSEEDRKKGKKFARYQLGDLLLHLEKKHGEDWGKVYDEAWERIDKKVEGLSKHIKLEEERRSEDAQSKAALTDWLRAKASFVIEGLKEADKDEFCRCELKLQKWYGDLRGKPFAIEAENSILDISGFSKQYNCAFIWQKDGVKKLNLYLIINYFKGGKLRFKKIKPEAFEANRFYTVINKKSGEIVPMEVNFNFDDPNLIILPLAFGKRQGREFIWNDLLSLETGSLKLANGRVIEKTLYNRRTRQDEPALFVALTFERREVLDSSNIKPMNLIGVDRGENIPAVIALTDPEGCPLSRFKDSLGNPTHILRIGESYKEKQRTIQAKKEVEQRPAGGYSRKYASKAKNLADDMVRNTARDLLYYAVTQDAMLIFENLSRGFGRQGKRTFMAERQYTRMEDWLTAKLAYEGLPSKTYLSKTLAQYTSKTCSNCGFTITSADYDRVLEKLKKTATGWMTTINGKELKVEGQITYYNRYKRQNVVKDLSVELDRLSEESVNNDISSWTKGRSGEALSLLKKRFSHRPVQEKFVCLNCGFETHADEQAALNIARSWLFLRSQEYKKYQTNKTTGNTDKRAFVETWQSFYRKKLKEVWKPAV

SEQ ID NO: 26376 - protein, 978 aa, synthetic construct
  REGION 1..978: note = engineered CasX variant
QEIKRINKIRRRLVKDSNTKKAGKTGPMKTLLVRVMTPDLRERLENLRKKPENIPQPISNTSRANLNKLLTDYTEMKKAILHVYWEEFQKDPVGLMSRVAQPASKKIDQNKLKPEMDEKGNLTTAGFACSQCGQPLFVYKLEQVSEKGKAYTNYFGRCNVAEHEKLILLAQLKPEKDSDEAVTYSLGKFGQRALDFYSIHVTKESTHPVKPLAQIAGNRYASGPVGKALSDACMGTIASFLSKYQDIIIEHQKVVKGNQKRLESLRELAGKENLEYPSVTLPPQPHTKEGVDAYNEVIARVRMWVNLNLWQKLKLSRDDAKPLLRLKGFPSFPLVERQANEVDWWDMVCNVKKLINEKKEDGKVFWQNLAGYKRQEALRPYLSSEEDRKKGKKFARYQLGDLLLHLEKKHGEDWGKVYDEAWERIDKKVEGLSKHIKLEEERRSEDAQSKAALTDWLRAKASFVIEGLKEADKDEFCRCELKLQKWYGDLRGKPFAIEAENSILDISGFSKQYNCAFIWQKDGVKKLNLYLIINYFKGGKLRFKKIKPEAFEANRFYTVINKKSGEIVPMEVNFNFDDPNLIILPLAFGKRQGREFIWNDLLSLETGSLKLANGRVIEKTLYNRRTRQDEPALFVALTFERREVLDSSNIKPMNLIGVDRGENIPAVIALTDPEGCPLSRFKDSLGNPTHILRIGESYKEKQRTIQAKKEVEQRNAGGYSRKYASKAKNLADDMVRNTARDLLYYAVTQDAMLIFENLSRGFGRQGKRTFMAERQYTRMEDWLTAKLAYEGLPSKTYLSKTLAQYTSKTCSNCGFTITSADYDRVLEKLKKTATGWMTTINGKELKVEGQITYYNRYKRQNVVKDLSVELDRLSEESVNNDISSWTKGRSGEALSLLKKRFSHRPVQEKFVCLNCGFETHADEQAALNIARSWLFLRSQEYKKYQTNKTTGNTDKRAFVETWQSFYRKKLKEVWKPAV

SEQ ID NO: 26377 - protein, 978 aa, synthetic construct
  REGION 1..978: note = engineered CasX variant
QEIKRINKIRRRLVKDSNTKKAGKTGPMKTLLVRVMTPDLRERLENLRKKPENIPQPISNTSRANLNKLLTDYTEMKKAILHVYWEEFQKDPVGLMSRVAQPASKKIDQNKLKPEMDEKGNLTTAGFACSQCGQPLFVYKLEQVSEKGKAYTNYFGRCNVAEHEKLILLAQLKPEKDSDEAVTYSLGKFGQRALDFYSIHVTKESTHPVKPLAQIAGNRYASGPVGKALSDACMGTIASFLSKYQDIIIEHQKVVKGNQKRLESLRELAGKENLEYPSVTLPPQPHTKEGVDAYNEVIARVRMWVNLNLWQKLKLSRDDAKPLLRLKGFPSFPLVERQANEVDWWDMVCNVKKLINEKKEDGKVFWQNLAGYKRQEALRPYLSSEEDRKKGKKFARYQLGDLLLHLEKKHGEDWGKVYDEAWERIDKKVEGLSKHIKLEEERRSEDAQSKAALTDWLRAKASFVIEGLKEADKDEFCRCELKLQKWYGDLRGKPFAIEAENSILDISGFSKQYNCAFIWQKDGVKKLNLYLIINYFKGGKLRFKKIKPEAFEANRFYTVINKKSGEIVPMEVNFNFDDPNLIILPLAFGKRQGREFIWNDLLSLETGSLKLANGRVIEKTLYNRRTRQDEPALFVALTFERREVLDSSNIKPMNLIGVDRGENIPAVIALTDPEGCPLSRFKDSLGNPTHILRIGESYKEKQRTIQAKKEVEQRMAGGYSRKYASKAKNLADDMVRNTARDLLYYAVTQDAMLIFENLSRGFGRQGKRTFMAERQYTRMEDWLTAKLAYEGLPSKTYLSKTLAQYTSKTCSNCGFTITSADYDRVLEKLKKTATGWMTTINGKELKVEGQITYYNRYKRQNVVKDLSVELDRLSEESVNNDISSWTKGRSGEALSLLKKRFSHRPVQEKFVCLNCGFETHADEQAALNIARSWLFLRSQEYKKYQTNKTTGNTDKRAFVETWQSFYRKKLKEVWKPAV

SEQ ID NO: 26378 - protein, 978 aa, synthetic construct
  REGION 1..978: note = engineered CasX variant
QEIKRINKIRRRLVKDSNTKKAGKTGPMKTLLVRVMTPDLRERLENLRKKPENIPQPISNTSRANLNKLLTDYTEMKKAILHVYWEEFQKDPVGLMSRVAQPASKKIDQNKLKPEMDEKGNLTTAGFACSQCGQPLFVYKLEQVSEKGKAYTNYFGRCNVAEHEKLILLAQLKPEKDSDEAVTYSLGKFGQRALDFYSIHVTKESTHPVKPLAQIAGNRYASGPVGKALSDACMGTIASFLSKYQDIIIEHQKVVKGNQKRLESLRELAGKENLEYPSVTLPPQPHTKEGVDAYNEVIARVRMWVNLNLWQKLKLSRDDAKPLLRLKGFPSFPLVERQANEVDWWDMVCNVKKLINEKKEDGKVFWQNLAGYKRQEALRPYLSSEEDRKKGKKFARYQLGDLLLHLEKKHGEDWGKVYDEAWERIDKKVEGLSKHIKLEEERRSEDAQSKAALTDWLRAKASFVIEGLKEADKDEFCRCELKLQKWYGDLRGKPFAIEAENSILDISGFSKQYNCAFIWQKDGVKKLNLYLIINYFKGGKLRFKKIKPEAFEANRFYTVINKKSGEIVPMEVNFNFDDPNLIILPLAFGKRQGREFIWNDLLSLETGSLKLANGRVIEKTLYNRRTRQDEPALFVALTFERREVLDSSNIKPMNLIGVDRGENIPAVIALTDPEGCPLSRFKDSLGNPTHILRIGESYKEKQRTIQAKKEVEQRLAGGYSRKYASKAKNLADDMVRNTARDLLYYAVTQDAMLIFENLSRGFGRQGKRTFMAERQYTRMEDWLTAKLAYEGLPSKTYLSKTLAQYTSKTCSNCGFTITSADYDRVLEKLKKTATGWMTTINGKELKVEGQITYYNRYKRQNVVKDLSVELDRLSEESVNNDISSWTKGRSGEALSLLKKRFSHRPVQEKFVCLNCGFETHADEQAALNIARSWLFLRSQEYKKYQTNKTTGNTDKRAFVETWQSFYRKKLKEVWKPAV

SEQ ID NO: 26379 - protein, 978 aa, synthetic construct
  REGION 1..978: note = engineered CasX variant
QEIKRINKIRRRLVKDSNTKKAGKTGPMKTLLVRVMTPDLRERLENLRKKPENIPQPISNTSRANLNKLLTDYTEMKKAILHVYWEEFQKDPVGLMSRVAQPASKKIDQNKLKPEMDEKGNLTTAGFACSQCGQPLFVYKLEQVSEKGKAYTNYFGRCNVAEHEKLILLAQLKPEKDSDEAVTYSLGKFGQRALDFYSIHVTKESTHPVKPLAQIAGNRYASGPVGKALSDACMGTIASFLSKYQDIIIEHQKVVKGNQKRLESLRELAGKENLEYPSVTLPPQPHTKEGVDAYNEVIARVRMWVNLNLWQKLKLSRDDAKPLLRLKGFPSFPLVERQANEVDWWDMVCNVKKLINEKKEDGKVFWQNLAGYKRQEALRPYLSSEEDRKKGKKFARYQLGDLLLHLEKKHGEDWGKVYDEAWERIDKKVEGLSKHIKLEEERRSEDAQSKAALTDWLRAKASFVIEGLKEADKDEFCRCELKLQKWYGDLRGKPFAIEAENSILDISGFSKQYNCAFIWQKDGVKKLNLYLIINYFKGGKLRFKKIKPEAFEANRFYTVINKKSGEIVPMEVNFNFDDPNLIILPLAFGKRQGREFIWNDLLSLETGSLKLANGRVIEKTLYNRRTRQDEPALFVALTFERREVLDSSNIKPMNLIGVDRGENIPAVIALTDPEGCPLSRFKDSLGNPTHILRIGESYKEKQRTIQAKKEVEQRKAGGYSRKYASKAKNLADDMVRNTARDLLYYAVTQDAMLIFENLSRGFGRQGKRTFMAERQYTRMEDWLTAKLAYEGLPSKTYLSKTLAQYTSKTCSNCGFTITSADYDRVLEKLKKTATGWMTTINGKELKVEGQITYYNRYKRQNVVKDLSVELDRLSEESVNNDISSWTKGRSGEALSLLKKRFSHRPVQEKFVCLNCGFETHADEQAALNIARSWLFLRSQEYKKYQTNKTTGNTDKRAFVETWQSFYRKKLKEVWKPAV

SEQ ID NO: 26380 - protein, 978 aa, synthetic construct
  REGION 1..978: note = engineered CasX variant
QEIKRINKIRRRLVKDSNTKKAGKTGPMKTLLVRVMTPDLRERLENLRKKPENIPQPISNTSRANLNKLLTDYTEMKKAILHVYWEEFQKDPVGLMSRVAQPASKKIDQNKLKPEMDEKGNLTTAGFACSQCGQPLFVYKLEQVSEKGKAYTNYFGRCNVAEHEKLILLAQLKPEKDSDEAVTYSLGKFGQRALDFYSIHVTKESTHPVKPLAQIAGNRYASGPVGKALSDACMGTIASFLSKYQDIIIEHQKVVKGNQKRLESLRELAGKENLEYPSVTLPPQPHTKEGVDAYNEVIARVRMWVNLNLWQKLKLSRDDAKPLLRLKGFPSFPLVERQANEVDWWDMVCNVKKLINEKKEDGKVFWQNLAGYKRQEALRPYLSSEEDRKKGKKFARYQLGDLLLHLEKKHGEDWGKVYDEAWERIDKKVEGLSKHIKLEEERRSEDAQSKAALTDWLRAKASFVIEGLKEADKDEFCRCELKLQKWYGDLRGKPFAIEAENSILDISGFSKQYNCAFIWQKDGVKKLNLYLIINYFKGGKLRFKKIKPEAFEANRFYTVINKKSGEIVPMEVNFNFDDPNLIILPLAFGKRQGREFIWNDLLSLETGSLKLANGRVIEKTLYNRRTRQDEPALFVALTFERREVLDSSNIKPMNLIGVDRGENIPAVIALTDPEGCPLSRFKDSLGNPTHILRIGESYKEKQRTIQAKKEVEQRIAGGYSRKYASKAKNLADDMVRNTARDLLYYAVTQDAMLIFENLSRGFGRQGKRTFMAERQYTRMEDWLTAKLAYEGLPSKTYLSKTLAQYTSKTCSNCGFTITSADYDRVLEKLKKTATGWMTTINGKELKVEGQITYYNRYKRQNVVKDLSVELDRLSEESVNNDISSWTKGRSGEALSLLKKRFSHRPVQEKFVCLNCGFETHADEQAALNIARSWLFLRSQEYKKYQTNKTTGNTDKRAFVETWQSFYRKKLKEVWKPAV

SEQ ID NO: 26381 - protein, 978 aa, synthetic construct
  REGION 1..978: note = engineered CasX variant
QEIKRINKIRRRLVKDSNTKKAGKTGPMKTLLVRVMTPDLRERLENLRKKPENIPQPISNTSRANLNKLLTDYTEMKKAILHVYWEEFQKDPVGLMSRVAQPASKKIDQNKLKPEMDEKGNLTTAGFACSQCGQPLFVYKLEQVSEKGKAYTNYFGRCNVAEHEKLILLAQLKPEKDSDEAVTYSLGKFGQRALDFYSIHVTKESTHPVKPLAQIAGNRYASGPVGKALSDACMGTIASFLSKYQDIIIEHQKVVKGNQKRLESLRELAGKENLEYPSVTLPPQPHTKEGVDAYNEVIARVRMWVNLNLWQKLKLSRDDAKPLLRLKGFPSFPLVERQANEVDWWDMVCNVKKLINEKKEDGKVFWQNLAGYKRQEALRPYLSSEEDRKKGKKFARYQLGDLLLHLEKKHGEDWGKVYDEAWERIDKKVEGLSKHIKLEEERRSEDAQSKAALTDWLRAKASFVIEGLKEADKDEFCRCELKLQKWYGDLRGKPFAIEAENSILDISGFSKQYNCAFIWQKDGVKKLNLYLIINYFKGGKLRFKKIKPEAFEANRFYTVINKKSGEIVPMEVNFNFDDPNLIILPLAFGKRQGREFIWNDLLSLETGSLKLANGRVIEKTLYNRRTRQDEPALFVALTFERREVLDSSNIKPMNLIGVDRGENIPAVIALTDPEGCPLSRFKDSLGNPTHILRIGESYKEKQRTIQAKKEVEQRHAGGYSRKYASKAKNLADDMVRNTARDLLYYAVTQDAMLIFENLSRGFGRQGKRTFMAERQYTRMEDWLTAKLAYEGLPSKTYLSKTLAQYTSKTCSNCGFTITSADYDRVLEKLKKTATGWMTTINGKELKVEGQITYYNRYKRQNVVKDLSVELDRLSEESVNNDISSWTKGRSGEALSLLKKRFSHRPVQEKFVCLNCGFETHADEQAALNIARSWLFLRSQEYKKYQTNKTTGNTDKRAFVETWQSFYRKKLKEVWKPAV

SEQ ID NO: 26382 - protein, 978 aa, synthetic construct
  REGION 1..978: note = engineered CasX variant
QEIKRINKIRRRLVKDSNTKKAGKTGPMKTLLVRVMTPDLRERLENLRKKPENIPQPISNTSRANLNKLLTDYTEMKKAILHVYWEEFQKDPVGLMSRVAQPASKKIDQNKLKPEMDEKGNLTTAGFACSQCGQPLFVYKLEQVSEKGKAYTNYFGRCNVAEHEKLILLAQLKPEKDSDEAVTYSLGKFGQRALDFYSIHVTKESTHPVKPLAQIAGNRYASGPVGKALSDACMGTIASFLSKYQDIIIEHQKVVKGNQKRLESLRELAGKENLEYPSVTLPPQPHTKEGVDAYNEVIARVRMWVNLNLWQKLKLSRDDAKPLLRLKGFPSFPLVERQANEVDWWDMVCNVKKLINEKKEDGKVFWQNLAGYKRQEALRPYLSSEEDRKKGKKFARYQLGDLLLHLEKKHGEDWGKVYDEAWERIDKKVEGLSKHIKLEEERRSEDAQSKAALTDWLRAKASFVIEGLKEADKDEFCRCELKLQKWYGDLRGKPFAIEAENSILDISGFSKQYNCAFIWQKDGVKKLNLYLIINYFKGGKLRFKKIKPEAFEANRFYTVINKKSGEIVPMEVNFNFDDPNLIILPLAFGKRQGREFIWNDLLSLETGSLKLANGRVIEKTLYNRRTRQDEPALFVALTFERREVLDSSNIKPMNLIGVDRGENIPAVIALTDPEGCPLSRFKDSLGNPTHILRIGESYKEKQRTIQAKKEVEQRGAGGYSRKYASKAKNLADDMVRNTARDLLYYAVTQDAMLIFENLSRGFGRQGKRTFMAERQYTRMEDWLTAKLAYEGLPSKTYLSKTLAQYTSKTCSNCGFTITSADYDRVLEKLKKTATGWMTTINGKELKVEGQITYYNRYKRQNVVKDLSVELDRLSEESVNNDISSWTKGRSGEALSLLKKRFSHRPVQEKFVCLNCGFETHADEQAALNIARSWLFLRSQEYKKYQTNKTTGNTDKRAFVETWQSFYRKKLKEVWKPAV

SEQ ID NO: 26383 - protein, 978 aa, synthetic construct
  REGION 1..978: note = engineered CasX variant
QEIKRINKIRRRLVKDSNTKKAGKTGPMKTLLVRVMTPDLRERLENLRKKPENIPQPISNTSRANLNKLLTDYTEMKKAILHVYWEEFQKDPVGLMSRVAQPASKKIDQNKLKPEMDEKGNLTTAGFACSQCGQPLFVYKLEQVSEKGKAYTNYFGRCNVAEHEKLILLAQLKPEKDSDEAVTYSLGKFGQRALDFYSIHVTKESTHPVKPLAQIAGNRYASGPVGKALSDACMGTIASFLSKYQDIIIEHQKVVKGNQKRLESLRELAGKENLEYPSVTLPPQPHTKEGVDAYNEVIARVRMWVNLNLWQKLKLSRDDAKPLLRLKGFPSFPLVERQANEVDWWDMVCNVKKLINEKKEDGKVFWQNLAGYKRQEALRPYLSSEEDRKKGKKFARYQLGDLLLHLEKKHGEDWGKVYDEAWERIDKKVEGLSKHIKLEEERRSEDAQSKAALTDWLRAKASFVIEGLKEADKDEFCRCELKLQKWYGDLRGKPFAIEAENSILDISGFSKQYNCAFIWQKDGVKKLNLYLIINYFKGGKLRFKKIKPEAFEANRFYTVINKKSGEIVPMEVNFNFDDPNLIILPLAFGKRQGREFIWNDLLSLETGSLKLANGRVIEKTLYNRRTRQDEPALFVALTFERREVLDSSNIKPMNLIGVDRGENIPAVIALTDPEGCPLSRFKDSLGNPTHILRIGESYKEKQRTIQAKKEVEQRFAGGYSRKYASKAKNLADDMVRNTARDLLYYAVTQDAMLIFENLSRGFGRQGKRTFMAERQYTRMEDWLTAKLAYEGLPSKTYLSKTLAQYTSKTCSNCGFTITSADYDRVLEKLKKTATGWMTTINGKELKVEGQITYYNRYKRQNVVKDLSVELDRLSEESVNNDISSWTKGRSGEALSLLKKRFSHRPVQEKFVCLNCGFETHADEQAALNIARSWLFLRSQEYKKYQTNKTTGNTDKRAFVETWQSFYRKKLKEVWKPAV

SEQ ID NO: 26384 - protein, 978 aa, synthetic construct
  REGION 1..978: note = engineered CasX variant
QEIKRINKIRRRLVKDSNTKKAGKTGPMKTLLVRVMTPDLRERLENLRKKPENIPQPISNTSRANLNKLLTDYTEMKKAILHVYWEEFQKDPVGLMSRVAQPASKKIDQNKLKPEMDEKGNLTTAGFACSQCGQPLFVYKLEQVSEKGKAYTNYFGRCNVAEHEKLILLAQLKPEKDSDEAVTYSLGKFGQRALDFYSIHVTKESTHPVKPLAQIAGNRYASGPVGKALSDACMGTIASFLSKYQDIIIEHQKVVKGNQKRLESLRELAGKENLEYPSVTLPPQPHTKEGVDAYNEVIARVRMWVNLNLWQKLKLSRDDAKPLLRLKGFPSFPLVERQANEVDWWDMVCNVKKLINEKKEDGKVFWQNLAGYKRQEALRPYLSSEEDRKKGKKFARYQLGDLLLHLEKKHGEDWGKVYDEAWERIDKKVEGLSKHIKLEEERRSEDAQSKAALTDWLRAKASFVIEGLKEADKDEFCRCELKLQKWYGDLRGKPFAIEAENSILDISGFSKQYNCAFIWQKDGVKKLNLYLIINYFKGGKLRFKKIKPEAFEANRFYTVINKKSGEIVPMEVNFNFDDPNLIILPLAFGKRQGREFIWNDLLSLETGSLKLANGRVIEKTLYNRRTRQDEPALFVALTFERREVLDSSNIKPMNLIGVDRGENIPAVIALTDPEGCPLSRFKDSLGNPTHILRIGESYKEKQRTIQAKKEVEQRCAGGYSRKYASKAKNLADDMVRNTARDLLYYAVTQDAMLIFENLSRGFGRQGKRTFMAERQYTRMEDWLTAKLAYEGLPSKTYLSKTLAQYTSKTCSNCGFTITSADYDRVLEKLKKTATGWMTTINGKELKVEGQITYYNRYKRQNVVKDLSVELDRLSEESVNNDISSWTKGRSGEALSLLKKRFSHRPVQEKFVCLNCGFETHADEQAALNIARSWLFLRSQEYKKYQTNKTTGNTDKRAFVETWQSFYRKKLKEVWKPAV

SEQ ID NO: 26385 - protein, 978 aa, synthetic construct
  REGION 1..978: note = engineered CasX variant
QEIKRINKIRRRLVKDSNTKKAGKTGPMKTLLVRVMTPDLRERLENLRKKPENIPQPISNTSRANLNKLLTDYTEMKKAILHVYWEEFQKDPVGLMSRVAQPASKKIDQNKLKPEMDEKGNLTTAGFACSQCGQPLFVYKLEQVSEKGKAYTNYFGRCNVAEHEKLILLAQLKPEKDSDEAVTYSLGKFGQRALDFYSIHVTKESTHPVKPLAQIAGNRYASGPVGKALSDACMGTIASFLSKYQDIIIEHQKVVKGNQKRLESLRELAGKENLEYPSVTLPPQPHTKEGVDAYNEVIARVRMWVNLNLWQKLKLSRDDAKPLLRLKGFPSFPLVERQANEVDWWDMVCNVKKLINEKKEDGKVFWQNLAGYKRQEALRPYLSSEEDRKKGKKFARYQLGDLLLHLEKKHGEDWGKVYDEAWERIDKKVEGLSKHIKLEEERRSEDAQSKAALTDWLRAKASFVIEGLKEADKDEFCRCELKLQKWYGDLRGKPFAIEAENSILDISGFSKQYNCAFIWQKDGVKKLNLYLIINYFKGGKLRFKKIKPEAFEANRFYTVINKKSGEIVPMEVNFNFDDPNLIILPLAFGKRQGREFIWNDLLSLETGSLKLANGRVIEKTLYNRRTRQDEPALFVALTFERREVLDSSNIKPMNLIGVDRGENIPAVIALTDPEGCPLSRFKDSLGNPTHILRIGESYKEKQRTIQAKKEVEQRAAGGYSRKYASKAKNLADDMVRNTARDLLYYAVTQDAMLIFENLSRGFGRQGKRTFMAERQYTRMEDWLTAKLAYEGLPSKTYLSKTLAQYTSKTCSNCGFTITSADYDRVLEKLKKTATGWMTTINGKELKVEGQITYYNRYKRQNVVKDLSVELDRLSEESVNNDISSWTKGRSGEALSLLKKRFSHRPVQEKFVCLNCGFETHADEQAALNIARSWLFLRSQEYKKYQTNKTTGNTDKRAFVETWQSFYRKKLKEVWKPAV

SEQ ID NO: 26386 - protein, 978 aa, synthetic construct
  REGION 1..978: note = engineered CasX variant
QEIKRINKIRRRLVKDSNTKKAGKTGPMKTLLVRVMTPDLRERLENLRKKPENIPQPISNTSRANLNKLLTDYTEMKKAILHVYWEEFQKDPVGLMSRVAQPASKKIDQNKLKPEMDEKGNLTTAGFACSQCGQPLFVYKLEQVSEKGKAYTNYFGRCNVAEHEKLILLAQLKPEKDSDEAVTYSLGKFGQRALDFYSIHVTKESTHPVKPLAQIAGNRYASGPVGKALSDACMGTIASFLSKYQDIIIEHQKVVKGNQKRLESLRELAGKENLEYPSVTLPPQPHTKEGVDAYNEVIARVRMWVNLNLWQKLKLSRDDAKPLLRLKGFPSFPLVERQANEVDWWDMVCNVKKLINEKKEDGKVFWQNLAGYKRQEALRPYLSSEEDRKKGKKFARYQLGDLLLHLEKKHGEDWGKVYDEAWERIDKKVEGLSKHIKLEEERRSEDAQSKAALTDWLRAKASFVIEGLKEADKDEFCRCELKLQKWYGDLRGKPFAIEAENSILDISGFSKQYNCAFIWQKDGVKKLNLYLIINYFKGGKLRFKKIKPEAFEANRFYTVINKKSGEIVPMEVNFNFDDPNLIILPLAFGKRQGREFIWNDLLSLETGSLKLANGRVIEKTLYNRRTRQDEPALFVALTFERREVLDSSNIKPMNLIGVDRGENIPAVIALTDPEGCPLSRFKDSLGNPTHILRIGESYKEKQRTIQAKKEVEQQRAGGYSRKYASKAKNLADDMVRNTARDLLYYAVTQDAMLIFENLSRGFGRQGKRTFMAERQYTRMEDWLTAKLAYEGLPSKTYLSKTLAQYTSKTCSNCGFTITSADYDRVLEKLKKTATGWMTTINGKELKVEGQITYYNRYKRQNVVKDLSVELDRLSEESVNNDISSWTKGRSGEALSLLKKRFSHRPVQEKFVCLNCGFETHADEQAALNIARSWLFLRSQEYKKYQTNKTTGNTDKRAFVETWQSFYRKKLKEVWKPAV

SEQ ID NO: 26387 - protein, 978 aa, synthetic construct
  REGION 1..978: note = engineered CasX variant
QEIKRINKIRRRLVKDSNTKKAGKTGPMKTLLVRVMTPDLRERLENLRKKPENIPQPISNTSRANLNKLLTDYTEMKKAILHVYWEEFQKDPVGLMSRVAQPASKKIDQNKLKPEMDEKGNLTTAGFACSQCGQPLFVYKLEQVSEKGKAYTNYFGRCNVAEHEKLILLAQLKPEKDSDEAVTYSLGKFGQRALDFYSIHVTKESTHPVKPLAQIAGNRYASGPVGKALSDACMGTIASFLSKYQDIIIEHQKVVKGNQKRLESLRELAGKENLEYPSVTLPPQPHTKEGVDAYNEVIARVRMWVNLNLWQKLKLSRDDAKPLLRLKGFPSFPLVERQANEVDWWDMVCNVKKLINEKKEDGKVFWQNLAGYKRQEALRPYLSSEEDRKKGKKFARYQLGDLLLHLEKKHGEDWGKVYDEAWERIDKKVEGLSKHIKLEEERRSEDAQSKAALTDWLRAKASFVIEGLKEADKDEFCRCELKLQKWYGDLRGKPFAIEAENSILDISGFSKQYNCAFIWQKDGVKKLNLYLIINYFKGGKLRFKKIKPEAFEANRFYTVINKKSGEIVPMEVNFNFDDPNLIILPLAFGKRQGREFIWNDLLSLETGSLKLANGRVIEKTLYNRRTRQDEPALFVALTFERREVLDSSNIKPMNLIGVDRGENIPAVIALTDPEGCPLSRFKDSLGNPTHILRIGESYKEKQRTIQAKKEVEQNRAGGYSRKYASKAKNLADDMVRNTARDLLYYAVTQDAMLIFENLSRGFGRQGKRTFMAERQYTRMEDWLTAKLAYEGLPSKTYLSKTLAQYTSKTCSNCGFTITSADYDRVLEKLKKTATGWMTTINGKELKVEGQITYYNRYKRQNVVKDLSVELDRLSEESVNNDISSWTKGRSGEALSLLKKRFSHRPVQEKFVCLNCGFETHADEQAALNIARSWLFLRSQEYKKYQTNKTTGNTDKRAFVETWQSFYRKKLKEVWKPAV

SEQ ID NO: 26388 - protein, 978 aa, synthetic construct
  REGION 1..978: note = engineered CasX variant
QEIKRINKIRRRLVKDSNTKKAGKTGPMKTLLVRVMTPDLRERLENLRKKPENIPQPISNTSRANLNKLLTDYTEMKKAILHVYWEEFQKDPVGLMSRVAQPASKKIDQNKLKPEMDEKGNLTTAGFACSQCGQPLFVYKLEQVSEKGKAYTNYFGRCNVAEHEKLILLAQLKPEKDSDEAVTYSLGKFGQRALDFYSIHVTKESTHPVKPLAQIAGNRYASGPVGKALSDACMGTIASFLSKYQDIIIEHQKVVKGNQKRLESLRELAGKENLEYPSVTLPPQPHTKEGVDAYNEVIARVRMWVNLNLWQKLKLSRDDAKPLLRLKGFPSFPLVERQANEVDWWDMVCNVKKLINEKKEDGKVFWQNLAGYKRQEALRPYLSSEEDRKKGKKFARYQLGDLLLHLEKKHGEDWGKVYDEAWERIDKKVEGLSKHIKLEEERRSEDAQSKAALTDWLRAKASFVIEGLKEADKDEFCRCELKLQKWYGDLRGKPFAIEAENSILDISGFSKQYNCAFIWQKDGVKKLNLYLIINYFKGGKLRFKKIKPEAFEANRFYTVINKKSGEIVPMEVNFNFDDPNLIILPLAFGKRQGREFIWNDLLSLETGSLKLANGRVIEKTLYNRRTRQDEPALFVALTFERREVLDSSNIKPMNLIGVDRGENIPAVIALTDPEGCPLSRFKDSLGNPTHILRIGESYKEKQRTIQAKKEVEQLRAGGYSRKYASKAKNLADDMVRNTARDLLYYAVTQDAMLIFENLSRGFGRQGKRTFMAERQYTRMEDWLTAKLAYEGLPSKTYLSKTLAQYTSKTCSNCGFTITSADYDRVLEKLKKTATGWMTTINGKELKVEGQITYYNRYKRQNVVKDLSVELDRLSEESVNNDISSWTKGRSGEALSLLKKRFSHRPVQEKFVCLNCGFETHADEQAALNIARSWLFLRSQEYKKYQTNKTTGNTDKRAFVETWQSFYRKKLKEVWKPAV

SEQ ID NO: 26389 - protein, 978 aa, synthetic construct
  REGION 1..978: note = engineered CasX variant
QEIKRINKIRRRLVKDSNTKKAGKTGPMKTLLVRVMTPDLRERLENLRKKPENIPQPISNTSRANLNKLLTDYTEMKKAILHVYWEEFQKDPVGLMSRVAQPASKKIDQNKLKPEMDEKGNLTTAGFACSQCGQPLFVYKLEQVSEKGKAYTNYFGRCNVAEHEKLILLAQLKPEKDSDEAVTYSLGKFGQRALDFYSIHVTKESTHPVKPLAQIAGNRYASGPVGKALSDACMGTIASFLSKYQDIIIEHQKVVKGNQKRLESLRELAGKENLEYPSVTLPPQPHTKEGVDAYNEVIARVRMWVNLNLWQKLKLSRDDAKPLLRLKGFPSFPLVERQANEVDWWDMVCNVKKLINEKKEDGKVFWQNLAGYKRQEALRPYLSSEEDRKKGKKFARYQLGDLLLHLEKKHGEDWGKVYDEAWERIDKKVEGLSKHIKLEEERRSEDAQSKAALTDWLRAKASFVIEGLKEADKDEFCRCELKLQKWYGDLRGKPFAIEAENSILDISGFSKQYNCAFIWQKDGVKKLNLYLIINYFKGGKLRFKKIKPEAFEANRFYTVINKKSGEIVPMEVNFNFDDPNLIILPLAFGKRQGREFIWNDLLSLETGSLKLANGRVIEKTLYNRRTRQDEPALFVALTFERREVLDSSNIKPMNLIGVDRGENIPAVIALTDPEGCPLSRFKDSLGNPTHILRIGESYKEKQRTIQAKKEVEQKRAGGYSRKYASKAKNLADDMVRNTARDLLYYAVTQDAMLIFENLSRGFGRQGKRTFMAERQYTRMEDWLTAKLAYEGLPSKTYLSKTLAQYTSKTCSNCGFTITSADYDRVLEKLKKTATGWMTTINGKELKVEGQITYYNRYKRQNVVKDLSVELDRLSEESVNNDISSWTKGRSGEALSLLKKRFSHRPVQEKFVCLNCGFETHADEQAALNIARSWLFLRSQEYKKYQTNKTTGNTDKRAFVETWQSFYRKKLKEVWKPAV

SEQ ID NO: 26390 - protein, 978 aa, synthetic construct
  REGION 1..978: note = engineered CasX variant
QEIKRINKIRRRLVKDSNTKKAGKTGPMKTLLVRVMTPDLRERLENLRKKPENIPQPISNTSRANLNKLLTDYTEMKKAILHVYWEEFQKDPVGLMSRVAQPASKKIDQNKLKPEMDEKGNLTTAGFACSQCGQPLFVYKLEQVSEKGKAYTNYFGRCNVAEHEKLILLAQLKPEKDSDEAVTYSLGKFGQRALDFYSIHVTKESTHPVKPLAQIAGNRYASGPVGKALSDACMGTIASFLSKYQDIIIEHQKVVKGNQKRLESLRELAGKENLEYPSVTLPPQPHTKEGVDAYNEVIARVRMWVNLNLWQKLKLSRDDAKPLLRLKGFPSFPLVERQANEVDWWDMVCNVKKLINEKKEDGKVFWQNLAGYKRQEALRPYLSSEEDRKKGKKFARYQLGDLLLHLEKKHGEDWGKVYDEAWERIDKKVEGLSKHIKLEEERRSEDAQSKAALTDWLRAKASFVIEGLKEADKDEFCRCELKLQKWYGDLRGKPFAIEAENSILDISGFSKQYNCAFIWQKDGVKKLNLYLIINYFKGGKLRFKKIKPEAFEANRFYTVINKKSGEIVPMEVNFNFDDPNLIILPLAFGKRQGREFIWNDLLSLETGSLKLANGRVIEKTLYNRRTRQDEPALFVALTFERREVLDSSNIKPMNLIGVDRGENIPAVIALTDPEGCPLSRFKDSLGNPTHILRIGESYKEKQRTIQAKKEVEQIRAGGYSRKYASKAKNLADDMVRNTARDLLYYAVTQDAMLIFENLSRGFGRQGKRTFMAERQYTRMEDWLTAKLAYEGLPSKTYLSKTLAQYTSKTCSNCGFTITSADYDRVLEKLKKTATGWMTTINGKELKVEGQITYYNRYKRQNVVKDLSVELDRLSEESVNNDISSWTKGRSGEALSLLKKRFSHRPVQEKFVCLNCGFETHADEQAALNIARSWLFLRSQEYKKYQTNKTTGNTDKRAFVETWQSFYRKKLKEVWKPAV

SEQ ID NO: 26391 - protein, 978 aa, synthetic construct
  REGION 1..978: note = engineered CasX variant
QEIKRINKIRRRLVKDSNTKKAGKTGPMKTLLVRVMTPDLRERLENLRKKPENIPQPISNTSRANLNKLLTDYTEMKKAILHVYWEEFQKDPVGLMSRVAQPASKKIDQNKLKPEMDEKGNLTTAGFACSQCGQPLFVYKLEQVSEKGKAYTNYFGRCNVAEHEKLILLAQLKPEKDSDEAVTYSLGKFGQRALDFYSIHVTKESTHPVKPLAQIAGNRYASGPVGKALSDACMGTIASFLSKYQDIIIEHQKVVKGNQKRLESLRELAGKENLEYPSVTLPPQPHTKEGVDAYNEVIARVRMWVNLNLWQKLKLSRDDAKPLLRLKGFPSFPLVERQANEVDWWDMVCNVKKLINEKKEDGKVFWQNLAGYKRQEALRPYLSSEEDRKKGKKFARYQLGDLLLHLEKKHGEDWGKVYDEAWERIDKKVEGLSKHIKLEEERRSEDAQSKAALTDWLRAKASFVIEGLKEADKDEFCRCELKLQKWYGDLRGKPFAIEAENSILDISGFSKQYNCAFIWQKDGVKKLNLYLIINYFKGGKLRFKKIKPEAFEANRFYTVINKKSGEIVPMEVNFNFDDPNLIILPLAFGKRQGREFIWNDLLSLETGSLKLANGRVIEKTLYNRRTRQDEPALFVALTFERREVLDSSNIKPMNLIGVDRGENIPAVIALTDPEGCPLSRFKDSLGNPTHILRIGESYKEKQRTIQAKKEVEQHRSGGYSRKYASKAKNLADDMVRNTARDLLYYAVTQDAMLIFENLSRGFGRQGKRTFMAERQYTRMEDWLTAKLAYEGLPSKTYLSKTLAQYTSKTCSNCGFTITSADYDRVLEKLKKTATGWMTTINGKELKVEGQITYYNRYKRQNVVKDLSVELDRLSEESVNNDISSWTKGRSGEALSLLKKRFSHRPVQEKFVCLNCGFETHADEQAALNIARSWLFLRSQEYKKYQTNKTTGNTDKRAFVETWQSFYRKKLKEVWKPAV

SEQ ID NO: 26392 - protein, 978 aa, synthetic construct
  REGION 1..978: note = engineered CasX variant
QEIKRINKIRRRLVKDSNTKKAGKTGPMKTLLVRVMTPDLRERLENLRKKPENIPQPISNTSRANLNKLLTDYTEMKKAILHVYWEEFQKDPVGLMSRVAQPASKKIDQNKLKPEMDEKGNLTTAGFACSQCGQPLFVYKLEQVSEKGKAYTNYFGRCNVAEHEKLILLAQLKPEKDSDEAVTYSLGKFGQRALDFYSIHVTKESTHPVKPLAQIAGNRYASGPVGKALSDACMGTIASFLSKYQDIIIEHQKVVKGNQKRLESLRELAGKENLEYPSVTLPPQPHTKEGVDAYNEVIARVRMWVNLNLWQKLKLSRDDAKPLLRLKGFPSFPLVERQANEVDWWDMVCNVKKLINEKKEDGKVFWQNLAGYKRQEALRPYLSSEEDRKKGKKFARYQLGDLLLHLEKKHGEDWGKVYDEAWERIDKKVEGLSKHIKLEEERRSEDAQSKAALTDWLRAKASFVIEGLKEADKDEFCRCELKLQKWYGDLRGKPFAIEAENSILDISGFSKQYNCAFIWQKDGVKKLNLYLIINYFKGGKLRFKKIKPEAFEANRFYTVINKKSGEIVPMEVNFNFDDPNLIILPLAFGKRQGREFIWNDLLSLETGSLKLANGRVIEKTLYNRRTRQDEPALFVALTFERREVLDSSNIKPMNLIGVDRGENIPAVIALTDPEGCPLSRFKDSLGNPTHILRIGESYKEKQRTIQAKKEVEQHRAGGYSRKYASKAKNLADDMVRNTARDLLYYAVTQDAMLIFENLSRGFGRQGKRTFMAERQYTRMEDWLTAKLAYEGLPSKTYLSKTLAQYTSKTCSNCGFTITSADYDRVLEKLKKTATGWMTTINGKELKVEGQITYYNRYKRQNVVKDLSVELDRLSEESVNNDISSWTKGRSGEALSLLKKRFSHRPVQEKFVCLNCGFETHADEQAALNIARSWLFLRSQEYKKYQTNKTTGNTDKRAFVETWQSFYRKKLKEVWKPAV

SEQ ID NO: 26393 - protein, 978 aa, synthetic construct
  REGION 1..978: note = engineered CasX variant
QEIKRINKIRRRLVKDSNTKKAGKTGPMKTLLVRVMTPDLRERLENLRKKPENIPQPISNTSRANLNKLLTDYTEMKKAILHVYWEEFQKDPVGLMSRVAQPASKKIDQNKLKPEMDEKGNLTTAGFACSQCGQPLFVYKLEQVSEKGKAYTNYFGRCNVAEHEKLILLAQLKPEKDSDEAVTYSLGKFGQRALDFYSIHVTKESTHPVKPLAQIAGNRYASGPVGKALSDACMGTIASFLSKYQDIIIEHQKVVKGNQKRLESLRELAGKENLEYPSVTLPPQPHTKEGVDAYNEVIARVRMWVNLNLWQKLKLSRDDAKPLLRLKGFPSFPLVERQANEVDWWDMVCNVKKLINEKKEDGKVFWQNLAGYKRQEALRPYLSSEEDRKKGKKFARYQLGDLLLHLEKKHGEDWGKVYDEAWERIDKKVEGLSKHIKLEEERRSEDAQSKAALTDWLRAKASFVIEGLKEADKDEFCRCELKLQKWYGDLRGKPFAIEAENSILDISGFSKQYNCAFIWQKDGVKKLNLYLIINYFKGGKLRFKKIKPEAFEANRFYTVINKKSGEIVPMEVNFNFDDPNLIILPLAFGKRQGREFIWNDLLSLETGSLKLANGRVIEKTLYNRRTRQDEPALFVALTFERREVLDSSNIKPMNLIGVDRGENIPAVIALTDPEGCPLSRFKDSLGNPTHILRIGESYKEKQRTIQAKKEVEQHHAGGYSRKYASKAKNLADDMVRNTARDLLYYAVTQDAMLIFENLSRGFGRQGKRTFMAERQYTRMEDWLTAKLAYEGLPSKTYLSKTLAQYTSKTCSNCGFTITSADYDRVLEKLKKTATGWMTTINGKELKVEGQITYYNRYKRQNVVKDLSVELDRLSEESVNNDISSWTKGRSGEALSLLKKRFSHRPVQEKFVCLNCGFETHADEQAALNIARSWLFLRSQEYKKYQTNKTTGNTDKRAFVETWQSFYRKKLKEVWKPAV

SEQ ID NO: 26394 - protein, 978 aa, synthetic construct
  REGION 1..978: note = engineered CasX variant
QEIKRINKIRRRLVKDSNTKKAGKTGPMKTLLVRVMTPDLRERLENLRKKPENIPQPISNTSRANLNKLLTDYTEMKKAILHVYWEEFQKDPVGLMSRVAQPASKKIDQNKLKPEMDEKGNLTTAGFACSQCGQPLFVYKLEQVSEKGKAYTNYFGRCNVAEHEKLILLAQLKPEKDSDEAVTYSLGKFGQRALDFYSIHVTKESTHPVKPLAQIAGNRYASGPVGKALSDACMGTIASFLSKYQDIIIEHQKVVKGNQKRLESLRELAGKENLEYPSVTLPPQPHTKEGVDAYNEVIARVRMWVNLNLWQKLKLSRDDAKPLLRLKGFPSFPLVERQANEVDWWDMVCNVKKLINEKKEDGKVFWQNLAGYKRQEALRPYLSSEEDRKKGKKFARYQLGDLLLHLEKKHGEDWGKVYDEAWERIDKKVEGLSKHIKLEEERRSEDAQSKAALTDWLRAKASFVIEGLKEADKDEFCRCELKLQKWYGDLRGKPFAIEAENSILDISGFSKQYNCAFIWQKDGVKKLNLYLIINYFKGGKLRFKKIKPEAFEANRFYTVINKKSGEIVPMEVNFNFDDPNLIILPLAFGKRQGREFIWNDLLSLETGSLKLANGRVIEKTLYNRRTRQDEPALFVALTFERREVLDSSNIKPMNLIGVDRGENIPAVIALTDPEGCPLSRFKDSLGNPTHILRIGESYKEKQRTIQAKKEVEQGRAGGYSRKYASKAKNLADDMVRNTARDLLYYAVTQDAMLIFENLSRGFGRQGKRTFMAERQYTRMEDWLTAKLAYEGLPSKTYLSKTLAQYTSKTCSNCGFTITSADYDRVLEKLKKTATGWMTTINGKELKVEGQITYYNRYKRQNVVKDLSVELDRLSEESVNNDISSWTKGRSGEALSLLKKRFSHRPVQEKFVCLNCGFETHADEQAALNIARSWLFLRSQEYKKYQTNKTTGNTDKRAFVETWQSFYRKKLKEVWKPAV

SEQ ID NO: 26395 - protein, 978 aa, synthetic construct
  REGION 1..978: note = engineered CasX variant
QEIKRINKIRRRLVKDSNTKKAGKTGPMKTLLVRVMTPDLRERLENLRKKPENIPQPISNTSRANLNKLLTDYTEMKKAILHVYWEEFQKDPVGLMSRVAQPASKKIDQNKLKPEMDEKGNLTTAGFACSQCGQPLFVYKLEQVSEKGKAYTNYFGRCNVAEHEKLILLAQLKPEKDSDEAVTYSLGKFGQRALDFYSIHVTKESTHPVKPLAQIAGNRYASGPVGKALSDACMGTIASFLSKYQDIIIEHQKVVKGNQKRLESLRELAGKENLEYPSVTLPPQPHTKEGVDAYNEVIARVRMWVNLNLWQKLKLSRDDAKPLLRLKGFPSFPLVERQANEVDWWDMVCNVKKLINEKKEDGKVFWQNLAGYKRQEALRPYLSSEEDRKKGKKFARYQLGDLLLHLEKKHGEDWGKVYDEAWERIDKKVEGLSKHIKLEEERRSEDAQSKAALTDWLRAKASFVIEGLKEADKDEFCRCELKLQKWYGDLRGKPFAIEAENSILDISGFSKQYNCAFIWQKDGVKKLNLYLIINYFKGGKLRFKKIKPEAFEANRFYTVINKKSGEIVPMEVNFNFDDPNLIILPLAFGKRQGREFIWNDLLSLETGSLKLANGRVIEKTLYNRRTRQDEPALFVALTFERREVLDSSNIKPMNLIGVDRGENIPAVIALTDPEGCPLSRFKDSLGNPTHILRIGESYKEKQRTIQAKKEVEQDRAGGYSRKYASKAKNLADDMVRNTARDLLYYAVTQDAMLIFENLSRGFGRQGKRTFMAERQYTRMEDWLTAKLAYEGLPSKTYLSKTLAQYTSKTCSNCGFTITSADYDRVLEKLKKTATGWMTTINGKELKVEGQITYYNRYKRQNVVKDLSVELDRLSEESVNNDISSWTKGRSGEALSLLKKRFSHRPVQEKFVCLNCGFETHADEQAALNIARSWLFLRSQEYKKYQTNKTTGNTDKRAFVETWQSFYRKKLKEVWKPAV

SEQ ID NO: 26396 - protein, 978 aa, synthetic construct
  REGION 1..978: note = engineered CasX variant
QEIKRINKIRRRLVKDSNTKKAGKTGPMKTLLVRVMTPDLRERLENLRKKPENIPQPISNTSRANLNKLLTDYTEMKKAILHVYWEEFQKDPVGLMSRVAQPASKKIDQNKLKPEMDEKGNLTTAGFACSQCGQPLFVYKLEQVSEKGKAYTNYFGRCNVAEHEKLILLAQLKPEKDSDEAVTYSLGKFGQRALDFYSIHVTKESTHPVKPLAQIAGNRYASGPVGKALSDACMGTIASFLSKYQDIIIEHQKVVKGNQKRLESLRELAGKENLEYPSVTLPPQPHTKEGVDAYNEVIARVRMWVNLNLWQKLKLSRDDAKPLLRLKGFPSFPLVERQANEVDWWDMVCNVKKLINEKKEDGKVFWQNLAGYKRQEALRPYLSSEEDRKKGKKFARYQLGDLLLHLEKKHGEDWGKVYDEAWERIDKKVEGLSKHIKLEEERRSEDAQSKAALTDWLRAKASFVIEGLKEADKDEFCRCELKLQKWYGDLRGKPFAIEAENSILDISGFSKQYNCAFIWQKDGVKKLNLYLIINYFKGGKLRFKKIKPEAFEANRFYTVINKKSGEIVPMEVNFNFDDPNLIILPLAFGKRQGREFIWNDLLSLETGSLKLANGRVIEKTLYNRRTRQDEPALFVALTFERREVLDSSNIKPMNLIGVDRGENIPAVIALTDPEGCPLSRFKDSLGNPTHILRIGESYKEKQRTIQAKKEVEQARAGGYSRKYASKAKNLADDMVRNTARDLLYYAVTQDAMLIFENLSRGFGRQGKRTFMAERQYTRMEDWLTAKLAYEGLPSKTYLSKTLAQYTSKTCSNCGFTITSADYDRVLEKLKKTATGWMTTINGKELKVEGQITYYNRYKRQNVVKDLSVELDRLSEESVNNDISSWTKGRSGEALSLLKKRFSHRPVQEKFVCLNCGFETHADEQAALNIARSWLFLRSQEYKKYQTNKTTGNTDKRAFVETWQSFYRKKLKEVWKPAV

SEQ ID NO: 26397 - protein, 978 aa, synthetic construct
  REGION 1..978: note = engineered CasX variant
QEIKRINKIRRRLVKDSNTKKAGKTGPMKTLLVRVMTPDLRERLENLRKKPENIPQPISNTSRANLNKLLTDYTEMKKAILHVYWEEFQKDPVGLMSRVAQPASKKIDQNKLKPEMDEKGNLTTAGFACSQCGQPLFVYKLEQVSEKGKAYTNYFGRCNVAEHEKLILLAQLKPEKDSDEAVTYSLGKFGQRALDFYSIHVTKESTHPVKPLAQIAGNRYASGPVGKALSDACMGTIASFLSKYQDIIIEHQKVVKGNQKRLESLRELAGKENLEYPSVTLPPQPHTKEGVDAYNEVIARVRMWVNLNLWQKLKLSRDDAKPLLRLKGFPSFPLVERQANEVDWWDMVCNVKKLINEKKEDGKVFWQNLAGYKRQEALRPYLSSEEDRKKGKKFARYQLGDLLLHLEKKHGEDWGKVYDEAWERIDKKVEGLSKHIKLEEERRSEDAQSKAALTDWLRAKASFVIEGLKEADKDEFCRCELKLQKWYGDLRGKPFAIEAENSILDISGFSKQYNCAFIWQKDGVKKLNLYLIINYFKGGKLRFKKIKPEAFEANRFYTVINKKSGEIVPMEVNFNFDDPNLIILPLAFGKRQGREFIWNDLLSLETGSLKLANGRVIEKTLYNRRTRQDEPALFVALTFERREVLDSSNIKPMNLIGVDRGENIPAVIALTDPEGCPLSRFKDSLGNPTHILRIGESYKEKQRTIQAKKEVENRRAGGYSRKYASKAKNLADDMVRNTARDLLYYAVTQDAMLIFENLSRGFGRQGKRTFMAERQYTRMEDWLTAKLAYEGLPSKTYLSKTLAQYTSKTCSNCGFTITSADYDRVLEKLKKTATGWMTTINGKELKVEGQITYYNRYKRQNVVKDLSVELDRLSEESVNNDISSWTKGRSGEALSLLKKRFSHRPVQEKFVCLNCGFETHADEQAALNIARSWLFLRSQEYKKYQTNKTTGNTDKRAFVETWQSFYRKKLKEVWKPAV

SEQ ID NO: 26398 - protein, 978 aa, synthetic construct
  REGION 1..978: note = engineered CasX variant
QEIKRINKIRRRLVKDSNTKKAGKTGPMKTLLVRVMTPDLRERLENLRKKPENIPQPISNTSRANLNKLLTDYTEMKKAILHVYWEEFQKDPVGLMSRVAQPASKKIDQNKLKPEMDEKGNLTTAGFACSQCGQPLFVYKLEQVSEKGKAYTNYFGRCNVAEHEKLILLAQLKPEKDSDEAVTYSLGKFGQRALDFYSIHVTKESTHPVKPLAQIAGNRYASGPVGKALSDACMGTIASFLSKYQDIIIEHQKVVKGNQKRLESLRELAGKENLEYPSVTLPPQPHTKEGVDAYNEVIARVRMWVNLNLWQKLKLSRDDAKPLLRLKGFPSFPLVERQANEVDWWDMVCNVKKLINEKKEDGKVFWQNLAGYKRQEALRPYLSSEEDRKKGKKFARYQLGDLLLHLEKKHGEDWGKVYDEAWERIDKKVEGLSKHIKLEEERRSEDAQSKAALTDWLRAKASFVIEGLKEADKDEFCRCELKLQKWYGDLRGKPFAIEAENSILDISGFSKQYNCAFIWQKDGVKKLNLYLIINYFKGGKLRFKKIKPEAFEANRFYTVINKKSGEIVPMEVNFNFDDPNLIILPLAFGKRQGREFIWNDLLSLETGSLKLANGRVIEKTLYNRRTRQDEPALFVALTFERREVLDSSNIKPMNLIGVDRGENIPAVIALTDPEGCPLSRFKDSLGNPTHILRIGESYKEKQRTIQAKKEVEMRRAGGYSRKYASKAKNLADDMVRNTARDLLYYAVTQDAMLIFENLSRGFGRQGKRTFMAERQYTRMEDWLTAKLAYEGLPSKTYLSKTLAQYTSKTCSNCGFTITSADYDRVLEKLKKTATGWMTTINGKELKVEGQITYYNRYKRQNVVKDLSVELDRLSEESVNNDISSWTKGRSGEALSLLKKRFSHRPVQEKFVCLNCGFETHADEQAALNIARSWLFLRSQEYKKYQTNKTTGNTDKRAFVETWQSFYRKKLKEVWKPAV

SEQ ID NO: 26399 - protein, 978 aa, synthetic construct
  REGION 1..978: note = engineered CasX variant
QEIKRINKIRRRLVKDSNTKKAGKTGPMKTLLVRVMTPDLRERLENLRKKPENIPQPISNTSRANLNKLLTDYTEMKKAILHVYWEEFQKDPVGLMSRVAQPASKKIDQNKLKPEMDEKGNLTTAGFACSQCGQPLFVYKLEQVSEKGKAYTNYFGRCNVAEHEKLILLAQLKPEKDSDEAVTYSLGKFGQRALDFYSIHVTKESTHPVKPLAQIAGNRYASGPVGKALSDACMGTIASFLSKYQDIIIEHQKVVKGNQKRLESLRELAGKENLEYPSVTLPPQPHTKEGVDAYNEVIARVRMWVNLNLWQKLKLSRDDAKPLLRLKGFPSFPLVERQANEVDWWDMVCNVKKLINEKKEDGKVFWQNLAGYKRQEALRPYLSSEEDRKKGKKFARYQLGDLLLHLEKKHGEDWGKVYDEAWERIDKKVEGLSKHIKLEEERRSEDAQSKAALTDWLRAKASFVIEGLKEADKDEFCRCELKLQKWYGDLRGKPFAIEAENSILDISGFSKQYNCAFIWQKDGVKKLNLYLIINYFKGGKLRFKKIKPEAFEANRFYTVINKKSGEIVPMEVNFNFDDPNLIILPLAFGKRQGREFIWNDLLSLETGSLKLANGRVIEKTLYNRRTRQDEPALFVALTFERREVLDSSNIKPMNLIGVDRGENIPAVIALTDPEGCPLSRFKDSLGNPTHILRIGESYKEKQRTIQAKKEVELRRAGGYSRKYASKAKNLADDMVRNTARDLLYYAVTQDAMLIFENLSRGFGRQGKRTFMAERQYTRMEDWLTAKLAYEGLPSKTYLSKTLAQYTSKTCSNCGFTITSADYDRVLEKLKKTATGWMTTINGKELKVEGQITYYNRYKRQNVVKDLSVELDRLSEESVNNDISSWTKGRSGEALSLLKKRFSHRPVQEKFVCLNCGFETHADEQAALNIARSWLFLRSQEYKKYQTNKTTGNTDKRAFVETWQSFYRKKLKEVWKPAV

SEQ ID NO: 26400 - protein, 978 aa, synthetic construct
  REGION 1..978: note = engineered CasX variant
QEIKRINKIRRRLVKDSNTKKAGKTGPMKTLLVRVMTPDLRERLENLRKKPENIPQPISNTSRANLNKLLTDYTEMKKAILHVYWEEFQKDPVGLMSRVAQPASKKIDQNKLKPEMDEKGNLTTAGFACSQCGQPLFVYKLEQVSEKGKAYTNYFGRCNVAEHEKLILLAQLKPEKDSDEAVTYSLGKFGQRALDFYSIHVTKESTHPVKPLAQIAGNRYASGPVGKALSDACMGTIASFLSKYQDIIIEHQKVVKGNQKRLESLRELAGKENLEYPSVTLPPQPHTKEGVDAYNEVIARVRMWVNLNLWQKLKLSRDDAKPLLRLKGFPSFPLVERQANEVDWWDMVCNVKKLINEKKEDGKVFWQNLAGYKRQEALRPYLSSEEDRKKGKKFARYQLGDLLLHLEKKHGEDWGKVYDEAWERIDKKVEGLSKHIKLEEERRSEDAQSKAALTDWLRAKASFVIEGLKEADKDEFCRCELKLQKWYGDLRGKPFAIEAENSILDISGFSKQYNCAFIWQKDGVKKLNLYLIINYFKGGKLRFKKIKPEAFEANRFYTVINKKSGEIVPMEVNFNFDDPNLIILPLAFGKRQGREFIWNDLLSLETGSLKLANGRVIEKTLYNRRTRQDEPALFVALTFERREVLDSSNIKPMNLIGVDRGENIPAVIALTDPEGCPLSRFKDSLGNPTHILRIGESYKEKQRTIQAKKEVEKRRAGGYSRKYASKAKNLADDMVRNTARDLLYYAVTQDAMLIFENLSRGFGRQGKRTFMAERQYTRMEDWLTAKLAYEGLPSKTYLSKTLAQYTSKTCSNCGFTITSADYDRVLEKLKKTATGWMTTINGKELKVEGQITYYNRYKRQNVVKDLSVELDRLSEESVNNDISSWTKGRSGEALSLLKKRFSHRPVQEKFVCLNCGFETHADEQAALNIARSWLFLRSQEYKKYQTNKTTGNTDKRAFVETWQSFYRKKLKEVWKPAV

SEQ ID NO: 26401 - protein, 978 aa, synthetic construct
  REGION 1..978: note = engineered CasX variant
QEIKRINKIRRRLVKDSNTKKAGKTGPMKTLLVRVMTPDLRERLENLRKKPENIPQPISNTSRANLNKLLTDYTEMKKAILHVYWEEFQKDPVGLMSRVAQPASKKIDQNKLKPEMDEKGNLTTAGFACSQCGQPLFVYKLEQVSEKGKAYTNYFGRCNVAEHEKLILLAQLKPEKDSDEAVTYSLGKFGQRALDFYSIHVTKESTHPVKPLAQIAGNRYASGPVGKALSDACMGTIASFLSKYQDIIIEHQKVVKGNQKRLESLRELAGKENLEYPSVTLPPQPHTKEGVDAYNEVIARVRMWVNLNLWQKLKLSRDDAKPLLRLKGFPSFPLVERQANEVDWWDMVCNVKKLINEKKEDGKVFWQNLAGYKRQEALRPYLSSEEDRKKGKKFARYQLGDLLLHLEKKHGEDWGKVYDEAWERIDKKVEGLSKHIKLEEERRSEDAQSKAALTDWLRAKASFVIEGLKEADKDEFCRCELKLQKWYGDLRGKPFAIEAENSILDISGFSKQYNCAFIWQKDGVKKLNLYLIINYFKGGKLRFKKIKPEAFEANRFYTVINKKSGEIVPMEVNFNFDDPNLIILPLAFGKRQGREFIWNDLLSLETGSLKLANGRVIEKTLYNRRTRQDEPALFVALTFERREVLDSSNIKPMNLIGVDRGENIPAVIALTDPEGCPLSRFKDSLGNPTHILRIGESYKEKQRTIQAKKEVEIRRAGGYSRKYASKAKNLADDMVRNTARDLLYYAVTQDAMLIFENLSRGFGRQGKRTFMAERQYTRMEDWLTAKLAYEGLPSKTYLSKTLAQYTSKTCSNCGFTITSADYDRVLEKLKKTATGWMTTINGKELKVEGQITYYNRYKRQNVVKDLSVELDRLSEESVNNDISSWTKGRSGEALSLLKKRFSHRPVQEKFVCLNCGFETHADEQAALNIARSWLFLRSQEYKKYQTNKTTGNTDKRAFVETWQSFYRKKLKEVWKPAV

SEQ ID NO: 26402 - protein, 978 aa, synthetic construct
  REGION 1..978: note = engineered CasX variant
QEIKRINKIRRRLVKDSNTKKAGKTGPMKTLLVRVMTPDLRERLENLRKKPENIPQPISNTSRANLNKLLTDYTEMKKAILHVYWEEFQKDPVGLMSRVAQPASKKIDQNKLKPEMDEKGNLTTAGFACSQCGQPLFVYKLEQVSEKGKAYTNYFGRCNVAEHEKLILLAQLKPEKDSDEAVTYSLGKFGQRALDFYSIHVTKESTHPVKPLAQIAGNRYASGPVGKALSDACMGTIASFLSKYQDIIIEHQKVVKGNQKRLESLRELAGKENLEYPSVTLPPQPHTKEGVDAYNEVIARVRMWVNLNLWQKLKLSRDDAKPLLRLKGFPSFPLVERQANEVDWWDMVCNVKKLINEKKEDGKVFWQNLAGYKRQEALRPYLSSEEDRKKGKKFARYQLGDLLLHLEKKHGEDWGKVYDEAWERIDKKVEGLSKHIKLEEERRSEDAQSKAALTDWLRAKASFVIEGLKEADKDEFCRCELKLQKWYGDLRGKPFAIEAENSILDISGFSKQYNCAFIWQKDGVKKLNLYLIINYFKGGKLRFKKIKPEAFEANRFYTVINKKSGEIVPMEVNFNFDDPNLIILPLAFGKRQGREFIWNDLLSLETGSLKLANGRVIEKTLYNRRTRQDEPALFVALTFERREVLDSSNIKPMNLIGVDRGENIPAVIALTDPEGCPLSRFKDSLGNPTHILRIGESYKEKQRTIQAKKEVEGRRAGGYSRKYASKAKNLADDMVRNTARDLLYYAVTQDAMLIFENLSRGFGRQGKRTFMAERQYTRMEDWLTAKLAYEGLPSKTYLSKTLAQYTSKTCSNCGFTITSADYDRVLEKLKKTATGWMTTINGKELKVEGQITYYNRYKRQNVVKDLSVELDRLSEESVNNDISSWTKGRSGEALSLLKKRFSHRPVQEKFVCLNCGFETHADEQAALNIARSWLFLRSQEYKKYQTNKTTGNTDKRAFVETWQSFYRKKLKEVWKPAV

SEQ ID NO: 26403 - protein, 978 aa, synthetic construct
  REGION 1..978: note = engineered CasX variant
QEIKRINKIRRRLVKDSNTKKAGKTGPMKTLLVRVMTPDLRERLENLRKKPENIPQPISNTSRANLNKLLTDYTEMKKAILHVYWEEFQKDPVGLMSRVAQPASKKIDQNKLKPEMDEKGNLTTAGFACSQCGQPLFVYKLEQVSEKGKAYTNYFGRCNVAEHEKLILLAQLKPEKDSDEAVTYSLGKFGQRALDFYSIHVTKESTHPVKPLAQIAGNRYASGPVGKALSDACMGTIASFLSKYQDIIIEHQKVVKGNQKRLESLRELAGKENLEYPSVTLPPQPHTKEGVDAYNEVIARVRMWVNLNLWQKLKLSRDDAKPLLRLKGFPSFPLVERQANEVDWWDMVCNVKKLINEKKEDGKVFWQNLAGYKRQEALRPYLSSEEDRKKGKKFARYQLGDLLLHLEKKHGEDWGKVYDEAWERIDKKVEGLSKHIKLEEERRSEDAQSKAALTDWLRAKASFVIEGLKEADKDEFCRCELKLQKWYGDLRGKPFAIEAENSILDISGFSKQYNCAFIWQKDGVKKLNLYLIINYFKGGKLRFKKIKPEAFEANRFYTVINKKSGEIVPMEVNFNFDDPNLIILPLAFGKRQGREFIWNDLLSLETGSLKLANGRVIEKTLYNRRTRQDEPALFVALTFERREVLDSSNIKPMNLIGVDRGENIPAVIALTDPEGCPLSRFKDSLGNPTHILRIGESYKEKQRTIQAKKEVEFRRAGGYSRKYASKAKNLADDMVRNTARDLLYYAVTQDAMLIFENLSRGFGRQGKRTFMAERQYTRMEDWLTAKLAYEGLPSKTYLSKTLAQYTSKTCSNCGFTITSADYDRVLEKLKKTATGWMTTINGKELKVEGQITYYNRYKRQNVVKDLSVELDRLSEESVNNDISSWTKGRSGEALSLLKKRFSHRPVQEKFVCLNCGFETHADEQAALNIARSWLFLRSQEYKKYQTNKTTGNTDKRAFVETWQSFYRKKLKEVWKPAV

SEQ ID NO: 26404 - protein, 978 aa, synthetic construct
  REGION 1..978: note = engineered CasX variant
QEIKRINKIRRRLVKDSNTKKAGKTGPMKTLLVRVMTPDLRERLENLRKKPENIPQPISNTSRANLNKLLTDYTEMKKAILHVYWEEFQKDPVGLMSRVAQPASKKIDQNKLKPEMDEKGNLTTAGFACSQCGQPLFVYKLEQVSEKGKAYTNYFGRCNVAEHEKLILLAQLKPEKDSDEAVTYSLGKFGQRALDFYSIHVTKESTHPVKPLAQIAGNRYASGPVGKALSDACMGTIASFLSKYQDIIIEHQKVVKGNQKRLESLRELAGKENLEYPSVTLPPQPHTKEGVDAYNEVIARVRMWVNLNLWQKLKLSRDDAKPLLRLKGFPSFPLVERQANEVDWWDMVCNVKKLINEKKEDGKVFWQNLAGYKRQEALRPYLSSEEDRKKGKKFARYQLGDLLLHLEKKHGEDWGKVYDEAWERIDKKVEGLSKHIKLEEERRSEDAQSKAALTDWLRAKASFVIEGLKEADKDEFCRCELKLQKWYGDLRGKPFAIEAENSILDISGFSKQYNCAFIWQKDGVKKLNLYLIINYFKGGKLRFKKIKPEAFEANRFYTVINKKSGEIVPMEVNFNFDDPNLIILPLAFGKRQGREFIWNDLLSLETGSLKLANGRVIEKTLYNRRTRQDEPALFVALTFERREVLDSSNIKPMNLIGVDRGENIPAVIALTDPEGCPLSRFKDSLGNPTHILRIGESYKEKQRTIQAKKEVEDRRAGGYSRKYASKAKNLADDMVRNTARDLLYYAVTQDAMLIFENLSRGFGRQGKRTFMAERQYTRMEDWLTAKLAYEGLPSKTYLSKTLAQYTSKTCSNCGFTITSADYDRVLEKLKKTATGWMTTINGKELKVEGQITYYNRYKRQNVVKDLSVELDRLSEESVNNDISSWTKGRSGEALSLLKKRFSHRPVQEKFVCLNCGFETHADEQAALNIARSWLFLRSQEYKKYQTNKTTGNTDKRAFVETWQSFYRKKLKEVWKPAV

SEQ ID NO: 26405 - protein, 978 aa, synthetic construct
  REGION 1..978: note = engineered CasX variant
QEIKRINKIRRRLVKDSNTKKAGKTGPMKTLLVRVMTPDLRERLENLRKKPENIPQPISNTSRANLNKLLTDYTEMKKAILHVYWEEFQKDPVGLMSRVAQPASKKIDQNKLKPEMDEKGNLTTAGFACSQCGQPLFVYKLEQVSEKGKAYTNYFGRCNVAEHEKLILLAQLKPEKDSDEAVTYSLGKFGQRALDFYSIHVTKESTHPVKPLAQIAGNRYASGPVGKALSDACMGTIASFLSKYQDIIIEHQKVVKGNQKRLESLRELAGKENLEYPSVTLPPQPHTKEGVDAYNEVIARVRMWVNLNLWQKLKLSRDDAKPLLRLKGFPSFPLVERQANEVDWWDMVCNVKKLINEKKEDGKVFWQNLAGYKRQEALRPYLSSEEDRKKGKKFARYQLGDLLLHLEKKHGEDWGKVYDEAWERIDKKVEGLSKHIKLEEERRSEDAQSKAALTDWLRAKASFVIEGLKEADKDEFCRCELKLQKWYGDLRGKPFAIEAENSILDISGFSKQYNCAFIWQKDGVKKLNLYLIINYFKGGKLRFKKIKPEAFEANRFYTVINKKSGEIVPMEVNFNFDDPNLIILPLAFGKRQGREFIWNDLLSLETGSLKLANGRVIEKTLYNRRTRQDEPALFVALTFERREVLDSSNIKPMNLIGVDRGENIPAVIALTDPEGCPLSRFKDSLGNPTHILRIGESYKEKQRTIQAKKEVECRRAGGYSRKYASKAKNLADDMVRNTARDLLYYAVTQDAMLIFENLSRGFGRQGKRTFMAERQYTRMEDWLTAKLAYEGLPSKTYLSKTLAQYTSKTCSNCGFTITSADYDRVLEKLKKTATGWMTTINGKELKVEGQITYYNRYKRQNVVKDLSVELDRLSEESVNNDISSWTKGRSGEALSLLKKRFSHRPVQEKFVCLNCGFETHADEQAALNIARSWLFLRSQEYKKYQTNKTTGNTDKRAFVETWQSFYRKKLKEVWKPAV

SEQ ID NO: 26406 - protein, 978 aa, synthetic construct
  REGION 1..978: note = engineered CasX variant
QEIKRINKIRRRLVKDSNTKKAGKTGPMKTLLVRVMTPDLRERLENLRKKPENIPQPISNTSRANLNKLLTDYTEMKKAILHVYWEEFQKDPVGLMSRVAQPASKKIDQNKLKPEMDEKGNLTTAGFACSQCGQPLFVYKLEQVSEKGKAYTNYFGRCNVAEHEKLILLAQLKPEKDSDEAVTYSLGKFGQRALDFYSIHVTKESTHPVKPLAQIAGNRYASGPVGKALSDACMGTIASFLSKYQDIIIEHQKVVKGNQKRLESLRELAGKENLEYPSVTLPPQPHTKEGVDAYNEVIARVRMWVNLNLWQKLKLSRDDAKPLLRLKGFPSFPLVERQANEVDWWDMVCNVKKLINEKKEDGKVFWQNLAGYKRQEALRPYLSSEEDRKKGKKFARYQLGDLLLHLEKKHGEDWGKVYDEAWERIDKKVEGLSKHIKLEEERRSEDAQSKAALTDWLRAKASFVIEGLKEADKDEFCRCELKLQKWYGDLRGKPFAIEAENSILDISGFSKQYNCAFIWQKDGVKKLNLYLIINYFKGGKLRFKKIKPEAFEANRFYTVINKKSGEIVPMEVNFNFDDPNLIILPLAFGKRQGREFIWNDLLSLETGSLKLANGRVIEKTLYNRRTRQDEPALFVALTFERREVLDSSNIKPMNLIGVDRGENIPAVIALTDPEGCPLSRFKDSLGNPTHILRIGESYKEKQRTIQAKKEVEARRAGGYSRKYASKAKNLADDMVRNTARDLLYYAVTQDAMLIFENLSRGFGRQGKRTFMAERQYTRMEDWLTAKLAYEGLPSKTYLSKTLAQYTSKTCSNCGFTITSADYDRVLEKLKKTATGWMTTINGKELKVEGQITYYNRYKRQNVVKDLSVELDRLSEESVNNDISSWTKGRSGEALSLLKKRFSHRPVQEKFVCLNCGFETHADEQAALNIARSWLFLRSQEYKKYQTNKTTGNTDKRAFVETWQSFYRKKLKEVWKPAV

SEQ ID NO: 26407 - protein, 978 aa, synthetic construct
  REGION 1..978: note = engineered CasX variant
QEIKRINKIRRRLVKDSNTKKAGKTGPMKTLLVRVMTPDLRERLENLRKKPENIPQPISNTSRANLNKLLTDYTEMKKAILHVYWEEFQKDPVGLMSRVAQPASKKIDQNKLKPEMDEKGNLTTAGFACSQCGQPLFVYKLEQVSEKGKAYTNYFGRCNVAEHEKLILLAQLKPEKDSDEAVTYSLGKFGQRALDFYSIHVTKESTHPVKPLAQIAGNRYASGPVGKALSDACMGTIASFLSKYQDIIIEHQKVVKGNQKRLESLRELAGKENLEYPSVTLPPQPHTKEGVDAYNEVIARVRMWVNLNLWQKLKLSRDDAKPLLRLKGFPSFPLVERQANEVDWWDMVCNVKKLINEKKEDGKVFWQNLAGYKRQEALRPYLSSEEDRKKGKKFARYQLGDLLLHLEKKHGEDWGKVYDEAWERIDKKVEGLSKHIKLEEERRSEDAQSKAALTDWLRAKASFVIEGLKEADKDEFCRCELKLQKWYGDLRGKPFAIEAENSILDISGFSKQYNCAFIWQKDGVKKLNLYLIINYFKGGKLRFKKIKPEAFEANRFYTVINKKSGEIVPMEVNFNFDDPNLIILPLAFGKRQGREFIWNDLLSLETGSLKLANGRVIEKTLYNRRTRQDEPALFVALTFERREVLDSSNIKPMNLIGVDRGENIPAVIALTDPEGCPLSRFKDSLGNPTHILRIGESYKEKQRTIQAKKEVDQRRAGGYSRKYASKAKNLADDMVRNTARDLLYYAVTQDAMLIFENLSRGFGRQGKRTFMAERQYTRMEDWLTAKLAYEGLPSKTYLSKTLAQYTSKTCSNCGFTITSADYDRVLEKLKKTATGWMTTINGKELKVEGQITYYNRYKRQNVVKDLSVELDRLSEESVNNDISSWTKGRSGEALSLLKKRFSHRPVQEKFVCLNCGFETHADEQAALNIARSWLFLRSQEYKKYQTNKTTGNTDKRAFVETWQSFYRKKLKEVWKPAV

SEQ ID NO: 26408 - protein, 978 aa, synthetic construct
  REGION 1..978: note = engineered CasX variant
QEIKRINKIRRRLVKDSNTKKAGKTGPMKTLLVRVMTPDLRERLENLRKKPENIPQPISNTSRANLNKLLTDYTEMKKAILHVYWEEFQKDPVGLMSRVAQPASKKIDQNKLKPEMDEKGNLTTAGFACSQCGQPLFVYKLEQVSEKGKAYTNYFGRCNVAEHEKLILLAQLKPEKDSDEAVTYSLGKFGQRALDFYSIHVTKESTHPVKPLAQIAGNRYASGPVGKALSDACMGTIASFLSKYQDIIIEHQKVVKGNQKRLESLRELAGKENLEYPSVTLPPQPHTKEGVDAYNEVIARVRMWVNLNLWQKLKLSRDDAKPLLRLKGFPSFPLVERQANEVDWWDMVCNVKKLINEKKEDGKVFWQNLAGYKRQEALRPYLSSEEDRKKGKKFARYQLGDLLLHLEKKHGEDWGKVYDEAWERIDKKVEGLSKHIKLEEERRSEDAQSKAALTDWLRAKASFVIEGLKEADKDEFCRCELKLQKWYGDLRGKPFAIEAENSILDISGFSKQYNCAFIWQKDGVKKLNLYLIINYFKGGKLRFKKIKPEAFEANRFYTVINKKSGEIVPMEVNFNFDDPNLIILPLAFGKRQGREFIWNDLLSLETGSLKLANGRVIEKTLYNRRTRQDEPALFVALTFERREVLDSSNIKPMNLIGVDRGENIPAVIALTDPEGCPLSRFKDSLGNPTHILRIGESYKEKQRTIQAKKEVCQRTAGGYSRKYASKAKNLADDMVRNTARDLLYYAVTQDAMLIFENLSRGFGRQGKRTFMAERQYTRMEDWLTAKLAYEGLPSKTYLSKTLAQYTSKTCSNCGFTITSADYDRVLEKLKKTATGWMTTINGKELKVEGQITYYNRYKRQNVVKDLSVELDRLSEESVNNDISSWTKGRSGEALSLLKKRFSHRPVQEKFVCLNCGFETHADEQAALNIARSWLFLRSQEYKKYQTNKTTGNTDKRAFVETWQSFYRKKLKEVWKPAV

SEQ ID NO: 26409 - protein, 978 aa, synthetic construct
  REGION 1..978: note = engineered CasX variant
QEIKRINKIRRRLVKDSNTKKAGKTGPMKTLLVRVMTPDLRERLENLRKKPENIPQPISNTSRANLNKLLTDYTEMKKAILHVYWEEFQKDPVGLMSRVAQPASKKIDQNKLKPEMDEKGNLTTAGFACSQCGQPLFVYKLEQVSEKGKAYTNYFGRCNVAEHEKLILLAQLKPEKDSDEAVTYSLGKFGQRALDFYSIHVTKESTHPVKPLAQIAGNRYASGPVGKALSDACMGTIASFLSKYQDIIIEHQKVVKGNQKRLESLRELAGKENLEYPSVTLPPQPHTKEGVDAYNEVIARVRMWVNLNLWQKLKLSRDDAKPLLRLKGFPSFPLVERQANEVDWWDMVCNVKKLINEKKEDGKVFWQNLAGYKRQEALRPYLSSEEDRKKGKKFARYQLGDLLLHLEKKHGEDWGKVYDEAWERIDKKVEGLSKHIKLEEERRSEDAQSKAALTDWLRAKASFVIEGLKEADKDEFCRCELKLQKWYGDLRGKPFAIEAENSILDISGFSKQYNCAFIWQKDGVKKLNLYLIINYFKGGKLRFKKIKPEAFEANRFYTVINKKSGEIVPMEVNFNFDDPNLIILPLAFGKRQGREFIWNDLLSLETGSLKLANGRVIEKTLYNRRTRQDEPALFVALTFERREVLDSSNIKPMNLIGVDRGENIPAVIALTDPEGCPLSRFKDSLGNPTHILRIGESYKEKQRTIQAKKEVCQRRAYGYSRKYASKAKNLADDMVRNTARDLLYYAVTQDAMLIFENLSRGFGRQGKRTFMAERQYTRMEDWLTAKLAYEGLPSKTYLSKTLAQYTSKTCSNCGFTITSADYDRVLEKLKKTATGWMTTINGKELKVEGQITYYNRYKRQNVVKDLSVELDRLSEESVNNDISSWTKGRSGEALSLLKKRFSHRPVQEKFVCLNCGFETHADEQAALNIARSWLFLRSQEYKKYQTNKTTGNTDKRAFVETWQSFYRKKLKEVWKPAV

SEQ ID NO: 26410 - protein, 978 aa, synthetic construct
  REGION 1..978: note = engineered CasX variant
QEIKRINKIRRRLVKDSNTKKAGKTGPMKTLLVRVMTPDLRERLENLRKKPENIPQPISNTSRANLNKLLTDYTEMKKAILHVYWEEFQKDPVGLMSRVAQPASKKIDQNKLKPEMDEKGNLTTAGFACSQCGQPLFVYKLEQVSEKGKAYTNYFGRCNVAEHEKLILLAQLKPEKDSDEAVTYSLGKFGQRALDFYSIHVTKESTHPVKPLAQIAGNRYASGPVGKALSDACMGTIASFLSKYQDIIIEHQKVVKGNQKRLESLRELAGKENLEYPSVTLPPQPHTKEGVDAYNEVIARVRMWVNLNLWQKLKLSRDDAKPLLRLKGFPSFPLVERQANEVDWWDMVCNVKKLINEKKEDGKVFWQNLAGYKRQEALRPYLSSEEDRKKGKKFARYQLGDLLLHLEKKHGEDWGKVYDEAWERIDKKVEGLSKHIKLEEERRSEDAQSKAALTDWLRAKASFVIEGLKEADKDEFCRCELKLQKWYGDLRGKPFAIEAENSILDISGFSKQYNCAFIWQKDGVKKLNLYLIINYFKGGKLRFKKIKPEAFEANRFYTVINKKSGEIVPMEVNFNFDDPNLIILPLAFGKRQGREFIWNDLLSLETGSLKLANGRVIEKTLYNRRTRQDEPALFVALTFERREVLDSSNIKPMNLIGVDRGENIPAVIALTDPEGCPLSRFKDSLGNPTHILRIGESYKEKQRTIQAKKEVCQRRANGYSRKYASKAKNLADDMVRNTARDLLYYAVTQDAMLIFENLSRGFGRQGKRTFMAERQYTRMEDWLTAKLAYEGLPSKTYLSKTLAQYTSKTCSNCGFTITSADYDRVLEKLKKTATGWMTTINGKELKVEGQITYYNRYKRQNVVKDLSVELDRLSEESVNNDISSWTKGRSGEALSLLKKRFSHRPVQEKFVCLNCGFETHADEQAALNIARSWLFLRSQEYKKYQTNKTTGNTDKRAFVETWQSFYRKKLKEVWKPAV

SEQ ID NO: 26411 - protein, 978 aa, synthetic construct
  REGION 1..978: note = engineered CasX variant
QEIKRINKIRRRLVKDSNTKKAGKTGPMKTLLVRVMTPDLRERLENLRKKPENIPQPISNTSRANLNKLLTDYTEMKKAILHVYWEEFQKDPVGLMSRVAQPASKKIDQNKLKPEMDEKGNLTTAGFACSQCGQPLFVYKLEQVSEKGKAYTNYFGRCNVAEHEKLILLAQLKPEKDSDEAVTYSLGKFGQRALDFYSIHVTKESTHPVKPLAQIAGNRYASGPVGKALSDACMGTIASFLSKYQDIIIEHQKVVKGNQKRLESLRELAGKENLEYPSVTLPPQPHTKEGVDAYNEVIARVRMWVNLNLWQKLKLSRDDAKPLLRLKGFPSFPLVERQANEVDWWDMVCNVKKLINEKKEDGKVFWQNLAGYKRQEALRPYLSSEEDRKKGKKFARYQLGDLLLHLEKKHGEDWGKVYDEAWERIDKKVEGLSKHIKLEEERRSEDAQSKAALTDWLRAKASFVIEGLKEADKDEFCRCELKLQKWYGDLRGKPFAIEAENSILDISGFSKQYNCAFIWQKDGVKKLNLYLIINYFKGGKLRFKKIKPEAFEANRFYTVINKKSGEIVPMEVNFNFDDPNLIILPLAFGKRQGREFIWNDLLSLETGSLKLANGRVIEKTLYNRRTRQDEPALFVALTFERREVLDSSNIKPMNLIGVDRGENIPAVIALTDPEGCPLSRFKDSLGNPTHILRIGESYKEKQRTIQAKKEVCQRRAGGYSRKYASKAKNLADDMVRNTARDLLYYAVTQDAMLIFENLSRGFGRQGKRTFMAERQYTRMEDWLTAKLAYEGLPSKTYLSKTLAQYTSKTCSNCGFTITSADYDRVLEKLKKTATGWMTTINGKELKVEGQITYYNRYKRQNVVKDLSVELDRLSEESVNNDISSWTKGRSGEALSLLKKRFSHRPVQEKFVCLNCGFETHADEQAALNIARSWLFLRSQEYKKYQTNKTTGNTDKRAFVETWQSFYRKKLKEVWKPAV

SEQ ID NO: 26412 - protein, 978 aa, synthetic construct
  REGION 1..978: note = engineered CasX variant
QEIKRINKIRRRLVKDSNTKKAGKTGPMKTLLVRVMTPDLRERLENLRKKPENIPQPISNTSRANLNKLLTDYTEMKKAILHVYWEEFQKDPVGLMSRVAQPASKKIDQNKLKPEMDEKGNLTTAGFACSQCGQPLFVYKLEQVSEKGKAYTNYFGRCNVAEHEKLILLAQLKPEKDSDEAVTYSLGKFGQRALDFYSIHVTKESTHPVKPLAQIAGNRYASGPVGKALSDACMGTIASFLSKYQDIIIEHQKVVKGNQKRLESLRELAGKENLEYPSVTLPPQPHTKEGVDAYNEVIARVRMWVNLNLWQKLKLSRDDAKPLLRLKGFPSFPLVERQANEVDWWDMVCNVKKLINEKKEDGKVFWQNLAGYKRQEALRPYLSSEEDRKKGKKFARYQLGDLLLHLEKKHGEDWGKVYDEAWERIDKKVEGLSKHIKLEEERRSEDAQSKAALTDWLRAKASFVIEGLKEADKDEFCRCELKLQKWYGDLRGKPFAIEAENSILDISGFSKQYNCAFIWQKDGVKKLNLYLIINYFKGGKLRFKKIKPEAFEANRFYTVINKKSGEIVPMEVNFNFDDPNLIILPLAFGKRQGREFIWNDLLSLETGSLKLANGRVIEKTLYNRRTRQDEPALFVALTFERREVLDSSNIKPMNLIGVDRGENIPAVIALTDPEGCPLSRFKDSLGNPTHILRIGESYKEKQRTIQAKKEVCQRQAGGYSRKYASKAKNLADDMVRNTARDLLYYAVTQDAMLIFENLSRGFGRQGKRTFMAERQYTRMEDWLTAKLAYEGLPSKTYLSKTLAQYTSKTCSNCGFTITSADYDRVLEKLKKTATGWMTTINGKELKVEGQITYYNRYKRQNVVKDLSVELDRLSEESVNNDISSWTKGRSGEALSLLKKRFSHRPVQEKFVCLNCGFETHADEQAALNIARSWLFLRSQEYKKYQTNKTTGNTDKRAFVETWQSFYRKKLKEVWKPAV

SEQ ID NO: 26413 - protein, 978 aa, synthetic construct
  REGION 1..978: note = engineered CasX variant
QEIKRINKIRRRLVKDSNTKKAGKTGPMKTLLVRVMTPDLRERLENLRKKPENIPQPISNTSRANLNKLLTDYTEMKKAILHVYWEEFQKDPVGLMSRVAQPASKKIDQNKLKPEMDEKGNLTTAGFACSQCGQPLFVYKLEQVSEKGKAYTNYFGRCNVAEHEKLILLAQLKPEKDSDEAVTYSLGKFGQRALDFYSIHVTKESTHPVKPLAQIAGNRYASGPVGKALSDACMGTIASFLSKYQDIIIEHQKVVKGNQKRLESLRELAGKENLEYPSVTLPPQPHTKEGVDAYNEVIARVRMWVNLNLWQKLKLSRDDAKPLLRLKGFPSFPLVERQANEVDWWDMVCNVKKLINEKKEDGKVFWQNLAGYKRQEALRPYLSSEEDRKKGKKFARYQLGDLLLHLEKKHGEDWGKVYDEAWERIDKKVEGLSKHIKLEEERRSEDAQSKAALTDWLRAKASFVIEGLKEADKDEFCRCELKLQKWYGDLRGKPFAIEAENSILDISGFSKQYNCAFIWQKDGVKKLNLYLIINYFKGGKLRFKKIKPEAFEANRFYTVINKKSGEIVPMEVNFNFDDPNLIILPLAFGKRQGREFIWNDLLSLETGSLKLANGRVIEKTLYNRRTRQDEPALFVALTFERREVLDSSNIKPMNLIGVDRGENIPAVIALTDPEGCPLSRFKDSLGNPTHILRIGESYKEKQRTIQAKKEVAQRRAGGYSRKYASKAKNLADDMVRNTARDLLYYAVTQDAMLIFENLSRGFGRQGKRTFMAERQYTRMEDWLTAKLAYEGLPSKTYLSKTLAQYTSKTCSNCGFTITSADYDRVLEKLKKTATGWMTTINGKELKVEGQITYYNRYKRQNVVKDLSVELDRLSEESVNNDISSWTKGRSGEALSLLKKRFSHRPVQEKFVCLNCGFETHADEQAALNIARSWLFLRSQEYKKYQTNKTTGNTDKRAFVETWQSFYRKKLKEVWKPAV

SEQ ID NO: 26414 - protein, 978 aa, synthetic construct
  REGION 1..978: note = engineered CasX variant
QEIKRINKIRRRLVKDSNTKKAGKTGPMKTLLVRVMTPDLRERLENLRKKPENIPQPISNTSRANLNKLLTDYTEMKKAILHVYWEEFQKDPVGLMSRVAQPASKKIDQNKLKPEMDEKGNLTTAGFACSQCGQPLFVYKLEQVSEKGKAYTNYFGRCNVAEHEKLILLAQLKPEKDSDEAVTYSLGKFGQRALDFYSIHVTKESTHPVKPLAQIAGNRYASGPVGKALSDACMGTIASFLSKYQDIIIEHQKVVKGNQKRLESLRELAGKENLEYPSVTLPPQPHTKEGVDAYNEVIARVRMWVNLNLWQKLKLSRDDAKPLLRLKGFPSFPLVERQANEVDWWDMVCNVKKLINEKKEDGKVFWQNLAGYKRQEALRPYLSSEEDRKKGKKFARYQLGDLLLHLEKKHGEDWGKVYDEAWERIDKKVEGLSKHIKLEEERRSEDAQSKAALTDWLRAKASFVIEGLKEADKDEFCRCELKLQKWYGDLRGKPFAIEAENSILDISGFSKQYNCAFIWQKDGVKKLNLYLIINYFKGGKLRFKKIKPEAFEANRFYTVINKKSGEIVPMEVNFNFDDPNLIILPLAFGKRQGREFIWNDLLSLETGSLKLANGRVIEKTLYNRRTRQDEPALFVALTFERREVLDSSNIKPMNLIGVDRGENIPAVIALTDPEGCPLSRFKDSLGNPTHILRIGESYKEKQRTIQAKKETEQRRAGGYSRKYASKAKNLADDMVRNTARDLLYYAVTQDAMLIFENLSRGFGRQGKRTFMAERQYTRMEDWLTAKLAYEGLPSKTYLSKTLAQYTSKTCSNCGFTITSADYDRVLEKLKKTATGWMTTINGKELKVEGQITYYNRYKRQNVVKDLSVELDRLSEESVNNDISSWTKGRSGEALSLLKKRFSHRPVQEKFVCLNCGFETHADEQAALNIARSWLFLRSQEYKKYQTNKTTGNTDKRAFVETWQSFYRKKLKEVWKPAV

SEQ ID NO: 26415 - protein, 978 aa, synthetic construct
  REGION 1..978: note = engineered CasX variant
QEIKRINKIRRRLVKDSNTKKAGKTGPMKTLLVRVMTPDLRERLENLRKKPENIPQPISNTSRANLNKLLTDYTEMKKAILHVYWEEFQKDPVGLMSRVAQPASKKIDQNKLKPEMDEKGNLTTAGFACSQCGQPLFVYKLEQVSEKGKAYTNYFGRCNVAEHEKLILLAQLKPEKDSDEAVTYSLGKFGQRALDFYSIHVTKESTHPVKPLAQIAGNRYASGPVGKALSDACMGTIASFLSKYQDIIIEHQKVVKGNQKRLESLRELAGKENLEYPSVTLPPQPHTKEGVDAYNEVIARVRMWVNLNLWQKLKLSRDDAKPLLRLKGFPSFPLVERQANEVDWWDMVCNVKKLINEKKEDGKVFWQNLAGYKRQEALRPYLSSEEDRKKGKKFARYQLGDLLLHLEKKHGEDWGKVYDEAWERIDKKVEGLSKHIKLEEERRSEDAQSKAALTDWLRAKASFVIEGLKEADKDEFCRCELKLQKWYGDLRGKPFAIEAENSILDISGFSKQYNCAFIWQKDGVKKLNLYLIINYFKGGKLRFKKIKPEAFEANRFYTVINKKSGEIVPMEVNFNFDDPNLIILPLAFGKRQGREFIWNDLLSLETGSLKLANGRVIEKTLYNRRTRQDEPALFVALTFERREVLDSSNIKPMNLIGVDRGENIPAVIALTDPEGCPLSRFKDSLGNPTHILRIGESYKEKQRTIQAKKETEQRQAGGYSRKYASKAKNLADDMVRNTARDLLYYAVTQDAMLIFENLSRGFGRQGKRTFMAERQYTRMEDWLTAKLAYEGLPSKTYLSKTLAQYTSKTCSNCGFTITSADYDRVLEKLKKTATGWMTTINGKELKVEGQITYYNRYKRQNVVKDLSVELDRLSEESVNNDISSWTKGRSGEALSLLKKRFSHRPVQEKFVCLNCGFETHADEQAALNIARSWLFLRSQEYKKYQTNKTTGNTDKRAFVETWQSFYRKKLKEVWKPAV

SEQ ID NO: 26416 - protein, 978 aa, synthetic construct
  REGION 1..978: note = engineered CasX variant
QEIKRINKIRRRLVKDSNTKKAGKTGPMKTLLVRVMTPDLRERLENLRKKPENIPQPISNTSRANLNKLLTDYTEMKKAILHVYWEEFQKDPVGLMSRVAQPASKKIDQNKLKPEMDEKGNLTTAGFACSQCGQPLFVYKLEQVSEKGKAYTNYFGRCNVAEHEKLILLAQLKPEKDSDEAVTYSLGKFGQRALDFYSIHVTKESTHPVKPLAQIAGNRYASGPVGKALSDACMGTIASFLSKYQDIIIEHQKVVKGNQKRLESLRELAGKENLEYPSVTLPPQPHTKEGVDAYNEVIARVRMWVNLNLWQKLKLSRDDAKPLLRLKGFPSFPLVERQANEVDWWDMVCNVKKLINEKKEDGKVFWQNLAGYKRQEALRPYLSSEEDRKKGKKFARYQLGDLLLHLEKKHGEDWGKVYDEAWERIDKKVEGLSKHIKLEEERRSEDAQSKAALTDWLRAKASFVIEGLKEADKDEFCRCELKLQKWYGDLRGKPFAIEAENSILDISGFSKQYNCAFIWQKDGVKKLNLYLIINYFKGGKLRFKKIKPEAFEANRFYTVINKKSGEIVPMEVNFNFDDPNLIILPLAFGKRQGREFIWNDLLSLETGSLKLANGRVIEKTLYNRRTRQDEPALFVALTFERREVLDSSNIKPMNLIGVDRGENIPAVIALTDPEGCPLSRFKDSLGNPTHILRIGESYKEKQRTIQAKKESRQRRAGGYSRKYASKAKNLADDMVRNTARDLLYYAVTQDAMLIFENLSRGFGRQGKRTFMAERQYTRMEDWLTAKLAYEGLPSKTYLSKTLAQYTSKTCSNCGFTITSADYDRVLEKLKKTATGWMTTINGKELKVEGQITYYNRYKRQNVVKDLSVELDRLSEESVNNDISSWTKGRSGEALSLLKKRFSHRPVQEKFVCLNCGFETHADEQAALNIARSWLFLRSQEYKKYQTNKTTGNTDKRAFVETWQSFYRKKLKEVWKPAV

SEQ ID NO: 26417 - protein, 978 aa, synthetic construct
  REGION 1..978: note = engineered CasX variant
QEIKRINKIRRRLVKDSNTKKAGKTGPMKTLLVRVMTPDLRERLENLRKKPENIPQPISNTSRANLNKLLTDYTEMKKAILHVYWEEFQKDPVGLMSRVAQPASKKIDQNKLKPEMDEKGNLTTAGFACSQCGQPLFVYKLEQVSEKGKAYTNYFGRCNVAEHEKLILLAQLKPEKDSDEAVTYSLGKFGQRALDFYSIHVTKESTHPVKPLAQIAGNRYASGPVGKALSDACMGTIASFLSKYQDIIIEHQKVVKGNQKRLESLRELAGKENLEYPSVTLPPQPHTKEGVDAYNEVIARVRMWVNLNLWQKLKLSRDDAKPLLRLKGFPSFPLVERQANEVDWWDMVCNVKKLINEKKEDGKVFWQNLAGYKRQEALRPYLSSEEDRKKGKKFARYQLGDLLLHLEKKHGEDWGKVYDEAWERIDKKVEGLSKHIKLEEERRSEDAQSKAALTDWLRAKASFVIEGLKEADKDEFCRCELKLQKWYGDLRGKPFAIEAENSILDISGFSKQYNCAFIWQKDGVKKLNLYLIINYFKGGKLRFKKIKPEAFEANRFYTVINKKSGEIVPMEVNFNFDDPNLIILPLAFGKRQGREFIWNDLLSLETGSLKLANGRVIEKTLYNRRTRQDEPALFVALTFERREVLDSSNIKPMNLIGVDRGENIPAVIALTDPEGCPLSRFKDSLGNPTHILRIGESYKEKQRTIQAKKESEQRRAYGYSRKYASKAKNLADDMVRNTARDLLYYAVTQDAMLIFENLSRGFGRQGKRTFMAERQYTRMEDWLTAKLAYEGLPSKTYLSKTLAQYTSKTCSNCGFTITSADYDRVLEKLKKTATGWMTTINGKELKVEGQITYYNRYKRQNVVKDLSVELDRLSEESVNNDISSWTKGRSGEALSLLKKRFSHRPVQEKFVCLNCGFETHADEQAALNIARSWLFLRSQEYKKYQTNKTTGNTDKRAFVETWQSFYRKKLKEVWKPAV

SEQ ID NO: 26418 - protein, 978 aa, synthetic construct
  REGION 1..978: note = engineered CasX variant
QEIKRINKIRRRLVKDSNTKKAGKTGPMKTLLVRVMTPDLRERLENLRKKPENIPQPISNTSRANLNKLLTDYTEMKKAILHVYWEEFQKDPVGLMSRVAQPASKKIDQNKLKPEMDEKGNLTTAGFACSQCGQPLFVYKLEQVSEKGKAYTNYFGRCNVAEHEKLILLAQLKPEKDSDEAVTYSLGKFGQRALDFYSIHVTKESTHPVKPLAQIAGNRYASGPVGKALSDACMGTIASFLSKYQDIIIEHQKVVKGNQKRLESLRELAGKENLEYPSVTLPPQPHTKEGVDAYNEVIARVRMWVNLNLWQKLKLSRDDAKPLLRLKGFPSFPLVERQANEVDWWDMVCNVKKLINEKKEDGKVFWQNLAGYKRQEALRPYLSSEEDRKKGKKFARYQLGDLLLHLEKKHGEDWGKVYDEAWERIDKKVEGLSKHIKLEEERRSEDAQSKAALTDWLRAKASFVIEGLKEADKDEFCRCELKLQKWYGDLRGKPFAIEAENSILDISGFSKQYNCAFIWQKDGVKKLNLYLIINYFKGGKLRFKKIKPEAFEANRFYTVINKKSGEIVPMEVNFNFDDPNLIILPLAFGKRQGREFIWNDLLSLETGSLKLANGRVIEKTLYNRRTRQDEPALFVALTFERREVLDSSNIKPMNLIGVDRGENIPAVIALTDPEGCPLSRFKDSLGNPTHILRIGESYKEKQRTIQAKKESEQRRAGGYSRKYASKAKNLADDMVRNTARDLLYYAVTQDAMLIFENLSRGFGRQGKRTFMAERQYTRMEDWLTAKLAYEGLPSKTYLSKTLAQYTSKTCSNCGFTITSADYDRVLEKLKKTATGWMTTINGKELKVEGQITYYNRYKRQNVVKDLSVELDRLSEESVNNDISSWTKGRSGEALSLLKKRFSHRPVQEKFVCLNCGFETHADEQAALNIARSWLFLRSQEYKKYQTNKTTGNTDKRAFVETWQSFYRKKLKEVWKPAV

SEQ ID NO: 26419 - protein, 978 aa, synthetic construct
  REGION 1..978: note = engineered CasX variant
QEIKRINKIRRRLVKDSNTKKAGKTGPMKTLLVRVMTPDLRERLENLRKKPENIPQPISNTSRANLNKLLTDYTEMKKAILHVYWEEFQKDPVGLMSRVAQPASKKIDQNKLKPEMDEKGNLTTAGFACSQCGQPLFVYKLEQVSEKGKAYTNYFGRCNVAEHEKLILLAQLKPEKDSDEAVTYSLGKFGQRALDFYSIHVTKESTHPVKPLAQIAGNRYASGPVGKALSDACMGTIASFLSKYQDIIIEHQKVVKGNQKRLESLRELAGKENLEYPSVTLPPQPHTKEGVDAYNEVIARVRMWVNLNLWQKLKLSRDDAKPLLRLKGFPSFPLVERQANEVDWWDMVCNVKKLINEKKEDGKVFWQNLAGYKRQEALRPYLSSEEDRKKGKKFARYQLGDLLLHLEKKHGEDWGKVYDEAWERIDKKVEGLSKHIKLEEERRSEDAQSKAALTDWLRAKASFVIEGLKEADKDEFCRCELKLQKWYGDLRGKPFAIEAENSILDISGFSKQYNCAFIWQKDGVKKLNLYLIINYFKGGKLRFKKIKPEAFEANRFYTVINKKSGEIVPMEVNFNFDDPNLIILPLAFGKRQGREFIWNDLLSLETGSLKLANGRVIEKTLYNRRTRQDEPALFVALTFERREVLDSSNIKPMNLIGVDRGENIPAVIALTDPEGCPLSRFKDSLGNPTHILRIGESYKEKQRTIQAKKEREQRRAGGYSRKYASKAKNLADDMVRNTARDLLYYAVTQDAMLIFENLSRGFGRQGKRTFMAERQYTRMEDWLTAKLAYEGLPSKTYLSKTLAQYTSKTCSNCGFTITSADYDRVLEKLKKTATGWMTTINGKELKVEGQITYYNRYKRQNVVKDLSVELDRLSEESVNNDISSWTKGRSGEALSLLKKRFSHRPVQEKFVCLNCGFETHADEQAALNIARSWLFLRSQEYKKYQTNKTTGNTDKRAFVETWQSFYRKKLKEVWKPAV

SEQ ID NO: 26420 - protein, 978 aa, synthetic construct
  REGION 1..978: note = engineered CasX variant
QEIKRINKIRRRLVKDSNTKKAGKTGPMKTLLVRVMTPDLRERLENLRKKPENIPQPISNTSRANLNKLLTDYTEMKKAILHVYWEEFQKDPVGLMSRVAQPASKKIDQNKLKPEMDEKGNLTTAGFACSQCGQPLFVYKLEQVSEKGKAYTNYFGRCNVAEHEKLILLAQLKPEKDSDEAVTYSLGKFGQRALDFYSIHVTKESTHPVKPLAQIAGNRYASGPVGKALSDACMGTIASFLSKYQDIIIEHQKVVKGNQKRLESLRELAGKENLEYPSVTLPPQPHTKEGVDAYNEVIARVRMWVNLNLWQKLKLSRDDAKPLLRLKGFPSFPLVERQANEVDWWDMVCNVKKLINEKKEDGKVFWQNLAGYKRQEALRPYLSSEEDRKKGKKFARYQLGDLLLHLEKKHGEDWGKVYDEAWERIDKKVEGLSKHIKLEEERRSEDAQSKAALTDWLRAKASFVIEGLKEADKDEFCRCELKLQKWYGDLRGKPFAIEAENSILDISGFSKQYNCAFIWQKDGVKKLNLYLIINYFKGGKLRFKKIKPEAFEANRFYTVINKKSGEIVPMEVNFNFDDPNLIILPLAFGKRQGREFIWNDLLSLETGSLKLANGRVIEKTLYNRRTRQDEPALFVALTFERREVLDSSNIKPMNLIGVDRGENIPAVIALTDPEGCPLSRFKDSLGNPTHILRIGESYKEKQRTIQAKKEREERRAGGYSRKYASKAKNLADDMVRNTARDLLYYAVTQDAMLIFENLSRGFGRQGKRTFMAERQYTRMEDWLTAKLAYEGLPSKTYLSKTLAQYTSKTCSNCGFTITSADYDRVLEKLKKTATGWMTTINGKELKVEGQITYYNRYKRQNVVKDLSVELDRLSEESVNNDISSWTKGRSGEALSLLKKRFSHRPVQEKFVCLNCGFETHADEQAALNIARSWLFLRSQEYKKYQTNKTTGNTDKRAFVETWQSFYRKKLKEVWKPAV

SEQ ID NO: 26421 - protein, 978 aa, synthetic construct
  REGION 1..978: note = engineered CasX variant
QEIKRINKIRRRLVKDSNTKKAGKTGPMKTLLVRVMTPDLRERLENLRKKPENIPQPISNTSRANLNKLLTDYTEMKKAILHVYWEEFQKDPVGLMSRVAQPASKKIDQNKLKPEMDEKGNLTTAGFACSQCGQPLFVYKLEQVSEKGKAYTNYFGRCNVAEHEKLILLAQLKPEKDSDEAVTYSLGKFGQRALDFYSIHVTKESTHPVKPLAQIAGNRYASGPVGKALSDACMGTIASFLSKYQDIIIEHQKVVKGNQKRLESLRELAGKENLEYPSVTLPPQPHTKEGVDAYNEVIARVRMWVNLNLWQKLKLSRDDAKPLLRLKGFPSFPLVERQANEVDWWDMVCNVKKLINEKKEDGKVFWQNLAGYKRQEALRPYLSSEEDRKKGKKFARYQLGDLLLHLEKKHGEDWGKVYDEAWERIDKKVEGLSKHIKLEEERRSEDAQSKAALTDWLRAKASFVIEGLKEADKDEFCRCELKLQKWYGDLRGKPFAIEAENSILDISGFSKQYNCAFIWQKDGVKKLNLYLIINYFKGGKLRFKKIKPEAFEANRFYTVINKKSGEIVPMEVNFNFDDPNLIILPLAFGKRQGREFIWNDLLSLETGSLKLANGRVIEKTLYNRRTRQDEPALFVALTFERREVLDSSNIKPMNLIGVDRGENIPAVIALTDPEGCPLSRFKDSLGNPTHILRIGESYKEKQRTIQAKKEQEQRRAGGYSRKYASKAKNLADDMVRNTARDLLYYAVTQDAMLIFENLSRGFGRQGKRTFMAERQYTRMEDWLTAKLAYEGLPSKTYLSKTLAQYTSKTCSNCGFTITSADYDRVLEKLKKTATGWMTTINGKELKVEGQITYYNRYKRQNVVKDLSVELDRLSEESVNNDISSWTKGRSGEALSLLKKRFSHRPVQEKFVCLNCGFETHADEQAALNIARSWLFLRSQEYKKYQTNKTTGNTDKRAFVETWQSFYRKKLKEVWKPAV

SEQ ID NO: 26422 - protein, 978 aa, synthetic construct
  REGION 1..978: note = engineered CasX variant
QEIKRINKIRRRLVKDSNTKKAGKTGPMKTLLVRVMTPDLRERLENLRKKPENIPQPISNTSRANLNKLLTDYTEMKKAILHVYWEEFQKDPVGLMSRVAQPASKKIDQNKLKPEMDEKGNLTTAGFACSQCGQPLFVYKLEQVSEKGKAYTNYFGRCNVAEHEKLILLAQLKPEKDSDEAVTYSLGKFGQRALDFYSIHVTKESTHPVKPLAQIAGNRYASGPVGKALSDACMGTIASFLSKYQDIIIEHQKVVKGNQKRLESLRELAGKENLEYPSVTLPPQPHTKEGVDAYNEVIARVRMWVNLNLWQKLKLSRDDAKPLLRLKGFPSFPLVERQANEVDWWDMVCNVKKLINEKKEDGKVFWQNLAGYKRQEALRPYLSSEEDRKKGKKFARYQLGDLLLHLEKKHGEDWGKVYDEAWERIDKKVEGLSKHIKLEEERRSEDAQSKAALTDWLRAKASFVIEGLKEADKDEFCRCELKLQKWYGDLRGKPFAIEAENSILDISGFSKQYNCAFIWQKDGVKKLNLYLIINYFKGGKLRFKKIKPEAFEANRFYTVINKKSGEIVPMEVNFNFDDPNLIILPLAFGKRQGREFIWNDLLSLETGSLKLANGRVIEKTLYNRRTRQDEPALFVALTFERREVLDSSNIKPMNLIGVDRGENIPAVIALTDPEGCPLSRFKDSLGNPTHILRIGESYKEKQRTIQAKKEPEQRRAGGYSRKYASKAKNLADDMVRNTARDLLYYAVTQDAMLIFENLSRGFGRQGKRTFMAERQYTRMEDWLTAKLAYEGLPSKTYLSKTLAQYTSKTCSNCGFTITSADYDRVLEKLKKTATGWMTTINGKELKVEGQITYYNRYKRQNVVKDLSVELDRLSEESVNNDISSWTKGRSGEALSLLKKRFSHRPVQEKFVCLNCGFETHADEQAALNIARSWLFLRSQEYKKYQTNKTTGNTDKRAFVETWQSFYRKKLKEVWKPAV

SEQ ID NO: 26423 - protein, 978 aa, synthetic construct
  REGION 1..978: note = engineered CasX variant
QEIKRINKIRRRLVKDSNTKKAGKTGPMKTLLVRVMTPDLRERLENLRKKPENIPQPISNTSRANLNKLLTDYTEMKKAILHVYWEEFQKDPVGLMSRVAQPASKKIDQNKLKPEMDEKGNLTTAGFACSQCGQPLFVYKLEQVSEKGKAYTNYFGRCNVAEHEKLILLAQLKPEKDSDEAVTYSLGKFGQRALDFYSIHVTKESTHPVKPLAQIAGNRYASGPVGKALSDACMGTIASFLSKYQDIIIEHQKVVKGNQKRLESLRELAGKENLEYPSVTLPPQPHTKEGVDAYNEVIARVRMWVNLNLWQKLKLSRDDAKPLLRLKGFPSFPLVERQANEVDWWDMVCNVKKLINEKKEDGKVFWQNLAGYKRQEALRPYLSSEEDRKKGKKFARYQLGDLLLHLEKKHGEDWGKVYDEAWERIDKKVEGLSKHIKLEEERRSEDAQSKAALTDWLRAKASFVIEGLKEADKDEFCRCELKLQKWYGDLRGKPFAIEAENSILDISGFSKQYNCAFIWQKDGVKKLNLYLIINYFKGGKLRFKKIKPEAFEANRFYTVINKKSGEIVPMEVNFNFDDPNLIILPLAFGKRQGREFIWNDLLSLETGSLKLANGRVIEKTLYNRRTRQDEPALFVALTFERREVLDSSNIKPMNLIGVDRGENIPAVIALTDPEGCPLSRFKDSLGNPTHILRIGESYKEKQRTIQAKKEMEQRRAGGYSRKYASKAKNLADDMVRNTARDLLYYAVTQDAMLIFENLSRGFGRQGKRTFMAERQYTRMEDWLTAKLAYEGLPSKTYLSKTLAQYTSKTCSNCGFTITSADYDRVLEKLKKTATGWMTTINGKELKVEGQITYYNRYKRQNVVKDLSVELDRLSEESVNNDISSWTKGRSGEALSLLKKRFSHRPVQEKFVCLNCGFETHADEQAALNIARSWLFLRSQEYKKYQTNKTTGNTDKRAFVETWQSFYRKKLKEVWKPAV

SEQ ID NO: 26424 - protein, 978 aa, synthetic construct
  REGION 1..978: note = engineered CasX variant
QEIKRINKIRRRLVKDSNTKKAGKTGPMKTLLVRVMTPDLRERLENLRKKPENIPQPISNTSRANLNKLLTDYTEMKKAILHVYWEEFQKDPVGLMSRVAQPASKKIDQNKLKPEMDEKGNLTTAGFACSQCGQPLFVYKLEQVSEKGKAYTNYFGRCNVAEHEKLILLAQLKPEKDSDEAVTYSLGKFGQRALDFYSIHVTKESTHPVKPLAQIAGNRYASGPVGKALSDACMGTIASFLSKYQDIIIEHQKVVKGNQKRLESLRELAGKENLEYPSVTLPPQPHTKEGVDAYNEVIARVRMWVNLNLWQKLKLSRDDAKPLLRLKGFPSFPLVERQANEVDWWDMVCNVKKLINEKKEDGKVFWQNLAGYKRQEALRPYLSSEEDRKKGKKFARYQLGDLLLHLEKKHGEDWGKVYDEAWERIDKKVEGLSKHIKLEEERRSEDAQSKAALTDWLRAKASFVIEGLKEADKDEFCRCELKLQKWYGDLRGKPFAIEAENSILDISGFSKQYNCAFIWQKDGVKKLNLYLIINYFKGGKLRFKKIKPEAFEANRFYTVINKKSGEIVPMEVNFNFDDPNLIILPLAFGKRQGREFIWNDLLSLETGSLKLANGRVIEKTLYNRRTRQDEPALFVALTFERREVLDSSNIKPMNLIGVDRGENIPAVIALTDPEGCPLSRFKDSLGNPTHILRIGESYKEKQRTIQAKKEMAQRRAGGYSRKYASKAKNLADDMVRNTARDLLYYAVTQDAMLIFENLSRGFGRQGKRTFMAERQYTRMEDWLTAKLAYEGLPSKTYLSKTLAQYTSKTCSNCGFTITSADYDRVLEKLKKTATGWMTTINGKELKVEGQITYYNRYKRQNVVKDLSVELDRLSEESVNNDISSWTKGRSGEALSLLKKRFSHRPVQEKFVCLNCGFETHADEQAALNIARSWLFLRSQEYKKYQTNKTTGNTDKRAFVETWQSFYRKKLKEVWKPAV

SEQ ID NO: 26425 - protein, 978 aa, synthetic construct
  REGION 1..978: note = engineered CasX variant
QEIKRINKIRRRLVKDSNTKKAGKTGPMKTLLVRVMTPDLRERLENLRKKPENIPQPISNTSRANLNKLLTDYTEMKKAILHVYWEEFQKDPVGLMSRVAQPASKKIDQNKLKPEMDEKGNLTTAGFACSQCGQPLFVYKLEQVSEKGKAYTNYFGRCNVAEHEKLILLAQLKPEKDSDEAVTYSLGKFGQRALDFYSIHVTKESTHPVKPLAQIAGNRYASGPVGKALSDACMGTIASFLSKYQDIIIEHQKVVKGNQKRLESLRELAGKENLEYPSVTLPPQPHTKEGVDAYNEVIARVRMWVNLNLWQKLKLSRDDAKPLLRLKGFPSFPLVERQANEVDWWDMVCNVKKLINEKKEDGKVFWQNLAGYKRQEALRPYLSSEEDRKKGKKFARYQLGDLLLHLEKKHGEDWGKVYDEAWERIDKKVEGLSKHIKLEEERRSEDAQSKAALTDWLRAKASFVIEGLKEADKDEFCRCELKLQKWYGDLRGKPFAIEAENSILDISGFSKQYNCAFIWQKDGVKKLNLYLIINYFKGGKLRFKKIKPEAFEANRFYTVINKKSGEIVPMEVNFNFDDPNLIILPLAFGKRQGREFIWNDLLSLETGSLKLANGRVIEKTLYNRRTRQDEPALFVALTFERREVLDSSNIKPMNLIGVDRGENIPAVIALTDPEGCPLSRFKDSLGNPTHILRIGESYKEKQRTIQAKKELEQRRAGGYSRKYASKAKNLADDMVRNTARDLLYYAVTQDAMLIFENLSRGFGRQGKRTFMAERQYTRMEDWLTAKLAYEGLPSKTYLSKTLAQYTSKTCSNCGFTITSADYDRVLEKLKKTATGWMTTINGKELKVEGQITYYNRYKRQNVVKDLSVELDRLSEESVNNDISSWTKGRSGEALSLLKKRFSHRPVQEKFVCLNCGFETHADEQAALNIARSWLFLRSQEYKKYQTNKTTGNTDKRAFVETWQSFYRKKLKEVWKPAV

SEQ ID NO: 26426 - protein, 978 aa, synthetic construct
  REGION 1..978: note = engineered CasX variant
QEIKRINKIRRRLVKDSNTKKAGKTGPMKTLLVRVMTPDLRERLENLRKKPENIPQPISNTSRANLNKLLTDYTEMKKAILHVYWEEFQKDPVGLMSRVAQPASKKIDQNKLKPEMDEKGNLTTAGFACSQCGQPLFVYKLEQVSEKGKAYTNYFGRCNVAEHEKLILLAQLKPEKDSDEAVTYSLGKFGQRALDFYSIHVTKESTHPVKPLAQIAGNRYASGPVGKALSDACMGTIASFLSKYQDIIIEHQKVVKGNQKRLESLRELAGKENLEYPSVTLPPQPHTKEGVDAYNEVIARVRMWVNLNLWQKLKLSRDDAKPLLRLKGFPSFPLVERQANEVDWWDMVCNVKKLINEKKEDGKVFWQNLAGYKRQEALRPYLSSEEDRKKGKKFARYQLGDLLLHLEKKHGEDWGKVYDEAWERIDKKVEGLSKHIKLEEERRSEDAQSKAALTDWLRAKASFVIEGLKEADKDEFCRCELKLQKWYGDLRGKPFAIEAENSILDISGFSKQYNCAFIWQKDGVKKLNLYLIINYFKGGKLRFKKIKPEAFEANRFYTVINKKSGEIVPMEVNFNFDDPNLIILPLAFGKRQGREFIWNDLLSLETGSLKLANGRVIEKTLYNRRTRQDEPALFVALTFERREVLDSSNIKPMNLIGVDRGENIPAVIALTDPEGCPLSRFKDSLGNPTHILRIGESYKEKQRTIQAKKEKEQRRAGGYSRKYASKAKNLADDMVRNTARDLLYYAVTQDAMLIFENLSRGFGRQGKRTFMAERQYTRMEDWLTAKLAYEGLPSKTYLSKTLAQYTSKTCSNCGFTITSADYDRVLEKLKKTATGWMTTINGKELKVEGQITYYNRYKRQNVVKDLSVELDRLSEESVNNDISSWTKGRSGEALSLLKKRFSHRPVQEKFVCLNCGFETHADEQAALNIARSWLFLRSQEYKKYQTNKTTGNTDKRAFVETWQSFYRKKLKEVWKPAV

SEQ ID NO: 26427 - protein, 978 aa, synthetic construct
  REGION 1..978: note = engineered CasX variant
QEIKRINKIRRRLVKDSNTKKAGKTGPMKTLLVRVMTPDLRERLENLRKKPENIPQPISNTSRANLNKLLTDYTEMKKAILHVYWEEFQKDPVGLMSRVAQPASKKIDQNKLKPEMDEKGNLTTAGFACSQCGQPLFVYKLEQVSEKGKAYTNYFGRCNVAEHEKLILLAQLKPEKDSDEAVTYSLGKFGQRALDFYSIHVTKESTHPVKPLAQIAGNRYASGPVGKALSDACMGTIASFLSKYQDIIIEHQKVVKGNQKRLESLRELAGKENLEYPSVTLPPQPHTKEGVDAYNEVIARVRMWVNLNLWQKLKLSRDDAKPLLRLKGFPSFPLVERQANEVDWWDMVCNVKKLINEKKEDGKVFWQNLAGYKRQEALRPYLSSEEDRKKGKKFARYQLGDLLLHLEKKHGEDWGKVYDEAWERIDKKVEGLSKHIKLEEERRSEDAQSKAALTDWLRAKASFVIEGLKEADKDEFCRCELKLQKWYGDLRGKPFAIEAENSILDISGFSKQYNCAFIWQKDGVKKLNLYLIINYFKGGKLRFKKIKPEAFEANRFYTVINKKSGEIVPMEVNFNFDDPNLIILPLAFGKRQGREFIWNDLLSLETGSLKLANGRVIEKTLYNRRTRQDEPALFVALTFERREVLDSSNIKPMNLIGVDRGENIPAVIALTDPEGCPLSRFKDSLGNPTHILRIGESYKEKQRTIQAKKEIEQRRAGGYSRKYASKAKNLADDMVRNTARDLLYYAVTQDAMLIFENLSRGFGRQGKRTFMAERQYTRMEDWLTAKLAYEGLPSKTYLSKTLAQYTSKTCSNCGFTITSADYDRVLEKLKKTATGWMTTINGKELKVEGQITYYNRYKRQNVVKDLSVELDRLSEESVNNDISSWTKGRSGEALSLLKKRFSHRPVQEKFVCLNCGFETHADEQAALNIARSWLFLRSQEYKKYQTNKTTGNTDKRAFVETWQSFYRKKLKEVWKPAV

SEQ ID NO: 26428 - protein, 978 aa, synthetic construct
  REGION 1..978: note = engineered CasX variant
QEIKRINKIRRRLVKDSNTKKAGKTGPMKTLLVRVMTPDLRERLENLRKKPENIPQPISNTSRANLNKLLTDYTEMKKAILHVYWEEFQKDPVGLMSRVAQPASKKIDQNKLKPEMDEKGNLTTAGFACSQCGQPLFVYKLEQVSEKGKAYTNYFGRCNVAEHEKLILLAQLKPEKDSDEAVTYSLGKFGQRALDFYSIHVTKESTHPVKPLAQIAGNRYASGPVGKALSDACMGTIASFLSKYQDIIIEHQKVVKGNQKRLESLRELAGKENLEYPSVTLPPQPHTKEGVDAYNEVIARVRMWVNLNLWQKLKLSRDDAKPLLRLKGFPSFPLVERQANEVDWWDMVCNVKKLINEKKEDGKVFWQNLAGYKRQEALRPYLSSEEDRKKGKKFARYQLGDLLLHLEKKHGEDWGKVYDEAWERIDKKVEGLSKHIKLEEERRSEDAQSKAALTDWLRAKASFVIEGLKEADKDEFCRCELKLQKWYGDLRGKPFAIEAENSILDISGFSKQYNCAFIWQKDGVKKLNLYLIINYFKGGKLRFKKIKPEAFEANRFYTVINKKSGEIVPMEVNFNFDDPNLIILPLAFGKRQGREFIWNDLLSLETGSLKLANGRVIEKTLYNRRTRQDEPALFVALTFERREVLDSSNIKPMNLIGVDRGENIPAVIALTDPEGCPLSRFKDSLGNPTHILRIGESYKEKQRTIQAKKEHEQRRAGGYSRKYASKAKNLADDMVRNTARDLLYYAVTQDAMLIFENLSRGFGRQGKRTFMAERQYTRMEDWLTAKLAYEGLPSKTYLSKTLAQYTSKTCSNCGFTITSADYDRVLEKLKKTATGWMTTINGKELKVEGQITYYNRYKRQNVVKDLSVELDRLSEESVNNDISSWTKGRSGEALSLLKKRFSHRPVQEKFVCLNCGFETHADEQAALNIARSWLFLRSQEYKKYQTNKTTGNTDKRAFVETWQSFYRKKLKEVWKPAV

SEQ ID NO: 26429 - protein, 978 aa, synthetic construct
  REGION 1..978: note = engineered CasX variant
QEIKRINKIRRRLVKDSNTKKAGKTGPMKTLLVRVMTPDLRERLENLRKKPENIPQPISNTSRANLNKLLTDYTEMKKAILHVYWEEFQKDPVGLMSRVAQPASKKIDQNKLKPEMDEKGNLTTAGFACSQCGQPLFVYKLEQVSEKGKAYTNYFGRCNVAEHEKLILLAQLKPEKDSDEAVTYSLGKFGQRALDFYSIHVTKESTHPVKPLAQIAGNRYASGPVGKALSDACMGTIASFLSKYQDIIIEHQKVVKGNQKRLESLRELAGKENLEYPSVTLPPQPHTKEGVDAYNEVIARVRMWVNLNLWQKLKLSRDDAKPLLRLKGFPSFPLVERQANEVDWWDMVCNVKKLINEKKEDGKVFWQNLAGYKRQEALRPYLSSEEDRKKGKKFARYQLGDLLLHLEKKHGEDWGKVYDEAWERIDKKVEGLSKHIKLEEERRSEDAQSKAALTDWLRAKASFVIEGLKEADKDEFCRCELKLQKWYGDLRGKPFAIEAENSILDISGFSKQYNCAFIWQKDGVKKLNLYLIINYFKGGKLRFKKIKPEAFEANRFYTVINKKSGEIVPMEVNFNFDDPNLIILPLAFGKRQGREFIWNDLLSLETGSLKLANGRVIEKTLYNRRTRQDEPALFVALTFERREVLDSSNIKPMNLIGVDRGENIPAVIALTDPEGCPLSRFKDSLGNPTHILRIGESYKEKQRTIQAKKEGEQRRAGGYSRKYASKAKNLADDMVRNTARDLLYYAVTQDAMLIFENLSRGFGRQGKRTFMAERQYTRMEDWLTAKLAYEGLPSKTYLSKTLAQYTSKTCSNCGFTITSADYDRVLEKLKKTATGWMTTINGKELKVEGQITYYNRYKRQNVVKDLSVELDRLSEESVNNDISSWTKGRSGEALSLLKKRFSHRPVQEKFVCLNCGFETHADEQAALNIARSWLFLRSQEYKKYQTNKTTGNTDKRAFVETWQSFYRKKLKEVWKPAV

SEQ ID NO: 26430 - protein, 978 aa, synthetic construct
  REGION 1..978: note = engineered CasX variant
QEIKRINKIRRRLVKDSNTKKAGKTGPMKTLLVRVMTPDLRERLENLRKKPENIPQPISNTSRANLNKLLTDYTEMKKAILHVYWEEFQKDPVGLMSRVAQPASKKIDQNKLKPEMDEKGNLTTAGFACSQCGQPLFVYKLEQVSEKGKAYTNYFGRCNVAEHEKLILLAQLKPEKDSDEAVTYSLGKFGQRALDFYSIHVTKESTHPVKPLAQIAGNRYASGPVGKALSDACMGTIASFLSKYQDIIIEHQKVVKGNQKRLESLRELAGKENLEYPSVTLPPQPHTKEGVDAYNEVIARVRMWVNLNLWQKLKLSRDDAKPLLRLKGFPSFPLVERQANEVDWWDMVCNVKKLINEKKEDGKVFWQNLAGYKRQEALRPYLSSEEDRKKGKKFARYQLGDLLLHLEKKHGEDWGKVYDEAWERIDKKVEGLSKHIKLEEERRSEDAQSKAALTDWLRAKASFVIEGLKEADKDEFCRCELKLQKWYGDLRGKPFAIEAENSILDISGFSKQYNCAFIWQKDGVKKLNLYLIINYFKGGKLRFKKIKPEAFEANRFYTVINKKSGEIVPMEVNFNFDDPNLIILPLAFGKRQGREFIWNDLLSLETGSLKLANGRVIEKTLYNRRTRQDEPALFVALTFERREVLDSSNIKPMNLIGVDRGENIPAVIALTDPEGCPLSRFKDSLGNPTHILRIGESYKEKQRTIQAKKEFEQRRAGGYSRKYASKAKNLADDMVRNTARDLLYYAVTQDAMLIFENLSRGFGRQGKRTFMAERQYTRMEDWLTAKLAYEGLPSKTYLSKTLAQYTSKTCSNCGFTITSADYDRVLEKLKKTATGWMTTINGKELKVEGQITYYNRYKRQNVVKDLSVELDRLSEESVNNDISSWTKGRSGEALSLLKKRFSHRPVQEKFVCLNCGFETHADEQAALNIARSWLFLRSQEYKKYQTNKTTGNTDKRAFVETWQSFYRKKLKEVWKPAV

SEQ ID NO: 26431 - protein, 978 aa, synthetic construct
  REGION 1..978: note = engineered CasX variant
QEIKRINKIRRRLVKDSNTKKAGKTGPMKTLLVRVMTPDLRERLENLRKKPENIPQPISNTSRANLNKLLTDYTEMKKAILHVYWEEFQKDPVGLMSRVAQPASKKIDQNKLKPEMDEKGNLTTAGFACSQCGQPLFVYKLEQVSEKGKAYTNYFGRCNVAEHEKLILLAQLKPEKDSDEAVTYSLGKFGQRALDFYSIHVTKESTHPVKPLAQIAGNRYASGPVGKALSDACMGTIASFLSKYQDIIIEHQKVVKGNQKRLESLRELAGKENLEYPSVTLPPQPHTKEGVDAYNEVIARVRMWVNLNLWQKLKLSRDDAKPLLRLKGFPSFPLVERQANEVDWWDMVCNVKKLINEKKEDGKVFWQNLAGYKRQEALRPYLSSEEDRKKGKKFARYQLGDLLLHLEKKHGEDWGKVYDEAWERIDKKVEGLSKHIKLEEERRSEDAQSKAALTDWLRAKASFVIEGLKEADKDEFCRCELKLQKWYGDLRGKPFAIEAENSILDISGFSKQYNCAFIWQKDGVKKLNLYLIINYFKGGKLRFKKIKPEAFEANRFYTVINKKSGEIVPMEVNFNFDDPNLIILPLAFGKRQGREFIWNDLLSLETGSLKLANGRVIEKTLYNRRTRQDEPALFVALTFERREVLDSSNIKPMNLIGVDRGENIPAVIALTDPEGCPLSRFKDSLGNPTHILRIGESYKEKQRTIQAKKEEEQRRAGLYSRKYASKAKNLADDMVRNTARDLLYYAVTQDAMLIFENLSRGFGRQGKRTFMAERQYTRMEDWLTAKLAYEGLPSKTYLSKTLAQYTSKTCSNCGFTITSADYDRVLEKLKKTATGWMTTINGKELKVEGQITYYNRYKRQNVVKDLSVELDRLSEESVNNDISSWTKGRSGEALSLLKKRFSHRPVQEKFVCLNCGFETHADEQAALNIARSWLFLRSQEYKKYQTNKTTGNTDKRAFVETWQSFYRKKLKEVWKPAV

SEQ ID NO: 26432 - protein, 978 aa, synthetic construct
  REGION 1..978: note = engineered CasX variant
QEIKRINKIRRRLVKDSNTKKAGKTGPMKTLLVRVMTPDLRERLENLRKKPENIPQPISNTSRANLNKLLTDYTEMKKAILHVYWEEFQKDPVGLMSRVAQPASKKIDQNKLKPEMDEKGNLTTAGFACSQCGQPLFVYKLEQVSEKGKAYTNYFGRCNVAEHEKLILLAQLKPEKDSDEAVTYSLGKFGQRALDFYSIHVTKESTHPVKPLAQIAGNRYASGPVGKALSDACMGTIASFLSKYQDIIIEHQKVVKGNQKRLESLRELAGKENLEYPSVTLPPQPHTKEGVDAYNEVIARVRMWVNLNLWQKLKLSRDDAKPLLRLKGFPSFPLVERQANEVDWWDMVCNVKKLINEKKEDGKVFWQNLAGYKRQEALRPYLSSEEDRKKGKKFARYQLGDLLLHLEKKHGEDWGKVYDEAWERIDKKVEGLSKHIKLEEERRSEDAQSKAALTDWLRAKASFVIEGLKEADKDEFCRCELKLQKWYGDLRGKPFAIEAENSILDISGFSKQYNCAFIWQKDGVKKLNLYLIINYFKGGKLRFKKIKPEAFEANRFYTVINKKSGEIVPMEVNFNFDDPNLIILPLAFGKRQGREFIWNDLLSLETGSLKLANGRVIEKTLYNRRTRQDEPALFVALTFERREVLDSSNIKPMNLIGVDRGENIPAVIALTDPEGCPLSRFKDSLGNPTHILRIGESYKEKQRTIQAKKEEEQRRAGGYSRKYASKAKNLADDMVRNTARDLLYYAVTQDAMLIFENLSRGFGRQGKRTFMAERQYTRMEDWLTAKLAYEGLPSKTYLSKTLAQYTSKTCSNCGFTITSADYDRVLEKLKKTATGWMTTINGKELKVEGQITYYNRYKRQNVVKDLSVELDRLSEESVNNDISSWTKGRSGEALSLLKKRFSHRPVQEKFVCLNCGFETHADEQAALNIARSWLFLRSQEYKKYQTNKTTGNTDKRAFVETWQSFYRKKLKEVWKPAV

SEQ ID NO: 26433 - protein, 978 aa, synthetic construct
  REGION 1..978: note = engineered CasX variant
QEIKRINKIRRRLVKDSNTKKAGKTGPMKTLLVRVMTPDLRERLENLRKKPENIPQPISNTSRANLNKLLTDYTEMKKAILHVYWEEFQKDPVGLMSRVAQPASKKIDQNKLKPEMDEKGNLTTAGFACSQCGQPLFVYKLEQVSEKGKAYTNYFGRCNVAEHEKLILLAQLKPEKDSDEAVTYSLGKFGQRALDFYSIHVTKESTHPVKPLAQIAGNRYASGPVGKALSDACMGTIASFLSKYQDIIIEHQKVVKGNQKRLESLRELAGKENLEYPSVTLPPQPHTKEGVDAYNEVIARVRMWVNLNLWQKLKLSRDDAKPLLRLKGFPSFPLVERQANEVDWWDMVCNVKKLINEKKEDGKVFWQNLAGYKRQEALRPYLSSEEDRKKGKKFARYQLGDLLLHLEKKHGEDWGKVYDEAWERIDKKVEGLSKHIKLEEERRSEDAQSKAALTDWLRAKASFVIEGLKEADKDEFCRCELKLQKWYGDLRGKPFAIEAENSILDISGFSKQYNCAFIWQKDGVKKLNLYLIINYFKGGKLRFKKIKPEAFEANRFYTVINKKSGEIVPMEVNFNFDDPNLIILPLAFGKRQGREFIWNDLLSLETGSLKLANGRVIEKTLYNRRTRQDEPALFVALTFERREVLDSSNIKPMNLIGVDRGENIPAVIALTDPEGCPLSRFKDSLGNPTHILRIGESYKEKQRTIQAKKEEENRRAGGYSRKYASKAKNLADDMVRNTARDLLYYAVTQDAMLIFENLSRGFGRQGKRTFMAERQYTRMEDWLTAKLAYEGLPSKTYLSKTLAQYTSKTCSNCGFTITSADYDRVLEKLKKTATGWMTTINGKELKVEGQITYYNRYKRQNVVKDLSVELDRLSEESVNNDISSWTKGRSGEALSLLKKRFSHRPVQEKFVCLNCGFETHADEQAALNIARSWLFLRSQEYKKYQTNKTTGNTDKRAFVETWQSFYRKKLKEVWKPAV

SEQ ID NO: 26434 - protein, 978 aa, synthetic construct
  REGION 1..978: note = engineered CasX variant
QEIKRINKIRRRLVKDSNTKKAGKTGPMKTLLVRVMTPDLRERLENLRKKPENIPQPISNTSRANLNKLLTDYTEMKKAILHVYWEEFQKDPVGLMSRVAQPASKKIDQNKLKPEMDEKGNLTTAGFACSQCGQPLFVYKLEQVSEKGKAYTNYFGRCNVAEHEKLILLAQLKPEKDSDEAVTYSLGKFGQRALDFYSIHVTKESTHPVKPLAQIAGNRYASGPVGKALSDACMGTIASFLSKYQDIIIEHQKVVKGNQKRLESLRELAGKENLEYPSVTLPPQPHTKEGVDAYNEVIARVRMWVNLNLWQKLKLSRDDAKPLLRLKGFPSFPLVERQANEVDWWDMVCNVKKLINEKKEDGKVFWQNLAGYKRQEALRPYLSSEEDRKKGKKFARYQLGDLLLHLEKKHGEDWGKVYDEAWERIDKKVEGLSKHIKLEEERRSEDAQSKAALTDWLRAKASFVIEGLKEADKDEFCRCELKLQKWYGDLRGKPFAIEAENSILDISGFSKQYNCAFIWQKDGVKKLNLYLIINYFKGGKLRFKKIKPEAFEANRFYTVINKKSGEIVPMEVNFNFDDPNLIILPLAFGKRQGREFIWNDLLSLETGSLKLANGRVIEKTLYNRRTRQDEPALFVALTFERREVLDSSNIKPMNLIGVDRGENIPAVIALTDPEGCPLSRFKDSLGNPTHILRIGESYKEKQRTIQAKKEDEQRRAGGYSRKYASKAKNLADDMVRNTARDLLYYAVTQDAMLIFENLSRGFGRQGKRTFMAERQYTRMEDWLTAKLAYEGLPSKTYLSKTLAQYTSKTCSNCGFTITSADYDRVLEKLKKTATGWMTTINGKELKVEGQITYYNRYKRQNVVKDLSVELDRLSEESVNNDISSWTKGRSGEALSLLKKRFSHRPVQEKFVCLNCGFETHADEQAALNIARSWLFLRSQEYKKYQTNKTTGNTDKRAFVETWQSFYRKKLKEVWKPAV

SEQ ID NO: 26435 - protein, 978 aa, synthetic construct
  REGION 1..978: note = engineered CasX variant
QEIKRINKIRRRLVKDSNTKKAGKTGPMKTLLVRVMTPDLRERLENLRKKPENIPQPISNTSRANLNKLLTDYTEMKKAILHVYWEEFQKDPVGLMSRVAQPASKKIDQNKLKPEMDEKGNLTTAGFACSQCGQPLFVYKLEQVSEKGKAYTNYFGRCNVAEHEKLILLAQLKPEKDSDEAVTYSLGKFGQRALDFYSIHVTKESTHPVKPLAQIAGNRYASGPVGKALSDACMGTIASFLSKYQDIIIEHQKVVKGNQKRLESLRELAGKENLEYPSVTLPPQPHTKEGVDAYNEVIARVRMWVNLNLWQKLKLSRDDAKPLLRLKGFPSFPLVERQANEVDWWDMVCNVKKLINEKKEDGKVFWQNLAGYKRQEALRPYLSSEEDRKKGKKFARYQLGDLLLHLEKKHGEDWGKVYDEAWERIDKKVEGLSKHIKLEEERRSEDAQSKAALTDWLRAKASFVIEGLKEADKDEFCRCELKLQKWYGDLRGKPFAIEAENSILDISGFSKQYNCAFIWQKDGVKKLNLYLIINYFKGGKLRFKKIKPEAFEANRFYTVINKKSGEIVPMEVNFNFDDPNLIILPLAFGKRQGREFIWNDLLSLETGSLKLANGRVIEKTLYNRRTRQDEPALFVALTFERREVLDSSNIKPMNLIGVDRGENIPAVIALTDPEGCPLSRFKDSLGNPTHILRIGESYKEKQRTIQAKKECEQRRAGGYSRKYASKAKNLADDMVRNTARDLLYYAVTQDAMLIFENLSRGFGRQGKRTFMAERQYTRMEDWLTAKLAYEGLPSKTYLSKTLAQYTSKTCSNCGFTITSADYDRVLEKLKKTATGWMTTINGKELKVEGQITYYNRYKRQNVVKDLSVELDRLSEESVNNDISSWTKGRSGEALSLLKKRFSHRPVQEKFVCLNCGFETHADEQAALNIARSWLFLRSQEYKKYQTNKTTGNTDKRAFVETWQSFYRKKLKEVWKPAV

SEQ ID NO: 26436 - protein, 978 aa, synthetic construct
  REGION 1..978: note = engineered CasX variant
QEIKRINKIRRRLVKDSNTKKAGKTGPMKTLLVRVMTPDLRERLENLRKKPENIPQPISNTSRANLNKLLTDYTEMKKAILHVYWEEFQKDPVGLMSRVAQPASKKIDQNKLKPEMDEKGNLTTAGFACSQCGQPLFVYKLEQVSEKGKAYTNYFGRCNVAEHEKLILLAQLKPEKDSDEAVTYSLGKFGQRALDFYSIHVTKESTHPVKPLAQIAGNRYASGPVGKALSDACMGTIASFLSKYQDIIIEHQKVVKGNQKRLESLRELAGKENLEYPSVTLPPQPHTKEGVDAYNEVIARVRMWVNLNLWQKLKLSRDDAKPLLRLKGFPSFPLVERQANEVDWWDMVCNVKKLINEKKEDGKVFWQNLAGYKRQEALRPYLSSEEDRKKGKKFARYQLGDLLLHLEKKHGEDWGKVYDEAWERIDKKVEGLSKHIKLEEERRSEDAQSKAALTDWLRAKASFVIEGLKEADKDEFCRCELKLQKWYGDLRGKPFAIEAENSILDISGFSKQYNCAFIWQKDGVKKLNLYLIINYFKGGKLRFKKIKPEAFEANRFYTVINKKSGEIVPMEVNFNFDDPNLIILPLAFGKRQGREFIWNDLLSLETGSLKLANGRVIEKTLYNRRTRQDEPALFVALTFERREVLDSSNIKPMNLIGVDRGENIPAVIALTDPEGCPLSRFKDSLGNPTHILRIGESYKEKQRTIQAKKEAEQRRAGGYSRKYASKAKNLADDMVRNTARDLLYYAVTQDAMLIFENLSRGFGRQGKRTFMAERQYTRMEDWLTAKLAYEGLPSKTYLSKTLAQYTSKTCSNCGFTITSADYDRVLEKLKKTATGWMTTINGKELKVEGQITYYNRYKRQNVVKDLSVELDRLSEESVNNDISSWTKGRSGEALSLLKKRFSHRPVQEKFVCLNCGFETHADEQAALNIARSWLFLRSQEYKKYQTNKTTGNTDKRAFVETWQSFYRKKLKEVWKPAV

SEQ ID NO: 26437 - protein, 978 aa, synthetic construct
  REGION 1..978: note = engineered CasX variant
QEIKRINKIRRRLVKDSNTKKAGKTGPMKTLLVRVMTPDLRERLENLRKKPENIPQPISNTSRANLNKLLTDYTEMKKAILHVYWEEFQKDPVGLMSRVAQPASKKIDQNKLKPEMDEKGNLTTAGFACSQCGQPLFVYKLEQVSEKGKAYTNYFGRCNVAEHEKLILLAQLKPEKDSDEAVTYSLGKFGQRALDFYSIHVTKESTHPVKPLAQIAGNRYASGPVGKALSDACMGTIASFLSKYQDIIIEHQKVVKGNQKRLESLRELAGKENLEYPSVTLPPQPHTKEGVDAYNEVIARVRMWVNLNLWQKLKLSRDDAKPLLRLKGFPSFPLVERQANEVDWWDMVCNVKKLINEKKEDGKVFWQNLAGYKRQEALRPYLSSEEDRKKGKKFARYQLGDLLLHLEKKHGEDWGKVYDEAWERIDKKVEGLSKHIKLEEERRSEDAQSKAALTDWLRAKASFVIEGLKEADKDEFCRCELKLQKWYGDLRGKPFAIEAENSILDISGFSKQYNCAFIWQKDGVKKLNLYLIINYFKGGKLRFKKIKPEAFEANRFYTVINKKSGEIVPMEVNFNFDDPNLIILPLAFGKRQGREFIWNDLLSLETGSLKLANGRVIEKTLYNRRTRQDEPALFVALTFERREVLDSSNIKPMNLIGVDRGENIPAVIALTDPEGCPLSRFKDSLGNPTHILRIGESYKEKQRTIQAKKCVESRRAGGYSRKYASKAKNLADDMVRNTARDLLYYAVTQDAMLIFENLSRGFGRQGKRTFMAERQYTRMEDWLTAKLAYEGLPSKTYLSKTLAQYTSKTCSNCGFTITSADYDRVLEKLKKTATGWMTTINGKELKVEGQITYYNRYKRQNVVKDLSVELDRLSEESVNNDISSWTKGRSGEALSLLKKRFSHRPVQEKFVCLNCGFETHADEQAALNIARSWLFLRSQEYKKYQTNKTTGNTDKRAFVETWQSFYRKKLKEVWKPAV

SEQ ID NO: 26438 - protein, 978 aa, synthetic construct
  REGION 1..978: note = engineered CasX variant
QEIKRINKIRRRLVKDSNTKKAGKTGPMKTLLVRVMTPDLRERLENLRKKPENIPQPISNTSRANLNKLLTDYTEMKKAILHVYWEEFQKDPVGLMSRVAQPASKKIDQNKLKPEMDEKGNLTTAGFACSQCGQPLFVYKLEQVSEKGKAYTNYFGRCNVAEHEKLILLAQLKPEKDSDEAVTYSLGKFGQRALDFYSIHVTKESTHPVKPLAQIAGNRYASGPVGKALSDACMGTIASFLSKYQDIIIEHQKVVKGNQKRLESLRELAGKENLEYPSVTLPPQPHTKEGVDAYNEVIARVRMWVNLNLWQKLKLSRDDAKPLLRLKGFPSFPLVERQANEVDWWDMVCNVKKLINEKKEDGKVFWQNLAGYKRQEALRPYLSSEEDRKKGKKFARYQLGDLLLHLEKKHGEDWGKVYDEAWERIDKKVEGLSKHIKLEEERRSEDAQSKAALTDWLRAKASFVIEGLKEADKDEFCRCELKLQKWYGDLRGKPFAIEAENSILDISGFSKQYNCAFIWQKDGVKKLNLYLIINYFKGGKLRFKKIKPEAFEANRFYTVINKKSGEIVPMEVNFNFDDPNLIILPLAFGKRQGREFIWNDLLSLETGSLKLANGRVIEKTLYNRRTRQDEPALFVALTFERREVLDSSNIKPMNLIGVDRGENIPAVIALTDPEGCPLSRFKDSLGNPTHILRIGESYKEKQRTIQAKKCVEQRRAYGYSRKYASKAKNLADDMVRNTARDLLYYAVTQDAMLIFENLSRGFGRQGKRTFMAERQYTRMEDWLTAKLAYEGLPSKTYLSKTLAQYTSKTCSNCGFTITSADYDRVLEKLKKTATGWMTTINGKELKVEGQITYYNRYKRQNVVKDLSVELDRLSEESVNNDISSWTKGRSGEALSLLKKRFSHRPVQEKFVCLNCGFETHADEQAALNIARSWLFLRSQEYKKYQTNKTTGNTDKRAFVETWQSFYRKKLKEVWKPAV

SEQ ID NO: 26439 - protein, 978 aa, synthetic construct
  REGION 1..978: note = engineered CasX variant
QEIKRINKIRRRLVKDSNTKKAGKTGPMKTLLVRVMTPDLRERLENLRKKPENIPQPISNTSRANLNKLLTDYTEMKKAILHVYWEEFQKDPVGLMSRVAQPASKKIDQNKLKPEMDEKGNLTTAGFACSQCGQPLFVYKLEQVSEKGKAYTNYFGRCNVAEHEKLILLAQLKPEKDSDEAVTYSLGKFGQRALDFYSIHVTKESTHPVKPLAQIAGNRYASGPVGKALSDACMGTIASFLSKYQDIIIEHQKVVKGNQKRLESLRELAGKENLEYPSVTLPPQPHTKEGVDAYNEVIARVRMWVNLNLWQKLKLSRDDAKPLLRLKGFPSFPLVERQANEVDWWDMVCNVKKLINEKKEDGKVFWQNLAGYKRQEALRPYLSSEEDRKKGKKFARYQLGDLLLHLEKKHGEDWGKVYDEAWERIDKKVEGLSKHIKLEEERRSEDAQSKAALTDWLRAKASFVIEGLKEADKDEFCRCELKLQKWYGDLRGKPFAIEAENSILDISGFSKQYNCAFIWQKDGVKKLNLYLIINYFKGGKLRFKKIKPEAFEANRFYTVINKKSGEIVPMEVNFNFDDPNLIILPLAFGKRQGREFIWNDLLSLETGSLKLANGRVIEKTLYNRRTRQDEPALFVALTFERREVLDSSNIKPMNLIGVDRGENIPAVIALTDPEGCPLSRFKDSLGNPTHILRIGESYKEKQRTIQAKKCVEQRRAGGYSRKYASKAKNLADDMVRNTARDLLYYAVTQDAMLIFENLSRGFGRQGKRTFMAERQYTRMEDWLTAKLAYEGLPSKTYLSKTLAQYTSKTCSNCGFTITSADYDRVLEKLKKTATGWMTTINGKELKVEGQITYYNRYKRQNVVKDLSVELDRLSEESVNNDISSWTKGRSGEALSLLKKRFSHRPVQEKFVCLNCGFETHADEQAALNIARSWLFLRSQEYKKYQTNKTTGNTDKRAFVETWQSFYRKKLKEVWKPAV

SEQ ID NO: 26440 - protein, 978 aa, synthetic construct
  REGION 1..978: note = engineered CasX variant
QEIKRINKIRRRLVKDSNTKKAGKTGPMKTLLVRVMTPDLRERLENLRKKPENIPQPISNTSRANLNKLLTDYTEMKKAILHVYWEEFQKDPVGLMSRVAQPASKKIDQNKLKPEMDEKGNLTTAGFACSQCGQPLFVYKLEQVSEKGKAYTNYFGRCNVAEHEKLILLAQLKPEKDSDEAVTYSLGKFGQRALDFYSIHVTKESTHPVKPLAQIAGNRYASGPVGKALSDACMGTIASFLSKYQDIIIEHQKVVKGNQKRLESLRELAGKENLEYPSVTLPPQPHTKEGVDAYNEVIARVRMWVNLNLWQKLKLSRDDAKPLLRLKGFPSFPLVERQANEVDWWDMVCNVKKLINEKKEDGKVFWQNLAGYKRQEALRPYLSSEEDRKKGKKFARYQLGDLLLHLEKKHGEDWGKVYDEAWERIDKKVEGLSKHIKLEEERRSEDAQSKAALTDWLRAKASFVIEGLKEADKDEFCRCELKLQKWYGDLRGKPFAIEAENSILDISGFSKQYNCAFIWQKDGVKKLNLYLIINYFKGGKLRFKKIKPEAFEANRFYTVINKKSGEIVPMEVNFNFDDPNLIILPLAFGKRQGREFIWNDLLSLETGSLKLANGRVIEKTLYNRRTRQDEPALFVALTFERREVLDSSNIKPMNLIGVDRGENIPAVIALTDPEGCPLSRFKDSLGNPTHILRIGESYKEKQRTIQAKKCVEARRAGGYSRKYASKAKNLADDMVRNTARDLLYYAVTQDAMLIFENLSRGFGRQGKRTFMAERQYTRMEDWLTAKLAYEGLPSKTYLSKTLAQYTSKTCSNCGFTITSADYDRVLEKLKKTATGWMTTINGKELKVEGQITYYNRYKRQNVVKDLSVELDRLSEESVNNDISSWTKGRSGEALSLLKKRFSHRPVQEKFVCLNCGFETHADEQAALNIARSWLFLRSQEYKKYQTNKTTGNTDKRAFVETWQSFYRKKLKEVWKPAV

SEQ ID NO: 26441 - protein, 978 aa, synthetic construct
  REGION 1..978: note = engineered CasX variant
QEIKRINKIRRRLVKDSNTKKAGKTGPMKTLLVRVMTPDLRERLENLRKKPENIPQPISNTSRANLNKLLTDYTEMKKAILHVYWEEFQKDPVGLMSRVAQPASKKIDQNKLKPEMDEKGNLTTAGFACSQCGQPLFVYKLEQVSEKGKAYTNYFGRCNVAEHEKLILLAQLKPEKDSDEAVTYSLGKFGQRALDFYSIHVTKESTHPVKPLAQIAGNRYASGPVGKALSDACMGTIASFLSKYQDIIIEHQKVVKGNQKRLESLRELAGKENLEYPSVTLPPQPHTKEGVDAYNEVIARVRMWVNLNLWQKLKLSRDDAKPLLRLKGFPSFPLVERQANEVDWWDMVCNVKKLINEKKEDGKVFWQNLAGYKRQEALRPYLSSEEDRKKGKKFARYQLGDLLLHLEKKHGEDWGKVYDEAWERIDKKVEGLSKHIKLEEERRSEDAQSKAALTDWLRAKASFVIEGLKEADKDEFCRCELKLQKWYGDLRGKPFAIEAENSILDISGFSKQYNCAFIWQKDGVKKLNLYLIINYFKGGKLRFKKIKPEAFEANRFYTVINKKSGEIVPMEVNFNFDDPNLIILPLAFGKRQGREFIWNDLLSLETGSLKLANGRVIEKTLYNRRTRQDEPALFVALTFERREVLDSSNIKPMNLIGVDRGENIPAVIALTDPEGCPLSRFKDSLGNPTHILRIGESYKEKQRTIQAKKAVEQRRAGGYSRKYASKAKNLADDMVRNTARDLLYYAVTQDAMLIFENLSRGFGRQGKRTFMAERQYTRMEDWLTAKLAYEGLPSKTYLSKTLAQYTSKTCSNCGFTITSADYDRVLEKLKKTATGWMTTINGKELKVEGQITYYNRYKRQNVVKDLSVELDRLSEESVNNDISSWTKGRSGEALSLLKKRFSHRPVQEKFVCLNCGFETHADEQAALNIARSWLFLRSQEYKKYQTNKTTGNTDKRAFVETWQSFYRKKLKEVWKPAV

SEQ ID NO: 26442 - protein, 978 aa, synthetic construct
  REGION 1..978: note = engineered CasX variant
QEIKRINKIRRRLVKDSNTKKAGKTGPMKTLLVRVMTPDLRERLENLRKKPENIPQPISNTSRANLNKLLTDYTEMKKAILHVYWEEFQKDPVGLMSRVAQPASKKIDQNKLKPEMDEKGNLTTAGFACSQCGQPLFVYKLEQVSEKGKAYTNYFGRCNVAEHEKLILLAQLKPEKDSDEAVTYSLGKFGQRALDFYSIHVTKESTHPVKPLAQIAGNRYASGPVGKALSDACMGTIASFLSKYQDIIIEHQKVVKGNQKRLESLRELAGKENLEYPSVTLPPQPHTKEGVDAYNEVIARVRMWVNLNLWQKLKLSRDDAKPLLRLKGFPSFPLVERQANEVDWWDMVCNVKKLINEKKEDGKVFWQNLAGYKRQEALRPYLSSEEDRKKGKKFARYQLGDLLLHLEKKHGEDWGKVYDEAWERIDKKVEGLSKHIKLEEERRSEDAQSKAALTDWLRAKASFVIEGLKEADKDEFCRCELKLQKWYGDLRGKPFAIEAENSILDISGFSKQYNCAFIWQKDGVKKLNLYLIINYFKGGKLRFKKIKPEAFEANRFYTVINKKSGEIVPMEVNFNFDDPNLIILPLAFGKRQGREFIWNDLLSLETGSLKLANGRVIEKTLYNRRTRQDEPALFVALTFERREVLDSSNIKPMNLIGVDRGENIPAVIALTDPEGCPLSRFKDSLGNPTHILRIGESYKEKQRTIQAKIEVEQRRAGGYSRKYASKAKNLADDMVRNTARDLLYYAVTQDAMLIFENLSRGFGRQGKRTFMAERQYTRMEDWLTAKLAYEGLPSKTYLSKTLAQYTSKTCSNCGFTITSADYDRVLEKLKKTATGWMTTINGKELKVEGQITYYNRYKRQNVVKDLSVELDRLSEESVNNDISSWTKGRSGEALSLLKKRFSHRPVQEKFVCLNCGFETHADEQAALNIARSWLFLRSQEYKKYQTNKTTGNTDKRAFVETWQSFYRKKLKEVWKPAV

SEQ ID NO: 26443 - protein, 978 aa, synthetic construct
  REGION 1..978: note = engineered CasX variant
QEIKRINKIRRRLVKDSNTKKAGKTGPMKTLLVRVMTPDLRERLENLRKKPENIPQPISNTSRANLNKLLTDYTEMKKAILHVYWEEFQKDPVGLMSRVAQPASKKIDQNKLKPEMDEKGNLTTAGFACSQCGQPLFVYKLEQVSEKGKAYTNYFGRCNVAEHEKLILLAQLKPEKDSDEAVTYSLGKFGQRALDFYSIHVTKESTHPVKPLAQIAGNRYASGPVGKALSDACMGTIASFLSKYQDIIIEHQKVVKGNQKRLESLRELAGKENLEYPSVTLPPQPHTKEGVDAYNEVIARVRMWVNLNLWQKLKLSRDDAKPLLRLKGFPSFPLVERQANEVDWWDMVCNVKKLINEKKEDGKVFWQNLAGYKRQEALRPYLSSEEDRKKGKKFARYQLGDLLLHLEKKHGEDWGKVYDEAWERIDKKVEGLSKHIKLEEERRSEDAQSKAALTDWLRAKASFVIEGLKEADKDEFCRCELKLQKWYGDLRGKPFAIEAENSILDISGFSKQYNCAFIWQKDGVKKLNLYLIINYFKGGKLRFKKIKPEAFEANRFYTVINKKSGEIVPMEVNFNFDDPNLIILPLAFGKRQGREFIWNDLLSLETGSLKLANGRVIEKTLYNRRTRQDEPALFVALTFERREVLDSSNIKPMNLIGVDRGENIPAVIALTDPEGCPLSRFKDSLGNPTHILRIGESYKEKQRTIQAKCEVEQRRAGGYSRKYASKAKNLADDMVRNTARDLLYYAVTQDAMLIFENLSRGFGRQGKRTFMAERQYTRMEDWLTAKLAYEGLPSKTYLSKTLAQYTSKTCSNCGFTITSADYDRVLEKLKKTATGWMTTINGKELKVEGQITYYNRYKRQNVVKDLSVELDRLSEESVNNDISSWTKGRSGEALSLLKKRFSHRPVQEKFVCLNCGFETHADEQAALNIARSWLFLRSQEYKKYQTNKTTGNTDKRAFVETWQSFYRKKLKEVWKPAV

SEQ ID NO: 26444 - protein, 978 aa, synthetic construct
  REGION 1..978: note = engineered CasX variant
QEIKRINKIRRRLVKDSNTKKAGKTGPMKTLLVRVMTPDLRERLENLRKKPENIPQPISNTSRANLNKLLTDYTEMKKAILHVYWEEFQKDPVGLMSRVAQPASKKIDQNKLKPEMDEKGNLTTAGFACSQCGQPLFVYKLEQVSEKGKAYTNYFGRCNVAEHEKLILLAQLKPEKDSDEAVTYSLGKFGQRALDFYSIHVTKESTHPVKPLAQIAGNRYASGPVGKALSDACMGTIASFLSKYQDIIIEHQKVVKGNQKRLESLRELAGKENLEYPSVTLPPQPHTKEGVDAYNEVIARVRMWVNLNLWQKLKLSRDDAKPLLRLKGFPSFPLVERQANEVDWWDMVCNVKKLINEKKEDGKVFWQNLAGYKRQEALRPYLSSEEDRKKGKKFARYQLGDLLLHLEKKHGEDWGKVYDEAWERIDKKVEGLSKHIKLEEERRSEDAQSKAALTDWLRAKASFVIEGLKEADKDEFCRCELKLQKWYGDLRGKPFAIEAENSILDISGFSKQYNCAFIWQKDGVKKLNLYLIINYFKGGKLRFKKIKPEAFEANRFYTVINKKSGEIVPMEVNFNFDDPNLIILPLAFGKRQGREFIWNDLLSLETGSLKLANGRVIEKTLYNRRTRQDEPALFVALTFERREVLDSSNIKPMNLIGVDRGENIPAVIALTDPEGCPLSRFKDSLGNPTHILRIGESYKEKQRTIQAIKEVEQRRAGGYSRKYASKAKNLADDMVRNTARDLLYYAVTQDAMLIFENLSRGFGRQGKRTFMAERQYTRMEDWLTAKLAYEGLPSKTYLSKTLAQYTSKTCSNCGFTITSADYDRVLEKLKKTATGWMTTINGKELKVEGQITYYNRYKRQNVVKDLSVELDRLSEESVNNDISSWTKGRSGEALSLLKKRFSHRPVQEKFVCLNCGFETHADEQAALNIARSWLFLRSQEYKKYQTNKTTGNTDKRAFVETWQSFYRKKLKEVWKPAV

SEQ ID NO: 26445 - protein, 978 aa, synthetic construct
  REGION 1..978: note = engineered CasX variant
QEIKRINKIRRRLVKDSNTKKAGKTGPMKTLLVRVMTPDLRERLENLRKKPENIPQPISNTSRANLNKLLTDYTEMKKAILHVYWEEFQKDPVGLMSRVAQPASKKIDQNKLKPEMDEKGNLTTAGFACSQCGQPLFVYKLEQVSEKGKAYTNYFGRCNVAEHEKLILLAQLKPEKDSDEAVTYSLGKFGQRALDFYSIHVTKESTHPVKPLAQIAGNRYASGPVGKALSDACMGTIASFLSKYQDIIIEHQKVVKGNQKRLESLRELAGKENLEYPSVTLPPQPHTKEGVDAYNEVIARVRMWVNLNLWQKLKLSRDDAKPLLRLKGFPSFPLVERQANEVDWWDMVCNVKKLINEKKEDGKVFWQNLAGYKRQEALRPYLSSEEDRKKGKKFARYQLGDLLLHLEKKHGEDWGKVYDEAWERIDKKVEGLSKHIKLEEERRSEDAQSKAALTDWLRAKASFVIEGLKEADKDEFCRCELKLQKWYGDLRGKPFAIEAENSILDISGFSKQYNCAFIWQKDGVKKLNLYLIINYFKGGKLRFKKIKPEAFEANRFYTVINKKSGEIVPMEVNFNFDDPNLIILPLAFGKRQGREFIWNDLLSLETGSLKLANGRVIEKTLYNRRTRQDEPALFVALTFERREVLDSSNIKPMNLIGVDRGENIPAVIALTDPEGCPLSRFKDSLGNPTHILRIGESYKEKQRTIQAHKEVEQRRAGGYSRKYASKAKNLADDMVRNTARDLLYYAVTQDAMLIFENLSRGFGRQGKRTFMAERQYTRMEDWLTAKLAYEGLPSKTYLSKTLAQYTSKTCSNCGFTITSADYDRVLEKLKKTATGWMTTINGKELKVEGQITYYNRYKRQNVVKDLSVELDRLSEESVNNDISSWTKGRSGEALSLLKKRFSHRPVQEKFVCLNCGFETHADEQAALNIARSWLFLRSQEYKKYQTNKTTGNTDKRAFVETWQSFYRKKLKEVWKPAV

SEQ ID NO: 26446 - protein, 978 aa, synthetic construct
  REGION 1..978: note = engineered CasX variant
QEIKRINKIRRRLVKDSNTKKAGKTGPMKTLLVRVMTPDLRERLENLRKKPENIPQPISNTSRANLNKLLTDYTEMKKAILHVYWEEFQKDPVGLMSRVAQPASKKIDQNKLKPEMDEKGNLTTAGFACSQCGQPLFVYKLEQVSEKGKAYTNYFGRCNVAEHEKLILLAQLKPEKDSDEAVTYSLGKFGQRALDFYSIHVTKESTHPVKPLAQIAGNRYASGPVGKALSDACMGTIASFLSKYQDIIIEHQKVVKGNQKRLESLRELAGKENLEYPSVTLPPQPHTKEGVDAYNEVIARVRMWVNLNLWQKLKLSRDDAKPLLRLKGFPSFPLVERQANEVDWWDMVCNVKKLINEKKEDGKVFWQNLAGYKRQEALRPYLSSEEDRKKGKKFARYQLGDLLLHLEKKHGEDWGKVYDEAWERIDKKVEGLSKHIKLEEERRSEDAQSKAALTDWLRAKASFVIEGLKEADKDEFCRCELKLQKWYGDLRGKPFAIEAENSILDISGFSKQYNCAFIWQKDGVKKLNLYLIINYFKGGKLRFKKIKPEAFEANRFYTVINKKSGEIVPMEVNFNFDDPNLIILPLAFGKRQGREFIWNDLLSLETGSLKLANGRVIEKTLYNRRTRQDEPALFVALTFERREVLDSSNIKPMNLIGVDRGENIPAVIALTDPEGCPLSRFKDSLGNPTHILRIGESYKEKQRTIQAGKTVEQRRAGGYSRKYASKAKNLADDMVRNTARDLLYYAVTQDAMLIFENLSRGFGRQGKRTFMAERQYTRMEDWLTAKLAYEGLPSKTYLSKTLAQYTSKTCSNCGFTITSADYDRVLEKLKKTATGWMTTINGKELKVEGQITYYNRYKRQNVVKDLSVELDRLSEESVNNDISSWTKGRSGEALSLLKKRFSHRPVQEKFVCLNCGFETHADEQAALNIARSWLFLRSQEYKKYQTNKTTGNTDKRAFVETWQSFYRKKLKEVWKPAV

SEQ ID NO: 26447 - protein, 978 aa, synthetic construct
  REGION 1..978: note = engineered CasX variant
QEIKRINKIRRRLVKDSNTKKAGKTGPMKTLLVRVMTPDLRERLENLRKKPENIPQPISNTSRANLNKLLTDYTEMKKAILHVYWEEFQKDPVGLMSRVAQPASKKIDQNKLKPEMDEKGNLTTAGFACSQCGQPLFVYKLEQVSEKGKAYTNYFGRCNVAEHEKLILLAQLKPEKDSDEAVTYSLGKFGQRALDFYSIHVTKESTHPVKPLAQIAGNRYASGPVGKALSDACMGTIASFLSKYQDIIIEHQKVVKGNQKRLESLRELAGKENLEYPSVTLPPQPHTKEGVDAYNEVIARVRMWVNLNLWQKLKLSRDDAKPLLRLKGFPSFPLVERQANEVDWWDMVCNVKKLINEKKEDGKVFWQNLAGYKRQEALRPYLSSEEDRKKGKKFARYQLGDLLLHLEKKHGEDWGKVYDEAWERIDKKVEGLSKHIKLEEERRSEDAQSKAALTDWLRAKASFVIEGLKEADKDEFCRCELKLQKWYGDLRGKPFAIEAENSILDISGFSKQYNCAFIWQKDGVKKLNLYLIINYFKGGKLRFKKIKPEAFEANRFYTVINKKSGEIVPMEVNFNFDDPNLIILPLAFGKRQGREFIWNDLLSLETGSLKLANGRVIEKTLYNRRTRQDEPALFVALTFERREVLDSSNIKPMNLIGVDRGENIPAVIALTDPEGCPLSRFKDSLGNPTHILRIGESYKEKQRTIQAGKEVEQRRAGGYSRKYASKAKNLADDMVRNTARDLLYYAVTQDAMLIFENLSRGFGRQGKRTFMAERQYTRMEDWLTAKLAYEGLPSKTYLSKTLAQYTSKTCSNCGFTITSADYDRVLEKLKKTATGWMTTINGKELKVEGQITYYNRYKRQNVVKDLSVELDRLSEESVNNDISSWTKGRSGEALSLLKKRFSHRPVQEKFVCLNCGFETHADEQAALNIARSWLFLRSQEYKKYQTNKTTGNTDKRAFVETWQSFYRKKLKEVWKPAV

SEQ ID NO: 26448 - protein, 978 aa, synthetic construct
  REGION 1..978: note = engineered CasX variant
QEIKRINKIRRRLVKDSNTKKAGKTGPMKTLLVRVMTPDLRERLENLRKKPENIPQPISNTSRANLNKLLTDYTEMKKAILHVYWEEFQKDPVGLMSRVAQPASKKIDQNKLKPEMDEKGNLTTAGFACSQCGQPLFVYKLEQVSEKGKAYTNYFGRCNVAEHEKLILLAQLKPEKDSDEAVTYSLGKFGQRALDFYSIHVTKESTHPVKPLAQIAGNRYASGPVGKALSDACMGTIASFLSKYQDIIIEHQKVVKGNQKRLESLRELAGKENLEYPSVTLPPQPHTKEGVDAYNEVIARVRMWVNLNLWQKLKLSRDDAKPLLRLKGFPSFPLVERQANEVDWWDMVCNVKKLINEKKEDGKVFWQNLAGYKRQEALRPYLSSEEDRKKGKKFARYQLGDLLLHLEKKHGEDWGKVYDEAWERIDKKVEGLSKHIKLEEERRSEDAQSKAALTDWLRAKASFVIEGLKEADKDEFCRCELKLQKWYGDLRGKPFAIEAENSILDISGFSKQYNCAFIWQKDGVKKLNLYLIINYFKGGKLRFKKIKPEAFEANRFYTVINKKSGEIVPMEVNFNFDDPNLIILPLAFGKRQGREFIWNDLLSLETGSLKLANGRVIEKTLYNRRTRQDEPALFVALTFERREVLDSSNIKPMNLIGVDRGENIPAVIALTDPEGCPLSRFKDSLGNPTHILRIGESYKEKQRTIQAFKEVEQSRAGGYSRKYASKAKNLADDMVRNTARDLLYYAVTQDAMLIFENLSRGFGRQGKRTFMAERQYTRMEDWLTAKLAYEGLPSKTYLSKTLAQYTSKTCSNCGFTITSADYDRVLEKLKKTATGWMTTINGKELKVEGQITYYNRYKRQNVVKDLSVELDRLSEESVNNDISSWTKGRSGEALSLLKKRFSHRPVQEKFVCLNCGFETHADEQAALNIARSWLFLRSQEYKKYQTNKTTGNTDKRAFVETWQSFYRKKLKEVWKPAV

SEQ ID NO: 26449 - protein, 978 aa, synthetic construct
  REGION 1..978: note = engineered CasX variant
QEIKRINKIRRRLVKDSNTKKAGKTGPMKTLLVRVMTPDLRERLENLRKKPENIPQPISNTSRANLNKLLTDYTEMKKAILHVYWEEFQKDPVGLMSRVAQPASKKIDQNKLKPEMDEKGNLTTAGFACSQCGQPLFVYKLEQVSEKGKAYTNYFGRCNVAEHEKLILLAQLKPEKDSDEAVTYSLGKFGQRALDFYSIHVTKESTHPVKPLAQIAGNRYASGPVGKALSDACMGTIASFLSKYQDIIIEHQKVVKGNQKRLESLRELAGKENLEYPSVTLPPQPHTKEGVDAYNEVIARVRMWVNLNLWQKLKLSRDDAKPLLRLKGFPSFPLVERQANEVDWWDMVCNVKKLINEKKEDGKVFWQNLAGYKRQEALRPYLSSEEDRKKGKKFARYQLGDLLLHLEKKHGEDWGKVYDEAWERIDKKVEGLSKHIKLEEERRSEDAQSKAALTDWLRAKASFVIEGLKEADKDEFCRCELKLQKWYGDLRGKPFAIEAENSILDISGFSKQYNCAFIWQKDGVKKLNLYLIINYFKGGKLRFKKIKPEAFEANRFYTVINKKSGEIVPMEVNFNFDDPNLIILPLAFGKRQGREFIWNDLLSLETGSLKLANGRVIEKTLYNRRTRQDEPALFVALTFERREVLDSSNIKPMNLIGVDRGENIPAVIALTDPEGCPLSRFKDSLGNPTHILRIGESYKEKQRTIQAFKEVEQRRAGGYSRKYASKAKNLADDMVRNTARDLLYYAVTQDAMLIFENLSRGFGRQGKRTFMAERQYTRMEDWLTAKLAYEGLPSKTYLSKTLAQYTSKTCSNCGFTITSADYDRVLEKLKKTATGWMTTINGKELKVEGQITYYNRYKRQNVVKDLSVELDRLSEESVNNDISSWTKGRSGEALSLLKKRFSHRPVQEKFVCLNCGFETHADEQAALNIARSWLFLRSQEYKKYQTNKTTGNTDKRAFVETWQSFYRKKLKEVWKPAV

SEQ ID NO: 26450 - protein, 978 aa, synthetic construct
  REGION 1..978: note = engineered CasX variant
QEIKRINKIRRRLVKDSNTKKAGKTGPMKTLLVRVMTPDLRERLENLRKKPENIPQPISNTSRANLNKLLTDYTEMKKAILHVYWEEFQKDPVGLMSRVAQPASKKIDQNKLKPEMDEKGNLTTAGFACSQCGQPLFVYKLEQVSEKGKAYTNYFGRCNVAEHEKLILLAQLKPEKDSDEAVTYSLGKFGQRALDFYSIHVTKESTHPVKPLAQIAGNRYASGPVGKALSDACMGTIASFLSKYQDIIIEHQKVVKGNQKRLESLRELAGKENLEYPSVTLPPQPHTKEGVDAYNEVIARVRMWVNLNLWQKLKLSRDDAKPLLRLKGFPSFPLVERQANEVDWWDMVCNVKKLINEKKEDGKVFWQNLAGYKRQEALRPYLSSEEDRKKGKKFARYQLGDLLLHLEKKHGEDWGKVYDEAWERIDKKVEGLSKHIKLEEERRSEDAQSKAALTDWLRAKASFVIEGLKEADKDEFCRCELKLQKWYGDLRGKPFAIEAENSILDISGFSKQYNCAFIWQKDGVKKLNLYLIINYFKGGKLRFKKIKPEAFEANRFYTVINKKSGEIVPMEVNFNFDDPNLIILPLAFGKRQGREFIWNDLLSLETGSLKLANGRVIEKTLYNRRTRQDEPALFVALTFERREVLDSSNIKPMNLIGVDRGENIPAVIALTDPEGCPLSRFKDSLGNPTHILRIGESYKEKQRTIQAFKEVEARRAGGYSRKYASKAKNLADDMVRNTARDLLYYAVTQDAMLIFENLSRGFGRQGKRTFMAERQYTRMEDWLTAKLAYEGLPSKTYLSKTLAQYTSKTCSNCGFTITSADYDRVLEKLKKTATGWMTTINGKELKVEGQITYYNRYKRQNVVKDLSVELDRLSEESVNNDISSWTKGRSGEALSLLKKRFSHRPVQEKFVCLNCGFETHADEQAALNIARSWLFLRSQEYKKYQTNKTTGNTDKRAFVETWQSFYRKKLKEVWKPAV

SEQ ID NO: 26451 - protein, 978 aa, synthetic construct
  REGION 1..978: note = engineered CasX variant
QEIKRINKIRRRLVKDSNTKKAGKTGPMKTLLVRVMTPDLRERLENLRKKPENIPQPISNTSRANLNKLLTDYTEMKKAILHVYWEEFQKDPVGLMSRVAQPASKKIDQNKLKPEMDEKGNLTTAGFACSQCGQPLFVYKLEQVSEKGKAYTNYFGRCNVAEHEKLILLAQLKPEKDSDEAVTYSLGKFGQRALDFYSIHVTKESTHPVKPLAQIAGNRYASGPVGKALSDACMGTIASFLSKYQDIIIEHQKVVKGNQKRLESLRELAGKENLEYPSVTLPPQPHTKEGVDAYNEVIARVRMWVNLNLWQKLKLSRDDAKPLLRLKGFPSFPLVERQANEVDWWDMVCNVKKLINEKKEDGKVFWQNLAGYKRQEALRPYLSSEEDRKKGKKFARYQLGDLLLHLEKKHGEDWGKVYDEAWERIDKKVEGLSKHIKLEEERRSEDAQSKAALTDWLRAKASFVIEGLKEADKDEFCRCELKLQKWYGDLRGKPFAIEAENSILDISGFSKQYNCAFIWQKDGVKKLNLYLIINYFKGGKLRFKKIKPEAFEANRFYTVINKKSGEIVPMEVNFNFDDPNLIILPLAFGKRQGREFIWNDLLSLETGSLKLANGRVIEKTLYNRRTRQDEPALFVALTFERREVLDSSNIKPMNLIGVDRGENIPAVIALTDPEGCPLSRFKDSLGNPTHILRIGESYKEKQRTIQADKEVEQRRAGGYSRKYASKAKNLADDMVRNTARDLLYYAVTQDAMLIFENLSRGFGRQGKRTFMAERQYTRMEDWLTAKLAYEGLPSKTYLSKTLAQYTSKTCSNCGFTITSADYDRVLEKLKKTATGWMTTINGKELKVEGQITYYNRYKRQNVVKDLSVELDRLSEESVNNDISSWTKGRSGEALSLLKKRFSHRPVQEKFVCLNCGFETHADEQAALNIARSWLFLRSQEYKKYQTNKTTGNTDKRAFVETWQSFYRKKLKEVWKPAV

SEQ ID NO: 26452 - protein, 978 aa, synthetic construct
  REGION 1..978: note = engineered CasX variant
QEIKRINKIRRRLVKDSNTKKAGKTGPMKTLLVRVMTPDLRERLENLRKKPENIPQPISNTSRANLNKLLTDYTEMKKAILHVYWEEFQKDPVGLMSRVAQPASKKIDQNKLKPEMDEKGNLTTAGFACSQCGQPLFVYKLEQVSEKGKAYTNYFGRCNVAEHEKLILLAQLKPEKDSDEAVTYSLGKFGQRALDFYSIHVTKESTHPVKPLAQIAGNRYASGPVGKALSDACMGTIASFLSKYQDIIIEHQKVVKGNQKRLESLRELAGKENLEYPSVTLPPQPHTKEGVDAYNEVIARVRMWVNLNLWQKLKLSRDDAKPLLRLKGFPSFPLVERQANEVDWWDMVCNVKKLINEKKEDGKVFWQNLAGYKRQEALRPYLSSEEDRKKGKKFARYQLGDLLLHLEKKHGEDWGKVYDEAWERIDKKVEGLSKHIKLEEERRSEDAQSKAALTDWLRAKASFVIEGLKEADKDEFCRCELKLQKWYGDLRGKPFAIEAENSILDISGFSKQYNCAFIWQKDGVKKLNLYLIINYFKGGKLRFKKIKPEAFEANRFYTVINKKSGEIVPMEVNFNFDDPNLIILPLAFGKRQGREFIWNDLLSLETGSLKLANGRVIEKTLYNRRTRQDEPALFVALTFERREVLDSSNIKPMNLIGVDRGENIPAVIALTDPEGCPLSRFKDSLGNPTHILRIGESYKEKQRTIQACKEVEQRRAGGYSRKYASKAKNLADDMVRNTARDLLYYAVTQDAMLIFENLSRGFGRQGKRTFMAERQYTRMEDWLTAKLAYEGLPSKTYLSKTLAQYTSKTCSNCGFTITSADYDRVLEKLKKTATGWMTTINGKELKVEGQITYYNRYKRQNVVKDLSVELDRLSEESVNNDISSWTKGRSGEALSLLKKRFSHRPVQEKFVCLNCGFETHADEQAALNIARSWLFLRSQEYKKYQTNKTTGNTDKRAFVETWQSFYRKKLKEVWKPAV

SEQ ID NO: 26453 - protein, 978 aa, synthetic construct
  REGION 1..978: note = engineered CasX variant
QEIKRINKIRRRLVKDSNTKKAGKTGPMKTLLVRVMTPDLRERLENLRKKPENIPQPISNTSRANLNKLLTDYTEMKKAILHVYWEEFQKDPVGLMSRVAQPASKKIDQNKLKPEMDEKGNLTTAGFACSQCGQPLFVYKLEQVSEKGKAYTNYFGRCNVAEHEKLILLAQLKPEKDSDEAVTYSLGKFGQRALDFYSIHVTKESTHPVKPLAQIAGNRYASGPVGKALSDACMGTIASFLSKYQDIIIEHQKVVKGNQKRLESLRELAGKENLEYPSVTLPPQPHTKEGVDAYNEVIARVRMWVNLNLWQKLKLSRDDAKPLLRLKGFPSFPLVERQANEVDWWDMVCNVKKLINEKKEDGKVFWQNLAGYKRQEALRPYLSSEEDRKKGKKFARYQLGDLLLHLEKKHGEDWGKVYDEAWERIDKKVEGLSKHIKLEEERRSEDAQSKAALTDWLRAKASFVIEGLKEADKDEFCRCELKLQKWYGDLRGKPFAIEAENSILDISGFSKQYNCAFIWQKDGVKKLNLYLIINYFKGGKLRFKKIKPEAFEANRFYTVINKKSGEIVPMEVNFNFDDPNLIILPLAFGKRQGREFIWNDLLSLETGSLKLANGRVIEKTLYNRRTRQDEPALFVALTFERREVLDSSNIKPMNLIGVDRGENIPAVIALTDPEGCPLSRFKDSLGNPTHILRIGESYKEKQRTIQACKEVENRRAGGYSRKYASKAKNLADDMVRNTARDLLYYAVTQDAMLIFENLSRGFGRQGKRTFMAERQYTRMEDWLTAKLAYEGLPSKTYLSKTLAQYTSKTCSNCGFTITSADYDRVLEKLKKTATGWMTTINGKELKVEGQITYYNRYKRQNVVKDLSVELDRLSEESVNNDISSWTKGRSGEALSLLKKRFSHRPVQEKFVCLNCGFETHADEQAALNIARSWLFLRSQEYKKYQTNKTTGNTDKRAFVETWQSFYRKKLKEVWKPAV

SEQ ID NO: 26454 - protein, 978 aa, synthetic construct
  REGION 1..978: note = engineered CasX variant
QEIKRINKIRRRLVKDSNTKKAGKTGPMKTLLVRVMTPDLRERLENLRKKPENIPQPISNTSRANLNKLLTDYTEMKKAILHVYWEEFQKDPVGLMSRVAQPASKKIDQNKLKPEMDEKGNLTTAGFACSQCGQPLFVYKLEQVSEKGKAYTNYFGRCNVAEHEKLILLAQLKPEKDSDEAVTYSLGKFGQRALDFYSIHVTKESTHPVKPLAQIAGNRYASGPVGKALSDACMGTIASFLSKYQDIIIEHQKVVKGNQKRLESLRELAGKENLEYPSVTLPPQPHTKEGVDAYNEVIARVRMWVNLNLWQKLKLSRDDAKPLLRLKGFPSFPLVERQANEVDWWDMVCNVKKLINEKKEDGKVFWQNLAGYKRQEALRPYLSSEEDRKKGKKFARYQLGDLLLHLEKKHGEDWGKVYDEAWERIDKKVEGLSKHIKLEEERRSEDAQSKAALTDWLRAKASFVIEGLKEADKDEFCRCELKLQKWYGDLRGKPFAIEAENSILDISGFSKQYNCAFIWQKDGVKKLNLYLIINYFKGGKLRFKKIKPEAFEANRFYTVINKKSGEIVPMEVNFNFDDPNLIILPLAFGKRQGREFIWNDLLSLETGSLKLANGRVIEKTLYNRRTRQDEPALFVALTFERREVLDSSNIKPMNLIGVDRGENIPAVIALTDPEGCPLSRFKDSLGNPTHILRIGESYKEKQRTIQAAKEVEQRRAGGYSRKYASKAKNLADDMVRNTARDLLYYAVTQDAMLIFENLSRGFGRQGKRTFMAERQYTRMEDWLTAKLAYEGLPSKTYLSKTLAQYTSKTCSNCGFTITSADYDRVLEKLKKTATGWMTTINGKELKVEGQITYYNRYKRQNVVKDLSVELDRLSEESVNNDISSWTKGRSGEALSLLKKRFSHRPVQEKFVCLNCGFETHADEQAALNIARSWLFLRSQEYKKYQTNKTTGNTDKRAFVETWQSFYRKKLKEVWKPAV

SEQ ID NO: 26455 - protein, 978 aa, synthetic construct
  REGION 1..978: note = engineered CasX variant
QEIKRINKIRRRLVKDSNTKKAGKTGPMKTLLVRVMTPDLRERLENLRKKPENIPQPISNTSRANLNKLLTDYTEMKKAILHVYWEEFQKDPVGLMSRVAQPASKKIDQNKLKPEMDEKGNLTTAGFACSQCGQPLFVYKLEQVSEKGKAYTNYFGRCNVAEHEKLILLAQLKPEKDSDEAVTYSLGKFGQRALDFYSIHVTKESTHPVKPLAQIAGNRYASGPVGKALSDACMGTIASFLSKYQDIIIEHQKVVKGNQKRLESLRELAGKENLEYPSVTLPPQPHTKEGVDAYNEVIARVRMWVNLNLWQKLKLSRDDAKPLLRLKGFPSFPLVERQANEVDWWDMVCNVKKLINEKKEDGKVFWQNLAGYKRQEALRPYLSSEEDRKKGKKFARYQLGDLLLHLEKKHGEDWGKVYDEAWERIDKKVEGLSKHIKLEEERRSEDAQSKAALTDWLRAKASFVIEGLKEADKDEFCRCELKLQKWYGDLRGKPFAIEAENSILDISGFSKQYNCAFIWQKDGVKKLNLYLIINYFKGGKLRFKKIKPEAFEANRFYTVINKKSGEIVPMEVNFNFDDPNLIILPLAFGKRQGREFIWNDLLSLETGSLKLANGRVIEKTLYNRRTRQDEPALFVALTFERREVLDSSNIKPMNLIGVDRGENIPAVIALTDPEGCPLSRFKDSLGNPTHILRIGESYKEKQRTIMAKKEVEQRRAGGYSRKYASKAKNLADDMVRNTARDLLYYAVTQDAMLIFENLSRGFGRQGKRTFMAERQYTRMEDWLTAKLAYEGLPSKTYLSKTLAQYTSKTCSNCGFTITSADYDRVLEKLKKTATGWMTTINGKELKVEGQITYYNRYKRQNVVKDLSVELDRLSEESVNNDISSWTKGRSGEALSLLKKRFSHRPVQEKFVCLNCGFETHADEQAALNIARSWLFLRSQEYKKYQTNKTTGNTDKRAFVETWQSFYRKKLKEVWKPAV

SEQ ID NO: 26456 - protein, 978 aa, synthetic construct
  REGION 1..978: note = engineered CasX variant
QEIKRINKIRRRLVKDSNTKKAGKTGPMKTLLVRVMTPDLRERLENLRKKPENIPQPISNTSRANLNKLLTDYTEMKKAILHVYWEEFQKDPVGLMSRVAQPASKKIDQNKLKPEMDEKGNLTTAGFACSQCGQPLFVYKLEQVSEKGKAYTNYFGRCNVAEHEKLILLAQLKPEKDSDEAVTYSLGKFGQRALDFYSIHVTKESTHPVKPLAQIAGNRYASGPVGKALSDACMGTIASFLSKYQDIIIEHQKVVKGNQKRLESLRELAGKENLEYPSVTLPPQPHTKEGVDAYNEVIARVRMWVNLNLWQKLKLSRDDAKPLLRLKGFPSFPLVERQANEVDWWDMVCNVKKLINEKKEDGKVFWQNLAGYKRQEALRPYLSSEEDRKKGKKFARYQLGDLLLHLEKKHGEDWGKVYDEAWERIDKKVEGLSKHIKLEEERRSEDAQSKAALTDWLRAKASFVIEGLKEADKDEFCRCELKLQKWYGDLRGKPFAIEAENSILDISGFSKQYNCAFIWQKDGVKKLNLYLIINYFKGGKLRFKKIKPEAFEANRFYTVINKKSGEIVPMEVNFNFDDPNLIILPLAFGKRQGREFIWNDLLSLETGSLKLANGRVIEKTLYNRRTRQDEPALFVALTFERREVLDSSNIKPMNLIGVDRGENIPAVIALTDPEGCPLSRFKDSLGNPTHILRIGESYKEKQRTILAKKEVEQRRAGGYSRKYASKAKNLADDMVRNTARDLLYYAVTQDAMLIFENLSRGFGRQGKRTFMAERQYTRMEDWLTAKLAYEGLPSKTYLSKTLAQYTSKTCSNCGFTITSADYDRVLEKLKKTATGWMTTINGKELKVEGQITYYNRYKRQNVVKDLSVELDRLSEESVNNDISSWTKGRSGEALSLLKKRFSHRPVQEKFVCLNCGFETHADEQAALNIARSWLFLRSQEYKKYQTNKTTGNTDKRAFVETWQSFYRKKLKEVWKPAV

SEQ ID NO: 26457 - protein, 978 aa, synthetic construct
  REGION 1..978: note = engineered CasX variant
QEIKRINKIRRRLVKDSNTKKAGKTGPMKTLLVRVMTPDLRERLENLRKKPENIPQPISNTSRANLNKLLTDYTEMKKAILHVYWEEFQKDPVGLMSRVAQPASKKIDQNKLKPEMDEKGNLTTAGFACSQCGQPLFVYKLEQVSEKGKAYTNYFGRCNVAEHEKLILLAQLKPEKDSDEAVTYSLGKFGQRALDFYSIHVTKESTHPVKPLAQIAGNRYASGPVGKALSDACMGTIASFLSKYQDIIIEHQKVVKGNQKRLESLRELAGKENLEYPSVTLPPQPHTKEGVDAYNEVIARVRMWVNLNLWQKLKLSRDDAKPLLRLKGFPSFPLVERQANEVDWWDMVCNVKKLINEKKEDGKVFWQNLAGYKRQEALRPYLSSEEDRKKGKKFARYQLGDLLLHLEKKHGEDWGKVYDEAWERIDKKVEGLSKHIKLEEERRSEDAQSKAALTDWLRAKASFVIEGLKEADKDEFCRCELKLQKWYGDLRGKPFAIEAENSILDISGFSKQYNCAFIWQKDGVKKLNLYLIINYFKGGKLRFKKIKPEAFEANRFYTVINKKSGEIVPMEVNFNFDDPNLIILPLAFGKRQGREFIWNDLLSLETGSLKLANGRVIEKTLYNRRTRQDEPALFVALTFERREVLDSSNIKPMNLIGVDRGENIPAVIALTDPEGCPLSRFKDSLGNPTHILRIGESYKEKQRTIIAKKEVEQRRAGGYSRKYASKAKNLADDMVRNTARDLLYYAVTQDAMLIFENLSRGFGRQGKRTFMAERQYTRMEDWLTAKLAYEGLPSKTYLSKTLAQYTSKTCSNCGFTITSADYDRVLEKLKKTATGWMTTINGKELKVEGQITYYNRYKRQNVVKDLSVELDRLSEESVNNDISSWTKGRSGEALSLLKKRFSHRPVQEKFVCLNCGFETHADEQAALNIARSWLFLRSQEYKKYQTNKTTGNTDKRAFVETWQSFYRKKLKEVWKPAV

SEQ ID NO: 26458 - protein, 978 aa, synthetic construct
  REGION 1..978: note = engineered CasX variant
QEIKRINKIRRRLVKDSNTKKAGKTGPMKTLLVRVMTPDLRERLENLRKKPENIPQPISNTSRANLNKLLTDYTEMKKAILHVYWEEFQKDPVGLMSRVAQPASKKIDQNKLKPEMDEKGNLTTAGFACSQCGQPLFVYKLEQVSEKGKAYTNYFGRCNVAEHEKLILLAQLKPEKDSDEAVTYSLGKFGQRALDFYSIHVTKESTHPVKPLAQIAGNRYASGPVGKALSDACMGTIASFLSKYQDIIIEHQKVVKGNQKRLESLRELAGKENLEYPSVTLPPQPHTKEGVDAYNEVIARVRMWVNLNLWQKLKLSRDDAKPLLRLKGFPSFPLVERQANEVDWWDMVCNVKKLINEKKEDGKVFWQNLAGYKRQEALRPYLSSEEDRKKGKKFARYQLGDLLLHLEKKHGEDWGKVYDEAWERIDKKVEGLSKHIKLEEERRSEDAQSKAALTDWLRAKASFVIEGLKEADKDEFCRCELKLQKWYGDLRGKPFAIEAENSILDISGFSKQYNCAFIWQKDGVKKLNLYLIINYFKGGKLRFKKIKPEAFEANRFYTVINKKSGEIVPMEVNFNFDDPNLIILPLAFGKRQGREFIWNDLLSLETGSLKLANGRVIEKTLYNRRTRQDEPALFVALTFERREVLDSSNIKPMNLIGVDRGENIPAVIALTDPEGCPLSRFKDSLGNPTHILRIGESYKEKQRTIHAKKEVEQRRAGGYSRKYASKAKNLADDMVRNTARDLLYYAVTQDAMLIFENLSRGFGRQGKRTFMAERQYTRMEDWLTAKLAYEGLPSKTYLSKTLAQYTSKTCSNCGFTITSADYDRVLEKLKKTATGWMTTINGKELKVEGQITYYNRYKRQNVVKDLSVELDRLSEESVNNDISSWTKGRSGEALSLLKKRFSHRPVQEKFVCLNCGFETHADEQAALNIARSWLFLRSQEYKKYQTNKTTGNTDKRAFVETWQSFYRKKLKEVWKPAV

SEQ ID NO: 26459 - protein, 978 aa, synthetic construct
  REGION 1..978: note = engineered CasX variant
QEIKRINKIRRRLVKDSNTKKAGKTGPMKTLLVRVMTPDLRERLENLRKKPENIPQPISNTSRANLNKLLTDYTEMKKAILHVYWEEFQKDPVGLMSRVAQPASKKIDQNKLKPEMDEKGNLTTAGFACSQCGQPLFVYKLEQVSEKGKAYTNYFGRCNVAEHEKLILLAQLKPEKDSDEAVTYSLGKFGQRALDFYSIHVTKESTHPVKPLAQIAGNRYASGPVGKALSDACMGTIASFLSKYQDIIIEHQKVVKGNQKRLESLRELAGKENLEYPSVTLPPQPHTKEGVDAYNEVIARVRMWVNLNLWQKLKLSRDDAKPLLRLKGFPSFPLVERQANEVDWWDMVCNVKKLINEKKEDGKVFWQNLAGYKRQEALRPYLSSEEDRKKGKKFARYQLGDLLLHLEKKHGEDWGKVYDEAWERIDKKVEGLSKHIKLEEERRSEDAQSKAALTDWLRAKASFVIEGLKEADKDEFCRCELKLQKWYGDLRGKPFAIEAENSILDISGFSKQYNCAFIWQKDGVKKLNLYLIINYFKGGKLRFKKIKPEAFEANRFYTVINKKSGEIVPMEVNFNFDDPNLIILPLAFGKRQGREFIWNDLLSLETGSLKLANGRVIEKTLYNRRTRQDEPALFVALTFERREVLDSSNIKPMNLIGVDRGENIPAVIALTDPEGCPLSRFKDSLGNPTHILRIGESYKEKQRTIGAKKHVEQRRAGGYSRKYASKAKNLADDMVRNTARDLLYYAVTQDAMLIFENLSRGFGRQGKRTFMAERQYTRMEDWLTAKLAYEGLPSKTYLSKTLAQYTSKTCSNCGFTITSADYDRVLEKLKKTATGWMTTINGKELKVEGQITYYNRYKRQNVVKDLSVELDRLSEESVNNDISSWTKGRSGEALSLLKKRFSHRPVQEKFVCLNCGFETHADEQAALNIARSWLFLRSQEYKKYQTNKTTGNTDKRAFVETWQSFYRKKLKEVWKPAV

SEQ ID NO: 26460 - protein, 978 aa, synthetic construct
  REGION 1..978: note = engineered CasX variant
QEIKRINKIRRRLVKDSNTKKAGKTGPMKTLLVRVMTPDLRERLENLRKKPENIPQPISNTSRANLNKLLTDYTEMKKAILHVYWEEFQKDPVGLMSRVAQPASKKIDQNKLKPEMDEKGNLTTAGFACSQCGQPLFVYKLEQVSEKGKAYTNYFGRCNVAEHEKLILLAQLKPEKDSDEAVTYSLGKFGQRALDFYSIHVTKESTHPVKPLAQIAGNRYASGPVGKALSDACMGTIASFLSKYQDIIIEHQKVVKGNQKRLESLRELAGKENLEYPSVTLPPQPHTKEGVDAYNEVIARVRMWVNLNLWQKLKLSRDDAKPLLRLKGFPSFPLVERQANEVDWWDMVCNVKKLINEKKEDGKVFWQNLAGYKRQEALRPYLSSEEDRKKGKKFARYQLGDLLLHLEKKHGEDWGKVYDEAWERIDKKVEGLSKHIKLEEERRSEDAQSKAALTDWLRAKASFVIEGLKEADKDEFCRCELKLQKWYGDLRGKPFAIEAENSILDISGFSKQYNCAFIWQKDGVKKLNLYLIINYFKGGKLRFKKIKPEAFEANRFYTVINKKSGEIVPMEVNFNFDDPNLIILPLAFGKRQGREFIWNDLLSLETGSLKLANGRVIEKTLYNRRTRQDEPALFVALTFERREVLDSSNIKPMNLIGVDRGENIPAVIALTDPEGCPLSRFKDSLGNPTHILRIGESYKEKQRTIGAKKEVEQRRAGGYSRKYASKAKNLADDMVRNTARDLLYYAVTQDAMLIFENLSRGFGRQGKRTFMAERQYTRMEDWLTAKLAYEGLPSKTYLSKTLAQYTSKTCSNCGFTITSADYDRVLEKLKKTATGWMTTINGKELKVEGQITYYNRYKRQNVVKDLSVELDRLSEESVNNDISSWTKGRSGEALSLLKKRFSHRPVQEKFVCLNCGFETHADEQAALNIARSWLFLRSQEYKKYQTNKTTGNTDKRAFVETWQSFYRKKLKEVWKPAV

SEQ ID NO: 26461 - protein, 978 aa, synthetic construct
  REGION 1..978: note = engineered CasX variant
QEIKRINKIRRRLVKDSNTKKAGKTGPMKTLLVRVMTPDLRERLENLRKKPENIPQPISNTSRANLNKLLTDYTEMKKAILHVYWEEFQKDPVGLMSRVAQPASKKIDQNKLKPEMDEKGNLTTAGFACSQCGQPLFVYKLEQVSEKGKAYTNYFGRCNVAEHEKLILLAQLKPEKDSDEAVTYSLGKFGQRALDFYSIHVTKESTHPVKPLAQIAGNRYASGPVGKALSDACMGTIASFLSKYQDIIIEHQKVVKGNQKRLESLRELAGKENLEYPSVTLPPQPHTKEGVDAYNEVIARVRMWVNLNLWQKLKLSRDDAKPLLRLKGFPSFPLVERQANEVDWWDMVCNVKKLINEKKEDGKVFWQNLAGYKRQEALRPYLSSEEDRKKGKKFARYQLGDLLLHLEKKHGEDWGKVYDEAWERIDKKVEGLSKHIKLEEERRSEDAQSKAALTDWLRAKASFVIEGLKEADKDEFCRCELKLQKWYGDLRGKPFAIEAENSILDISGFSKQYNCAFIWQKDGVKKLNLYLIINYFKGGKLRFKKIKPEAFEANRFYTVINKKSGEIVPMEVNFNFDDPNLIILPLAFGKRQGREFIWNDLLSLETGSLKLANGRVIEKTLYNRRTRQDEPALFVALTFERREVLDSSNIKPMNLIGVDRGENIPAVIALTDPEGCPLSRFKDSLGNPTHILRIGESYKEKQRTIFAKKEWEQRRAGGYSRKYASKAKNLADDMVRNTARDLLYYAVTQDAMLIFENLSRGFGRQGKRTFMAERQYTRMEDWLTAKLAYEGLPSKTYLSKTLAQYTSKTCSNCGFTITSADYDRVLEKLKKTATGWMTTINGKELKVEGQITYYNRYKRQNVVKDLSVELDRLSEESVNNDISSWTKGRSGEALSLLKKRFSHRPVQEKFVCLNCGFETHADEQAALNIARSWLFLRSQEYKKYQTNKTTGNTDKRAFVETWQSFYRKKLKEVWKPAV

SEQ ID NO: 26462 - protein, 978 aa, synthetic construct
  REGION 1..978: note = engineered CasX variant
QEIKRINKIRRRLVKDSNTKKAGKTGPMKTLLVRVMTPDLRERLENLRKKPENIPQPISNTSRANLNKLLTDYTEMKKAILHVYWEEFQKDPVGLMSRVAQPASKKIDQNKLKPEMDEKGNLTTAGFACSQCGQPLFVYKLEQVSEKGKAYTNYFGRCNVAEHEKLILLAQLKPEKDSDEAVTYSLGKFGQRALDFYSIHVTKESTHPVKPLAQIAGNRYASGPVGKALSDACMGTIASFLSKYQDIIIEHQKVVKGNQKRLESLRELAGKENLEYPSVTLPPQPHTKEGVDAYNEVIARVRMWVNLNLWQKLKLSRDDAKPLLRLKGFPSFPLVERQANEVDWWDMVCNVKKLINEKKEDGKVFWQNLAGYKRQEALRPYLSSEEDRKKGKKFARYQLGDLLLHLEKKHGEDWGKVYDEAWERIDKKVEGLSKHIKLEEERRSEDAQSKAALTDWLRAKASFVIEGLKEADKDEFCRCELKLQKWYGDLRGKPFAIEAENSILDISGFSKQYNCAFIWQKDGVKKLNLYLIINYFKGGKLRFKKIKPEAFEANRFYTVINKKSGEIVPMEVNFNFDDPNLIILPLAFGKRQGREFIWNDLLSLETGSLKLANGRVIEKTLYNRRTRQDEPALFVALTFERREVLDSSNIKPMNLIGVDRGENIPAVIALTDPEGCPLSRFKDSLGNPTHILRIGESYKEKQRTIFAKKEVEQRRAGGYSRKYASKAKNLADDMVRNTARDLLYYAVTQDAMLIFENLSRGFGRQGKRTFMAERQYTRMEDWLTAKLAYEGLPSKTYLSKTLAQYTSKTCSNCGFTITSADYDRVLEKLKKTATGWMTTINGKELKVEGQITYYNRYKRQNVVKDLSVELDRLSEESVNNDISSWTKGRSGEALSLLKKRFSHRPVQEKFVCLNCGFETHADEQAALNIARSWLFLRSQEYKKYQTNKTTGNTDKRAFVETWQSFYRKKLKEVWKPAV

SEQ ID NO: 26463 - protein, 978 aa, synthetic construct
  REGION 1..978: note = engineered CasX variant
QEIKRINKIRRRLVKDSNTKKAGKTGPMKTLLVRVMTPDLRERLENLRKKPENIPQPISNTSRANLNKLLTDYTEMKKAILHVYWEEFQKDPVGLMSRVAQPASKKIDQNKLKPEMDEKGNLTTAGFACSQCGQPLFVYKLEQVSEKGKAYTNYFGRCNVAEHEKLILLAQLKPEKDSDEAVTYSLGKFGQRALDFYSIHVTKESTHPVKPLAQIAGNRYASGPVGKALSDACMGTIASFLSKYQDIIIEHQKVVKGNQKRLESLRELAGKENLEYPSVTLPPQPHTKEGVDAYNEVIARVRMWVNLNLWQKLKLSRDDAKPLLRLKGFPSFPLVERQANEVDWWDMVCNVKKLINEKKEDGKVFWQNLAGYKRQEALRPYLSSEEDRKKGKKFARYQLGDLLLHLEKKHGEDWGKVYDEAWERIDKKVEGLSKHIKLEEERRSEDAQSKAALTDWLRAKASFVIEGLKEADKDEFCRCELKLQKWYGDLRGKPFAIEAENSILDISGFSKQYNCAFIWQKDGVKKLNLYLIINYFKGGKLRFKKIKPEAFEANRFYTVINKKSGEIVPMEVNFNFDDPNLIILPLAFGKRQGREFIWNDLLSLETGSLKLANGRVIEKTLYNRRTRQDEPALFVALTFERREVLDSSNIKPMNLIGVDRGENIPAVIALTDPEGCPLSRFKDSLGNPTHILRIGESYKEKQRTIFAKKEAEQRRAGGYSRKYASKAKNLADDMVRNTARDLLYYAVTQDAMLIFENLSRGFGRQGKRTFMAERQYTRMEDWLTAKLAYEGLPSKTYLSKTLAQYTSKTCSNCGFTITSADYDRVLEKLKKTATGWMTTINGKELKVEGQITYYNRYKRQNVVKDLSVELDRLSEESVNNDISSWTKGRSGEALSLLKKRFSHRPVQEKFVCLNCGFETHADEQAALNIARSWLFLRSQEYKKYQTNKTTGNTDKRAFVETWQSFYRKKLKEVWKPAV

SEQ ID NO: 26464 - protein, 978 aa, synthetic construct
  REGION 1..978: note = engineered CasX variant
QEIKRINKIRRRLVKDSNTKKAGKTGPMKTLLVRVMTPDLRERLENLRKKPENIPQPISNTSRANLNKLLTDYTEMKKAILHVYWEEFQKDPVGLMSRVAQPASKKIDQNKLKPEMDEKGNLTTAGFACSQCGQPLFVYKLEQVSEKGKAYTNYFGRCNVAEHEKLILLAQLKPEKDSDEAVTYSLGKFGQRALDFYSIHVTKESTHPVKPLAQIAGNRYASGPVGKALSDACMGTIASFLSKYQDIIIEHQKVVKGNQKRLESLRELAGKENLEYPSVTLPPQPHTKEGVDAYNEVIARVRMWVNLNLWQKLKLSRDDAKPLLRLKGFPSFPLVERQANEVDWWDMVCNVKKLINEKKEDGKVFWQNLAGYKRQEALRPYLSSEEDRKKGKKFARYQLGDLLLHLEKKHGEDWGKVYDEAWERIDKKVEGLSKHIKLEEERRSEDAQSKAALTDWLRAKASFVIEGLKEADKDEFCRCELKLQKWYGDLRGKPFAIEAENSILDISGFSKQYNCAFIWQKDGVKKLNLYLIINYFKGGKLRFKKIKPEAFEANRFYTVINKKSGEIVPMEVNFNFDDPNLIILPLAFGKRQGREFIWNDLLSLETGSLKLANGRVIEKTLYNRRTRQDEPALFVALTFERREVLDSSNIKPMNLIGVDRGENIPAVIALTDPEGCPLSRFKDSLGNPTHILRIGESYKEKQRTIEAKKEVYQRRAGGYSRKYASKAKNLADDMVRNTARDLLYYAVTQDAMLIFENLSRGFGRQGKRTFMAERQYTRMEDWLTAKLAYEGLPSKTYLSKTLAQYTSKTCSNCGFTITSADYDRVLEKLKKTATGWMTTINGKELKVEGQITYYNRYKRQNVVKDLSVELDRLSEESVNNDISSWTKGRSGEALSLLKKRFSHRPVQEKFVCLNCGFETHADEQAALNIARSWLFLRSQEYKKYQTNKTTGNTDKRAFVETWQSFYRKKLKEVWKPAV

SEQ ID NO: 26465 - protein, 978 aa, synthetic construct
  REGION 1..978: note = engineered CasX variant
QEIKRINKIRRRLVKDSNTKKAGKTGPMKTLLVRVMTPDLRERLENLRKKPENIPQPISNTSRANLNKLLTDYTEMKKAILHVYWEEFQKDPVGLMSRVAQPASKKIDQNKLKPEMDEKGNLTTAGFACSQCGQPLFVYKLEQVSEKGKAYTNYFGRCNVAEHEKLILLAQLKPEKDSDEAVTYSLGKFGQRALDFYSIHVTKESTHPVKPLAQIAGNRYASGPVGKALSDACMGTIASFLSKYQDIIIEHQKVVKGNQKRLESLRELAGKENLEYPSVTLPPQPHTKEGVDAYNEVIARVRMWVNLNLWQKLKLSRDDAKPLLRLKGFPSFPLVERQANEVDWWDMVCNVKKLINEKKEDGKVFWQNLAGYKRQEALRPYLSSEEDRKKGKKFARYQLGDLLLHLEKKHGEDWGKVYDEAWERIDKKVEGLSKHIKLEEERRSEDAQSKAALTDWLRAKASFVIEGLKEADKDEFCRCELKLQKWYGDLRGKPFAIEAENSILDISGFSKQYNCAFIWQKDGVKKLNLYLIINYFKGGKLRFKKIKPEAFEANRFYTVINKKSGEIVPMEVNFNFDDPNLIILPLAFGKRQGREFIWNDLLSLETGSLKLANGRVIEKTLYNRRTRQDEPALFVALTFERREVLDSSNIKPMNLIGVDRGENIPAVIALTDPEGCPLSRFKDSLGNPTHILRIGESYKEKQRTIEAKKEVEQRRAGLYSRKYASKAKNLADDMVRNTARDLLYYAVTQDAMLIFENLSRGFGRQGKRTFMAERQYTRMEDWLTAKLAYEGLPSKTYLSKTLAQYTSKTCSNCGFTITSADYDRVLEKLKKTATGWMTTINGKELKVEGQITYYNRYKRQNVVKDLSVELDRLSEESVNNDISSWTKGRSGEALSLLKKRFSHRPVQEKFVCLNCGFETHADEQAALNIARSWLFLRSQEYKKYQTNKTTGNTDKRAFVETWQSFYRKKLKEVWKPAV

SEQ ID NO: 26466 - protein, 978 aa, synthetic construct
  REGION 1..978: note = engineered CasX variant
QEIKRINKIRRRLVKDSNTKKAGKTGPMKTLLVRVMTPDLRERLENLRKKPENIPQPISNTSRANLNKLLTDYTEMKKAILHVYWEEFQKDPVGLMSRVAQPASKKIDQNKLKPEMDEKGNLTTAGFACSQCGQPLFVYKLEQVSEKGKAYTNYFGRCNVAEHEKLILLAQLKPEKDSDEAVTYSLGKFGQRALDFYSIHVTKESTHPVKPLAQIAGNRYASGPVGKALSDACMGTIASFLSKYQDIIIEHQKVVKGNQKRLESLRELAGKENLEYPSVTLPPQPHTKEGVDAYNEVIARVRMWVNLNLWQKLKLSRDDAKPLLRLKGFPSFPLVERQANEVDWWDMVCNVKKLINEKKEDGKVFWQNLAGYKRQEALRPYLSSEEDRKKGKKFARYQLGDLLLHLEKKHGEDWGKVYDEAWERIDKKVEGLSKHIKLEEERRSEDAQSKAALTDWLRAKASFVIEGLKEADKDEFCRCELKLQKWYGDLRGKPFAIEAENSILDISGFSKQYNCAFIWQKDGVKKLNLYLIINYFKGGKLRFKKIKPEAFEANRFYTVINKKSGEIVPMEVNFNFDDPNLIILPLAFGKRQGREFIWNDLLSLETGSLKLANGRVIEKTLYNRRTRQDEPALFVALTFERREVLDSSNIKPMNLIGVDRGENIPAVIALTDPEGCPLSRFKDSLGNPTHILRIGESYKEKQRTIEAKKEVEQRRAGGYSRKYASKAKNLADDMVRNTARDLLYYAVTQDAMLIFENLSRGFGRQGKRTFMAERQYTRMEDWLTAKLAYEGLPSKTYLSKTLAQYTSKTCSNCGFTITSADYDRVLEKLKKTATGWMTTINGKELKVEGQITYYNRYKRQNVVKDLSVELDRLSEESVNNDISSWTKGRSGEALSLLKKRFSHRPVQEKFVCLNCGFETHADEQAALNIARSWLFLRSQEYKKYQTNKTTGNTDKRAFVETWQSFYRKKLKEVWKPAV

SEQ ID NO: 26467 - protein, 978 aa, synthetic construct
  REGION 1..978: note = engineered CasX variant
QEIKRINKIRRRLVKDSNTKKAGKTGPMKTLLVRVMTPDLRERLENLRKKPENIPQPISNTSRANLNKLLTDYTEMKKAILHVYWEEFQKDPVGLMSRVAQPASKKIDQNKLKPEMDEKGNLTTAGFACSQCGQPLFVYKLEQVSEKGKAYTNYFGRCNVAEHEKLILLAQLKPEKDSDEAVTYSLGKFGQRALDFYSIHVTKESTHPVKPLAQIAGNRYASGPVGKALSDACMGTIASFLSKYQDIIIEHQKVVKGNQKRLESLRELAGKENLEYPSVTLPPQPHTKEGVDAYNEVIARVRMWVNLNLWQKLKLSRDDAKPLLRLKGFPSFPLVERQANEVDWWDMVCNVKKLINEKKEDGKVFWQNLAGYKRQEALRPYLSSEEDRKKGKKFARYQLGDLLLHLEKKHGEDWGKVYDEAWERIDKKVEGLSKHIKLEEERRSEDAQSKAALTDWLRAKASFVIEGLKEADKDEFCRCELKLQKWYGDLRGKPFAIEAENSILDISGFSKQYNCAFIWQKDGVKKLNLYLIINYFKGGKLRFKKIKPEAFEANRFYTVINKKSGEIVPMEVNFNFDDPNLIILPLAFGKRQGREFIWNDLLSLETGSLKLANGRVIEKTLYNRRTRQDEPALFVALTFERREVLDSSNIKPMNLIGVDRGENIPAVIALTDPEGCPLSRFKDSLGNPTHILRIGESYKEKQRTIEAKKEEEQRRAGLYSRKYASKAKNLADDMVRNTARDLLYYAVTQDAMLIFENLSRGFGRQGKRTFMAERQYTRMEDWLTAKLAYEGLPSKTYLSKTLAQYTSKTCSNCGFTITSADYDRVLEKLKKTATGWMTTINGKELKVEGQITYYNRYKRQNVVKDLSVELDRLSEESVNNDISSWTKGRSGEALSLLKKRFSHRPVQEKFVCLNCGFETHADEQAALNIARSWLFLRSQEYKKYQTNKTTGNTDKRAFVETWQSFYRKKLKEVWKPAV

SEQ ID NO: 26468 - protein, 978 aa, synthetic construct
  REGION 1..978: note = engineered CasX variant
QEIKRINKIRRRLVKDSNTKKAGKTGPMKTLLVRVMTPDLRERLENLRKKPENIPQPISNTSRANLNKLLTDYTEMKKAILHVYWEEFQKDPVGLMSRVAQPASKKIDQNKLKPEMDEKGNLTTAGFACSQCGQPLFVYKLEQVSEKGKAYTNYFGRCNVAEHEKLILLAQLKPEKDSDEAVTYSLGKFGQRALDFYSIHVTKESTHPVKPLAQIAGNRYASGPVGKALSDACMGTIASFLSKYQDIIIEHQKVVKGNQKRLESLRELAGKENLEYPSVTLPPQPHTKEGVDAYNEVIARVRMWVNLNLWQKLKLSRDDAKPLLRLKGFPSFPLVERQANEVDWWDMVCNVKKLINEKKEDGKVFWQNLAGYKRQEALRPYLSSEEDRKKGKKFARYQLGDLLLHLEKKHGEDWGKVYDEAWERIDKKVEGLSKHIKLEEERRSEDAQSKAALTDWLRAKASFVIEGLKEADKDEFCRCELKLQKWYGDLRGKPFAIEAENSILDISGFSKQYNCAFIWQKDGVKKLNLYLIINYFKGGKLRFKKIKPEAFEANRFYTVINKKSGEIVPMEVNFNFDDPNLIILPLAFGKRQGREFIWNDLLSLETGSLKLANGRVIEKTLYNRRTRQDEPALFVALTFERREVLDSSNIKPMNLIGVDRGENIPAVIALTDPEGCPLSRFKDSLGNPTHILRIGESYKEKQRTIEAKKEEEQRRAGGYSRKYASKAKNLADDMVRNTARDLLYYAVTQDAMLIFENLSRGFGRQGKRTFMAERQYTRMEDWLTAKLAYEGLPSKTYLSKTLAQYTSKTCSNCGFTITSADYDRVLEKLKKTATGWMTTINGKELKVEGQITYYNRYKRQNVVKDLSVELDRLSEESVNNDISSWTKGRSGEALSLLKKRFSHRPVQEKFVCLNCGFETHADEQAALNIARSWLFLRSQEYKKYQTNKTTGNTDKRAFVETWQSFYRKKLKEVWKPAV

SEQ ID NO: 26469 - protein, 978 aa, synthetic construct
  REGION 1..978: note = engineered CasX variant
QEIKRINKIRRRLVKDSNTKKAGKTGPMKTLLVRVMTPDLRERLENLRKKPENIPQPISNTSRANLNKLLTDYTEMKKAILHVYWEEFQKDPVGLMSRVAQPASKKIDQNKLKPEMDEKGNLTTAGFACSQCGQPLFVYKLEQVSEKGKAYTNYFGRCNVAEHEKLILLAQLKPEKDSDEAVTYSLGKFGQRALDFYSIHVTKESTHPVKPLAQIAGNRYASGPVGKALSDACMGTIASFLSKYQDIIIEHQKVVKGNQKRLESLRELAGKENLEYPSVTLPPQPHTKEGVDAYNEVIARVRMWVNLNLWQKLKLSRDDAKPLLRLKGFPSFPLVERQANEVDWWDMVCNVKKLINEKKEDGKVFWQNLAGYKRQEALRPYLSSEEDRKKGKKFARYQLGDLLLHLEKKHGEDWGKVYDEAWERIDKKVEGLSKHIKLEEERRSEDAQSKAALTDWLRAKASFVIEGLKEADKDEFCRCELKLQKWYGDLRGKPFAIEAENSILDISGFSKQYNCAFIWQKDGVKKLNLYLIINYFKGGKLRFKKIKPEAFEANRFYTVINKKSGEIVPMEVNFNFDDPNLIILPLAFGKRQGREFIWNDLLSLETGSLKLANGRVIEKTLYNRRTRQDEPALFVALTFERREVLDSSNIKPMNLIGVDRGENIPAVIALTDPEGCPLSRFKDSLGNPTHILRIGESYKEKQRTICAKKQVEQRRAGGYSRKYASKAKNLADDMVRNTARDLLYYAVTQDAMLIFENLSRGFGRQGKRTFMAERQYTRMEDWLTAKLAYEGLPSKTYLSKTLAQYTSKTCSNCGFTITSADYDRVLEKLKKTATGWMTTINGKELKVEGQITYYNRYKRQNVVKDLSVELDRLSEESVNNDISSWTKGRSGEALSLLKKRFSHRPVQEKFVCLNCGFETHADEQAALNIARSWLFLRSQEYKKYQTNKTTGNTDKRAFVETWQSFYRKKLKEVWKPAV

SEQ ID NO: 26470 - protein, 978 aa, synthetic construct
  REGION 1..978: note = engineered CasX variant
QEIKRINKIRRRLVKDSNTKKAGKTGPMKTLLVRVMTPDLRERLENLRKKPENIPQPISNTSRANLNKLLTDYTEMKKAILHVYWEEFQKDPVGLMSRVAQPASKKIDQNKLKPEMDEKGNLTTAGFACSQCGQPLFVYKLEQVSEKGKAYTNYFGRCNVAEHEKLILLAQLKPEKDSDEAVTYSLGKFGQRALDFYSIHVTKESTHPVKPLAQIAGNRYASGPVGKALSDACMGTIASFLSKYQDIIIEHQKVVKGNQKRLESLRELAGKENLEYPSVTLPPQPHTKEGVDAYNEVIARVRMWVNLNLWQKLKLSRDDAKPLLRLKGFPSFPLVERQANEVDWWDMVCNVKKLINEKKEDGKVFWQNLAGYKRQEALRPYLSSEEDRKKGKKFARYQLGDLLLHLEKKHGEDWGKVYDEAWERIDKKVEGLSKHIKLEEERRSEDAQSKAALTDWLRAKASFVIEGLKEADKDEFCRCELKLQKWYGDLRGKPFAIEAENSILDISGFSKQYNCAFIWQKDGVKKLNLYLIINYFKGGKLRFKKIKPEAFEANRFYTVINKKSGEIVPMEVNFNFDDPNLIILPLAFGKRQGREFIWNDLLSLETGSLKLANGRVIEKTLYNRRTRQDEPALFVALTFERREVLDSSNIKPMNLIGVDRGENIPAVIALTDPEGCPLSRFKDSLGNPTHILRIGESYKEKQRTICAKKEVEQRRAGGYSRKYASKAKNLADDMVRNTARDLLYYAVTQDAMLIFENLSRGFGRQGKRTFMAERQYTRMEDWLTAKLAYEGLPSKTYLSKTLAQYTSKTCSNCGFTITSADYDRVLEKLKKTATGWMTTINGKELKVEGQITYYNRYKRQNVVKDLSVELDRLSEESVNNDISSWTKGRSGEALSLLKKRFSHRPVQEKFVCLNCGFETHADEQAALNIARSWLFLRSQEYKKYQTNKTTGNTDKRAFVETWQSFYRKKLKEVWKPAV

SEQ ID NO: 26471 - protein, 978 aa, synthetic construct
  REGION 1..978: note = engineered CasX variant
QEIKRINKIRRRLVKDSNTKKAGKTGPMKTLLVRVMTPDLRERLENLRKKPENIPQPISNTSRANLNKLLTDYTEMKKAILHVYWEEFQKDPVGLMSRVAQPASKKIDQNKLKPEMDEKGNLTTAGFACSQCGQPLFVYKLEQVSEKGKAYTNYFGRCNVAEHEKLILLAQLKPEKDSDEAVTYSLGKFGQRALDFYSIHVTKESTHPVKPLAQIAGNRYASGPVGKALSDACMGTIASFLSKYQDIIIEHQKVVKGNQKRLESLRELAGKENLEYPSVTLPPQPHTKEGVDAYNEVIARVRMWVNLNLWQKLKLSRDDAKPLLRLKGFPSFPLVERQANEVDWWDMVCNVKKLINEKKEDGKVFWQNLAGYKRQEALRPYLSSEEDRKKGKKFARYQLGDLLLHLEKKHGEDWGKVYDEAWERIDKKVEGLSKHIKLEEERRSEDAQSKAALTDWLRAKASFVIEGLKEADKDEFCRCELKLQKWYGDLRGKPFAIEAENSILDISGFSKQYNCAFIWQKDGVKKLNLYLIINYFKGGKLRFKKIKPEAFEANRFYTVINKKSGEIVPMEVNFNFDDPNLIILPLAFGKRQGREFIWNDLLSLETGSLKLANGRVIEKTLYNRRTRQDEPALFVALTFERREVLDSSNIKPMNLIGVDRGENIPAVIALTDPEGCPLSRFKDSLGNPTHILRIGESYKEKQRTICAKKEHEQRRAGGYSRKYASKAKNLADDMVRNTARDLLYYAVTQDAMLIFENLSRGFGRQGKRTFMAERQYTRMEDWLTAKLAYEGLPSKTYLSKTLAQYTSKTCSNCGFTITSADYDRVLEKLKKTATGWMTTINGKELKVEGQITYYNRYKRQNVVKDLSVELDRLSEESVNNDISSWTKGRSGEALSLLKKRFSHRPVQEKFVCLNCGFETHADEQAALNIARSWLFLRSQEYKKYQTNKTTGNTDKRAFVETWQSFYRKKLKEVWKPAV

SEQ ID NO: 26472 - protein, 978 aa, synthetic construct
  REGION 1..978: note = engineered CasX variant
QEIKRINKIRRRLVKDSNTKKAGKTGPMKTLLVRVMTPDLRERLENLRKKPENIPQPISNTSRANLNKLLTDYTEMKKAILHVYWEEFQKDPVGLMSRVAQPASKKIDQNKLKPEMDEKGNLTTAGFACSQCGQPLFVYKLEQVSEKGKAYTNYFGRCNVAEHEKLILLAQLKPEKDSDEAVTYSLGKFGQRALDFYSIHVTKESTHPVKPLAQIAGNRYASGPVGKALSDACMGTIASFLSKYQDIIIEHQKVVKGNQKRLESLRELAGKENLEYPSVTLPPQPHTKEGVDAYNEVIARVRMWVNLNLWQKLKLSRDDAKPLLRLKGFPSFPLVERQANEVDWWDMVCNVKKLINEKKEDGKVFWQNLAGYKRQEALRPYLSSEEDRKKGKKFARYQLGDLLLHLEKKHGEDWGKVYDEAWERIDKKVEGLSKHIKLEEERRSEDAQSKAALTDWLRAKASFVIEGLKEADKDEFCRCELKLQKWYGDLRGKPFAIEAENSILDISGFSKQYNCAFIWQKDGVKKLNLYLIINYFKGGKLRFKKIKPEAFEANRFYTVINKKSGEIVPMEVNFNFDDPNLIILPLAFGKRQGREFIWNDLLSLETGSLKLANGRVIEKTLYNRRTRQDEPALFVALTFERREVLDSSNIKPMNLIGVDRGENIPAVIALTDPEGCPLSRFKDSLGNPTHILRIGESYKEKQRTIAAKKEVEQRRAGGYSRKYASKAKNLADDMVRNTARDLLYYAVTQDAMLIFENLSRGFGRQGKRTFMAERQYTRMEDWLTAKLAYEGLPSKTYLSKTLAQYTSKTCSNCGFTITSADYDRVLEKLKKTATGWMTTINGKELKVEGQITYYNRYKRQNVVKDLSVELDRLSEESVNNDISSWTKGRSGEALSLLKKRFSHRPVQEKFVCLNCGFETHADEQAALNIARSWLFLRSQEYKKYQTNKTTGNTDKRAFVETWQSFYRKKLKEVWKPAV

SEQ ID NO: 26473 - protein, 978 aa, synthetic construct
  REGION 1..978: note = engineered CasX variant
QEIKRINKIRRRLVKDSNTKKAGKTGPMKTLLVRVMTPDLRERLENLRKKPENIPQPISNTSRANLNKLLTDYTEMKKAILHVYWEEFQKDPVGLMSRVAQPASKKIDQNKLKPEMDEKGNLTTAGFACSQCGQPLFVYKLEQVSEKGKAYTNYFGRCNVAEHEKLILLAQLKPEKDSDEAVTYSLGKFGQRALDFYSIHVTKESTHPVKPLAQIAGNRYASGPVGKALSDACMGTIASFLSKYQDIIIEHQKVVKGNQKRLESLRELAGKENLEYPSVTLPPQPHTKEGVDAYNEVIARVRMWVNLNLWQKLKLSRDDAKPLLRLKGFPSFPLVERQANEVDWWDMVCNVKKLINEKKEDGKVFWQNLAGYKRQEALRPYLSSEEDRKKGKKFARYQLGDLLLHLEKKHGEDWGKVYDEAWERIDKKVEGLSKHIKLEEERRSEDAQSKAALTDWLRAKASFVIEGLKEADKDEFCRCELKLQKWYGDLRGKPFAIEAENSILDISGFSKQYNCAFIWQKDGVKKLNLYLIINYFKGGKLRFKKIKPEAFEANRFYTVINKKSGEIVPMEVNFNFDDPNLIILPLAFGKRQGREFIWNDLLSLETGSLKLANGRVIEKTLYNRRTRQDEPALFVALTFERREVLDSSNIKPMNLIGVDRGENIPAVIALTDPEGCPLSRFKDSLGNPTHILRIGESYKEKQRTHQAKKYVEQRRAGGYSRKYASKAKNLADDMVRNTARDLLYYAVTQDAMLIFENLSRGFGRQGKRTFMAERQYTRMEDWLTAKLAYEGLPSKTYLSKTLAQYTSKTCSNCGFTITSADYDRVLEKLKKTATGWMTTINGKELKVEGQITYYNRYKRQNVVKDLSVELDRLSEESVNNDISSWTKGRSGEALSLLKKRFSHRPVQEKFVCLNCGFETHADEQAALNIARSWLFLRSQEYKKYQTNKTTGNTDKRAFVETWQSFYRKKLKEVWKPAV

SEQ ID NO: 26474 - protein, 978 aa, synthetic construct
  REGION 1..978: note = engineered CasX variant
QEIKRINKIRRRLVKDSNTKKAGKTGPMKTLLVRVMTPDLRERLENLRKKPENIPQPISNTSRANLNKLLTDYTEMKKAILHVYWEEFQKDPVGLMSRVAQPASKKIDQNKLKPEMDEKGNLTTAGFACSQCGQPLFVYKLEQVSEKGKAYTNYFGRCNVAEHEKLILLAQLKPEKDSDEAVTYSLGKFGQRALDFYSIHVTKESTHPVKPLAQIAGNRYASGPVGKALSDACMGTIASFLSKYQDIIIEHQKVVKGNQKRLESLRELAGKENLEYPSVTLPPQPHTKEGVDAYNEVIARVRMWVNLNLWQKLKLSRDDAKPLLRLKGFPSFPLVERQANEVDWWDMVCNVKKLINEKKEDGKVFWQNLAGYKRQEALRPYLSSEEDRKKGKKFARYQLGDLLLHLEKKHGEDWGKVYDEAWERIDKKVEGLSKHIKLEEERRSEDAQSKAALTDWLRAKASFVIEGLKEADKDEFCRCELKLQKWYGDLRGKPFAIEAENSILDISGFSKQYNCAFIWQKDGVKKLNLYLIINYFKGGKLRFKKIKPEAFEANRFYTVINKKSGEIVPMEVNFNFDDPNLIILPLAFGKRQGREFIWNDLLSLETGSLKLANGRVIEKTLYNRRTRQDEPALFVALTFERREVLDSSNIKPMNLIGVDRGENIPAVIALTDPEGCPLSRFKDSLGNPTHILRIGESYKEKQRTHQAKKEVEQRRAGGYSRKYASKAKNLADDMVRNTARDLLYYAVTQDAMLIFENLSRGFGRQGKRTFMAERQYTRMEDWLTAKLAYEGLPSKTYLSKTLAQYTSKTCSNCGFTITSADYDRVLEKLKKTATGWMTTINGKELKVEGQITYYNRYKRQNVVKDLSVELDRLSEESVNNDISSWTKGRSGEALSLLKKRFSHRPVQEKFVCLNCGFETHADEQAALNIARSWLFLRSQEYKKYQTNKTTGNTDKRAFVETWQSFYRKKLKEVWKPAV

SEQ ID NO: 26475 - protein, 978 aa, synthetic construct
  REGION 1..978: note = engineered CasX variant
QEIKRINKIRRRLVKDSNTKKAGKTGPMKTLLVRVMTPDLRERLENLRKKPENIPQPISNTSRANLNKLLTDYTEMKKAILHVYWEEFQKDPVGLMSRVAQPASKKIDQNKLKPEMDEKGNLTTAGFACSQCGQPLFVYKLEQVSEKGKAYTNYFGRCNVAEHEKLILLAQLKPEKDSDEAVTYSLGKFGQRALDFYSIHVTKESTHPVKPLAQIAGNRYASGPVGKALSDACMGTIASFLSKYQDIIIEHQKVVKGNQKRLESLRELAGKENLEYPSVTLPPQPHTKEGVDAYNEVIARVRMWVNLNLWQKLKLSRDDAKPLLRLKGFPSFPLVERQANEVDWWDMVCNVKKLINEKKEDGKVFWQNLAGYKRQEALRPYLSSEEDRKKGKKFARYQLGDLLLHLEKKHGEDWGKVYDEAWERIDKKVEGLSKHIKLEEERRSEDAQSKAALTDWLRAKASFVIEGLKEADKDEFCRCELKLQKWYGDLRGKPFAIEAENSILDISGFSKQYNCAFIWQKDGVKKLNLYLIINYFKGGKLRFKKIKPEAFEANRFYTVINKKSGEIVPMEVNFNFDDPNLIILPLAFGKRQGREFIWNDLLSLETGSLKLANGRVIEKTLYNRRTRQDEPALFVALTFERREVLDSSNIKPMNLIGVDRGENIPAVIALTDPEGCPLSRFKDSLGNPTHILRIGESYKEKQRTFQASKEVEQRRAGGYSRKYASKAKNLADDMVRNTARDLLYYAVTQDAMLIFENLSRGFGRQGKRTFMAERQYTRMEDWLTAKLAYEGLPSKTYLSKTLAQYTSKTCSNCGFTITSADYDRVLEKLKKTATGWMTTINGKELKVEGQITYYNRYKRQNVVKDLSVELDRLSEESVNNDISSWTKGRSGEALSLLKKRFSHRPVQEKFVCLNCGFETHADEQAALNIARSWLFLRSQEYKKYQTNKTTGNTDKRAFVETWQSFYRKKLKEVWKPAV

SEQ ID NO: 26476 - protein, 978 aa, synthetic construct
  REGION 1..978: note = engineered CasX variant
QEIKRINKIRRRLVKDSNTKKAGKTGPMKTLLVRVMTPDLRERLENLRKKPENIPQPISNTSRANLNKLLTDYTEMKKAILHVYWEEFQKDPVGLMSRVAQPASKKIDQNKLKPEMDEKGNLTTAGFACSQCGQPLFVYKLEQVSEKGKAYTNYFGRCNVAEHEKLILLAQLKPEKDSDEAVTYSLGKFGQRALDFYSIHVTKESTHPVKPLAQIAGNRYASGPVGKALSDACMGTIASFLSKYQDIIIEHQKVVKGNQKRLESLRELAGKENLEYPSVTLPPQPHTKEGVDAYNEVIARVRMWVNLNLWQKLKLSRDDAKPLLRLKGFPSFPLVERQANEVDWWDMVCNVKKLINEKKEDGKVFWQNLAGYKRQEALRPYLSSEEDRKKGKKFARYQLGDLLLHLEKKHGEDWGKVYDEAWERIDKKVEGLSKHIKLEEERRSEDAQSKAALTDWLRAKASFVIEGLKEADKDEFCRCELKLQKWYGDLRGKPFAIEAENSILDISGFSKQYNCAFIWQKDGVKKLNLYLIINYFKGGKLRFKKIKPEAFEANRFYTVINKKSGEIVPMEVNFNFDDPNLIILPLAFGKRQGREFIWNDLLSLETGSLKLANGRVIEKTLYNRRTRQDEPALFVALTFERREVLDSSNIKPMNLIGVDRGENIPAVIALTDPEGCPLSRFKDSLGNPTHILRIGESYKEKQRTFQAKKEVEQRRAGGYSRKYASKAKNLADDMVRNTARDLLYYAVTQDAMLIFENLSRGFGRQGKRTFMAERQYTRMEDWLTAKLAYEGLPSKTYLSKTLAQYTSKTCSNCGFTITSADYDRVLEKLKKTATGWMTTINGKELKVEGQITYYNRYKRQNVVKDLSVELDRLSEESVNNDISSWTKGRSGEALSLLKKRFSHRPVQEKFVCLNCGFETHADEQAALNIARSWLFLRSQEYKKYQTNKTTGNTDKRAFVETWQSFYRKKLKEVWKPAV

SEQ ID NO: 26477 - protein, 978 aa, synthetic construct
  REGION 1..978: note = engineered CasX variant
QEIKRINKIRRRLVKDSNTKKAGKTGPMKTLLVRVMTPDLRERLENLRKKPENIPQPISNTSRANLNKLLTDYTEMKKAILHVYWEEFQKDPVGLMSRVAQPASKKIDQNKLKPEMDEKGNLTTAGFACSQCGQPLFVYKLEQVSEKGKAYTNYFGRCNVAEHEKLILLAQLKPEKDSDEAVTYSLGKFGQRALDFYSIHVTKESTHPVKPLAQIAGNRYASGPVGKALSDACMGTIASFLSKYQDIIIEHQKVVKGNQKRLESLRELAGKENLEYPSVTLPPQPHTKEGVDAYNEVIARVRMWVNLNLWQKLKLSRDDAKPLLRLKGFPSFPLVERQANEVDWWDMVCNVKKLINEKKEDGKVFWQNLAGYKRQEALRPYLSSEEDRKKGKKFARYQLGDLLLHLEKKHGEDWGKVYDEAWERIDKKVEGLSKHIKLEEERRSEDAQSKAALTDWLRAKASFVIEGLKEADKDEFCRCELKLQKWYGDLRGKPFAIEAENSILDISGFSKQYNCAFIWQKDGVKKLNLYLIINYFKGGKLRFKKIKPEAFEANRFYTVINKKSGEIVPMEVNFNFDDPNLIILPLAFGKRQGREFIWNDLLSLETGSLKLANGRVIEKTLYNRRTRQDEPALFVALTFERREVLDSSNIKPMNLIGVDRGENIPAVIALTDPEGCPLSRFKDSLGNPTHILRIGESYKEKQRTFQAKKETEQRRAGGYSRKYASKAKNLADDMVRNTARDLLYYAVTQDAMLIFENLSRGFGRQGKRTFMAERQYTRMEDWLTAKLAYEGLPSKTYLSKTLAQYTSKTCSNCGFTITSADYDRVLEKLKKTATGWMTTINGKELKVEGQITYYNRYKRQNVVKDLSVELDRLSEESVNNDISSWTKGRSGEALSLLKKRFSHRPVQEKFVCLNCGFETHADEQAALNIARSWLFLRSQEYKKYQTNKTTGNTDKRAFVETWQSFYRKKLKEVWKPAV

SEQ ID NO: 26478 - protein, 978 aa, synthetic construct
  REGION 1..978: note = engineered CasX variant
QEIKRINKIRRRLVKDSNTKKAGKTGPMKTLLVRVMTPDLRERLENLRKKPENIPQPISNTSRANLNKLLTDYTEMKKAILHVYWEEFQKDPVGLMSRVAQPASKKIDQNKLKPEMDEKGNLTTAGFACSQCGQPLFVYKLEQVSEKGKAYTNYFGRCNVAEHEKLILLAQLKPEKDSDEAVTYSLGKFGQRALDFYSIHVTKESTHPVKPLAQIAGNRYASGPVGKALSDACMGTIASFLSKYQDIIIEHQKVVKGNQKRLESLRELAGKENLEYPSVTLPPQPHTKEGVDAYNEVIARVRMWVNLNLWQKLKLSRDDAKPLLRLKGFPSFPLVERQANEVDWWDMVCNVKKLINEKKEDGKVFWQNLAGYKRQEALRPYLSSEEDRKKGKKFARYQLGDLLLHLEKKHGEDWGKVYDEAWERIDKKVEGLSKHIKLEEERRSEDAQSKAALTDWLRAKASFVIEGLKEADKDEFCRCELKLQKWYGDLRGKPFAIEAENSILDISGFSKQYNCAFIWQKDGVKKLNLYLIINYFKGGKLRFKKIKPEAFEANRFYTVINKKSGEIVPMEVNFNFDDPNLIILPLAFGKRQGREFIWNDLLSLETGSLKLANGRVIEKTLYNRRTRQDEPALFVALTFERREVLDSSNIKPMNLIGVDRGENIPAVIALTDPEGCPLSRFKDSLGNPTHILRIGESYKEKQRTEQAKKEVEQRRAGGYSRKYASKAKNLADDMVRNTARDLLYYAVTQDAMLIFENLSRGFGRQGKRTFMAERQYTRMEDWLTAKLAYEGLPSKTYLSKTLAQYTSKTCSNCGFTITSADYDRVLEKLKKTATGWMTTINGKELKVEGQITYYNRYKRQNVVKDLSVELDRLSEESVNNDISSWTKGRSGEALSLLKKRFSHRPVQEKFVCLNCGFETHADEQAALNIARSWLFLRSQEYKKYQTNKTTGNTDKRAFVETWQSFYRKKLKEVWKPAV

SEQ ID NO: 26479 - protein, 978 aa, synthetic construct
  REGION 1..978: note = engineered CasX variant
QEIKRINKIRRRLVKDSNTKKAGKTGPMKTLLVRVMTPDLRERLENLRKKPENIPQPISNTSRANLNKLLTDYTEMKKAILHVYWEEFQKDPVGLMSRVAQPASKKIDQNKLKPEMDEKGNLTTAGFACSQCGQPLFVYKLEQVSEKGKAYTNYFGRCNVAEHEKLILLAQLKPEKDSDEAVTYSLGKFGQRALDFYSIHVTKESTHPVKPLAQIAGNRYASGPVGKALSDACMGTIASFLSKYQDIIIEHQKVVKGNQKRLESLRELAGKENLEYPSVTLPPQPHTKEGVDAYNEVIARVRMWVNLNLWQKLKLSRDDAKPLLRLKGFPSFPLVERQANEVDWWDMVCNVKKLINEKKEDGKVFWQNLAGYKRQEALRPYLSSEEDRKKGKKFARYQLGDLLLHLEKKHGEDWGKVYDEAWERIDKKVEGLSKHIKLEEERRSEDAQSKAALTDWLRAKASFVIEGLKEADKDEFCRCELKLQKWYGDLRGKPFAIEAENSILDISGFSKQYNCAFIWQKDGVKKLNLYLIINYFKGGKLRFKKIKPEAFEANRFYTVINKKSGEIVPMEVNFNFDDPNLIILPLAFGKRQGREFIWNDLLSLETGSLKLANGRVIEKTLYNRRTRQDEPALFVALTFERREVLDSSNIKPMNLIGVDRGENIPAVIALTDPEGCPLSRFKDSLGNPTHILRIGESYKEKQRTDQAKKEVEQRRAGGYSRKYASKAKNLADDMVRNTARDLLYYAVTQDAMLIFENLSRGFGRQGKRTFMAERQYTRMEDWLTAKLAYEGLPSKTYLSKTLAQYTSKTCSNCGFTITSADYDRVLEKLKKTATGWMTTINGKELKVEGQITYYNRYKRQNVVKDLSVELDRLSEESVNNDISSWTKGRSGEALSLLKKRFSHRPVQEKFVCLNCGFETHADEQAALNIARSWLFLRSQEYKKYQTNKTTGNTDKRAFVETWQSFYRKKLKEVWKPAV

SEQ ID NO: 26480 - protein, 978 aa, synthetic construct
  REGION 1..978: note = engineered CasX variant
QEIKRINKIRRRLVKDSNTKKAGKTGPMKTLLVRVMTPDLRERLENLRKKPENIPQPISNTSRANLNKLLTDYTEMKKAILHVYWEEFQKDPVGLMSRVAQPASKKIDQNKLKPEMDEKGNLTTAGFACSQCGQPLFVYKLEQVSEKGKAYTNYFGRCNVAEHEKLILLAQLKPEKDSDEAVTYSLGKFGQRALDFYSIHVTKESTHPVKPLAQIAGNRYASGPVGKALSDACMGTIASFLSKYQDIIIEHQKVVKGNQKRLESLRELAGKENLEYPSVTLPPQPHTKEGVDAYNEVIARVRMWVNLNLWQKLKLSRDDAKPLLRLKGFPSFPLVERQANEVDWWDMVCNVKKLINEKKEDGKVFWQNLAGYKRQEALRPYLSSEEDRKKGKKFARYQLGDLLLHLEKKHGEDWGKVYDEAWERIDKKVEGLSKHIKLEEERRSEDAQSKAALTDWLRAKASFVIEGLKEADKDEFCRCELKLQKWYGDLRGKPFAIEAENSILDISGFSKQYNCAFIWQKDGVKKLNLYLIINYFKGGKLRFKKIKPEAFEANRFYTVINKKSGEIVPMEVNFNFDDPNLIILPLAFGKRQGREFIWNDLLSLETGSLKLANGRVIEKTLYNRRTRQDEPALFVALTFERREVLDSSNIKPMNLIGVDRGENIPAVIALTDPEGCPLSRFKDSLGNPTHILRIGESYKEKQRTCQAMKEVEQRRAGGYSRKYASKAKNLADDMVRNTARDLLYYAVTQDAMLIFENLSRGFGRQGKRTFMAERQYTRMEDWLTAKLAYEGLPSKTYLSKTLAQYTSKTCSNCGFTITSADYDRVLEKLKKTATGWMTTINGKELKVEGQITYYNRYKRQNVVKDLSVELDRLSEESVNNDISSWTKGRSGEALSLLKKRFSHRPVQEKFVCLNCGFETHADEQAALNIARSWLFLRSQEYKKYQTNKTTGNTDKRAFVETWQSFYRKKLKEVWKPAV

SEQ ID NO: 26481 - protein, 978 aa, synthetic construct
  REGION 1..978: note = engineered CasX variant
QEIKRINKIRRRLVKDSNTKKAGKTGPMKTLLVRVMTPDLRERLENLRKKPENIPQPISNTSRANLNKLLTDYTEMKKAILHVYWEEFQKDPVGLMSRVAQPASKKIDQNKLKPEMDEKGNLTTAGFACSQCGQPLFVYKLEQVSEKGKAYTNYFGRCNVAEHEKLILLAQLKPEKDSDEAVTYSLGKFGQRALDFYSIHVTKESTHPVKPLAQIAGNRYASGPVGKALSDACMGTIASFLSKYQDIIIEHQKVVKGNQKRLESLRELAGKENLEYPSVTLPPQPHTKEGVDAYNEVIARVRMWVNLNLWQKLKLSRDDAKPLLRLKGFPSFPLVERQANEVDWWDMVCNVKKLINEKKEDGKVFWQNLAGYKRQEALRPYLSSEEDRKKGKKFARYQLGDLLLHLEKKHGEDWGKVYDEAWERIDKKVEGLSKHIKLEEERRSEDAQSKAALTDWLRAKASFVIEGLKEADKDEFCRCELKLQKWYGDLRGKPFAIEAENSILDISGFSKQYNCAFIWQKDGVKKLNLYLIINYFKGGKLRFKKIKPEAFEANRFYTVINKKSGEIVPMEVNFNFDDPNLIILPLAFGKRQGREFIWNDLLSLETGSLKLANGRVIEKTLYNRRTRQDEPALFVALTFERREVLDSSNIKPMNLIGVDRGENIPAVIALTDPEGCPLSRFKDSLGNPTHILRIGESYKEKQRTCQAKKEVEQRRAGGYSRKYASKAKNLADDMVRNTARDLLYYAVTQDAMLIFENLSRGFGRQGKRTFMAERQYTRMEDWLTAKLAYEGLPSKTYLSKTLAQYTSKTCSNCGFTITSADYDRVLEKLKKTATGWMTTINGKELKVEGQITYYNRYKRQNVVKDLSVELDRLSEESVNNDISSWTKGRSGEALSLLKKRFSHRPVQEKFVCLNCGFETHADEQAALNIARSWLFLRSQEYKKYQTNKTTGNTDKRAFVETWQSFYRKKLKEVWKPAV

SEQ ID NO: 26482 - protein, 978 aa, synthetic construct
  REGION 1..978: note = engineered CasX variant
QEIKRINKIRRRLVKDSNTKKAGKTGPMKTLLVRVMTPDLRERLENLRKKPENIPQPISNTSRANLNKLLTDYTEMKKAILHVYWEEFQKDPVGLMSRVAQPASKKIDQNKLKPEMDEKGNLTTAGFACSQCGQPLFVYKLEQVSEKGKAYTNYFGRCNVAEHEKLILLAQLKPEKDSDEAVTYSLGKFGQRALDFYSIHVTKESTHPVKPLAQIAGNRYASGPVGKALSDACMGTIASFLSKYQDIIIEHQKVVKGNQKRLESLRELAGKENLEYPSVTLPPQPHTKEGVDAYNEVIARVRMWVNLNLWQKLKLSRDDAKPLLRLKGFPSFPLVERQANEVDWWDMVCNVKKLINEKKEDGKVFWQNLAGYKRQEALRPYLSSEEDRKKGKKFARYQLGDLLLHLEKKHGEDWGKVYDEAWERIDKKVEGLSKHIKLEEERRSEDAQSKAALTDWLRAKASFVIEGLKEADKDEFCRCELKLQKWYGDLRGKPFAIEAENSILDISGFSKQYNCAFIWQKDGVKKLNLYLIINYFKGGKLRFKKIKPEAFEANRFYTVINKKSGEIVPMEVNFNFDDPNLIILPLAFGKRQGREFIWNDLLSLETGSLKLANGRVIEKTLYNRRTRQDEPALFVALTFERREVLDSSNIKPMNLIGVDRGENIPAVIALTDPEGCPLSRFKDSLGNPTHILRIGESYKEKQRTAQAKKEVEQRRAGGYSRKYASKAKNLADDMVRNTARDLLYYAVTQDAMLIFENLSRGFGRQGKRTFMAERQYTRMEDWLTAKLAYEGLPSKTYLSKTLAQYTSKTCSNCGFTITSADYDRVLEKLKKTATGWMTTINGKELKVEGQITYYNRYKRQNVVKDLSVELDRLSEESVNNDISSWTKGRSGEALSLLKKRFSHRPVQEKFVCLNCGFETHADEQAALNIARSWLFLRSQEYKKYQTNKTTGNTDKRAFVETWQSFYRKKLKEVWKPAV

SEQ ID NO: 26483 - protein, 978 aa, synthetic construct
  REGION 1..978: note = engineered CasX variant
QEIKRINKIRRRLVKDSNTKKAGKTGPMKTLLVRVMTPDLRERLENLRKKPENIPQPISNTSRANLNKLLTDYTEMKKAILHVYWEEFQKDPVGLMSRVAQPASKKIDQNKLKPEMDEKGNLTTAGFACSQCGQPLFVYKLEQVSEKGKAYTNYFGRCNVAEHEKLILLAQLKPEKDSDEAVTYSLGKFGQRALDFYSIHVTKESTHPVKPLAQIAGNRYASGPVGKALSDACMGTIASFLSKYQDIIIEHQKVVKGNQKRLESLRELAGKENLEYPSVTLPPQPHTKEGVDAYNEVIARVRMWVNLNLWQKLKLSRDDAKPLLRLKGFPSFPLVERQANEVDWWDMVCNVKKLINEKKEDGKVFWQNLAGYKRQEALRPYLSSEEDRKKGKKFARYQLGDLLLHLEKKHGEDWGKVYDEAWERIDKKVEGLSKHIKLEEERRSEDAQSKAALTDWLRAKASFVIEGLKEADKDEFCRCELKLQKWYGDLRGKPFAIEAENSILDISGFSKQYNCAFIWQKDGVKKLNLYLIINYFKGGKLRFKKIKPEAFEANRFYTVINKKSGEIVPMEVNFNFDDPNLIILPLAFGKRQGREFIWNDLLSLETGSLKLANGRVIEKTLYNRRTRQDEPALFVALTFERREVLDSSNIKPMNLIGVDRGENIPAVIALTDPEGCPLSRFKDSLGNPTHILRIGESYKEKQRSIQAKKEVEQRRAGGYSRKYASKAKNLADDMVRNTARDLLYYAVTQDAMLIFENLSRGFGRQGKRTFMAERQYTRMEDWLTAKLAYEGLPSKTYLSKTLAQYTSKTCSNCGFTITSADYDRVLEKLKKTATGWMTTINGKELKVEGQITYYNRYKRQNVVKDLSVELDRLSEESVNNDISSWTKGRSGEALSLLKKRFSHRPVQEKFVCLNCGFETHADEQAALNIARSWLFLRSQEYKKYQTNKTTGNTDKRAFVETWQSFYRKKLKEVWKPAV

SEQ ID NO: 26484 - protein, 978 aa, synthetic construct
  REGION 1..978: note = engineered CasX variant
QEIKRINKIRRRLVKDSNTKKAGKTGPMKTLLVRVMTPDLRERLENLRKKPENIPQPISNTSRANLNKLLTDYTEMKKAILHVYWEEFQKDPVGLMSRVAQPASKKIDQNKLKPEMDEKGNLTTAGFACSQCGQPLFVYKLEQVSEKGKAYTNYFGRCNVAEHEKLILLAQLKPEKDSDEAVTYSLGKFGQRALDFYSIHVTKESTHPVKPLAQIAGNRYASGPVGKALSDACMGTIASFLSKYQDIIIEHQKVVKGNQKRLESLRELAGKENLEYPSVTLPPQPHTKEGVDAYNEVIARVRMWVNLNLWQKLKLSRDDAKPLLRLKGFPSFPLVERQANEVDWWDMVCNVKKLINEKKEDGKVFWQNLAGYKRQEALRPYLSSEEDRKKGKKFARYQLGDLLLHLEKKHGEDWGKVYDEAWERIDKKVEGLSKHIKLEEERRSEDAQSKAALTDWLRAKASFVIEGLKEADKDEFCRCELKLQKWYGDLRGKPFAIEAENSILDISGFSKQYNCAFIWQKDGVKKLNLYLIINYFKGGKLRFKKIKPEAFEANRFYTVINKKSGEIVPMEVNFNFDDPNLIILPLAFGKRQGREFIWNDLLSLETGSLKLANGRVIEKTLYNRRTRQDEPALFVALTFERREVLDSSNIKPMNLIGVDRGENIPAVIALTDPEGCPLSRFKDSLGNPTHILRIGESYKEKQRRIQAKKEVEQRRAGGYSRKYASKAKNLADDMVRNTARDLLYYAVTQDAMLIFENLSRGFGRQGKRTFMAERQYTRMEDWLTAKLAYEGLPSKTYLSKTLAQYTSKTCSNCGFTITSADYDRVLEKLKKTATGWMTTINGKELKVEGQITYYNRYKRQNVVKDLSVELDRLSEESVNNDISSWTKGRSGEALSLLKKRFSHRPVQEKFVCLNCGFETHADEQAALNIARSWLFLRSQEYKKYQTNKTTGNTDKRAFVETWQSFYRKKLKEVWKPAV

SEQ ID NO: 26485 - protein, 978 aa, synthetic construct
  REGION 1..978: note = engineered CasX variant
QEIKRINKIRRRLVKDSNTKKAGKTGPMKTLLVRVMTPDLRERLENLRKKPENIPQPISNTSRANLNKLLTDYTEMKKAILHVYWEEFQKDPVGLMSRVAQPASKKIDQNKLKPEMDEKGNLTTAGFACSQCGQPLFVYKLEQVSEKGKAYTNYFGRCNVAEHEKLILLAQLKPEKDSDEAVTYSLGKFGQRALDFYSIHVTKESTHPVKPLAQIAGNRYASGPVGKALSDACMGTIASFLSKYQDIIIEHQKVVKGNQKRLESLRELAGKENLEYPSVTLPPQPHTKEGVDAYNEVIARVRMWVNLNLWQKLKLSRDDAKPLLRLKGFPSFPLVERQANEVDWWDMVCNVKKLINEKKEDGKVFWQNLAGYKRQEALRPYLSSEEDRKKGKKFARYQLGDLLLHLEKKHGEDWGKVYDEAWERIDKKVEGLSKHIKLEEERRSEDAQSKAALTDWLRAKASFVIEGLKEADKDEFCRCELKLQKWYGDLRGKPFAIEAENSILDISGFSKQYNCAFIWQKDGVKKLNLYLIINYFKGGKLRFKKIKPEAFEANRFYTVINKKSGEIVPMEVNFNFDDPNLIILPLAFGKRQGREFIWNDLLSLETGSLKLANGRVIEKTLYNRRTRQDEPALFVALTFERREVLDSSNIKPMNLIGVDRGENIPAVIALTDPEGCPLSRFKDSLGNPTHILRIGESYKEKQRRIQAKKETEQRRAGGYSRKYASKAKNLADDMVRNTARDLLYYAVTQDAMLIFENLSRGFGRQGKRTFMAERQYTRMEDWLTAKLAYEGLPSKTYLSKTLAQYTSKTCSNCGFTITSADYDRVLEKLKKTATGWMTTINGKELKVEGQITYYNRYKRQNVVKDLSVELDRLSEESVNNDISSWTKGRSGEALSLLKKRFSHRPVQEKFVCLNCGFETHADEQAALNIARSWLFLRSQEYKKYQTNKTTGNTDKRAFVETWQSFYRKKLKEVWKPAV

SEQ ID NO: 26486 - protein, 978 aa, synthetic construct
  REGION 1..978: note = engineered CasX variant
QEIKRINKIRRRLVKDSNTKKAGKTGPMKTLLVRVMTPDLRERLENLRKKPENIPQPISNTSRANLNKLLTDYTEMKKAILHVYWEEFQKDPVGLMSRVAQPASKKIDQNKLKPEMDEKGNLTTAGFACSQCGQPLFVYKLEQVSEKGKAYTNYFGRCNVAEHEKLILLAQLKPEKDSDEAVTYSLGKFGQRALDFYSIHVTKESTHPVKPLAQIAGNRYASGPVGKALSDACMGTIASFLSKYQDIIIEHQKVVKGNQKRLESLRELAGKENLEYPSVTLPPQPHTKEGVDAYNEVIARVRMWVNLNLWQKLKLSRDDAKPLLRLKGFPSFPLVERQANEVDWWDMVCNVKKLINEKKEDGKVFWQNLAGYKRQEALRPYLSSEEDRKKGKKFARYQLGDLLLHLEKKHGEDWGKVYDEAWERIDKKVEGLSKHIKLEEERRSEDAQSKAALTDWLRAKASFVIEGLKEADKDEFCRCELKLQKWYGDLRGKPFAIEAENSILDISGFSKQYNCAFIWQKDGVKKLNLYLIINYFKGGKLRFKKIKPEAFEANRFYTVINKKSGEIVPMEVNFNFDDPNLIILPLAFGKRQGREFIWNDLLSLETGSLKLANGRVIEKTLYNRRTRQDEPALFVALTFERREVLDSSNIKPMNLIGVDRGENIPAVIALTDPEGCPLSRFKDSLGNPTHILRIGESYKEKQRQIQAKKEVTQRRAGGYSRKYASKAKNLADDMVRNTARDLLYYAVTQDAMLIFENLSRGFGRQGKRTFMAERQYTRMEDWLTAKLAYEGLPSKTYLSKTLAQYTSKTCSNCGFTITSADYDRVLEKLKKTATGWMTTINGKELKVEGQITYYNRYKRQNVVKDLSVELDRLSEESVNNDISSWTKGRSGEALSLLKKRFSHRPVQEKFVCLNCGFETHADEQAALNIARSWLFLRSQEYKKYQTNKTTGNTDKRAFVETWQSFYRKKLKEVWKPAV

SEQ ID NO: 26487 - protein, 978 aa, synthetic construct
  REGION 1..978: note = engineered CasX variant
QEIKRINKIRRRLVKDSNTKKAGKTGPMKTLLVRVMTPDLRERLENLRKKPENIPQPISNTSRANLNKLLTDYTEMKKAILHVYWEEFQKDPVGLMSRVAQPASKKIDQNKLKPEMDEKGNLTTAGFACSQCGQPLFVYKLEQVSEKGKAYTNYFGRCNVAEHEKLILLAQLKPEKDSDEAVTYSLGKFGQRALDFYSIHVTKESTHPVKPLAQIAGNRYASGPVGKALSDACMGTIASFLSKYQDIIIEHQKVVKGNQKRLESLRELAGKENLEYPSVTLPPQPHTKEGVDAYNEVIARVRMWVNLNLWQKLKLSRDDAKPLLRLKGFPSFPLVERQANEVDWWDMVCNVKKLINEKKEDGKVFWQNLAGYKRQEALRPYLSSEEDRKKGKKFARYQLGDLLLHLEKKHGEDWGKVYDEAWERIDKKVEGLSKHIKLEEERRSEDAQSKAALTDWLRAKASFVIEGLKEADKDEFCRCELKLQKWYGDLRGKPFAIEAENSILDISGFSKQYNCAFIWQKDGVKKLNLYLIINYFKGGKLRFKKIKPEAFEANRFYTVINKKSGEIVPMEVNFNFDDPNLIILPLAFGKRQGREFIWNDLLSLETGSLKLANGRVIEKTLYNRRTRQDEPALFVALTFERREVLDSSNIKPMNLIGVDRGENIPAVIALTDPEGCPLSRFKDSLGNPTHILRIGESYKEKQRQIQAKKEVESRRAGGYSRKYASKAKNLADDMVRNTARDLLYYAVTQDAMLIFENLSRGFGRQGKRTFMAERQYTRMEDWLTAKLAYEGLPSKTYLSKTLAQYTSKTCSNCGFTITSADYDRVLEKLKKTATGWMTTINGKELKVEGQITYYNRYKRQNVVKDLSVELDRLSEESVNNDISSWTKGRSGEALSLLKKRFSHRPVQEKFVCLNCGFETHADEQAALNIARSWLFLRSQEYKKYQTNKTTGNTDKRAFVETWQSFYRKKLKEVWKPAV

SEQ ID NO: 26488 - protein, 978 aa, synthetic construct
  REGION 1..978: note = engineered CasX variant
QEIKRINKIRRRLVKDSNTKKAGKTGPMKTLLVRVMTPDLRERLENLRKKPENIPQPISNTSRANLNKLLTDYTEMKKAILHVYWEEFQKDPVGLMSRVAQPASKKIDQNKLKPEMDEKGNLTTAGFACSQCGQPLFVYKLEQVSEKGKAYTNYFGRCNVAEHEKLILLAQLKPEKDSDEAVTYSLGKFGQRALDFYSIHVTKESTHPVKPLAQIAGNRYASGPVGKALSDACMGTIASFLSKYQDIIIEHQKVVKGNQKRLESLRELAGKENLEYPSVTLPPQPHTKEGVDAYNEVIARVRMWVNLNLWQKLKLSRDDAKPLLRLKGFPSFPLVERQANEVDWWDMVCNVKKLINEKKEDGKVFWQNLAGYKRQEALRPYLSSEEDRKKGKKFARYQLGDLLLHLEKKHGEDWGKVYDEAWERIDKKVEGLSKHIKLEEERRSEDAQSKAALTDWLRAKASFVIEGLKEADKDEFCRCELKLQKWYGDLRGKPFAIEAENSILDISGFSKQYNCAFIWQKDGVKKLNLYLIINYFKGGKLRFKKIKPEAFEANRFYTVINKKSGEIVPMEVNFNFDDPNLIILPLAFGKRQGREFIWNDLLSLETGSLKLANGRVIEKTLYNRRTRQDEPALFVALTFERREVLDSSNIKPMNLIGVDRGENIPAVIALTDPEGCPLSRFKDSLGNPTHILRIGESYKEKQRQIQAKKEVEQRRAGGYSRKYASKAKNLADDMVRNTARDLLYYAVTQDAMLIFENLSRGFGRQGKRTFMAERQYTRMEDWLTAKLAYEGLPSKTYLSKTLAQYTSKTCSNCGFTITSADYDRVLEKLKKTATGWMTTINGKELKVEGQITYYNRYKRQNVVKDLSVELDRLSEESVNNDISSWTKGRSGEALSLLKKRFSHRPVQEKFVCLNCGFETHADEQAALNIARSWLFLRSQEYKKYQTNKTTGNTDKRAFVETWQSFYRKKLKEVWKPAV

SEQ ID NO: 26489 - protein, 978 aa, synthetic construct
  REGION 1..978: note = engineered CasX variant
QEIKRINKIRRRLVKDSNTKKAGKTGPMKTLLVRVMTPDLRERLENLRKKPENIPQPISNTSRANLNKLLTDYTEMKKAILHVYWEEFQKDPVGLMSRVAQPASKKIDQNKLKPEMDEKGNLTTAGFACSQCGQPLFVYKLEQVSEKGKAYTNYFGRCNVAEHEKLILLAQLKPEKDSDEAVTYSLGKFGQRALDFYSIHVTKESTHPVKPLAQIAGNRYASGPVGKALSDACMGTIASFLSKYQDIIIEHQKVVKGNQKRLESLRELAGKENLEYPSVTLPPQPHTKEGVDAYNEVIARVRMWVNLNLWQKLKLSRDDAKPLLRLKGFPSFPLVERQANEVDWWDMVCNVKKLINEKKEDGKVFWQNLAGYKRQEALRPYLSSEEDRKKGKKFARYQLGDLLLHLEKKHGEDWGKVYDEAWERIDKKVEGLSKHIKLEEERRSEDAQSKAALTDWLRAKASFVIEGLKEADKDEFCRCELKLQKWYGDLRGKPFAIEAENSILDISGFSKQYNCAFIWQKDGVKKLNLYLIINYFKGGKLRFKKIKPEAFEANRFYTVINKKSGEIVPMEVNFNFDDPNLIILPLAFGKRQGREFIWNDLLSLETGSLKLANGRVIEKTLYNRRTRQDEPALFVALTFERREVLDSSNIKPMNLIGVDRGENIPAVIALTDPEGCPLSRFKDSLGNPTHILRIGESYKEKQRQIQAKKCVESRRAGGYSRKYASKAKNLADDMVRNTARDLLYYAVTQDAMLIFENLSRGFGRQGKRTFMAERQYTRMEDWLTAKLAYEGLPSKTYLSKTLAQYTSKTCSNCGFTITSADYDRVLEKLKKTATGWMTTINGKELKVEGQITYYNRYKRQNVVKDLSVELDRLSEESVNNDISSWTKGRSGEALSLLKKRFSHRPVQEKFVCLNCGFETHADEQAALNIARSWLFLRSQEYKKYQTNKTTGNTDKRAFVETWQSFYRKKLKEVWKPAV

SEQ ID NO: 26490 - protein, 978 aa, synthetic construct
  REGION 1..978: note = engineered CasX variant
QEIKRINKIRRRLVKDSNTKKAGKTGPMKTLLVRVMTPDLRERLENLRKKPENIPQPISNTSRANLNKLLTDYTEMKKAILHVYWEEFQKDPVGLMSRVAQPASKKIDQNKLKPEMDEKGNLTTAGFACSQCGQPLFVYKLEQVSEKGKAYTNYFGRCNVAEHEKLILLAQLKPEKDSDEAVTYSLGKFGQRALDFYSIHVTKESTHPVKPLAQIAGNRYASGPVGKALSDACMGTIASFLSKYQDIIIEHQKVVKGNQKRLESLRELAGKENLEYPSVTLPPQPHTKEGVDAYNEVIARVRMWVNLNLWQKLKLSRDDAKPLLRLKGFPSFPLVERQANEVDWWDMVCNVKKLINEKKEDGKVFWQNLAGYKRQEALRPYLSSEEDRKKGKKFARYQLGDLLLHLEKKHGEDWGKVYDEAWERIDKKVEGLSKHIKLEEERRSEDAQSKAALTDWLRAKASFVIEGLKEADKDEFCRCELKLQKWYGDLRGKPFAIEAENSILDISGFSKQYNCAFIWQKDGVKKLNLYLIINYFKGGKLRFKKIKPEAFEANRFYTVINKKSGEIVPMEVNFNFDDPNLIILPLAFGKRQGREFIWNDLLSLETGSLKLANGRVIEKTLYNRRTRQDEPALFVALTFERREVLDSSNIKPMNLIGVDRGENIPAVIALTDPEGCPLSRFKDSLGNPTHILRIGESYKEKQRQIQAKKCVEQRRAGGYSRKYASKAKNLADDMVRNTARDLLYYAVTQDAMLIFENLSRGFGRQGKRTFMAERQYTRMEDWLTAKLAYEGLPSKTYLSKTLAQYTSKTCSNCGFTITSADYDRVLEKLKKTATGWMTTINGKELKVEGQITYYNRYKRQNVVKDLSVELDRLSEESVNNDISSWTKGRSGEALSLLKKRFSHRPVQEKFVCLNCGFETHADEQAALNIARSWLFLRSQEYKKYQTNKTTGNTDKRAFVETWQSFYRKKLKEVWKPAV

SEQ ID NO: 26491 - protein, 978 aa, synthetic construct
  REGION 1..978: note = engineered CasX variant
QEIKRINKIRRRLVKDSNTKKAGKTGPMKTLLVRVMTPDLRERLENLRKKPENIPQPISNTSRANLNKLLTDYTEMKKAILHVYWEEFQKDPVGLMSRVAQPASKKIDQNKLKPEMDEKGNLTTAGFACSQCGQPLFVYKLEQVSEKGKAYTNYFGRCNVAEHEKLILLAQLKPEKDSDEAVTYSLGKFGQRALDFYSIHVTKESTHPVKPLAQIAGNRYASGPVGKALSDACMGTIASFLSKYQDIIIEHQKVVKGNQKRLESLRELAGKENLEYPSVTLPPQPHTKEGVDAYNEVIARVRMWVNLNLWQKLKLSRDDAKPLLRLKGFPSFPLVERQANEVDWWDMVCNVKKLINEKKEDGKVFWQNLAGYKRQEALRPYLSSEEDRKKGKKFARYQLGDLLLHLEKKHGEDWGKVYDEAWERIDKKVEGLSKHIKLEEERRSEDAQSKAALTDWLRAKASFVIEGLKEADKDEFCRCELKLQKWYGDLRGKPFAIEAENSILDISGFSKQYNCAFIWQKDGVKKLNLYLIINYFKGGKLRFKKIKPEAFEANRFYTVINKKSGEIVPMEVNFNFDDPNLIILPLAFGKRQGREFIWNDLLSLETGSLKLANGRVIEKTLYNRRTRQDEPALFVALTFERREVLDSSNIKPMNLIGVDRGENIPAVIALTDPEGCPLSRFKDSLGNPTHILRIGESYKEKQRNIQAKKEVEQRRAGGYSRKYASKAKNLADDMVRNTARDLLYYAVTQDAMLIFENLSRGFGRQGKRTFMAERQYTRMEDWLTAKLAYEGLPSKTYLSKTLAQYTSKTCSNCGFTITSADYDRVLEKLKKTATGWMTTINGKELKVEGQITYYNRYKRQNVVKDLSVELDRLSEESVNNDISSWTKGRSGEALSLLKKRFSHRPVQEKFVCLNCGFETHADEQAALNIARSWLFLRSQEYKKYQTNKTTGNTDKRAFVETWQSFYRKKLKEVWKPAV

SEQ ID NO: 26492 - protein, 978 aa, synthetic construct
  REGION 1..978: note = engineered CasX variant
QEIKRINKIRRRLVKDSNTKKAGKTGPMKTLLVRVMTPDLRERLENLRKKPENIPQPISNTSRANLNKLLTDYTEMKKAILHVYWEEFQKDPVGLMSRVAQPASKKIDQNKLKPEMDEKGNLTTAGFACSQCGQPLFVYKLEQVSEKGKAYTNYFGRCNVAEHEKLILLAQLKPEKDSDEAVTYSLGKFGQRALDFYSIHVTKESTHPVKPLAQIAGNRYASGPVGKALSDACMGTIASFLSKYQDIIIEHQKVVKGNQKRLESLRELAGKENLEYPSVTLPPQPHTKEGVDAYNEVIARVRMWVNLNLWQKLKLSRDDAKPLLRLKGFPSFPLVERQANEVDWWDMVCNVKKLINEKKEDGKVFWQNLAGYKRQEALRPYLSSEEDRKKGKKFARYQLGDLLLHLEKKHGEDWGKVYDEAWERIDKKVEGLSKHIKLEEERRSEDAQSKAALTDWLRAKASFVIEGLKEADKDEFCRCELKLQKWYGDLRGKPFAIEAENSILDISGFSKQYNCAFIWQKDGVKKLNLYLIINYFKGGKLRFKKIKPEAFEANRFYTVINKKSGEIVPMEVNFNFDDPNLIILPLAFGKRQGREFIWNDLLSLETGSLKLANGRVIEKTLYNRRTRQDEPALFVALTFERREVLDSSNIKPMNLIGVDRGENIPAVIALTDPEGCPLSRFKDSLGNPTHILRIGESYKEKQRNIQAKKEVEQARAGGYSRKYASKAKNLADDMVRNTARDLLYYAVTQDAMLIFENLSRGFGRQGKRTFMAERQYTRMEDWLTAKLAYEGLPSKTYLSKTLAQYTSKTCSNCGFTITSADYDRVLEKLKKTATGWMTTINGKELKVEGQITYYNRYKRQNVVKDLSVELDRLSEESVNNDISSWTKGRSGEALSLLKKRFSHRPVQEKFVCLNCGFETHADEQAALNIARSWLFLRSQEYKKYQTNKTTGNTDKRAFVETWQSFYRKKLKEVWKPAV

SEQ ID NO: 26493 - protein, 978 aa, synthetic construct
  REGION 1..978: note = engineered CasX variant
QEIKRINKIRRRLVKDSNTKKAGKTGPMKTLLVRVMTPDLRERLENLRKKPENIPQPISNTSRANLNKLLTDYTEMKKAILHVYWEEFQKDPVGLMSRVAQPASKKIDQNKLKPEMDEKGNLTTAGFACSQCGQPLFVYKLEQVSEKGKAYTNYFGRCNVAEHEKLILLAQLKPEKDSDEAVTYSLGKFGQRALDFYSIHVTKESTHPVKPLAQIAGNRYASGPVGKALSDACMGTIASFLSKYQDIIIEHQKVVKGNQKRLESLRELAGKENLEYPSVTLPPQPHTKEGVDAYNEVIARVRMWVNLNLWQKLKLSRDDAKPLLRLKGFPSFPLVERQANEVDWWDMVCNVKKLINEKKEDGKVFWQNLAGYKRQEALRPYLSSEEDRKKGKKFARYQLGDLLLHLEKKHGEDWGKVYDEAWERIDKKVEGLSKHIKLEEERRSEDAQSKAALTDWLRAKASFVIEGLKEADKDEFCRCELKLQKWYGDLRGKPFAIEAENSILDISGFSKQYNCAFIWQKDGVKKLNLYLIINYFKGGKLRFKKIKPEAFEANRFYTVINKKSGEIVPMEVNFNFDDPNLIILPLAFGKRQGREFIWNDLLSLETGSLKLANGRVIEKTLYNRRTRQDEPALFVALTFERREVLDSSNIKPMNLIGVDRGENIPAVIALTDPEGCPLSRFKDSLGNPTHILRIGESYKEKQRMIQAKKEVEQRRAGGYSRKYASKAKNLADDMVRNTARDLLYYAVTQDAMLIFENLSRGFGRQGKRTFMAERQYTRMEDWLTAKLAYEGLPSKTYLSKTLAQYTSKTCSNCGFTITSADYDRVLEKLKKTATGWMTTINGKELKVEGQITYYNRYKRQNVVKDLSVELDRLSEESVNNDISSWTKGRSGEALSLLKKRFSHRPVQEKFVCLNCGFETHADEQAALNIARSWLFLRSQEYKKYQTNKTTGNTDKRAFVETWQSFYRKKLKEVWKPAV

SEQ ID NO: 26494 - protein, 978 aa, synthetic construct
  REGION 1..978: note = engineered CasX variant
QEIKRINKIRRRLVKDSNTKKAGKTGPMKTLLVRVMTPDLRERLENLRKKPENIPQPISNTSRANLNKLLTDYTEMKKAILHVYWEEFQKDPVGLMSRVAQPASKKIDQNKLKPEMDEKGNLTTAGFACSQCGQPLFVYKLEQVSEKGKAYTNYFGRCNVAEHEKLILLAQLKPEKDSDEAVTYSLGKFGQRALDFYSIHVTKESTHPVKPLAQIAGNRYASGPVGKALSDACMGTIASFLSKYQDIIIEHQKVVKGNQKRLESLRELAGKENLEYPSVTLPPQPHTKEGVDAYNEVIARVRMWVNLNLWQKLKLSRDDAKPLLRLKGFPSFPLVERQANEVDWWDMVCNVKKLINEKKEDGKVFWQNLAGYKRQEALRPYLSSEEDRKKGKKFARYQLGDLLLHLEKKHGEDWGKVYDEAWERIDKKVEGLSKHIKLEEERRSEDAQSKAALTDWLRAKASFVIEGLKEADKDEFCRCELKLQKWYGDLRGKPFAIEAENSILDISGFSKQYNCAFIWQKDGVKKLNLYLIINYFKGGKLRFKKIKPEAFEANRFYTVINKKSGEIVPMEVNFNFDDPNLIILPLAFGKRQGREFIWNDLLSLETGSLKLANGRVIEKTLYNRRTRQDEPALFVALTFERREVLDSSNIKPMNLIGVDRGENIPAVIALTDPEGCPLSRFKDSLGNPTHILRIGESYKEKQRLIQAKKEVEQRRAGGYSRKYASKAKNLADDMVRNTARDLLYYAVTQDAMLIFENLSRGFGRQGKRTFMAERQYTRMEDWLTAKLAYEGLPSKTYLSKTLAQYTSKTCSNCGFTITSADYDRVLEKLKKTATGWMTTINGKELKVEGQITYYNRYKRQNVVKDLSVELDRLSEESVNNDISSWTKGRSGEALSLLKKRFSHRPVQEKFVCLNCGFETHADEQAALNIARSWLFLRSQEYKKYQTNKTTGNTDKRAFVETWQSFYRKKLKEVWKPAV

SEQ ID NO: 26495 - protein, 978 aa, synthetic construct
  REGION 1..978: note = engineered CasX variant
QEIKRINKIRRRLVKDSNTKKAGKTGPMKTLLVRVMTPDLRERLENLRKKPENIPQPISNTSRANLNKLLTDYTEMKKAILHVYWEEFQKDPVGLMSRVAQPASKKIDQNKLKPEMDEKGNLTTAGFACSQCGQPLFVYKLEQVSEKGKAYTNYFGRCNVAEHEKLILLAQLKPEKDSDEAVTYSLGKFGQRALDFYSIHVTKESTHPVKPLAQIAGNRYASGPVGKALSDACMGTIASFLSKYQDIIIEHQKVVKGNQKRLESLRELAGKENLEYPSVTLPPQPHTKEGVDAYNEVIARVRMWVNLNLWQKLKLSRDDAKPLLRLKGFPSFPLVERQANEVDWWDMVCNVKKLINEKKEDGKVFWQNLAGYKRQEALRPYLSSEEDRKKGKKFARYQLGDLLLHLEKKHGEDWGKVYDEAWERIDKKVEGLSKHIKLEEERRSEDAQSKAALTDWLRAKASFVIEGLKEADKDEFCRCELKLQKWYGDLRGKPFAIEAENSILDISGFSKQYNCAFIWQKDGVKKLNLYLIINYFKGGKLRFKKIKPEAFEANRFYTVINKKSGEIVPMEVNFNFDDPNLIILPLAFGKRQGREFIWNDLLSLETGSLKLANGRVIEKTLYNRRTRQDEPALFVALTFERREVLDSSNIKPMNLIGVDRGENIPAVIALTDPEGCPLSRFKDSLGNPTHILRIGESYKEKQRLIQAKKEIEQRRAGGYSRKYASKAKNLADDMVRNTARDLLYYAVTQDAMLIFENLSRGFGRQGKRTFMAERQYTRMEDWLTAKLAYEGLPSKTYLSKTLAQYTSKTCSNCGFTITSADYDRVLEKLKKTATGWMTTINGKELKVEGQITYYNRYKRQNVVKDLSVELDRLSEESVNNDISSWTKGRSGEALSLLKKRFSHRPVQEKFVCLNCGFETHADEQAALNIARSWLFLRSQEYKKYQTNKTTGNTDKRAFVETWQSFYRKKLKEVWKPAV

SEQ ID NO: 26496 - protein, 978 aa, synthetic construct
  REGION 1..978: note = engineered CasX variant
QEIKRINKIRRRLVKDSNTKKAGKTGPMKTLLVRVMTPDLRERLENLRKKPENIPQPISNTSRANLNKLLTDYTEMKKAILHVYWEEFQKDPVGLMSRVAQPASKKIDQNKLKPEMDEKGNLTTAGFACSQCGQPLFVYKLEQVSEKGKAYTNYFGRCNVAEHEKLILLAQLKPEKDSDEAVTYSLGKFGQRALDFYSIHVTKESTHPVKPLAQIAGNRYASGPVGKALSDACMGTIASFLSKYQDIIIEHQKVVKGNQKRLESLRELAGKENLEYPSVTLPPQPHTKEGVDAYNEVIARVRMWVNLNLWQKLKLSRDDAKPLLRLKGFPSFPLVERQANEVDWWDMVCNVKKLINEKKEDGKVFWQNLAGYKRQEALRPYLSSEEDRKKGKKFARYQLGDLLLHLEKKHGEDWGKVYDEAWERIDKKVEGLSKHIKLEEERRSEDAQSKAALTDWLRAKASFVIEGLKEADKDEFCRCELKLQKWYGDLRGKPFAIEAENSILDISGFSKQYNCAFIWQKDGVKKLNLYLIINYFKGGKLRFKKIKPEAFEANRFYTVINKKSGEIVPMEVNFNFDDPNLIILPLAFGKRQGREFIWNDLLSLETGSLKLANGRVIEKTLYNRRTRQDEPALFVALTFERREVLDSSNIKPMNLIGVDRGENIPAVIALTDPEGCPLSRFKDSLGNPTHILRIGESYKEKQRKKQAKKEVEQRRAGGYSRKYASKAKNLADDMVRNTARDLLYYAVTQDAMLIFENLSRGFGRQGKRTFMAERQYTRMEDWLTAKLAYEGLPSKTYLSKTLAQYTSKTCSNCGFTITSADYDRVLEKLKKTATGWMTTINGKELKVEGQITYYNRYKRQNVVKDLSVELDRLSEESVNNDISSWTKGRSGEALSLLKKRFSHRPVQEKFVCLNCGFETHADEQAALNIARSWLFLRSQEYKKYQTNKTTGNTDKRAFVETWQSFYRKKLKEVWKPAV

SEQ ID NO: 26497 - protein, 978 aa, synthetic construct
  REGION 1..978: note = engineered CasX variant
QEIKRINKIRRRLVKDSNTKKAGKTGPMKTLLVRVMTPDLRERLENLRKKPENIPQPISNTSRANLNKLLTDYTEMKKAILHVYWEEFQKDPVGLMSRVAQPASKKIDQNKLKPEMDEKGNLTTAGFACSQCGQPLFVYKLEQVSEKGKAYTNYFGRCNVAEHEKLILLAQLKPEKDSDEAVTYSLGKFGQRALDFYSIHVTKESTHPVKPLAQIAGNRYASGPVGKALSDACMGTIASFLSKYQDIIIEHQKVVKGNQKRLESLRELAGKENLEYPSVTLPPQPHTKEGVDAYNEVIARVRMWVNLNLWQKLKLSRDDAKPLLRLKGFPSFPLVERQANEVDWWDMVCNVKKLINEKKEDGKVFWQNLAGYKRQEALRPYLSSEEDRKKGKKFARYQLGDLLLHLEKKHGEDWGKVYDEAWERIDKKVEGLSKHIKLEEERRSEDAQSKAALTDWLRAKASFVIEGLKEADKDEFCRCELKLQKWYGDLRGKPFAIEAENSILDISGFSKQYNCAFIWQKDGVKKLNLYLIINYFKGGKLRFKKIKPEAFEANRFYTVINKKSGEIVPMEVNFNFDDPNLIILPLAFGKRQGREFIWNDLLSLETGSLKLANGRVIEKTLYNRRTRQDEPALFVALTFERREVLDSSNIKPMNLIGVDRGENIPAVIALTDPEGCPLSRFKDSLGNPTHILRIGESYKEKQRKIQAKKEVEQRRAGGYSRKYASKAKNLADDMVRNTARDLLYYAVTQDAMLIFENLSRGFGRQGKRTFMAERQYTRMEDWLTAKLAYEGLPSKTYLSKTLAQYTSKTCSNCGFTITSADYDRVLEKLKKTATGWMTTINGKELKVEGQITYYNRYKRQNVVKDLSVELDRLSEESVNNDISSWTKGRSGEALSLLKKRFSHRPVQEKFVCLNCGFETHADEQAALNIARSWLFLRSQEYKKYQTNKTTGNTDKRAFVETWQSFYRKKLKEVWKPAV

SEQ ID NO: 26498 - protein, 978 aa, synthetic construct
  REGION 1..978: note = engineered CasX variant
QEIKRINKIRRRLVKDSNTKKAGKTGPMKTLLVRVMTPDLRERLENLRKKPENIPQPISNTSRANLNKLLTDYTEMKKAILHVYWEEFQKDPVGLMSRVAQPASKKIDQNKLKPEMDEKGNLTTAGFACSQCGQPLFVYKLEQVSEKGKAYTNYFGRCNVAEHEKLILLAQLKPEKDSDEAVTYSLGKFGQRALDFYSIHVTKESTHPVKPLAQIAGNRYASGPVGKALSDACMGTIASFLSKYQDIIIEHQKVVKGNQKRLESLRELAGKENLEYPSVTLPPQPHTKEGVDAYNEVIARVRMWVNLNLWQKLKLSRDDAKPLLRLKGFPSFPLVERQANEVDWWDMVCNVKKLINEKKEDGKVFWQNLAGYKRQEALRPYLSSEEDRKKGKKFARYQLGDLLLHLEKKHGEDWGKVYDEAWERIDKKVEGLSKHIKLEEERRSEDAQSKAALTDWLRAKASFVIEGLKEADKDEFCRCELKLQKWYGDLRGKPFAIEAENSILDISGFSKQYNCAFIWQKDGVKKLNLYLIINYFKGGKLRFKKIKPEAFEANRFYTVINKKSGEIVPMEVNFNFDDPNLIILPLAFGKRQGREFIWNDLLSLETGSLKLANGRVIEKTLYNRRTRQDEPALFVALTFERREVLDSSNIKPMNLIGVDRGENIPAVIALTDPEGCPLSRFKDSLGNPTHILRIGESYKEKQRIIQAKKEVEQRRAGGYSRKYASKAKNLADDMVRNTARDLLYYAVTQDAMLIFENLSRGFGRQGKRTFMAERQYTRMEDWLTAKLAYEGLPSKTYLSKTLAQYTSKTCSNCGFTITSADYDRVLEKLKKTATGWMTTINGKELKVEGQITYYNRYKRQNVVKDLSVELDRLSEESVNNDISSWTKGRSGEALSLLKKRFSHRPVQEKFVCLNCGFETHADEQAALNIARSWLFLRSQEYKKYQTNKTTGNTDKRAFVETWQSFYRKKLKEVWKPAV

SEQ ID NO: 26499 - protein, 978 aa, synthetic construct
  REGION 1..978: note = engineered CasX variant
QEIKRINKIRRRLVKDSNTKKAGKTGPMKTLLVRVMTPDLRERLENLRKKPENIPQPISNTSRANLNKLLTDYTEMKKAILHVYWEEFQKDPVGLMSRVAQPASKKIDQNKLKPEMDEKGNLTTAGFACSQCGQPLFVYKLEQVSEKGKAYTNYFGRCNVAEHEKLILLAQLKPEKDSDEAVTYSLGKFGQRALDFYSIHVTKESTHPVKPLAQIAGNRYASGPVGKALSDACMGTIASFLSKYQDIIIEHQKVVKGNQKRLESLRELAGKENLEYPSVTLPPQPHTKEGVDAYNEVIARVRMWVNLNLWQKLKLSRDDAKPLLRLKGFPSFPLVERQANEVDWWDMVCNVKKLINEKKEDGKVFWQNLAGYKRQEALRPYLSSEEDRKKGKKFARYQLGDLLLHLEKKHGEDWGKVYDEAWERIDKKVEGLSKHIKLEEERRSEDAQSKAALTDWLRAKASFVIEGLKEADKDEFCRCELKLQKWYGDLRGKPFAIEAENSILDISGFSKQYNCAFIWQKDGVKKLNLYLIINYFKGGKLRFKKIKPEAFEANRFYTVINKKSGEIVPMEVNFNFDDPNLIILPLAFGKRQGREFIWNDLLSLETGSLKLANGRVIEKTLYNRRTRQDEPALFVALTFERREVLDSSNIKPMNLIGVDRGENIPAVIALTDPEGCPLSRFKDSLGNPTHILRIGESYKEKQRIIQAKKEVEQRRAFGYSRKYASKAKNLADDMVRNTARDLLYYAVTQDAMLIFENLSRGFGRQGKRTFMAERQYTRMEDWLTAKLAYEGLPSKTYLSKTLAQYTSKTCSNCGFTITSADYDRVLEKLKKTATGWMTTINGKELKVEGQITYYNRYKRQNVVKDLSVELDRLSEESVNNDISSWTKGRSGEALSLLKKRFSHRPVQEKFVCLNCGFETHADEQAALNIARSWLFLRSQEYKKYQTNKTTGNTDKRAFVETWQSFYRKKLKEVWKPAV

SEQ ID NO: 26500 - protein, 978 aa, synthetic construct
  REGION 1..978: note = engineered CasX variant
QEIKRINKIRRRLVKDSNTKKAGKTGPMKTLLVRVMTPDLRERLENLRKKPENIPQPISNTSRANLNKLLTDYTEMKKAILHVYWEEFQKDPVGLMSRVAQPASKKIDQNKLKPEMDEKGNLTTAGFACSQCGQPLFVYKLEQVSEKGKAYTNYFGRCNVAEHEKLILLAQLKPEKDSDEAVTYSLGKFGQRALDFYSIHVTKESTHPVKPLAQIAGNRYASGPVGKALSDACMGTIASFLSKYQDIIIEHQKVVKGNQKRLESLRELAGKENLEYPSVTLPPQPHTKEGVDAYNEVIARVRMWVNLNLWQKLKLSRDDAKPLLRLKGFPSFPLVERQANEVDWWDMVCNVKKLINEKKEDGKVFWQNLAGYKRQEALRPYLSSEEDRKKGKKFARYQLGDLLLHLEKKHGEDWGKVYDEAWERIDKKVEGLSKHIKLEEERRSEDAQSKAALTDWLRAKASFVIEGLKEADKDEFCRCELKLQKWYGDLRGKPFAIEAENSILDISGFSKQYNCAFIWQKDGVKKLNLYLIINYFKGGKLRFKKIKPEAFEANRFYTVINKKSGEIVPMEVNFNFDDPNLIILPLAFGKRQGREFIWNDLLSLETGSLKLANGRVIEKTLYNRRTRQDEPALFVALTFERREVLDSSNIKPMNLIGVDRGENIPAVIALTDPEGCPLSRFKDSLGNPTHILRIGESYKEKQRHIQAKKEVEQRRAGGYSRKYASKAKNLADDMVRNTARDLLYYAVTQDAMLIFENLSRGFGRQGKRTFMAERQYTRMEDWLTAKLAYEGLPSKTYLSKTLAQYTSKTCSNCGFTITSADYDRVLEKLKKTATGWMTTINGKELKVEGQITYYNRYKRQNVVKDLSVELDRLSEESVNNDISSWTKGRSGEALSLLKKRFSHRPVQEKFVCLNCGFETHADEQAALNIARSWLFLRSQEYKKYQTNKTTGNTDKRAFVETWQSFYRKKLKEVWKPAV

SEQ ID NO: 26501 - protein, 978 aa, synthetic construct
  REGION 1..978: note = engineered CasX variant
QEIKRINKIRRRLVKDSNTKKAGKTGPMKTLLVRVMTPDLRERLENLRKKPENIPQPISNTSRANLNKLLTDYTEMKKAILHVYWEEFQKDPVGLMSRVAQPASKKIDQNKLKPEMDEKGNLTTAGFACSQCGQPLFVYKLEQVSEKGKAYTNYFGRCNVAEHEKLILLAQLKPEKDSDEAVTYSLGKFGQRALDFYSIHVTKESTHPVKPLAQIAGNRYASGPVGKALSDACMGTIASFLSKYQDIIIEHQKVVKGNQKRLESLRELAGKENLEYPSVTLPPQPHTKEGVDAYNEVIARVRMWVNLNLWQKLKLSRDDAKPLLRLKGFPSFPLVERQANEVDWWDMVCNVKKLINEKKEDGKVFWQNLAGYKRQEALRPYLSSEEDRKKGKKFARYQLGDLLLHLEKKHGEDWGKVYDEAWERIDKKVEGLSKHIKLEEERRSEDAQSKAALTDWLRAKASFVIEGLKEADKDEFCRCELKLQKWYGDLRGKPFAIEAENSILDISGFSKQYNCAFIWQKDGVKKLNLYLIINYFKGGKLRFKKIKPEAFEANRFYTVINKKSGEIVPMEVNFNFDDPNLIILPLAFGKRQGREFIWNDLLSLETGSLKLANGRVIEKTLYNRRTRQDEPALFVALTFERREVLDSSNIKPMNLIGVDRGENIPAVIALTDPEGCPLSRFKDSLGNPTHILRIGESYKEKQRGIQAKKEVEQRRAGGYSRKYASKAKNLADDMVRNTARDLLYYAVTQDAMLIFENLSRGFGRQGKRTFMAERQYTRMEDWLTAKLAYEGLPSKTYLSKTLAQYTSKTCSNCGFTITSADYDRVLEKLKKTATGWMTTINGKELKVEGQITYYNRYKRQNVVKDLSVELDRLSEESVNNDISSWTKGRSGEALSLLKKRFSHRPVQEKFVCLNCGFETHADEQAALNIARSWLFLRSQEYKKYQTNKTTGNTDKRAFVETWQSFYRKKLKEVWKPAV

SEQ ID NO: 26502 - protein, 978 aa, synthetic construct
  REGION 1..978: note = engineered CasX variant
QEIKRINKIRRRLVKDSNTKKAGKTGPMKTLLVRVMTPDLRERLENLRKKPENIPQPISNTSRANLNKLLTDYTEMKKAILHVYWEEFQKDPVGLMSRVAQPASKKIDQNKLKPEMDEKGNLTTAGFACSQCGQPLFVYKLEQVSEKGKAYTNYFGRCNVAEHEKLILLAQLKPEKDSDEAVTYSLGKFGQRALDFYSIHVTKESTHPVKPLAQIAGNRYASGPVGKALSDACMGTIASFLSKYQDIIIEHQKVVKGNQKRLESLRELAGKENLEYPSVTLPPQPHTKEGVDAYNEVIARVRMWVNLNLWQKLKLSRDDAKPLLRLKGFPSFPLVERQANEVDWWDMVCNVKKLINEKKEDGKVFWQNLAGYKRQEALRPYLSSEEDRKKGKKFARYQLGDLLLHLEKKHGEDWGKVYDEAWERIDKKVEGLSKHIKLEEERRSEDAQSKAALTDWLRAKASFVIEGLKEADKDEFCRCELKLQKWYGDLRGKPFAIEAENSILDISGFSKQYNCAFIWQKDGVKKLNLYLIINYFKGGKLRFKKIKPEAFEANRFYTVINKKSGEIVPMEVNFNFDDPNLIILPLAFGKRQGREFIWNDLLSLETGSLKLANGRVIEKTLYNRRTRQDEPALFVALTFERREVLDSSNIKPMNLIGVDRGENIPAVIALTDPEGCPLSRFKDSLGNPTHILRIGESYKEKQRFIQAKKEVEQRRAGGYSRKYASKAKNLADDMVRNTARDLLYYAVTQDAMLIFENLSRGFGRQGKRTFMAERQYTRMEDWLTAKLAYEGLPSKTYLSKTLAQYTSKTCSNCGFTITSADYDRVLEKLKKTATGWMTTINGKELKVEGQITYYNRYKRQNVVKDLSVELDRLSEESVNNDISSWTKGRSGEALSLLKKRFSHRPVQEKFVCLNCGFETHADEQAALNIARSWLFLRSQEYKKYQTNKTTGNTDKRAFVETWQSFYRKKLKEVWKPAV

SEQ ID NO: 26503 - protein, 978 aa, synthetic construct
  REGION 1..978: note = engineered CasX variant
QEIKRINKIRRRLVKDSNTKKAGKTGPMKTLLVRVMTPDLRERLENLRKKPENIPQPISNTSRANLNKLLTDYTEMKKAILHVYWEEFQKDPVGLMSRVAQPASKKIDQNKLKPEMDEKGNLTTAGFACSQCGQPLFVYKLEQVSEKGKAYTNYFGRCNVAEHEKLILLAQLKPEKDSDEAVTYSLGKFGQRALDFYSIHVTKESTHPVKPLAQIAGNRYASGPVGKALSDACMGTIASFLSKYQDIIIEHQKVVKGNQKRLESLRELAGKENLEYPSVTLPPQPHTKEGVDAYNEVIARVRMWVNLNLWQKLKLSRDDAKPLLRLKGFPSFPLVERQANEVDWWDMVCNVKKLINEKKEDGKVFWQNLAGYKRQEALRPYLSSEEDRKKGKKFARYQLGDLLLHLEKKHGEDWGKVYDEAWERIDKKVEGLSKHIKLEEERRSEDAQSKAALTDWLRAKASFVIEGLKEADKDEFCRCELKLQKWYGDLRGKPFAIEAENSILDISGFSKQYNCAFIWQKDGVKKLNLYLIINYFKGGKLRFKKIKPEAFEANRFYTVINKKSGEIVPMEVNFNFDDPNLIILPLAFGKRQGREFIWNDLLSLETGSLKLANGRVIEKTLYNRRTRQDEPALFVALTFERREVLDSSNIKPMNLIGVDRGENIPAVIALTDPEGCPLSRFKDSLGNPTHILRIGESYKEKQRFIQAKKESEQRRAGGYSRKYASKAKNLADDMVRNTARDLLYYAVTQDAMLIFENLSRGFGRQGKRTFMAERQYTRMEDWLTAKLAYEGLPSKTYLSKTLAQYTSKTCSNCGFTITSADYDRVLEKLKKTATGWMTTINGKELKVEGQITYYNRYKRQNVVKDLSVELDRLSEESVNNDISSWTKGRSGEALSLLKKRFSHRPVQEKFVCLNCGFETHADEQAALNIARSWLFLRSQEYKKYQTNKTTGNTDKRAFVETWQSFYRKKLKEVWKPAV

SEQ ID NO: 26504 - protein, 978 aa, synthetic construct
  REGION 1..978: note = engineered CasX variant
QEIKRINKIRRRLVKDSNTKKAGKTGPMKTLLVRVMTPDLRERLENLRKKPENIPQPISNTSRANLNKLLTDYTEMKKAILHVYWEEFQKDPVGLMSRVAQPASKKIDQNKLKPEMDEKGNLTTAGFACSQCGQPLFVYKLEQVSEKGKAYTNYFGRCNVAEHEKLILLAQLKPEKDSDEAVTYSLGKFGQRALDFYSIHVTKESTHPVKPLAQIAGNRYASGPVGKALSDACMGTIASFLSKYQDIIIEHQKVVKGNQKRLESLRELAGKENLEYPSVTLPPQPHTKEGVDAYNEVIARVRMWVNLNLWQKLKLSRDDAKPLLRLKGFPSFPLVERQANEVDWWDMVCNVKKLINEKKEDGKVFWQNLAGYKRQEALRPYLSSEEDRKKGKKFARYQLGDLLLHLEKKHGEDWGKVYDEAWERIDKKVEGLSKHIKLEEERRSEDAQSKAALTDWLRAKASFVIEGLKEADKDEFCRCELKLQKWYGDLRGKPFAIEAENSILDISGFSKQYNCAFIWQKDGVKKLNLYLIINYFKGGKLRFKKIKPEAFEANRFYTVINKKSGEIVPMEVNFNFDDPNLIILPLAFGKRQGREFIWNDLLSLETGSLKLANGRVIEKTLYNRRTRQDEPALFVALTFERREVLDSSNIKPMNLIGVDRGENIPAVIALTDPEGCPLSRFKDSLGNPTHILRIGESYKEKQRFIQAKKEAEQRRAGGYSRKYASKAKNLADDMVRNTARDLLYYAVTQDAMLIFENLSRGFGRQGKRTFMAERQYTRMEDWLTAKLAYEGLPSKTYLSKTLAQYTSKTCSNCGFTITSADYDRVLEKLKKTATGWMTTINGKELKVEGQITYYNRYKRQNVVKDLSVELDRLSEESVNNDISSWTKGRSGEALSLLKKRFSHRPVQEKFVCLNCGFETHADEQAALNIARSWLFLRSQEYKKYQTNKTTGNTDKRAFVETWQSFYRKKLKEVWKPAV

SEQ ID NO: 26505 - protein, 978 aa, synthetic construct
  REGION 1..978: note = engineered CasX variant
QEIKRINKIRRRLVKDSNTKKAGKTGPMKTLLVRVMTPDLRERLENLRKKPENIPQPISNTSRANLNKLLTDYTEMKKAILHVYWEEFQKDPVGLMSRVAQPASKKIDQNKLKPEMDEKGNLTTAGFACSQCGQPLFVYKLEQVSEKGKAYTNYFGRCNVAEHEKLILLAQLKPEKDSDEAVTYSLGKFGQRALDFYSIHVTKESTHPVKPLAQIAGNRYASGPVGKALSDACMGTIASFLSKYQDIIIEHQKVVKGNQKRLESLRELAGKENLEYPSVTLPPQPHTKEGVDAYNEVIARVRMWVNLNLWQKLKLSRDDAKPLLRLKGFPSFPLVERQANEVDWWDMVCNVKKLINEKKEDGKVFWQNLAGYKRQEALRPYLSSEEDRKKGKKFARYQLGDLLLHLEKKHGEDWGKVYDEAWERIDKKVEGLSKHIKLEEERRSEDAQSKAALTDWLRAKASFVIEGLKEADKDEFCRCELKLQKWYGDLRGKPFAIEAENSILDISGFSKQYNCAFIWQKDGVKKLNLYLIINYFKGGKLRFKKIKPEAFEANRFYTVINKKSGEIVPMEVNFNFDDPNLIILPLAFGKRQGREFIWNDLLSLETGSLKLANGRVIEKTLYNRRTRQDEPALFVALTFERREVLDSSNIKPMNLIGVDRGENIPAVIALTDPEGCPLSRFKDSLGNPTHILRIGESYKEKQREIQAKKEVEQRRAGGYSRKYASKAKNLADDMVRNTARDLLYYAVTQDAMLIFENLSRGFGRQGKRTFMAERQYTRMEDWLTAKLAYEGLPSKTYLSKTLAQYTSKTCSNCGFTITSADYDRVLEKLKKTATGWMTTINGKELKVEGQITYYNRYKRQNVVKDLSVELDRLSEESVNNDISSWTKGRSGEALSLLKKRFSHRPVQEKFVCLNCGFETHADEQAALNIARSWLFLRSQEYKKYQTNKTTGNTDKRAFVETWQSFYRKKLKEVWKPAV

SEQ ID NO: 26506 - protein, 978 aa, synthetic construct
  REGION 1..978: note = engineered CasX variant
QEIKRINKIRRRLVKDSNTKKAGKTGPMKTLLVRVMTPDLRERLENLRKKPENIPQPISNTSRANLNKLLTDYTEMKKAILHVYWEEFQKDPVGLMSRVAQPASKKIDQNKLKPEMDEKGNLTTAGFACSQCGQPLFVYKLEQVSEKGKAYTNYFGRCNVAEHEKLILLAQLKPEKDSDEAVTYSLGKFGQRALDFYSIHVTKESTHPVKPLAQIAGNRYASGPVGKALSDACMGTIASFLSKYQDIIIEHQKVVKGNQKRLESLRELAGKENLEYPSVTLPPQPHTKEGVDAYNEVIARVRMWVNLNLWQKLKLSRDDAKPLLRLKGFPSFPLVERQANEVDWWDMVCNVKKLINEKKEDGKVFWQNLAGYKRQEALRPYLSSEEDRKKGKKFARYQLGDLLLHLEKKHGEDWGKVYDEAWERIDKKVEGLSKHIKLEEERRSEDAQSKAALTDWLRAKASFVIEGLKEADKDEFCRCELKLQKWYGDLRGKPFAIEAENSILDISGFSKQYNCAFIWQKDGVKKLNLYLIINYFKGGKLRFKKIKPEAFEANRFYTVINKKSGEIVPMEVNFNFDDPNLIILPLAFGKRQGREFIWNDLLSLETGSLKLANGRVIEKTLYNRRTRQDEPALFVALTFERREVLDSSNIKPMNLIGVDRGENIPAVIALTDPEGCPLSRFKDSLGNPTHILRIGESYKEKQREIQAKKEVEQKRAGGYSRKYASKAKNLADDMVRNTARDLLYYAVTQDAMLIFENLSRGFGRQGKRTFMAERQYTRMEDWLTAKLAYEGLPSKTYLSKTLAQYTSKTCSNCGFTITSADYDRVLEKLKKTATGWMTTINGKELKVEGQITYYNRYKRQNVVKDLSVELDRLSEESVNNDISSWTKGRSGEALSLLKKRFSHRPVQEKFVCLNCGFETHADEQAALNIARSWLFLRSQEYKKYQTNKTTGNTDKRAFVETWQSFYRKKLKEVWKPAV

SEQ ID NO: 26507 - protein, 978 aa, synthetic construct
  REGION 1..978: note = engineered CasX variant
QEIKRINKIRRRLVKDSNTKKAGKTGPMKTLLVRVMTPDLRERLENLRKKPENIPQPISNTSRANLNKLLTDYTEMKKAILHVYWEEFQKDPVGLMSRVAQPASKKIDQNKLKPEMDEKGNLTTAGFACSQCGQPLFVYKLEQVSEKGKAYTNYFGRCNVAEHEKLILLAQLKPEKDSDEAVTYSLGKFGQRALDFYSIHVTKESTHPVKPLAQIAGNRYASGPVGKALSDACMGTIASFLSKYQDIIIEHQKVVKGNQKRLESLRELAGKENLEYPSVTLPPQPHTKEGVDAYNEVIARVRMWVNLNLWQKLKLSRDDAKPLLRLKGFPSFPLVERQANEVDWWDMVCNVKKLINEKKEDGKVFWQNLAGYKRQEALRPYLSSEEDRKKGKKFARYQLGDLLLHLEKKHGEDWGKVYDEAWERIDKKVEGLSKHIKLEEERRSEDAQSKAALTDWLRAKASFVIEGLKEADKDEFCRCELKLQKWYGDLRGKPFAIEAENSILDISGFSKQYNCAFIWQKDGVKKLNLYLIINYFKGGKLRFKKIKPEAFEANRFYTVINKKSGEIVPMEVNFNFDDPNLIILPLAFGKRQGREFIWNDLLSLETGSLKLANGRVIEKTLYNRRTRQDEPALFVALTFERREVLDSSNIKPMNLIGVDRGENIPAVIALTDPEGCPLSRFKDSLGNPTHILRIGESYKEKQRCIQAKKSVEQRRAGGYSRKYASKAKNLADDMVRNTARDLLYYAVTQDAMLIFENLSRGFGRQGKRTFMAERQYTRMEDWLTAKLAYEGLPSKTYLSKTLAQYTSKTCSNCGFTITSADYDRVLEKLKKTATGWMTTINGKELKVEGQITYYNRYKRQNVVKDLSVELDRLSEESVNNDISSWTKGRSGEALSLLKKRFSHRPVQEKFVCLNCGFETHADEQAALNIARSWLFLRSQEYKKYQTNKTTGNTDKRAFVETWQSFYRKKLKEVWKPAV

SEQ ID NO: 26508 - protein, 978 aa, synthetic construct
  REGION 1..978: note = engineered CasX variant
QEIKRINKIRRRLVKDSNTKKAGKTGPMKTLLVRVMTPDLRERLENLRKKPENIPQPISNTSRANLNKLLTDYTEMKKAILHVYWEEFQKDPVGLMSRVAQPASKKIDQNKLKPEMDEKGNLTTAGFACSQCGQPLFVYKLEQVSEKGKAYTNYFGRCNVAEHEKLILLAQLKPEKDSDEAVTYSLGKFGQRALDFYSIHVTKESTHPVKPLAQIAGNRYASGPVGKALSDACMGTIASFLSKYQDIIIEHQKVVKGNQKRLESLRELAGKENLEYPSVTLPPQPHTKEGVDAYNEVIARVRMWVNLNLWQKLKLSRDDAKPLLRLKGFPSFPLVERQANEVDWWDMVCNVKKLINEKKEDGKVFWQNLAGYKRQEALRPYLSSEEDRKKGKKFARYQLGDLLLHLEKKHGEDWGKVYDEAWERIDKKVEGLSKHIKLEEERRSEDAQSKAALTDWLRAKASFVIEGLKEADKDEFCRCELKLQKWYGDLRGKPFAIEAENSILDISGFSKQYNCAFIWQKDGVKKLNLYLIINYFKGGKLRFKKIKPEAFEANRFYTVINKKSGEIVPMEVNFNFDDPNLIILPLAFGKRQGREFIWNDLLSLETGSLKLANGRVIEKTLYNRRTRQDEPALFVALTFERREVLDSSNIKPMNLIGVDRGENIPAVIALTDPEGCPLSRFKDSLGNPTHILRIGESYKEKQRCIQAKKEVETRRAGGYSRKYASKAKNLADDMVRNTARDLLYYAVTQDAMLIFENLSRGFGRQGKRTFMAERQYTRMEDWLTAKLAYEGLPSKTYLSKTLAQYTSKTCSNCGFTITSADYDRVLEKLKKTATGWMTTINGKELKVEGQITYYNRYKRQNVVKDLSVELDRLSEESVNNDISSWTKGRSGEALSLLKKRFSHRPVQEKFVCLNCGFETHADEQAALNIARSWLFLRSQEYKKYQTNKTTGNTDKRAFVETWQSFYRKKLKEVWKPAV

SEQ ID NO: 26509 - protein, 978 aa, synthetic construct
  REGION 1..978: note = engineered CasX variant
QEIKRINKIRRRLVKDSNTKKAGKTGPMKTLLVRVMTPDLRERLENLRKKPENIPQPISNTSRANLNKLLTDYTEMKKAILHVYWEEFQKDPVGLMSRVAQPASKKIDQNKLKPEMDEKGNLTTAGFACSQCGQPLFVYKLEQVSEKGKAYTNYFGRCNVAEHEKLILLAQLKPEKDSDEAVTYSLGKFGQRALDFYSIHVTKESTHPVKPLAQIAGNRYASGPVGKALSDACMGTIASFLSKYQDIIIEHQKVVKGNQKRLESLRELAGKENLEYPSVTLPPQPHTKEGVDAYNEVIARVRMWVNLNLWQKLKLSRDDAKPLLRLKGFPSFPLVERQANEVDWWDMVCNVKKLINEKKEDGKVFWQNLAGYKRQEALRPYLSSEEDRKKGKKFARYQLGDLLLHLEKKHGEDWGKVYDEAWERIDKKVEGLSKHIKLEEERRSEDAQSKAALTDWLRAKASFVIEGLKEADKDEFCRCELKLQKWYGDLRGKPFAIEAENSILDISGFSKQYNCAFIWQKDGVKKLNLYLIINYFKGGKLRFKKIKPEAFEANRFYTVINKKSGEIVPMEVNFNFDDPNLIILPLAFGKRQGREFIWNDLLSLETGSLKLANGRVIEKTLYNRRTRQDEPALFVALTFERREVLDSSNIKPMNLIGVDRGENIPAVIALTDPEGCPLSRFKDSLGNPTHILRIGESYKEKQRCIQAKKEVEQRRAGYYSRKYASKAKNLADDMVRNTARDLLYYAVTQDAMLIFENLSRGFGRQGKRTFMAERQYTRMEDWLTAKLAYEGLPSKTYLSKTLAQYTSKTCSNCGFTITSADYDRVLEKLKKTATGWMTTINGKELKVEGQITYYNRYKRQNVVKDLSVELDRLSEESVNNDISSWTKGRSGEALSLLKKRFSHRPVQEKFVCLNCGFETHADEQAALNIARSWLFLRSQEYKKYQTNKTTGNTDKRAFVETWQSFYRKKLKEVWKPAV

SEQ ID NO: 26510 - protein, 978 aa, synthetic construct
  REGION 1..978: note = engineered CasX variant
QEIKRINKIRRRLVKDSNTKKAGKTGPMKTLLVRVMTPDLRERLENLRKKPENIPQPISNTSRANLNKLLTDYTEMKKAILHVYWEEFQKDPVGLMSRVAQPASKKIDQNKLKPEMDEKGNLTTAGFACSQCGQPLFVYKLEQVSEKGKAYTNYFGRCNVAEHEKLILLAQLKPEKDSDEAVTYSLGKFGQRALDFYSIHVTKESTHPVKPLAQIAGNRYASGPVGKALSDACMGTIASFLSKYQDIIIEHQKVVKGNQKRLESLRELAGKENLEYPSVTLPPQPHTKEGVDAYNEVIARVRMWVNLNLWQKLKLSRDDAKPLLRLKGFPSFPLVERQANEVDWWDMVCNVKKLINEKKEDGKVFWQNLAGYKRQEALRPYLSSEEDRKKGKKFARYQLGDLLLHLEKKHGEDWGKVYDEAWERIDKKVEGLSKHIKLEEERRSEDAQSKAALTDWLRAKASFVIEGLKEADKDEFCRCELKLQKWYGDLRGKPFAIEAENSILDISGFSKQYNCAFIWQKDGVKKLNLYLIINYFKGGKLRFKKIKPEAFEANRFYTVINKKSGEIVPMEVNFNFDDPNLIILPLAFGKRQGREFIWNDLLSLETGSLKLANGRVIEKTLYNRRTRQDEPALFVALTFERREVLDSSNIKPMNLIGVDRGENIPAVIALTDPEGCPLSRFKDSLGNPTHILRIGESYKEKQRCIQAKKEVEQRRAGGYSRKYASKAKNLADDMVRNTARDLLYYAVTQDAMLIFENLSRGFGRQGKRTFMAERQYTRMEDWLTAKLAYEGLPSKTYLSKTLAQYTSKTCSNCGFTITSADYDRVLEKLKKTATGWMTTINGKELKVEGQITYYNRYKRQNVVKDLSVELDRLSEESVNNDISSWTKGRSGEALSLLKKRFSHRPVQEKFVCLNCGFETHADEQAALNIARSWLFLRSQEYKKYQTNKTTGNTDKRAFVETWQSFYRKKLKEVWKPAV

SEQ ID NO: 26511 - protein, 978 aa, synthetic construct
  REGION 1..978: note = engineered CasX variant
QEIKRINKIRRRLVKDSNTKKAGKTGPMKTLLVRVMTPDLRERLENLRKKPENIPQPISNTSRANLNKLLTDYTEMKKAILHVYWEEFQKDPVGLMSRVAQPASKKIDQNKLKPEMDEKGNLTTAGFACSQCGQPLFVYKLEQVSEKGKAYTNYFGRCNVAEHEKLILLAQLKPEKDSDEAVTYSLGKFGQRALDFYSIHVTKESTHPVKPLAQIAGNRYASGPVGKALSDACMGTIASFLSKYQDIIIEHQKVVKGNQKRLESLRELAGKENLEYPSVTLPPQPHTKEGVDAYNEVIARVRMWVNLNLWQKLKLSRDDAKPLLRLKGFPSFPLVERQANEVDWWDMVCNVKKLINEKKEDGKVFWQNLAGYKRQEALRPYLSSEEDRKKGKKFARYQLGDLLLHLEKKHGEDWGKVYDEAWERIDKKVEGLSKHIKLEEERRSEDAQSKAALTDWLRAKASFVIEGLKEADKDEFCRCELKLQKWYGDLRGKPFAIEAENSILDISGFSKQYNCAFIWQKDGVKKLNLYLIINYFKGGKLRFKKIKPEAFEANRFYTVINKKSGEIVPMEVNFNFDDPNLIILPLAFGKRQGREFIWNDLLSLETGSLKLANGRVIEKTLYNRRTRQDEPALFVALTFERREVLDSSNIKPMNLIGVDRGENIPAVIALTDPEGCPLSRFKDSLGNPTHILRIGESYKEKQRAIQAKKEVEQRRAGGYSRKYASKAKNLADDMVRNTARDLLYYAVTQDAMLIFENLSRGFGRQGKRTFMAERQYTRMEDWLTAKLAYEGLPSKTYLSKTLAQYTSKTCSNCGFTITSADYDRVLEKLKKTATGWMTTINGKELKVEGQITYYNRYKRQNVVKDLSVELDRLSEESVNNDISSWTKGRSGEALSLLKKRFSHRPVQEKFVCLNCGFETHADEQAALNIARSWLFLRSQEYKKYQTNKTTGNTDKRAFVETWQSFYRKKLKEVWKPAV

SEQ ID NO: 26512 - protein, 978 aa, synthetic construct
  REGION 1..978: note = engineered CasX variant
QEIKRINKIRRRLVKDSNTKKAGKTGPMKTLLVRVMTPDLRERLENLRKKPENIPQPISNTSRANLNKLLTDYTEMKKAILHVYWEEFQKDPVGLMSRVAQPASKKIDQNKLKPEMDEKGNLTTAGFACSQCGQPLFVYKLEQVSEKGKAYTNYFGRCNVAEHEKLILLAQLKPEKDSDEAVTYSLGKFGQRALDFYSIHVTKESTHPVKPLAQIAGNRYASGPVGKALSDACMGTIASFLSKYQDIIIEHQKVVKGNQKRLESLRELAGKENLEYPSVTLPPQPHTKEGVDAYNEVIARVRMWVNLNLWQKLKLSRDDAKPLLRLKGFPSFPLVERQANEVDWWDMVCNVKKLINEKKEDGKVFWQNLAGYKRQEALRPYLSSEEDRKKGKKFARYQLGDLLLHLEKKHGEDWGKVYDEAWERIDKKVEGLSKHIKLEEERRSEDAQSKAALTDWLRAKASFVIEGLKEADKDEFCRCELKLQKWYGDLRGKPFAIEAENSILDISGFSKQYNCAFIWQKDGVKKLNLYLIINYFKGGKLRFKKIKPEAFEANRFYTVINKKSGEIVPMEVNFNFDDPNLIILPLAFGKRQGREFIWNDLLSLETGSLKLANGRVIEKTLYNRRTRQDEPALFVALTFERREVLDSSNIKPMNLIGVDRGENIPAVIALTDPEGCPLSRFKDSLGNPTHILRIGESYKEKQRAIFAKKEVEQRRAGGYSRKYASKAKNLADDMVRNTARDLLYYAVTQDAMLIFENLSRGFGRQGKRTFMAERQYTRMEDWLTAKLAYEGLPSKTYLSKTLAQYTSKTCSNCGFTITSADYDRVLEKLKKTATGWMTTINGKELKVEGQITYYNRYKRQNVVKDLSVELDRLSEESVNNDISSWTKGRSGEALSLLKKRFSHRPVQEKFVCLNCGFETHADEQAALNIARSWLFLRSQEYKKYQTNKTTGNTDKRAFVETWQSFYRKKLKEVWKPAV

SEQ ID NO: 26513 - protein, 978 aa, synthetic construct
  REGION 1..978: note = engineered CasX variant
QEIKRINKIRRRLVKDSNTKKAGKTGPMKTLLVRVMTPDLRERLENLRKKPENIPQPISNTSRANLNKLLTDYTEMKKAILHVYWEEFQKDPVGLMSRVAQPASKKIDQNKLKPEMDEKGNLTTAGFACSQCGQPLFVYKLEQVSEKGKAYTNYFGRCNVAEHEKLILLAQLKPEKDSDEAVTYSLGKFGQRALDFYSIHVTKESTHPVKPLAQIAGNRYASGPVGKALSDACMGTIASFLSKYQDIIIEHQKVVKGNQKRLESLRELAGKENLEYPSVTLPPQPHTKEGVDAYNEVIARVRMWVNLNLWQKLKLSRDDAKPLLRLKGFPSFPLVERQANEVDWWDMVCNVKKLINEKKEDGKVFWQNLAGYKRQEALRPYLSSEEDRKKGKKFARYQLGDLLLHLEKKHGEDWGKVYDEAWERIDKKVEGLSKHIKLEEERRSEDAQSKAALTDWLRAKASFVIEGLKEADKDEFCRCELKLQKWYGDLRGKPFAIEAENSILDISGFSKQYNCAFIWQKDGVKKLNLYLIINYFKGGKLRFKKIKPEAFEANRFYTVINKKSGEIVPMEVNFNFDDPNLIILPLAFGKRQGREFIWNDLLSLETGSLKLANGRVIEKTLYNRRTRQDEPALFVALTFERREVLDSSNIKPMNLIGVDRGENIPAVIALTDPEGCPLSRFKDSLGNPTHILRIGESYKEKQQTIQAKKEVEQRRAGGYSRKYASKAKNLADDMVRNTARDLLYYAVTQDAMLIFENLSRGFGRQGKRTFMAERQYTRMEDWLTAKLAYEGLPSKTYLSKTLAQYTSKTCSNCGFTITSADYDRVLEKLKKTATGWMTTINGKELKVEGQITYYNRYKRQNVVKDLSVELDRLSEESVNNDISSWTKGRSGEALSLLKKRFSHRPVQEKFVCLNCGFETHADEQAALNIARSWLFLRSQEYKKYQTNKTTGNTDKRAFVETWQSFYRKKLKEVWKPAV

SEQ ID NO: 26514 - protein, 978 aa, synthetic construct
  REGION 1..978: note = engineered CasX variant
QEIKRINKIRRRLVKDSNTKKAGKTGPMKTLLVRVMTPDLRERLENLRKKPENIPQPISNTSRANLNKLLTDYTEMKKAILHVYWEEFQKDPVGLMSRVAQPASKKIDQNKLKPEMDEKGNLTTAGFACSQCGQPLFVYKLEQVSEKGKAYTNYFGRCNVAEHEKLILLAQLKPEKDSDEAVTYSLGKFGQRALDFYSIHVTKESTHPVKPLAQIAGNRYASGPVGKALSDACMGTIASFLSKYQDIIIEHQKVVKGNQKRLESLRELAGKENLEYPSVTLPPQPHTKEGVDAYNEVIARVRMWVNLNLWQKLKLSRDDAKPLLRLKGFPSFPLVERQANEVDWWDMVCNVKKLINEKKEDGKVFWQNLAGYKRQEALRPYLSSEEDRKKGKKFARYQLGDLLLHLEKKHGEDWGKVYDEAWERIDKKVEGLSKHIKLEEERRSEDAQSKAALTDWLRAKASFVIEGLKEADKDEFCRCELKLQKWYGDLRGKPFAIEAENSILDISGFSKQYNCAFIWQKDGVKKLNLYLIINYFKGGKLRFKKIKPEAFEANRFYTVINKKSGEIVPMEVNFNFDDPNLIILPLAFGKRQGREFIWNDLLSLETGSLKLANGRVIEKTLYNRRTRQDEPALFVALTFERREVLDSSNIKPMNLIGVDRGENIPAVIALTDPEGCPLSRFKDSLGNPTHILRIGESYKEKQNTIQAKKEVEQRRAGGYSRKYASKAKNLADDMVRNTARDLLYYAVTQDAMLIFENLSRGFGRQGKRTFMAERQYTRMEDWLTAKLAYEGLPSKTYLSKTLAQYTSKTCSNCGFTITSADYDRVLEKLKKTATGWMTTINGKELKVEGQITYYNRYKRQNVVKDLSVELDRLSEESVNNDISSWTKGRSGEALSLLKKRFSHRPVQEKFVCLNCGFETHADEQAALNIARSWLFLRSQEYKKYQTNKTTGNTDKRAFVETWQSFYRKKLKEVWKPAV

SEQ ID NO: 26515 - protein, 978 aa, synthetic construct
  REGION 1..978: note = engineered CasX variant
QEIKRINKIRRRLVKDSNTKKAGKTGPMKTLLVRVMTPDLRERLENLRKKPENIPQPISNTSRANLNKLLTDYTEMKKAILHVYWEEFQKDPVGLMSRVAQPASKKIDQNKLKPEMDEKGNLTTAGFACSQCGQPLFVYKLEQVSEKGKAYTNYFGRCNVAEHEKLILLAQLKPEKDSDEAVTYSLGKFGQRALDFYSIHVTKESTHPVKPLAQIAGNRYASGPVGKALSDACMGTIASFLSKYQDIIIEHQKVVKGNQKRLESLRELAGKENLEYPSVTLPPQPHTKEGVDAYNEVIARVRMWVNLNLWQKLKLSRDDAKPLLRLKGFPSFPLVERQANEVDWWDMVCNVKKLINEKKEDGKVFWQNLAGYKRQEALRPYLSSEEDRKKGKKFARYQLGDLLLHLEKKHGEDWGKVYDEAWERIDKKVEGLSKHIKLEEERRSEDAQSKAALTDWLRAKASFVIEGLKEADKDEFCRCELKLQKWYGDLRGKPFAIEAENSILDISGFSKQYNCAFIWQKDGVKKLNLYLIINYFKGGKLRFKKIKPEAFEANRFYTVINKKSGEIVPMEVNFNFDDPNLIILPLAFGKRQGREFIWNDLLSLETGSLKLANGRVIEKTLYNRRTRQDEPALFVALTFERREVLDSSNIKPMNLIGVDRGENIPAVIALTDPEGCPLSRFKDSLGNPTHILRIGESYKEKQMTIQAKKEVEQRRAGGYSRKYASKAKNLADDMVRNTARDLLYYAVTQDAMLIFENLSRGFGRQGKRTFMAERQYTRMEDWLTAKLAYEGLPSKTYLSKTLAQYTSKTCSNCGFTITSADYDRVLEKLKKTATGWMTTINGKELKVEGQITYYNRYKRQNVVKDLSVELDRLSEESVNNDISSWTKGRSGEALSLLKKRFSHRPVQEKFVCLNCGFETHADEQAALNIARSWLFLRSQEYKKYQTNKTTGNTDKRAFVETWQSFYRKKLKEVWKPAV

SEQ ID NO: 26516 - protein, 978 aa, synthetic construct
  REGION 1..978: note = engineered CasX variant
QEIKRINKIRRRLVKDSNTKKAGKTGPMKTLLVRVMTPDLRERLENLRKKPENIPQPISNTSRANLNKLLTDYTEMKKAILHVYWEEFQKDPVGLMSRVAQPASKKIDQNKLKPEMDEKGNLTTAGFACSQCGQPLFVYKLEQVSEKGKAYTNYFGRCNVAEHEKLILLAQLKPEKDSDEAVTYSLGKFGQRALDFYSIHVTKESTHPVKPLAQIAGNRYASGPVGKALSDACMGTIASFLSKYQDIIIEHQKVVKGNQKRLESLRELAGKENLEYPSVTLPPQPHTKEGVDAYNEVIARVRMWVNLNLWQKLKLSRDDAKPLLRLKGFPSFPLVERQANEVDWWDMVCNVKKLINEKKEDGKVFWQNLAGYKRQEALRPYLSSEEDRKKGKKFARYQLGDLLLHLEKKHGEDWGKVYDEAWERIDKKVEGLSKHIKLEEERRSEDAQSKAALTDWLRAKASFVIEGLKEADKDEFCRCELKLQKWYGDLRGKPFAIEAENSILDISGFSKQYNCAFIWQKDGVKKLNLYLIINYFKGGKLRFKKIKPEAFEANRFYTVINKKSGEIVPMEVNFNFDDPNLIILPLAFGKRQGREFIWNDLLSLETGSLKLANGRVIEKTLYNRRTRQDEPALFVALTFERREVLDSSNIKPMNLIGVDRGENIPAVIALTDPEGCPLSRFKDSLGNPTHILRIGESYKEKQLTIQAKKEVEQRRAGGYSRKYASKAKNLADDMVRNTARDLLYYAVTQDAMLIFENLSRGFGRQGKRTFMAERQYTRMEDWLTAKLAYEGLPSKTYLSKTLAQYTSKTCSNCGFTITSADYDRVLEKLKKTATGWMTTINGKELKVEGQITYYNRYKRQNVVKDLSVELDRLSEESVNNDISSWTKGRSGEALSLLKKRFSHRPVQEKFVCLNCGFETHADEQAALNIARSWLFLRSQEYKKYQTNKTTGNTDKRAFVETWQSFYRKKLKEVWKPAV

SEQ ID NO: 26517 - protein, 978 aa, synthetic construct
  REGION 1..978: note = engineered CasX variant
QEIKRINKIRRRLVKDSNTKKAGKTGPMKTLLVRVMTPDLRERLENLRKKPENIPQPISNTSRANLNKLLTDYTEMKKAILHVYWEEFQKDPVGLMSRVAQPASKKIDQNKLKPEMDEKGNLTTAGFACSQCGQPLFVYKLEQVSEKGKAYTNYFGRCNVAEHEKLILLAQLKPEKDSDEAVTYSLGKFGQRALDFYSIHVTKESTHPVKPLAQIAGNRYASGPVGKALSDACMGTIASFLSKYQDIIIEHQKVVKGNQKRLESLRELAGKENLEYPSVTLPPQPHTKEGVDAYNEVIARVRMWVNLNLWQKLKLSRDDAKPLLRLKGFPSFPLVERQANEVDWWDMVCNVKKLINEKKEDGKVFWQNLAGYKRQEALRPYLSSEEDRKKGKKFARYQLGDLLLHLEKKHGEDWGKVYDEAWERIDKKVEGLSKHIKLEEERRSEDAQSKAALTDWLRAKASFVIEGLKEADKDEFCRCELKLQKWYGDLRGKPFAIEAENSILDISGFSKQYNCAFIWQKDGVKKLNLYLIINYFKGGKLRFKKIKPEAFEANRFYTVINKKSGEIVPMEVNFNFDDPNLIILPLAFGKRQGREFIWNDLLSLETGSLKLANGRVIEKTLYNRRTRQDEPALFVALTFERREVLDSSNIKPMNLIGVDRGENIPAVIALTDPEGCPLSRFKDSLGNPTHILRIGESYKEKQKTIQAKKEVEQRRAGGYSRKYASKAKNLADDMVRNTARDLLYYAVTQDAMLIFENLSRGFGRQGKRTFMAERQYTRMEDWLTAKLAYEGLPSKTYLSKTLAQYTSKTCSNCGFTITSADYDRVLEKLKKTATGWMTTINGKELKVEGQITYYNRYKRQNVVKDLSVELDRLSEESVNNDISSWTKGRSGEALSLLKKRFSHRPVQEKFVCLNCGFETHADEQAALNIARSWLFLRSQEYKKYQTNKTTGNTDKRAFVETWQSFYRKKLKEVWKPAV

SEQ ID NO: 26518 - protein, 978 aa, synthetic construct
  REGION 1..978: note = engineered CasX variant
QEIKRINKIRRRLVKDSNTKKAGKTGPMKTLLVRVMTPDLRERLENLRKKPENIPQPISNTSRANLNKLLTDYTEMKKAILHVYWEEFQKDPVGLMSRVAQPASKKIDQNKLKPEMDEKGNLTTAGFACSQCGQPLFVYKLEQVSEKGKAYTNYFGRCNVAEHEKLILLAQLKPEKDSDEAVTYSLGKFGQRALDFYSIHVTKESTHPVKPLAQIAGNRYASGPVGKALSDACMGTIASFLSKYQDIIIEHQKVVKGNQKRLESLRELAGKENLEYPSVTLPPQPHTKEGVDAYNEVIARVRMWVNLNLWQKLKLSRDDAKPLLRLKGFPSFPLVERQANEVDWWDMVCNVKKLINEKKEDGKVFWQNLAGYKRQEALRPYLSSEEDRKKGKKFARYQLGDLLLHLEKKHGEDWGKVYDEAWERIDKKVEGLSKHIKLEEERRSEDAQSKAALTDWLRAKASFVIEGLKEADKDEFCRCELKLQKWYGDLRGKPFAIEAENSILDISGFSKQYNCAFIWQKDGVKKLNLYLIINYFKGGKLRFKKIKPEAFEANRFYTVINKKSGEIVPMEVNFNFDDPNLIILPLAFGKRQGREFIWNDLLSLETGSLKLANGRVIEKTLYNRRTRQDEPALFVALTFERREVLDSSNIKPMNLIGVDRGENIPAVIALTDPEGCPLSRFKDSLGNPTHILRIGESYKEKQITIQAKKEVYQRRAGGYSRKYASKAKNLADDMVRNTARDLLYYAVTQDAMLIFENLSRGFGRQGKRTFMAERQYTRMEDWLTAKLAYEGLPSKTYLSKTLAQYTSKTCSNCGFTITSADYDRVLEKLKKTATGWMTTINGKELKVEGQITYYNRYKRQNVVKDLSVELDRLSEESVNNDISSWTKGRSGEALSLLKKRFSHRPVQEKFVCLNCGFETHADEQAALNIARSWLFLRSQEYKKYQTNKTTGNTDKRAFVETWQSFYRKKLKEVWKPAV

SEQ ID NO: 26519 - protein, 978 aa, synthetic construct
  REGION 1..978: note = engineered CasX variant
QEIKRINKIRRRLVKDSNTKKAGKTGPMKTLLVRVMTPDLRERLENLRKKPENIPQPISNTSRANLNKLLTDYTEMKKAILHVYWEEFQKDPVGLMSRVAQPASKKIDQNKLKPEMDEKGNLTTAGFACSQCGQPLFVYKLEQVSEKGKAYTNYFGRCNVAEHEKLILLAQLKPEKDSDEAVTYSLGKFGQRALDFYSIHVTKESTHPVKPLAQIAGNRYASGPVGKALSDACMGTIASFLSKYQDIIIEHQKVVKGNQKRLESLRELAGKENLEYPSVTLPPQPHTKEGVDAYNEVIARVRMWVNLNLWQKLKLSRDDAKPLLRLKGFPSFPLVERQANEVDWWDMVCNVKKLINEKKEDGKVFWQNLAGYKRQEALRPYLSSEEDRKKGKKFARYQLGDLLLHLEKKHGEDWGKVYDEAWERIDKKVEGLSKHIKLEEERRSEDAQSKAALTDWLRAKASFVIEGLKEADKDEFCRCELKLQKWYGDLRGKPFAIEAENSILDISGFSKQYNCAFIWQKDGVKKLNLYLIINYFKGGKLRFKKIKPEAFEANRFYTVINKKSGEIVPMEVNFNFDDPNLIILPLAFGKRQGREFIWNDLLSLETGSLKLANGRVIEKTLYNRRTRQDEPALFVALTFERREVLDSSNIKPMNLIGVDRGENIPAVIALTDPEGCPLSRFKDSLGNPTHILRIGESYKEKQITIQAKKEVEQRRAGGYSRKYASKAKNLADDMVRNTARDLLYYAVTQDAMLIFENLSRGFGRQGKRTFMAERQYTRMEDWLTAKLAYEGLPSKTYLSKTLAQYTSKTCSNCGFTITSADYDRVLEKLKKTATGWMTTINGKELKVEGQITYYNRYKRQNVVKDLSVELDRLSEESVNNDISSWTKGRSGEALSLLKKRFSHRPVQEKFVCLNCGFETHADEQAALNIARSWLFLRSQEYKKYQTNKTTGNTDKRAFVETWQSFYRKKLKEVWKPAV

SEQ ID NO: 26520 - protein, 978 aa, synthetic construct
  REGION 1..978: note = engineered CasX variant
QEIKRINKIRRRLVKDSNTKKAGKTGPMKTLLVRVMTPDLRERLENLRKKPENIPQPISNTSRANLNKLLTDYTEMKKAILHVYWEEFQKDPVGLMSRVAQPASKKIDQNKLKPEMDEKGNLTTAGFACSQCGQPLFVYKLEQVSEKGKAYTNYFGRCNVAEHEKLILLAQLKPEKDSDEAVTYSLGKFGQRALDFYSIHVTKESTHPVKPLAQIAGNRYASGPVGKALSDACMGTIASFLSKYQDIIIEHQKVVKGNQKRLESLRELAGKENLEYPSVTLPPQPHTKEGVDAYNEVIARVRMWVNLNLWQKLKLSRDDAKPLLRLKGFPSFPLVERQANEVDWWDMVCNVKKLINEKKEDGKVFWQNLAGYKRQEALRPYLSSEEDRKKGKKFARYQLGDLLLHLEKKHGEDWGKVYDEAWERIDKKVEGLSKHIKLEEERRSEDAQSKAALTDWLRAKASFVIEGLKEADKDEFCRCELKLQKWYGDLRGKPFAIEAENSILDISGFSKQYNCAFIWQKDGVKKLNLYLIINYFKGGKLRFKKIKPEAFEANRFYTVINKKSGEIVPMEVNFNFDDPNLIILPLAFGKRQGREFIWNDLLSLETGSLKLANGRVIEKTLYNRRTRQDEPALFVALTFERREVLDSSNIKPMNLIGVDRGENIPAVIALTDPEGCPLSRFKDSLGNPTHILRIGESYKEKQHTIQAKKSVEQRRAGGYSRKYASKAKNLADDMVRNTARDLLYYAVTQDAMLIFENLSRGFGRQGKRTFMAERQYTRMEDWLTAKLAYEGLPSKTYLSKTLAQYTSKTCSNCGFTITSADYDRVLEKLKKTATGWMTTINGKELKVEGQITYYNRYKRQNVVKDLSVELDRLSEESVNNDISSWTKGRSGEALSLLKKRFSHRPVQEKFVCLNCGFETHADEQAALNIARSWLFLRSQEYKKYQTNKTTGNTDKRAFVETWQSFYRKKLKEVWKPAV

SEQ ID NO: 26521 - protein, 978 aa, synthetic construct
  REGION 1..978: note = engineered CasX variant
QEIKRINKIRRRLVKDSNTKKAGKTGPMKTLLVRVMTPDLRERLENLRKKPENIPQPISNTSRANLNKLLTDYTEMKKAILHVYWEEFQKDPVGLMSRVAQPASKKIDQNKLKPEMDEKGNLTTAGFACSQCGQPLFVYKLEQVSEKGKAYTNYFGRCNVAEHEKLILLAQLKPEKDSDEAVTYSLGKFGQRALDFYSIHVTKESTHPVKPLAQIAGNRYASGPVGKALSDACMGTIASFLSKYQDIIIEHQKVVKGNQKRLESLRELAGKENLEYPSVTLPPQPHTKEGVDAYNEVIARVRMWVNLNLWQKLKLSRDDAKPLLRLKGFPSFPLVERQANEVDWWDMVCNVKKLINEKKEDGKVFWQNLAGYKRQEALRPYLSSEEDRKKGKKFARYQLGDLLLHLEKKHGEDWGKVYDEAWERIDKKVEGLSKHIKLEEERRSEDAQSKAALTDWLRAKASFVIEGLKEADKDEFCRCELKLQKWYGDLRGKPFAIEAENSILDISGFSKQYNCAFIWQKDGVKKLNLYLIINYFKGGKLRFKKIKPEAFEANRFYTVINKKSGEIVPMEVNFNFDDPNLIILPLAFGKRQGREFIWNDLLSLETGSLKLANGRVIEKTLYNRRTRQDEPALFVALTFERREVLDSSNIKPMNLIGVDRGENIPAVIALTDPEGCPLSRFKDSLGNPTHILRIGESYKEKQHTIQAKKEVEQRRAGGYSRKYASKAKNLADDMVRNTARDLLYYAVTQDAMLIFENLSRGFGRQGKRTFMAERQYTRMEDWLTAKLAYEGLPSKTYLSKTLAQYTSKTCSNCGFTITSADYDRVLEKLKKTATGWMTTINGKELKVEGQITYYNRYKRQNVVKDLSVELDRLSEESVNNDISSWTKGRSGEALSLLKKRFSHRPVQEKFVCLNCGFETHADEQAALNIARSWLFLRSQEYKKYQTNKTTGNTDKRAFVETWQSFYRKKLKEVWKPAV

SEQ ID NO: 26522 - protein, 978 aa, synthetic construct
  REGION 1..978: note = engineered CasX variant
QEIKRINKIRRRLVKDSNTKKAGKTGPMKTLLVRVMTPDLRERLENLRKKPENIPQPISNTSRANLNKLLTDYTEMKKAILHVYWEEFQKDPVGLMSRVAQPASKKIDQNKLKPEMDEKGNLTTAGFACSQCGQPLFVYKLEQVSEKGKAYTNYFGRCNVAEHEKLILLAQLKPEKDSDEAVTYSLGKFGQRALDFYSIHVTKESTHPVKPLAQIAGNRYASGPVGKALSDACMGTIASFLSKYQDIIIEHQKVVKGNQKRLESLRELAGKENLEYPSVTLPPQPHTKEGVDAYNEVIARVRMWVNLNLWQKLKLSRDDAKPLLRLKGFPSFPLVERQANEVDWWDMVCNVKKLINEKKEDGKVFWQNLAGYKRQEALRPYLSSEEDRKKGKKFARYQLGDLLLHLEKKHGEDWGKVYDEAWERIDKKVEGLSKHIKLEEERRSEDAQSKAALTDWLRAKASFVIEGLKEADKDEFCRCELKLQKWYGDLRGKPFAIEAENSILDISGFSKQYNCAFIWQKDGVKKLNLYLIINYFKGGKLRFKKIKPEAFEANRFYTVINKKSGEIVPMEVNFNFDDPNLIILPLAFGKRQGREFIWNDLLSLETGSLKLANGRVIEKTLYNRRTRQDEPALFVALTFERREVLDSSNIKPMNLIGVDRGENIPAVIALTDPEGCPLSRFKDSLGNPTHILRIGESYKEKQGTIQAKKEVEQRRAGGYSRKYASKAKNLADDMVRNTARDLLYYAVTQDAMLIFENLSRGFGRQGKRTFMAERQYTRMEDWLTAKLAYEGLPSKTYLSKTLAQYTSKTCSNCGFTITSADYDRVLEKLKKTATGWMTTINGKELKVEGQITYYNRYKRQNVVKDLSVELDRLSEESVNNDISSWTKGRSGEALSLLKKRFSHRPVQEKFVCLNCGFETHADEQAALNIARSWLFLRSQEYKKYQTNKTTGNTDKRAFVETWQSFYRKKLKEVWKPAV

SEQ ID NO: 26523 - protein, 978 aa, synthetic construct
  REGION 1..978: note = engineered CasX variant
QEIKRINKIRRRLVKDSNTKKAGKTGPMKTLLVRVMTPDLRERLENLRKKPENIPQPISNTSRANLNKLLTDYTEMKKAILHVYWEEFQKDPVGLMSRVAQPASKKIDQNKLKPEMDEKGNLTTAGFACSQCGQPLFVYKLEQVSEKGKAYTNYFGRCNVAEHEKLILLAQLKPEKDSDEAVTYSLGKFGQRALDFYSIHVTKESTHPVKPLAQIAGNRYASGPVGKALSDACMGTIASFLSKYQDIIIEHQKVVKGNQKRLESLRELAGKENLEYPSVTLPPQPHTKEGVDAYNEVIARVRMWVNLNLWQKLKLSRDDAKPLLRLKGFPSFPLVERQANEVDWWDMVCNVKKLINEKKEDGKVFWQNLAGYKRQEALRPYLSSEEDRKKGKKFARYQLGDLLLHLEKKHGEDWGKVYDEAWERIDKKVEGLSKHIKLEEERRSEDAQSKAALTDWLRAKASFVIEGLKEADKDEFCRCELKLQKWYGDLRGKPFAIEAENSILDISGFSKQYNCAFIWQKDGVKKLNLYLIINYFKGGKLRFKKIKPEAFEANRFYTVINKKSGEIVPMEVNFNFDDPNLIILPLAFGKRQGREFIWNDLLSLETGSLKLANGRVIEKTLYNRRTRQDEPALFVALTFERREVLDSSNIKPMNLIGVDRGENIPAVIALTDPEGCPLSRFKDSLGNPTHILRIGESYKEKNRTIQAKKQVEQRRAGGYSRKYASKAKNLADDMVRNTARDLLYYAVTQDAMLIFENLSRGFGRQGKRTFMAERQYTRMEDWLTAKLAYEGLPSKTYLSKTLAQYTSKTCSNCGFTITSADYDRVLEKLKKTATGWMTTINGKELKVEGQITYYNRYKRQNVVKDLSVELDRLSEESVNNDISSWTKGRSGEALSLLKKRFSHRPVQEKFVCLNCGFETHADEQAALNIARSWLFLRSQEYKKYQTNKTTGNTDKRAFVETWQSFYRKKLKEVWKPAV

SEQ ID NO: 26524 - protein, 978 aa, synthetic construct
  REGION 1..978: note = engineered CasX variant
QEIKRINKIRRRLVKDSNTKKAGKTGPMKTLLVRVMTPDLRERLENLRKKPENIPQPISNTSRANLNKLLTDYTEMKKAILHVYWEEFQKDPVGLMSRVAQPASKKIDQNKLKPEMDEKGNLTTAGFACSQCGQPLFVYKLEQVSEKGKAYTNYFGRCNVAEHEKLILLAQLKPEKDSDEAVTYSLGKFGQRALDFYSIHVTKESTHPVKPLAQIAGNRYASGPVGKALSDACMGTIASFLSKYQDIIIEHQKVVKGNQKRLESLRELAGKENLEYPSVTLPPQPHTKEGVDAYNEVIARVRMWVNLNLWQKLKLSRDDAKPLLRLKGFPSFPLVERQANEVDWWDMVCNVKKLINEKKEDGKVFWQNLAGYKRQEALRPYLSSEEDRKKGKKFARYQLGDLLLHLEKKHGEDWGKVYDEAWERIDKKVEGLSKHIKLEEERRSEDAQSKAALTDWLRAKASFVIEGLKEADKDEFCRCELKLQKWYGDLRGKPFAIEAENSILDISGFSKQYNCAFIWQKDGVKKLNLYLIINYFKGGKLRFKKIKPEAFEANRFYTVINKKSGEIVPMEVNFNFDDPNLIILPLAFGKRQGREFIWNDLLSLETGSLKLANGRVIEKTLYNRRTRQDEPALFVALTFERREVLDSSNIKPMNLIGVDRGENIPAVIALTDPEGCPLSRFKDSLGNPTHILRIGESYKEKNRTIQAKKEVEQRRDGGYSRKYASKAKNLADDMVRNTARDLLYYAVTQDAMLIFENLSRGFGRQGKRTFMAERQYTRMEDWLTAKLAYEGLPSKTYLSKTLAQYTSKTCSNCGFTITSADYDRVLEKLKKTATGWMTTINGKELKVEGQITYYNRYKRQNVVKDLSVELDRLSEESVNNDISSWTKGRSGEALSLLKKRFSHRPVQEKFVCLNCGFETHADEQAALNIARSWLFLRSQEYKKYQTNKTTGNTDKRAFVETWQSFYRKKLKEVWKPAV

SEQ ID NO: 26525 - protein, 978 aa, synthetic construct
  REGION 1..978: note = engineered CasX variant
QEIKRINKIRRRLVKDSNTKKAGKTGPMKTLLVRVMTPDLRERLENLRKKPENIPQPISNTSRANLNKLLTDYTEMKKAILHVYWEEFQKDPVGLMSRVAQPASKKIDQNKLKPEMDEKGNLTTAGFACSQCGQPLFVYKLEQVSEKGKAYTNYFGRCNVAEHEKLILLAQLKPEKDSDEAVTYSLGKFGQRALDFYSIHVTKESTHPVKPLAQIAGNRYASGPVGKALSDACMGTIASFLSKYQDIIIEHQKVVKGNQKRLESLRELAGKENLEYPSVTLPPQPHTKEGVDAYNEVIARVRMWVNLNLWQKLKLSRDDAKPLLRLKGFPSFPLVERQANEVDWWDMVCNVKKLINEKKEDGKVFWQNLAGYKRQEALRPYLSSEEDRKKGKKFARYQLGDLLLHLEKKHGEDWGKVYDEAWERIDKKVEGLSKHIKLEEERRSEDAQSKAALTDWLRAKASFVIEGLKEADKDEFCRCELKLQKWYGDLRGKPFAIEAENSILDISGFSKQYNCAFIWQKDGVKKLNLYLIINYFKGGKLRFKKIKPEAFEANRFYTVINKKSGEIVPMEVNFNFDDPNLIILPLAFGKRQGREFIWNDLLSLETGSLKLANGRVIEKTLYNRRTRQDEPALFVALTFERREVLDSSNIKPMNLIGVDRGENIPAVIALTDPEGCPLSRFKDSLGNPTHILRIGESYKEKNRTIQAKKEVEQRRAGGYSRKYASKAKNLADDMVRNTARDLLYYAVTQDAMLIFENLSRGFGRQGKRTFMAERQYTRMEDWLTAKLAYEGLPSKTYLSKTLAQYTSKTCSNCGFTITSADYDRVLEKLKKTATGWMTTINGKELKVEGQITYYNRYKRQNVVKDLSVELDRLSEESVNNDISSWTKGRSGEALSLLKKRFSHRPVQEKFVCLNCGFETHADEQAALNIARSWLFLRSQEYKKYQTNKTTGNTDKRAFVETWQSFYRKKLKEVWKPAV

SEQ ID NO: 26526 - protein, 978 aa, synthetic construct
  REGION 1..978: note = engineered CasX variant
QEIKRINKIRRRLVKDSNTKKAGKTGPMKTLLVRVMTPDLRERLENLRKKPENIPQPISNTSRANLNKLLTDYTEMKKAILHVYWEEFQKDPVGLMSRVAQPASKKIDQNKLKPEMDEKGNLTTAGFACSQCGQPLFVYKLEQVSEKGKAYTNYFGRCNVAEHEKLILLAQLKPEKDSDEAVTYSLGKFGQRALDFYSIHVTKESTHPVKPLAQIAGNRYASGPVGKALSDACMGTIASFLSKYQDIIIEHQKVVKGNQKRLESLRELAGKENLEYPSVTLPPQPHTKEGVDAYNEVIARVRMWVNLNLWQKLKLSRDDAKPLLRLKGFPSFPLVERQANEVDWWDMVCNVKKLINEKKEDGKVFWQNLAGYKRQEALRPYLSSEEDRKKGKKFARYQLGDLLLHLEKKHGEDWGKVYDEAWERIDKKVEGLSKHIKLEEERRSEDAQSKAALTDWLRAKASFVIEGLKEADKDEFCRCELKLQKWYGDLRGKPFAIEAENSILDISGFSKQYNCAFIWQKDGVKKLNLYLIINYFKGGKLRFKKIKPEAFEANRFYTVINKKSGEIVPMEVNFNFDDPNLIILPLAFGKRQGREFIWNDLLSLETGSLKLANGRVIEKTLYNRRTRQDEPALFVALTFERREVLDSSNIKPMNLIGVDRGENIPAVIALTDPEGCPLSRFKDSLGNPTHILRIGESYKEKMRTIQAKKEVEQRRAGGYSRKYASKAKNLADDMVRNTARDLLYYAVTQDAMLIFENLSRGFGRQGKRTFMAERQYTRMEDWLTAKLAYEGLPSKTYLSKTLAQYTSKTCSNCGFTITSADYDRVLEKLKKTATGWMTTINGKELKVEGQITYYNRYKRQNVVKDLSVELDRLSEESVNNDISSWTKGRSGEALSLLKKRFSHRPVQEKFVCLNCGFETHADEQAALNIARSWLFLRSQEYKKYQTNKTTGNTDKRAFVETWQSFYRKKLKEVWKPAV

SEQ ID NO: 26527 - protein, 978 aa, synthetic construct
  REGION 1..978: note = engineered CasX variant
QEIKRINKIRRRLVKDSNTKKAGKTGPMKTLLVRVMTPDLRERLENLRKKPENIPQPISNTSRANLNKLLTDYTEMKKAILHVYWEEFQKDPVGLMSRVAQPASKKIDQNKLKPEMDEKGNLTTAGFACSQCGQPLFVYKLEQVSEKGKAYTNYFGRCNVAEHEKLILLAQLKPEKDSDEAVTYSLGKFGQRALDFYSIHVTKESTHPVKPLAQIAGNRYASGPVGKALSDACMGTIASFLSKYQDIIIEHQKVVKGNQKRLESLRELAGKENLEYPSVTLPPQPHTKEGVDAYNEVIARVRMWVNLNLWQKLKLSRDDAKPLLRLKGFPSFPLVERQANEVDWWDMVCNVKKLINEKKEDGKVFWQNLAGYKRQEALRPYLSSEEDRKKGKKFARYQLGDLLLHLEKKHGEDWGKVYDEAWERIDKKVEGLSKHIKLEEERRSEDAQSKAALTDWLRAKASFVIEGLKEADKDEFCRCELKLQKWYGDLRGKPFAIEAENSILDISGFSKQYNCAFIWQKDGVKKLNLYLIINYFKGGKLRFKKIKPEAFEANRFYTVINKKSGEIVPMEVNFNFDDPNLIILPLAFGKRQGREFIWNDLLSLETGSLKLANGRVIEKTLYNRRTRQDEPALFVALTFERREVLDSSNIKPMNLIGVDRGENIPAVIALTDPEGCPLSRFKDSLGNPTHILRIGESYKEKIRTIQAKKEVEQRRAGGYSRKYASKAKNLADDMVRNTARDLLYYAVTQDAMLIFENLSRGFGRQGKRTFMAERQYTRMEDWLTAKLAYEGLPSKTYLSKTLAQYTSKTCSNCGFTITSADYDRVLEKLKKTATGWMTTINGKELKVEGQITYYNRYKRQNVVKDLSVELDRLSEESVNNDISSWTKGRSGEALSLLKKRFSHRPVQEKFVCLNCGFETHADEQAALNIARSWLFLRSQEYKKYQTNKTTGNTDKRAFVETWQSFYRKKLKEVWKPAV

SEQ ID NO: 26528 - protein, 978 aa, synthetic construct
  REGION 1..978: note = engineered CasX variant
QEIKRINKIRRRLVKDSNTKKAGKTGPMKTLLVRVMTPDLRERLENLRKKPENIPQPISNTSRANLNKLLTDYTEMKKAILHVYWEEFQKDPVGLMSRVAQPASKKIDQNKLKPEMDEKGNLTTAGFACSQCGQPLFVYKLEQVSEKGKAYTNYFGRCNVAEHEKLILLAQLKPEKDSDEAVTYSLGKFGQRALDFYSIHVTKESTHPVKPLAQIAGNRYASGPVGKALSDACMGTIASFLSKYQDIIIEHQKVVKGNQKRLESLRELAGKENLEYPSVTLPPQPHTKEGVDAYNEVIARVRMWVNLNLWQKLKLSRDDAKPLLRLKGFPSFPLVERQANEVDWWDMVCNVKKLINEKKEDGKVFWQNLAGYKRQEALRPYLSSEEDRKKGKKFARYQLGDLLLHLEKKHGEDWGKVYDEAWERIDKKVEGLSKHIKLEEERRSEDAQSKAALTDWLRAKASFVIEGLKEADKDEFCRCELKLQKWYGDLRGKPFAIEAENSILDISGFSKQYNCAFIWQKDGVKKLNLYLIINYFKGGKLRFKKIKPEAFEANRFYTVINKKSGEIVPMEVNFNFDDPNLIILPLAFGKRQGREFIWNDLLSLETGSLKLANGRVIEKTLYNRRTRQDEPALFVALTFERREVLDSSNIKPMNLIGVDRGENIPAVIALTDPEGCPLSRFKDSLGNPTHILRIGESYKEKIRTAQAKKEVEQRRAGGYSRKYASKAKNLADDMVRNTARDLLYYAVTQDAMLIFENLSRGFGRQGKRTFMAERQYTRMEDWLTAKLAYEGLPSKTYLSKTLAQYTSKTCSNCGFTITSADYDRVLEKLKKTATGWMTTINGKELKVEGQITYYNRYKRQNVVKDLSVELDRLSEESVNNDISSWTKGRSGEALSLLKKRFSHRPVQEKFVCLNCGFETHADEQAALNIARSWLFLRSQEYKKYQTNKTTGNTDKRAFVETWQSFYRKKLKEVWKPAV

SEQ ID NO: 26529 - protein, 978 aa, synthetic construct
  REGION 1..978: note = engineered CasX variant
QEIKRINKIRRRLVKDSNTKKAGKTGPMKTLLVRVMTPDLRERLENLRKKPENIPQPISNTSRANLNKLLTDYTEMKKAILHVYWEEFQKDPVGLMSRVAQPASKKIDQNKLKPEMDEKGNLTTAGFACSQCGQPLFVYKLEQVSEKGKAYTNYFGRCNVAEHEKLILLAQLKPEKDSDEAVTYSLGKFGQRALDFYSIHVTKESTHPVKPLAQIAGNRYASGPVGKALSDACMGTIASFLSKYQDIIIEHQKVVKGNQKRLESLRELAGKENLEYPSVTLPPQPHTKEGVDAYNEVIARVRMWVNLNLWQKLKLSRDDAKPLLRLKGFPSFPLVERQANEVDWWDMVCNVKKLINEKKEDGKVFWQNLAGYKRQEALRPYLSSEEDRKKGKKFARYQLGDLLLHLEKKHGEDWGKVYDEAWERIDKKVEGLSKHIKLEEERRSEDAQSKAALTDWLRAKASFVIEGLKEADKDEFCRCELKLQKWYGDLRGKPFAIEAENSILDISGFSKQYNCAFIWQKDGVKKLNLYLIINYFKGGKLRFKKIKPEAFEANRFYTVINKKSGEIVPMEVNFNFDDPNLIILPLAFGKRQGREFIWNDLLSLETGSLKLANGRVIEKTLYNRRTRQDEPALFVALTFERREVLDSSNIKPMNLIGVDRGENIPAVIALTDPEGCPLSRFKDSLGNPTHILRIGESYKEKHRTIQAKKEVEQRRAGTYSRKYASKAKNLADDMVRNTARDLLYYAVTQDAMLIFENLSRGFGRQGKRTFMAERQYTRMEDWLTAKLAYEGLPSKTYLSKTLAQYTSKTCSNCGFTITSADYDRVLEKLKKTATGWMTTINGKELKVEGQITYYNRYKRQNVVKDLSVELDRLSEESVNNDISSWTKGRSGEALSLLKKRFSHRPVQEKFVCLNCGFETHADEQAALNIARSWLFLRSQEYKKYQTNKTTGNTDKRAFVETWQSFYRKKLKEVWKPAV

SEQ ID NO: 26530 - protein, 978 aa, synthetic construct
  REGION 1..978: note = engineered CasX variant
QEIKRINKIRRRLVKDSNTKKAGKTGPMKTLLVRVMTPDLRERLENLRKKPENIPQPISNTSRANLNKLLTDYTEMKKAILHVYWEEFQKDPVGLMSRVAQPASKKIDQNKLKPEMDEKGNLTTAGFACSQCGQPLFVYKLEQVSEKGKAYTNYFGRCNVAEHEKLILLAQLKPEKDSDEAVTYSLGKFGQRALDFYSIHVTKESTHPVKPLAQIAGNRYASGPVGKALSDACMGTIASFLSKYQDIIIEHQKVVKGNQKRLESLRELAGKENLEYPSVTLPPQPHTKEGVDAYNEVIARVRMWVNLNLWQKLKLSRDDAKPLLRLKGFPSFPLVERQANEVDWWDMVCNVKKLINEKKEDGKVFWQNLAGYKRQEALRPYLSSEEDRKKGKKFARYQLGDLLLHLEKKHGEDWGKVYDEAWERIDKKVEGLSKHIKLEEERRSEDAQSKAALTDWLRAKASFVIEGLKEADKDEFCRCELKLQKWYGDLRGKPFAIEAENSILDISGFSKQYNCAFIWQKDGVKKLNLYLIINYFKGGKLRFKKIKPEAFEANRFYTVINKKSGEIVPMEVNFNFDDPNLIILPLAFGKRQGREFIWNDLLSLETGSLKLANGRVIEKTLYNRRTRQDEPALFVALTFERREVLDSSNIKPMNLIGVDRGENIPAVIALTDPEGCPLSRFKDSLGNPTHILRIGESYKEKHRTIQAKKEVEQRRAGGYSRKYASKAKNLADDMVRNTARDLLYYAVTQDAMLIFENLSRGFGRQGKRTFMAERQYTRMEDWLTAKLAYEGLPSKTYLSKTLAQYTSKTCSNCGFTITSADYDRVLEKLKKTATGWMTTINGKELKVEGQITYYNRYKRQNVVKDLSVELDRLSEESVNNDISSWTKGRSGEALSLLKKRFSHRPVQEKFVCLNCGFETHADEQAALNIARSWLFLRSQEYKKYQTNKTTGNTDKRAFVETWQSFYRKKLKEVWKPAV

SEQ ID NO: 26531 - protein, 978 aa, synthetic construct
  REGION 1..978: note = engineered CasX variant
QEIKRINKIRRRLVKDSNTKKAGKTGPMKTLLVRVMTPDLRERLENLRKKPENIPQPISNTSRANLNKLLTDYTEMKKAILHVYWEEFQKDPVGLMSRVAQPASKKIDQNKLKPEMDEKGNLTTAGFACSQCGQPLFVYKLEQVSEKGKAYTNYFGRCNVAEHEKLILLAQLKPEKDSDEAVTYSLGKFGQRALDFYSIHVTKESTHPVKPLAQIAGNRYASGPVGKALSDACMGTIASFLSKYQDIIIEHQKVVKGNQKRLESLRELAGKENLEYPSVTLPPQPHTKEGVDAYNEVIARVRMWVNLNLWQKLKLSRDDAKPLLRLKGFPSFPLVERQANEVDWWDMVCNVKKLINEKKEDGKVFWQNLAGYKRQEALRPYLSSEEDRKKGKKFARYQLGDLLLHLEKKHGEDWGKVYDEAWERIDKKVEGLSKHIKLEEERRSEDAQSKAALTDWLRAKASFVIEGLKEADKDEFCRCELKLQKWYGDLRGKPFAIEAENSILDISGFSKQYNCAFIWQKDGVKKLNLYLIINYFKGGKLRFKKIKPEAFEANRFYTVINKKSGEIVPMEVNFNFDDPNLIILPLAFGKRQGREFIWNDLLSLETGSLKLANGRVIEKTLYNRRTRQDEPALFVALTFERREVLDSSNIKPMNLIGVDRGENIPAVIALTDPEGCPLSRFKDSLGNPTHILRIGESYKEKHRTIQAKKEPEQRRAGGYSRKYASKAKNLADDMVRNTARDLLYYAVTQDAMLIFENLSRGFGRQGKRTFMAERQYTRMEDWLTAKLAYEGLPSKTYLSKTLAQYTSKTCSNCGFTITSADYDRVLEKLKKTATGWMTTINGKELKVEGQITYYNRYKRQNVVKDLSVELDRLSEESVNNDISSWTKGRSGEALSLLKKRFSHRPVQEKFVCLNCGFETHADEQAALNIARSWLFLRSQEYKKYQTNKTTGNTDKRAFVETWQSFYRKKLKEVWKPAV

SEQ ID NO: 26532 - protein, 978 aa, synthetic construct
  REGION 1..978: note = engineered CasX variant
QEIKRINKIRRRLVKDSNTKKAGKTGPMKTLLVRVMTPDLRERLENLRKKPENIPQPISNTSRANLNKLLTDYTEMKKAILHVYWEEFQKDPVGLMSRVAQPASKKIDQNKLKPEMDEKGNLTTAGFACSQCGQPLFVYKLEQVSEKGKAYTNYFGRCNVAEHEKLILLAQLKPEKDSDEAVTYSLGKFGQRALDFYSIHVTKESTHPVKPLAQIAGNRYASGPVGKALSDACMGTIASFLSKYQDIIIEHQKVVKGNQKRLESLRELAGKENLEYPSVTLPPQPHTKEGVDAYNEVIARVRMWVNLNLWQKLKLSRDDAKPLLRLKGFPSFPLVERQANEVDWWDMVCNVKKLINEKKEDGKVFWQNLAGYKRQEALRPYLSSEEDRKKGKKFARYQLGDLLLHLEKKHGEDWGKVYDEAWERIDKKVEGLSKHIKLEEERRSEDAQSKAALTDWLRAKASFVIEGLKEADKDEFCRCELKLQKWYGDLRGKPFAIEAENSILDISGFSKQYNCAFIWQKDGVKKLNLYLIINYFKGGKLRFKKIKPEAFEANRFYTVINKKSGEIVPMEVNFNFDDPNLIILPLAFGKRQGREFIWNDLLSLETGSLKLANGRVIEKTLYNRRTRQDEPALFVALTFERREVLDSSNIKPMNLIGVDRGENIPAVIALTDPEGCPLSRFKDSLGNPTHILRIGESYKEKGRTIQAKKEVEQRRAGGYSRKYASKAKNLADDMVRNTARDLLYYAVTQDAMLIFENLSRGFGRQGKRTFMAERQYTRMEDWLTAKLAYEGLPSKTYLSKTLAQYTSKTCSNCGFTITSADYDRVLEKLKKTATGWMTTINGKELKVEGQITYYNRYKRQNVVKDLSVELDRLSEESVNNDISSWTKGRSGEALSLLKKRFSHRPVQEKFVCLNCGFETHADEQAALNIARSWLFLRSQEYKKYQTNKTTGNTDKRAFVETWQSFYRKKLKEVWKPAV

SEQ ID NO: 26533 - protein, 978 aa, synthetic construct
  REGION 1..978: note = engineered CasX variant
QEIKRINKIRRRLVKDSNTKKAGKTGPMKTLLVRVMTPDLRERLENLRKKPENIPQPISNTSRANLNKLLTDYTEMKKAILHVYWEEFQKDPVGLMSRVAQPASKKIDQNKLKPEMDEKGNLTTAGFACSQCGQPLFVYKLEQVSEKGKAYTNYFGRCNVAEHEKLILLAQLKPEKDSDEAVTYSLGKFGQRALDFYSIHVTKESTHPVKPLAQIAGNRYASGPVGKALSDACMGTIASFLSKYQDIIIEHQKVVKGNQKRLESLRELAGKENLEYPSVTLPPQPHTKEGVDAYNEVIARVRMWVNLNLWQKLKLSRDDAKPLLRLKGFPSFPLVERQANEVDWWDMVCNVKKLINEKKEDGKVFWQNLAGYKRQEALRPYLSSEEDRKKGKKFARYQLGDLLLHLEKKHGEDWGKVYDEAWERIDKKVEGLSKHIKLEEERRSEDAQSKAALTDWLRAKASFVIEGLKEADKDEFCRCELKLQKWYGDLRGKPFAIEAENSILDISGFSKQYNCAFIWQKDGVKKLNLYLIINYFKGGKLRFKKIKPEAFEANRFYTVINKKSGEIVPMEVNFNFDDPNLIILPLAFGKRQGREFIWNDLLSLETGSLKLANGRVIEKTLYNRRTRQDEPALFVALTFERREVLDSSNIKPMNLIGVDRGENIPAVIALTDPEGCPLSRFKDSLGNPTHILRIGESYKEKFRTIQAKKEVEQRRAGGYSRKYASKAKNLADDMVRNTARDLLYYAVTQDAMLIFENLSRGFGRQGKRTFMAERQYTRMEDWLTAKLAYEGLPSKTYLSKTLAQYTSKTCSNCGFTITSADYDRVLEKLKKTATGWMTTINGKELKVEGQITYYNRYKRQNVVKDLSVELDRLSEESVNNDISSWTKGRSGEALSLLKKRFSHRPVQEKFVCLNCGFETHADEQAALNIARSWLFLRSQEYKKYQTNKTTGNTDKRAFVETWQSFYRKKLKEVWKPAV

SEQ ID NO: 26534 - protein, 978 aa, synthetic construct
  REGION 1..978: note = engineered CasX variant
QEIKRINKIRRRLVKDSNTKKAGKTGPMKTLLVRVMTPDLRERLENLRKKPENIPQPISNTSRANLNKLLTDYTEMKKAILHVYWEEFQKDPVGLMSRVAQPASKKIDQNKLKPEMDEKGNLTTAGFACSQCGQPLFVYKLEQVSEKGKAYTNYFGRCNVAEHEKLILLAQLKPEKDSDEAVTYSLGKFGQRALDFYSIHVTKESTHPVKPLAQIAGNRYASGPVGKALSDACMGTIASFLSKYQDIIIEHQKVVKGNQKRLESLRELAGKENLEYPSVTLPPQPHTKEGVDAYNEVIARVRMWVNLNLWQKLKLSRDDAKPLLRLKGFPSFPLVERQANEVDWWDMVCNVKKLINEKKEDGKVFWQNLAGYKRQEALRPYLSSEEDRKKGKKFARYQLGDLLLHLEKKHGEDWGKVYDEAWERIDKKVEGLSKHIKLEEERRSEDAQSKAALTDWLRAKASFVIEGLKEADKDEFCRCELKLQKWYGDLRGKPFAIEAENSILDISGFSKQYNCAFIWQKDGVKKLNLYLIINYFKGGKLRFKKIKPEAFEANRFYTVINKKSGEIVPMEVNFNFDDPNLIILPLAFGKRQGREFIWNDLLSLETGSLKLANGRVIEKTLYNRRTRQDEPALFVALTFERREVLDSSNIKPMNLIGVDRGENIPAVIALTDPEGCPLSRFKDSLGNPTHILRIGESYKEKCRTIQAKKEVEQRRAGGYSRKYASKAKNLADDMVRNTARDLLYYAVTQDAMLIFENLSRGFGRQGKRTFMAERQYTRMEDWLTAKLAYEGLPSKTYLSKTLAQYTSKTCSNCGFTITSADYDRVLEKLKKTATGWMTTINGKELKVEGQITYYNRYKRQNVVKDLSVELDRLSEESVNNDISSWTKGRSGEALSLLKKRFSHRPVQEKFVCLNCGFETHADEQAALNIARSWLFLRSQEYKKYQTNKTTGNTDKRAFVETWQSFYRKKLKEVWKPAV

SEQ ID NO: 26535 - protein, 978 aa, synthetic construct
  REGION 1..978: note = engineered CasX variant
QEIKRINKIRRRLVKDSNTKKAGKTGPMKTLLVRVMTPDLRERLENLRKKPENIPQPISNTSRANLNKLLTDYTEMKKAILHVYWEEFQKDPVGLMSRVAQPASKKIDQNKLKPEMDEKGNLTTAGFACSQCGQPLFVYKLEQVSEKGKAYTNYFGRCNVAEHEKLILLAQLKPEKDSDEAVTYSLGKFGQRALDFYSIHVTKESTHPVKPLAQIAGNRYASGPVGKALSDACMGTIASFLSKYQDIIIEHQKVVKGNQKRLESLRELAGKENLEYPSVTLPPQPHTKEGVDAYNEVIARVRMWVNLNLWQKLKLSRDDAKPLLRLKGFPSFPLVERQANEVDWWDMVCNVKKLINEKKEDGKVFWQNLAGYKRQEALRPYLSSEEDRKKGKKFARYQLGDLLLHLEKKHGEDWGKVYDEAWERIDKKVEGLSKHIKLEEERRSEDAQSKAALTDWLRAKASFVIEGLKEADKDEFCRCELKLQKWYGDLRGKPFAIEAENSILDISGFSKQYNCAFIWQKDGVKKLNLYLIINYFKGGKLRFKKIKPEAFEANRFYTVINKKSGEIVPMEVNFNFDDPNLIILPLAFGKRQGREFIWNDLLSLETGSLKLANGRVIEKTLYNRRTRQDEPALFVALTFERREVLDSSNIKPMNLIGVDRGENIPAVIALTDPEGCPLSRFKDSLGNPTHILRIGESYKEKARTIQAKKEVEQRRAGGYSRKYASKAKNLADDMVRNTARDLLYYAVTQDAMLIFENLSRGFGRQGKRTFMAERQYTRMEDWLTAKLAYEGLPSKTYLSKTLAQYTSKTCSNCGFTITSADYDRVLEKLKKTATGWMTTINGKELKVEGQITYYNRYKRQNVVKDLSVELDRLSEESVNNDISSWTKGRSGEALSLLKKRFSHRPVQEKFVCLNCGFETHADEQAALNIARSWLFLRSQEYKKYQTNKTTGNTDKRAFVETWQSFYRKKLKEVWKPAV

SEQ ID NO: 26536 - protein, 978 aa, synthetic construct
  REGION 1..978: note = engineered CasX variant
QEIKRINKIRRRLVKDSNTKKAGKTGPMKTLLVRVMTPDLRERLENLRKKPENIPQPISNTSRANLNKLLTDYTEMKKAILHVYWEEFQKDPVGLMSRVAQPASKKIDQNKLKPEMDEKGNLTTAGFACSQCGQPLFVYKLEQVSEKGKAYTNYFGRCNVAEHEKLILLAQLKPEKDSDEAVTYSLGKFGQRALDFYSIHVTKESTHPVKPLAQIAGNRYASGPVGKALSDACMGTIASFLSKYQDIIIEHQKVVKGNQKRLESLRELAGKENLEYPSVTLPPQPHTKEGVDAYNEVIARVRMWVNLNLWQKLKLSRDDAKPLLRLKGFPSFPLVERQANEVDWWDMVCNVKKLINEKKEDGKVFWQNLAGYKRQEALRPYLSSEEDRKKGKKFARYQLGDLLLHLEKKHGEDWGKVYDEAWERIDKKVEGLSKHIKLEEERRSEDAQSKAALTDWLRAKASFVIEGLKEADKDEFCRCELKLQKWYGDLRGKPFAIEAENSILDISGFSKQYNCAFIWQKDGVKKLNLYLIINYFKGGKLRFKKIKPEAFEANRFYTVINKKSGEIVPMEVNFNFDDPNLIILPLAFGKRQGREFIWNDLLSLETGSLKLANGRVIEKTLYNRRTRQDEPALFVALTFERREVLDSSNIKPMNLIGVDRGENIPAVIALTDPEGCPLSRFKDSLGNPTHILRIGESYKEIQRTIQWKKEVEQRRAGGYSRKYASKAKNLADDMVRNTARDLLYYAVTQDAMLIFENLSRGFGRQGKRTFMAERQYTRMEDWLTAKLAYEGLPSKTYLSKTLAQYTSKTCSNCGFTITSADYDRVLEKLKKTATGWMTTINGKELKVEGQITYYNRYKRQNVVKDLSVELDRLSEESVNNDISSWTKGRSGEALSLLKKRFSHRPVQEKFVCLNCGFETHADEQAALNIARSWLFLRSQEYKKYQTNKTTGNTDKRAFVETWQSFYRKKLKEVWKPAV

SEQ ID NO: 26537 - protein, 978 aa, synthetic construct
  REGION 1..978: note = engineered CasX variant
QEIKRINKIRRRLVKDSNTKKAGKTGPMKTLLVRVMTPDLRERLENLRKKPENIPQPISNTSRANLNKLLTDYTEMKKAILHVYWEEFQKDPVGLMSRVAQPASKKIDQNKLKPEMDEKGNLTTAGFACSQCGQPLFVYKLEQVSEKGKAYTNYFGRCNVAEHEKLILLAQLKPEKDSDEAVTYSLGKFGQRALDFYSIHVTKESTHPVKPLAQIAGNRYASGPVGKALSDACMGTIASFLSKYQDIIIEHQKVVKGNQKRLESLRELAGKENLEYPSVTLPPQPHTKEGVDAYNEVIARVRMWVNLNLWQKLKLSRDDAKPLLRLKGFPSFPLVERQANEVDWWDMVCNVKKLINEKKEDGKVFWQNLAGYKRQEALRPYLSSEEDRKKGKKFARYQLGDLLLHLEKKHGEDWGKVYDEAWERIDKKVEGLSKHIKLEEERRSEDAQSKAALTDWLRAKASFVIEGLKEADKDEFCRCELKLQKWYGDLRGKPFAIEAENSILDISGFSKQYNCAFIWQKDGVKKLNLYLIINYFKGGKLRFKKIKPEAFEANRFYTVINKKSGEIVPMEVNFNFDDPNLIILPLAFGKRQGREFIWNDLLSLETGSLKLANGRVIEKTLYNRRTRQDEPALFVALTFERREVLDSSNIKPMNLIGVDRGENIPAVIALTDPEGCPLSRFKDSLGNPTHILRIGESYKEIQRTIQAKKEVEQRRAGGYSRKYASKAKNLADDMVRNTARDLLYYAVTQDAMLIFENLSRGFGRQGKRTFMAERQYTRMEDWLTAKLAYEGLPSKTYLSKTLAQYTSKTCSNCGFTITSADYDRVLEKLKKTATGWMTTINGKELKVEGQITYYNRYKRQNVVKDLSVELDRLSEESVNNDISSWTKGRSGEALSLLKKRFSHRPVQEKFVCLNCGFETHADEQAALNIARSWLFLRSQEYKKYQTNKTTGNTDKRAFVETWQSFYRKKLKEVWKPAV

SEQ ID NO: 26538 - protein, 978 aa, synthetic construct
  REGION 1..978: note = engineered CasX variant
QEIKRINKIRRRLVKDSNTKKAGKTGPMKTLLVRVMTPDLRERLENLRKKPENIPQPISNTSRANLNKLLTDYTEMKKAILHVYWEEFQKDPVGLMSRVAQPASKKIDQNKLKPEMDEKGNLTTAGFACSQCGQPLFVYKLEQVSEKGKAYTNYFGRCNVAEHEKLILLAQLKPEKDSDEAVTYSLGKFGQRALDFYSIHVTKESTHPVKPLAQIAGNRYASGPVGKALSDACMGTIASFLSKYQDIIIEHQKVVKGNQKRLESLRELAGKENLEYPSVTLPPQPHTKEGVDAYNEVIARVRMWVNLNLWQKLKLSRDDAKPLLRLKGFPSFPLVERQANEVDWWDMVCNVKKLINEKKEDGKVFWQNLAGYKRQEALRPYLSSEEDRKKGKKFARYQLGDLLLHLEKKHGEDWGKVYDEAWERIDKKVEGLSKHIKLEEERRSEDAQSKAALTDWLRAKASFVIEGLKEADKDEFCRCELKLQKWYGDLRGKPFAIEAENSILDISGFSKQYNCAFIWQKDGVKKLNLYLIINYFKGGKLRFKKIKPEAFEANRFYTVINKKSGEIVPMEVNFNFDDPNLIILPLAFGKRQGREFIWNDLLSLETGSLKLANGRVIEKTLYNRRTRQDEPALFVALTFERREVLDSSNIKPMNLIGVDRGENIPAVIALTDPEGCPLSRFKDSLGNPTHILRIGESYKEHQRTIQAKKEVEQRRAYGYSRKYASKAKNLADDMVRNTARDLLYYAVTQDAMLIFENLSRGFGRQGKRTFMAERQYTRMEDWLTAKLAYEGLPSKTYLSKTLAQYTSKTCSNCGFTITSADYDRVLEKLKKTATGWMTTINGKELKVEGQITYYNRYKRQNVVKDLSVELDRLSEESVNNDISSWTKGRSGEALSLLKKRFSHRPVQEKFVCLNCGFETHADEQAALNIARSWLFLRSQEYKKYQTNKTTGNTDKRAFVETWQSFYRKKLKEVWKPAV

SEQ ID NO: 26539 - protein, 978 aa, synthetic construct
  REGION 1..978: note = engineered CasX variant
QEIKRINKIRRRLVKDSNTKKAGKTGPMKTLLVRVMTPDLRERLENLRKKPENIPQPISNTSRANLNKLLTDYTEMKKAILHVYWEEFQKDPVGLMSRVAQPASKKIDQNKLKPEMDEKGNLTTAGFACSQCGQPLFVYKLEQVSEKGKAYTNYFGRCNVAEHEKLILLAQLKPEKDSDEAVTYSLGKFGQRALDFYSIHVTKESTHPVKPLAQIAGNRYASGPVGKALSDACMGTIASFLSKYQDIIIEHQKVVKGNQKRLESLRELAGKENLEYPSVTLPPQPHTKEGVDAYNEVIARVRMWVNLNLWQKLKLSRDDAKPLLRLKGFPSFPLVERQANEVDWWDMVCNVKKLINEKKEDGKVFWQNLAGYKRQEALRPYLSSEEDRKKGKKFARYQLGDLLLHLEKKHGEDWGKVYDEAWERIDKKVEGLSKHIKLEEERRSEDAQSKAALTDWLRAKASFVIEGLKEADKDEFCRCELKLQKWYGDLRGKPFAIEAENSILDISGFSKQYNCAFIWQKDGVKKLNLYLIINYFKGGKLRFKKIKPEAFEANRFYTVINKKSGEIVPMEVNFNFDDPNLIILPLAFGKRQGREFIWNDLLSLETGSLKLANGRVIEKTLYNRRTRQDEPALFVALTFERREVLDSSNIKPMNLIGVDRGENIPAVIALTDPEGCPLSRFKDSLGNPTHILRIGESYKEHQRTIQAKKEVEQRRAGGYSRKYASKAKNLADDMVRNTARDLLYYAVTQDAMLIFENLSRGFGRQGKRTFMAERQYTRMEDWLTAKLAYEGLPSKTYLSKTLAQYTSKTCSNCGFTITSADYDRVLEKLKKTATGWMTTINGKELKVEGQITYYNRYKRQNVVKDLSVELDRLSEESVNNDISSWTKGRSGEALSLLKKRFSHRPVQEKFVCLNCGFETHADEQAALNIARSWLFLRSQEYKKYQTNKTTGNTDKRAFVETWQSFYRKKLKEVWKPAV

SEQ ID NO: 26540 - protein, 978 aa, synthetic construct
  REGION 1..978: note = engineered CasX variant
QEIKRINKIRRRLVKDSNTKKAGKTGPMKTLLVRVMTPDLRERLENLRKKPENIPQPISNTSRANLNKLLTDYTEMKKAILHVYWEEFQKDPVGLMSRVAQPASKKIDQNKLKPEMDEKGNLTTAGFACSQCGQPLFVYKLEQVSEKGKAYTNYFGRCNVAEHEKLILLAQLKPEKDSDEAVTYSLGKFGQRALDFYSIHVTKESTHPVKPLAQIAGNRYASGPVGKALSDACMGTIASFLSKYQDIIIEHQKVVKGNQKRLESLRELAGKENLEYPSVTLPPQPHTKEGVDAYNEVIARVRMWVNLNLWQKLKLSRDDAKPLLRLKGFPSFPLVERQANEVDWWDMVCNVKKLINEKKEDGKVFWQNLAGYKRQEALRPYLSSEEDRKKGKKFARYQLGDLLLHLEKKHGEDWGKVYDEAWERIDKKVEGLSKHIKLEEERRSEDAQSKAALTDWLRAKASFVIEGLKEADKDEFCRCELKLQKWYGDLRGKPFAIEAENSILDISGFSKQYNCAFIWQKDGVKKLNLYLIINYFKGGKLRFKKIKPEAFEANRFYTVINKKSGEIVPMEVNFNFDDPNLIILPLAFGKRQGREFIWNDLLSLETGSLKLANGRVIEKTLYNRRTRQDEPALFVALTFERREVLDSSNIKPMNLIGVDRGENIPAVIALTDPEGCPLSRFKDSLGNPTHILRIGESYKEHQRTIQAKKEVCQRRAGGYSRKYASKAKNLADDMVRNTARDLLYYAVTQDAMLIFENLSRGFGRQGKRTFMAERQYTRMEDWLTAKLAYEGLPSKTYLSKTLAQYTSKTCSNCGFTITSADYDRVLEKLKKTATGWMTTINGKELKVEGQITYYNRYKRQNVVKDLSVELDRLSEESVNNDISSWTKGRSGEALSLLKKRFSHRPVQEKFVCLNCGFETHADEQAALNIARSWLFLRSQEYKKYQTNKTTGNTDKRAFVETWQSFYRKKLKEVWKPAV

SEQ ID NO: 26541 - protein, 978 aa, synthetic construct
  REGION 1..978: note = engineered CasX variant
QEIKRINKIRRRLVKDSNTKKAGKTGPMKTLLVRVMTPDLRERLENLRKKPENIPQPISNTSRANLNKLLTDYTEMKKAILHVYWEEFQKDPVGLMSRVAQPASKKIDQNKLKPEMDEKGNLTTAGFACSQCGQPLFVYKLEQVSEKGKAYTNYFGRCNVAEHEKLILLAQLKPEKDSDEAVTYSLGKFGQRALDFYSIHVTKESTHPVKPLAQIAGNRYASGPVGKALSDACMGTIASFLSKYQDIIIEHQKVVKGNQKRLESLRELAGKENLEYPSVTLPPQPHTKEGVDAYNEVIARVRMWVNLNLWQKLKLSRDDAKPLLRLKGFPSFPLVERQANEVDWWDMVCNVKKLINEKKEDGKVFWQNLAGYKRQEALRPYLSSEEDRKKGKKFARYQLGDLLLHLEKKHGEDWGKVYDEAWERIDKKVEGLSKHIKLEEERRSEDAQSKAALTDWLRAKASFVIEGLKEADKDEFCRCELKLQKWYGDLRGKPFAIEAENSILDISGFSKQYNCAFIWQKDGVKKLNLYLIINYFKGGKLRFKKIKPEAFEANRFYTVINKKSGEIVPMEVNFNFDDPNLIILPLAFGKRQGREFIWNDLLSLETGSLKLANGRVIEKTLYNRRTRQDEPALFVALTFERREVLDSSNIKPMNLIGVDRGENIPAVIALTDPEGCPLSRFKDSLGNPTHILRIGESYKEGQRTIQAKKEVEQRRAGGYSRKYASKAKNLADDMVRNTARDLLYYAVTQDAMLIFENLSRGFGRQGKRTFMAERQYTRMEDWLTAKLAYEGLPSKTYLSKTLAQYTSKTCSNCGFTITSADYDRVLEKLKKTATGWMTTINGKELKVEGQITYYNRYKRQNVVKDLSVELDRLSEESVNNDISSWTKGRSGEALSLLKKRFSHRPVQEKFVCLNCGFETHADEQAALNIARSWLFLRSQEYKKYQTNKTTGNTDKRAFVETWQSFYRKKLKEVWKPAV

SEQ ID NO: 26542 - protein, 978 aa, synthetic construct
  REGION 1..978: note = engineered CasX variant
QEIKRINKIRRRLVKDSNTKKAGKTGPMKTLLVRVMTPDLRERLENLRKKPENIPQPISNTSRANLNKLLTDYTEMKKAILHVYWEEFQKDPVGLMSRVAQPASKKIDQNKLKPEMDEKGNLTTAGFACSQCGQPLFVYKLEQVSEKGKAYTNYFGRCNVAEHEKLILLAQLKPEKDSDEAVTYSLGKFGQRALDFYSIHVTKESTHPVKPLAQIAGNRYASGPVGKALSDACMGTIASFLSKYQDIIIEHQKVVKGNQKRLESLRELAGKENLEYPSVTLPPQPHTKEGVDAYNEVIARVRMWVNLNLWQKLKLSRDDAKPLLRLKGFPSFPLVERQANEVDWWDMVCNVKKLINEKKEDGKVFWQNLAGYKRQEALRPYLSSEEDRKKGKKFARYQLGDLLLHLEKKHGEDWGKVYDEAWERIDKKVEGLSKHIKLEEERRSEDAQSKAALTDWLRAKASFVIEGLKEADKDEFCRCELKLQKWYGDLRGKPFAIEAENSILDISGFSKQYNCAFIWQKDGVKKLNLYLIINYFKGGKLRFKKIKPEAFEANRFYTVINKKSGEIVPMEVNFNFDDPNLIILPLAFGKRQGREFIWNDLLSLETGSLKLANGRVIEKTLYNRRTRQDEPALFVALTFERREVLDSSNIKPMNLIGVDRGENIPAVIALTDPEGCPLSRFKDSLGNPTHILRIGESYKEGQRTIHAKKEVEQRRAGGYSRKYASKAKNLADDMVRNTARDLLYYAVTQDAMLIFENLSRGFGRQGKRTFMAERQYTRMEDWLTAKLAYEGLPSKTYLSKTLAQYTSKTCSNCGFTITSADYDRVLEKLKKTATGWMTTINGKELKVEGQITYYNRYKRQNVVKDLSVELDRLSEESVNNDISSWTKGRSGEALSLLKKRFSHRPVQEKFVCLNCGFETHADEQAALNIARSWLFLRSQEYKKYQTNKTTGNTDKRAFVETWQSFYRKKLKEVWKPAV

SEQ ID NO: 26543 - protein, 978 aa, synthetic construct
  REGION 1..978: note = engineered CasX variant
QEIKRINKIRRRLVKDSNTKKAGKTGPMKTLLVRVMTPDLRERLENLRKKPENIPQPISNTSRANLNKLLTDYTEMKKAILHVYWEEFQKDPVGLMSRVAQPASKKIDQNKLKPEMDEKGNLTTAGFACSQCGQPLFVYKLEQVSEKGKAYTNYFGRCNVAEHEKLILLAQLKPEKDSDEAVTYSLGKFGQRALDFYSIHVTKESTHPVKPLAQIAGNRYASGPVGKALSDACMGTIASFLSKYQDIIIEHQKVVKGNQKRLESLRELAGKENLEYPSVTLPPQPHTKEGVDAYNEVIARVRMWVNLNLWQKLKLSRDDAKPLLRLKGFPSFPLVERQANEVDWWDMVCNVKKLINEKKEDGKVFWQNLAGYKRQEALRPYLSSEEDRKKGKKFARYQLGDLLLHLEKKHGEDWGKVYDEAWERIDKKVEGLSKHIKLEEERRSEDAQSKAALTDWLRAKASFVIEGLKEADKDEFCRCELKLQKWYGDLRGKPFAIEAENSILDISGFSKQYNCAFIWQKDGVKKLNLYLIINYFKGGKLRFKKIKPEAFEANRFYTVINKKSGEIVPMEVNFNFDDPNLIILPLAFGKRQGREFIWNDLLSLETGSLKLANGRVIEKTLYNRRTRQDEPALFVALTFERREVLDSSNIKPMNLIGVDRGENIPAVIALTDPEGCPLSRFKDSLGNPTHILRIGESYKEFQRTIQAKKEVEQSRAGGYSRKYASKAKNLADDMVRNTARDLLYYAVTQDAMLIFENLSRGFGRQGKRTFMAERQYTRMEDWLTAKLAYEGLPSKTYLSKTLAQYTSKTCSNCGFTITSADYDRVLEKLKKTATGWMTTINGKELKVEGQITYYNRYKRQNVVKDLSVELDRLSEESVNNDISSWTKGRSGEALSLLKKRFSHRPVQEKFVCLNCGFETHADEQAALNIARSWLFLRSQEYKKYQTNKTTGNTDKRAFVETWQSFYRKKLKEVWKPAV

SEQ ID NO: 26544 - protein, 978 aa, synthetic construct
  REGION 1..978: note = engineered CasX variant
QEIKRINKIRRRLVKDSNTKKAGKTGPMKTLLVRVMTPDLRERLENLRKKPENIPQPISNTSRANLNKLLTDYTEMKKAILHVYWEEFQKDPVGLMSRVAQPASKKIDQNKLKPEMDEKGNLTTAGFACSQCGQPLFVYKLEQVSEKGKAYTNYFGRCNVAEHEKLILLAQLKPEKDSDEAVTYSLGKFGQRALDFYSIHVTKESTHPVKPLAQIAGNRYASGPVGKALSDACMGTIASFLSKYQDIIIEHQKVVKGNQKRLESLRELAGKENLEYPSVTLPPQPHTKEGVDAYNEVIARVRMWVNLNLWQKLKLSRDDAKPLLRLKGFPSFPLVERQANEVDWWDMVCNVKKLINEKKEDGKVFWQNLAGYKRQEALRPYLSSEEDRKKGKKFARYQLGDLLLHLEKKHGEDWGKVYDEAWERIDKKVEGLSKHIKLEEERRSEDAQSKAALTDWLRAKASFVIEGLKEADKDEFCRCELKLQKWYGDLRGKPFAIEAENSILDISGFSKQYNCAFIWQKDGVKKLNLYLIINYFKGGKLRFKKIKPEAFEANRFYTVINKKSGEIVPMEVNFNFDDPNLIILPLAFGKRQGREFIWNDLLSLETGSLKLANGRVIEKTLYNRRTRQDEPALFVALTFERREVLDSSNIKPMNLIGVDRGENIPAVIALTDPEGCPLSRFKDSLGNPTHILRIGESYKEFQRTIQAKKEVEQRRAGGYSRKYASKAKNLADDMVRNTARDLLYYAVTQDAMLIFENLSRGFGRQGKRTFMAERQYTRMEDWLTAKLAYEGLPSKTYLSKTLAQYTSKTCSNCGFTITSADYDRVLEKLKKTATGWMTTINGKELKVEGQITYYNRYKRQNVVKDLSVELDRLSEESVNNDISSWTKGRSGEALSLLKKRFSHRPVQEKFVCLNCGFETHADEQAALNIARSWLFLRSQEYKKYQTNKTTGNTDKRAFVETWQSFYRKKLKEVWKPAV

SEQ ID NO: 26545 - protein, 978 aa, synthetic construct
  REGION 1..978: note = engineered CasX variant
QEIKRINKIRRRLVKDSNTKKAGKTGPMKTLLVRVMTPDLRERLENLRKKPENIPQPISNTSRANLNKLLTDYTEMKKAILHVYWEEFQKDPVGLMSRVAQPASKKIDQNKLKPEMDEKGNLTTAGFACSQCGQPLFVYKLEQVSEKGKAYTNYFGRCNVAEHEKLILLAQLKPEKDSDEAVTYSLGKFGQRALDFYSIHVTKESTHPVKPLAQIAGNRYASGPVGKALSDACMGTIASFLSKYQDIIIEHQKVVKGNQKRLESLRELAGKENLEYPSVTLPPQPHTKEGVDAYNEVIARVRMWVNLNLWQKLKLSRDDAKPLLRLKGFPSFPLVERQANEVDWWDMVCNVKKLINEKKEDGKVFWQNLAGYKRQEALRPYLSSEEDRKKGKKFARYQLGDLLLHLEKKHGEDWGKVYDEAWERIDKKVEGLSKHIKLEEERRSEDAQSKAALTDWLRAKASFVIEGLKEADKDEFCRCELKLQKWYGDLRGKPFAIEAENSILDISGFSKQYNCAFIWQKDGVKKLNLYLIINYFKGGKLRFKKIKPEAFEANRFYTVINKKSGEIVPMEVNFNFDDPNLIILPLAFGKRQGREFIWNDLLSLETGSLKLANGRVIEKTLYNRRTRQDEPALFVALTFERREVLDSSNIKPMNLIGVDRGENIPAVIALTDPEGCPLSRFKDSLGNPTHILRIGESYKEDQRTIQAKKEVEQRTAGGYSRKYASKAKNLADDMVRNTARDLLYYAVTQDAMLIFENLSRGFGRQGKRTFMAERQYTRMEDWLTAKLAYEGLPSKTYLSKTLAQYTSKTCSNCGFTITSADYDRVLEKLKKTATGWMTTINGKELKVEGQITYYNRYKRQNVVKDLSVELDRLSEESVNNDISSWTKGRSGEALSLLKKRFSHRPVQEKFVCLNCGFETHADEQAALNIARSWLFLRSQEYKKYQTNKTTGNTDKRAFVETWQSFYRKKLKEVWKPAV

SEQ ID NO: 26546 - protein, 978 aa, synthetic construct
  REGION 1..978: note = engineered CasX variant
QEIKRINKIRRRLVKDSNTKKAGKTGPMKTLLVRVMTPDLRERLENLRKKPENIPQPISNTSRANLNKLLTDYTEMKKAILHVYWEEFQKDPVGLMSRVAQPASKKIDQNKLKPEMDEKGNLTTAGFACSQCGQPLFVYKLEQVSEKGKAYTNYFGRCNVAEHEKLILLAQLKPEKDSDEAVTYSLGKFGQRALDFYSIHVTKESTHPVKPLAQIAGNRYASGPVGKALSDACMGTIASFLSKYQDIIIEHQKVVKGNQKRLESLRELAGKENLEYPSVTLPPQPHTKEGVDAYNEVIARVRMWVNLNLWQKLKLSRDDAKPLLRLKGFPSFPLVERQANEVDWWDMVCNVKKLINEKKEDGKVFWQNLAGYKRQEALRPYLSSEEDRKKGKKFARYQLGDLLLHLEKKHGEDWGKVYDEAWERIDKKVEGLSKHIKLEEERRSEDAQSKAALTDWLRAKASFVIEGLKEADKDEFCRCELKLQKWYGDLRGKPFAIEAENSILDISGFSKQYNCAFIWQKDGVKKLNLYLIINYFKGGKLRFKKIKPEAFEANRFYTVINKKSGEIVPMEVNFNFDDPNLIILPLAFGKRQGREFIWNDLLSLETGSLKLANGRVIEKTLYNRRTRQDEPALFVALTFERREVLDSSNIKPMNLIGVDRGENIPAVIALTDPEGCPLSRFKDSLGNPTHILRIGESYKEDQRTIQAKKEVEQRRAGGYSRKYASKAKNLADDMVRNTARDLLYYAVTQDAMLIFENLSRGFGRQGKRTFMAERQYTRMEDWLTAKLAYEGLPSKTYLSKTLAQYTSKTCSNCGFTITSADYDRVLEKLKKTATGWMTTINGKELKVEGQITYYNRYKRQNVVKDLSVELDRLSEESVNNDISSWTKGRSGEALSLLKKRFSHRPVQEKFVCLNCGFETHADEQAALNIARSWLFLRSQEYKKYQTNKTTGNTDKRAFVETWQSFYRKKLKEVWKPAV

SEQ ID NO: 26547 - protein, 978 aa, synthetic construct
  REGION 1..978: note = engineered CasX variant
QEIKRINKIRRRLVKDSNTKKAGKTGPMKTLLVRVMTPDLRERLENLRKKPENIPQPISNTSRANLNKLLTDYTEMKKAILHVYWEEFQKDPVGLMSRVAQPASKKIDQNKLKPEMDEKGNLTTAGFACSQCGQPLFVYKLEQVSEKGKAYTNYFGRCNVAEHEKLILLAQLKPEKDSDEAVTYSLGKFGQRALDFYSIHVTKESTHPVKPLAQIAGNRYASGPVGKALSDACMGTIASFLSKYQDIIIEHQKVVKGNQKRLESLRELAGKENLEYPSVTLPPQPHTKEGVDAYNEVIARVRMWVNLNLWQKLKLSRDDAKPLLRLKGFPSFPLVERQANEVDWWDMVCNVKKLINEKKEDGKVFWQNLAGYKRQEALRPYLSSEEDRKKGKKFARYQLGDLLLHLEKKHGEDWGKVYDEAWERIDKKVEGLSKHIKLEEERRSEDAQSKAALTDWLRAKASFVIEGLKEADKDEFCRCELKLQKWYGDLRGKPFAIEAENSILDISGFSKQYNCAFIWQKDGVKKLNLYLIINYFKGGKLRFKKIKPEAFEANRFYTVINKKSGEIVPMEVNFNFDDPNLIILPLAFGKRQGREFIWNDLLSLETGSLKLANGRVIEKTLYNRRTRQDEPALFVALTFERREVLDSSNIKPMNLIGVDRGENIPAVIALTDPEGCPLSRFKDSLGNPTHILRIGESYKECQRTIQAKKEVEQRRAGGYSRKYASKAKNLADDMVRNTARDLLYYAVTQDAMLIFENLSRGFGRQGKRTFMAERQYTRMEDWLTAKLAYEGLPSKTYLSKTLAQYTSKTCSNCGFTITSADYDRVLEKLKKTATGWMTTINGKELKVEGQITYYNRYKRQNVVKDLSVELDRLSEESVNNDISSWTKGRSGEALSLLKKRFSHRPVQEKFVCLNCGFETHADEQAALNIARSWLFLRSQEYKKYQTNKTTGNTDKRAFVETWQSFYRKKLKEVWKPAV

SEQ ID NO: 26548 - protein, 978 aa, synthetic construct
  REGION 1..978: note = engineered CasX variant
QEIKRINKIRRRLVKDSNTKKAGKTGPMKTLLVRVMTPDLRERLENLRKKPENIPQPISNTSRANLNKLLTDYTEMKKAILHVYWEEFQKDPVGLMSRVAQPASKKIDQNKLKPEMDEKGNLTTAGFACSQCGQPLFVYKLEQVSEKGKAYTNYFGRCNVAEHEKLILLAQLKPEKDSDEAVTYSLGKFGQRALDFYSIHVTKESTHPVKPLAQIAGNRYASGPVGKALSDACMGTIASFLSKYQDIIIEHQKVVKGNQKRLESLRELAGKENLEYPSVTLPPQPHTKEGVDAYNEVIARVRMWVNLNLWQKLKLSRDDAKPLLRLKGFPSFPLVERQANEVDWWDMVCNVKKLINEKKEDGKVFWQNLAGYKRQEALRPYLSSEEDRKKGKKFARYQLGDLLLHLEKKHGEDWGKVYDEAWERIDKKVEGLSKHIKLEEERRSEDAQSKAALTDWLRAKASFVIEGLKEADKDEFCRCELKLQKWYGDLRGKPFAIEAENSILDISGFSKQYNCAFIWQKDGVKKLNLYLIINYFKGGKLRFKKIKPEAFEANRFYTVINKKSGEIVPMEVNFNFDDPNLIILPLAFGKRQGREFIWNDLLSLETGSLKLANGRVIEKTLYNRRTRQDEPALFVALTFERREVLDSSNIKPMNLIGVDRGENIPAVIALTDPEGCPLSRFKDSLGNPTHILRIGESYKEAQRTIQAKKEVEQRRAGGYSRKYASKAKNLADDMVRNTARDLLYYAVTQDAMLIFENLSRGFGRQGKRTFMAERQYTRMEDWLTAKLAYEGLPSKTYLSKTLAQYTSKTCSNCGFTITSADYDRVLEKLKKTATGWMTTINGKELKVEGQITYYNRYKRQNVVKDLSVELDRLSEESVNNDISSWTKGRSGEALSLLKKRFSHRPVQEKFVCLNCGFETHADEQAALNIARSWLFLRSQEYKKYQTNKTTGNTDKRAFVETWQSFYRKKLKEVWKPAV

SEQ ID NO: 26549 - protein, 978 aa, synthetic construct
  REGION 1..978: note = engineered CasX variant
QEIKRINKIRRRLVKDSNTKKAGKTGPMKTLLVRVMTPDLRERLENLRKKPENIPQPISNTSRANLNKLLTDYTEMKKAILHVYWEEFQKDPVGLMSRVAQPASKKIDQNKLKPEMDEKGNLTTAGFACSQCGQPLFVYKLEQVSEKGKAYTNYFGRCNVAEHEKLILLAQLKPEKDSDEAVTYSLGKFGQRALDFYSIHVTKESTHPVKPLAQIAGNRYASGPVGKALSDACMGTIASFLSKYQDIIIEHQKVVKGNQKRLESLRELAGKENLEYPSVTLPPQPHTKEGVDAYNEVIARVRMWVNLNLWQKLKLSRDDAKPLLRLKGFPSFPLVERQANEVDWWDMVCNVKKLINEKKEDGKVFWQNLAGYKRQEALRPYLSSEEDRKKGKKFARYQLGDLLLHLEKKHGEDWGKVYDEAWERIDKKVEGLSKHIKLEEERRSEDAQSKAALTDWLRAKASFVIEGLKEADKDEFCRCELKLQKWYGDLRGKPFAIEAENSILDISGFSKQYNCAFIWQKDGVKKLNLYLIINYFKGGKLRFKKIKPEAFEANRFYTVINKKSGEIVPMEVNFNFDDPNLIILPLAFGKRQGREFIWNDLLSLETGSLKLANGRVIEKTLYNRRTRQDEPALFVALTFERREVLDSSNIKPMNLIGVDRGENIPAVIALTDPEGCPLSRFKDSLGNPTHILRIGESYKDKQRTIQAKKEVEQRRAGGYSRKYASKAKNLADDMVRNTARDLLYYAVTQDAMLIFENLSRGFGRQGKRTFMAERQYTRMEDWLTAKLAYEGLPSKTYLSKTLAQYTSKTCSNCGFTITSADYDRVLEKLKKTATGWMTTINGKELKVEGQITYYNRYKRQNVVKDLSVELDRLSEESVNNDISSWTKGRSGEALSLLKKRFSHRPVQEKFVCLNCGFETHADEQAALNIARSWLFLRSQEYKKYQTNKTTGNTDKRAFVETWQSFYRKKLKEVWKPAV

SEQ ID NO: 26550 - protein, 978 aa, synthetic construct
  REGION 1..978: note = engineered CasX variant
QEIKRINKIRRRLVKDSNTKKAGKTGPMKTLLVRVMTPDLRERLENLRKKPENIPQPISNTSRANLNKLLTDYTEMKKAILHVYWEEFQKDPVGLMSRVAQPASKKIDQNKLKPEMDEKGNLTTAGFACSQCGQPLFVYKLEQVSEKGKAYTNYFGRCNVAEHEKLILLAQLKPEKDSDEAVTYSLGKFGQRALDFYSIHVTKESTHPVKPLAQIAGNRYASGPVGKALSDACMGTIASFLSKYQDIIIEHQKVVKGNQKRLESLRELAGKENLEYPSVTLPPQPHTKEGVDAYNEVIARVRMWVNLNLWQKLKLSRDDAKPLLRLKGFPSFPLVERQANEVDWWDMVCNVKKLINEKKEDGKVFWQNLAGYKRQEALRPYLSSEEDRKKGKKFARYQLGDLLLHLEKKHGEDWGKVYDEAWERIDKKVEGLSKHIKLEEERRSEDAQSKAALTDWLRAKASFVIEGLKEADKDEFCRCELKLQKWYGDLRGKPFAIEAENSILDISGFSKQYNCAFIWQKDGVKKLNLYLIINYFKGGKLRFKKIKPEAFEANRFYTVINKKSGEIVPMEVNFNFDDPNLIILPLAFGKRQGREFIWNDLLSLETGSLKLANGRVIEKTLYNRRTRQDEPALFVALTFERREVLDSSNIKPMNLIGVDRGENIPAVIALTDPEGCPLSRFKDSLGNPTHILRIGESYKDKQRTIQAKKEVEARRAGGYSRKYASKAKNLADDMVRNTARDLLYYAVTQDAMLIFENLSRGFGRQGKRTFMAERQYTRMEDWLTAKLAYEGLPSKTYLSKTLAQYTSKTCSNCGFTITSADYDRVLEKLKKTATGWMTTINGKELKVEGQITYYNRYKRQNVVKDLSVELDRLSEESVNNDISSWTKGRSGEALSLLKKRFSHRPVQEKFVCLNCGFETHADEQAALNIARSWLFLRSQEYKKYQTNKTTGNTDKRAFVETWQSFYRKKLKEVWKPAV

SEQ ID NO: 26551 - protein, 978 aa, synthetic construct
  REGION 1..978: note = engineered CasX variant
QEIKRINKIRRRLVKDSNTKKAGKTGPMKTLLVRVMTPDLRERLENLRKKPENIPQPISNTSRANLNKLLTDYTEMKKAILHVYWEEFQKDPVGLMSRVAQPASKKIDQNKLKPEMDEKGNLTTAGFACSQCGQPLFVYKLEQVSEKGKAYTNYFGRCNVAEHEKLILLAQLKPEKDSDEAVTYSLGKFGQRALDFYSIHVTKESTHPVKPLAQIAGNRYASGPVGKALSDACMGTIASFLSKYQDIIIEHQKVVKGNQKRLESLRELAGKENLEYPSVTLPPQPHTKEGVDAYNEVIARVRMWVNLNLWQKLKLSRDDAKPLLRLKGFPSFPLVERQANEVDWWDMVCNVKKLINEKKEDGKVFWQNLAGYKRQEALRPYLSSEEDRKKGKKFARYQLGDLLLHLEKKHGEDWGKVYDEAWERIDKKVEGLSKHIKLEEERRSEDAQSKAALTDWLRAKASFVIEGLKEADKDEFCRCELKLQKWYGDLRGKPFAIEAENSILDISGFSKQYNCAFIWQKDGVKKLNLYLIINYFKGGKLRFKKIKPEAFEANRFYTVINKKSGEIVPMEVNFNFDDPNLIILPLAFGKRQGREFIWNDLLSLETGSLKLANGRVIEKTLYNRRTRQDEPALFVALTFERREVLDSSNIKPMNLIGVDRGENIPAVIALTDPEGCPLSRFKDSLGNPTHILRIGESYKDKQREIQAKKEVEQRRAGGYSRKYASKAKNLADDMVRNTARDLLYYAVTQDAMLIFENLSRGFGRQGKRTFMAERQYTRMEDWLTAKLAYEGLPSKTYLSKTLAQYTSKTCSNCGFTITSADYDRVLEKLKKTATGWMTTINGKELKVEGQITYYNRYKRQNVVKDLSVELDRLSEESVNNDISSWTKGRSGEALSLLKKRFSHRPVQEKFVCLNCGFETHADEQAALNIARSWLFLRSQEYKKYQTNKTTGNTDKRAFVETWQSFYRKKLKEVWKPAV

SEQ ID NO: 26552 - protein, 978 aa, synthetic construct
  REGION 1..978: note = engineered CasX variant
QEIKRINKIRRRLVKDSNTKKAGKTGPMKTLLVRVMTPDLRERLENLRKKPENIPQPISNTSRANLNKLLTDYTEMKKAILHVYWEEFQKDPVGLMSRVAQPASKKIDQNKLKPEMDEKGNLTTAGFACSQCGQPLFVYKLEQVSEKGKAYTNYFGRCNVAEHEKLILLAQLKPEKDSDEAVTYSLGKFGQRALDFYSIHVTKESTHPVKPLAQIAGNRYASGPVGKALSDACMGTIASFLSKYQDIIIEHQKVVKGNQKRLESLRELAGKENLEYPSVTLPPQPHTKEGVDAYNEVIARVRMWVNLNLWQKLKLSRDDAKPLLRLKGFPSFPLVERQANEVDWWDMVCNVKKLINEKKEDGKVFWQNLAGYKRQEALRPYLSSEEDRKKGKKFARYQLGDLLLHLEKKHGEDWGKVYDEAWERIDKKVEGLSKHIKLEEERRSEDAQSKAALTDWLRAKASFVIEGLKEADKDEFCRCELKLQKWYGDLRGKPFAIEAENSILDISGFSKQYNCAFIWQKDGVKKLNLYLIINYFKGGKLRFKKIKPEAFEANRFYTVINKKSGEIVPMEVNFNFDDPNLIILPLAFGKRQGREFIWNDLLSLETGSLKLANGRVIEKTLYNRRTRQDEPALFVALTFERREVLDSSNIKPMNLIGVDRGENIPAVIALTDPEGCPLSRFKDSLGNPTHILRIGESYKCKQRTIQAKKEVEQRRAGGYSRKYASKAKNLADDMVRNTARDLLYYAVTQDAMLIFENLSRGFGRQGKRTFMAERQYTRMEDWLTAKLAYEGLPSKTYLSKTLAQYTSKTCSNCGFTITSADYDRVLEKLKKTATGWMTTINGKELKVEGQITYYNRYKRQNVVKDLSVELDRLSEESVNNDISSWTKGRSGEALSLLKKRFSHRPVQEKFVCLNCGFETHADEQAALNIARSWLFLRSQEYKKYQTNKTTGNTDKRAFVETWQSFYRKKLKEVWKPAV

SEQ ID NO: 26553 - protein, 978 aa, synthetic construct
  REGION 1..978: note = engineered CasX variant
QEIKRINKIRRRLVKDSNTKKAGKTGPMKTLLVRVMTPDLRERLENLRKKPENIPQPISNTSRANLNKLLTDYTEMKKAILHVYWEEFQKDPVGLMSRVAQPASKKIDQNKLKPEMDEKGNLTTAGFACSQCGQPLFVYKLEQVSEKGKAYTNYFGRCNVAEHEKLILLAQLKPEKDSDEAVTYSLGKFGQRALDFYSIHVTKESTHPVKPLAQIAGNRYASGPVGKALSDACMGTIASFLSKYQDIIIEHQKVVKGNQKRLESLRELAGKENLEYPSVTLPPQPHTKEGVDAYNEVIARVRMWVNLNLWQKLKLSRDDAKPLLRLKGFPSFPLVERQANEVDWWDMVCNVKKLINEKKEDGKVFWQNLAGYKRQEALRPYLSSEEDRKKGKKFARYQLGDLLLHLEKKHGEDWGKVYDEAWERIDKKVEGLSKHIKLEEERRSEDAQSKAALTDWLRAKASFVIEGLKEADKDEFCRCELKLQKWYGDLRGKPFAIEAENSILDISGFSKQYNCAFIWQKDGVKKLNLYLIINYFKGGKLRFKKIKPEAFEANRFYTVINKKSGEIVPMEVNFNFDDPNLIILPLAFGKRQGREFIWNDLLSLETGSLKLANGRVIEKTLYNRRTRQDEPALFVALTFERREVLDSSNIKPMNLIGVDRGENIPAVIALTDPEGCPLSRFKDSLGNPTHILRIGESYKCKQRTIQAKKEVEMRRAGGYSRKYASKAKNLADDMVRNTARDLLYYAVTQDAMLIFENLSRGFGRQGKRTFMAERQYTRMEDWLTAKLAYEGLPSKTYLSKTLAQYTSKTCSNCGFTITSADYDRVLEKLKKTATGWMTTINGKELKVEGQITYYNRYKRQNVVKDLSVELDRLSEESVNNDISSWTKGRSGEALSLLKKRFSHRPVQEKFVCLNCGFETHADEQAALNIARSWLFLRSQEYKKYQTNKTTGNTDKRAFVETWQSFYRKKLKEVWKPAV

SEQ ID NO: 26554 - protein, 978 aa, synthetic construct
  REGION 1..978: note = engineered CasX variant
QEIKRINKIRRRLVKDSNTKKAGKTGPMKTLLVRVMTPDLRERLENLRKKPENIPQPISNTSRANLNKLLTDYTEMKKAILHVYWEEFQKDPVGLMSRVAQPASKKIDQNKLKPEMDEKGNLTTAGFACSQCGQPLFVYKLEQVSEKGKAYTNYFGRCNVAEHEKLILLAQLKPEKDSDEAVTYSLGKFGQRALDFYSIHVTKESTHPVKPLAQIAGNRYASGPVGKALSDACMGTIASFLSKYQDIIIEHQKVVKGNQKRLESLRELAGKENLEYPSVTLPPQPHTKEGVDAYNEVIARVRMWVNLNLWQKLKLSRDDAKPLLRLKGFPSFPLVERQANEVDWWDMVCNVKKLINEKKEDGKVFWQNLAGYKRQEALRPYLSSEEDRKKGKKFARYQLGDLLLHLEKKHGEDWGKVYDEAWERIDKKVEGLSKHIKLEEERRSEDAQSKAALTDWLRAKASFVIEGLKEADKDEFCRCELKLQKWYGDLRGKPFAIEAENSILDISGFSKQYNCAFIWQKDGVKKLNLYLIINYFKGGKLRFKKIKPEAFEANRFYTVINKKSGEIVPMEVNFNFDDPNLIILPLAFGKRQGREFIWNDLLSLETGSLKLANGRVIEKTLYNRRTRQDEPALFVALTFERREVLDSSNIKPMNLIGVDRGENIPAVIALTDPEGCPLSRFKDSLGNPTHILRIGESYKCKQRTIQAKKCVEQRRAGGYSRKYASKAKNLADDMVRNTARDLLYYAVTQDAMLIFENLSRGFGRQGKRTFMAERQYTRMEDWLTAKLAYEGLPSKTYLSKTLAQYTSKTCSNCGFTITSADYDRVLEKLKKTATGWMTTINGKELKVEGQITYYNRYKRQNVVKDLSVELDRLSEESVNNDISSWTKGRSGEALSLLKKRFSHRPVQEKFVCLNCGFETHADEQAALNIARSWLFLRSQEYKKYQTNKTTGNTDKRAFVETWQSFYRKKLKEVWKPAV

SEQ ID NO: 26555 - protein, 978 aa, synthetic construct
  REGION 1..978: note = engineered CasX variant
QEIKRINKIRRRLVKDSNTKKAGKTGPMKTLLVRVMTPDLRERLENLRKKPENIPQPISNTSRANLNKLLTDYTEMKKAILHVYWEEFQKDPVGLMSRVAQPASKKIDQNKLKPEMDEKGNLTTAGFACSQCGQPLFVYKLEQVSEKGKAYTNYFGRCNVAEHEKLILLAQLKPEKDSDEAVTYSLGKFGQRALDFYSIHVTKESTHPVKPLAQIAGNRYASGPVGKALSDACMGTIASFLSKYQDIIIEHQKVVKGNQKRLESLRELAGKENLEYPSVTLPPQPHTKEGVDAYNEVIARVRMWVNLNLWQKLKLSRDDAKPLLRLKGFPSFPLVERQANEVDWWDMVCNVKKLINEKKEDGKVFWQNLAGYKRQEALRPYLSSEEDRKKGKKFARYQLGDLLLHLEKKHGEDWGKVYDEAWERIDKKVEGLSKHIKLEEERRSEDAQSKAALTDWLRAKASFVIEGLKEADKDEFCRCELKLQKWYGDLRGKPFAIEAENSILDISGFSKQYNCAFIWQKDGVKKLNLYLIINYFKGGKLRFKKIKPEAFEANRFYTVINKKSGEIVPMEVNFNFDDPNLIILPLAFGKRQGREFIWNDLLSLETGSLKLANGRVIEKTLYNRRTRQDEPALFVALTFERREVLDSSNIKPMNLIGVDRGENIPAVIALTDPEGCPLSRFKDSLGNPTHILRIGESYKCKQRTIQACKEVEQRRAGGYSRKYASKAKNLADDMVRNTARDLLYYAVTQDAMLIFENLSRGFGRQGKRTFMAERQYTRMEDWLTAKLAYEGLPSKTYLSKTLAQYTSKTCSNCGFTITSADYDRVLEKLKKTATGWMTTINGKELKVEGQITYYNRYKRQNVVKDLSVELDRLSEESVNNDISSWTKGRSGEALSLLKKRFSHRPVQEKFVCLNCGFETHADEQAALNIARSWLFLRSQEYKKYQTNKTTGNTDKRAFVETWQSFYRKKLKEVWKPAV

SEQ ID NO: 26556 - protein, 978 aa, synthetic construct
  REGION 1..978: note = engineered CasX variant
QEIKRINKIRRRLVKDSNTKKAGKTGPMKTLLVRVMTPDLRERLENLRKKPENIPQPISNTSRANLNKLLTDYTEMKKAILHVYWEEFQKDPVGLMSRVAQPASKKIDQNKLKPEMDEKGNLTTAGFACSQCGQPLFVYKLEQVSEKGKAYTNYFGRCNVAEHEKLILLAQLKPEKDSDEAVTYSLGKFGQRALDFYSIHVTKESTHPVKPLAQIAGNRYASGPVGKALSDACMGTIASFLSKYQDIIIEHQKVVKGNQKRLESLRELAGKENLEYPSVTLPPQPHTKEGVDAYNEVIARVRMWVNLNLWQKLKLSRDDAKPLLRLKGFPSFPLVERQANEVDWWDMVCNVKKLINEKKEDGKVFWQNLAGYKRQEALRPYLSSEEDRKKGKKFARYQLGDLLLHLEKKHGEDWGKVYDEAWERIDKKVEGLSKHIKLEEERRSEDAQSKAALTDWLRAKASFVIEGLKEADKDEFCRCELKLQKWYGDLRGKPFAIEAENSILDISGFSKQYNCAFIWQKDGVKKLNLYLIINYFKGGKLRFKKIKPEAFEANRFYTVINKKSGEIVPMEVNFNFDDPNLIILPLAFGKRQGREFIWNDLLSLETGSLKLANGRVIEKTLYNRRTRQDEPALFVALTFERREVLDSSNIKPMNLIGVDRGENIPAVIALTDPEGCPLSRFKDSLGNPTHILRIGESYKCKCRTIQAKKEVEQRRAGGYSRKYASKAKNLADDMVRNTARDLLYYAVTQDAMLIFENLSRGFGRQGKRTFMAERQYTRMEDWLTAKLAYEGLPSKTYLSKTLAQYTSKTCSNCGFTITSADYDRVLEKLKKTATGWMTTINGKELKVEGQITYYNRYKRQNVVKDLSVELDRLSEESVNNDISSWTKGRSGEALSLLKKRFSHRPVQEKFVCLNCGFETHADEQAALNIARSWLFLRSQEYKKYQTNKTTGNTDKRAFVETWQSFYRKKLKEVWKPAV

SEQ ID NO: 26557 - protein, 978 aa, synthetic construct
  REGION 1..978: note = engineered CasX variant
QEIKRINKIRRRLVKDSNTKKAGKTGPMKTLLVRVMTPDLRERLENLRKKPENIPQPISNTSRANLNKLLTDYTEMKKAILHVYWEEFQKDPVGLMSRVAQPASKKIDQNKLKPEMDEKGNLTTAGFACSQCGQPLFVYKLEQVSEKGKAYTNYFGRCNVAEHEKLILLAQLKPEKDSDEAVTYSLGKFGQRALDFYSIHVTKESTHPVKPLAQIAGNRYASGPVGKALSDACMGTIASFLSKYQDIIIEHQKVVKGNQKRLESLRELAGKENLEYPSVTLPPQPHTKEGVDAYNEVIARVRMWVNLNLWQKLKLSRDDAKPLLRLKGFPSFPLVERQANEVDWWDMVCNVKKLINEKKEDGKVFWQNLAGYKRQEALRPYLSSEEDRKKGKKFARYQLGDLLLHLEKKHGEDWGKVYDEAWERIDKKVEGLSKHIKLEEERRSEDAQSKAALTDWLRAKASFVIEGLKEADKDEFCRCELKLQKWYGDLRGKPFAIEAENSILDISGFSKQYNCAFIWQKDGVKKLNLYLIINYFKGGKLRFKKIKPEAFEANRFYTVINKKSGEIVPMEVNFNFDDPNLIILPLAFGKRQGREFIWNDLLSLETGSLKLANGRVIEKTLYNRRTRQDEPALFVALTFERREVLDSSNIKPMNLIGVDRGENIPAVIALTDPEGCPLSRFKDSLGNPTHILRIGESYKAKQRTIQAKKEVEQRRAGGYSRKYASKAKNLADDMVRNTARDLLYYAVTQDAMLIFENLSRGFGRQGKRTFMAERQYTRMEDWLTAKLAYEGLPSKTYLSKTLAQYTSKTCSNCGFTITSADYDRVLEKLKKTATGWMTTINGKELKVEGQITYYNRYKRQNVVKDLSVELDRLSEESVNNDISSWTKGRSGEALSLLKKRFSHRPVQEKFVCLNCGFETHADEQAALNIARSWLFLRSQEYKKYQTNKTTGNTDKRAFVETWQSFYRKKLKEVWKPAV

SEQ ID NO: 26558 - protein, 978 aa, synthetic construct
  REGION 1..978: note = engineered CasX variant
QEIKRINKIRRRLVKDSNTKKAGKTGPMKTLLVRVMTPDLRERLENLRKKPENIPQPISNTSRANLNKLLTDYTEMKKAILHVYWEEFQKDPVGLMSRVAQPASKKIDQNKLKPEMDEKGNLTTAGFACSQCGQPLFVYKLEQVSEKGKAYTNYFGRCNVAEHEKLILLAQLKPEKDSDEAVTYSLGKFGQRALDFYSIHVTKESTHPVKPLAQIAGNRYASGPVGKALSDACMGTIASFLSKYQDIIIEHQKVVKGNQKRLESLRELAGKENLEYPSVTLPPQPHTKEGVDAYNEVIARVRMWVNLNLWQKLKLSRDDAKPLLRLKGFPSFPLVERQANEVDWWDMVCNVKKLINEKKEDGKVFWQNLAGYKRQEALRPYLSSEEDRKKGKKFARYQLGDLLLHLEKKHGEDWGKVYDEAWERIDKKVEGLSKHIKLEEERRSEDAQSKAALTDWLRAKASFVIEGLKEADKDEFCRCELKLQKWYGDLRGKPFAIEAENSILDISGFSKQYNCAFIWQKDGVKKLNLYLIINYFKGGKLRFKKIKPEAFEANRFYTVINKKSGEIVPMEVNFNFDDPNLIILPLAFGKRQGREFIWNDLLSLETGSLKLANGRVIEKTLYNRRTRQDEPALFVALTFERREVLDSSNIKPMNLIGVDRGENIPAVIALTDPEGCPLSRFKDSLGNPTHILRIGESYKAKQRTIQAKKEVEQRKAGGYSRKYASKAKNLADDMVRNTARDLLYYAVTQDAMLIFENLSRGFGRQGKRTFMAERQYTRMEDWLTAKLAYEGLPSKTYLSKTLAQYTSKTCSNCGFTITSADYDRVLEKLKKTATGWMTTINGKELKVEGQITYYNRYKRQNVVKDLSVELDRLSEESVNNDISSWTKGRSGEALSLLKKRFSHRPVQEKFVCLNCGFETHADEQAALNIARSWLFLRSQEYKKYQTNKTTGNTDKRAFVETWQSFYRKKLKEVWKPAV

SEQ ID NO: 26559 - protein, 978 aa, synthetic construct
  REGION 1..978: note = engineered CasX variant
QEIKRINKIRRRLVKDSNTKKAGKTGPMKTLLVRVMTPDLRERLENLRKKPENIPQPISNTSRANLNKLLTDYTEMKKAILHVYWEEFQKDPVGLMSRVAQPASKKIDQNKLKPEMDEKGNLTTAGFACSQCGQPLFVYKLEQVSEKGKAYTNYFGRCNVAEHEKLILLAQLKPEKDSDEAVTYSLGKFGQRALDFYSIHVTKESTHPVKPLAQIAGNRYASGPVGKALSDACMGTIASFLSKYQDIIIEHQKVVKGNQKRLESLRELAGKENLEYPSVTLPPQPHTKEGVDAYNEVIARVRMWVNLNLWQKLKLSRDDAKPLLRLKGFPSFPLVERQANEVDWWDMVCNVKKLINEKKEDGKVFWQNLAGYKRQEALRPYLSSEEDRKKGKKFARYQLGDLLLHLEKKHGEDWGKVYDEAWERIDKKVEGLSKHIKLEEERRSEDAQSKAALTDWLRAKASFVIEGLKEADKDEFCRCELKLQKWYGDLRGKPFAIEAENSILDISGFSKQYNCAFIWQKDGVKKLNLYLIINYFKGGKLRFKKIKPEAFEANRFYTVINKKSGEIVPMEVNFNFDDPNLIILPLAFGKRQGREFIWNDLLSLETGSLKLANGRVIEKTLYNRRTRQDEPALFVALTFERREVLDSSNIKPMNLIGVDRGENIPAVIALTDPEGCPLSRFKDSLGNPTHILRIGESVKEKQRTIQAKKEVEQRRAGGYSRKYASKAKNLADDMVRNTARDLLYYAVTQDAMLIFENLSRGFGRQGKRTFMAERQYTRMEDWLTAKLAYEGLPSKTYLSKTLAQYTSKTCSNCGFTITSADYDRVLEKLKKTATGWMTTINGKELKVEGQITYYNRYKRQNVVKDLSVELDRLSEESVNNDISSWTKGRSGEALSLLKKRFSHRPVQEKFVCLNCGFETHADEQAALNIARSWLFLRSQEYKKYQTNKTTGNTDKRAFVETWQSFYRKKLKEVWKPAV

SEQ ID NO: 26560 - protein, 978 aa, synthetic construct
  REGION 1..978: note = engineered CasX variant
QEIKRINKIRRRLVKDSNTKKAGKTGPMKTLLVRVMTPDLRERLENLRKKPENIPQPISNTSRANLNKLLTDYTEMKKAILHVYWEEFQKDPVGLMSRVAQPASKKIDQNKLKPEMDEKGNLTTAGFACSQCGQPLFVYKLEQVSEKGKAYTNYFGRCNVAEHEKLILLAQLKPEKDSDEAVTYSLGKFGQRALDFYSIHVTKESTHPVKPLAQIAGNRYASGPVGKALSDACMGTIASFLSKYQDIIIEHQKVVKGNQKRLESLRELAGKENLEYPSVTLPPQPHTKEGVDAYNEVIARVRMWVNLNLWQKLKLSRDDAKPLLRLKGFPSFPLVERQANEVDWWDMVCNVKKLINEKKEDGKVFWQNLAGYKRQEALRPYLSSEEDRKKGKKFARYQLGDLLLHLEKKHGEDWGKVYDEAWERIDKKVEGLSKHIKLEEERRSEDAQSKAALTDWLRAKASFVIEGLKEADKDEFCRCELKLQKWYGDLRGKPFAIEAENSILDISGFSKQYNCAFIWQKDGVKKLNLYLIINYFKGGKLRFKKIKPEAFEANRFYTVINKKSGEIVPMEVNFNFDDPNLIILPLAFGKRQGREFIWNDLLSLETGSLKLANGRVIEKTLYNRRTRQDEPALFVALTFERREVLDSSNIKPMNLIGVDRGENIPAVIALTDPEGCPLSRFKDSLGNPTHILRIGESTKEKQRTIQAKKEVEQRRAGGYSRKYASKAKNLADDMVRNTARDLLYYAVTQDAMLIFENLSRGFGRQGKRTFMAERQYTRMEDWLTAKLAYEGLPSKTYLSKTLAQYTSKTCSNCGFTITSADYDRVLEKLKKTATGWMTTINGKELKVEGQITYYNRYKRQNVVKDLSVELDRLSEESVNNDISSWTKGRSGEALSLLKKRFSHRPVQEKFVCLNCGFETHADEQAALNIARSWLFLRSQEYKKYQTNKTTGNTDKRAFVETWQSFYRKKLKEVWKPAV

SEQ ID NO: 26561 - protein, 978 aa, synthetic construct
  REGION 1..978: note = engineered CasX variant
QEIKRINKIRRRLVKDSNTKKAGKTGPMKTLLVRVMTPDLRERLENLRKKPENIPQPISNTSRANLNKLLTDYTEMKKAILHVYWEEFQKDPVGLMSRVAQPASKKIDQNKLKPEMDEKGNLTTAGFACSQCGQPLFVYKLEQVSEKGKAYTNYFGRCNVAEHEKLILLAQLKPEKDSDEAVTYSLGKFGQRALDFYSIHVTKESTHPVKPLAQIAGNRYASGPVGKALSDACMGTIASFLSKYQDIIIEHQKVVKGNQKRLESLRELAGKENLEYPSVTLPPQPHTKEGVDAYNEVIARVRMWVNLNLWQKLKLSRDDAKPLLRLKGFPSFPLVERQANEVDWWDMVCNVKKLINEKKEDGKVFWQNLAGYKRQEALRPYLSSEEDRKKGKKFARYQLGDLLLHLEKKHGEDWGKVYDEAWERIDKKVEGLSKHIKLEEERRSEDAQSKAALTDWLRAKASFVIEGLKEADKDEFCRCELKLQKWYGDLRGKPFAIEAENSILDISGFSKQYNCAFIWQKDGVKKLNLYLIINYFKGGKLRFKKIKPEAFEANRFYTVINKKSGEIVPMEVNFNFDDPNLIILPLAFGKRQGREFIWNDLLSLETGSLKLANGRVIEKTLYNRRTRQDEPALFVALTFERREVLDSSNIKPMNLIGVDRGENIPAVIALTDPEGCPLSRFKDSLGNPTHILRIGESSKEKQRTIQAKKEVEQRRAGGYSRKYASKAKNLADDMVRNTARDLLYYAVTQDAMLIFENLSRGFGRQGKRTFMAERQYTRMEDWLTAKLAYEGLPSKTYLSKTLAQYTSKTCSNCGFTITSADYDRVLEKLKKTATGWMTTINGKELKVEGQITYYNRYKRQNVVKDLSVELDRLSEESVNNDISSWTKGRSGEALSLLKKRFSHRPVQEKFVCLNCGFETHADEQAALNIARSWLFLRSQEYKKYQTNKTTGNTDKRAFVETWQSFYRKKLKEVWKPAV

SEQ ID NO: 26562 - protein, 978 aa, synthetic construct
  REGION 1..978: note = engineered CasX variant
QEIKRINKIRRRLVKDSNTKKAGKTGPMKTLLVRVMTPDLRERLENLRKKPENIPQPISNTSRANLNKLLTDYTEMKKAILHVYWEEFQKDPVGLMSRVAQPASKKIDQNKLKPEMDEKGNLTTAGFACSQCGQPLFVYKLEQVSEKGKAYTNYFGRCNVAEHEKLILLAQLKPEKDSDEAVTYSLGKFGQRALDFYSIHVTKESTHPVKPLAQIAGNRYASGPVGKALSDACMGTIASFLSKYQDIIIEHQKVVKGNQKRLESLRELAGKENLEYPSVTLPPQPHTKEGVDAYNEVIARVRMWVNLNLWQKLKLSRDDAKPLLRLKGFPSFPLVERQANEVDWWDMVCNVKKLINEKKEDGKVFWQNLAGYKRQEALRPYLSSEEDRKKGKKFARYQLGDLLLHLEKKHGEDWGKVYDEAWERIDKKVEGLSKHIKLEEERRSEDAQSKAALTDWLRAKASFVIEGLKEADKDEFCRCELKLQKWYGDLRGKPFAIEAENSILDISGFSKQYNCAFIWQKDGVKKLNLYLIINYFKGGKLRFKKIKPEAFEANRFYTVINKKSGEIVPMEVNFNFDDPNLIILPLAFGKRQGREFIWNDLLSLETGSLKLANGRVIEKTLYNRRTRQDEPALFVALTFERREVLDSSNIKPMNLIGVDRGENIPAVIALTDPEGCPLSRFKDSLGNPTHILRIGESQKEKQRTIQAKKEVEQRRAGGYSRKYASKAKNLADDMVRNTARDLLYYAVTQDAMLIFENLSRGFGRQGKRTFMAERQYTRMEDWLTAKLAYEGLPSKTYLSKTLAQYTSKTCSNCGFTITSADYDRVLEKLKKTATGWMTTINGKELKVEGQITYYNRYKRQNVVKDLSVELDRLSEESVNNDISSWTKGRSGEALSLLKKRFSHRPVQEKFVCLNCGFETHADEQAALNIARSWLFLRSQEYKKYQTNKTTGNTDKRAFVETWQSFYRKKLKEVWKPAV

SEQ ID NO: 26563 - protein, 978 aa, synthetic construct
  REGION 1..978: note = engineered CasX variant
QEIKRINKIRRRLVKDSNTKKAGKTGPMKTLLVRVMTPDLRERLENLRKKPENIPQPISNTSRANLNKLLTDYTEMKKAILHVYWEEFQKDPVGLMSRVAQPASKKIDQNKLKPEMDEKGNLTTAGFACSQCGQPLFVYKLEQVSEKGKAYTNYFGRCNVAEHEKLILLAQLKPEKDSDEAVTYSLGKFGQRALDFYSIHVTKESTHPVKPLAQIAGNRYASGPVGKALSDACMGTIASFLSKYQDIIIEHQKVVKGNQKRLESLRELAGKENLEYPSVTLPPQPHTKEGVDAYNEVIARVRMWVNLNLWQKLKLSRDDAKPLLRLKGFPSFPLVERQANEVDWWDMVCNVKKLINEKKEDGKVFWQNLAGYKRQEALRPYLSSEEDRKKGKKFARYQLGDLLLHLEKKHGEDWGKVYDEAWERIDKKVEGLSKHIKLEEERRSEDAQSKAALTDWLRAKASFVIEGLKEADKDEFCRCELKLQKWYGDLRGKPFAIEAENSILDISGFSKQYNCAFIWQKDGVKKLNLYLIINYFKGGKLRFKKIKPEAFEANRFYTVINKKSGEIVPMEVNFNFDDPNLIILPLAFGKRQGREFIWNDLLSLETGSLKLANGRVIEKTLYNRRTRQDEPALFVALTFERREVLDSSNIKPMNLIGVDRGENIPAVIALTDPEGCPLSRFKDSLGNPTHILRIGESNKEKQRTIQAKKEVEQRRAGGYSRKYASKAKNLADDMVRNTARDLLYYAVTQDAMLIFENLSRGFGRQGKRTFMAERQYTRMEDWLTAKLAYEGLPSKTYLSKTLAQYTSKTCSNCGFTITSADYDRVLEKLKKTATGWMTTINGKELKVEGQITYYNRYKRQNVVKDLSVELDRLSEESVNNDISSWTKGRSGEALSLLKKRFSHRPVQEKFVCLNCGFETHADEQAALNIARSWLFLRSQEYKKYQTNKTTGNTDKRAFVETWQSFYRKKLKEVWKPAV

SEQ ID NO: 26564 - protein, 978 aa, synthetic construct
  REGION 1..978: note = engineered CasX variant
QEIKRINKIRRRLVKDSNTKKAGKTGPMKTLLVRVMTPDLRERLENLRKKPENIPQPISNTSRANLNKLLTDYTEMKKAILHVYWEEFQKDPVGLMSRVAQPASKKIDQNKLKPEMDEKGNLTTAGFACSQCGQPLFVYKLEQVSEKGKAYTNYFGRCNVAEHEKLILLAQLKPEKDSDEAVTYSLGKFGQRALDFYSIHVTKESTHPVKPLAQIAGNRYASGPVGKALSDACMGTIASFLSKYQDIIIEHQKVVKGNQKRLESLRELAGKENLEYPSVTLPPQPHTKEGVDAYNEVIARVRMWVNLNLWQKLKLSRDDAKPLLRLKGFPSFPLVERQANEVDWWDMVCNVKKLINEKKEDGKVFWQNLAGYKRQEALRPYLSSEEDRKKGKKFARYQLGDLLLHLEKKHGEDWGKVYDEAWERIDKKVEGLSKHIKLEEERRSEDAQSKAALTDWLRAKASFVIEGLKEADKDEFCRCELKLQKWYGDLRGKPFAIEAENSILDISGFSKQYNCAFIWQKDGVKKLNLYLIINYFKGGKLRFKKIKPEAFEANRFYTVINKKSGEIVPMEVNFNFDDPNLIILPLAFGKRQGREFIWNDLLSLETGSLKLANGRVIEKTLYNRRTRQDEPALFVALTFERREVLDSSNIKPMNLIGVDRGENIPAVIALTDPEGCPLSRFKDSLGNPTHILRIGESLKEKQRTIQAKKEVEQRRAGGYSRKYASKAKNLADDMVRNTARDLLYYAVTQDAMLIFENLSRGFGRQGKRTFMAERQYTRMEDWLTAKLAYEGLPSKTYLSKTLAQYTSKTCSNCGFTITSADYDRVLEKLKKTATGWMTTINGKELKVEGQITYYNRYKRQNVVKDLSVELDRLSEESVNNDISSWTKGRSGEALSLLKKRFSHRPVQEKFVCLNCGFETHADEQAALNIARSWLFLRSQEYKKYQTNKTTGNTDKRAFVETWQSFYRKKLKEVWKPAV

SEQ ID NO: 26565 - protein, 978 aa, synthetic construct
  REGION 1..978: note = engineered CasX variant
QEIKRINKIRRRLVKDSNTKKAGKTGPMKTLLVRVMTPDLRERLENLRKKPENIPQPISNTSRANLNKLLTDYTEMKKAILHVYWEEFQKDPVGLMSRVAQPASKKIDQNKLKPEMDEKGNLTTAGFACSQCGQPLFVYKLEQVSEKGKAYTNYFGRCNVAEHEKLILLAQLKPEKDSDEAVTYSLGKFGQRALDFYSIHVTKESTHPVKPLAQIAGNRYASGPVGKALSDACMGTIASFLSKYQDIIIEHQKVVKGNQKRLESLRELAGKENLEYPSVTLPPQPHTKEGVDAYNEVIARVRMWVNLNLWQKLKLSRDDAKPLLRLKGFPSFPLVERQANEVDWWDMVCNVKKLINEKKEDGKVFWQNLAGYKRQEALRPYLSSEEDRKKGKKFARYQLGDLLLHLEKKHGEDWGKVYDEAWERIDKKVEGLSKHIKLEEERRSEDAQSKAALTDWLRAKASFVIEGLKEADKDEFCRCELKLQKWYGDLRGKPFAIEAENSILDISGFSKQYNCAFIWQKDGVKKLNLYLIINYFKGGKLRFKKIKPEAFEANRFYTVINKKSGEIVPMEVNFNFDDPNLIILPLAFGKRQGREFIWNDLLSLETGSLKLANGRVIEKTLYNRRTRQDEPALFVALTFERREVLDSSNIKPMNLIGVDRGENIPAVIALTDPEGCPLSRFKDSLGNPTHILRIGESLKEKQRTIQADKEVEQRRAGGYSRKYASKAKNLADDMVRNTARDLLYYAVTQDAMLIFENLSRGFGRQGKRTFMAERQYTRMEDWLTAKLAYEGLPSKTYLSKTLAQYTSKTCSNCGFTITSADYDRVLEKLKKTATGWMTTINGKELKVEGQITYYNRYKRQNVVKDLSVELDRLSEESVNNDISSWTKGRSGEALSLLKKRFSHRPVQEKFVCLNCGFETHADEQAALNIARSWLFLRSQEYKKYQTNKTTGNTDKRAFVETWQSFYRKKLKEVWKPAV

SEQ ID NO: 26566 - protein, 978 aa, synthetic construct
  REGION 1..978: note = engineered CasX variant
QEIKRINKIRRRLVKDSNTKKAGKTGPMKTLLVRVMTPDLRERLENLRKKPENIPQPISNTSRANLNKLLTDYTEMKKAILHVYWEEFQKDPVGLMSRVAQPASKKIDQNKLKPEMDEKGNLTTAGFACSQCGQPLFVYKLEQVSEKGKAYTNYFGRCNVAEHEKLILLAQLKPEKDSDEAVTYSLGKFGQRALDFYSIHVTKESTHPVKPLAQIAGNRYASGPVGKALSDACMGTIASFLSKYQDIIIEHQKVVKGNQKRLESLRELAGKENLEYPSVTLPPQPHTKEGVDAYNEVIARVRMWVNLNLWQKLKLSRDDAKPLLRLKGFPSFPLVERQANEVDWWDMVCNVKKLINEKKEDGKVFWQNLAGYKRQEALRPYLSSEEDRKKGKKFARYQLGDLLLHLEKKHGEDWGKVYDEAWERIDKKVEGLSKHIKLEEERRSEDAQSKAALTDWLRAKASFVIEGLKEADKDEFCRCELKLQKWYGDLRGKPFAIEAENSILDISGFSKQYNCAFIWQKDGVKKLNLYLIINYFKGGKLRFKKIKPEAFEANRFYTVINKKSGEIVPMEVNFNFDDPNLIILPLAFGKRQGREFIWNDLLSLETGSLKLANGRVIEKTLYNRRTRQDEPALFVALTFERREVLDSSNIKPMNLIGVDRGENIPAVIALTDPEGCPLSRFKDSLGNPTHILRIGESIKEKQRTIQAKKEVEQRRAGGYSRKYASKAKNLADDMVRNTARDLLYYAVTQDAMLIFENLSRGFGRQGKRTFMAERQYTRMEDWLTAKLAYEGLPSKTYLSKTLAQYTSKTCSNCGFTITSADYDRVLEKLKKTATGWMTTINGKELKVEGQITYYNRYKRQNVVKDLSVELDRLSEESVNNDISSWTKGRSGEALSLLKKRFSHRPVQEKFVCLNCGFETHADEQAALNIARSWLFLRSQEYKKYQTNKTTGNTDKRAFVETWQSFYRKKLKEVWKPAV

SEQ ID NO: 26567 - protein, 978 aa, synthetic construct
  REGION 1..978: note = engineered CasX variant
QEIKRINKIRRRLVKDSNTKKAGKTGPMKTLLVRVMTPDLRERLENLRKKPENIPQPISNTSRANLNKLLTDYTEMKKAILHVYWEEFQKDPVGLMSRVAQPASKKIDQNKLKPEMDEKGNLTTAGFACSQCGQPLFVYKLEQVSEKGKAYTNYFGRCNVAEHEKLILLAQLKPEKDSDEAVTYSLGKFGQRALDFYSIHVTKESTHPVKPLAQIAGNRYASGPVGKALSDACMGTIASFLSKYQDIIIEHQKVVKGNQKRLESLRELAGKENLEYPSVTLPPQPHTKEGVDAYNEVIARVRMWVNLNLWQKLKLSRDDAKPLLRLKGFPSFPLVERQANEVDWWDMVCNVKKLINEKKEDGKVFWQNLAGYKRQEALRPYLSSEEDRKKGKKFARYQLGDLLLHLEKKHGEDWGKVYDEAWERIDKKVEGLSKHIKLEEERRSEDAQSKAALTDWLRAKASFVIEGLKEADKDEFCRCELKLQKWYGDLRGKPFAIEAENSILDISGFSKQYNCAFIWQKDGVKKLNLYLIINYFKGGKLRFKKIKPEAFEANRFYTVINKKSGEIVPMEVNFNFDDPNLIILPLAFGKRQGREFIWNDLLSLETGSLKLANGRVIEKTLYNRRTRQDEPALFVALTFERREVLDSSNIKPMNLIGVDRGENIPAVIALTDPEGCPLSRFKDSLGNPTHILRIGESHKEKQRTIQAKKEVEQRRAGGYSRKYASKAKNLADDMVRNTARDLLYYAVTQDAMLIFENLSRGFGRQGKRTFMAERQYTRMEDWLTAKLAYEGLPSKTYLSKTLAQYTSKTCSNCGFTITSADYDRVLEKLKKTATGWMTTINGKELKVEGQITYYNRYKRQNVVKDLSVELDRLSEESVNNDISSWTKGRSGEALSLLKKRFSHRPVQEKFVCLNCGFETHADEQAALNIARSWLFLRSQEYKKYQTNKTTGNTDKRAFVETWQSFYRKKLKEVWKPAV

SEQ ID NO: 26568 - protein, 978 aa, synthetic construct
  REGION 1..978: note = engineered CasX variant
QEIKRINKIRRRLVKDSNTKKAGKTGPMKTLLVRVMTPDLRERLENLRKKPENIPQPISNTSRANLNKLLTDYTEMKKAILHVYWEEFQKDPVGLMSRVAQPASKKIDQNKLKPEMDEKGNLTTAGFACSQCGQPLFVYKLEQVSEKGKAYTNYFGRCNVAEHEKLILLAQLKPEKDSDEAVTYSLGKFGQRALDFYSIHVTKESTHPVKPLAQIAGNRYASGPVGKALSDACMGTIASFLSKYQDIIIEHQKVVKGNQKRLESLRELAGKENLEYPSVTLPPQPHTKEGVDAYNEVIARVRMWVNLNLWQKLKLSRDDAKPLLRLKGFPSFPLVERQANEVDWWDMVCNVKKLINEKKEDGKVFWQNLAGYKRQEALRPYLSSEEDRKKGKKFARYQLGDLLLHLEKKHGEDWGKVYDEAWERIDKKVEGLSKHIKLEEERRSEDAQSKAALTDWLRAKASFVIEGLKEADKDEFCRCELKLQKWYGDLRGKPFAIEAENSILDISGFSKQYNCAFIWQKDGVKKLNLYLIINYFKGGKLRFKKIKPEAFEANRFYTVINKKSGEIVPMEVNFNFDDPNLIILPLAFGKRQGREFIWNDLLSLETGSLKLANGRVIEKTLYNRRTRQDEPALFVALTFERREVLDSSNIKPMNLIGVDRGENIPAVIALTDPEGCPLSRFKDSLGNPTHILRIGESFKQKQRTIQAKKEVEQRRAGGYSRKYASKAKNLADDMVRNTARDLLYYAVTQDAMLIFENLSRGFGRQGKRTFMAERQYTRMEDWLTAKLAYEGLPSKTYLSKTLAQYTSKTCSNCGFTITSADYDRVLEKLKKTATGWMTTINGKELKVEGQITYYNRYKRQNVVKDLSVELDRLSEESVNNDISSWTKGRSGEALSLLKKRFSHRPVQEKFVCLNCGFETHADEQAALNIARSWLFLRSQEYKKYQTNKTTGNTDKRAFVETWQSFYRKKLKEVWKPAV

SEQ ID NO: 26569 - protein, 978 aa, synthetic construct
  REGION 1..978: note = engineered CasX variant
QEIKRINKIRRRLVKDSNTKKAGKTGPMKTLLVRVMTPDLRERLENLRKKPENIPQPISNTSRANLNKLLTDYTEMKKAILHVYWEEFQKDPVGLMSRVAQPASKKIDQNKLKPEMDEKGNLTTAGFACSQCGQPLFVYKLEQVSEKGKAYTNYFGRCNVAEHEKLILLAQLKPEKDSDEAVTYSLGKFGQRALDFYSIHVTKESTHPVKPLAQIAGNRYASGPVGKALSDACMGTIASFLSKYQDIIIEHQKVVKGNQKRLESLRELAGKENLEYPSVTLPPQPHTKEGVDAYNEVIARVRMWVNLNLWQKLKLSRDDAKPLLRLKGFPSFPLVERQANEVDWWDMVCNVKKLINEKKEDGKVFWQNLAGYKRQEALRPYLSSEEDRKKGKKFARYQLGDLLLHLEKKHGEDWGKVYDEAWERIDKKVEGLSKHIKLEEERRSEDAQSKAALTDWLRAKASFVIEGLKEADKDEFCRCELKLQKWYGDLRGKPFAIEAENSILDISGFSKQYNCAFIWQKDGVKKLNLYLIINYFKGGKLRFKKIKPEAFEANRFYTVINKKSGEIVPMEVNFNFDDPNLIILPLAFGKRQGREFIWNDLLSLETGSLKLANGRVIEKTLYNRRTRQDEPALFVALTFERREVLDSSNIKPMNLIGVDRGENIPAVIALTDPEGCPLSRFKDSLGNPTHILRIGESFKENQRTIQAKKEVEQRRAGGYSRKYASKAKNLADDMVRNTARDLLYYAVTQDAMLIFENLSRGFGRQGKRTFMAERQYTRMEDWLTAKLAYEGLPSKTYLSKTLAQYTSKTCSNCGFTITSADYDRVLEKLKKTATGWMTTINGKELKVEGQITYYNRYKRQNVVKDLSVELDRLSEESVNNDISSWTKGRSGEALSLLKKRFSHRPVQEKFVCLNCGFETHADEQAALNIARSWLFLRSQEYKKYQTNKTTGNTDKRAFVETWQSFYRKKLKEVWKPAV

SEQ ID NO: 26570 - protein, 978 aa, synthetic construct
  REGION 1..978: note = engineered CasX variant
QEIKRINKIRRRLVKDSNTKKAGKTGPMKTLLVRVMTPDLRERLENLRKKPENIPQPISNTSRANLNKLLTDYTEMKKAILHVYWEEFQKDPVGLMSRVAQPASKKIDQNKLKPEMDEKGNLTTAGFACSQCGQPLFVYKLEQVSEKGKAYTNYFGRCNVAEHEKLILLAQLKPEKDSDEAVTYSLGKFGQRALDFYSIHVTKESTHPVKPLAQIAGNRYASGPVGKALSDACMGTIASFLSKYQDIIIEHQKVVKGNQKRLESLRELAGKENLEYPSVTLPPQPHTKEGVDAYNEVIARVRMWVNLNLWQKLKLSRDDAKPLLRLKGFPSFPLVERQANEVDWWDMVCNVKKLINEKKEDGKVFWQNLAGYKRQEALRPYLSSEEDRKKGKKFARYQLGDLLLHLEKKHGEDWGKVYDEAWERIDKKVEGLSKHIKLEEERRSEDAQSKAALTDWLRAKASFVIEGLKEADKDEFCRCELKLQKWYGDLRGKPFAIEAENSILDISGFSKQYNCAFIWQKDGVKKLNLYLIINYFKGGKLRFKKIKPEAFEANRFYTVINKKSGEIVPMEVNFNFDDPNLIILPLAFGKRQGREFIWNDLLSLETGSLKLANGRVIEKTLYNRRTRQDEPALFVALTFERREVLDSSNIKPMNLIGVDRGENIPAVIALTDPEGCPLSRFKDSLGNPTHILRIGESFKEKQRTIQAYKEVEQRRAGGYSRKYASKAKNLADDMVRNTARDLLYYAVTQDAMLIFENLSRGFGRQGKRTFMAERQYTRMEDWLTAKLAYEGLPSKTYLSKTLAQYTSKTCSNCGFTITSADYDRVLEKLKKTATGWMTTINGKELKVEGQITYYNRYKRQNVVKDLSVELDRLSEESVNNDISSWTKGRSGEALSLLKKRFSHRPVQEKFVCLNCGFETHADEQAALNIARSWLFLRSQEYKKYQTNKTTGNTDKRAFVETWQSFYRKKLKEVWKPAV

SEQ ID NO: 26571 - protein, 978 aa, synthetic construct
  REGION 1..978: note = engineered CasX variant
QEIKRINKIRRRLVKDSNTKKAGKTGPMKTLLVRVMTPDLRERLENLRKKPENIPQPISNTSRANLNKLLTDYTEMKKAILHVYWEEFQKDPVGLMSRVAQPASKKIDQNKLKPEMDEKGNLTTAGFACSQCGQPLFVYKLEQVSEKGKAYTNYFGRCNVAEHEKLILLAQLKPEKDSDEAVTYSLGKFGQRALDFYSIHVTKESTHPVKPLAQIAGNRYASGPVGKALSDACMGTIASFLSKYQDIIIEHQKVVKGNQKRLESLRELAGKENLEYPSVTLPPQPHTKEGVDAYNEVIARVRMWVNLNLWQKLKLSRDDAKPLLRLKGFPSFPLVERQANEVDWWDMVCNVKKLINEKKEDGKVFWQNLAGYKRQEALRPYLSSEEDRKKGKKFARYQLGDLLLHLEKKHGEDWGKVYDEAWERIDKKVEGLSKHIKLEEERRSEDAQSKAALTDWLRAKASFVIEGLKEADKDEFCRCELKLQKWYGDLRGKPFAIEAENSILDISGFSKQYNCAFIWQKDGVKKLNLYLIINYFKGGKLRFKKIKPEAFEANRFYTVINKKSGEIVPMEVNFNFDDPNLIILPLAFGKRQGREFIWNDLLSLETGSLKLANGRVIEKTLYNRRTRQDEPALFVALTFERREVLDSSNIKPMNLIGVDRGENIPAVIALTDPEGCPLSRFKDSLGNPTHILRIGESFKEKQRTIQAKKEVEQRRAGGYSRKYASKAKNLADDMVRNTARDLLYYAVTQDAMLIFENLSRGFGRQGKRTFMAERQYTRMEDWLTAKLAYEGLPSKTYLSKTLAQYTSKTCSNCGFTITSADYDRVLEKLKKTATGWMTTINGKELKVEGQITYYNRYKRQNVVKDLSVELDRLSEESVNNDISSWTKGRSGEALSLLKKRFSHRPVQEKFVCLNCGFETHADEQAALNIARSWLFLRSQEYKKYQTNKTTGNTDKRAFVETWQSFYRKKLKEVWKPAV

SEQ ID NO: 26572 - protein, 978 aa, synthetic construct
  REGION 1..978: note = engineered CasX variant
QEIKRINKIRRRLVKDSNTKKAGKTGPMKTLLVRVMTPDLRERLENLRKKPENIPQPISNTSRANLNKLLTDYTEMKKAILHVYWEEFQKDPVGLMSRVAQPASKKIDQNKLKPEMDEKGNLTTAGFACSQCGQPLFVYKLEQVSEKGKAYTNYFGRCNVAEHEKLILLAQLKPEKDSDEAVTYSLGKFGQRALDFYSIHVTKESTHPVKPLAQIAGNRYASGPVGKALSDACMGTIASFLSKYQDIIIEHQKVVKGNQKRLESLRELAGKENLEYPSVTLPPQPHTKEGVDAYNEVIARVRMWVNLNLWQKLKLSRDDAKPLLRLKGFPSFPLVERQANEVDWWDMVCNVKKLINEKKEDGKVFWQNLAGYKRQEALRPYLSSEEDRKKGKKFARYQLGDLLLHLEKKHGEDWGKVYDEAWERIDKKVEGLSKHIKLEEERRSEDAQSKAALTDWLRAKASFVIEGLKEADKDEFCRCELKLQKWYGDLRGKPFAIEAENSILDISGFSKQYNCAFIWQKDGVKKLNLYLIINYFKGGKLRFKKIKPEAFEANRFYTVINKKSGEIVPMEVNFNFDDPNLIILPLAFGKRQGREFIWNDLLSLETGSLKLANGRVIEKTLYNRRTRQDEPALFVALTFERREVLDSSNIKPMNLIGVDRGENIPAVIALTDPEGCPLSRFKDSLGNPTHILRIGESFKEKQRTIQAKKEVEMRRAGGYSRKYASKAKNLADDMVRNTARDLLYYAVTQDAMLIFENLSRGFGRQGKRTFMAERQYTRMEDWLTAKLAYEGLPSKTYLSKTLAQYTSKTCSNCGFTITSADYDRVLEKLKKTATGWMTTINGKELKVEGQITYYNRYKRQNVVKDLSVELDRLSEESVNNDISSWTKGRSGEALSLLKKRFSHRPVQEKFVCLNCGFETHADEQAALNIARSWLFLRSQEYKKYQTNKTTGNTDKRAFVETWQSFYRKKLKEVWKPAV

SEQ ID NO: 26573 - protein, 978 aa, synthetic construct
  REGION 1..978: note = engineered CasX variant
QEIKRINKIRRRLVKDSNTKKAGKTGPMKTLLVRVMTPDLRERLENLRKKPENIPQPISNTSRANLNKLLTDYTEMKKAILHVYWEEFQKDPVGLMSRVAQPASKKIDQNKLKPEMDEKGNLTTAGFACSQCGQPLFVYKLEQVSEKGKAYTNYFGRCNVAEHEKLILLAQLKPEKDSDEAVTYSLGKFGQRALDFYSIHVTKESTHPVKPLAQIAGNRYASGPVGKALSDACMGTIASFLSKYQDIIIEHQKVVKGNQKRLESLRELAGKENLEYPSVTLPPQPHTKEGVDAYNEVIARVRMWVNLNLWQKLKLSRDDAKPLLRLKGFPSFPLVERQANEVDWWDMVCNVKKLINEKKEDGKVFWQNLAGYKRQEALRPYLSSEEDRKKGKKFARYQLGDLLLHLEKKHGEDWGKVYDEAWERIDKKVEGLSKHIKLEEERRSEDAQSKAALTDWLRAKASFVIEGLKEADKDEFCRCELKLQKWYGDLRGKPFAIEAENSILDISGFSKQYNCAFIWQKDGVKKLNLYLIINYFKGGKLRFKKIKPEAFEANRFYTVINKKSGEIVPMEVNFNFDDPNLIILPLAFGKRQGREFIWNDLLSLETGSLKLANGRVIEKTLYNRRTRQDEPALFVALTFERREVLDSSNIKPMNLIGVDRGENIPAVIALTDPEGCPLSRFKDSLGNPTHILRIGESFKCKQRTIQAKKEVEQRRAGGYSRKYASKAKNLADDMVRNTARDLLYYAVTQDAMLIFENLSRGFGRQGKRTFMAERQYTRMEDWLTAKLAYEGLPSKTYLSKTLAQYTSKTCSNCGFTITSADYDRVLEKLKKTATGWMTTINGKELKVEGQITYYNRYKRQNVVKDLSVELDRLSEESVNNDISSWTKGRSGEALSLLKKRFSHRPVQEKFVCLNCGFETHADEQAALNIARSWLFLRSQEYKKYQTNKTTGNTDKRAFVETWQSFYRKKLKEVWKPAV

SEQ ID NO: 26574 - protein, 978 aa, synthetic construct
  REGION 1..978: note = engineered CasX variant
QEIKRINKIRRRLVKDSNTKKAGKTGPMKTLLVRVMTPDLRERLENLRKKPENIPQPISNTSRANLNKLLTDYTEMKKAILHVYWEEFQKDPVGLMSRVAQPASKKIDQNKLKPEMDEKGNLTTAGFACSQCGQPLFVYKLEQVSEKGKAYTNYFGRCNVAEHEKLILLAQLKPEKDSDEAVTYSLGKFGQRALDFYSIHVTKESTHPVKPLAQIAGNRYASGPVGKALSDACMGTIASFLSKYQDIIIEHQKVVKGNQKRLESLRELAGKENLEYPSVTLPPQPHTKEGVDAYNEVIARVRMWVNLNLWQKLKLSRDDAKPLLRLKGFPSFPLVERQANEVDWWDMVCNVKKLINEKKEDGKVFWQNLAGYKRQEALRPYLSSEEDRKKGKKFARYQLGDLLLHLEKKHGEDWGKVYDEAWERIDKKVEGLSKHIKLEEERRSEDAQSKAALTDWLRAKASFVIEGLKEADKDEFCRCELKLQKWYGDLRGKPFAIEAENSILDISGFSKQYNCAFIWQKDGVKKLNLYLIINYFKGGKLRFKKIKPEAFEANRFYTVINKKSGEIVPMEVNFNFDDPNLIILPLAFGKRQGREFIWNDLLSLETGSLKLANGRVIEKTLYNRRTRQDEPALFVALTFERREVLDSSNIKPMNLIGVDRGENIPAVIALTDPEGCPLSRFKDSLGNPTHILRIGESFKCKQRTIQAKKEVEMRRAGGYSRKYASKAKNLADDMVRNTARDLLYYAVTQDAMLIFENLSRGFGRQGKRTFMAERQYTRMEDWLTAKLAYEGLPSKTYLSKTLAQYTSKTCSNCGFTITSADYDRVLEKLKKTATGWMTTINGKELKVEGQITYYNRYKRQNVVKDLSVELDRLSEESVNNDISSWTKGRSGEALSLLKKRFSHRPVQEKFVCLNCGFETHADEQAALNIARSWLFLRSQEYKKYQTNKTTGNTDKRAFVETWQSFYRKKLKEVWKPAV

SEQ ID NO: 26575 - protein, 978 aa, synthetic construct
  REGION 1..978: note = engineered CasX variant
QEIKRINKIRRRLVKDSNTKKAGKTGPMKTLLVRVMTPDLRERLENLRKKPENIPQPISNTSRANLNKLLTDYTEMKKAILHVYWEEFQKDPVGLMSRVAQPASKKIDQNKLKPEMDEKGNLTTAGFACSQCGQPLFVYKLEQVSEKGKAYTNYFGRCNVAEHEKLILLAQLKPEKDSDEAVTYSLGKFGQRALDFYSIHVTKESTHPVKPLAQIAGNRYASGPVGKALSDACMGTIASFLSKYQDIIIEHQKVVKGNQKRLESLRELAGKENLEYPSVTLPPQPHTKEGVDAYNEVIARVRMWVNLNLWQKLKLSRDDAKPLLRLKGFPSFPLVERQANEVDWWDMVCNVKKLINEKKEDGKVFWQNLAGYKRQEALRPYLSSEEDRKKGKKFARYQLGDLLLHLEKKHGEDWGKVYDEAWERIDKKVEGLSKHIKLEEERRSEDAQSKAALTDWLRAKASFVIEGLKEADKDEFCRCELKLQKWYGDLRGKPFAIEAENSILDISGFSKQYNCAFIWQKDGVKKLNLYLIINYFKGGKLRFKKIKPEAFEANRFYTVINKKSGEIVPMEVNFNFDDPNLIILPLAFGKRQGREFIWNDLLSLETGSLKLANGRVIEKTLYNRRTRQDEPALFVALTFERREVLDSSNIKPMNLIGVDRGENIPAVIALTDPEGCPLSRFKDSLGNPTHILRIGESAKEKQRTIQAKKEVEQRRAGGYSRKYASKAKNLADDMVRNTARDLLYYAVTQDAMLIFENLSRGFGRQGKRTFMAERQYTRMEDWLTAKLAYEGLPSKTYLSKTLAQYTSKTCSNCGFTITSADYDRVLEKLKKTATGWMTTINGKELKVEGQITYYNRYKRQNVVKDLSVELDRLSEESVNNDISSWTKGRSGEALSLLKKRFSHRPVQEKFVCLNCGFETHADEQAALNIARSWLFLRSQEYKKYQTNKTTGNTDKRAFVETWQSFYRKKLKEVWKPAV

SEQ ID NO: 26576 - protein, 978 aa, synthetic construct
  REGION 1..978: note = engineered CasX variant
QEIKRINKIRRRLVKDSNTKKAGKTGPMKTLLVRVMTPDLRERLENLRKKPENIPQPISNTSRANLNKLLTDYTEMKKAILHVYWEEFQKDPVGLMSRVAQPASKKIDQNKLKPEMDEKGNLTTAGFACSQCGQPLFVYKLEQVSEKGKAYTNYFGRCNVAEHEKLILLAQLKPEKDSDEAVTYSLGKFGQRALDFYSIHVTKESTHPVKPLAQIAGNRYASGPVGKALSDACMGTIASFLSKYQDIIIEHQKVVKGNQKRLESLRELAGKENLEYPSVTLPPQPHTKEGVDAYNEVIARVRMWVNLNLWQKLKLSRDDAKPLLRLKGFPSFPLVERQANEVDWWDMVCNVKKLINEKKEDGKVFWQNLAGYKRQEALRPYLSSEEDRKKGKKFARYQLGDLLLHLEKKHGEDWGKVYDEAWERIDKKVEGLSKHIKLEEERRSEDAQSKAALTDWLRAKASFVIEGLKEADKDEFCRCELKLQKWYGDLRGKPFAIEAENSILDISGFSKQYNCAFIWQKDGVKKLNLYLIINYFKGGKLRFKKIKPEAFEANRFYTVINKKSGEIVPMEVNFNFDDPNLIILPLAFGKRQGREFIWNDLLSLETGSLKLANGRVIEKTLYNRRTRQDEPALFVALTFERREVLDSSNIKPMNLIGVDRGENIPAVIALTDPEGCPLSRFKDSLGNPTHILRIGERYKESQRTIQAKKEVEQRRAGGYSRKYASKAKNLADDMVRNTARDLLYYAVTQDAMLIFENLSRGFGRQGKRTFMAERQYTRMEDWLTAKLAYEGLPSKTYLSKTLAQYTSKTCSNCGFTITSADYDRVLEKLKKTATGWMTTINGKELKVEGQITYYNRYKRQNVVKDLSVELDRLSEESVNNDISSWTKGRSGEALSLLKKRFSHRPVQEKFVCLNCGFETHADEQAALNIARSWLFLRSQEYKKYQTNKTTGNTDKRAFVETWQSFYRKKLKEVWKPAV

SEQ ID NO: 26577 - protein, 978 aa, synthetic construct
  REGION 1..978: note = engineered CasX variant
QEIKRINKIRRRLVKDSNTKKAGKTGPMKTLLVRVMTPDLRERLENLRKKPENIPQPISNTSRANLNKLLTDYTEMKKAILHVYWEEFQKDPVGLMSRVAQPASKKIDQNKLKPEMDEKGNLTTAGFACSQCGQPLFVYKLEQVSEKGKAYTNYFGRCNVAEHEKLILLAQLKPEKDSDEAVTYSLGKFGQRALDFYSIHVTKESTHPVKPLAQIAGNRYASGPVGKALSDACMGTIASFLSKYQDIIIEHQKVVKGNQKRLESLRELAGKENLEYPSVTLPPQPHTKEGVDAYNEVIARVRMWVNLNLWQKLKLSRDDAKPLLRLKGFPSFPLVERQANEVDWWDMVCNVKKLINEKKEDGKVFWQNLAGYKRQEALRPYLSSEEDRKKGKKFARYQLGDLLLHLEKKHGEDWGKVYDEAWERIDKKVEGLSKHIKLEEERRSEDAQSKAALTDWLRAKASFVIEGLKEADKDEFCRCELKLQKWYGDLRGKPFAIEAENSILDISGFSKQYNCAFIWQKDGVKKLNLYLIINYFKGGKLRFKKIKPEAFEANRFYTVINKKSGEIVPMEVNFNFDDPNLIILPLAFGKRQGREFIWNDLLSLETGSLKLANGRVIEKTLYNRRTRQDEPALFVALTFERREVLDSSNIKPMNLIGVDRGENIPAVIALTDPEGCPLSRFKDSLGNPTHILRIGERYKEKQRTIQHKKEVEQRRAGGYSRKYASKAKNLADDMVRNTARDLLYYAVTQDAMLIFENLSRGFGRQGKRTFMAERQYTRMEDWLTAKLAYEGLPSKTYLSKTLAQYTSKTCSNCGFTITSADYDRVLEKLKKTATGWMTTINGKELKVEGQITYYNRYKRQNVVKDLSVELDRLSEESVNNDISSWTKGRSGEALSLLKKRFSHRPVQEKFVCLNCGFETHADEQAALNIARSWLFLRSQEYKKYQTNKTTGNTDKRAFVETWQSFYRKKLKEVWKPAV

SEQ ID NO: 26578 - protein, 978 aa, synthetic construct
  REGION 1..978: note = engineered CasX variant
QEIKRINKIRRRLVKDSNTKKAGKTGPMKTLLVRVMTPDLRERLENLRKKPENIPQPISNTSRANLNKLLTDYTEMKKAILHVYWEEFQKDPVGLMSRVAQPASKKIDQNKLKPEMDEKGNLTTAGFACSQCGQPLFVYKLEQVSEKGKAYTNYFGRCNVAEHEKLILLAQLKPEKDSDEAVTYSLGKFGQRALDFYSIHVTKESTHPVKPLAQIAGNRYASGPVGKALSDACMGTIASFLSKYQDIIIEHQKVVKGNQKRLESLRELAGKENLEYPSVTLPPQPHTKEGVDAYNEVIARVRMWVNLNLWQKLKLSRDDAKPLLRLKGFPSFPLVERQANEVDWWDMVCNVKKLINEKKEDGKVFWQNLAGYKRQEALRPYLSSEEDRKKGKKFARYQLGDLLLHLEKKHGEDWGKVYDEAWERIDKKVEGLSKHIKLEEERRSEDAQSKAALTDWLRAKASFVIEGLKEADKDEFCRCELKLQKWYGDLRGKPFAIEAENSILDISGFSKQYNCAFIWQKDGVKKLNLYLIINYFKGGKLRFKKIKPEAFEANRFYTVINKKSGEIVPMEVNFNFDDPNLIILPLAFGKRQGREFIWNDLLSLETGSLKLANGRVIEKTLYNRRTRQDEPALFVALTFERREVLDSSNIKPMNLIGVDRGENIPAVIALTDPEGCPLSRFKDSLGNPTHILRIGERYKEKQRTIQAKKEVEQRREGGYSRKYASKAKNLADDMVRNTARDLLYYAVTQDAMLIFENLSRGFGRQGKRTFMAERQYTRMEDWLTAKLAYEGLPSKTYLSKTLAQYTSKTCSNCGFTITSADYDRVLEKLKKTATGWMTTINGKELKVEGQITYYNRYKRQNVVKDLSVELDRLSEESVNNDISSWTKGRSGEALSLLKKRFSHRPVQEKFVCLNCGFETHADEQAALNIARSWLFLRSQEYKKYQTNKTTGNTDKRAFVETWQSFYRKKLKEVWKPAV

SEQ ID NO: 26579 - protein, 978 aa, synthetic construct; identical to SEQ ID NO: 272
  REGION 1..978: note = engineered CasX variant

SEQ ID NO: 26580 - protein, 978 aa, synthetic construct
  REGION 1..978: note = engineered CasX variant
QEIKRINKIRRRLVKDSNTKKAGKTGPMKTLLVRVMTPDLRERLENLRKKPENIPQPISNTSRANLNKLLTDYTEMKKAILHVYWEEFQKDPVGLMSRVAQPASKKIDQNKLKPEMDEKGNLTTAGFACSQCGQPLFVYKLEQVSEKGKAYTNYFGRCNVAEHEKLILLAQLKPEKDSDEAVTYSLGKFGQRALDFYSIHVTKESTHPVKPLAQIAGNRYASGPVGKALSDACMGTIASFLSKYQDIIIEHQKVVKGNQKRLESLRELAGKENLEYPSVTLPPQPHTKEGVDAYNEVIARVRMWVNLNLWQKLKLSRDDAKPLLRLKGFPSFPLVERQANEVDWWDMVCNVKKLINEKKEDGKVFWQNLAGYKRQEALRPYLSSEEDRKKGKKFARYQLGDLLLHLEKKHGEDWGKVYDEAWERIDKKVEGLSKHIKLEEERRSEDAQSKAALTDWLRAKASFVIEGLKEADKDEFCRCELKLQKWYGDLRGKPFAIEAENSILDISGFSKQYNCAFIWQKDGVKKLNLYLIINYFKGGKLRFKKIKPEAFEANRFYTVINKKSGEIVPMEVNFNFDDPNLIILPLAFGKRQGREFIWNDLLSLETGSLKLANGRVIEKTLYNRRTRQDEPALFVALTFERREVLDSSNIKPMNLIGVDRGENIPAVIALTDPEGCPLSRFKDSLGNPTHILRIGERYKEKQRTIQAKKEKEQRRAGGYSRKYASKAKNLADDMVRNTARDLLYYAVTQDAMLIFENLSRGFGRQGKRTFMAERQYTRMEDWLTAKLAYEGLPSKTYLSKTLAQYTSKTCSNCGFTITSADYDRVLEKLKKTATGWMTTINGKELKVEGQITYYNRYKRQNVVKDLSVELDRLSEESVNNDISSWTKGRSGEALSLLKKRFSHRPVQEKFVCLNCGFETHADEQAALNIARSWLFLRSQEYKKYQTNKTTGNTDKRAFVETWQSFYRKKLKEVWKPAV

SEQ ID NO: 26581 - protein, 978 aa, synthetic construct
  REGION 1..978: note = engineered CasX variant
QEIKRINKIRRRLVKDSNTKKAGKTGPMKTLLVRVMTPDLRERLENLRKKPENIPQPISNTSRANLNKLLTDYTEMKKAILHVYWEEFQKDPVGLMSRVAQPASKKIDQNKLKPEMDEKGNLTTAGFACSQCGQPLFVYKLEQVSEKGKAYTNYFGRCNVAEHEKLILLAQLKPEKDSDEAVTYSLGKFGQRALDFYSIHVTKESTHPVKPLAQIAGNRYASGPVGKALSDACMGTIASFLSKYQDIIIEHQKVVKGNQKRLESLRELAGKENLEYPSVTLPPQPHTKEGVDAYNEVIARVRMWVNLNLWQKLKLSRDDAKPLLRLKGFPSFPLVERQANEVDWWDMVCNVKKLINEKKEDGKVFWQNLAGYKRQEALRPYLSSEEDRKKGKKFARYQLGDLLLHLEKKHGEDWGKVYDEAWERIDKKVEGLSKHIKLEEERRSEDAQSKAALTDWLRAKASFVIEGLKEADKDEFCRCELKLQKWYGDLRGKPFAIEAENSILDISGFSKQYNCAFIWQKDGVKKLNLYLIINYFKGGKLRFKKIKPEAFEANRFYTVINKKSGEIVPMEVNFNFDDPNLIILPLAFGKRQGREFIWNDLLSLETGSLKLANGRVIEKTLYNRRTRQDEPALFVALTFERREVLDSSNIKPMNLIGVDRGENIPAVIALTDPEGCPLSRFKDSLGNPTHILRIGERYKEKQRGIQAKKEVEQRRAGGYSRKYASKAKNLADDMVRNTARDLLYYAVTQDAMLIFENLSRGFGRQGKRTFMAERQYTRMEDWLTAKLAYEGLPSKTYLSKTLAQYTSKTCSNCGFTITSADYDRVLEKLKKTATGWMTTINGKELKVEGQITYYNRYKRQNVVKDLSVELDRLSEESVNNDISSWTKGRSGEALSLLKKRFSHRPVQEKFVCLNCGFETHADEQAALNIARSWLFLRSQEYKKYQTNKTTGNTDKRAFVETWQSFYRKKLKEVWKPAV

SEQ ID NO: 26582 - protein, 978 aa, synthetic construct
  REGION 1..978: note = engineered CasX variant
QEIKRINKIRRRLVKDSNTKKAGKTGPMKTLLVRVMTPDLRERLENLRKKPENIPQPISNTSRANLNKLLTDYTEMKKAILHVYWEEFQKDPVGLMSRVAQPASKKIDQNKLKPEMDEKGNLTTAGFACSQCGQPLFVYKLEQVSEKGKAYTNYFGRCNVAEHEKLILLAQLKPEKDSDEAVTYSLGKFGQRALDFYSIHVTKESTHPVKPLAQIAGNRYASGPVGKALSDACMGTIASFLSKYQDIIIEHQKVVKGNQKRLESLRELAGKENLEYPSVTLPPQPHTKEGVDAYNEVIARVRMWVNLNLWQKLKLSRDDAKPLLRLKGFPSFPLVERQANEVDWWDMVCNVKKLINEKKEDGKVFWQNLAGYKRQEALRPYLSSEEDRKKGKKFARYQLGDLLLHLEKKHGEDWGKVYDEAWERIDKKVEGLSKHIKLEEERRSEDAQSKAALTDWLRAKASFVIEGLKEADKDEFCRCELKLQKWYGDLRGKPFAIEAENSILDISGFSKQYNCAFIWQKDGVKKLNLYLIINYFKGGKLRFKKIKPEAFEANRFYTVINKKSGEIVPMEVNFNFDDPNLIILPLAFGKRQGREFIWNDLLSLETGSLKLANGRVIEKTLYNRRTRQDEPALFVALTFERREVLDSSNIKPMNLIGVDRGENIPAVIALTDPEGCPLSRFKDSLGNPTHILRIGEPYKEKQRTIQQKKEVEQRRAGGYSRKYASKAKNLADDMVRNTARDLLYYAVTQDAMLIFENLSRGFGRQGKRTFMAERQYTRMEDWLTAKLAYEGLPSKTYLSKTLAQYTSKTCSNCGFTITSADYDRVLEKLKKTATGWMTTINGKELKVEGQITYYNRYKRQNVVKDLSVELDRLSEESVNNDISSWTKGRSGEALSLLKKRFSHRPVQEKFVCLNCGFETHADEQAALNIARSWLFLRSQEYKKYQTNKTTGNTDKRAFVETWQSFYRKKLKEVWKPAV

SEQ ID NO: 26583 - protein, 978 aa, synthetic construct
  REGION 1..978: note = engineered CasX variant
QEIKRINKIRRRLVKDSNTKKAGKTGPMKTLLVRVMTPDLRERLENLRKKPENIPQPISNTSRANLNKLLTDYTEMKKAILHVYWEEFQKDPVGLMSRVAQPASKKIDQNKLKPEMDEKGNLTTAGFACSQCGQPLFVYKLEQVSEKGKAYTNYFGRCNVAEHEKLILLAQLKPEKDSDEAVTYSLGKFGQRALDFYSIHVTKESTHPVKPLAQIAGNRYASGPVGKALSDACMGTIASFLSKYQDIIIEHQKVVKGNQKRLESLRELAGKENLEYPSVTLPPQPHTKEGVDAYNEVIARVRMWVNLNLWQKLKLSRDDAKPLLRLKGFPSFPLVERQANEVDWWDMVCNVKKLINEKKEDGKVFWQNLAGYKRQEALRPYLSSEEDRKKGKKFARYQLGDLLLHLEKKHGEDWGKVYDEAWERIDKKVEGLSKHIKLEEERRSEDAQSKAALTDWLRAKASFVIEGLKEADKDEFCRCELKLQKWYGDLRGKPFAIEAENSILDISGFSKQYNCAFIWQKDGVKKLNLYLIINYFKGGKLRFKKIKPEAFEANRFYTVINKKSGEIVPMEVNFNFDDPNLIILPLAFGKRQGREFIWNDLLSLETGSLKLANGRVIEKTLYNRRTRQDEPALFVALTFERREVLDSSNIKPMNLIGVDRGENIPAVIALTDPEGCPLSRFKDSLGNPTHILRIGEPYKEKQRTIQAKKEVEQRRAHGYSRKYASKAKNLADDMVRNTARDLLYYAVTQDAMLIFENLSRGFGRQGKRTFMAERQYTRMEDWLTAKLAYEGLPSKTYLSKTLAQYTSKTCSNCGFTITSADYDRVLEKLKKTATGWMTTINGKELKVEGQITYYNRYKRQNVVKDLSVELDRLSEESVNNDISSWTKGRSGEALSLLKKRFSHRPVQEKFVCLNCGFETHADEQAALNIARSWLFLRSQEYKKYQTNKTTGNTDKRAFVETWQSFYRKKLKEVWKPAV

SEQ ID NO: 26584 - protein, 978 aa, synthetic construct
  REGION 1..978: note = engineered CasX variant
QEIKRINKIRRRLVKDSNTKKAGKTGPMKTLLVRVMTPDLRERLENLRKKPENIPQPISNTSRANLNKLLTDYTEMKKAILHVYWEEFQKDPVGLMSRVAQPASKKIDQNKLKPEMDEKGNLTTAGFACSQCGQPLFVYKLEQVSEKGKAYTNYFGRCNVAEHEKLILLAQLKPEKDSDEAVTYSLGKFGQRALDFYSIHVTKESTHPVKPLAQIAGNRYASGPVGKALSDACMGTIASFLSKYQDIIIEHQKVVKGNQKRLESLRELAGKENLEYPSVTLPPQPHTKEGVDAYNEVIARVRMWVNLNLWQKLKLSRDDAKPLLRLKGFPSFPLVERQANEVDWWDMVCNVKKLINEKKEDGKVFWQNLAGYKRQEALRPYLSSEEDRKKGKKFARYQLGDLLLHLEKKHGEDWGKVYDEAWERIDKKVEGLSKHIKLEEERRSEDAQSKAALTDWLRAKASFVIEGLKEADKDEFCRCELKLQKWYGDLRGKPFAIEAENSILDISGFSKQYNCAFIWQKDGVKKLNLYLIINYFKGGKLRFKKIKPEAFEANRFYTVINKKSGEIVPMEVNFNFDDPNLIILPLAFGKRQGREFIWNDLLSLETGSLKLANGRVIEKTLYNRRTRQDEPALFVALTFERREVLDSSNIKPMNLIGVDRGENIPAVIALTDPEGCPLSRFKDSLGNPTHILRIGEPYKEKQRTIQAKKEVEQRRAGRYSRKYASKAKNLADDMVRNTARDLLYYAVTQDAMLIFENLSRGFGRQGKRTFMAERQYTRMEDWLTAKLAYEGLPSKTYLSKTLAQYTSKTCSNCGFTITSADYDRVLEKLKKTATGWMTTINGKELKVEGQITYYNRYKRQNVVKDLSVELDRLSEESVNNDISSWTKGRSGEALSLLKKRFSHRPVQEKFVCLNCGFETHADEQAALNIARSWLFLRSQEYKKYQTNKTTGNTDKRAFVETWQSFYRKKLKEVWKPAV

SEQ ID NO: 26585 - protein, 978 aa, synthetic construct
  REGION 1..978: note = engineered CasX variant
QEIKRINKIRRRLVKDSNTKKAGKTGPMKTLLVRVMTPDLRERLENLRKKPENIPQPISNTSRANLNKLLTDYTEMKKAILHVYWEEFQKDPVGLMSRVAQPASKKIDQNKLKPEMDEKGNLTTAGFACSQCGQPLFVYKLEQVSEKGKAYTNYFGRCNVAEHEKLILLAQLKPEKDSDEAVTYSLGKFGQRALDFYSIHVTKESTHPVKPLAQIAGNRYASGPVGKALSDACMGTIASFLSKYQDIIIEHQKVVKGNQKRLESLRELAGKENLEYPSVTLPPQPHTKEGVDAYNEVIARVRMWVNLNLWQKLKLSRDDAKPLLRLKGFPSFPLVERQANEVDWWDMVCNVKKLINEKKEDGKVFWQNLAGYKRQEALRPYLSSEEDRKKGKKFARYQLGDLLLHLEKKHGEDWGKVYDEAWERIDKKVEGLSKHIKLEEERRSEDAQSKAALTDWLRAKASFVIEGLKEADKDEFCRCELKLQKWYGDLRGKPFAIEAENSILDISGFSKQYNCAFIWQKDGVKKLNLYLIINYFKGGKLRFKKIKPEAFEANRFYTVINKKSGEIVPMEVNFNFDDPNLIILPLAFGKRQGREFIWNDLLSLETGSLKLANGRVIEKTLYNRRTRQDEPALFVALTFERREVLDSSNIKPMNLIGVDRGENIPAVIALTDPEGCPLSRFKDSLGNPTHILRIGEPYKEKQRTIQAKKEVEQRRAGGYSRKYASKAKNLADDMVRNTARDLLYYAVTQDAMLIFENLSRGFGRQGKRTFMAERQYTRMEDWLTAKLAYEGLPSKTYLSKTLAQYTSKTCSNCGFTITSADYDRVLEKLKKTATGWMTTINGKELKVEGQITYYNRYKRQNVVKDLSVELDRLSEESVNNDISSWTKGRSGEALSLLKKRFSHRPVQEKFVCLNCGFETHADEQAALNIARSWLFLRSQEYKKYQTNKTTGNTDKRAFVETWQSFYRKKLKEVWKPAV

SEQ ID NO: 26586 - protein, 978 aa, synthetic construct
  REGION 1..978: note = engineered CasX variant
QEIKRINKIRRRLVKDSNTKKAGKTGPMKTLLVRVMTPDLRERLENLRKKPENIPQPISNTSRANLNKLLTDYTEMKKAILHVYWEEFQKDPVGLMSRVAQPASKKIDQNKLKPEMDEKGNLTTAGFACSQCGQPLFVYKLEQVSEKGKAYTNYFGRCNVAEHEKLILLAQLKPEKDSDEAVTYSLGKFGQRALDFYSIHVTKESTHPVKPLAQIAGNRYASGPVGKALSDACMGTIASFLSKYQDIIIEHQKVVKGNQKRLESLRELAGKENLEYPSVTLPPQPHTKEGVDAYNEVIARVRMWVNLNLWQKLKLSRDDAKPLLRLKGFPSFPLVERQANEVDWWDMVCNVKKLINEKKEDGKVFWQNLAGYKRQEALRPYLSSEEDRKKGKKFARYQLGDLLLHLEKKHGEDWGKVYDEAWERIDKKVEGLSKHIKLEEERRSEDAQSKAALTDWLRAKASFVIEGLKEADKDEFCRCELKLQKWYGDLRGKPFAIEAENSILDISGFSKQYNCAFIWQKDGVKKLNLYLIINYFKGGKLRFKKIKPEAFEANRFYTVINKKSGEIVPMEVNFNFDDPNLIILPLAFGKRQGREFIWNDLLSLETGSLKLANGRVIEKTLYNRRTRQDEPALFVALTFERREVLDSSNIKPMNLIGVDRGENIPAVIALTDPEGCPLSRFKDSLGNPTHILRIGEPYKEKQRTIQAKKEVEQRRAFGYSRKYASKAKNLADDMVRNTARDLLYYAVTQDAMLIFENLSRGFGRQGKRTFMAERQYTRMEDWLTAKLAYEGLPSKTYLSKTLAQYTSKTCSNCGFTITSADYDRVLEKLKKTATGWMTTINGKELKVEGQITYYNRYKRQNVVKDLSVELDRLSEESVNNDISSWTKGRSGEALSLLKKRFSHRPVQEKFVCLNCGFETHADEQAALNIARSWLFLRSQEYKKYQTNKTTGNTDKRAFVETWQSFYRKKLKEVWKPAV

SEQ ID NO: 26587 - protein, 978 aa, synthetic construct
  REGION 1..978: note = engineered CasX variant
QEIKRINKIRRRLVKDSNTKKAGKTGPMKTLLVRVMTPDLRERLENLRKKPENIPQPISNTSRANLNKLLTDYTEMKKAILHVYWEEFQKDPVGLMSRVAQPASKKIDQNKLKPEMDEKGNLTTAGFACSQCGQPLFVYKLEQVSEKGKAYTNYFGRCNVAEHEKLILLAQLKPEKDSDEAVTYSLGKFGQRALDFYSIHVTKESTHPVKPLAQIAGNRYASGPVGKALSDACMGTIASFLSKYQDIIIEHQKVVKGNQKRLESLRELAGKENLEYPSVTLPPQPHTKEGVDAYNEVIARVRMWVNLNLWQKLKLSRDDAKPLLRLKGFPSFPLVERQANEVDWWDMVCNVKKLINEKKEDGKVFWQNLAGYKRQEALRPYLSSEEDRKKGKKFARYQLGDLLLHLEKKHGEDWGKVYDEAWERIDKKVEGLSKHIKLEEERRSEDAQSKAALTDWLRAKASFVIEGLKEADKDEFCRCELKLQKWYGDLRGKPFAIEAENSILDISGFSKQYNCAFIWQKDGVKKLNLYLIINYFKGGKLRFKKIKPEAFEANRFYTVINKKSGEIVPMEVNFNFDDPNLIILPLAFGKRQGREFIWNDLLSLETGSLKLANGRVIEKTLYNRRTRQDEPALFVALTFERREVLDSSNIKPMNLIGVDRGENIPAVIALTDPEGCPLSRFKDSLGNPTHILRIGEPYKCKQRTIQAKKEVEQRRAGGYSRKYASKAKNLADDMVRNTARDLLYYAVTQDAMLIFENLSRGFGRQGKRTFMAERQYTRMEDWLTAKLAYEGLPSKTYLSKTLAQYTSKTCSNCGFTITSADYDRVLEKLKKTATGWMTTINGKELKVEGQITYYNRYKRQNVVKDLSVELDRLSEESVNNDISSWTKGRSGEALSLLKKRFSHRPVQEKFVCLNCGFETHADEQAALNIARSWLFLRSQEYKKYQTNKTTGNTDKRAFVETWQSFYRKKLKEVWKPAV

SEQ ID NO: 26588 - protein, 978 aa, synthetic construct
  REGION 1..978: note = engineered CasX variant
QEIKRINKIRRRLVKDSNTKKAGKTGPMKTLLVRVMTPDLRERLENLRKKPENIPQPISNTSRANLNKLLTDYTEMKKAILHVYWEEFQKDPVGLMSRVAQPASKKIDQNKLKPEMDEKGNLTTAGFACSQCGQPLFVYKLEQVSEKGKAYTNYFGRCNVAEHEKLILLAQLKPEKDSDEAVTYSLGKFGQRALDFYSIHVTKESTHPVKPLAQIAGNRYASGPVGKALSDACMGTIASFLSKYQDIIIEHQKVVKGNQKRLESLRELAGKENLEYPSVTLPPQPHTKEGVDAYNEVIARVRMWVNLNLWQKLKLSRDDAKPLLRLKGFPSFPLVERQANEVDWWDMVCNVKKLINEKKEDGKVFWQNLAGYKRQEALRPYLSSEEDRKKGKKFARYQLGDLLLHLEKKHGEDWGKVYDEAWERIDKKVEGLSKHIKLEEERRSEDAQSKAALTDWLRAKASFVIEGLKEADKDEFCRCELKLQKWYGDLRGKPFAIEAENSILDISGFSKQYNCAFIWQKDGVKKLNLYLIINYFKGGKLRFKKIKPEAFEANRFYTVINKKSGEIVPMEVNFNFDDPNLIILPLAFGKRQGREFIWNDLLSLETGSLKLANGRVIEKTLYNRRTRQDEPALFVALTFERREVLDSSNIKPMNLIGVDRGENIPAVIALTDPEGCPLSRFKDSLGNPTHILRIGENYKEKQRTIQAYKEVEQRRAGGYSRKYASKAKNLADDMVRNTARDLLYYAVTQDAMLIFENLSRGFGRQGKRTFMAERQYTRMEDWLTAKLAYEGLPSKTYLSKTLAQYTSKTCSNCGFTITSADYDRVLEKLKKTATGWMTTINGKELKVEGQITYYNRYKRQNVVKDLSVELDRLSEESVNNDISSWTKGRSGEALSLLKKRFSHRPVQEKFVCLNCGFETHADEQAALNIARSWLFLRSQEYKKYQTNKTTGNTDKRAFVETWQSFYRKKLKEVWKPAV

SEQ ID NO: 26589 - protein, 978 aa, synthetic construct
  REGION 1..978: note = engineered CasX variant
QEIKRINKIRRRLVKDSNTKKAGKTGPMKTLLVRVMTPDLRERLENLRKKPENIPQPISNTSRANLNKLLTDYTEMKKAILHVYWEEFQKDPVGLMSRVAQPASKKIDQNKLKPEMDEKGNLTTAGFACSQCGQPLFVYKLEQVSEKGKAYTNYFGRCNVAEHEKLILLAQLKPEKDSDEAVTYSLGKFGQRALDFYSIHVTKESTHPVKPLAQIAGNRYASGPVGKALSDACMGTIASFLSKYQDIIIEHQKVVKGNQKRLESLRELAGKENLEYPSVTLPPQPHTKEGVDAYNEVIARVRMWVNLNLWQKLKLSRDDAKPLLRLKGFPSFPLVERQANEVDWWDMVCNVKKLINEKKEDGKVFWQNLAGYKRQEALRPYLSSEEDRKKGKKFARYQLGDLLLHLEKKHGEDWGKVYDEAWERIDKKVEGLSKHIKLEEERRSEDAQSKAALTDWLRAKASFVIEGLKEADKDEFCRCELKLQKWYGDLRGKPFAIEAENSILDISGFSKQYNCAFIWQKDGVKKLNLYLIINYFKGGKLRFKKIKPEAFEANRFYTVINKKSGEIVPMEVNFNFDDPNLIILPLAFGKRQGREFIWNDLLSLETGSLKLANGRVIEKTLYNRRTRQDEPALFVALTFERREVLDSSNIKPMNLIGVDRGENIPAVIALTDPEGCPLSRFKDSLGNPTHILRIGENYKEKQRTIQAKKEVEQRRAGGYSRKYASKAKNLADDMVRNTARDLLYYAVTQDAMLIFENLSRGFGRQGKRTFMAERQYTRMEDWLTAKLAYEGLPSKTYLSKTLAQYTSKTCSNCGFTITSADYDRVLEKLKKTATGWMTTINGKELKVEGQITYYNRYKRQNVVKDLSVELDRLSEESVNNDISSWTKGRSGEALSLLKKRFSHRPVQEKFVCLNCGFETHADEQAALNIARSWLFLRSQEYKKYQTNKTTGNTDKRAFVETWQSFYRKKLKEVWKPAV

SEQ ID NO: 26590 - protein, 978 aa, synthetic construct
  REGION 1..978: note = engineered CasX variant
QEIKRINKIRRRLVKDSNTKKAGKTGPMKTLLVRVMTPDLRERLENLRKKPENIPQPISNTSRANLNKLLTDYTEMKKAILHVYWEEFQKDPVGLMSRVAQPASKKIDQNKLKPEMDEKGNLTTAGFACSQCGQPLFVYKLEQVSEKGKAYTNYFGRCNVAEHEKLILLAQLKPEKDSDEAVTYSLGKFGQRALDFYSIHVTKESTHPVKPLAQIAGNRYASGPVGKALSDACMGTIASFLSKYQDIIIEHQKVVKGNQKRLESLRELAGKENLEYPSVTLPPQPHTKEGVDAYNEVIARVRMWVNLNLWQKLKLSRDDAKPLLRLKGFPSFPLVERQANEVDWWDMVCNVKKLINEKKEDGKVFWQNLAGYKRQEALRPYLSSEEDRKKGKKFARYQLGDLLLHLEKKHGEDWGKVYDEAWERIDKKVEGLSKHIKLEEERRSEDAQSKAALTDWLRAKASFVIEGLKEADKDEFCRCELKLQKWYGDLRGKPFAIEAENSILDISGFSKQYNCAFIWQKDGVKKLNLYLIINYFKGGKLRFKKIKPEAFEANRFYTVINKKSGEIVPMEVNFNFDDPNLIILPLAFGKRQGREFIWNDLLSLETGSLKLANGRVIEKTLYNRRTRQDEPALFVALTFERREVLDSSNIKPMNLIGVDRGENIPAVIALTDPEGCPLSRFKDSLGNPTHILRIGENYKEKQRTIQAKKEVEARRAGGYSRKYASKAKNLADDMVRNTARDLLYYAVTQDAMLIFENLSRGFGRQGKRTFMAERQYTRMEDWLTAKLAYEGLPSKTYLSKTLAQYTSKTCSNCGFTITSADYDRVLEKLKKTATGWMTTINGKELKVEGQITYYNRYKRQNVVKDLSVELDRLSEESVNNDISSWTKGRSGEALSLLKKRFSHRPVQEKFVCLNCGFETHADEQAALNIARSWLFLRSQEYKKYQTNKTTGNTDKRAFVETWQSFYRKKLKEVWKPAV

SEQ ID NO: 26591 - protein, 978 aa, synthetic construct
  REGION 1..978: note = engineered CasX variant
QEIKRINKIRRRLVKDSNTKKAGKTGPMKTLLVRVMTPDLRERLENLRKKPENIPQPISNTSRANLNKLLTDYTEMKKAILHVYWEEFQKDPVGLMSRVAQPASKKIDQNKLKPEMDEKGNLTTAGFACSQCGQPLFVYKLEQVSEKGKAYTNYFGRCNVAEHEKLILLAQLKPEKDSDEAVTYSLGKFGQRALDFYSIHVTKESTHPVKPLAQIAGNRYASGPVGKALSDACMGTIASFLSKYQDIIIEHQKVVKGNQKRLESLRELAGKENLEYPSVTLPPQPHTKEGVDAYNEVIARVRMWVNLNLWQKLKLSRDDAKPLLRLKGFPSFPLVERQANEVDWWDMVCNVKKLINEKKEDGKVFWQNLAGYKRQEALRPYLSSEEDRKKGKKFARYQLGDLLLHLEKKHGEDWGKVYDEAWERIDKKVEGLSKHIKLEEERRSEDAQSKAALTDWLRAKASFVIEGLKEADKDEFCRCELKLQKWYGDLRGKPFAIEAENSILDISGFSKQYNCAFIWQKDGVKKLNLYLIINYFKGGKLRFKKIKPEAFEANRFYTVINKKSGEIVPMEVNFNFDDPNLIILPLAFGKRQGREFIWNDLLSLETGSLKLANGRVIEKTLYNRRTRQDEPALFVALTFERREVLDSSNIKPMNLIGVDRGENIPAVIALTDPEGCPLSRFKDSLGNPTHILRIGEMYKEKQRTIYAKKEVEQRRAGGYSRKYASKAKNLADDMVRNTARDLLYYAVTQDAMLIFENLSRGFGRQGKRTFMAERQYTRMEDWLTAKLAYEGLPSKTYLSKTLAQYTSKTCSNCGFTITSADYDRVLEKLKKTATGWMTTINGKELKVEGQITYYNRYKRQNVVKDLSVELDRLSEESVNNDISSWTKGRSGEALSLLKKRFSHRPVQEKFVCLNCGFETHADEQAALNIARSWLFLRSQEYKKYQTNKTTGNTDKRAFVETWQSFYRKKLKEVWKPAV

SEQ ID NO: 26592 - protein, 978 aa, synthetic construct
  REGION 1..978: note = engineered CasX variant
QEIKRINKIRRRLVKDSNTKKAGKTGPMKTLLVRVMTPDLRERLENLRKKPENIPQPISNTSRANLNKLLTDYTEMKKAILHVYWEEFQKDPVGLMSRVAQPASKKIDQNKLKPEMDEKGNLTTAGFACSQCGQPLFVYKLEQVSEKGKAYTNYFGRCNVAEHEKLILLAQLKPEKDSDEAVTYSLGKFGQRALDFYSIHVTKESTHPVKPLAQIAGNRYASGPVGKALSDACMGTIASFLSKYQDIIIEHQKVVKGNQKRLESLRELAGKENLEYPSVTLPPQPHTKEGVDAYNEVIARVRMWVNLNLWQKLKLSRDDAKPLLRLKGFPSFPLVERQANEVDWWDMVCNVKKLINEKKEDGKVFWQNLAGYKRQEALRPYLSSEEDRKKGKKFARYQLGDLLLHLEKKHGEDWGKVYDEAWERIDKKVEGLSKHIKLEEERRSEDAQSKAALTDWLRAKASFVIEGLKEADKDEFCRCELKLQKWYGDLRGKPFAIEAENSILDISGFSKQYNCAFIWQKDGVKKLNLYLIINYFKGGKLRFKKIKPEAFEANRFYTVINKKSGEIVPMEVNFNFDDPNLIILPLAFGKRQGREFIWNDLLSLETGSLKLANGRVIEKTLYNRRTRQDEPALFVALTFERREVLDSSNIKPMNLIGVDRGENIPAVIALTDPEGCPLSRFKDSLGNPTHILRIGEMYKEKQRTIQAKKEVEQRRAGGYSRKYASKAKNLADDMVRNTARDLLYYAVTQDAMLIFENLSRGFGRQGKRTFMAERQYTRMEDWLTAKLAYEGLPSKTYLSKTLAQYTSKTCSNCGFTITSADYDRVLEKLKKTATGWMTTINGKELKVEGQITYYNRYKRQNVVKDLSVELDRLSEESVNNDISSWTKGRSGEALSLLKKRFSHRPVQEKFVCLNCGFETHADEQAALNIARSWLFLRSQEYKKYQTNKTTGNTDKRAFVETWQSFYRKKLKEVWKPAV

SEQ ID NO: 26593 - protein, 978 aa, synthetic construct
  REGION 1..978: note = engineered CasX variant
QEIKRINKIRRRLVKDSNTKKAGKTGPMKTLLVRVMTPDLRERLENLRKKPENIPQPISNTSRANLNKLLTDYTEMKKAILHVYWEEFQKDPVGLMSRVAQPASKKIDQNKLKPEMDEKGNLTTAGFACSQCGQPLFVYKLEQVSEKGKAYTNYFGRCNVAEHEKLILLAQLKPEKDSDEAVTYSLGKFGQRALDFYSIHVTKESTHPVKPLAQIAGNRYASGPVGKALSDACMGTIASFLSKYQDIIIEHQKVVKGNQKRLESLRELAGKENLEYPSVTLPPQPHTKEGVDAYNEVIARVRMWVNLNLWQKLKLSRDDAKPLLRLKGFPSFPLVERQANEVDWWDMVCNVKKLINEKKEDGKVFWQNLAGYKRQEALRPYLSSEEDRKKGKKFARYQLGDLLLHLEKKHGEDWGKVYDEAWERIDKKVEGLSKHIKLEEERRSEDAQSKAALTDWLRAKASFVIEGLKEADKDEFCRCELKLQKWYGDLRGKPFAIEAENSILDISGFSKQYNCAFIWQKDGVKKLNLYLIINYFKGGKLRFKKIKPEAFEANRFYTVINKKSGEIVPMEVNFNFDDPNLIILPLAFGKRQGREFIWNDLLSLETGSLKLANGRVIEKTLYNRRTRQDEPALFVALTFERREVLDSSNIKPMNLIGVDRGENIPAVIALTDPEGCPLSRFKDSLGNPTHILRIGELYKEKQRTIQAKKEVEQRRAGGYSRKYASKAKNLADDMVRNTARDLLYYAVTQDAMLIFENLSRGFGRQGKRTFMAERQYTRMEDWLTAKLAYEGLPSKTYLSKTLAQYTSKTCSNCGFTITSADYDRVLEKLKKTATGWMTTINGKELKVEGQITYYNRYKRQNVVKDLSVELDRLSEESVNNDISSWTKGRSGEALSLLKKRFSHRPVQEKFVCLNCGFETHADEQAALNIARSWLFLRSQEYKKYQTNKTTGNTDKRAFVETWQSFYRKKLKEVWKPAV

SEQ ID NO: 26594 - protein, 978 aa, synthetic construct
  REGION 1..978: note = engineered CasX variant
QEIKRINKIRRRLVKDSNTKKAGKTGPMKTLLVRVMTPDLRERLENLRKKPENIPQPISNTSRANLNKLLTDYTEMKKAILHVYWEEFQKDPVGLMSRVAQPASKKIDQNKLKPEMDEKGNLTTAGFACSQCGQPLFVYKLEQVSEKGKAYTNYFGRCNVAEHEKLILLAQLKPEKDSDEAVTYSLGKFGQRALDFYSIHVTKESTHPVKPLAQIAGNRYASGPVGKALSDACMGTIASFLSKYQDIIIEHQKVVKGNQKRLESLRELAGKENLEYPSVTLPPQPHTKEGVDAYNEVIARVRMWVNLNLWQKLKLSRDDAKPLLRLKGFPSFPLVERQANEVDWWDMVCNVKKLINEKKEDGKVFWQNLAGYKRQEALRPYLSSEEDRKKGKKFARYQLGDLLLHLEKKHGEDWGKVYDEAWERIDKKVEGLSKHIKLEEERRSEDAQSKAALTDWLRAKASFVIEGLKEADKDEFCRCELKLQKWYGDLRGKPFAIEAENSILDISGFSKQYNCAFIWQKDGVKKLNLYLIINYFKGGKLRFKKIKPEAFEANRFYTVINKKSGEIVPMEVNFNFDDPNLIILPLAFGKRQGREFIWNDLLSLETGSLKLANGRVIEKTLYNRRTRQDEPALFVALTFERREVLDSSNIKPMNLIGVDRGENIPAVIALTDPEGCPLSRFKDSLGNPTHILRIGELYKEKQRTIQAKKEVEQLRAGGYSRKYASKAKNLADDMVRNTARDLLYYAVTQDAMLIFENLSRGFGRQGKRTFMAERQYTRMEDWLTAKLAYEGLPSKTYLSKTLAQYTSKTCSNCGFTITSADYDRVLEKLKKTATGWMTTINGKELKVEGQITYYNRYKRQNVVKDLSVELDRLSEESVNNDISSWTKGRSGEALSLLKKRFSHRPVQEKFVCLNCGFETHADEQAALNIARSWLFLRSQEYKKYQTNKTTGNTDKRAFVETWQSFYRKKLKEVWKPAV

SEQ ID NO: 26595 - protein, 978 aa, synthetic construct
  REGION 1..978: note = engineered CasX variant
QEIKRINKIRRRLVKDSNTKKAGKTGPMKTLLVRVMTPDLRERLENLRKKPENIPQPISNTSRANLNKLLTDYTEMKKAILHVYWEEFQKDPVGLMSRVAQPASKKIDQNKLKPEMDEKGNLTTAGFACSQCGQPLFVYKLEQVSEKGKAYTNYFGRCNVAEHEKLILLAQLKPEKDSDEAVTYSLGKFGQRALDFYSIHVTKESTHPVKPLAQIAGNRYASGPVGKALSDACMGTIASFLSKYQDIIIEHQKVVKGNQKRLESLRELAGKENLEYPSVTLPPQPHTKEGVDAYNEVIARVRMWVNLNLWQKLKLSRDDAKPLLRLKGFPSFPLVERQANEVDWWDMVCNVKKLINEKKEDGKVFWQNLAGYKRQEALRPYLSSEEDRKKGKKFARYQLGDLLLHLEKKHGEDWGKVYDEAWERIDKKVEGLSKHIKLEEERRSEDAQSKAALTDWLRAKASFVIEGLKEADKDEFCRCELKLQKWYGDLRGKPFAIEAENSILDISGFSKQYNCAFIWQKDGVKKLNLYLIINYFKGGKLRFKKIKPEAFEANRFYTVINKKSGEIVPMEVNFNFDDPNLIILPLAFGKRQGREFIWNDLLSLETGSLKLANGRVIEKTLYNRRTRQDEPALFVALTFERREVLDSSNIKPMNLIGVDRGENIPAVIALTDPEGCPLSRFKDSLGNPTHILRIGEKYKYKQRTIQAKKEVEQRRAGGYSRKYASKAKNLADDMVRNTARDLLYYAVTQDAMLIFENLSRGFGRQGKRTFMAERQYTRMEDWLTAKLAYEGLPSKTYLSKTLAQYTSKTCSNCGFTITSADYDRVLEKLKKTATGWMTTINGKELKVEGQITYYNRYKRQNVVKDLSVELDRLSEESVNNDISSWTKGRSGEALSLLKKRFSHRPVQEKFVCLNCGFETHADEQAALNIARSWLFLRSQEYKKYQTNKTTGNTDKRAFVETWQSFYRKKLKEVWKPAV

SEQ ID NO: 26596 - protein, 978 aa, synthetic construct; identical to SEQ ID NO: 273
  REGION 1..978: note = engineered CasX variant

SEQ ID NO: 26597 - protein, 978 aa, synthetic construct
  REGION 1..978: note = engineered CasX variant
QEIKRINKIRRRLVKDSNTKKAGKTGPMKTLLVRVMTPDLRERLENLRKKPENIPQPISNTSRANLNKLLTDYTEMKKAILHVYWEEFQKDPVGLMSRVAQPASKKIDQNKLKPEMDEKGNLTTAGFACSQCGQPLFVYKLEQVSEKGKAYTNYFGRCNVAEHEKLILLAQLKPEKDSDEAVTYSLGKFGQRALDFYSIHVTKESTHPVKPLAQIAGNRYASGPVGKALSDACMGTIASFLSKYQDIIIEHQKVVKGNQKRLESLRELAGKENLEYPSVTLPPQPHTKEGVDAYNEVIARVRMWVNLNLWQKLKLSRDDAKPLLRLKGFPSFPLVERQANEVDWWDMVCNVKKLINEKKEDGKVFWQNLAGYKRQEALRPYLSSEEDRKKGKKFARYQLGDLLLHLEKKHGEDWGKVYDEAWERIDKKVEGLSKHIKLEEERRSEDAQSKAALTDWLRAKASFVIEGLKEADKDEFCRCELKLQKWYGDLRGKPFAIEAENSILDISGFSKQYNCAFIWQKDGVKKLNLYLIINYFKGGKLRFKKIKPEAFEANRFYTVINKKSGEIVPMEVNFNFDDPNLIILPLAFGKRQGREFIWNDLLSLETGSLKLANGRVIEKTLYNRRTRQDEPALFVALTFERREVLDSSNIKPMNLIGVDRGENIPAVIALTDPEGCPLSRFKDSLGNPTHILRIGEIYKEKQRTIQAYKEVEQRRAGGYSRKYASKAKNLADDMVRNTARDLLYYAVTQDAMLIFENLSRGFGRQGKRTFMAERQYTRMEDWLTAKLAYEGLPSKTYLSKTLAQYTSKTCSNCGFTITSADYDRVLEKLKKTATGWMTTINGKELKVEGQITYYNRYKRQNVVKDLSVELDRLSEESVNNDISSWTKGRSGEALSLLKKRFSHRPVQEKFVCLNCGFETHADEQAALNIARSWLFLRSQEYKKYQTNKTTGNTDKRAFVETWQSFYRKKLKEVWKPAV

SEQ ID NO: 26598 - protein, 978 aa, synthetic construct
  REGION 1..978: note = engineered CasX variant
QEIKRINKIRRRLVKDSNTKKAGKTGPMKTLLVRVMTPDLRERLENLRKKPENIPQPISNTSRANLNKLLTDYTEMKKAILHVYWEEFQKDPVGLMSRVAQPASKKIDQNKLKPEMDEKGNLTTAGFACSQCGQPLFVYKLEQVSEKGKAYTNYFGRCNVAEHEKLILLAQLKPEKDSDEAVTYSLGKFGQRALDFYSIHVTKESTHPVKPLAQIAGNRYASGPVGKALSDACMGTIASFLSKYQDIIIEHQKVVKGNQKRLESLRELAGKENLEYPSVTLPPQPHTKEGVDAYNEVIARVRMWVNLNLWQKLKLSRDDAKPLLRLKGFPSFPLVERQANEVDWWDMVCNVKKLINEKKEDGKVFWQNLAGYKRQEALRPYLSSEEDRKKGKKFARYQLGDLLLHLEKKHGEDWGKVYDEAWERIDKKVEGLSKHIKLEEERRSEDAQSKAALTDWLRAKASFVIEGLKEADKDEFCRCELKLQKWYGDLRGKPFAIEAENSILDISGFSKQYNCAFIWQKDGVKKLNLYLIINYFKGGKLRFKKIKPEAFEANRFYTVINKKSGEIVPMEVNFNFDDPNLIILPLAFGKRQGREFIWNDLLSLETGSLKLANGRVIEKTLYNRRTRQDEPALFVALTFERREVLDSSNIKPMNLIGVDRGENIPAVIALTDPEGCPLSRFKDSLGNPTHILRIGEIYKEKQRTIQAKKEVEQRRAGGYSRKYASKAKNLADDMVRNTARDLLYYAVTQDAMLIFENLSRGFGRQGKRTFMAERQYTRMEDWLTAKLAYEGLPSKTYLSKTLAQYTSKTCSNCGFTITSADYDRVLEKLKKTATGWMTTINGKELKVEGQITYYNRYKRQNVVKDLSVELDRLSEESVNNDISSWTKGRSGEALSLLKKRFSHRPVQEKFVCLNCGFETHADEQAALNIARSWLFLRSQEYKKYQTNKTTGNTDKRAFVETWQSFYRKKLKEVWKPAV

SEQ ID NO: 26599 - protein, 978 aa, synthetic construct
  REGION 1..978: note = engineered CasX variant
QEIKRINKIRRRLVKDSNTKKAGKTGPMKTLLVRVMTPDLRERLENLRKKPENIPQPISNTSRANLNKLLTDYTEMKKAILHVYWEEFQKDPVGLMSRVAQPASKKIDQNKLKPEMDEKGNLTTAGFACSQCGQPLFVYKLEQVSEKGKAYTNYFGRCNVAEHEKLILLAQLKPEKDSDEAVTYSLGKFGQRALDFYSIHVTKESTHPVKPLAQIAGNRYASGPVGKALSDACMGTIASFLSKYQDIIIEHQKVVKGNQKRLESLRELAGKENLEYPSVTLPPQPHTKEGVDAYNEVIARVRMWVNLNLWQKLKLSRDDAKPLLRLKGFPSFPLVERQANEVDWWDMVCNVKKLINEKKEDGKVFWQNLAGYKRQEALRPYLSSEEDRKKGKKFARYQLGDLLLHLEKKHGEDWGKVYDEAWERIDKKVEGLSKHIKLEEERRSEDAQSKAALTDWLRAKASFVIEGLKEADKDEFCRCELKLQKWYGDLRGKPFAIEAENSILDISGFSKQYNCAFIWQKDGVKKLNLYLIINYFKGGKLRFKKIKPEAFEANRFYTVINKKSGEIVPMEVNFNFDDPNLIILPLAFGKRQGREFIWNDLLSLETGSLKLANGRVIEKTLYNRRTRQDEPALFVALTFERREVLDSSNIKPMNLIGVDRGENIPAVIALTDPEGCPLSRFKDSLGNPTHILRIGEIYKEKQRTAQAKKEVEQRRAGGYSRKYASKAKNLADDMVRNTARDLLYYAVTQDAMLIFENLSRGFGRQGKRTFMAERQYTRMEDWLTAKLAYEGLPSKTYLSKTLAQYTSKTCSNCGFTITSADYDRVLEKLKKTATGWMTTINGKELKVEGQITYYNRYKRQNVVKDLSVELDRLSEESVNNDISSWTKGRSGEALSLLKKRFSHRPVQEKFVCLNCGFETHADEQAALNIARSWLFLRSQEYKKYQTNKTTGNTDKRAFVETWQSFYRKKLKEVWKPAV

SEQ ID NO: 26600 - protein, 978 aa, synthetic construct
  REGION 1..978: note = engineered CasX variant
QEIKRINKIRRRLVKDSNTKKAGKTGPMKTLLVRVMTPDLRERLENLRKKPENIPQPISNTSRANLNKLLTDYTEMKKAILHVYWEEFQKDPVGLMSRVAQPASKKIDQNKLKPEMDEKGNLTTAGFACSQCGQPLFVYKLEQVSEKGKAYTNYFGRCNVAEHEKLILLAQLKPEKDSDEAVTYSLGKFGQRALDFYSIHVTKESTHPVKPLAQIAGNRYASGPVGKALSDACMGTIASFLSKYQDIIIEHQKVVKGNQKRLESLRELAGKENLEYPSVTLPPQPHTKEGVDAYNEVIARVRMWVNLNLWQKLKLSRDDAKPLLRLKGFPSFPLVERQANEVDWWDMVCNVKKLINEKKEDGKVFWQNLAGYKRQEALRPYLSSEEDRKKGKKFARYQLGDLLLHLEKKHGEDWGKVYDEAWERIDKKVEGLSKHIKLEEERRSEDAQSKAALTDWLRAKASFVIEGLKEADKDEFCRCELKLQKWYGDLRGKPFAIEAENSILDISGFSKQYNCAFIWQKDGVKKLNLYLIINYFKGGKLRFKKIKPEAFEANRFYTVINKKSGEIVPMEVNFNFDDPNLIILPLAFGKRQGREFIWNDLLSLETGSLKLANGRVIEKTLYNRRTRQDEPALFVALTFERREVLDSSNIKPMNLIGVDRGENIPAVIALTDPEGCPLSRFKDSLGNPTHILRIGEHYKEKQRTIQAKKEVEQRRAGGYSRKYASKAKNLADDMVRNTARDLLYYAVTQDAMLIFENLSRGFGRQGKRTFMAERQYTRMEDWLTAKLAYEGLPSKTYLSKTLAQYTSKTCSNCGFTITSADYDRVLEKLKKTATGWMTTINGKELKVEGQITYYNRYKRQNVVKDLSVELDRLSEESVNNDISSWTKGRSGEALSLLKKRFSHRPVQEKFVCLNCGFETHADEQAALNIARSWLFLRSQEYKKYQTNKTTGNTDKRAFVETWQSFYRKKLKEVWKPAV

SEQ ID NO: 26601 - protein, 978 aa, synthetic construct
  REGION 1..978: note = engineered CasX variant
QEIKRINKIRRRLVKDSNTKKAGKTGPMKTLLVRVMTPDLRERLENLRKKPENIPQPISNTSRANLNKLLTDYTEMKKAILHVYWEEFQKDPVGLMSRVAQPASKKIDQNKLKPEMDEKGNLTTAGFACSQCGQPLFVYKLEQVSEKGKAYTNYFGRCNVAEHEKLILLAQLKPEKDSDEAVTYSLGKFGQRALDFYSIHVTKESTHPVKPLAQIAGNRYASGPVGKALSDACMGTIASFLSKYQDIIIEHQKVVKGNQKRLESLRELAGKENLEYPSVTLPPQPHTKEGVDAYNEVIARVRMWVNLNLWQKLKLSRDDAKPLLRLKGFPSFPLVERQANEVDWWDMVCNVKKLINEKKEDGKVFWQNLAGYKRQEALRPYLSSEEDRKKGKKFARYQLGDLLLHLEKKHGEDWGKVYDEAWERIDKKVEGLSKHIKLEEERRSEDAQSKAALTDWLRAKASFVIEGLKEADKDEFCRCELKLQKWYGDLRGKPFAIEAENSILDISGFSKQYNCAFIWQKDGVKKLNLYLIINYFKGGKLRFKKIKPEAFEANRFYTVINKKSGEIVPMEVNFNFDDPNLIILPLAFGKRQGREFIWNDLLSLETGSLKLANGRVIEKTLYNRRTRQDEPALFVALTFERREVLDSSNIKPMNLIGVDRGENIPAVIALTDPEGCPLSRFKDSLGNPTHILRIGEGYKENQRTIQAKKEVEQRRAGGYSRKYASKAKNLADDMVRNTARDLLYYAVTQDAMLIFENLSRGFGRQGKRTFMAERQYTRMEDWLTAKLAYEGLPSKTYLSKTLAQYTSKTCSNCGFTITSADYDRVLEKLKKTATGWMTTINGKELKVEGQITYYNRYKRQNVVKDLSVELDRLSEESVNNDISSWTKGRSGEALSLLKKRFSHRPVQEKFVCLNCGFETHADEQAALNIARSWLFLRSQEYKKYQTNKTTGNTDKRAFVETWQSFYRKKLKEVWKPAV

SEQ ID NO: 26602 - protein, 978 aa, synthetic construct
  REGION 1..978: note = engineered CasX variant
QEIKRINKIRRRLVKDSNTKKAGKTGPMKTLLVRVMTPDLRERLENLRKKPENIPQPISNTSRANLNKLLTDYTEMKKAILHVYWEEFQKDPVGLMSRVAQPASKKIDQNKLKPEMDEKGNLTTAGFACSQCGQPLFVYKLEQVSEKGKAYTNYFGRCNVAEHEKLILLAQLKPEKDSDEAVTYSLGKFGQRALDFYSIHVTKESTHPVKPLAQIAGNRYASGPVGKALSDACMGTIASFLSKYQDIIIEHQKVVKGNQKRLESLRELAGKENLEYPSVTLPPQPHTKEGVDAYNEVIARVRMWVNLNLWQKLKLSRDDAKPLLRLKGFPSFPLVERQANEVDWWDMVCNVKKLINEKKEDGKVFWQNLAGYKRQEALRPYLSSEEDRKKGKKFARYQLGDLLLHLEKKHGEDWGKVYDEAWERIDKKVEGLSKHIKLEEERRSEDAQSKAALTDWLRAKASFVIEGLKEADKDEFCRCELKLQKWYGDLRGKPFAIEAENSILDISGFSKQYNCAFIWQKDGVKKLNLYLIINYFKGGKLRFKKIKPEAFEANRFYTVINKKSGEIVPMEVNFNFDDPNLIILPLAFGKRQGREFIWNDLLSLETGSLKLANGRVIEKTLYNRRTRQDEPALFVALTFERREVLDSSNIKPMNLIGVDRGENIPAVIALTDPEGCPLSRFKDSLGNPTHILRIGEGYKEKQRTIQAKKEVEQRRAGGYSRKYASKAKNLADDMVRNTARDLLYYAVTQDAMLIFENLSRGFGRQGKRTFMAERQYTRMEDWLTAKLAYEGLPSKTYLSKTLAQYTSKTCSNCGFTITSADYDRVLEKLKKTATGWMTTINGKELKVEGQITYYNRYKRQNVVKDLSVELDRLSEESVNNDISSWTKGRSGEALSLLKKRFSHRPVQEKFVCLNCGFETHADEQAALNIARSWLFLRSQEYKKYQTNKTTGNTDKRAFVETWQSFYRKKLKEVWKPAV

SEQ ID NO: 26603 - protein, 978 aa, synthetic construct
  REGION 1..978: note = engineered CasX variant
QEIKRINKIRRRLVKDSNTKKAGKTGPMKTLLVRVMTPDLRERLENLRKKPENIPQPISNTSRANLNKLLTDYTEMKKAILHVYWEEFQKDPVGLMSRVAQPASKKIDQNKLKPEMDEKGNLTTAGFACSQCGQPLFVYKLEQVSEKGKAYTNYFGRCNVAEHEKLILLAQLKPEKDSDEAVTYSLGKFGQRALDFYSIHVTKESTHPVKPLAQIAGNRYASGPVGKALSDACMGTIASFLSKYQDIIIEHQKVVKGNQKRLESLRELAGKENLEYPSVTLPPQPHTKEGVDAYNEVIARVRMWVNLNLWQKLKLSRDDAKPLLRLKGFPSFPLVERQANEVDWWDMVCNVKKLINEKKEDGKVFWQNLAGYKRQEALRPYLSSEEDRKKGKKFARYQLGDLLLHLEKKHGEDWGKVYDEAWERIDKKVEGLSKHIKLEEERRSEDAQSKAALTDWLRAKASFVIEGLKEADKDEFCRCELKLQKWYGDLRGKPFAIEAENSILDISGFSKQYNCAFIWQKDGVKKLNLYLIINYFKGGKLRFKKIKPEAFEANRFYTVINKKSGEIVPMEVNFNFDDPNLIILPLAFGKRQGREFIWNDLLSLETGSLKLANGRVIEKTLYNRRTRQDEPALFVALTFERREVLDSSNIKPMNLIGVDRGENIPAVIALTDPEGCPLSRFKDSLGNPTHILRIGEFYKEKQRTIQAKKEVESRRAGGYSRKYASKAKNLADDMVRNTARDLLYYAVTQDAMLIFENLSRGFGRQGKRTFMAERQYTRMEDWLTAKLAYEGLPSKTYLSKTLAQYTSKTCSNCGFTITSADYDRVLEKLKKTATGWMTTINGKELKVEGQITYYNRYKRQNVVKDLSVELDRLSEESVNNDISSWTKGRSGEALSLLKKRFSHRPVQEKFVCLNCGFETHADEQAALNIARSWLFLRSQEYKKYQTNKTTGNTDKRAFVETWQSFYRKKLKEVWKPAV

SEQ ID NO: 26604 - protein, 978 aa, synthetic construct
  REGION 1..978: note = engineered CasX variant
QEIKRINKIRRRLVKDSNTKKAGKTGPMKTLLVRVMTPDLRERLENLRKKPENIPQPISNTSRANLNKLLTDYTEMKKAILHVYWEEFQKDPVGLMSRVAQPASKKIDQNKLKPEMDEKGNLTTAGFACSQCGQPLFVYKLEQVSEKGKAYTNYFGRCNVAEHEKLILLAQLKPEKDSDEAVTYSLGKFGQRALDFYSIHVTKESTHPVKPLAQIAGNRYASGPVGKALSDACMGTIASFLSKYQDIIIEHQKVVKGNQKRLESLRELAGKENLEYPSVTLPPQPHTKEGVDAYNEVIARVRMWVNLNLWQKLKLSRDDAKPLLRLKGFPSFPLVERQANEVDWWDMVCNVKKLINEKKEDGKVFWQNLAGYKRQEALRPYLSSEEDRKKGKKFARYQLGDLLLHLEKKHGEDWGKVYDEAWERIDKKVEGLSKHIKLEEERRSEDAQSKAALTDWLRAKASFVIEGLKEADKDEFCRCELKLQKWYGDLRGKPFAIEAENSILDISGFSKQYNCAFIWQKDGVKKLNLYLIINYFKGGKLRFKKIKPEAFEANRFYTVINKKSGEIVPMEVNFNFDDPNLIILPLAFGKRQGREFIWNDLLSLETGSLKLANGRVIEKTLYNRRTRQDEPALFVALTFERREVLDSSNIKPMNLIGVDRGENIPAVIALTDPEGCPLSRFKDSLGNPTHILRIGEFYKEKQRTIQAKKEVEQRRAGGYSRKYASKAKNLADDMVRNTARDLLYYAVTQDAMLIFENLSRGFGRQGKRTFMAERQYTRMEDWLTAKLAYEGLPSKTYLSKTLAQYTSKTCSNCGFTITSADYDRVLEKLKKTATGWMTTINGKELKVEGQITYYNRYKRQNVVKDLSVELDRLSEESVNNDISSWTKGRSGEALSLLKKRFSHRPVQEKFVCLNCGFETHADEQAALNIARSWLFLRSQEYKKYQTNKTTGNTDKRAFVETWQSFYRKKLKEVWKPAV

SEQ ID NO: 26605 - protein, 978 aa, synthetic construct
  REGION 1..978: note = engineered CasX variant
QEIKRINKIRRRLVKDSNTKKAGKTGPMKTLLVRVMTPDLRERLENLRKKPENIPQPISNTSRANLNKLLTDYTEMKKAILHVYWEEFQKDPVGLMSRVAQPASKKIDQNKLKPEMDEKGNLTTAGFACSQCGQPLFVYKLEQVSEKGKAYTNYFGRCNVAEHEKLILLAQLKPEKDSDEAVTYSLGKFGQRALDFYSIHVTKESTHPVKPLAQIAGNRYASGPVGKALSDACMGTIASFLSKYQDIIIEHQKVVKGNQKRLESLRELAGKENLEYPSVTLPPQPHTKEGVDAYNEVIARVRMWVNLNLWQKLKLSRDDAKPLLRLKGFPSFPLVERQANEVDWWDMVCNVKKLINEKKEDGKVFWQNLAGYKRQEALRPYLSSEEDRKKGKKFARYQLGDLLLHLEKKHGEDWGKVYDEAWERIDKKVEGLSKHIKLEEERRSEDAQSKAALTDWLRAKASFVIEGLKEADKDEFCRCELKLQKWYGDLRGKPFAIEAENSILDISGFSKQYNCAFIWQKDGVKKLNLYLIINYFKGGKLRFKKIKPEAFEANRFYTVINKKSGEIVPMEVNFNFDDPNLIILPLAFGKRQGREFIWNDLLSLETGSLKLANGRVIEKTLYNRRTRQDEPALFVALTFERREVLDSSNIKPMNLIGVDRGENIPAVIALTDPEGCPLSRFKDSLGNPTHILRIGEEYKEKQRTIQAKKEVEQRWAGGYSRKYASKAKNLADDMVRNTARDLLYYAVTQDAMLIFENLSRGFGRQGKRTFMAERQYTRMEDWLTAKLAYEGLPSKTYLSKTLAQYTSKTCSNCGFTITSADYDRVLEKLKKTATGWMTTINGKELKVEGQITYYNRYKRQNVVKDLSVELDRLSEESVNNDISSWTKGRSGEALSLLKKRFSHRPVQEKFVCLNCGFETHADEQAALNIARSWLFLRSQEYKKYQTNKTTGNTDKRAFVETWQSFYRKKLKEVWKPAV

SEQ ID NO: 26606 - protein, 978 aa, synthetic construct
  REGION 1..978: note = engineered CasX variant
QEIKRINKIRRRLVKDSNTKKAGKTGPMKTLLVRVMTPDLRERLENLRKKPENIPQPISNTSRANLNKLLTDYTEMKKAILHVYWEEFQKDPVGLMSRVAQPASKKIDQNKLKPEMDEKGNLTTAGFACSQCGQPLFVYKLEQVSEKGKAYTNYFGRCNVAEHEKLILLAQLKPEKDSDEAVTYSLGKFGQRALDFYSIHVTKESTHPVKPLAQIAGNRYASGPVGKALSDACMGTIASFLSKYQDIIIEHQKVVKGNQKRLESLRELAGKENLEYPSVTLPPQPHTKEGVDAYNEVIARVRMWVNLNLWQKLKLSRDDAKPLLRLKGFPSFPLVERQANEVDWWDMVCNVKKLINEKKEDGKVFWQNLAGYKRQEALRPYLSSEEDRKKGKKFARYQLGDLLLHLEKKHGEDWGKVYDEAWERIDKKVEGLSKHIKLEEERRSEDAQSKAALTDWLRAKASFVIEGLKEADKDEFCRCELKLQKWYGDLRGKPFAIEAENSILDISGFSKQYNCAFIWQKDGVKKLNLYLIINYFKGGKLRFKKIKPEAFEANRFYTVINKKSGEIVPMEVNFNFDDPNLIILPLAFGKRQGREFIWNDLLSLETGSLKLANGRVIEKTLYNRRTRQDEPALFVALTFERREVLDSSNIKPMNLIGVDRGENIPAVIALTDPEGCPLSRFKDSLGNPTHILRIGEEYKEKQRTIQAKKEVEQRRAGGYSRKYASKAKNLADDMVRNTARDLLYYAVTQDAMLIFENLSRGFGRQGKRTFMAERQYTRMEDWLTAKLAYEGLPSKTYLSKTLAQYTSKTCSNCGFTITSADYDRVLEKLKKTATGWMTTINGKELKVEGQITYYNRYKRQNVVKDLSVELDRLSEESVNNDISSWTKGRSGEALSLLKKRFSHRPVQEKFVCLNCGFETHADEQAALNIARSWLFLRSQEYKKYQTNKTTGNTDKRAFVETWQSFYRKKLKEVWKPAV

SEQ ID NO: 26607 - protein, 978 aa, synthetic construct
  REGION 1..978: note = engineered CasX variant
QEIKRINKIRRRLVKDSNTKKAGKTGPMKTLLVRVMTPDLRERLENLRKKPENIPQPISNTSRANLNKLLTDYTEMKKAILHVYWEEFQKDPVGLMSRVAQPASKKIDQNKLKPEMDEKGNLTTAGFACSQCGQPLFVYKLEQVSEKGKAYTNYFGRCNVAEHEKLILLAQLKPEKDSDEAVTYSLGKFGQRALDFYSIHVTKESTHPVKPLAQIAGNRYASGPVGKALSDACMGTIASFLSKYQDIIIEHQKVVKGNQKRLESLRELAGKENLEYPSVTLPPQPHTKEGVDAYNEVIARVRMWVNLNLWQKLKLSRDDAKPLLRLKGFPSFPLVERQANEVDWWDMVCNVKKLINEKKEDGKVFWQNLAGYKRQEALRPYLSSEEDRKKGKKFARYQLGDLLLHLEKKHGEDWGKVYDEAWERIDKKVEGLSKHIKLEEERRSEDAQSKAALTDWLRAKASFVIEGLKEADKDEFCRCELKLQKWYGDLRGKPFAIEAENSILDISGFSKQYNCAFIWQKDGVKKLNLYLIINYFKGGKLRFKKIKPEAFEANRFYTVINKKSGEIVPMEVNFNFDDPNLIILPLAFGKRQGREFIWNDLLSLETGSLKLANGRVIEKTLYNRRTRQDEPALFVALTFERREVLDSSNIKPMNLIGVDRGENIPAVIALTDPEGCPLSRFKDSLGNPTHILRIGECYKEKQRTIQALKGVEQRRAGGYSRKYASKAKNLADDMVRNTARDLLYYAVTQDAMLIFENLSRGFGRQGKRTFMAERQYTRMEDWLTAKLAYEGLPSKTYLSKTLAQYTSKTCSNCGFTITSADYDRVLEKLKKTATGWMTTINGKELKVEGQITYYNRYKRQNVVKDLSVELDRLSEESVNNDISSWTKGRSGEALSLLKKRFSHRPVQEKFVCLNCGFETHADEQAALNIARSWLFLRSQEYKKYQTNKTTGNTDKRAFVETWQSFYRKKLKEVWKPAV

SEQ ID NO: 26608 - protein, 978 aa, synthetic construct
  REGION 1..978: note = engineered CasX variant
QEIKRINKIRRRLVKDSNTKKAGKTGPMKTLLVRVMTPDLRERLENLRKKPENIPQPISNTSRANLNKLLTDYTEMKKAILHVYWEEFQKDPVGLMSRVAQPASKKIDQNKLKPEMDEKGNLTTAGFACSQCGQPLFVYKLEQVSEKGKAYTNYFGRCNVAEHEKLILLAQLKPEKDSDEAVTYSLGKFGQRALDFYSIHVTKESTHPVKPLAQIAGNRYASGPVGKALSDACMGTIASFLSKYQDIIIEHQKVVKGNQKRLESLRELAGKENLEYPSVTLPPQPHTKEGVDAYNEVIARVRMWVNLNLWQKLKLSRDDAKPLLRLKGFPSFPLVERQANEVDWWDMVCNVKKLINEKKEDGKVFWQNLAGYKRQEALRPYLSSEEDRKKGKKFARYQLGDLLLHLEKKHGEDWGKVYDEAWERIDKKVEGLSKHIKLEEERRSEDAQSKAALTDWLRAKASFVIEGLKEADKDEFCRCELKLQKWYGDLRGKPFAIEAENSILDISGFSKQYNCAFIWQKDGVKKLNLYLIINYFKGGKLRFKKIKPEAFEANRFYTVINKKSGEIVPMEVNFNFDDPNLIILPLAFGKRQGREFIWNDLLSLETGSLKLANGRVIEKTLYNRRTRQDEPALFVALTFERREVLDSSNIKPMNLIGVDRGENIPAVIALTDPEGCPLSRFKDSLGNPTHILRIGECYKEKQRTIQALKEVEQRRAGGYSRKYASKAKNLADDMVRNTARDLLYYAVTQDAMLIFENLSRGFGRQGKRTFMAERQYTRMEDWLTAKLAYEGLPSKTYLSKTLAQYTSKTCSNCGFTITSADYDRVLEKLKKTATGWMTTINGKELKVEGQITYYNRYKRQNVVKDLSVELDRLSEESVNNDISSWTKGRSGEALSLLKKRFSHRPVQEKFVCLNCGFETHADEQAALNIARSWLFLRSQEYKKYQTNKTTGNTDKRAFVETWQSFYRKKLKEVWKPAV

SEQ ID NO: 26609 - protein, 978 aa, synthetic construct
  REGION 1..978: note = engineered CasX variant
QEIKRINKIRRRLVKDSNTKKAGKTGPMKTLLVRVMTPDLRERLENLRKKPENIPQPISNTSRANLNKLLTDYTEMKKAILHVYWEEFQKDPVGLMSRVAQPASKKIDQNKLKPEMDEKGNLTTAGFACSQCGQPLFVYKLEQVSEKGKAYTNYFGRCNVAEHEKLILLAQLKPEKDSDEAVTYSLGKFGQRALDFYSIHVTKESTHPVKPLAQIAGNRYASGPVGKALSDACMGTIASFLSKYQDIIIEHQKVVKGNQKRLESLRELAGKENLEYPSVTLPPQPHTKEGVDAYNEVIARVRMWVNLNLWQKLKLSRDDAKPLLRLKGFPSFPLVERQANEVDWWDMVCNVKKLINEKKEDGKVFWQNLAGYKRQEALRPYLSSEEDRKKGKKFARYQLGDLLLHLEKKHGEDWGKVYDEAWERIDKKVEGLSKHIKLEEERRSEDAQSKAALTDWLRAKASFVIEGLKEADKDEFCRCELKLQKWYGDLRGKPFAIEAENSILDISGFSKQYNCAFIWQKDGVKKLNLYLIINYFKGGKLRFKKIKPEAFEANRFYTVINKKSGEIVPMEVNFNFDDPNLIILPLAFGKRQGREFIWNDLLSLETGSLKLANGRVIEKTLYNRRTRQDEPALFVALTFERREVLDSSNIKPMNLIGVDRGENIPAVIALTDPEGCPLSRFKDSLGNPTHILRIGECYKEKQRTIQAKKGVEQRRAGGYSRKYASKAKNLADDMVRNTARDLLYYAVTQDAMLIFENLSRGFGRQGKRTFMAERQYTRMEDWLTAKLAYEGLPSKTYLSKTLAQYTSKTCSNCGFTITSADYDRVLEKLKKTATGWMTTINGKELKVEGQITYYNRYKRQNVVKDLSVELDRLSEESVNNDISSWTKGRSGEALSLLKKRFSHRPVQEKFVCLNCGFETHADEQAALNIARSWLFLRSQEYKKYQTNKTTGNTDKRAFVETWQSFYRKKLKEVWKPAV

SEQ ID NO: 26610 - protein, 978 aa, synthetic construct
  REGION 1..978: note = engineered CasX variant
QEIKRINKIRRRLVKDSNTKKAGKTGPMKTLLVRVMTPDLRERLENLRKKPENIPQPISNTSRANLNKLLTDYTEMKKAILHVYWEEFQKDPVGLMSRVAQPASKKIDQNKLKPEMDEKGNLTTAGFACSQCGQPLFVYKLEQVSEKGKAYTNYFGRCNVAEHEKLILLAQLKPEKDSDEAVTYSLGKFGQRALDFYSIHVTKESTHPVKPLAQIAGNRYASGPVGKALSDACMGTIASFLSKYQDIIIEHQKVVKGNQKRLESLRELAGKENLEYPSVTLPPQPHTKEGVDAYNEVIARVRMWVNLNLWQKLKLSRDDAKPLLRLKGFPSFPLVERQANEVDWWDMVCNVKKLINEKKEDGKVFWQNLAGYKRQEALRPYLSSEEDRKKGKKFARYQLGDLLLHLEKKHGEDWGKVYDEAWERIDKKVEGLSKHIKLEEERRSEDAQSKAALTDWLRAKASFVIEGLKEADKDEFCRCELKLQKWYGDLRGKPFAIEAENSILDISGFSKQYNCAFIWQKDGVKKLNLYLIINYFKGGKLRFKKIKPEAFEANRFYTVINKKSGEIVPMEVNFNFDDPNLIILPLAFGKRQGREFIWNDLLSLETGSLKLANGRVIEKTLYNRRTRQDEPALFVALTFERREVLDSSNIKPMNLIGVDRGENIPAVIALTDPEGCPLSRFKDSLGNPTHILRIGECYKEKQRTIQAKKEVEQRRLGGYSRKYASKAKNLADDMVRNTARDLLYYAVTQDAMLIFENLSRGFGRQGKRTFMAERQYTRMEDWLTAKLAYEGLPSKTYLSKTLAQYTSKTCSNCGFTITSADYDRVLEKLKKTATGWMTTINGKELKVEGQITYYNRYKRQNVVKDLSVELDRLSEESVNNDISSWTKGRSGEALSLLKKRFSHRPVQEKFVCLNCGFETHADEQAALNIARSWLFLRSQEYKKYQTNKTTGNTDKRAFVETWQSFYRKKLKEVWKPAV

SEQ ID NO: 26611 - protein, 978 aa, synthetic construct
  REGION 1..978: note = engineered CasX variant
QEIKRINKIRRRLVKDSNTKKAGKTGPMKTLLVRVMTPDLRERLENLRKKPENIPQPISNTSRANLNKLLTDYTEMKKAILHVYWEEFQKDPVGLMSRVAQPASKKIDQNKLKPEMDEKGNLTTAGFACSQCGQPLFVYKLEQVSEKGKAYTNYFGRCNVAEHEKLILLAQLKPEKDSDEAVTYSLGKFGQRALDFYSIHVTKESTHPVKPLAQIAGNRYASGPVGKALSDACMGTIASFLSKYQDIIIEHQKVVKGNQKRLESLRELAGKENLEYPSVTLPPQPHTKEGVDAYNEVIARVRMWVNLNLWQKLKLSRDDAKPLLRLKGFPSFPLVERQANEVDWWDMVCNVKKLINEKKEDGKVFWQNLAGYKRQEALRPYLSSEEDRKKGKKFARYQLGDLLLHLEKKHGEDWGKVYDEAWERIDKKVEGLSKHIKLEEERRSEDAQSKAALTDWLRAKASFVIEGLKEADKDEFCRCELKLQKWYGDLRGKPFAIEAENSILDISGFSKQYNCAFIWQKDGVKKLNLYLIINYFKGGKLRFKKIKPEAFEANRFYTVINKKSGEIVPMEVNFNFDDPNLIILPLAFGKRQGREFIWNDLLSLETGSLKLANGRVIEKTLYNRRTRQDEPALFVALTFERREVLDSSNIKPMNLIGVDRGENIPAVIALTDPEGCPLSRFKDSLGNPTHILRIGECYKEKQRTIQAKKEVEQRRLFGYSRKYASKAKNLADDMVRNTARDLLYYAVTQDAMLIFENLSRGFGRQGKRTFMAERQYTRMEDWLTAKLAYEGLPSKTYLSKTLAQYTSKTCSNCGFTITSADYDRVLEKLKKTATGWMTTINGKELKVEGQITYYNRYKRQNVVKDLSVELDRLSEESVNNDISSWTKGRSGEALSLLKKRFSHRPVQEKFVCLNCGFETHADEQAALNIARSWLFLRSQEYKKYQTNKTTGNTDKRAFVETWQSFYRKKLKEVWKPAV

SEQ ID NO: 26612 - protein, 978 aa, synthetic construct
  REGION 1..978: note = engineered CasX variant
QEIKRINKIRRRLVKDSNTKKAGKTGPMKTLLVRVMTPDLRERLENLRKKPENIPQPISNTSRANLNKLLTDYTEMKKAILHVYWEEFQKDPVGLMSRVAQPASKKIDQNKLKPEMDEKGNLTTAGFACSQCGQPLFVYKLEQVSEKGKAYTNYFGRCNVAEHEKLILLAQLKPEKDSDEAVTYSLGKFGQRALDFYSIHVTKESTHPVKPLAQIAGNRYASGPVGKALSDACMGTIASFLSKYQDIIIEHQKVVKGNQKRLESLRELAGKENLEYPSVTLPPQPHTKEGVDAYNEVIARVRMWVNLNLWQKLKLSRDDAKPLLRLKGFPSFPLVERQANEVDWWDMVCNVKKLINEKKEDGKVFWQNLAGYKRQEALRPYLSSEEDRKKGKKFARYQLGDLLLHLEKKHGEDWGKVYDEAWERIDKKVEGLSKHIKLEEERRSEDAQSKAALTDWLRAKASFVIEGLKEADKDEFCRCELKLQKWYGDLRGKPFAIEAENSILDISGFSKQYNCAFIWQKDGVKKLNLYLIINYFKGGKLRFKKIKPEAFEANRFYTVINKKSGEIVPMEVNFNFDDPNLIILPLAFGKRQGREFIWNDLLSLETGSLKLANGRVIEKTLYNRRTRQDEPALFVALTFERREVLDSSNIKPMNLIGVDRGENIPAVIALTDPEGCPLSRFKDSLGNPTHILRIGECYKEKQRTIQAKKEVEQRRAGGYSRKYASKAKNLADDMVRNTARDLLYYAVTQDAMLIFENLSRGFGRQGKRTFMAERQYTRMEDWLTAKLAYEGLPSKTYLSKTLAQYTSKTCSNCGFTITSADYDRVLEKLKKTATGWMTTINGKELKVEGQITYYNRYKRQNVVKDLSVELDRLSEESVNNDISSWTKGRSGEALSLLKKRFSHRPVQEKFVCLNCGFETHADEQAALNIARSWLFLRSQEYKKYQTNKTTGNTDKRAFVETWQSFYRKKLKEVWKPAV

SEQ ID NO: 26613 - protein, 978 aa, synthetic construct
  REGION 1..978: note = engineered CasX variant
QEIKRINKIRRRLVKDSNTKKAGKTGPMKTLLVRVMTPDLRERLENLRKKPENIPQPISNTSRANLNKLLTDYTEMKKAILHVYWEEFQKDPVGLMSRVAQPASKKIDQNKLKPEMDEKGNLTTAGFACSQCGQPLFVYKLEQVSEKGKAYTNYFGRCNVAEHEKLILLAQLKPEKDSDEAVTYSLGKFGQRALDFYSIHVTKESTHPVKPLAQIAGNRYASGPVGKALSDACMGTIASFLSKYQDIIIEHQKVVKGNQKRLESLRELAGKENLEYPSVTLPPQPHTKEGVDAYNEVIARVRMWVNLNLWQKLKLSRDDAKPLLRLKGFPSFPLVERQANEVDWWDMVCNVKKLINEKKEDGKVFWQNLAGYKRQEALRPYLSSEEDRKKGKKFARYQLGDLLLHLEKKHGEDWGKVYDEAWERIDKKVEGLSKHIKLEEERRSEDAQSKAALTDWLRAKASFVIEGLKEADKDEFCRCELKLQKWYGDLRGKPFAIEAENSILDISGFSKQYNCAFIWQKDGVKKLNLYLIINYFKGGKLRFKKIKPEAFEANRFYTVINKKSGEIVPMEVNFNFDDPNLIILPLAFGKRQGREFIWNDLLSLETGSLKLANGRVIEKTLYNRRTRQDEPALFVALTFERREVLDSSNIKPMNLIGVDRGENIPAVIALTDPEGCPLSRFKDSLGNPTHILRIGECYKEKQRTIQAKKEVEQRRAFGYSRKYASKAKNLADDMVRNTARDLLYYAVTQDAMLIFENLSRGFGRQGKRTFMAERQYTRMEDWLTAKLAYEGLPSKTYLSKTLAQYTSKTCSNCGFTITSADYDRVLEKLKKTATGWMTTINGKELKVEGQITYYNRYKRQNVVKDLSVELDRLSEESVNNDISSWTKGRSGEALSLLKKRFSHRPVQEKFVCLNCGFETHADEQAALNIARSWLFLRSQEYKKYQTNKTTGNTDKRAFVETWQSFYRKKLKEVWKPAV

SEQ ID NO: 26614 - protein, 978 aa, synthetic construct
  REGION 1..978: note = engineered CasX variant
QEIKRINKIRRRLVKDSNTKKAGKTGPMKTLLVRVMTPDLRERLENLRKKPENIPQPISNTSRANLNKLLTDYTEMKKAILHVYWEEFQKDPVGLMSRVAQPASKKIDQNKLKPEMDEKGNLTTAGFACSQCGQPLFVYKLEQVSEKGKAYTNYFGRCNVAEHEKLILLAQLKPEKDSDEAVTYSLGKFGQRALDFYSIHVTKESTHPVKPLAQIAGNRYASGPVGKALSDACMGTIASFLSKYQDIIIEHQKVVKGNQKRLESLRELAGKENLEYPSVTLPPQPHTKEGVDAYNEVIARVRMWVNLNLWQKLKLSRDDAKPLLRLKGFPSFPLVERQANEVDWWDMVCNVKKLINEKKEDGKVFWQNLAGYKRQEALRPYLSSEEDRKKGKKFARYQLGDLLLHLEKKHGEDWGKVYDEAWERIDKKVEGLSKHIKLEEERRSEDAQSKAALTDWLRAKASFVIEGLKEADKDEFCRCELKLQKWYGDLRGKPFAIEAENSILDISGFSKQYNCAFIWQKDGVKKLNLYLIINYFKGGKLRFKKIKPEAFEANRFYTVINKKSGEIVPMEVNFNFDDPNLIILPLAFGKRQGREFIWNDLLSLETGSLKLANGRVIEKTLYNRRTRQDEPALFVALTFERREVLDSSNIKPMNLIGVDRGENIPAVIALTDPEGCPLSRFKDSLGNPTHILRIGECYKEKQRTIQACKEVEQRRAGGYSRKYASKAKNLADDMVRNTARDLLYYAVTQDAMLIFENLSRGFGRQGKRTFMAERQYTRMEDWLTAKLAYEGLPSKTYLSKTLAQYTSKTCSNCGFTITSADYDRVLEKLKKTATGWMTTINGKELKVEGQITYYNRYKRQNVVKDLSVELDRLSEESVNNDISSWTKGRSGEALSLLKKRFSHRPVQEKFVCLNCGFETHADEQAALNIARSWLFLRSQEYKKYQTNKTTGNTDKRAFVETWQSFYRKKLKEVWKPAV

SEQ ID NO: 26615 - protein, 978 aa, synthetic construct
  REGION 1..978: note = engineered CasX variant
QEIKRINKIRRRLVKDSNTKKAGKTGPMKTLLVRVMTPDLRERLENLRKKPENIPQPISNTSRANLNKLLTDYTEMKKAILHVYWEEFQKDPVGLMSRVAQPASKKIDQNKLKPEMDEKGNLTTAGFACSQCGQPLFVYKLEQVSEKGKAYTNYFGRCNVAEHEKLILLAQLKPEKDSDEAVTYSLGKFGQRALDFYSIHVTKESTHPVKPLAQIAGNRYASGPVGKALSDACMGTIASFLSKYQDIIIEHQKVVKGNQKRLESLRELAGKENLEYPSVTLPPQPHTKEGVDAYNEVIARVRMWVNLNLWQKLKLSRDDAKPLLRLKGFPSFPLVERQANEVDWWDMVCNVKKLINEKKEDGKVFWQNLAGYKRQEALRPYLSSEEDRKKGKKFARYQLGDLLLHLEKKHGEDWGKVYDEAWERIDKKVEGLSKHIKLEEERRSEDAQSKAALTDWLRAKASFVIEGLKEADKDEFCRCELKLQKWYGDLRGKPFAIEAENSILDISGFSKQYNCAFIWQKDGVKKLNLYLIINYFKGGKLRFKKIKPEAFEANRFYTVINKKSGEIVPMEVNFNFDDPNLIILPLAFGKRQGREFIWNDLLSLETGSLKLANGRVIEKTLYNRRTRQDEPALFVALTFERREVLDSSNIKPMNLIGVDRGENIPAVIALTDPEGCPLSRFKDSLGNPTHILRIGEAYKEKQRTIQAKKEVEQRRAGGYSRKYASKAKNLADDMVRNTARDLLYYAVTQDAMLIFENLSRGFGRQGKRTFMAERQYTRMEDWLTAKLAYEGLPSKTYLSKTLAQYTSKTCSNCGFTITSADYDRVLEKLKKTATGWMTTINGKELKVEGQITYYNRYKRQNVVKDLSVELDRLSEESVNNDISSWTKGRSGEALSLLKKRFSHRPVQEKFVCLNCGFETHADEQAALNIARSWLFLRSQEYKKYQTNKTTGNTDKRAFVETWQSFYRKKLKEVWKPAV

SEQ ID NO: 26616 - protein, 978 aa, synthetic construct
  REGION 1..978: note = engineered CasX variant
QEIKRINKIRRRLVKDSNTKKAGKTGPMKTLLVRVMTPDLRERLENLRKKPENIPQPISNTSRANLNKLLTDYTEMKKAILHVYWEEFQKDPVGLMSRVAQPASKKIDQNKLKPEMDEKGNLTTAGFACSQCGQPLFVYKLEQVSEKGKAYTNYFGRCNVAEHEKLILLAQLKPEKDSDEAVTYSLGKFGQRALDFYSIHVTKESTHPVKPLAQIAGNRYASGPVGKALSDACMGTIASFLSKYQDIIIEHQKVVKGNQKRLESLRELAGKENLEYPSVTLPPQPHTKEGVDAYNEVIARVRMWVNLNLWQKLKLSRDDAKPLLRLKGFPSFPLVERQANEVDWWDMVCNVKKLINEKKEDGKVFWQNLAGYKRQEALRPYLSSEEDRKKGKKFARYQLGDLLLHLEKKHGEDWGKVYDEAWERIDKKVEGLSKHIKLEEERRSEDAQSKAALTDWLRAKASFVIEGLKEADKDEFCRCELKLQKWYGDLRGKPFAIEAENSILDISGFSKQYNCAFIWQKDGVKKLNLYLIINYFKGGKLRFKKIKPEAFEANRFYTVINKKSGEIVPMEVNFNFDDPNLIILPLAFGKRQGREFIWNDLLSLETGSLKLANGRVIEKTLYNRRTRQDEPALFVALTFERREVLDSSNIKPMNLIGVDRGENIPAVIALTDPEGCPLSRFKDSLGNPTHILRIGEAFKEKQRTIQAKKEVEQRRAGGYSRKYASKAKNLADDMVRNTARDLLYYAVTQDAMLIFENLSRGFGRQGKRTFMAERQYTRMEDWLTAKLAYEGLPSKTYLSKTLAQYTSKTCSNCGFTITSADYDRVLEKLKKTATGWMTTINGKELKVEGQITYYNRYKRQNVVKDLSVELDRLSEESVNNDISSWTKGRSGEALSLLKKRFSHRPVQEKFVCLNCGFETHADEQAALNIARSWLFLRSQEYKKYQTNKTTGNTDKRAFVETWQSFYRKKLKEVWKPAV

SEQ ID NO: 26617 - protein, 978 aa, synthetic construct
  REGION 1..978: note = engineered CasX variant
QEIKRINKIRRRLVKDSNTKKAGKTGPMKTLLVRVMTPDLRERLENLRKKPENIPQPISNTSRANLNKLLTDYTEMKKAILHVYWEEFQKDPVGLMSRVAQPASKKIDQNKLKPEMDEKGNLTTAGFACSQCGQPLFVYKLEQVSEKGKAYTNYFGRCNVAEHEKLILLAQLKPEKDSDEAVTYSLGKFGQRALDFYSIHVTKESTHPVKPLAQIAGNRYASGPVGKALSDACMGTIASFLSKYQDIIIEHQKVVKGNQKRLESLRELAGKENLEYPSVTLPPQPHTKEGVDAYNEVIARVRMWVNLNLWQKLKLSRDDAKPLLRLKGFPSFPLVERQANEVDWWDMVCNVKKLINEKKEDGKVFWQNLAGYKRQEALRPYLSSEEDRKKGKKFARYQLGDLLLHLEKKHGEDWGKVYDEAWERIDKKVEGLSKHIKLEEERRSEDAQSKAALTDWLRAKASFVIEGLKEADKDEFCRCELKLQKWYGDLRGKPFAIEAENSILDISGFSKQYNCAFIWQKDGVKKLNLYLIINYFKGGKLRFKKIKPEAFEANRFYTVINKKSGEIVPMEVNFNFDDPNLIILPLAFGKRQGREFIWNDLLSLETGSLKLANGRVIEKTLYNRRTRQDEPALFVALTFERREVLDSSNIKPMNLIGVDRGENIPAVIALTDPEGCPLSRFKDSLGNPTHILRIGDSYKEKQRTIQAKKEVEQRRAGGYSRKYASKAKNLADDMVRNTARDLLYYAVTQDAMLIFENLSRGFGRQGKRTFMAERQYTRMEDWLTAKLAYEGLPSKTYLSKTLAQYTSKTCSNCGFTITSADYDRVLEKLKKTATGWMTTINGKELKVEGQITYYNRYKRQNVVKDLSVELDRLSEESVNNDISSWTKGRSGEALSLLKKRFSHRPVQEKFVCLNCGFETHADEQAALNIARSWLFLRSQEYKKYQTNKTTGNTDKRAFVETWQSFYRKKLKEVWKPAV

SEQ ID NO: 26618 - protein, 978 aa, synthetic construct
  REGION 1..978: note = engineered CasX variant
QEIKRINKIRRRLVKDSNTKKAGKTGPMKTLLVRVMTPDLRERLENLRKKPENIPQPISNTSRANLNKLLTDYTEMKKAILHVYWEEFQKDPVGLMSRVAQPASKKIDQNKLKPEMDEKGNLTTAGFACSQCGQPLFVYKLEQVSEKGKAYTNYFGRCNVAEHEKLILLAQLKPEKDSDEAVTYSLGKFGQRALDFYSIHVTKESTHPVKPLAQIAGNRYASGPVGKALSDACMGTIASFLSKYQDIIIEHQKVVKGNQKRLESLRELAGKENLEYPSVTLPPQPHTKEGVDAYNEVIARVRMWVNLNLWQKLKLSRDDAKPLLRLKGFPSFPLVERQANEVDWWDMVCNVKKLINEKKEDGKVFWQNLAGYKRQEALRPYLSSEEDRKKGKKFARYQLGDLLLHLEKKHGEDWGKVYDEAWERIDKKVEGLSKHIKLEEERRSEDAQSKAALTDWLRAKASFVIEGLKEADKDEFCRCELKLQKWYGDLRGKPFAIEAENSILDISGFSKQYNCAFIWQKDGVKKLNLYLIINYFKGGKLRFKKIKPEAFEANRFYTVINKKSGEIVPMEVNFNFDDPNLIILPLAFGKRQGREFIWNDLLSLETGSLKLANGRVIEKTLYNRRTRQDEPALFVALTFERREVLDSSNIKPMNLIGVDRGENIPAVIALTDPEGCPLSRFKDSLGNPTHILRIGDKYKEKQRTIQAKKEVEQRRAGGYSRKYASKAKNLADDMVRNTARDLLYYAVTQDAMLIFENLSRGFGRQGKRTFMAERQYTRMEDWLTAKLAYEGLPSKTYLSKTLAQYTSKTCSNCGFTITSADYDRVLEKLKKTATGWMTTINGKELKVEGQITYYNRYKRQNVVKDLSVELDRLSEESVNNDISSWTKGRSGEALSLLKKRFSHRPVQEKFVCLNCGFETHADEQAALNIARSWLFLRSQEYKKYQTNKTTGNTDKRAFVETWQSFYRKKLKEVWKPAV

SEQ ID NO: 26619 - protein, 978 aa, synthetic construct
  REGION 1..978: note = engineered CasX variant
QEIKRINKIRRRLVKDSNTKKAGKTGPMKTLLVRVMTPDLRERLENLRKKPENIPQPISNTSRANLNKLLTDYTEMKKAILHVYWEEFQKDPVGLMSRVAQPASKKIDQNKLKPEMDEKGNLTTAGFACSQCGQPLFVYKLEQVSEKGKAYTNYFGRCNVAEHEKLILLAQLKPEKDSDEAVTYSLGKFGQRALDFYSIHVTKESTHPVKPLAQIAGNRYASGPVGKALSDACMGTIASFLSKYQDIIIEHQKVVKGNQKRLESLRELAGKENLEYPSVTLPPQPHTKEGVDAYNEVIARVRMWVNLNLWQKLKLSRDDAKPLLRLKGFPSFPLVERQANEVDWWDMVCNVKKLINEKKEDGKVFWQNLAGYKRQEALRPYLSSEEDRKKGKKFARYQLGDLLLHLEKKHGEDWGKVYDEAWERIDKKVEGLSKHIKLEEERRSEDAQSKAALTDWLRAKASFVIEGLKEADKDEFCRCELKLQKWYGDLRGKPFAIEAENSILDISGFSKQYNCAFIWQKDGVKKLNLYLIINYFKGGKLRFKKIKPEAFEANRFYTVINKKSGEIVPMEVNFNFDDPNLIILPLAFGKRQGREFIWNDLLSLETGSLKLANGRVIEKTLYNRRTRQDEPALFVALTFERREVLDSSNIKPMNLIGVDRGENIPAVIALTDPEGCPLSRFKDSLGNPTHILRIGCSYREKQRTIQAKKEVEQRRAGAYSRKYASKAKNLADDMVRNTARDLLYYAVTQDAMLIFENLSRGFGRQGKRTFMAERQYTRMEDWLTAKLAYEGLPSKTYLSKTLAQYTSKTCSNCGFTITSADYDRVLEKLKKTATGWMTTINGKELKVEGQITYYNRYKRQNVVKDLSVELDRLSEESVNNDISSWTKGRSGEALSLLKKRFSHRPVQEKFVCLNCGFETHADEQAALNIARSWLFLRSQEYKKYQTNKTTGNTDKRAFVETWQSFYRKKLKEVWKPAV

SEQ ID NO: 26620 - protein, 978 aa, synthetic construct
  REGION 1..978: note = engineered CasX variant
QEIKRINKIRRRLVKDSNTKKAGKTGPMKTLLVRVMTPDLRERLENLRKKPENIPQPISNTSRANLNKLLTDYTEMKKAILHVYWEEFQKDPVGLMSRVAQPASKKIDQNKLKPEMDEKGNLTTAGFACSQCGQPLFVYKLEQVSEKGKAYTNYFGRCNVAEHEKLILLAQLKPEKDSDEAVTYSLGKFGQRALDFYSIHVTKESTHPVKPLAQIAGNRYASGPVGKALSDACMGTIASFLSKYQDIIIEHQKVVKGNQKRLESLRELAGKENLEYPSVTLPPQPHTKEGVDAYNEVIARVRMWVNLNLWQKLKLSRDDAKPLLRLKGFPSFPLVERQANEVDWWDMVCNVKKLINEKKEDGKVFWQNLAGYKRQEALRPYLSSEEDRKKGKKFARYQLGDLLLHLEKKHGEDWGKVYDEAWERIDKKVEGLSKHIKLEEERRSEDAQSKAALTDWLRAKASFVIEGLKEADKDEFCRCELKLQKWYGDLRGKPFAIEAENSILDISGFSKQYNCAFIWQKDGVKKLNLYLIINYFKGGKLRFKKIKPEAFEANRFYTVINKKSGEIVPMEVNFNFDDPNLIILPLAFGKRQGREFIWNDLLSLETGSLKLANGRVIEKTLYNRRTRQDEPALFVALTFERREVLDSSNIKPMNLIGVDRGENIPAVIALTDPEGCPLSRFKDSLGNPTHILRIGCSYKEKQRTIQARKEVEQRRAGGYSRKYASKAKNLADDMVRNTARDLLYYAVTQDAMLIFENLSRGFGRQGKRTFMAERQYTRMEDWLTAKLAYEGLPSKTYLSKTLAQYTSKTCSNCGFTITSADYDRVLEKLKKTATGWMTTINGKELKVEGQITYYNRYKRQNVVKDLSVELDRLSEESVNNDISSWTKGRSGEALSLLKKRFSHRPVQEKFVCLNCGFETHADEQAALNIARSWLFLRSQEYKKYQTNKTTGNTDKRAFVETWQSFYRKKLKEVWKPAV

SEQ ID NO: 26621 - protein, 978 aa, synthetic construct
  REGION 1..978: note = engineered CasX variant
QEIKRINKIRRRLVKDSNTKKAGKTGPMKTLLVRVMTPDLRERLENLRKKPENIPQPISNTSRANLNKLLTDYTEMKKAILHVYWEEFQKDPVGLMSRVAQPASKKIDQNKLKPEMDEKGNLTTAGFACSQCGQPLFVYKLEQVSEKGKAYTNYFGRCNVAEHEKLILLAQLKPEKDSDEAVTYSLGKFGQRALDFYSIHVTKESTHPVKPLAQIAGNRYASGPVGKALSDACMGTIASFLSKYQDIIIEHQKVVKGNQKRLESLRELAGKENLEYPSVTLPPQPHTKEGVDAYNEVIARVRMWVNLNLWQKLKLSRDDAKPLLRLKGFPSFPLVERQANEVDWWDMVCNVKKLINEKKEDGKVFWQNLAGYKRQEALRPYLSSEEDRKKGKKFARYQLGDLLLHLEKKHGEDWGKVYDEAWERIDKKVEGLSKHIKLEEERRSEDAQSKAALTDWLRAKASFVIEGLKEADKDEFCRCELKLQKWYGDLRGKPFAIEAENSILDISGFSKQYNCAFIWQKDGVKKLNLYLIINYFKGGKLRFKKIKPEAFEANRFYTVINKKSGEIVPMEVNFNFDDPNLIILPLAFGKRQGREFIWNDLLSLETGSLKLANGRVIEKTLYNRRTRQDEPALFVALTFERREVLDSSNIKPMNLIGVDRGENIPAVIALTDPEGCPLSRFKDSLGNPTHILRIGCSYKEKQRTIQAKKEVEQRRAGGYSRKYASKAKNLADDMVRNTARDLLYYAVTQDAMLIFENLSRGFGRQGKRTFMAERQYTRMEDWLTAKLAYEGLPSKTYLSKTLAQYTSKTCSNCGFTITSADYDRVLEKLKKTATGWMTTINGKELKVEGQITYYNRYKRQNVVKDLSVELDRLSEESVNNDISSWTKGRSGEALSLLKKRFSHRPVQEKFVCLNCGFETHADEQAALNIARSWLFLRSQEYKKYQTNKTTGNTDKRAFVETWQSFYRKKLKEVWKPAV

SEQ ID NO: 26622 - protein, 978 aa, synthetic construct
  REGION 1..978: note = engineered CasX variant
QEIKRINKIRRRLVKDSNTKKAGKTGPMKTLLVRVMTPDLRERLENLRKKPENIPQPISNTSRANLNKLLTDYTEMKKAILHVYWEEFQKDPVGLMSRVAQPASKKIDQNKLKPEMDEKGNLTTAGFACSQCGQPLFVYKLEQVSEKGKAYTNYFGRCNVAEHEKLILLAQLKPEKDSDEAVTYSLGKFGQRALDFYSIHVTKESTHPVKPLAQIAGNRYASGPVGKALSDACMGTIASFLSKYQDIIIEHQKVVKGNQKRLESLRELAGKENLEYPSVTLPPQPHTKEGVDAYNEVIARVRMWVNLNLWQKLKLSRDDAKPLLRLKGFPSFPLVERQANEVDWWDMVCNVKKLINEKKEDGKVFWQNLAGYKRQEALRPYLSSEEDRKKGKKFARYQLGDLLLHLEKKHGEDWGKVYDEAWERIDKKVEGLSKHIKLEEERRSEDAQSKAALTDWLRAKASFVIEGLKEADKDEFCRCELKLQKWYGDLRGKPFAIEAENSILDISGFSKQYNCAFIWQKDGVKKLNLYLIINYFKGGKLRFKKIKPEAFEANRFYTVINKKSGEIVPMEVNFNFDDPNLIILPLAFGKRQGREFIWNDLLSLETGSLKLANGRVIEKTLYNRRTRQDEPALFVALTFERREVLDSSNIKPMNLIGVDRGENIPAVIALTDPEGCPLSRFKDSLGNPTHILRIGCSYKEKQRTIQAKKEVEQRRAGAYSRKYASKAKNLADDMVRNTARDLLYYAVTQDAMLIFENLSRGFGRQGKRTFMAERQYTRMEDWLTAKLAYEGLPSKTYLSKTLAQYTSKTCSNCGFTITSADYDRVLEKLKKTATGWMTTINGKELKVEGQITYYNRYKRQNVVKDLSVELDRLSEESVNNDISSWTKGRSGEALSLLKKRFSHRPVQEKFVCLNCGFETHADEQAALNIARSWLFLRSQEYKKYQTNKTTGNTDKRAFVETWQSFYRKKLKEVWKPAV

SEQ ID NO: 26623 - protein, 978 aa, synthetic construct
  REGION 1..978: note = engineered CasX variant
QEIKRINKIRRRLVKDSNTKKAGKTGPMKTLLVRVMTPDLRERLENLRKKPENIPQPISNTSRANLNKLLTDYTEMKKAILHVYWEEFQKDPVGLMSRVAQPASKKIDQNKLKPEMDEKGNLTTAGFACSQCGQPLFVYKLEQVSEKGKAYTNYFGRCNVAEHEKLILLAQLKPEKDSDEAVTYSLGKFGQRALDFYSIHVTKESTHPVKPLAQIAGNRYASGPVGKALSDACMGTIASFLSKYQDIIIEHQKVVKGNQKRLESLRELAGKENLEYPSVTLPPQPHTKEGVDAYNEVIARVRMWVNLNLWQKLKLSRDDAKPLLRLKGFPSFPLVERQANEVDWWDMVCNVKKLINEKKEDGKVFWQNLAGYKRQEALRPYLSSEEDRKKGKKFARYQLGDLLLHLEKKHGEDWGKVYDEAWERIDKKVEGLSKHIKLEEERRSEDAQSKAALTDWLRAKASFVIEGLKEADKDEFCRCELKLQKWYGDLRGKPFAIEAENSILDISGFSKQYNCAFIWQKDGVKKLNLYLIINYFKGGKLRFKKIKPEAFEANRFYTVINKKSGEIVPMEVNFNFDDPNLIILPLAFGKRQGREFIWNDLLSLETGSLKLANGRVIEKTLYNRRTRQDEPALFVALTFERREVLDSSNIKPMNLIGVDRGENIPAVIALTDPEGCPLSRFKDSLGNPTHILRIGASYKEKQRTIQAKKEVEQRRAGGYSRKYASKAKNLADDMVRNTARDLLYYAVTQDAMLIFENLSRGFGRQGKRTFMAERQYTRMEDWLTAKLAYEGLPSKTYLSKTLAQYTSKTCSNCGFTITSADYDRVLEKLKKTATGWMTTINGKELKVEGQITYYNRYKRQNVVKDLSVELDRLSEESVNNDISSWTKGRSGEALSLLKKRFSHRPVQEKFVCLNCGFETHADEQAALNIARSWLFLRSQEYKKYQTNKTTGNTDKRAFVETWQSFYRKKLKEVWKPAV

SEQ ID NO: 26624 - protein, 978 aa, synthetic construct
  REGION 1..978: note = engineered CasX variant
QEIKRINKIRRRLVKDSNTKKAGKTGPMKTLLVRVMTPDLRERLENLRKKPENIPQPISNTSRANLNKLLTDYTEMKKAILHVYWEEFQKDPVGLMSRVAQPASKKIDQNKLKPEMDEKGNLTTAGFACSQCGQPLFVYKLEQVSEKGKAYTNYFGRCNVAEHEKLILLAQLKPEKDSDEAVTYSLGKFGQRALDFYSIHVTKESTHPVKPLAQIAGNRYASGPVGKALSDACMGTIASFLSKYQDIIIEHQKVVKGNQKRLESLRELAGKENLEYPSVTLPPQPHTKEGVDAYNEVIARVRMWVNLNLWQKLKLSRDDAKPLLRLKGFPSFPLVERQANEVDWWDMVCNVKKLINEKKEDGKVFWQNLAGYKRQEALRPYLSSEEDRKKGKKFARYQLGDLLLHLEKKHGEDWGKVYDEAWERIDKKVEGLSKHIKLEEERRSEDAQSKAALTDWLRAKASFVIEGLKEADKDEFCRCELKLQKWYGDLRGKPFAIEAENSILDISGFSKQYNCAFIWQKDGVKKLNLYLIINYFKGGKLRFKKIKPEAFEANRFYTVINKKSGEIVPMEVNFNFDDPNLIILPLAFGKRQGREFIWNDLLSLETGSLKLANGRVIEKTLYNRRTRQDEPALFVALTFERREVLDSSNIKPMNLIGVDRGENIPAVIALTDPEGCPLSRFKDSLGNPTHILRIFESYKEKQRTIQWKKEVEQRRAGYYSRKYASKAKNLADDMVRNTARDLLYYAVTQDAMLIFENLSRGFGRQGKRTFMAERQYTRMEDWLTAKLAYEGLPSKTYLSKTLAQYTSKTCSNCGFTITSADYDRVLEKLKKTATGWMTTINGKELKVEGQITYYNRYKRQNVVKDLSVELDRLSEESVNNDISSWTKGRSGEALSLLKKRFSHRPVQEKFVCLNCGFETHADEQAALNIARSWLFLRSQEYKKYQTNKTTGNTDKRAFVETWQSFYRKKLKEVWKPAV

SEQ ID NO: 26625 - protein, 978 aa, synthetic construct
  REGION 1..978: note = engineered CasX variant
QEIKRINKIRRRLVKDSNTKKAGKTGPMKTLLVRVMTPDLRERLENLRKKPENIPQPISNTSRANLNKLLTDYTEMKKAILHVYWEEFQKDPVGLMSRVAQPASKKIDQNKLKPEMDEKGNLTTAGFACSQCGQPLFVYKLEQVSEKGKAYTNYFGRCNVAEHEKLILLAQLKPEKDSDEAVTYSLGKFGQRALDFYSIHVTKESTHPVKPLAQIAGNRYASGPVGKALSDACMGTIASFLSKYQDIIIEHQKVVKGNQKRLESLRELAGKENLEYPSVTLPPQPHTKEGVDAYNEVIARVRMWVNLNLWQKLKLSRDDAKPLLRLKGFPSFPLVERQANEVDWWDMVCNVKKLINEKKEDGKVFWQNLAGYKRQEALRPYLSSEEDRKKGKKFARYQLGDLLLHLEKKHGEDWGKVYDEAWERIDKKVEGLSKHIKLEEERRSEDAQSKAALTDWLRAKASFVIEGLKEADKDEFCRCELKLQKWYGDLRGKPFAIEAENSILDISGFSKQYNCAFIWQKDGVKKLNLYLIINYFKGGKLRFKKIKPEAFEANRFYTVINKKSGEIVPMEVNFNFDDPNLIILPLAFGKRQGREFIWNDLLSLETGSLKLANGRVIEKTLYNRRTRQDEPALFVALTFERREVLDSSNIKPMNLIGVDRGENIPAVIALTDPEGCPLSRFKDSLGNPTHILRIFESYKEKQRTIQWKKEVEQRRAGGYSRKYASKAKNLADDMVRNTARDLLYYAVTQDAMLIFENLSRGFGRQGKRTFMAERQYTRMEDWLTAKLAYEGLPSKTYLSKTLAQYTSKTCSNCGFTITSADYDRVLEKLKKTATGWMTTINGKELKVEGQITYYNRYKRQNVVKDLSVELDRLSEESVNNDISSWTKGRSGEALSLLKKRFSHRPVQEKFVCLNCGFETHADEQAALNIARSWLFLRSQEYKKYQTNKTTGNTDKRAFVETWQSFYRKKLKEVWKPAV

SEQ ID NO: 26626 - protein, 978 aa, synthetic construct
  REGION 1..978: note = engineered CasX variant
QEIKRINKIRRRLVKDSNTKKAGKTGPMKTLLVRVMTPDLRERLENLRKKPENIPQPISNTSRANLNKLLTDYTEMKKAILHVYWEEFQKDPVGLMSRVAQPASKKIDQNKLKPEMDEKGNLTTAGFACSQCGQPLFVYKLEQVSEKGKAYTNYFGRCNVAEHEKLILLAQLKPEKDSDEAVTYSLGKFGQRALDFYSIHVTKESTHPVKPLAQIAGNRYASGPVGKALSDACMGTIASFLSKYQDIIIEHQKVVKGNQKRLESLRELAGKENLEYPSVTLPPQPHTKEGVDAYNEVIARVRMWVNLNLWQKLKLSRDDAKPLLRLKGFPSFPLVERQANEVDWWDMVCNVKKLINEKKEDGKVFWQNLAGYKRQEALRPYLSSEEDRKKGKKFARYQLGDLLLHLEKKHGEDWGKVYDEAWERIDKKVEGLSKHIKLEEERRSEDAQSKAALTDWLRAKASFVIEGLKEADKDEFCRCELKLQKWYGDLRGKPFAIEAENSILDISGFSKQYNCAFIWQKDGVKKLNLYLIINYFKGGKLRFKKIKPEAFEANRFYTVINKKSGEIVPMEVNFNFDDPNLIILPLAFGKRQGREFIWNDLLSLETGSLKLANGRVIEKTLYNRRTRQDEPALFVALTFERREVLDSSNIKPMNLIGVDRGENIPAVIALTDPEGCPLSRFKDSLGNPTHILRIFESYKEKQRTIQAKKEVEQRRAGYYSRKYASKAKNLADDMVRNTARDLLYYAVTQDAMLIFENLSRGFGRQGKRTFMAERQYTRMEDWLTAKLAYEGLPSKTYLSKTLAQYTSKTCSNCGFTITSADYDRVLEKLKKTATGWMTTINGKELKVEGQITYYNRYKRQNVVKDLSVELDRLSEESVNNDISSWTKGRSGEALSLLKKRFSHRPVQEKFVCLNCGFETHADEQAALNIARSWLFLRSQEYKKYQTNKTTGNTDKRAFVETWQSFYRKKLKEVWKPAV

SEQ ID NO: 26627 - protein, 978 aa, synthetic construct
  REGION 1..978: note = engineered CasX variant
QEIKRINKIRRRLVKDSNTKKAGKTGPMKTLLVRVMTPDLRERLENLRKKPENIPQPISNTSRANLNKLLTDYTEMKKAILHVYWEEFQKDPVGLMSRVAQPASKKIDQNKLKPEMDEKGNLTTAGFACSQCGQPLFVYKLEQVSEKGKAYTNYFGRCNVAEHEKLILLAQLKPEKDSDEAVTYSLGKFGQRALDFYSIHVTKESTHPVKPLAQIAGNRYASGPVGKALSDACMGTIASFLSKYQDIIIEHQKVVKGNQKRLESLRELAGKENLEYPSVTLPPQPHTKEGVDAYNEVIARVRMWVNLNLWQKLKLSRDDAKPLLRLKGFPSFPLVERQANEVDWWDMVCNVKKLINEKKEDGKVFWQNLAGYKRQEALRPYLSSEEDRKKGKKFARYQLGDLLLHLEKKHGEDWGKVYDEAWERIDKKVEGLSKHIKLEEERRSEDAQSKAALTDWLRAKASFVIEGLKEADKDEFCRCELKLQKWYGDLRGKPFAIEAENSILDISGFSKQYNCAFIWQKDGVKKLNLYLIINYFKGGKLRFKKIKPEAFEANRFYTVINKKSGEIVPMEVNFNFDDPNLIILPLAFGKRQGREFIWNDLLSLETGSLKLANGRVIEKTLYNRRTRQDEPALFVALTFERREVLDSSNIKPMNLIGVDRGENIPAVIALTDPEGCPLSRFKDSLGNPTHILRIEESYKEKQRTIQAKKEVEQRRAGGYSRKYASKAKNLADDMVRNTARDLLYYAVTQDAMLIFENLSRGFGRQGKRTFMAERQYTRMEDWLTAKLAYEGLPSKTYLSKTLAQYTSKTCSNCGFTITSADYDRVLEKLKKTATGWMTTINGKELKVEGQITYYNRYKRQNVVKDLSVELDRLSEESVNNDISSWTKGRSGEALSLLKKRFSHRPVQEKFVCLNCGFETHADEQAALNIARSWLFLRSQEYKKYQTNKTTGNTDKRAFVETWQSFYRKKLKEVWKPAV

SEQ ID NO: 26628 - protein, 978 aa, synthetic construct
  REGION 1..978: note = engineered CasX variant
QEIKRINKIRRRLVKDSNTKKAGKTGPMKTLLVRVMTPDLRERLENLRKKPENIPQPISNTSRANLNKLLTDYTEMKKAILHVYWEEFQKDPVGLMSRVAQPASKKIDQNKLKPEMDEKGNLTTAGFACSQCGQPLFVYKLEQVSEKGKAYTNYFGRCNVAEHEKLILLAQLKPEKDSDEAVTYSLGKFGQRALDFYSIHVTKESTHPVKPLAQIAGNRYASGPVGKALSDACMGTIASFLSKYQDIIIEHQKVVKGNQKRLESLRELAGKENLEYPSVTLPPQPHTKEGVDAYNEVIARVRMWVNLNLWQKLKLSRDDAKPLLRLKGFPSFPLVERQANEVDWWDMVCNVKKLINEKKEDGKVFWQNLAGYKRQEALRPYLSSEEDRKKGKKFARYQLGDLLLHLEKKHGEDWGKVYDEAWERIDKKVEGLSKHIKLEEERRSEDAQSKAALTDWLRAKASFVIEGLKEADKDEFCRCELKLQKWYGDLRGKPFAIEAENSILDISGFSKQYNCAFIWQKDGVKKLNLYLIINYFKGGKLRFKKIKPEAFEANRFYTVINKKSGEIVPMEVNFNFDDPNLIILPLAFGKRQGREFIWNDLLSLETGSLKLANGRVIEKTLYNRRTRQDEPALFVALTFERREVLDSSNIKPMNLIGVDRGENIPAVIALTDPEGCPLSRFKDSLGNPTHILRIEESYKEKQRTIQAKKEGEQRRAGGYSRKYASKAKNLADDMVRNTARDLLYYAVTQDAMLIFENLSRGFGRQGKRTFMAERQYTRMEDWLTAKLAYEGLPSKTYLSKTLAQYTSKTCSNCGFTITSADYDRVLEKLKKTATGWMTTINGKELKVEGQITYYNRYKRQNVVKDLSVELDRLSEESVNNDISSWTKGRSGEALSLLKKRFSHRPVQEKFVCLNCGFETHADEQAALNIARSWLFLRSQEYKKYQTNKTTGNTDKRAFVETWQSFYRKKLKEVWKPAV

SEQ ID NO: 26629 - protein, 978 aa, synthetic construct
  REGION 1..978: note = engineered CasX variant
QEIKRINKIRRRLVKDSNTKKAGKTGPMKTLLVRVMTPDLRERLENLRKKPENIPQPISNTSRANLNKLLTDYTEMKKAILHVYWEEFQKDPVGLMSRVAQPASKKIDQNKLKPEMDEKGNLTTAGFACSQCGQPLFVYKLEQVSEKGKAYTNYFGRCNVAEHEKLILLAQLKPEKDSDEAVTYSLGKFGQRALDFYSIHVTKESTHPVKPLAQIAGNRYASGPVGKALSDACMGTIASFLSKYQDIIIEHQKVVKGNQKRLESLRELAGKENLEYPSVTLPPQPHTKEGVDAYNEVIARVRMWVNLNLWQKLKLSRDDAKPLLRLKGFPSFPLVERQANEVDWWDMVCNVKKLINEKKEDGKVFWQNLAGYKRQEALRPYLSSEEDRKKGKKFARYQLGDLLLHLEKKHGEDWGKVYDEAWERIDKKVEGLSKHIKLEEERRSEDAQSKAALTDWLRAKASFVIEGLKEADKDEFCRCELKLQKWYGDLRGKPFAIEAENSILDISGFSKQYNCAFIWQKDGVKKLNLYLIINYFKGGKLRFKKIKPEAFEANRFYTVINKKSGEIVPMEVNFNFDDPNLIILPLAFGKRQGREFIWNDLLSLETGSLKLANGRVIEKTLYNRRTRQDEPALFVALTFERREVLDSSNIKPMNLIGVDRGENIPAVIALTDPEGCPLSRFKDSLGNPTHILRIDESYKHKTRTIQAKKEVEQRRAGGYSRKYASKAKNLADDMVRNTARDLLYYAVTQDAMLIFENLSRGFGRQGKRTFMAERQYTRMEDWLTAKLAYEGLPSKTYLSKTLAQYTSKTCSNCGFTITSADYDRVLEKLKKTATGWMTTINGKELKVEGQITYYNRYKRQNVVKDLSVELDRLSEESVNNDISSWTKGRSGEALSLLKKRFSHRPVQEKFVCLNCGFETHADEQAALNIARSWLFLRSQEYKKYQTNKTTGNTDKRAFVETWQSFYRKKLKEVWKPAV

SEQ ID NO: 26630 - protein, 978 aa, synthetic construct
  REGION 1..978: note = engineered CasX variant
QEIKRINKIRRRLVKDSNTKKAGKTGPMKTLLVRVMTPDLRERLENLRKKPENIPQPISNTSRANLNKLLTDYTEMKKAILHVYWEEFQKDPVGLMSRVAQPASKKIDQNKLKPEMDEKGNLTTAGFACSQCGQPLFVYKLEQVSEKGKAYTNYFGRCNVAEHEKLILLAQLKPEKDSDEAVTYSLGKFGQRALDFYSIHVTKESTHPVKPLAQIAGNRYASGPVGKALSDACMGTIASFLSKYQDIIIEHQKVVKGNQKRLESLRELAGKENLEYPSVTLPPQPHTKEGVDAYNEVIARVRMWVNLNLWQKLKLSRDDAKPLLRLKGFPSFPLVERQANEVDWWDMVCNVKKLINEKKEDGKVFWQNLAGYKRQEALRPYLSSEEDRKKGKKFARYQLGDLLLHLEKKHGEDWGKVYDEAWERIDKKVEGLSKHIKLEEERRSEDAQSKAALTDWLRAKASFVIEGLKEADKDEFCRCELKLQKWYGDLRGKPFAIEAENSILDISGFSKQYNCAFIWQKDGVKKLNLYLIINYFKGGKLRFKKIKPEAFEANRFYTVINKKSGEIVPMEVNFNFDDPNLIILPLAFGKRQGREFIWNDLLSLETGSLKLANGRVIEKTLYNRRTRQDEPALFVALTFERREVLDSSNIKPMNLIGVDRGENIPAVIALTDPEGCPLSRFKDSLGNPTHILRIDESYKHKQRTIQAKKEVEQRRAGGYSRKYASKAKNLADDMVRNTARDLLYYAVTQDAMLIFENLSRGFGRQGKRTFMAERQYTRMEDWLTAKLAYEGLPSKTYLSKTLAQYTSKTCSNCGFTITSADYDRVLEKLKKTATGWMTTINGKELKVEGQITYYNRYKRQNVVKDLSVELDRLSEESVNNDISSWTKGRSGEALSLLKKRFSHRPVQEKFVCLNCGFETHADEQAALNIARSWLFLRSQEYKKYQTNKTTGNTDKRAFVETWQSFYRKKLKEVWKPAV

SEQ ID NO: 26631 - protein, 978 aa, synthetic construct
  REGION 1..978: note = engineered CasX variant
QEIKRINKIRRRLVKDSNTKKAGKTGPMKTLLVRVMTPDLRERLENLRKKPENIPQPISNTSRANLNKLLTDYTEMKKAILHVYWEEFQKDPVGLMSRVAQPASKKIDQNKLKPEMDEKGNLTTAGFACSQCGQPLFVYKLEQVSEKGKAYTNYFGRCNVAEHEKLILLAQLKPEKDSDEAVTYSLGKFGQRALDFYSIHVTKESTHPVKPLAQIAGNRYASGPVGKALSDACMGTIASFLSKYQDIIIEHQKVVKGNQKRLESLRELAGKENLEYPSVTLPPQPHTKEGVDAYNEVIARVRMWVNLNLWQKLKLSRDDAKPLLRLKGFPSFPLVERQANEVDWWDMVCNVKKLINEKKEDGKVFWQNLAGYKRQEALRPYLSSEEDRKKGKKFARYQLGDLLLHLEKKHGEDWGKVYDEAWERIDKKVEGLSKHIKLEEERRSEDAQSKAALTDWLRAKASFVIEGLKEADKDEFCRCELKLQKWYGDLRGKPFAIEAENSILDISGFSKQYNCAFIWQKDGVKKLNLYLIINYFKGGKLRFKKIKPEAFEANRFYTVINKKSGEIVPMEVNFNFDDPNLIILPLAFGKRQGREFIWNDLLSLETGSLKLANGRVIEKTLYNRRTRQDEPALFVALTFERREVLDSSNIKPMNLIGVDRGENIPAVIALTDPEGCPLSRFKDSLGNPTHILRIDESYKHKQRTIQAKKCVEQRRAGGYSRKYASKAKNLADDMVRNTARDLLYYAVTQDAMLIFENLSRGFGRQGKRTFMAERQYTRMEDWLTAKLAYEGLPSKTYLSKTLAQYTSKTCSNCGFTITSADYDRVLEKLKKTATGWMTTINGKELKVEGQITYYNRYKRQNVVKDLSVELDRLSEESVNNDISSWTKGRSGEALSLLKKRFSHRPVQEKFVCLNCGFETHADEQAALNIARSWLFLRSQEYKKYQTNKTTGNTDKRAFVETWQSFYRKKLKEVWKPAV

SEQ ID NO: 26632 - protein, 978 aa, synthetic construct
  REGION 1..978: note = engineered CasX variant
QEIKRINKIRRRLVKDSNTKKAGKTGPMKTLLVRVMTPDLRERLENLRKKPENIPQPISNTSRANLNKLLTDYTEMKKAILHVYWEEFQKDPVGLMSRVAQPASKKIDQNKLKPEMDEKGNLTTAGFACSQCGQPLFVYKLEQVSEKGKAYTNYFGRCNVAEHEKLILLAQLKPEKDSDEAVTYSLGKFGQRALDFYSIHVTKESTHPVKPLAQIAGNRYASGPVGKALSDACMGTIASFLSKYQDIIIEHQKVVKGNQKRLESLRELAGKENLEYPSVTLPPQPHTKEGVDAYNEVIARVRMWVNLNLWQKLKLSRDDAKPLLRLKGFPSFPLVERQANEVDWWDMVCNVKKLINEKKEDGKVFWQNLAGYKRQEALRPYLSSEEDRKKGKKFARYQLGDLLLHLEKKHGEDWGKVYDEAWERIDKKVEGLSKHIKLEEERRSEDAQSKAALTDWLRAKASFVIEGLKEADKDEFCRCELKLQKWYGDLRGKPFAIEAENSILDISGFSKQYNCAFIWQKDGVKKLNLYLIINYFKGGKLRFKKIKPEAFEANRFYTVINKKSGEIVPMEVNFNFDDPNLIILPLAFGKRQGREFIWNDLLSLETGSLKLANGRVIEKTLYNRRTRQDEPALFVALTFERREVLDSSNIKPMNLIGVDRGENIPAVIALTDPEGCPLSRFKDSLGNPTHILRIDESYKEKTRTIQAKKEVEQRRAGGYSRKYASKAKNLADDMVRNTARDLLYYAVTQDAMLIFENLSRGFGRQGKRTFMAERQYTRMEDWLTAKLAYEGLPSKTYLSKTLAQYTSKTCSNCGFTITSADYDRVLEKLKKTATGWMTTINGKELKVEGQITYYNRYKRQNVVKDLSVELDRLSEESVNNDISSWTKGRSGEALSLLKKRFSHRPVQEKFVCLNCGFETHADEQAALNIARSWLFLRSQEYKKYQTNKTTGNTDKRAFVETWQSFYRKKLKEVWKPAV

SEQ ID NO: 26633 - protein, 978 aa, synthetic construct
  REGION 1..978: note = engineered CasX variant
QEIKRINKIRRRLVKDSNTKKAGKTGPMKTLLVRVMTPDLRERLENLRKKPENIPQPISNTSRANLNKLLTDYTEMKKAILHVYWEEFQKDPVGLMSRVAQPASKKIDQNKLKPEMDEKGNLTTAGFACSQCGQPLFVYKLEQVSEKGKAYTNYFGRCNVAEHEKLILLAQLKPEKDSDEAVTYSLGKFGQRALDFYSIHVTKESTHPVKPLAQIAGNRYASGPVGKALSDACMGTIASFLSKYQDIIIEHQKVVKGNQKRLESLRELAGKENLEYPSVTLPPQPHTKEGVDAYNEVIARVRMWVNLNLWQKLKLSRDDAKPLLRLKGFPSFPLVERQANEVDWWDMVCNVKKLINEKKEDGKVFWQNLAGYKRQEALRPYLSSEEDRKKGKKFARYQLGDLLLHLEKKHGEDWGKVYDEAWERIDKKVEGLSKHIKLEEERRSEDAQSKAALTDWLRAKASFVIEGLKEADKDEFCRCELKLQKWYGDLRGKPFAIEAENSILDISGFSKQYNCAFIWQKDGVKKLNLYLIINYFKGGKLRFKKIKPEAFEANRFYTVINKKSGEIVPMEVNFNFDDPNLIILPLAFGKRQGREFIWNDLLSLETGSLKLANGRVIEKTLYNRRTRQDEPALFVALTFERREVLDSSNIKPMNLIGVDRGENIPAVIALTDPEGCPLSRFKDSLGNPTHILRIDESYKEKTRTIQAKKCVEQRRAGGYSRKYASKAKNLADDMVRNTARDLLYYAVTQDAMLIFENLSRGFGRQGKRTFMAERQYTRMEDWLTAKLAYEGLPSKTYLSKTLAQYTSKTCSNCGFTITSADYDRVLEKLKKTATGWMTTINGKELKVEGQITYYNRYKRQNVVKDLSVELDRLSEESVNNDISSWTKGRSGEALSLLKKRFSHRPVQEKFVCLNCGFETHADEQAALNIARSWLFLRSQEYKKYQTNKTTGNTDKRAFVETWQSFYRKKLKEVWKPAV

SEQ ID NO: 26634 - protein, 978 aa, synthetic construct
  REGION 1..978: note = engineered CasX variant
QEIKRINKIRRRLVKDSNTKKAGKTGPMKTLLVRVMTPDLRERLENLRKKPENIPQPISNTSRANLNKLLTDYTEMKKAILHVYWEEFQKDPVGLMSRVAQPASKKIDQNKLKPEMDEKGNLTTAGFACSQCGQPLFVYKLEQVSEKGKAYTNYFGRCNVAEHEKLILLAQLKPEKDSDEAVTYSLGKFGQRALDFYSIHVTKESTHPVKPLAQIAGNRYASGPVGKALSDACMGTIASFLSKYQDIIIEHQKVVKGNQKRLESLRELAGKENLEYPSVTLPPQPHTKEGVDAYNEVIARVRMWVNLNLWQKLKLSRDDAKPLLRLKGFPSFPLVERQANEVDWWDMVCNVKKLINEKKEDGKVFWQNLAGYKRQEALRPYLSSEEDRKKGKKFARYQLGDLLLHLEKKHGEDWGKVYDEAWERIDKKVEGLSKHIKLEEERRSEDAQSKAALTDWLRAKASFVIEGLKEADKDEFCRCELKLQKWYGDLRGKPFAIEAENSILDISGFSKQYNCAFIWQKDGVKKLNLYLIINYFKGGKLRFKKIKPEAFEANRFYTVINKKSGEIVPMEVNFNFDDPNLIILPLAFGKRQGREFIWNDLLSLETGSLKLANGRVIEKTLYNRRTRQDEPALFVALTFERREVLDSSNIKPMNLIGVDRGENIPAVIALTDPEGCPLSRFKDSLGNPTHILRIDESYKEKQRTIQAKKEVEQSRAGGYSRKYASKAKNLADDMVRNTARDLLYYAVTQDAMLIFENLSRGFGRQGKRTFMAERQYTRMEDWLTAKLAYEGLPSKTYLSKTLAQYTSKTCSNCGFTITSADYDRVLEKLKKTATGWMTTINGKELKVEGQITYYNRYKRQNVVKDLSVELDRLSEESVNNDISSWTKGRSGEALSLLKKRFSHRPVQEKFVCLNCGFETHADEQAALNIARSWLFLRSQEYKKYQTNKTTGNTDKRAFVETWQSFYRKKLKEVWKPAV

SEQ ID NO: 26635 - protein, 978 aa, synthetic construct
  REGION 1..978: note = engineered CasX variant
QEIKRINKIRRRLVKDSNTKKAGKTGPMKTLLVRVMTPDLRERLENLRKKPENIPQPISNTSRANLNKLLTDYTEMKKAILHVYWEEFQKDPVGLMSRVAQPASKKIDQNKLKPEMDEKGNLTTAGFACSQCGQPLFVYKLEQVSEKGKAYTNYFGRCNVAEHEKLILLAQLKPEKDSDEAVTYSLGKFGQRALDFYSIHVTKESTHPVKPLAQIAGNRYASGPVGKALSDACMGTIASFLSKYQDIIIEHQKVVKGNQKRLESLRELAGKENLEYPSVTLPPQPHTKEGVDAYNEVIARVRMWVNLNLWQKLKLSRDDAKPLLRLKGFPSFPLVERQANEVDWWDMVCNVKKLINEKKEDGKVFWQNLAGYKRQEALRPYLSSEEDRKKGKKFARYQLGDLLLHLEKKHGEDWGKVYDEAWERIDKKVEGLSKHIKLEEERRSEDAQSKAALTDWLRAKASFVIEGLKEADKDEFCRCELKLQKWYGDLRGKPFAIEAENSILDISGFSKQYNCAFIWQKDGVKKLNLYLIINYFKGGKLRFKKIKPEAFEANRFYTVINKKSGEIVPMEVNFNFDDPNLIILPLAFGKRQGREFIWNDLLSLETGSLKLANGRVIEKTLYNRRTRQDEPALFVALTFERREVLDSSNIKPMNLIGVDRGENIPAVIALTDPEGCPLSRFKDSLGNPTHILRIDESYKEKQRTIQAKKEVEQRRMGGYSRKYASKAKNLADDMVRNTARDLLYYAVTQDAMLIFENLSRGFGRQGKRTFMAERQYTRMEDWLTAKLAYEGLPSKTYLSKTLAQYTSKTCSNCGFTITSADYDRVLEKLKKTATGWMTTINGKELKVEGQITYYNRYKRQNVVKDLSVELDRLSEESVNNDISSWTKGRSGEALSLLKKRFSHRPVQEKFVCLNCGFETHADEQAALNIARSWLFLRSQEYKKYQTNKTTGNTDKRAFVETWQSFYRKKLKEVWKPAV

SEQ ID NO: 26636 - protein, 978 aa, synthetic construct
  REGION 1..978: note = engineered CasX variant
QEIKRINKIRRRLVKDSNTKKAGKTGPMKTLLVRVMTPDLRERLENLRKKPENIPQPISNTSRANLNKLLTDYTEMKKAILHVYWEEFQKDPVGLMSRVAQPASKKIDQNKLKPEMDEKGNLTTAGFACSQCGQPLFVYKLEQVSEKGKAYTNYFGRCNVAEHEKLILLAQLKPEKDSDEAVTYSLGKFGQRALDFYSIHVTKESTHPVKPLAQIAGNRYASGPVGKALSDACMGTIASFLSKYQDIIIEHQKVVKGNQKRLESLRELAGKENLEYPSVTLPPQPHTKEGVDAYNEVIARVRMWVNLNLWQKLKLSRDDAKPLLRLKGFPSFPLVERQANEVDWWDMVCNVKKLINEKKEDGKVFWQNLAGYKRQEALRPYLSSEEDRKKGKKFARYQLGDLLLHLEKKHGEDWGKVYDEAWERIDKKVEGLSKHIKLEEERRSEDAQSKAALTDWLRAKASFVIEGLKEADKDEFCRCELKLQKWYGDLRGKPFAIEAENSILDISGFSKQYNCAFIWQKDGVKKLNLYLIINYFKGGKLRFKKIKPEAFEANRFYTVINKKSGEIVPMEVNFNFDDPNLIILPLAFGKRQGREFIWNDLLSLETGSLKLANGRVIEKTLYNRRTRQDEPALFVALTFERREVLDSSNIKPMNLIGVDRGENIPAVIALTDPEGCPLSRFKDSLGNPTHILRIDESYKEKQRTIQAKKEVEQRRAGGYSRKYASKAKNLADDMVRNTARDLLYYAVTQDAMLIFENLSRGFGRQGKRTFMAERQYTRMEDWLTAKLAYEGLPSKTYLSKTLAQYTSKTCSNCGFTITSADYDRVLEKLKKTATGWMTTINGKELKVEGQITYYNRYKRQNVVKDLSVELDRLSEESVNNDISSWTKGRSGEALSLLKKRFSHRPVQEKFVCLNCGFETHADEQAALNIARSWLFLRSQEYKKYQTNKTTGNTDKRAFVETWQSFYRKKLKEVWKPAV

SEQ ID NO: 26637 - protein, 978 aa, synthetic construct
  REGION 1..978: note = engineered CasX variant
QEIKRINKIRRRLVKDSNTKKAGKTGPMKTLLVRVMTPDLRERLENLRKKPENIPQPISNTSRANLNKLLTDYTEMKKAILHVYWEEFQKDPVGLMSRVAQPASKKIDQNKLKPEMDEKGNLTTAGFACSQCGQPLFVYKLEQVSEKGKAYTNYFGRCNVAEHEKLILLAQLKPEKDSDEAVTYSLGKFGQRALDFYSIHVTKESTHPVKPLAQIAGNRYASGPVGKALSDACMGTIASFLSKYQDIIIEHQKVVKGNQKRLESLRELAGKENLEYPSVTLPPQPHTKEGVDAYNEVIARVRMWVNLNLWQKLKLSRDDAKPLLRLKGFPSFPLVERQANEVDWWDMVCNVKKLINEKKEDGKVFWQNLAGYKRQEALRPYLSSEEDRKKGKKFARYQLGDLLLHLEKKHGEDWGKVYDEAWERIDKKVEGLSKHIKLEEERRSEDAQSKAALTDWLRAKASFVIEGLKEADKDEFCRCELKLQKWYGDLRGKPFAIEAENSILDISGFSKQYNCAFIWQKDGVKKLNLYLIINYFKGGKLRFKKIKPEAFEANRFYTVINKKSGEIVPMEVNFNFDDPNLIILPLAFGKRQGREFIWNDLLSLETGSLKLANGRVIEKTLYNRRTRQDEPALFVALTFERREVLDSSNIKPMNLIGVDRGENIPAVIALTDPEGCPLSRFKDSLGNPTHILRIDESYKEKQRTIQAKKEVEQQRAGGYSRKYASKAKNLADDMVRNTARDLLYYAVTQDAMLIFENLSRGFGRQGKRTFMAERQYTRMEDWLTAKLAYEGLPSKTYLSKTLAQYTSKTCSNCGFTITSADYDRVLEKLKKTATGWMTTINGKELKVEGQITYYNRYKRQNVVKDLSVELDRLSEESVNNDISSWTKGRSGEALSLLKKRFSHRPVQEKFVCLNCGFETHADEQAALNIARSWLFLRSQEYKKYQTNKTTGNTDKRAFVETWQSFYRKKLKEVWKPAV

SEQ ID NO: 26638 - protein, 978 aa, synthetic construct
  REGION 1..978: note = engineered CasX variant
QEIKRINKIRRRLVKDSNTKKAGKTGPMKTLLVRVMTPDLRERLENLRKKPENIPQPISNTSRANLNKLLTDYTEMKKAILHVYWEEFQKDPVGLMSRVAQPASKKIDQNKLKPEMDEKGNLTTAGFACSQCGQPLFVYKLEQVSEKGKAYTNYFGRCNVAEHEKLILLAQLKPEKDSDEAVTYSLGKFGQRALDFYSIHVTKESTHPVKPLAQIAGNRYASGPVGKALSDACMGTIASFLSKYQDIIIEHQKVVKGNQKRLESLRELAGKENLEYPSVTLPPQPHTKEGVDAYNEVIARVRMWVNLNLWQKLKLSRDDAKPLLRLKGFPSFPLVERQANEVDWWDMVCNVKKLINEKKEDGKVFWQNLAGYKRQEALRPYLSSEEDRKKGKKFARYQLGDLLLHLEKKHGEDWGKVYDEAWERIDKKVEGLSKHIKLEEERRSEDAQSKAALTDWLRAKASFVIEGLKEADKDEFCRCELKLQKWYGDLRGKPFAIEAENSILDISGFSKQYNCAFIWQKDGVKKLNLYLIINYFKGGKLRFKKIKPEAFEANRFYTVINKKSGEIVPMEVNFNFDDPNLIILPLAFGKRQGREFIWNDLLSLETGSLKLANGRVIEKTLYNRRTRQDEPALFVALTFERREVLDSSNIKPMNLIGVDRGENIPAVIALTDPEGCPLSRFKDSLGNPTHILRIDESYKEKQRTIQAKKCVEQRRAGGYSRKYASKAKNLADDMVRNTARDLLYYAVTQDAMLIFENLSRGFGRQGKRTFMAERQYTRMEDWLTAKLAYEGLPSKTYLSKTLAQYTSKTCSNCGFTITSADYDRVLEKLKKTATGWMTTINGKELKVEGQITYYNRYKRQNVVKDLSVELDRLSEESVNNDISSWTKGRSGEALSLLKKRFSHRPVQEKFVCLNCGFETHADEQAALNIARSWLFLRSQEYKKYQTNKTTGNTDKRAFVETWQSFYRKKLKEVWKPAV

SEQ ID NO: 26639 - protein, 978 aa, synthetic construct
  REGION 1..978: note = engineered CasX variant
QEIKRINKIRRRLVKDSNTKKAGKTGPMKTLLVRVMTPDLRERLENLRKKPENIPQPISNTSRANLNKLLTDYTEMKKAILHVYWEEFQKDPVGLMSRVAQPASKKIDQNKLKPEMDEKGNLTTAGFACSQCGQPLFVYKLEQVSEKGKAYTNYFGRCNVAEHEKLILLAQLKPEKDSDEAVTYSLGKFGQRALDFYSIHVTKESTHPVKPLAQIAGNRYASGPVGKALSDACMGTIASFLSKYQDIIIEHQKVVKGNQKRLESLRELAGKENLEYPSVTLPPQPHTKEGVDAYNEVIARVRMWVNLNLWQKLKLSRDDAKPLLRLKGFPSFPLVERQANEVDWWDMVCNVKKLINEKKEDGKVFWQNLAGYKRQEALRPYLSSEEDRKKGKKFARYQLGDLLLHLEKKHGEDWGKVYDEAWERIDKKVEGLSKHIKLEEERRSEDAQSKAALTDWLRAKASFVIEGLKEADKDEFCRCELKLQKWYGDLRGKPFAIEAENSILDISGFSKQYNCAFIWQKDGVKKLNLYLIINYFKGGKLRFKKIKPEAFEANRFYTVINKKSGEIVPMEVNFNFDDPNLIILPLAFGKRQGREFIWNDLLSLETGSLKLANGRVIEKTLYNRRTRQDEPALFVALTFERREVLDSSNIKPMNLIGVDRGENIPAVIALTDPEGCPLSRFKDSLGNPTHILRIDESYKEKQQTIQAKKEVEQRRAGGYSRKYASKAKNLADDMVRNTARDLLYYAVTQDAMLIFENLSRGFGRQGKRTFMAERQYTRMEDWLTAKLAYEGLPSKTYLSKTLAQYTSKTCSNCGFTITSADYDRVLEKLKKTATGWMTTINGKELKVEGQITYYNRYKRQNVVKDLSVELDRLSEESVNNDISSWTKGRSGEALSLLKKRFSHRPVQEKFVCLNCGFETHADEQAALNIARSWLFLRSQEYKKYQTNKTTGNTDKRAFVETWQSFYRKKLKEVWKPAV

SEQ ID NO: 26640 - protein, 978 aa, synthetic construct
  REGION 1..978: note = engineered CasX variant
QEIKRINKIRRRLVKDSNTKKAGKTGPMKTLLVRVMTPDLRERLENLRKKPENIPQPISNTSRANLNKLLTDYTEMKKAILHVYWEEFQKDPVGLMSRVAQPASKKIDQNKLKPEMDEKGNLTTAGFACSQCGQPLFVYKLEQVSEKGKAYTNYFGRCNVAEHEKLILLAQLKPEKDSDEAVTYSLGKFGQRALDFYSIHVTKESTHPVKPLAQIAGNRYASGPVGKALSDACMGTIASFLSKYQDIIIEHQKVVKGNQKRLESLRELAGKENLEYPSVTLPPQPHTKEGVDAYNEVIARVRMWVNLNLWQKLKLSRDDAKPLLRLKGFPSFPLVERQANEVDWWDMVCNVKKLINEKKEDGKVFWQNLAGYKRQEALRPYLSSEEDRKKGKKFARYQLGDLLLHLEKKHGEDWGKVYDEAWERIDKKVEGLSKHIKLEEERRSEDAQSKAALTDWLRAKASFVIEGLKEADKDEFCRCELKLQKWYGDLRGKPFAIEAENSILDISGFSKQYNCAFIWQKDGVKKLNLYLIINYFKGGKLRFKKIKPEAFEANRFYTVINKKSGEIVPMEVNFNFDDPNLIILPLAFGKRQGREFIWNDLLSLETGSLKLANGRVIEKTLYNRRTRQDEPALFVALTFERREVLDSSNIKPMNLIGVDRGENIPAVIALTDPEGCPLSRFKDSLGNPTHILRIDESYKCKQRTIQAKKEVEQRRAGGYSRKYASKAKNLADDMVRNTARDLLYYAVTQDAMLIFENLSRGFGRQGKRTFMAERQYTRMEDWLTAKLAYEGLPSKTYLSKTLAQYTSKTCSNCGFTITSADYDRVLEKLKKTATGWMTTINGKELKVEGQITYYNRYKRQNVVKDLSVELDRLSEESVNNDISSWTKGRSGEALSLLKKRFSHRPVQEKFVCLNCGFETHADEQAALNIARSWLFLRSQEYKKYQTNKTTGNTDKRAFVETWQSFYRKKLKEVWKPAV

SEQ ID NO: 26641 - protein, 978 aa, synthetic construct
  REGION 1..978: note = engineered CasX variant
QEIKRINKIRRRLVKDSNTKKAGKTGPMKTLLVRVMTPDLRERLENLRKKPENIPQPISNTSRANLNKLLTDYTEMKKAILHVYWEEFQKDPVGLMSRVAQPASKKIDQNKLKPEMDEKGNLTTAGFACSQCGQPLFVYKLEQVSEKGKAYTNYFGRCNVAEHEKLILLAQLKPEKDSDEAVTYSLGKFGQRALDFYSIHVTKESTHPVKPLAQIAGNRYASGPVGKALSDACMGTIASFLSKYQDIIIEHQKVVKGNQKRLESLRELAGKENLEYPSVTLPPQPHTKEGVDAYNEVIARVRMWVNLNLWQKLKLSRDDAKPLLRLKGFPSFPLVERQANEVDWWDMVCNVKKLINEKKEDGKVFWQNLAGYKRQEALRPYLSSEEDRKKGKKFARYQLGDLLLHLEKKHGEDWGKVYDEAWERIDKKVEGLSKHIKLEEERRSEDAQSKAALTDWLRAKASFVIEGLKEADKDEFCRCELKLQKWYGDLRGKPFAIEAENSILDISGFSKQYNCAFIWQKDGVKKLNLYLIINYFKGGKLRFKKIKPEAFEANRFYTVINKKSGEIVPMEVNFNFDDPNLIILPLAFGKRQGREFIWNDLLSLETGSLKLANGRVIEKTLYNRRTRQDEPALFVALTFERREVLDSSNIKPMNLIGVDRGENIPAVIALTDPEGCPLSRFKDSLGNPTHILRIDESYKCKQRTIQAKKCVEQRRAGGYSRKYASKAKNLADDMVRNTARDLLYYAVTQDAMLIFENLSRGFGRQGKRTFMAERQYTRMEDWLTAKLAYEGLPSKTYLSKTLAQYTSKTCSNCGFTITSADYDRVLEKLKKTATGWMTTINGKELKVEGQITYYNRYKRQNVVKDLSVELDRLSEESVNNDISSWTKGRSGEALSLLKKRFSHRPVQEKFVCLNCGFETHADEQAALNIARSWLFLRSQEYKKYQTNKTTGNTDKRAFVETWQSFYRKKLKEVWKPAV

SEQ ID NO: 26642 - protein, 978 aa, synthetic construct
  REGION 1..978: note = engineered CasX variant
QEIKRINKIRRRLVKDSNTKKAGKTGPMKTLLVRVMTPDLRERLENLRKKPENIPQPISNTSRANLNKLLTDYTEMKKAILHVYWEEFQKDPVGLMSRVAQPASKKIDQNKLKPEMDEKGNLTTAGFACSQCGQPLFVYKLEQVSEKGKAYTNYFGRCNVAEHEKLILLAQLKPEKDSDEAVTYSLGKFGQRALDFYSIHVTKESTHPVKPLAQIAGNRYASGPVGKALSDACMGTIASFLSKYQDIIIEHQKVVKGNQKRLESLRELAGKENLEYPSVTLPPQPHTKEGVDAYNEVIARVRMWVNLNLWQKLKLSRDDAKPLLRLKGFPSFPLVERQANEVDWWDMVCNVKKLINEKKEDGKVFWQNLAGYKRQEALRPYLSSEEDRKKGKKFARYQLGDLLLHLEKKHGEDWGKVYDEAWERIDKKVEGLSKHIKLEEERRSEDAQSKAALTDWLRAKASFVIEGLKEADKDEFCRCELKLQKWYGDLRGKPFAIEAENSILDISGFSKQYNCAFIWQKDGVKKLNLYLIINYFKGGKLRFKKIKPEAFEANRFYTVINKKSGEIVPMEVNFNFDDPNLIILPLAFGKRQGREFIWNDLLSLETGSLKLANGRVIEKTLYNRRTRQDEPALFVALTFERREVLDSSNIKPMNLIGVDRGENIPAVIALTDPEGCPLSRFKDSLGNPTHILRIDEPYKEKQRTIQAKKEVEQRRAGGYSRKYASKAKNLADDMVRNTARDLLYYAVTQDAMLIFENLSRGFGRQGKRTFMAERQYTRMEDWLTAKLAYEGLPSKTYLSKTLAQYTSKTCSNCGFTITSADYDRVLEKLKKTATGWMTTINGKELKVEGQITYYNRYKRQNVVKDLSVELDRLSEESVNNDISSWTKGRSGEALSLLKKRFSHRPVQEKFVCLNCGFETHADEQAALNIARSWLFLRSQEYKKYQTNKTTGNTDKRAFVETWQSFYRKKLKEVWKPAV

SEQ ID NO: 26643 - protein, 978 aa, synthetic construct
  REGION 1..978: note = engineered CasX variant
QEIKRINKIRRRLVKDSNTKKAGKTGPMKTLLVRVMTPDLRERLENLRKKPENIPQPISNTSRANLNKLLTDYTEMKKAILHVYWEEFQKDPVGLMSRVAQPASKKIDQNKLKPEMDEKGNLTTAGFACSQCGQPLFVYKLEQVSEKGKAYTNYFGRCNVAEHEKLILLAQLKPEKDSDEAVTYSLGKFGQRALDFYSIHVTKESTHPVKPLAQIAGNRYASGPVGKALSDACMGTIASFLSKYQDIIIEHQKVVKGNQKRLESLRELAGKENLEYPSVTLPPQPHTKEGVDAYNEVIARVRMWVNLNLWQKLKLSRDDAKPLLRLKGFPSFPLVERQANEVDWWDMVCNVKKLINEKKEDGKVFWQNLAGYKRQEALRPYLSSEEDRKKGKKFARYQLGDLLLHLEKKHGEDWGKVYDEAWERIDKKVEGLSKHIKLEEERRSEDAQSKAALTDWLRAKASFVIEGLKEADKDEFCRCELKLQKWYGDLRGKPFAIEAENSILDISGFSKQYNCAFIWQKDGVKKLNLYLIINYFKGGKLRFKKIKPEAFEANRFYTVINKKSGEIVPMEVNFNFDDPNLIILPLAFGKRQGREFIWNDLLSLETGSLKLANGRVIEKTLYNRRTRQDEPALFVALTFERREVLDSSNIKPMNLIGVDRGENIPAVIALTDPEGCPLSRFKDSLGNPTHILRICESYKEKQRTIQAKKEVKQRRAGGYSRKYASKAKNLADDMVRNTARDLLYYAVTQDAMLIFENLSRGFGRQGKRTFMAERQYTRMEDWLTAKLAYEGLPSKTYLSKTLAQYTSKTCSNCGFTITSADYDRVLEKLKKTATGWMTTINGKELKVEGQITYYNRYKRQNVVKDLSVELDRLSEESVNNDISSWTKGRSGEALSLLKKRFSHRPVQEKFVCLNCGFETHADEQAALNIARSWLFLRSQEYKKYQTNKTTGNTDKRAFVETWQSFYRKKLKEVWKPAV

SEQ ID NO: 26644 - protein, 978 aa, synthetic construct
  REGION 1..978: note = engineered CasX variant
QEIKRINKIRRRLVKDSNTKKAGKTGPMKTLLVRVMTPDLRERLENLRKKPENIPQPISNTSRANLNKLLTDYTEMKKAILHVYWEEFQKDPVGLMSRVAQPASKKIDQNKLKPEMDEKGNLTTAGFACSQCGQPLFVYKLEQVSEKGKAYTNYFGRCNVAEHEKLILLAQLKPEKDSDEAVTYSLGKFGQRALDFYSIHVTKESTHPVKPLAQIAGNRYASGPVGKALSDACMGTIASFLSKYQDIIIEHQKVVKGNQKRLESLRELAGKENLEYPSVTLPPQPHTKEGVDAYNEVIARVRMWVNLNLWQKLKLSRDDAKPLLRLKGFPSFPLVERQANEVDWWDMVCNVKKLINEKKEDGKVFWQNLAGYKRQEALRPYLSSEEDRKKGKKFARYQLGDLLLHLEKKHGEDWGKVYDEAWERIDKKVEGLSKHIKLEEERRSEDAQSKAALTDWLRAKASFVIEGLKEADKDEFCRCELKLQKWYGDLRGKPFAIEAENSILDISGFSKQYNCAFIWQKDGVKKLNLYLIINYFKGGKLRFKKIKPEAFEANRFYTVINKKSGEIVPMEVNFNFDDPNLIILPLAFGKRQGREFIWNDLLSLETGSLKLANGRVIEKTLYNRRTRQDEPALFVALTFERREVLDSSNIKPMNLIGVDRGENIPAVIALTDPEGCPLSRFKDSLGNPTHILRICESYKEKQRTIQAKKEVEQRRAGGYSRKYASKAKNLADDMVRNTARDLLYYAVTQDAMLIFENLSRGFGRQGKRTFMAERQYTRMEDWLTAKLAYEGLPSKTYLSKTLAQYTSKTCSNCGFTITSADYDRVLEKLKKTATGWMTTINGKELKVEGQITYYNRYKRQNVVKDLSVELDRLSEESVNNDISSWTKGRSGEALSLLKKRFSHRPVQEKFVCLNCGFETHADEQAALNIARSWLFLRSQEYKKYQTNKTTGNTDKRAFVETWQSFYRKKLKEVWKPAV

SEQ ID NO: 26645 - protein, 978 aa, synthetic construct
  REGION 1..978: note = engineered CasX variant
QEIKRINKIRRRLVKDSNTKKAGKTGPMKTLLVRVMTPDLRERLENLRKKPENIPQPISNTSRANLNKLLTDYTEMKKAILHVYWEEFQKDPVGLMSRVAQPASKKIDQNKLKPEMDEKGNLTTAGFACSQCGQPLFVYKLEQVSEKGKAYTNYFGRCNVAEHEKLILLAQLKPEKDSDEAVTYSLGKFGQRALDFYSIHVTKESTHPVKPLAQIAGNRYASGPVGKALSDACMGTIASFLSKYQDIIIEHQKVVKGNQKRLESLRELAGKENLEYPSVTLPPQPHTKEGVDAYNEVIARVRMWVNLNLWQKLKLSRDDAKPLLRLKGFPSFPLVERQANEVDWWDMVCNVKKLINEKKEDGKVFWQNLAGYKRQEALRPYLSSEEDRKKGKKFARYQLGDLLLHLEKKHGEDWGKVYDEAWERIDKKVEGLSKHIKLEEERRSEDAQSKAALTDWLRAKASFVIEGLKEADKDEFCRCELKLQKWYGDLRGKPFAIEAENSILDISGFSKQYNCAFIWQKDGVKKLNLYLIINYFKGGKLRFKKIKPEAFEANRFYTVINKKSGEIVPMEVNFNFDDPNLIILPLAFGKRQGREFIWNDLLSLETGSLKLANGRVIEKTLYNRRTRQDEPALFVALTFERREVLDSSNIKPMNLIGVDRGENIPAVIALTDPEGCPLSRFKDSLGNPTHILRIAESYKEKQRTIQAKKEVEQRRDGGYSRKYASKAKNLADDMVRNTARDLLYYAVTQDAMLIFENLSRGFGRQGKRTFMAERQYTRMEDWLTAKLAYEGLPSKTYLSKTLAQYTSKTCSNCGFTITSADYDRVLEKLKKTATGWMTTINGKELKVEGQITYYNRYKRQNVVKDLSVELDRLSEESVNNDISSWTKGRSGEALSLLKKRFSHRPVQEKFVCLNCGFETHADEQAALNIARSWLFLRSQEYKKYQTNKTTGNTDKRAFVETWQSFYRKKLKEVWKPAV

SEQ ID NO: 26646 - protein, 978 aa, synthetic construct
  REGION 1..978: note = engineered CasX variant
QEIKRINKIRRRLVKDSNTKKAGKTGPMKTLLVRVMTPDLRERLENLRKKPENIPQPISNTSRANLNKLLTDYTEMKKAILHVYWEEFQKDPVGLMSRVAQPASKKIDQNKLKPEMDEKGNLTTAGFACSQCGQPLFVYKLEQVSEKGKAYTNYFGRCNVAEHEKLILLAQLKPEKDSDEAVTYSLGKFGQRALDFYSIHVTKESTHPVKPLAQIAGNRYASGPVGKALSDACMGTIASFLSKYQDIIIEHQKVVKGNQKRLESLRELAGKENLEYPSVTLPPQPHTKEGVDAYNEVIARVRMWVNLNLWQKLKLSRDDAKPLLRLKGFPSFPLVERQANEVDWWDMVCNVKKLINEKKEDGKVFWQNLAGYKRQEALRPYLSSEEDRKKGKKFARYQLGDLLLHLEKKHGEDWGKVYDEAWERIDKKVEGLSKHIKLEEERRSEDAQSKAALTDWLRAKASFVIEGLKEADKDEFCRCELKLQKWYGDLRGKPFAIEAENSILDISGFSKQYNCAFIWQKDGVKKLNLYLIINYFKGGKLRFKKIKPEAFEANRFYTVINKKSGEIVPMEVNFNFDDPNLIILPLAFGKRQGREFIWNDLLSLETGSLKLANGRVIEKTLYNRRTRQDEPALFVALTFERREVLDSSNIKPMNLIGVDRGENIPAVIALTDPEGCPLSRFKDSLGNPTHILRIAESYKEKQRTIQAKKEVEQRRAGGYSRKYASKAKNLADDMVRNTARDLLYYAVTQDAMLIFENLSRGFGRQGKRTFMAERQYTRMEDWLTAKLAYEGLPSKTYLSKTLAQYTSKTCSNCGFTITSADYDRVLEKLKKTATGWMTTINGKELKVEGQITYYNRYKRQNVVKDLSVELDRLSEESVNNDISSWTKGRSGEALSLLKKRFSHRPVQEKFVCLNCGFETHADEQAALNIARSWLFLRSQEYKKYQTNKTTGNTDKRAFVETWQSFYRKKLKEVWKPAV

SEQ ID NO: 26647 - protein, 978 aa, synthetic construct
  REGION 1..978: note = engineered CasX variant
QEIKRINKIRRRLVKDSNTKKAGKTGPMKTLLVRVMTPDLRERLENLRKKPENIPQPISNTSRANLNKLLTDYTEMKKAILHVYWEEFQKDPVGLMSRVAQPASKKIDQNKLKPEMDEKGNLTTAGFACSQCGQPLFVYKLEQVSEKGKAYTNYFGRCNVAEHEKLILLAQLKPEKDSDEAVTYSLGKFGQRALDFYSIHVTKESTHPVKPLAQIAGNRYASGPVGKALSDACMGTIASFLSKYQDIIIEHQKVVKGNQKRLESLRELAGKENLEYPSVTLPPQPHTKEGVDAYNEVIARVRMWVNLNLWQKLKLSRDDAKPLLRLKGFPSFPLVERQANEVDWWDMVCNVKKLINEKKEDGKVFWQNLAGYKRQEALRPYLSSEEDRKKGKKFARYQLGDLLLHLEKKHGEDWGKVYDEAWERIDKKVEGLSKHIKLEEERRSEDAQSKAALTDWLRAKASFVIEGLKEADKDEFCRCELKLQKWYGDLRGKPFAIEAENSILDISGFSKQYNCAFIWQKDGVKKLNLYLIINYFKGGKLRFKKIKPEAFEANRFYTVINKKSGEIVPMEVNFNFDDPNLIILPLAFGKRQGREFIWNDLLSLETGSLKLANGRVIEKTLYNRRTRQDEPALFVALTFERREVLDSSNIKPMNLIGVDRGENIPAVIALTDPEGCPLSRFKDSLGNPTHILRIAESYKEKNRTIQAKKEVEQRRDGGYSRKYASKAKNLADDMVRNTARDLLYYAVTQDAMLIFENLSRGFGRQGKRTFMAERQYTRMEDWLTAKLAYEGLPSKTYLSKTLAQYTSKTCSNCGFTITSADYDRVLEKLKKTATGWMTTINGKELKVEGQITYYNRYKRQNVVKDLSVELDRLSEESVNNDISSWTKGRSGEALSLLKKRFSHRPVQEKFVCLNCGFETHADEQAALNIARSWLFLRSQEYKKYQTNKTTGNTDKRAFVETWQSFYRKKLKEVWKPAV

SEQ ID NO: 26648 - protein, 978 aa, synthetic construct
  REGION 1..978: note = engineered CasX variant
QEIKRINKIRRRLVKDSNTKKAGKTGPMKTLLVRVMTPDLRERLENLRKKPENIPQPISNTSRANLNKLLTDYTEMKKAILHVYWEEFQKDPVGLMSRVAQPASKKIDQNKLKPEMDEKGNLTTAGFACSQCGQPLFVYKLEQVSEKGKAYTNYFGRCNVAEHEKLILLAQLKPEKDSDEAVTYSLGKFGQRALDFYSIHVTKESTHPVKPLAQIAGNRYASGPVGKALSDACMGTIASFLSKYQDIIIEHQKVVKGNQKRLESLRELAGKENLEYPSVTLPPQPHTKEGVDAYNEVIARVRMWVNLNLWQKLKLSRDDAKPLLRLKGFPSFPLVERQANEVDWWDMVCNVKKLINEKKEDGKVFWQNLAGYKRQEALRPYLSSEEDRKKGKKFARYQLGDLLLHLEKKHGEDWGKVYDEAWERIDKKVEGLSKHIKLEEERRSEDAQSKAALTDWLRAKASFVIEGLKEADKDEFCRCELKLQKWYGDLRGKPFAIEAENSILDISGFSKQYNCAFIWQKDGVKKLNLYLIINYFKGGKLRFKKIKPEAFEANRFYTVINKKSGEIVPMEVNFNFDDPNLIILPLAFGKRQGREFIWNDLLSLETGSLKLANGRVIEKTLYNRRTRQDEPALFVALTFERREVLDSSNIKPMNLIGVDRGENIPAVIALTDPEGCPLSRFKDSLGNPTHILRIAESYKEKNRTIQAKKEVEQRRAGGYSRKYASKAKNLADDMVRNTARDLLYYAVTQDAMLIFENLSRGFGRQGKRTFMAERQYTRMEDWLTAKLAYEGLPSKTYLSKTLAQYTSKTCSNCGFTITSADYDRVLEKLKKTATGWMTTINGKELKVEGQITYYNRYKRQNVVKDLSVELDRLSEESVNNDISSWTKGRSGEALSLLKKRFSHRPVQEKFVCLNCGFETHADEQAALNIARSWLFLRSQEYKKYQTNKTTGNTDKRAFVETWQSFYRKKLKEVWKPAV

SEQ ID NO: 26649 - protein, 978 aa, synthetic construct
  REGION 1..978: note = engineered CasX variant
QEIKRINKIRRRLVKDSNTKKAGKTGPMKTLLVRVMTPDLRERLENLRKKPENIPQPISNTSRANLNKLLTDYTEMKKAILHVYWEEFQKDPVGLMSRVAQPASKKIDQNKLKPEMDEKGNLTTAGFACSQCGQPLFVYKLEQVSEKGKAYTNYFGRCNVAEHEKLILLAQLKPEKDSDEAVTYSLGKFGQRALDFYSIHVTKESTHPVKPLAQIAGNRYASGPVGKALSDACMGTIASFLSKYQDIIIEHQKVVKGNQKRLESLRELAGKENLEYPSVTLPPQPHTKEGVDAYNEVIARVRMWVNLNLWQKLKLSRDDAKPLLRLKGFPSFPLVERQANEVDWWDMVCNVKKLINEKKEDGKVFWQNLAGYKRQEALRPYLSSEEDRKKGKKFARYQLGDLLLHLEKKHGEDWGKVYDEAWERIDKKVEGLSKHIKLEEERRSEDAQSKAALTDWLRAKASFVIEGLKEADKDEFCRCELKLQKWYGDLRGKPFAIEAENSILDISGFSKQYNCAFIWQKDGVKKLNLYLIINYFKGGKLRFKKIKPEAFEANRFYTVINKKSGEIVPMEVNFNFDDPNLIILPLAFGKRQGREFIWNDLLSLETGSLKLANGRVIEKTLYNRRTRQDEPALFVALTFERREVLDSSNIKPMNLIGVDRGENIPAVIALTDPEGCPLSRFKDSLGNPTHILRFGESYKEKQRTIQAKKEVEQRRLGGYSRKYASKAKNLADDMVRNTARDLLYYAVTQDAMLIFENLSRGFGRQGKRTFMAERQYTRMEDWLTAKLAYEGLPSKTYLSKTLAQYTSKTCSNCGFTITSADYDRVLEKLKKTATGWMTTINGKELKVEGQITYYNRYKRQNVVKDLSVELDRLSEESVNNDISSWTKGRSGEALSLLKKRFSHRPVQEKFVCLNCGFETHADEQAALNIARSWLFLRSQEYKKYQTNKTTGNTDKRAFVETWQSFYRKKLKEVWKPAV

SEQ ID NO: 26650 - protein, 978 aa, synthetic construct
  REGION 1..978: note = engineered CasX variant
QEIKRINKIRRRLVKDSNTKKAGKTGPMKTLLVRVMTPDLRERLENLRKKPENIPQPISNTSRANLNKLLTDYTEMKKAILHVYWEEFQKDPVGLMSRVAQPASKKIDQNKLKPEMDEKGNLTTAGFACSQCGQPLFVYKLEQVSEKGKAYTNYFGRCNVAEHEKLILLAQLKPEKDSDEAVTYSLGKFGQRALDFYSIHVTKESTHPVKPLAQIAGNRYASGPVGKALSDACMGTIASFLSKYQDIIIEHQKVVKGNQKRLESLRELAGKENLEYPSVTLPPQPHTKEGVDAYNEVIARVRMWVNLNLWQKLKLSRDDAKPLLRLKGFPSFPLVERQANEVDWWDMVCNVKKLINEKKEDGKVFWQNLAGYKRQEALRPYLSSEEDRKKGKKFARYQLGDLLLHLEKKHGEDWGKVYDEAWERIDKKVEGLSKHIKLEEERRSEDAQSKAALTDWLRAKASFVIEGLKEADKDEFCRCELKLQKWYGDLRGKPFAIEAENSILDISGFSKQYNCAFIWQKDGVKKLNLYLIINYFKGGKLRFKKIKPEAFEANRFYTVINKKSGEIVPMEVNFNFDDPNLIILPLAFGKRQGREFIWNDLLSLETGSLKLANGRVIEKTLYNRRTRQDEPALFVALTFERREVLDSSNIKPMNLIGVDRGENIPAVIALTDPEGCPLSRFKDSLGNPTHILRFGESYKEKQRTIQAKKEVEQRRLFGYSRKYASKAKNLADDMVRNTARDLLYYAVTQDAMLIFENLSRGFGRQGKRTFMAERQYTRMEDWLTAKLAYEGLPSKTYLSKTLAQYTSKTCSNCGFTITSADYDRVLEKLKKTATGWMTTINGKELKVEGQITYYNRYKRQNVVKDLSVELDRLSEESVNNDISSWTKGRSGEALSLLKKRFSHRPVQEKFVCLNCGFETHADEQAALNIARSWLFLRSQEYKKYQTNKTTGNTDKRAFVETWQSFYRKKLKEVWKPAV

SEQ ID NO: 26651 - protein, 978 aa, synthetic construct
  REGION 1..978: note = engineered CasX variant
QEIKRINKIRRRLVKDSNTKKAGKTGPMKTLLVRVMTPDLRERLENLRKKPENIPQPISNTSRANLNKLLTDYTEMKKAILHVYWEEFQKDPVGLMSRVAQPASKKIDQNKLKPEMDEKGNLTTAGFACSQCGQPLFVYKLEQVSEKGKAYTNYFGRCNVAEHEKLILLAQLKPEKDSDEAVTYSLGKFGQRALDFYSIHVTKESTHPVKPLAQIAGNRYASGPVGKALSDACMGTIASFLSKYQDIIIEHQKVVKGNQKRLESLRELAGKENLEYPSVTLPPQPHTKEGVDAYNEVIARVRMWVNLNLWQKLKLSRDDAKPLLRLKGFPSFPLVERQANEVDWWDMVCNVKKLINEKKEDGKVFWQNLAGYKRQEALRPYLSSEEDRKKGKKFARYQLGDLLLHLEKKHGEDWGKVYDEAWERIDKKVEGLSKHIKLEEERRSEDAQSKAALTDWLRAKASFVIEGLKEADKDEFCRCELKLQKWYGDLRGKPFAIEAENSILDISGFSKQYNCAFIWQKDGVKKLNLYLIINYFKGGKLRFKKIKPEAFEANRFYTVINKKSGEIVPMEVNFNFDDPNLIILPLAFGKRQGREFIWNDLLSLETGSLKLANGRVIEKTLYNRRTRQDEPALFVALTFERREVLDSSNIKPMNLIGVDRGENIPAVIALTDPEGCPLSRFKDSLGNPTHILRFGESYKEKQRTIQAKKEVEQRRAGGYSRKYASKAKNLADDMVRNTARDLLYYAVTQDAMLIFENLSRGFGRQGKRTFMAERQYTRMEDWLTAKLAYEGLPSKTYLSKTLAQYTSKTCSNCGFTITSADYDRVLEKLKKTATGWMTTINGKELKVEGQITYYNRYKRQNVVKDLSVELDRLSEESVNNDISSWTKGRSGEALSLLKKRFSHRPVQEKFVCLNCGFETHADEQAALNIARSWLFLRSQEYKKYQTNKTTGNTDKRAFVETWQSFYRKKLKEVWKPAV

SEQ ID NO: 26652 - protein, 978 aa, synthetic construct
  REGION 1..978: note = engineered CasX variant
QEIKRINKIRRRLVKDSNTKKAGKTGPMKTLLVRVMTPDLRERLENLRKKPENIPQPISNTSRANLNKLLTDYTEMKKAILHVYWEEFQKDPVGLMSRVAQPASKKIDQNKLKPEMDEKGNLTTAGFACSQCGQPLFVYKLEQVSEKGKAYTNYFGRCNVAEHEKLILLAQLKPEKDSDEAVTYSLGKFGQRALDFYSIHVTKESTHPVKPLAQIAGNRYASGPVGKALSDACMGTIASFLSKYQDIIIEHQKVVKGNQKRLESLRELAGKENLEYPSVTLPPQPHTKEGVDAYNEVIARVRMWVNLNLWQKLKLSRDDAKPLLRLKGFPSFPLVERQANEVDWWDMVCNVKKLINEKKEDGKVFWQNLAGYKRQEALRPYLSSEEDRKKGKKFARYQLGDLLLHLEKKHGEDWGKVYDEAWERIDKKVEGLSKHIKLEEERRSEDAQSKAALTDWLRAKASFVIEGLKEADKDEFCRCELKLQKWYGDLRGKPFAIEAENSILDISGFSKQYNCAFIWQKDGVKKLNLYLIINYFKGGKLRFKKIKPEAFEANRFYTVINKKSGEIVPMEVNFNFDDPNLIILPLAFGKRQGREFIWNDLLSLETGSLKLANGRVIEKTLYNRRTRQDEPALFVALTFERREVLDSSNIKPMNLIGVDRGENIPAVIALTDPEGCPLSRFKDSLGNPTHILRFGESYKEKQRTIQAKKEVEQRRAFGYSRKYASKAKNLADDMVRNTARDLLYYAVTQDAMLIFENLSRGFGRQGKRTFMAERQYTRMEDWLTAKLAYEGLPSKTYLSKTLAQYTSKTCSNCGFTITSADYDRVLEKLKKTATGWMTTINGKELKVEGQITYYNRYKRQNVVKDLSVELDRLSEESVNNDISSWTKGRSGEALSLLKKRFSHRPVQEKFVCLNCGFETHADEQAALNIARSWLFLRSQEYKKYQTNKTTGNTDKRAFVETWQSFYRKKLKEVWKPAV

SEQ ID NO: 26653 - protein, 978 aa, synthetic construct
  REGION 1..978: note = engineered CasX variant
QEIKRINKIRRRLVKDSNTKKAGKTGPMKTLLVRVMTPDLRERLENLRKKPENIPQPISNTSRANLNKLLTDYTEMKKAILHVYWEEFQKDPVGLMSRVAQPASKKIDQNKLKPEMDEKGNLTTAGFACSQCGQPLFVYKLEQVSEKGKAYTNYFGRCNVAEHEKLILLAQLKPEKDSDEAVTYSLGKFGQRALDFYSIHVTKESTHPVKPLAQIAGNRYASGPVGKALSDACMGTIASFLSKYQDIIIEHQKVVKGNQKRLESLRELAGKENLEYPSVTLPPQPHTKEGVDAYNEVIARVRMWVNLNLWQKLKLSRDDAKPLLRLKGFPSFPLVERQANEVDWWDMVCNVKKLINEKKEDGKVFWQNLAGYKRQEALRPYLSSEEDRKKGKKFARYQLGDLLLHLEKKHGEDWGKVYDEAWERIDKKVEGLSKHIKLEEERRSEDAQSKAALTDWLRAKASFVIEGLKEADKDEFCRCELKLQKWYGDLRGKPFAIEAENSILDISGFSKQYNCAFIWQKDGVKKLNLYLIINYFKGGKLRFKKIKPEAFEANRFYTVINKKSGEIVPMEVNFNFDDPNLIILPLAFGKRQGREFIWNDLLSLETGSLKLANGRVIEKTLYNRRTRQDEPALFVALTFERREVLDSSNIKPMNLIGVDRGENIPAVIALTDPEGCPLSRFKDSLGNPTHILRFGESYKEKQREIQAKKEVEQRRAGGYSRKYASKAKNLADDMVRNTARDLLYYAVTQDAMLIFENLSRGFGRQGKRTFMAERQYTRMEDWLTAKLAYEGLPSKTYLSKTLAQYTSKTCSNCGFTITSADYDRVLEKLKKTATGWMTTINGKELKVEGQITYYNRYKRQNVVKDLSVELDRLSEESVNNDISSWTKGRSGEALSLLKKRFSHRPVQEKFVCLNCGFETHADEQAALNIARSWLFLRSQEYKKYQTNKTTGNTDKRAFVETWQSFYRKKLKEVWKPAV

SEQ ID NO: 26654 - protein, 978 aa, synthetic construct
  REGION 1..978: note = engineered CasX variant
QEIKRINKIRRRLVKDSNTKKAGKTGPMKTLLVRVMTPDLRERLENLRKKPENIPQPISNTSRANLNKLLTDYTEMKKAILHVYWEEFQKDPVGLMSRVAQPASKKIDQNKLKPEMDEKGNLTTAGFACSQCGQPLFVYKLEQVSEKGKAYTNYFGRCNVAEHEKLILLAQLKPEKDSDEAVTYSLGKFGQRALDFYSIHVTKESTHPVKPLAQIAGNRYASGPVGKALSDACMGTIASFLSKYQDIIIEHQKVVKGNQKRLESLRELAGKENLEYPSVTLPPQPHTKEGVDAYNEVIARVRMWVNLNLWQKLKLSRDDAKPLLRLKGFPSFPLVERQANEVDWWDMVCNVKKLINEKKEDGKVFWQNLAGYKRQEALRPYLSSEEDRKKGKKFARYQLGDLLLHLEKKHGEDWGKVYDEAWERIDKKVEGLSKHIKLEEERRSEDAQSKAALTDWLRAKASFVIEGLKEADKDEFCRCELKLQKWYGDLRGKPFAIEAENSILDISGFSKQYNCAFIWQKDGVKKLNLYLIINYFKGGKLRFKKIKPEAFEANRFYTVINKKSGEIVPMEVNFNFDDPNLIILPLAFGKRQGREFIWNDLLSLETGSLKLANGRVIEKTLYNRRTRQDEPALFVALTFERREVLDSSNIKPMNLIGVDRGENIPAVIALTDPEGCPLSRFKDSLGNPTHILRFGECYKEKQRTIQAKKEVEQRRAGGYSRKYASKAKNLADDMVRNTARDLLYYAVTQDAMLIFENLSRGFGRQGKRTFMAERQYTRMEDWLTAKLAYEGLPSKTYLSKTLAQYTSKTCSNCGFTITSADYDRVLEKLKKTATGWMTTINGKELKVEGQITYYNRYKRQNVVKDLSVELDRLSEESVNNDISSWTKGRSGEALSLLKKRFSHRPVQEKFVCLNCGFETHADEQAALNIARSWLFLRSQEYKKYQTNKTTGNTDKRAFVETWQSFYRKKLKEVWKPAV

SEQ ID NO: 26655 - protein, 978 aa, synthetic construct
  REGION 1..978: note = engineered CasX variant
QEIKRINKIRRRLVKDSNTKKAGKTGPMKTLLVRVMTPDLRERLENLRKKPENIPQPISNTSRANLNKLLTDYTEMKKAILHVYWEEFQKDPVGLMSRVAQPASKKIDQNKLKPEMDEKGNLTTAGFACSQCGQPLFVYKLEQVSEKGKAYTNYFGRCNVAEHEKLILLAQLKPEKDSDEAVTYSLGKFGQRALDFYSIHVTKESTHPVKPLAQIAGNRYASGPVGKALSDACMGTIASFLSKYQDIIIEHQKVVKGNQKRLESLRELAGKENLEYPSVTLPPQPHTKEGVDAYNEVIARVRMWVNLNLWQKLKLSRDDAKPLLRLKGFPSFPLVERQANEVDWWDMVCNVKKLINEKKEDGKVFWQNLAGYKRQEALRPYLSSEEDRKKGKKFARYQLGDLLLHLEKKHGEDWGKVYDEAWERIDKKVEGLSKHIKLEEERRSEDAQSKAALTDWLRAKASFVIEGLKEADKDEFCRCELKLQKWYGDLRGKPFAIEAENSILDISGFSKQYNCAFIWQKDGVKKLNLYLIINYFKGGKLRFKKIKPEAFEANRFYTVINKKSGEIVPMEVNFNFDDPNLIILPLAFGKRQGREFIWNDLLSLETGSLKLANGRVIEKTLYNRRTRQDEPALFVALTFERREVLDSSNIKPMNLIGVDRGENIPAVIALTDPEGCPLSRFKDSLGNPTHILRFGECYKEKQRTIQAKKEVEQRRAFGYSRKYASKAKNLADDMVRNTARDLLYYAVTQDAMLIFENLSRGFGRQGKRTFMAERQYTRMEDWLTAKLAYEGLPSKTYLSKTLAQYTSKTCSNCGFTITSADYDRVLEKLKKTATGWMTTINGKELKVEGQITYYNRYKRQNVVKDLSVELDRLSEESVNNDISSWTKGRSGEALSLLKKRFSHRPVQEKFVCLNCGFETHADEQAALNIARSWLFLRSQEYKKYQTNKTTGNTDKRAFVETWQSFYRKKLKEVWKPAV

SEQ ID NO: 26656 - protein, 978 aa, synthetic construct
  REGION 1..978: note = engineered CasX variant
QEIKRINKIRRRLVKDSNTKKAGKTGPMKTLLVRVMTPDLRERLENLRKKPENIPQPISNTSRANLNKLLTDYTEMKKAILHVYWEEFQKDPVGLMSRVAQPASKKIDQNKLKPEMDEKGNLTTAGFACSQCGQPLFVYKLEQVSEKGKAYTNYFGRCNVAEHEKLILLAQLKPEKDSDEAVTYSLGKFGQRALDFYSIHVTKESTHPVKPLAQIAGNRYASGPVGKALSDACMGTIASFLSKYQDIIIEHQKVVKGNQKRLESLRELAGKENLEYPSVTLPPQPHTKEGVDAYNEVIARVRMWVNLNLWQKLKLSRDDAKPLLRLKGFPSFPLVERQANEVDWWDMVCNVKKLINEKKEDGKVFWQNLAGYKRQEALRPYLSSEEDRKKGKKFARYQLGDLLLHLEKKHGEDWGKVYDEAWERIDKKVEGLSKHIKLEEERRSEDAQSKAALTDWLRAKASFVIEGLKEADKDEFCRCELKLQKWYGDLRGKPFAIEAENSILDISGFSKQYNCAFIWQKDGVKKLNLYLIINYFKGGKLRFKKIKPEAFEANRFYTVINKKSGEIVPMEVNFNFDDPNLIILPLAFGKRQGREFIWNDLLSLETGSLKLANGRVIEKTLYNRRTRQDEPALFVALTFERREVLDSSNIKPMNLIGVDRGENIPAVIALTDPEGCPLSRFKDSLGNPTHILRCGESYKEKQRTIQAKKEVEQRRAGGYSRKYASKAKNLADDMVRNTARDLLYYAVTQDAMLIFENLSRGFGRQGKRTFMAERQYTRMEDWLTAKLAYEGLPSKTYLSKTLAQYTSKTCSNCGFTITSADYDRVLEKLKKTATGWMTTINGKELKVEGQITYYNRYKRQNVVKDLSVELDRLSEESVNNDISSWTKGRSGEALSLLKKRFSHRPVQEKFVCLNCGFETHADEQAALNIARSWLFLRSQEYKKYQTNKTTGNTDKRAFVETWQSFYRKKLKEVWKPAV

SEQ ID NO: 26657 - protein, 978 aa, synthetic construct
  REGION 1..978: note = engineered CasX variant
QEIKRINKIRRRLVKDSNTKKAGKTGPMKTLLVRVMTPDLRERLENLRKKPENIPQPISNTSRANLNKLLTDYTEMKKAILHVYWEEFQKDPVGLMSRVAQPASKKIDQNKLKPEMDEKGNLTTAGFACSQCGQPLFVYKLEQVSEKGKAYTNYFGRCNVAEHEKLILLAQLKPEKDSDEAVTYSLGKFGQRALDFYSIHVTKESTHPVKPLAQIAGNRYASGPVGKALSDACMGTIASFLSKYQDIIIEHQKVVKGNQKRLESLRELAGKENLEYPSVTLPPQPHTKEGVDAYNEVIARVRMWVNLNLWQKLKLSRDDAKPLLRLKGFPSFPLVERQANEVDWWDMVCNVKKLINEKKEDGKVFWQNLAGYKRQEALRPYLSSEEDRKKGKKFARYQLGDLLLHLEKKHGEDWGKVYDEAWERIDKKVEGLSKHIKLEEERRSEDAQSKAALTDWLRAKASFVIEGLKEADKDEFCRCELKLQKWYGDLRGKPFAIEAENSILDISGFSKQYNCAFIWQKDGVKKLNLYLIINYFKGGKLRFKKIKPEAFEANRFYTVINKKSGEIVPMEVNFNFDDPNLIILPLAFGKRQGREFIWNDLLSLETGSLKLANGRVIEKTLYNRRTRQDEPALFVALTFERREVLDSSNIKPMNLIGVDRGENIPAVIALTDPEGCPLSRFKDSLGNPTHILRCGESYKEKQRTIQAKKEIEQRRAGGYSRKYASKAKNLADDMVRNTARDLLYYAVTQDAMLIFENLSRGFGRQGKRTFMAERQYTRMEDWLTAKLAYEGLPSKTYLSKTLAQYTSKTCSNCGFTITSADYDRVLEKLKKTATGWMTTINGKELKVEGQITYYNRYKRQNVVKDLSVELDRLSEESVNNDISSWTKGRSGEALSLLKKRFSHRPVQEKFVCLNCGFETHADEQAALNIARSWLFLRSQEYKKYQTNKTTGNTDKRAFVETWQSFYRKKLKEVWKPAV

SEQ ID NO: 26658 - protein, 978 aa, synthetic construct
  REGION 1..978: note = engineered CasX variant
QEIKRINKIRRRLVKDSNTKKAGKTGPMKTLLVRVMTPDLRERLENLRKKPENIPQPISNTSRANLNKLLTDYTEMKKAILHVYWEEFQKDPVGLMSRVAQPASKKIDQNKLKPEMDEKGNLTTAGFACSQCGQPLFVYKLEQVSEKGKAYTNYFGRCNVAEHEKLILLAQLKPEKDSDEAVTYSLGKFGQRALDFYSIHVTKESTHPVKPLAQIAGNRYASGPVGKALSDACMGTIASFLSKYQDIIIEHQKVVKGNQKRLESLRELAGKENLEYPSVTLPPQPHTKEGVDAYNEVIARVRMWVNLNLWQKLKLSRDDAKPLLRLKGFPSFPLVERQANEVDWWDMVCNVKKLINEKKEDGKVFWQNLAGYKRQEALRPYLSSEEDRKKGKKFARYQLGDLLLHLEKKHGEDWGKVYDEAWERIDKKVEGLSKHIKLEEERRSEDAQSKAALTDWLRAKASFVIEGLKEADKDEFCRCELKLQKWYGDLRGKPFAIEAENSILDISGFSKQYNCAFIWQKDGVKKLNLYLIINYFKGGKLRFKKIKPEAFEANRFYTVINKKSGEIVPMEVNFNFDDPNLIILPLAFGKRQGREFIWNDLLSLETGSLKLANGRVIEKTLYNRRTRQDEPALFVALTFERREVLDSSNIKPMNLIGVDRGENIPAVIALTDPEGCPLSRFKDSLGNPTHILRCGESYKEKQRTIQAKKEAEQRRAGGYSRKYASKAKNLADDMVRNTARDLLYYAVTQDAMLIFENLSRGFGRQGKRTFMAERQYTRMEDWLTAKLAYEGLPSKTYLSKTLAQYTSKTCSNCGFTITSADYDRVLEKLKKTATGWMTTINGKELKVEGQITYYNRYKRQNVVKDLSVELDRLSEESVNNDISSWTKGRSGEALSLLKKRFSHRPVQEKFVCLNCGFETHADEQAALNIARSWLFLRSQEYKKYQTNKTTGNTDKRAFVETWQSFYRKKLKEVWKPAV

SEQ ID NO: 26659 - protein, 978 aa, synthetic construct
  REGION 1..978: note = engineered CasX variant
QEIKRINKIRRRLVKDSNTKKAGKTGPMKTLLVRVMTPDLRERLENLRKKPENIPQPISNTSRANLNKLLTDYTEMKKAILHVYWEEFQKDPVGLMSRVAQPASKKIDQNKLKPEMDEKGNLTTAGFACSQCGQPLFVYKLEQVSEKGKAYTNYFGRCNVAEHEKLILLAQLKPEKDSDEAVTYSLGKFGQRALDFYSIHVTKESTHPVKPLAQIAGNRYASGPVGKALSDACMGTIASFLSKYQDIIIEHQKVVKGNQKRLESLRELAGKENLEYPSVTLPPQPHTKEGVDAYNEVIARVRMWVNLNLWQKLKLSRDDAKPLLRLKGFPSFPLVERQANEVDWWDMVCNVKKLINEKKEDGKVFWQNLAGYKRQEALRPYLSSEEDRKKGKKFARYQLGDLLLHLEKKHGEDWGKVYDEAWERIDKKVEGLSKHIKLEEERRSEDAQSKAALTDWLRAKASFVIEGLKEADKDEFCRCELKLQKWYGDLRGKPFAIEAENSILDISGFSKQYNCAFIWQKDGVKKLNLYLIINYFKGGKLRFKKIKPEAFEANRFYTVINKKSGEIVPMEVNFNFDDPNLIILPLAFGKRQGREFIWNDLLSLETGSLKLANGRVIEKTLYNRRTRQDEPALFVALTFERREVLDSSNIKPMNLIGVDRGENIPAVIALTDPEGCPLSRFKDSLGNPTHILRCGESYKEKQRTIFAKKEVEQRRAGGYSRKYASKAKNLADDMVRNTARDLLYYAVTQDAMLIFENLSRGFGRQGKRTFMAERQYTRMEDWLTAKLAYEGLPSKTYLSKTLAQYTSKTCSNCGFTITSADYDRVLEKLKKTATGWMTTINGKELKVEGQITYYNRYKRQNVVKDLSVELDRLSEESVNNDISSWTKGRSGEALSLLKKRFSHRPVQEKFVCLNCGFETHADEQAALNIARSWLFLRSQEYKKYQTNKTTGNTDKRAFVETWQSFYRKKLKEVWKPAV

SEQ ID NO: 26660 - protein, 978 aa, synthetic construct
  REGION 1..978: note = engineered CasX variant
QEIKRINKIRRRLVKDSNTKKAGKTGPMKTLLVRVMTPDLRERLENLRKKPENIPQPISNTSRANLNKLLTDYTEMKKAILHVYWEEFQKDPVGLMSRVAQPASKKIDQNKLKPEMDEKGNLTTAGFACSQCGQPLFVYKLEQVSEKGKAYTNYFGRCNVAEHEKLILLAQLKPEKDSDEAVTYSLGKFGQRALDFYSIHVTKESTHPVKPLAQIAGNRYASGPVGKALSDACMGTIASFLSKYQDIIIEHQKVVKGNQKRLESLRELAGKENLEYPSVTLPPQPHTKEGVDAYNEVIARVRMWVNLNLWQKLKLSRDDAKPLLRLKGFPSFPLVERQANEVDWWDMVCNVKKLINEKKEDGKVFWQNLAGYKRQEALRPYLSSEEDRKKGKKFARYQLGDLLLHLEKKHGEDWGKVYDEAWERIDKKVEGLSKHIKLEEERRSEDAQSKAALTDWLRAKASFVIEGLKEADKDEFCRCELKLQKWYGDLRGKPFAIEAENSILDISGFSKQYNCAFIWQKDGVKKLNLYLIINYFKGGKLRFKKIKPEAFEANRFYTVINKKSGEIVPMEVNFNFDDPNLIILPLAFGKRQGREFIWNDLLSLETGSLKLANGRVIEKTLYNRRTRQDEPALFVALTFERREVLDSSNIKPMNLIGVDRGENIPAVIALTDPEGCPLSRFKDSLGNPTHILRCGESYKEKQRTIFAKKEAEQRRAGGYSRKYASKAKNLADDMVRNTARDLLYYAVTQDAMLIFENLSRGFGRQGKRTFMAERQYTRMEDWLTAKLAYEGLPSKTYLSKTLAQYTSKTCSNCGFTITSADYDRVLEKLKKTATGWMTTINGKELKVEGQITYYNRYKRQNVVKDLSVELDRLSEESVNNDISSWTKGRSGEALSLLKKRFSHRPVQEKFVCLNCGFETHADEQAALNIARSWLFLRSQEYKKYQTNKTTGNTDKRAFVETWQSFYRKKLKEVWKPAV

SEQ ID NO: 26661 - protein, 978 aa, synthetic construct
  REGION 1..978: note = engineered CasX variant
QEIKRINKIRRRLVKDSNTKKAGKTGPMKTLLVRVMTPDLRERLENLRKKPENIPQPISNTSRANLNKLLTDYTEMKKAILHVYWEEFQKDPVGLMSRVAQPASKKIDQNKLKPEMDEKGNLTTAGFACSQCGQPLFVYKLEQVSEKGKAYTNYFGRCNVAEHEKLILLAQLKPEKDSDEAVTYSLGKFGQRALDFYSIHVTKESTHPVKPLAQIAGNRYASGPVGKALSDACMGTIASFLSKYQDIIIEHQKVVKGNQKRLESLRELAGKENLEYPSVTLPPQPHTKEGVDAYNEVIARVRMWVNLNLWQKLKLSRDDAKPLLRLKGFPSFPLVERQANEVDWWDMVCNVKKLINEKKEDGKVFWQNLAGYKRQEALRPYLSSEEDRKKGKKFARYQLGDLLLHLEKKHGEDWGKVYDEAWERIDKKVEGLSKHIKLEEERRSEDAQSKAALTDWLRAKASFVIEGLKEADKDEFCRCELKLQKWYGDLRGKPFAIEAENSILDISGFSKQYNCAFIWQKDGVKKLNLYLIINYFKGGKLRFKKIKPEAFEANRFYTVINKKSGEIVPMEVNFNFDDPNLIILPLAFGKRQGREFIWNDLLSLETGSLKLANGRVIEKTLYNRRTRQDEPALFVALTFERREVLDSSNIKPMNLIGVDRGENIPAVIALTDPEGCPLSRFKDSLGNPTHILRCGESYKEKQRLIQAKKEVEQRRAGGYSRKYASKAKNLADDMVRNTARDLLYYAVTQDAMLIFENLSRGFGRQGKRTFMAERQYTRMEDWLTAKLAYEGLPSKTYLSKTLAQYTSKTCSNCGFTITSADYDRVLEKLKKTATGWMTTINGKELKVEGQITYYNRYKRQNVVKDLSVELDRLSEESVNNDISSWTKGRSGEALSLLKKRFSHRPVQEKFVCLNCGFETHADEQAALNIARSWLFLRSQEYKKYQTNKTTGNTDKRAFVETWQSFYRKKLKEVWKPAV

SEQ ID NO: 26662 - protein, 978 aa, synthetic construct
  REGION 1..978: note = engineered CasX variant
QEIKRINKIRRRLVKDSNTKKAGKTGPMKTLLVRVMTPDLRERLENLRKKPENIPQPISNTSRANLNKLLTDYTEMKKAILHVYWEEFQKDPVGLMSRVAQPASKKIDQNKLKPEMDEKGNLTTAGFACSQCGQPLFVYKLEQVSEKGKAYTNYFGRCNVAEHEKLILLAQLKPEKDSDEAVTYSLGKFGQRALDFYSIHVTKESTHPVKPLAQIAGNRYASGPVGKALSDACMGTIASFLSKYQDIIIEHQKVVKGNQKRLESLRELAGKENLEYPSVTLPPQPHTKEGVDAYNEVIARVRMWVNLNLWQKLKLSRDDAKPLLRLKGFPSFPLVERQANEVDWWDMVCNVKKLINEKKEDGKVFWQNLAGYKRQEALRPYLSSEEDRKKGKKFARYQLGDLLLHLEKKHGEDWGKVYDEAWERIDKKVEGLSKHIKLEEERRSEDAQSKAALTDWLRAKASFVIEGLKEADKDEFCRCELKLQKWYGDLRGKPFAIEAENSILDISGFSKQYNCAFIWQKDGVKKLNLYLIINYFKGGKLRFKKIKPEAFEANRFYTVINKKSGEIVPMEVNFNFDDPNLIILPLAFGKRQGREFIWNDLLSLETGSLKLANGRVIEKTLYNRRTRQDEPALFVALTFERREVLDSSNIKPMNLIGVDRGENIPAVIALTDPEGCPLSRFKDSLGNPTHILRCGESYKEKQRLIQAKKEIEQRRAGGYSRKYASKAKNLADDMVRNTARDLLYYAVTQDAMLIFENLSRGFGRQGKRTFMAERQYTRMEDWLTAKLAYEGLPSKTYLSKTLAQYTSKTCSNCGFTITSADYDRVLEKLKKTATGWMTTINGKELKVEGQITYYNRYKRQNVVKDLSVELDRLSEESVNNDISSWTKGRSGEALSLLKKRFSHRPVQEKFVCLNCGFETHADEQAALNIARSWLFLRSQEYKKYQTNKTTGNTDKRAFVETWQSFYRKKLKEVWKPAV

SEQ ID NO: 26663 - protein, 978 aa, synthetic construct
  REGION 1..978: note = engineered CasX variant
QEIKRINKIRRRLVKDSNTKKAGKTGPMKTLLVRVMTPDLRERLENLRKKPENIPQPISNTSRANLNKLLTDYTEMKKAILHVYWEEFQKDPVGLMSRVAQPASKKIDQNKLKPEMDEKGNLTTAGFACSQCGQPLFVYKLEQVSEKGKAYTNYFGRCNVAEHEKLILLAQLKPEKDSDEAVTYSLGKFGQRALDFYSIHVTKESTHPVKPLAQIAGNRYASGPVGKALSDACMGTIASFLSKYQDIIIEHQKVVKGNQKRLESLRELAGKENLEYPSVTLPPQPHTKEGVDAYNEVIARVRMWVNLNLWQKLKLSRDDAKPLLRLKGFPSFPLVERQANEVDWWDMVCNVKKLINEKKEDGKVFWQNLAGYKRQEALRPYLSSEEDRKKGKKFARYQLGDLLLHLEKKHGEDWGKVYDEAWERIDKKVEGLSKHIKLEEERRSEDAQSKAALTDWLRAKASFVIEGLKEADKDEFCRCELKLQKWYGDLRGKPFAIEAENSILDISGFSKQYNCAFIWQKDGVKKLNLYLIINYFKGGKLRFKKIKPEAFEANRFYTVINKKSGEIVPMEVNFNFDDPNLIILPLAFGKRQGREFIWNDLLSLETGSLKLANGRVIEKTLYNRRTRQDEPALFVALTFERREVLDSSNIKPMNLIGVDRGENIPAVIALTDPEGCPLSRFKDSLGNPTHILRAGESYKEKQRTIQAKKEVEQRRAGGYSRKYASKAKNLADDMVRNTARDLLYYAVTQDAMLIFENLSRGFGRQGKRTFMAERQYTRMEDWLTAKLAYEGLPSKTYLSKTLAQYTSKTCSNCGFTITSADYDRVLEKLKKTATGWMTTINGKELKVEGQITYYNRYKRQNVVKDLSVELDRLSEESVNNDISSWTKGRSGEALSLLKKRFSHRPVQEKFVCLNCGFETHADEQAALNIARSWLFLRSQEYKKYQTNKTTGNTDKRAFVETWQSFYRKKLKEVWKPAV

SEQ ID NO: 26664 - protein, 978 aa, synthetic construct
  REGION 1..978: note = engineered CasX variant
QEIKRINKIRRRLVKDSNTKKAGKTGPMKTLLVRVMTPDLRERLENLRKKPENIPQPISNTSRANLNKLLTDYTEMKKAILHVYWEEFQKDPVGLMSRVAQPASKKIDQNKLKPEMDEKGNLTTAGFACSQCGQPLFVYKLEQVSEKGKAYTNYFGRCNVAEHEKLILLAQLKPEKDSDEAVTYSLGKFGQRALDFYSIHVTKESTHPVKPLAQIAGNRYASGPVGKALSDACMGTIASFLSKYQDIIIEHQKVVKGNQKRLESLRELAGKENLEYPSVTLPPQPHTKEGVDAYNEVIARVRMWVNLNLWQKLKLSRDDAKPLLRLKGFPSFPLVERQANEVDWWDMVCNVKKLINEKKEDGKVFWQNLAGYKRQEALRPYLSSEEDRKKGKKFARYQLGDLLLHLEKKHGEDWGKVYDEAWERIDKKVEGLSKHIKLEEERRSEDAQSKAALTDWLRAKASFVIEGLKEADKDEFCRCELKLQKWYGDLRGKPFAIEAENSILDISGFSKQYNCAFIWQKDGVKKLNLYLIINYFKGGKLRFKKIKPEAFEANRFYTVINKKSGEIVPMEVNFNFDDPNLIILPLAFGKRQGREFIWNDLLSLETGSLKLANGRVIEKTLYNRRTRQDEPALFVALTFERREVLDSSNIKPMNLIGVDRGENIPAVIALTDPEGCPLSRFKDSLGNPTHILRAGEEYKEKQRTIQAKKEVEQRRAGGYSRKYASKAKNLADDMVRNTARDLLYYAVTQDAMLIFENLSRGFGRQGKRTFMAERQYTRMEDWLTAKLAYEGLPSKTYLSKTLAQYTSKTCSNCGFTITSADYDRVLEKLKKTATGWMTTINGKELKVEGQITYYNRYKRQNVVKDLSVELDRLSEESVNNDISSWTKGRSGEALSLLKKRFSHRPVQEKFVCLNCGFETHADEQAALNIARSWLFLRSQEYKKYQTNKTTGNTDKRAFVETWQSFYRKKLKEVWKPAV

SEQ ID NO: 26665 - protein, 978 aa, synthetic construct
  REGION 1..978: note = engineered CasX variant
QEIKRINKIRRRLVKDSNTKKAGKTGPMKTLLVRVMTPDLRERLENLRKKPENIPQPISNTSRANLNKLLTDYTEMKKAILHVYWEEFQKDPVGLMSRVAQPASKKIDQNKLKPEMDEKGNLTTAGFACSQCGQPLFVYKLEQVSEKGKAYTNYFGRCNVAEHEKLILLAQLKPEKDSDEAVTYSLGKFGQRALDFYSIHVTKESTHPVKPLAQIAGNRYASGPVGKALSDACMGTIASFLSKYQDIIIEHQKVVKGNQKRLESLRELAGKENLEYPSVTLPPQPHTKEGVDAYNEVIARVRMWVNLNLWQKLKLSRDDAKPLLRLKGFPSFPLVERQANEVDWWDMVCNVKKLINEKKEDGKVFWQNLAGYKRQEALRPYLSSEEDRKKGKKFARYQLGDLLLHLEKKHGEDWGKVYDEAWERIDKKVEGLSKHIKLEEERRSEDAQSKAALTDWLRAKASFVIEGLKEADKDEFCRCELKLQKWYGDLRGKPFAIEAENSILDISGFSKQYNCAFIWQKDGVKKLNLYLIINYFKGGKLRFKKIKPEAFEANRFYTVINKKSGEIVPMEVNFNFDDPNLIILPLAFGKRQGREFIWNDLLSLETGSLKLANGRVIEKTLYNRRTRQDEPALFVALTFERREVLDSSNIKPMNLIGVDRGENIPAVIALTDPEGCPLSRFKDSLGNPTHILNIGESYKEKQRTIQAKKEVEQRRAGGYSRKYASKAKNLADDMVRNTARDLLYYAVTQDAMLIFENLSRGFGRQGKRTFMAERQYTRMEDWLTAKLAYEGLPSKTYLSKTLAQYTSKTCSNCGFTITSADYDRVLEKLKKTATGWMTTINGKELKVEGQITYYNRYKRQNVVKDLSVELDRLSEESVNNDISSWTKGRSGEALSLLKKRFSHRPVQEKFVCLNCGFETHADEQAALNIARSWLFLRSQEYKKYQTNKTTGNTDKRAFVETWQSFYRKKLKEVWKPAV

SEQ ID NO: 26666 - protein, 978 aa, synthetic construct
  REGION 1..978: note = engineered CasX variant
QEIKRINKIRRRLVKDSNTKKAGKTGPMKTLLVRVMTPDLRERLENLRKKPENIPQPISNTSRANLNKLLTDYTEMKKAILHVYWEEFQKDPVGLMSRVAQPASKKIDQNKLKPEMDEKGNLTTAGFACSQCGQPLFVYKLEQVSEKGKAYTNYFGRCNVAEHEKLILLAQLKPEKDSDEAVTYSLGKFGQRALDFYSIHVTKESTHPVKPLAQIAGNRYASGPVGKALSDACMGTIASFLSKYQDIIIEHQKVVKGNQKRLESLRELAGKENLEYPSVTLPPQPHTKEGVDAYNEVIARVRMWVNLNLWQKLKLSRDDAKPLLRLKGFPSFPLVERQANEVDWWDMVCNVKKLINEKKEDGKVFWQNLAGYKRQEALRPYLSSEEDRKKGKKFARYQLGDLLLHLEKKHGEDWGKVYDEAWERIDKKVEGLSKHIKLEEERRSEDAQSKAALTDWLRAKASFVIEGLKEADKDEFCRCELKLQKWYGDLRGKPFAIEAENSILDISGFSKQYNCAFIWQKDGVKKLNLYLIINYFKGGKLRFKKIKPEAFEANRFYTVINKKSGEIVPMEVNFNFDDPNLIILPLAFGKRQGREFIWNDLLSLETGSLKLANGRVIEKTLYNRRTRQDEPALFVALTFERREVLDSSNIKPMNLIGVDRGENIPAVIALTDPEGCPLSRFKDSLGNPTHILHIGESYKEKQRTIQMKKEVEQRRAGGYSRKYASKAKNLADDMVRNTARDLLYYAVTQDAMLIFENLSRGFGRQGKRTFMAERQYTRMEDWLTAKLAYEGLPSKTYLSKTLAQYTSKTCSNCGFTITSADYDRVLEKLKKTATGWMTTINGKELKVEGQITYYNRYKRQNVVKDLSVELDRLSEESVNNDISSWTKGRSGEALSLLKKRFSHRPVQEKFVCLNCGFETHADEQAALNIARSWLFLRSQEYKKYQTNKTTGNTDKRAFVETWQSFYRKKLKEVWKPAV

SEQ ID NO: 26667 - protein, 978 aa, synthetic construct
  REGION 1..978: note = engineered CasX variant
QEIKRINKIRRRLVKDSNTKKAGKTGPMKTLLVRVMTPDLRERLENLRKKPENIPQPISNTSRANLNKLLTDYTEMKKAILHVYWEEFQKDPVGLMSRVAQPASKKIDQNKLKPEMDEKGNLTTAGFACSQCGQPLFVYKLEQVSEKGKAYTNYFGRCNVAEHEKLILLAQLKPEKDSDEAVTYSLGKFGQRALDFYSIHVTKESTHPVKPLAQIAGNRYASGPVGKALSDACMGTIASFLSKYQDIIIEHQKVVKGNQKRLESLRELAGKENLEYPSVTLPPQPHTKEGVDAYNEVIARVRMWVNLNLWQKLKLSRDDAKPLLRLKGFPSFPLVERQANEVDWWDMVCNVKKLINEKKEDGKVFWQNLAGYKRQEALRPYLSSEEDRKKGKKFARYQLGDLLLHLEKKHGEDWGKVYDEAWERIDKKVEGLSKHIKLEEERRSEDAQSKAALTDWLRAKASFVIEGLKEADKDEFCRCELKLQKWYGDLRGKPFAIEAENSILDISGFSKQYNCAFIWQKDGVKKLNLYLIINYFKGGKLRFKKIKPEAFEANRFYTVINKKSGEIVPMEVNFNFDDPNLIILPLAFGKRQGREFIWNDLLSLETGSLKLANGRVIEKTLYNRRTRQDEPALFVALTFERREVLDSSNIKPMNLIGVDRGENIPAVIALTDPEGCPLSRFKDSLGNPTHILHIGESYKEKQRTIQAKKEVEQRRLGGYSRKYASKAKNLADDMVRNTARDLLYYAVTQDAMLIFENLSRGFGRQGKRTFMAERQYTRMEDWLTAKLAYEGLPSKTYLSKTLAQYTSKTCSNCGFTITSADYDRVLEKLKKTATGWMTTINGKELKVEGQITYYNRYKRQNVVKDLSVELDRLSEESVNNDISSWTKGRSGEALSLLKKRFSHRPVQEKFVCLNCGFETHADEQAALNIARSWLFLRSQEYKKYQTNKTTGNTDKRAFVETWQSFYRKKLKEVWKPAV

SEQ ID NO: 26668 - protein, 978 aa, synthetic construct
  REGION 1..978: note = engineered CasX variant
QEIKRINKIRRRLVKDSNTKKAGKTGPMKTLLVRVMTPDLRERLENLRKKPENIPQPISNTSRANLNKLLTDYTEMKKAILHVYWEEFQKDPVGLMSRVAQPASKKIDQNKLKPEMDEKGNLTTAGFACSQCGQPLFVYKLEQVSEKGKAYTNYFGRCNVAEHEKLILLAQLKPEKDSDEAVTYSLGKFGQRALDFYSIHVTKESTHPVKPLAQIAGNRYASGPVGKALSDACMGTIASFLSKYQDIIIEHQKVVKGNQKRLESLRELAGKENLEYPSVTLPPQPHTKEGVDAYNEVIARVRMWVNLNLWQKLKLSRDDAKPLLRLKGFPSFPLVERQANEVDWWDMVCNVKKLINEKKEDGKVFWQNLAGYKRQEALRPYLSSEEDRKKGKKFARYQLGDLLLHLEKKHGEDWGKVYDEAWERIDKKVEGLSKHIKLEEERRSEDAQSKAALTDWLRAKASFVIEGLKEADKDEFCRCELKLQKWYGDLRGKPFAIEAENSILDISGFSKQYNCAFIWQKDGVKKLNLYLIINYFKGGKLRFKKIKPEAFEANRFYTVINKKSGEIVPMEVNFNFDDPNLIILPLAFGKRQGREFIWNDLLSLETGSLKLANGRVIEKTLYNRRTRQDEPALFVALTFERREVLDSSNIKPMNLIGVDRGENIPAVIALTDPEGCPLSRFKDSLGNPTHILHIGESYKEKQRTIQAKKEVEQRRAQGYSRKYASKAKNLADDMVRNTARDLLYYAVTQDAMLIFENLSRGFGRQGKRTFMAERQYTRMEDWLTAKLAYEGLPSKTYLSKTLAQYTSKTCSNCGFTITSADYDRVLEKLKKTATGWMTTINGKELKVEGQITYYNRYKRQNVVKDLSVELDRLSEESVNNDISSWTKGRSGEALSLLKKRFSHRPVQEKFVCLNCGFETHADEQAALNIARSWLFLRSQEYKKYQTNKTTGNTDKRAFVETWQSFYRKKLKEVWKPAV

SEQ ID NO: 26669 - protein, 978 aa, synthetic construct
  REGION 1..978: note = engineered CasX variant
QEIKRINKIRRRLVKDSNTKKAGKTGPMKTLLVRVMTPDLRERLENLRKKPENIPQPISNTSRANLNKLLTDYTEMKKAILHVYWEEFQKDPVGLMSRVAQPASKKIDQNKLKPEMDEKGNLTTAGFACSQCGQPLFVYKLEQVSEKGKAYTNYFGRCNVAEHEKLILLAQLKPEKDSDEAVTYSLGKFGQRALDFYSIHVTKESTHPVKPLAQIAGNRYASGPVGKALSDACMGTIASFLSKYQDIIIEHQKVVKGNQKRLESLRELAGKENLEYPSVTLPPQPHTKEGVDAYNEVIARVRMWVNLNLWQKLKLSRDDAKPLLRLKGFPSFPLVERQANEVDWWDMVCNVKKLINEKKEDGKVFWQNLAGYKRQEALRPYLSSEEDRKKGKKFARYQLGDLLLHLEKKHGEDWGKVYDEAWERIDKKVEGLSKHIKLEEERRSEDAQSKAALTDWLRAKASFVIEGLKEADKDEFCRCELKLQKWYGDLRGKPFAIEAENSILDISGFSKQYNCAFIWQKDGVKKLNLYLIINYFKGGKLRFKKIKPEAFEANRFYTVINKKSGEIVPMEVNFNFDDPNLIILPLAFGKRQGREFIWNDLLSLETGSLKLANGRVIEKTLYNRRTRQDEPALFVALTFERREVLDSSNIKPMNLIGVDRGENIPAVIALTDPEGCPLSRFKDSLGNPTHILHIGESYKEKQRTIQAKKEVEQRRAGGYSRKYASKAKNLADDMVRNTARDLLYYAVTQDAMLIFENLSRGFGRQGKRTFMAERQYTRMEDWLTAKLAYEGLPSKTYLSKTLAQYTSKTCSNCGFTITSADYDRVLEKLKKTATGWMTTINGKELKVEGQITYYNRYKRQNVVKDLSVELDRLSEESVNNDISSWTKGRSGEALSLLKKRFSHRPVQEKFVCLNCGFETHADEQAALNIARSWLFLRSQEYKKYQTNKTTGNTDKRAFVETWQSFYRKKLKEVWKPAV

SEQ ID NO: 26670 - protein, 978 aa, synthetic construct
  REGION 1..978: note = engineered CasX variant
QEIKRINKIRRRLVKDSNTKKAGKTGPMKTLLVRVMTPDLRERLENLRKKPENIPQPISNTSRANLNKLLTDYTEMKKAILHVYWEEFQKDPVGLMSRVAQPASKKIDQNKLKPEMDEKGNLTTAGFACSQCGQPLFVYKLEQVSEKGKAYTNYFGRCNVAEHEKLILLAQLKPEKDSDEAVTYSLGKFGQRALDFYSIHVTKESTHPVKPLAQIAGNRYASGPVGKALSDACMGTIASFLSKYQDIIIEHQKVVKGNQKRLESLRELAGKENLEYPSVTLPPQPHTKEGVDAYNEVIARVRMWVNLNLWQKLKLSRDDAKPLLRLKGFPSFPLVERQANEVDWWDMVCNVKKLINEKKEDGKVFWQNLAGYKRQEALRPYLSSEEDRKKGKKFARYQLGDLLLHLEKKHGEDWGKVYDEAWERIDKKVEGLSKHIKLEEERRSEDAQSKAALTDWLRAKASFVIEGLKEADKDEFCRCELKLQKWYGDLRGKPFAIEAENSILDISGFSKQYNCAFIWQKDGVKKLNLYLIINYFKGGKLRFKKIKPEAFEANRFYTVINKKSGEIVPMEVNFNFDDPNLIILPLAFGKRQGREFIWNDLLSLETGSLKLANGRVIEKTLYNRRTRQDEPALFVALTFERREVLDSSNIKPMNLIGVDRGENIPAVIALTDPEGCPLSRFKDSLGNPTHIKRIGESYKEKQRTIQAKKEVEQRRAGGYSRKYASKAKNLADDMVRNTARDLLYYAVTQDAMLIFENLSRGFGRQGKRTFMAERQYTRMEDWLTAKLAYEGLPSKTYLSKTLAQYTSKTCSNCGFTITSADYDRVLEKLKKTATGWMTTINGKELKVEGQITYYNRYKRQNVVKDLSVELDRLSEESVNNDISSWTKGRSGEALSLLKKRFSHRPVQEKFVCLNCGFETHADEQAALNIARSWLFLRSQEYKKYQTNKTTGNTDKRAFVETWQSFYRKKLKEVWKPAV

SEQ ID NO: 26671 - protein, 978 aa, synthetic construct
  REGION 1..978: note = engineered CasX variant
QEIKRINKIRRRLVKDSNTKKAGKTGPMKTLLVRVMTPDLRERLENLRKKPENIPQPISNTSRANLNKLLTDYTEMKKAILHVYWEEFQKDPVGLMSRVAQPASKKIDQNKLKPEMDEKGNLTTAGFACSQCGQPLFVYKLEQVSEKGKAYTNYFGRCNVAEHEKLILLAQLKPEKDSDEAVTYSLGKFGQRALDFYSIHVTKESTHPVKPLAQIAGNRYASGPVGKALSDACMGTIASFLSKYQDIIIEHQKVVKGNQKRLESLRELAGKENLEYPSVTLPPQPHTKEGVDAYNEVIARVRMWVNLNLWQKLKLSRDDAKPLLRLKGFPSFPLVERQANEVDWWDMVCNVKKLINEKKEDGKVFWQNLAGYKRQEALRPYLSSEEDRKKGKKFARYQLGDLLLHLEKKHGEDWGKVYDEAWERIDKKVEGLSKHIKLEEERRSEDAQSKAALTDWLRAKASFVIEGLKEADKDEFCRCELKLQKWYGDLRGKPFAIEAENSILDISGFSKQYNCAFIWQKDGVKKLNLYLIINYFKGGKLRFKKIKPEAFEANRFYTVINKKSGEIVPMEVNFNFDDPNLIILPLAFGKRQGREFIWNDLLSLETGSLKLANGRVIEKTLYNRRTRQDEPALFVALTFERREVLDSSNIKPMNLIGVDRGENIPAVIALTDPEGCPLSRFKDSLGNPTHIIRIGESYKEKQRTIQAKKEVEQRRAGGYSRKYASKAKNLADDMVRNTARDLLYYAVTQDAMLIFENLSRGFGRQGKRTFMAERQYTRMEDWLTAKLAYEGLPSKTYLSKTLAQYTSKTCSNCGFTITSADYDRVLEKLKKTATGWMTTINGKELKVEGQITYYNRYKRQNVVKDLSVELDRLSEESVNNDISSWTKGRSGEALSLLKKRFSHRPVQEKFVCLNCGFETHADEQAALNIARSWLFLRSQEYKKYQTNKTTGNTDKRAFVETWQSFYRKKLKEVWKPAV

SEQ ID NO: 26672 - protein, 978 aa, synthetic construct
  REGION 1..978: note = engineered CasX variant
QEIKRINKIRRRLVKDSNTKKAGKTGPMKTLLVRVMTPDLRERLENLRKKPENIPQPISNTSRANLNKLLTDYTEMKKAILHVYWEEFQKDPVGLMSRVAQPASKKIDQNKLKPEMDEKGNLTTAGFACSQCGQPLFVYKLEQVSEKGKAYTNYFGRCNVAEHEKLILLAQLKPEKDSDEAVTYSLGKFGQRALDFYSIHVTKESTHPVKPLAQIAGNRYASGPVGKALSDACMGTIASFLSKYQDIIIEHQKVVKGNQKRLESLRELAGKENLEYPSVTLPPQPHTKEGVDAYNEVIARVRMWVNLNLWQKLKLSRDDAKPLLRLKGFPSFPLVERQANEVDWWDMVCNVKKLINEKKEDGKVFWQNLAGYKRQEALRPYLSSEEDRKKGKKFARYQLGDLLLHLEKKHGEDWGKVYDEAWERIDKKVEGLSKHIKLEEERRSEDAQSKAALTDWLRAKASFVIEGLKEADKDEFCRCELKLQKWYGDLRGKPFAIEAENSILDISGFSKQYNCAFIWQKDGVKKLNLYLIINYFKGGKLRFKKIKPEAFEANRFYTVINKKSGEIVPMEVNFNFDDPNLIILPLAFGKRQGREFIWNDLLSLETGSLKLANGRVIEKTLYNRRTRQDEPALFVALTFERREVLDSSNIKPMNLIGVDRGENIPAVIALTDPEGCPLSRFKDSLGNPTHIHRIGESYKEQQRTIQAKKEVEQRRAGGYSRKYASKAKNLADDMVRNTARDLLYYAVTQDAMLIFENLSRGFGRQGKRTFMAERQYTRMEDWLTAKLAYEGLPSKTYLSKTLAQYTSKTCSNCGFTITSADYDRVLEKLKKTATGWMTTINGKELKVEGQITYYNRYKRQNVVKDLSVELDRLSEESVNNDISSWTKGRSGEALSLLKKRFSHRPVQEKFVCLNCGFETHADEQAALNIARSWLFLRSQEYKKYQTNKTTGNTDKRAFVETWQSFYRKKLKEVWKPAV

SEQ ID NO: 26673 - protein, 978 aa, synthetic construct
  REGION 1..978: note = engineered CasX variant
QEIKRINKIRRRLVKDSNTKKAGKTGPMKTLLVRVMTPDLRERLENLRKKPENIPQPISNTSRANLNKLLTDYTEMKKAILHVYWEEFQKDPVGLMSRVAQPASKKIDQNKLKPEMDEKGNLTTAGFACSQCGQPLFVYKLEQVSEKGKAYTNYFGRCNVAEHEKLILLAQLKPEKDSDEAVTYSLGKFGQRALDFYSIHVTKESTHPVKPLAQIAGNRYASGPVGKALSDACMGTIASFLSKYQDIIIEHQKVVKGNQKRLESLRELAGKENLEYPSVTLPPQPHTKEGVDAYNEVIARVRMWVNLNLWQKLKLSRDDAKPLLRLKGFPSFPLVERQANEVDWWDMVCNVKKLINEKKEDGKVFWQNLAGYKRQEALRPYLSSEEDRKKGKKFARYQLGDLLLHLEKKHGEDWGKVYDEAWERIDKKVEGLSKHIKLEEERRSEDAQSKAALTDWLRAKASFVIEGLKEADKDEFCRCELKLQKWYGDLRGKPFAIEAENSILDISGFSKQYNCAFIWQKDGVKKLNLYLIINYFKGGKLRFKKIKPEAFEANRFYTVINKKSGEIVPMEVNFNFDDPNLIILPLAFGKRQGREFIWNDLLSLETGSLKLANGRVIEKTLYNRRTRQDEPALFVALTFERREVLDSSNIKPMNLIGVDRGENIPAVIALTDPEGCPLSRFKDSLGNPTHIHRIGESYKEQQRTIQAKKEVEMRRAGGYSRKYASKAKNLADDMVRNTARDLLYYAVTQDAMLIFENLSRGFGRQGKRTFMAERQYTRMEDWLTAKLAYEGLPSKTYLSKTLAQYTSKTCSNCGFTITSADYDRVLEKLKKTATGWMTTINGKELKVEGQITYYNRYKRQNVVKDLSVELDRLSEESVNNDISSWTKGRSGEALSLLKKRFSHRPVQEKFVCLNCGFETHADEQAALNIARSWLFLRSQEYKKYQTNKTTGNTDKRAFVETWQSFYRKKLKEVWKPAV

SEQ ID NO: 26674 - protein, 978 aa, synthetic construct
  REGION 1..978: note = engineered CasX variant
QEIKRINKIRRRLVKDSNTKKAGKTGPMKTLLVRVMTPDLRERLENLRKKPENIPQPISNTSRANLNKLLTDYTEMKKAILHVYWEEFQKDPVGLMSRVAQPASKKIDQNKLKPEMDEKGNLTTAGFACSQCGQPLFVYKLEQVSEKGKAYTNYFGRCNVAEHEKLILLAQLKPEKDSDEAVTYSLGKFGQRALDFYSIHVTKESTHPVKPLAQIAGNRYASGPVGKALSDACMGTIASFLSKYQDIIIEHQKVVKGNQKRLESLRELAGKENLEYPSVTLPPQPHTKEGVDAYNEVIARVRMWVNLNLWQKLKLSRDDAKPLLRLKGFPSFPLVERQANEVDWWDMVCNVKKLINEKKEDGKVFWQNLAGYKRQEALRPYLSSEEDRKKGKKFARYQLGDLLLHLEKKHGEDWGKVYDEAWERIDKKVEGLSKHIKLEEERRSEDAQSKAALTDWLRAKASFVIEGLKEADKDEFCRCELKLQKWYGDLRGKPFAIEAENSILDISGFSKQYNCAFIWQKDGVKKLNLYLIINYFKGGKLRFKKIKPEAFEANRFYTVINKKSGEIVPMEVNFNFDDPNLIILPLAFGKRQGREFIWNDLLSLETGSLKLANGRVIEKTLYNRRTRQDEPALFVALTFERREVLDSSNIKPMNLIGVDRGENIPAVIALTDPEGCPLSRFKDSLGNPTHIHRIGESYKEKQRTIQAKKEVEQRRAGGYSRKYASKAKNLADDMVRNTARDLLYYAVTQDAMLIFENLSRGFGRQGKRTFMAERQYTRMEDWLTAKLAYEGLPSKTYLSKTLAQYTSKTCSNCGFTITSADYDRVLEKLKKTATGWMTTINGKELKVEGQITYYNRYKRQNVVKDLSVELDRLSEESVNNDISSWTKGRSGEALSLLKKRFSHRPVQEKFVCLNCGFETHADEQAALNIARSWLFLRSQEYKKYQTNKTTGNTDKRAFVETWQSFYRKKLKEVWKPAV

SEQ ID NO: 26675 - protein, 978 aa, synthetic construct
  REGION 1..978: note = engineered CasX variant
QEIKRINKIRRRLVKDSNTKKAGKTGPMKTLLVRVMTPDLRERLENLRKKPENIPQPISNTSRANLNKLLTDYTEMKKAILHVYWEEFQKDPVGLMSRVAQPASKKIDQNKLKPEMDEKGNLTTAGFACSQCGQPLFVYKLEQVSEKGKAYTNYFGRCNVAEHEKLILLAQLKPEKDSDEAVTYSLGKFGQRALDFYSIHVTKESTHPVKPLAQIAGNRYASGPVGKALSDACMGTIASFLSKYQDIIIEHQKVVKGNQKRLESLRELAGKENLEYPSVTLPPQPHTKEGVDAYNEVIARVRMWVNLNLWQKLKLSRDDAKPLLRLKGFPSFPLVERQANEVDWWDMVCNVKKLINEKKEDGKVFWQNLAGYKRQEALRPYLSSEEDRKKGKKFARYQLGDLLLHLEKKHGEDWGKVYDEAWERIDKKVEGLSKHIKLEEERRSEDAQSKAALTDWLRAKASFVIEGLKEADKDEFCRCELKLQKWYGDLRGKPFAIEAENSILDISGFSKQYNCAFIWQKDGVKKLNLYLIINYFKGGKLRFKKIKPEAFEANRFYTVINKKSGEIVPMEVNFNFDDPNLIILPLAFGKRQGREFIWNDLLSLETGSLKLANGRVIEKTLYNRRTRQDEPALFVALTFERREVLDSSNIKPMNLIGVDRGENIPAVIALTDPEGCPLSRFKDSLGNPTHIHRIGESYKEKQRTIQAKKEVEMRRAGGYSRKYASKAKNLADDMVRNTARDLLYYAVTQDAMLIFENLSRGFGRQGKRTFMAERQYTRMEDWLTAKLAYEGLPSKTYLSKTLAQYTSKTCSNCGFTITSADYDRVLEKLKKTATGWMTTINGKELKVEGQITYYNRYKRQNVVKDLSVELDRLSEESVNNDISSWTKGRSGEALSLLKKRFSHRPVQEKFVCLNCGFETHADEQAALNIARSWLFLRSQEYKKYQTNKTTGNTDKRAFVETWQSFYRKKLKEVWKPAV

SEQ ID NO: 26676 - protein, 978 aa, synthetic construct
  REGION 1..978: note = engineered CasX variant
QEIKRINKIRRRLVKDSNTKKAGKTGPMKTLLVRVMTPDLRERLENLRKKPENIPQPISNTSRANLNKLLTDYTEMKKAILHVYWEEFQKDPVGLMSRVAQPASKKIDQNKLKPEMDEKGNLTTAGFACSQCGQPLFVYKLEQVSEKGKAYTNYFGRCNVAEHEKLILLAQLKPEKDSDEAVTYSLGKFGQRALDFYSIHVTKESTHPVKPLAQIAGNRYASGPVGKALSDACMGTIASFLSKYQDIIIEHQKVVKGNQKRLESLRELAGKENLEYPSVTLPPQPHTKEGVDAYNEVIARVRMWVNLNLWQKLKLSRDDAKPLLRLKGFPSFPLVERQANEVDWWDMVCNVKKLINEKKEDGKVFWQNLAGYKRQEALRPYLSSEEDRKKGKKFARYQLGDLLLHLEKKHGEDWGKVYDEAWERIDKKVEGLSKHIKLEEERRSEDAQSKAALTDWLRAKASFVIEGLKEADKDEFCRCELKLQKWYGDLRGKPFAIEAENSILDISGFSKQYNCAFIWQKDGVKKLNLYLIINYFKGGKLRFKKIKPEAFEANRFYTVINKKSGEIVPMEVNFNFDDPNLIILPLAFGKRQGREFIWNDLLSLETGSLKLANGRVIEKTLYNRRTRQDEPALFVALTFERREVLDSSNIKPMNLIGVDRGENIPAVIALTDPEGCPLSRFKDSLGNPTHIHRIGESYKEKQRCIQAKKEVEQRRAGGYSRKYASKAKNLADDMVRNTARDLLYYAVTQDAMLIFENLSRGFGRQGKRTFMAERQYTRMEDWLTAKLAYEGLPSKTYLSKTLAQYTSKTCSNCGFTITSADYDRVLEKLKKTATGWMTTINGKELKVEGQITYYNRYKRQNVVKDLSVELDRLSEESVNNDISSWTKGRSGEALSLLKKRFSHRPVQEKFVCLNCGFETHADEQAALNIARSWLFLRSQEYKKYQTNKTTGNTDKRAFVETWQSFYRKKLKEVWKPAV

SEQ ID NO: 26677 - protein, 978 aa, synthetic construct
  REGION 1..978: note = engineered CasX variant
QEIKRINKIRRRLVKDSNTKKAGKTGPMKTLLVRVMTPDLRERLENLRKKPENIPQPISNTSRANLNKLLTDYTEMKKAILHVYWEEFQKDPVGLMSRVAQPASKKIDQNKLKPEMDEKGNLTTAGFACSQCGQPLFVYKLEQVSEKGKAYTNYFGRCNVAEHEKLILLAQLKPEKDSDEAVTYSLGKFGQRALDFYSIHVTKESTHPVKPLAQIAGNRYASGPVGKALSDACMGTIASFLSKYQDIIIEHQKVVKGNQKRLESLRELAGKENLEYPSVTLPPQPHTKEGVDAYNEVIARVRMWVNLNLWQKLKLSRDDAKPLLRLKGFPSFPLVERQANEVDWWDMVCNVKKLINEKKEDGKVFWQNLAGYKRQEALRPYLSSEEDRKKGKKFARYQLGDLLLHLEKKHGEDWGKVYDEAWERIDKKVEGLSKHIKLEEERRSEDAQSKAALTDWLRAKASFVIEGLKEADKDEFCRCELKLQKWYGDLRGKPFAIEAENSILDISGFSKQYNCAFIWQKDGVKKLNLYLIINYFKGGKLRFKKIKPEAFEANRFYTVINKKSGEIVPMEVNFNFDDPNLIILPLAFGKRQGREFIWNDLLSLETGSLKLANGRVIEKTLYNRRTRQDEPALFVALTFERREVLDSSNIKPMNLIGVDRGENIPAVIALTDPEGCPLSRFKDSLGNPTHIFRIGESYKEKQRTIQAKKEVEQRRAGGYSRKYASKAKNLADDMVRNTARDLLYYAVTQDAMLIFENLSRGFGRQGKRTFMAERQYTRMEDWLTAKLAYEGLPSKTYLSKTLAQYTSKTCSNCGFTITSADYDRVLEKLKKTATGWMTTINGKELKVEGQITYYNRYKRQNVVKDLSVELDRLSEESVNNDISSWTKGRSGEALSLLKKRFSHRPVQEKFVCLNCGFETHADEQAALNIARSWLFLRSQEYKKYQTNKTTGNTDKRAFVETWQSFYRKKLKEVWKPAV

SEQ ID NO: 26678 - protein, 978 aa, synthetic construct
  REGION 1..978: note = engineered CasX variant
QEIKRINKIRRRLVKDSNTKKAGKTGPMKTLLVRVMTPDLRERLENLRKKPENIPQPISNTSRANLNKLLTDYTEMKKAILHVYWEEFQKDPVGLMSRVAQPASKKIDQNKLKPEMDEKGNLTTAGFACSQCGQPLFVYKLEQVSEKGKAYTNYFGRCNVAEHEKLILLAQLKPEKDSDEAVTYSLGKFGQRALDFYSIHVTKESTHPVKPLAQIAGNRYASGPVGKALSDACMGTIASFLSKYQDIIIEHQKVVKGNQKRLESLRELAGKENLEYPSVTLPPQPHTKEGVDAYNEVIARVRMWVNLNLWQKLKLSRDDAKPLLRLKGFPSFPLVERQANEVDWWDMVCNVKKLINEKKEDGKVFWQNLAGYKRQEALRPYLSSEEDRKKGKKFARYQLGDLLLHLEKKHGEDWGKVYDEAWERIDKKVEGLSKHIKLEEERRSEDAQSKAALTDWLRAKASFVIEGLKEADKDEFCRCELKLQKWYGDLRGKPFAIEAENSILDISGFSKQYNCAFIWQKDGVKKLNLYLIINYFKGGKLRFKKIKPEAFEANRFYTVINKKSGEIVPMEVNFNFDDPNLIILPLAFGKRQGREFIWNDLLSLETGSLKLANGRVIEKTLYNRRTRQDEPALFVALTFERREVLDSSNIKPMNLIGVDRGENIPAVIALTDPEGCPLSRFKDSLGNPTHICRIGESYKEKQRTIQAKKEVEQRRAGGYSRKYASKAKNLADDMVRNTARDLLYYAVTQDAMLIFENLSRGFGRQGKRTFMAERQYTRMEDWLTAKLAYEGLPSKTYLSKTLAQYTSKTCSNCGFTITSADYDRVLEKLKKTATGWMTTINGKELKVEGQITYYNRYKRQNVVKDLSVELDRLSEESVNNDISSWTKGRSGEALSLLKKRFSHRPVQEKFVCLNCGFETHADEQAALNIARSWLFLRSQEYKKYQTNKTTGNTDKRAFVETWQSFYRKKLKEVWKPAV

SEQ ID NO: 26679 - protein, 978 aa, synthetic construct
  REGION 1..978: note = engineered CasX variant
QEIKRINKIRRRLVKDSNTKKAGKTGPMKTLLVRVMTPDLRERLENLRKKPENIPQPISNTSRANLNKLLTDYTEMKKAILHVYWEEFQKDPVGLMSRVAQPASKKIDQNKLKPEMDEKGNLTTAGFACSQCGQPLFVYKLEQVSEKGKAYTNYFGRCNVAEHEKLILLAQLKPEKDSDEAVTYSLGKFGQRALDFYSIHVTKESTHPVKPLAQIAGNRYASGPVGKALSDACMGTIASFLSKYQDIIIEHQKVVKGNQKRLESLRELAGKENLEYPSVTLPPQPHTKEGVDAYNEVIARVRMWVNLNLWQKLKLSRDDAKPLLRLKGFPSFPLVERQANEVDWWDMVCNVKKLINEKKEDGKVFWQNLAGYKRQEALRPYLSSEEDRKKGKKFARYQLGDLLLHLEKKHGEDWGKVYDEAWERIDKKVEGLSKHIKLEEERRSEDAQSKAALTDWLRAKASFVIEGLKEADKDEFCRCELKLQKWYGDLRGKPFAIEAENSILDISGFSKQYNCAFIWQKDGVKKLNLYLIINYFKGGKLRFKKIKPEAFEANRFYTVINKKSGEIVPMEVNFNFDDPNLIILPLAFGKRQGREFIWNDLLSLETGSLKLANGRVIEKTLYNRRTRQDEPALFVALTFERREVLDSSNIKPMNLIGVDRGENIPAVIALTDPEGCPLSRFKDSLGNPTHICRIGESYKEKQRTFQAKKEVEQRRAGGYSRKYASKAKNLADDMVRNTARDLLYYAVTQDAMLIFENLSRGFGRQGKRTFMAERQYTRMEDWLTAKLAYEGLPSKTYLSKTLAQYTSKTCSNCGFTITSADYDRVLEKLKKTATGWMTTINGKELKVEGQITYYNRYKRQNVVKDLSVELDRLSEESVNNDISSWTKGRSGEALSLLKKRFSHRPVQEKFVCLNCGFETHADEQAALNIARSWLFLRSQEYKKYQTNKTTGNTDKRAFVETWQSFYRKKLKEVWKPAV

SEQ ID NO: 26680 - protein, 978 aa, synthetic construct
  REGION 1..978: note = engineered CasX variant
QEIKRINKIRRRLVKDSNTKKAGKTGPMKTLLVRVMTPDLRERLENLRKKPENIPQPISNTSRANLNKLLTDYTEMKKAILHVYWEEFQKDPVGLMSRVAQPASKKIDQNKLKPEMDEKGNLTTAGFACSQCGQPLFVYKLEQVSEKGKAYTNYFGRCNVAEHEKLILLAQLKPEKDSDEAVTYSLGKFGQRALDFYSIHVTKESTHPVKPLAQIAGNRYASGPVGKALSDACMGTIASFLSKYQDIIIEHQKVVKGNQKRLESLRELAGKENLEYPSVTLPPQPHTKEGVDAYNEVIARVRMWVNLNLWQKLKLSRDDAKPLLRLKGFPSFPLVERQANEVDWWDMVCNVKKLINEKKEDGKVFWQNLAGYKRQEALRPYLSSEEDRKKGKKFARYQLGDLLLHLEKKHGEDWGKVYDEAWERIDKKVEGLSKHIKLEEERRSEDAQSKAALTDWLRAKASFVIEGLKEADKDEFCRCELKLQKWYGDLRGKPFAIEAENSILDISGFSKQYNCAFIWQKDGVKKLNLYLIINYFKGGKLRFKKIKPEAFEANRFYTVINKKSGEIVPMEVNFNFDDPNLIILPLAFGKRQGREFIWNDLLSLETGSLKLANGRVIEKTLYNRRTRQDEPALFVALTFERREVLDSSNIKPMNLIGVDRGENIPAVIALTDPEGCPLSRFKDSLGNPTHFLRIQESYKEKQRTIQAKKEVEQRRAGGYSRKYASKAKNLADDMVRNTARDLLYYAVTQDAMLIFENLSRGFGRQGKRTFMAERQYTRMEDWLTAKLAYEGLPSKTYLSKTLAQYTSKTCSNCGFTITSADYDRVLEKLKKTATGWMTTINGKELKVEGQITYYNRYKRQNVVKDLSVELDRLSEESVNNDISSWTKGRSGEALSLLKKRFSHRPVQEKFVCLNCGFETHADEQAALNIARSWLFLRSQEYKKYQTNKTTGNTDKRAFVETWQSFYRKKLKEVWKPAV

SEQ ID NO: 26681 - protein, 978 aa, synthetic construct
  REGION 1..978: note = engineered CasX variant
QEIKRINKIRRRLVKDSNTKKAGKTGPMKTLLVRVMTPDLRERLENLRKKPENIPQPISNTSRANLNKLLTDYTEMKKAILHVYWEEFQKDPVGLMSRVAQPASKKIDQNKLKPEMDEKGNLTTAGFACSQCGQPLFVYKLEQVSEKGKAYTNYFGRCNVAEHEKLILLAQLKPEKDSDEAVTYSLGKFGQRALDFYSIHVTKESTHPVKPLAQIAGNRYASGPVGKALSDACMGTIASFLSKYQDIIIEHQKVVKGNQKRLESLRELAGKENLEYPSVTLPPQPHTKEGVDAYNEVIARVRMWVNLNLWQKLKLSRDDAKPLLRLKGFPSFPLVERQANEVDWWDMVCNVKKLINEKKEDGKVFWQNLAGYKRQEALRPYLSSEEDRKKGKKFARYQLGDLLLHLEKKHGEDWGKVYDEAWERIDKKVEGLSKHIKLEEERRSEDAQSKAALTDWLRAKASFVIEGLKEADKDEFCRCELKLQKWYGDLRGKPFAIEAENSILDISGFSKQYNCAFIWQKDGVKKLNLYLIINYFKGGKLRFKKIKPEAFEANRFYTVINKKSGEIVPMEVNFNFDDPNLIILPLAFGKRQGREFIWNDLLSLETGSLKLANGRVIEKTLYNRRTRQDEPALFVALTFERREVLDSSNIKPMNLIGVDRGENIPAVIALTDPEGCPLSRFKDSLGNPTHFLRIGESYKEKQRTIQAKKTVEQRRAGGYSRKYASKAKNLADDMVRNTARDLLYYAVTQDAMLIFENLSRGFGRQGKRTFMAERQYTRMEDWLTAKLAYEGLPSKTYLSKTLAQYTSKTCSNCGFTITSADYDRVLEKLKKTATGWMTTINGKELKVEGQITYYNRYKRQNVVKDLSVELDRLSEESVNNDISSWTKGRSGEALSLLKKRFSHRPVQEKFVCLNCGFETHADEQAALNIARSWLFLRSQEYKKYQTNKTTGNTDKRAFVETWQSFYRKKLKEVWKPAV

SEQ ID NO: 26682 - protein, 978 aa, synthetic construct
  REGION 1..978: note = engineered CasX variant
QEIKRINKIRRRLVKDSNTKKAGKTGPMKTLLVRVMTPDLRERLENLRKKPENIPQPISNTSRANLNKLLTDYTEMKKAILHVYWEEFQKDPVGLMSRVAQPASKKIDQNKLKPEMDEKGNLTTAGFACSQCGQPLFVYKLEQVSEKGKAYTNYFGRCNVAEHEKLILLAQLKPEKDSDEAVTYSLGKFGQRALDFYSIHVTKESTHPVKPLAQIAGNRYASGPVGKALSDACMGTIASFLSKYQDIIIEHQKVVKGNQKRLESLRELAGKENLEYPSVTLPPQPHTKEGVDAYNEVIARVRMWVNLNLWQKLKLSRDDAKPLLRLKGFPSFPLVERQANEVDWWDMVCNVKKLINEKKEDGKVFWQNLAGYKRQEALRPYLSSEEDRKKGKKFARYQLGDLLLHLEKKHGEDWGKVYDEAWERIDKKVEGLSKHIKLEEERRSEDAQSKAALTDWLRAKASFVIEGLKEADKDEFCRCELKLQKWYGDLRGKPFAIEAENSILDISGFSKQYNCAFIWQKDGVKKLNLYLIINYFKGGKLRFKKIKPEAFEANRFYTVINKKSGEIVPMEVNFNFDDPNLIILPLAFGKRQGREFIWNDLLSLETGSLKLANGRVIEKTLYNRRTRQDEPALFVALTFERREVLDSSNIKPMNLIGVDRGENIPAVIALTDPEGCPLSRFKDSLGNPTHFLRIGESYKEKQRTIQAKKEVEQRRAGGYSRKYASKAKNLADDMVRNTARDLLYYAVTQDAMLIFENLSRGFGRQGKRTFMAERQYTRMEDWLTAKLAYEGLPSKTYLSKTLAQYTSKTCSNCGFTITSADYDRVLEKLKKTATGWMTTINGKELKVEGQITYYNRYKRQNVVKDLSVELDRLSEESVNNDISSWTKGRSGEALSLLKKRFSHRPVQEKFVCLNCGFETHADEQAALNIARSWLFLRSQEYKKYQTNKTTGNTDKRAFVETWQSFYRKKLKEVWKPAV

SEQ ID NO: 26683 - protein, 978 aa, synthetic construct
  REGION 1..978: note = engineered CasX variant
QEIKRINKIRRRLVKDSNTKKAGKTGPMKTLLVRVMTPDLRERLENLRKKPENIPQPISNTSRANLNKLLTDYTEMKKAILHVYWEEFQKDPVGLMSRVAQPASKKIDQNKLKPEMDEKGNLTTAGFACSQCGQPLFVYKLEQVSEKGKAYTNYFGRCNVAEHEKLILLAQLKPEKDSDEAVTYSLGKFGQRALDFYSIHVTKESTHPVKPLAQIAGNRYASGPVGKALSDACMGTIASFLSKYQDIIIEHQKVVKGNQKRLESLRELAGKENLEYPSVTLPPQPHTKEGVDAYNEVIARVRMWVNLNLWQKLKLSRDDAKPLLRLKGFPSFPLVERQANEVDWWDMVCNVKKLINEKKEDGKVFWQNLAGYKRQEALRPYLSSEEDRKKGKKFARYQLGDLLLHLEKKHGEDWGKVYDEAWERIDKKVEGLSKHIKLEEERRSEDAQSKAALTDWLRAKASFVIEGLKEADKDEFCRCELKLQKWYGDLRGKPFAIEAENSILDISGFSKQYNCAFIWQKDGVKKLNLYLIINYFKGGKLRFKKIKPEAFEANRFYTVINKKSGEIVPMEVNFNFDDPNLIILPLAFGKRQGREFIWNDLLSLETGSLKLANGRVIEKTLYNRRTRQDEPALFVALTFERREVLDSSNIKPMNLIGVDRGENIPAVIALTDPEGCPLSRFKDSLGNPTHCLRIGESYKEKQRTIQAKKEVEQRRAGGYSRKYASKAKNLADDMVRNTARDLLYYAVTQDAMLIFENLSRGFGRQGKRTFMAERQYTRMEDWLTAKLAYEGLPSKTYLSKTLAQYTSKTCSNCGFTITSADYDRVLEKLKKTATGWMTTINGKELKVEGQITYYNRYKRQNVVKDLSVELDRLSEESVNNDISSWTKGRSGEALSLLKKRFSHRPVQEKFVCLNCGFETHADEQAALNIARSWLFLRSQEYKKYQTNKTTGNTDKRAFVETWQSFYRKKLKEVWKPAV

SEQ ID NO: 26684 - protein, 978 aa, synthetic construct
  REGION 1..978: note = engineered CasX variant
QEIKRINKIRRRLVKDSNTKKAGKTGPMKTLLVRVMTPDLRERLENLRKKPENIPQPISNTSRANLNKLLTDYTEMKKAILHVYWEEFQKDPVGLMSRVAQPASKKIDQNKLKPEMDEKGNLTTAGFACSQCGQPLFVYKLEQVSEKGKAYTNYFGRCNVAEHEKLILLAQLKPEKDSDEAVTYSLGKFGQRALDFYSIHVTKESTHPVKPLAQIAGNRYASGPVGKALSDACMGTIASFLSKYQDIIIEHQKVVKGNQKRLESLRELAGKENLEYPSVTLPPQPHTKEGVDAYNEVIARVRMWVNLNLWQKLKLSRDDAKPLLRLKGFPSFPLVERQANEVDWWDMVCNVKKLINEKKEDGKVFWQNLAGYKRQEALRPYLSSEEDRKKGKKFARYQLGDLLLHLEKKHGEDWGKVYDEAWERIDKKVEGLSKHIKLEEERRSEDAQSKAALTDWLRAKASFVIEGLKEADKDEFCRCELKLQKWYGDLRGKPFAIEAENSILDISGFSKQYNCAFIWQKDGVKKLNLYLIINYFKGGKLRFKKIKPEAFEANRFYTVINKKSGEIVPMEVNFNFDDPNLIILPLAFGKRQGREFIWNDLLSLETGSLKLANGRVIEKTLYNRRTRQDEPALFVALTFERREVLDSSNIKPMNLIGVDRGENIPAVIALTDPEGCPLSRFKDSLGNPTHCLRIGESYKEKQRTIQAKKEVEARRAGGYSRKYASKAKNLADDMVRNTARDLLYYAVTQDAMLIFENLSRGFGRQGKRTFMAERQYTRMEDWLTAKLAYEGLPSKTYLSKTLAQYTSKTCSNCGFTITSADYDRVLEKLKKTATGWMTTINGKELKVEGQITYYNRYKRQNVVKDLSVELDRLSEESVNNDISSWTKGRSGEALSLLKKRFSHRPVQEKFVCLNCGFETHADEQAALNIARSWLFLRSQEYKKYQTNKTTGNTDKRAFVETWQSFYRKKLKEVWKPAV

SEQ ID NO: 26685 - protein, 978 aa, synthetic construct
  REGION 1..978: note = engineered CasX variant
QEIKRINKIRRRLVKDSNTKKAGKTGPMKTLLVRVMTPDLRERLENLRKKPENIPQPISNTSRANLNKLLTDYTEMKKAILHVYWEEFQKDPVGLMSRVAQPASKKIDQNKLKPEMDEKGNLTTAGFACSQCGQPLFVYKLEQVSEKGKAYTNYFGRCNVAEHEKLILLAQLKPEKDSDEAVTYSLGKFGQRALDFYSIHVTKESTHPVKPLAQIAGNRYASGPVGKALSDACMGTIASFLSKYQDIIIEHQKVVKGNQKRLESLRELAGKENLEYPSVTLPPQPHTKEGVDAYNEVIARVRMWVNLNLWQKLKLSRDDAKPLLRLKGFPSFPLVERQANEVDWWDMVCNVKKLINEKKEDGKVFWQNLAGYKRQEALRPYLSSEEDRKKGKKFARYQLGDLLLHLEKKHGEDWGKVYDEAWERIDKKVEGLSKHIKLEEERRSEDAQSKAALTDWLRAKASFVIEGLKEADKDEFCRCELKLQKWYGDLRGKPFAIEAENSILDISGFSKQYNCAFIWQKDGVKKLNLYLIINYFKGGKLRFKKIKPEAFEANRFYTVINKKSGEIVPMEVNFNFDDPNLIILPLAFGKRQGREFIWNDLLSLETGSLKLANGRVIEKTLYNRRTRQDEPALFVALTFERREVLDSSNIKPMNLIGVDRGENIPAVIALTDPEGCPLSRFKDSLGNPTHCLRIGESYKEKQRTIQAFKEVEQRRAGGYSRKYASKAKNLADDMVRNTARDLLYYAVTQDAMLIFENLSRGFGRQGKRTFMAERQYTRMEDWLTAKLAYEGLPSKTYLSKTLAQYTSKTCSNCGFTITSADYDRVLEKLKKTATGWMTTINGKELKVEGQITYYNRYKRQNVVKDLSVELDRLSEESVNNDISSWTKGRSGEALSLLKKRFSHRPVQEKFVCLNCGFETHADEQAALNIARSWLFLRSQEYKKYQTNKTTGNTDKRAFVETWQSFYRKKLKEVWKPAV

SEQ ID NO: 26686 - protein, 978 aa, synthetic construct
  REGION 1..978: note = engineered CasX variant
QEIKRINKIRRRLVKDSNTKKAGKTGPMKTLLVRVMTPDLRERLENLRKKPENIPQPISNTSRANLNKLLTDYTEMKKAILHVYWEEFQKDPVGLMSRVAQPASKKIDQNKLKPEMDEKGNLTTAGFACSQCGQPLFVYKLEQVSEKGKAYTNYFGRCNVAEHEKLILLAQLKPEKDSDEAVTYSLGKFGQRALDFYSIHVTKESTHPVKPLAQIAGNRYASGPVGKALSDACMGTIASFLSKYQDIIIEHQKVVKGNQKRLESLRELAGKENLEYPSVTLPPQPHTKEGVDAYNEVIARVRMWVNLNLWQKLKLSRDDAKPLLRLKGFPSFPLVERQANEVDWWDMVCNVKKLINEKKEDGKVFWQNLAGYKRQEALRPYLSSEEDRKKGKKFARYQLGDLLLHLEKKHGEDWGKVYDEAWERIDKKVEGLSKHIKLEEERRSEDAQSKAALTDWLRAKASFVIEGLKEADKDEFCRCELKLQKWYGDLRGKPFAIEAENSILDISGFSKQYNCAFIWQKDGVKKLNLYLIINYFKGGKLRFKKIKPEAFEANRFYTVINKKSGEIVPMEVNFNFDDPNLIILPLAFGKRQGREFIWNDLLSLETGSLKLANGRVIEKTLYNRRTRQDEPALFVALTFERREVLDSSNIKPMNLIGVDRGENIPAVIALTDPEGCPLSRFKDSLGNPTHCLRIGESYKEKQRTIQAFKEVEARRAGGYSRKYASKAKNLADDMVRNTARDLLYYAVTQDAMLIFENLSRGFGRQGKRTFMAERQYTRMEDWLTAKLAYEGLPSKTYLSKTLAQYTSKTCSNCGFTITSADYDRVLEKLKKTATGWMTTINGKELKVEGQITYYNRYKRQNVVKDLSVELDRLSEESVNNDISSWTKGRSGEALSLLKKRFSHRPVQEKFVCLNCGFETHADEQAALNIARSWLFLRSQEYKKYQTNKTTGNTDKRAFVETWQSFYRKKLKEVWKPAV

SEQ ID NO: 26687 - protein, 978 aa, synthetic construct
  REGION 1..978: note = engineered CasX variant
QEIKRINKIRRRLVKDSNTKKAGKTGPMKTLLVRVMTPDLRERLENLRKKPENIPQPISNTSRANLNKLLTDYTEMKKAILHVYWEEFQKDPVGLMSRVAQPASKKIDQNKLKPEMDEKGNLTTAGFACSQCGQPLFVYKLEQVSEKGKAYTNYFGRCNVAEHEKLILLAQLKPEKDSDEAVTYSLGKFGQRALDFYSIHVTKESTHPVKPLAQIAGNRYASGPVGKALSDACMGTIASFLSKYQDIIIEHQKVVKGNQKRLESLRELAGKENLEYPSVTLPPQPHTKEGVDAYNEVIARVRMWVNLNLWQKLKLSRDDAKPLLRLKGFPSFPLVERQANEVDWWDMVCNVKKLINEKKEDGKVFWQNLAGYKRQEALRPYLSSEEDRKKGKKFARYQLGDLLLHLEKKHGEDWGKVYDEAWERIDKKVEGLSKHIKLEEERRSEDAQSKAALTDWLRAKASFVIEGLKEADKDEFCRCELKLQKWYGDLRGKPFAIEAENSILDISGFSKQYNCAFIWQKDGVKKLNLYLIINYFKGGKLRFKKIKPEAFEANRFYTVINKKSGEIVPMEVNFNFDDPNLIILPLAFGKRQGREFIWNDLLSLETGSLKLANGRVIEKTLYNRRTRQDEPALFVALTFERREVLDSSNIKPMNLIGVDRGENIPAVIALTDPEGCPLSRFKDSLGNPTHCLRIGESYKEKQRTIFAKKEVEQRRAGGYSRKYASKAKNLADDMVRNTARDLLYYAVTQDAMLIFENLSRGFGRQGKRTFMAERQYTRMEDWLTAKLAYEGLPSKTYLSKTLAQYTSKTCSNCGFTITSADYDRVLEKLKKTATGWMTTINGKELKVEGQITYYNRYKRQNVVKDLSVELDRLSEESVNNDISSWTKGRSGEALSLLKKRFSHRPVQEKFVCLNCGFETHADEQAALNIARSWLFLRSQEYKKYQTNKTTGNTDKRAFVETWQSFYRKKLKEVWKPAV

SEQ ID NO: 26688 - protein, 978 aa, synthetic construct
  REGION 1..978: note = engineered CasX variant
QEIKRINKIRRRLVKDSNTKKAGKTGPMKTLLVRVMTPDLRERLENLRKKPENIPQPISNTSRANLNKLLTDYTEMKKAILHVYWEEFQKDPVGLMSRVAQPASKKIDQNKLKPEMDEKGNLTTAGFACSQCGQPLFVYKLEQVSEKGKAYTNYFGRCNVAEHEKLILLAQLKPEKDSDEAVTYSLGKFGQRALDFYSIHVTKESTHPVKPLAQIAGNRYASGPVGKALSDACMGTIASFLSKYQDIIIEHQKVVKGNQKRLESLRELAGKENLEYPSVTLPPQPHTKEGVDAYNEVIARVRMWVNLNLWQKLKLSRDDAKPLLRLKGFPSFPLVERQANEVDWWDMVCNVKKLINEKKEDGKVFWQNLAGYKRQEALRPYLSSEEDRKKGKKFARYQLGDLLLHLEKKHGEDWGKVYDEAWERIDKKVEGLSKHIKLEEERRSEDAQSKAALTDWLRAKASFVIEGLKEADKDEFCRCELKLQKWYGDLRGKPFAIEAENSILDISGFSKQYNCAFIWQKDGVKKLNLYLIINYFKGGKLRFKKIKPEAFEANRFYTVINKKSGEIVPMEVNFNFDDPNLIILPLAFGKRQGREFIWNDLLSLETGSLKLANGRVIEKTLYNRRTRQDEPALFVALTFERREVLDSSNIKPMNLIGVDRGENIPAVIALTDPEGCPLSRFKDSLGNPTHCLRIGESFKEKQRTIQAKKEVEQRRAGGYSRKYASKAKNLADDMVRNTARDLLYYAVTQDAMLIFENLSRGFGRQGKRTFMAERQYTRMEDWLTAKLAYEGLPSKTYLSKTLAQYTSKTCSNCGFTITSADYDRVLEKLKKTATGWMTTINGKELKVEGQITYYNRYKRQNVVKDLSVELDRLSEESVNNDISSWTKGRSGEALSLLKKRFSHRPVQEKFVCLNCGFETHADEQAALNIARSWLFLRSQEYKKYQTNKTTGNTDKRAFVETWQSFYRKKLKEVWKPAV

SEQ ID NO: 26689 - protein, 978 aa, synthetic construct
  REGION 1..978: note = engineered CasX variant
QEIKRINKIRRRLVKDSNTKKAGKTGPMKTLLVRVMTPDLRERLENLRKKPENIPQPISNTSRANLNKLLTDYTEMKKAILHVYWEEFQKDPVGLMSRVAQPASKKIDQNKLKPEMDEKGNLTTAGFACSQCGQPLFVYKLEQVSEKGKAYTNYFGRCNVAEHEKLILLAQLKPEKDSDEAVTYSLGKFGQRALDFYSIHVTKESTHPVKPLAQIAGNRYASGPVGKALSDACMGTIASFLSKYQDIIIEHQKVVKGNQKRLESLRELAGKENLEYPSVTLPPQPHTKEGVDAYNEVIARVRMWVNLNLWQKLKLSRDDAKPLLRLKGFPSFPLVERQANEVDWWDMVCNVKKLINEKKEDGKVFWQNLAGYKRQEALRPYLSSEEDRKKGKKFARYQLGDLLLHLEKKHGEDWGKVYDEAWERIDKKVEGLSKHIKLEEERRSEDAQSKAALTDWLRAKASFVIEGLKEADKDEFCRCELKLQKWYGDLRGKPFAIEAENSILDISGFSKQYNCAFIWQKDGVKKLNLYLIINYFKGGKLRFKKIKPEAFEANRFYTVINKKSGEIVPMEVNFNFDDPNLIILPLAFGKRQGREFIWNDLLSLETGSLKLANGRVIEKTLYNRRTRQDEPALFVALTFERREVLDSSNIKPMNLIGVDRGENIPAVIALTDPEGCPLSRFKDSLGNPTFILRIGESYKIKQRTIQAKKEVEQRRAGGYSRKYASKAKNLADDMVRNTARDLLYYAVTQDAMLIFENLSRGFGRQGKRTFMAERQYTRMEDWLTAKLAYEGLPSKTYLSKTLAQYTSKTCSNCGFTITSADYDRVLEKLKKTATGWMTTINGKELKVEGQITYYNRYKRQNVVKDLSVELDRLSEESVNNDISSWTKGRSGEALSLLKKRFSHRPVQEKFVCLNCGFETHADEQAALNIARSWLFLRSQEYKKYQTNKTTGNTDKRAFVETWQSFYRKKLKEVWKPAV

SEQ ID NO: 26690 - protein, 978 aa, synthetic construct
  REGION 1..978: note = engineered CasX variant
QEIKRINKIRRRLVKDSNTKKAGKTGPMKTLLVRVMTPDLRERLENLRKKPENIPQPISNTSRANLNKLLTDYTEMKKAILHVYWEEFQKDPVGLMSRVAQPASKKIDQNKLKPEMDEKGNLTTAGFACSQCGQPLFVYKLEQVSEKGKAYTNYFGRCNVAEHEKLILLAQLKPEKDSDEAVTYSLGKFGQRALDFYSIHVTKESTHPVKPLAQIAGNRYASGPVGKALSDACMGTIASFLSKYQDIIIEHQKVVKGNQKRLESLRELAGKENLEYPSVTLPPQPHTKEGVDAYNEVIARVRMWVNLNLWQKLKLSRDDAKPLLRLKGFPSFPLVERQANEVDWWDMVCNVKKLINEKKEDGKVFWQNLAGYKRQEALRPYLSSEEDRKKGKKFARYQLGDLLLHLEKKHGEDWGKVYDEAWERIDKKVEGLSKHIKLEEERRSEDAQSKAALTDWLRAKASFVIEGLKEADKDEFCRCELKLQKWYGDLRGKPFAIEAENSILDISGFSKQYNCAFIWQKDGVKKLNLYLIINYFKGGKLRFKKIKPEAFEANRFYTVINKKSGEIVPMEVNFNFDDPNLIILPLAFGKRQGREFIWNDLLSLETGSLKLANGRVIEKTLYNRRTRQDEPALFVALTFERREVLDSSNIKPMNLIGVDRGENIPAVIALTDPEGCPLSRFKDSLGNPTFILRIGESYKHKQRTIQAKKEVEQRRAGGYSRKYASKAKNLADDMVRNTARDLLYYAVTQDAMLIFENLSRGFGRQGKRTFMAERQYTRMEDWLTAKLAYEGLPSKTYLSKTLAQYTSKTCSNCGFTITSADYDRVLEKLKKTATGWMTTINGKELKVEGQITYYNRYKRQNVVKDLSVELDRLSEESVNNDISSWTKGRSGEALSLLKKRFSHRPVQEKFVCLNCGFETHADEQAALNIARSWLFLRSQEYKKYQTNKTTGNTDKRAFVETWQSFYRKKLKEVWKPAV

SEQ ID NO: 26691 - protein, 978 aa, synthetic construct
  REGION 1..978: note = engineered CasX variant
QEIKRINKIRRRLVKDSNTKKAGKTGPMKTLLVRVMTPDLRERLENLRKKPENIPQPISNTSRANLNKLLTDYTEMKKAILHVYWEEFQKDPVGLMSRVAQPASKKIDQNKLKPEMDEKGNLTTAGFACSQCGQPLFVYKLEQVSEKGKAYTNYFGRCNVAEHEKLILLAQLKPEKDSDEAVTYSLGKFGQRALDFYSIHVTKESTHPVKPLAQIAGNRYASGPVGKALSDACMGTIASFLSKYQDIIIEHQKVVKGNQKRLESLRELAGKENLEYPSVTLPPQPHTKEGVDAYNEVIARVRMWVNLNLWQKLKLSRDDAKPLLRLKGFPSFPLVERQANEVDWWDMVCNVKKLINEKKEDGKVFWQNLAGYKRQEALRPYLSSEEDRKKGKKFARYQLGDLLLHLEKKHGEDWGKVYDEAWERIDKKVEGLSKHIKLEEERRSEDAQSKAALTDWLRAKASFVIEGLKEADKDEFCRCELKLQKWYGDLRGKPFAIEAENSILDISGFSKQYNCAFIWQKDGVKKLNLYLIINYFKGGKLRFKKIKPEAFEANRFYTVINKKSGEIVPMEVNFNFDDPNLIILPLAFGKRQGREFIWNDLLSLETGSLKLANGRVIEKTLYNRRTRQDEPALFVALTFERREVLDSSNIKPMNLIGVDRGENIPAVIALTDPEGCPLSRFKDSLGNPTFILRIGESYKEVQRTIQAKKEVEQRRAGGYSRKYASKAKNLADDMVRNTARDLLYYAVTQDAMLIFENLSRGFGRQGKRTFMAERQYTRMEDWLTAKLAYEGLPSKTYLSKTLAQYTSKTCSNCGFTITSADYDRVLEKLKKTATGWMTTINGKELKVEGQITYYNRYKRQNVVKDLSVELDRLSEESVNNDISSWTKGRSGEALSLLKKRFSHRPVQEKFVCLNCGFETHADEQAALNIARSWLFLRSQEYKKYQTNKTTGNTDKRAFVETWQSFYRKKLKEVWKPAV

SEQ ID NO: 26692 - protein, 978 aa, synthetic construct
  REGION 1..978: note = engineered CasX variant
QEIKRINKIRRRLVKDSNTKKAGKTGPMKTLLVRVMTPDLRERLENLRKKPENIPQPISNTSRANLNKLLTDYTEMKKAILHVYWEEFQKDPVGLMSRVAQPASKKIDQNKLKPEMDEKGNLTTAGFACSQCGQPLFVYKLEQVSEKGKAYTNYFGRCNVAEHEKLILLAQLKPEKDSDEAVTYSLGKFGQRALDFYSIHVTKESTHPVKPLAQIAGNRYASGPVGKALSDACMGTIASFLSKYQDIIIEHQKVVKGNQKRLESLRELAGKENLEYPSVTLPPQPHTKEGVDAYNEVIARVRMWVNLNLWQKLKLSRDDAKPLLRLKGFPSFPLVERQANEVDWWDMVCNVKKLINEKKEDGKVFWQNLAGYKRQEALRPYLSSEEDRKKGKKFARYQLGDLLLHLEKKHGEDWGKVYDEAWERIDKKVEGLSKHIKLEEERRSEDAQSKAALTDWLRAKASFVIEGLKEADKDEFCRCELKLQKWYGDLRGKPFAIEAENSILDISGFSKQYNCAFIWQKDGVKKLNLYLIINYFKGGKLRFKKIKPEAFEANRFYTVINKKSGEIVPMEVNFNFDDPNLIILPLAFGKRQGREFIWNDLLSLETGSLKLANGRVIEKTLYNRRTRQDEPALFVALTFERREVLDSSNIKPMNLIGVDRGENIPAVIALTDPEGCPLSRFKDSLGNPTFILRIGESYKEKQRTIQAKKEVEQRRAGGYSRKYASKAKNLADDMVRNTARDLLYYAVTQDAMLIFENLSRGFGRQGKRTFMAERQYTRMEDWLTAKLAYEGLPSKTYLSKTLAQYTSKTCSNCGFTITSADYDRVLEKLKKTATGWMTTINGKELKVEGQITYYNRYKRQNVVKDLSVELDRLSEESVNNDISSWTKGRSGEALSLLKKRFSHRPVQEKFVCLNCGFETHADEQAALNIARSWLFLRSQEYKKYQTNKTTGNTDKRAFVETWQSFYRKKLKEVWKPAV

SEQ ID NO: 26693 - protein, 978 aa, synthetic construct
  REGION 1..978: note = engineered CasX variant
QEIKRINKIRRRLVKDSNTKKAGKTGPMKTLLVRVMTPDLRERLENLRKKPENIPQPISNTSRANLNKLLTDYTEMKKAILHVYWEEFQKDPVGLMSRVAQPASKKIDQNKLKPEMDEKGNLTTAGFACSQCGQPLFVYKLEQVSEKGKAYTNYFGRCNVAEHEKLILLAQLKPEKDSDEAVTYSLGKFGQRALDFYSIHVTKESTHPVKPLAQIAGNRYASGPVGKALSDACMGTIASFLSKYQDIIIEHQKVVKGNQKRLESLRELAGKENLEYPSVTLPPQPHTKEGVDAYNEVIARVRMWVNLNLWQKLKLSRDDAKPLLRLKGFPSFPLVERQANEVDWWDMVCNVKKLINEKKEDGKVFWQNLAGYKRQEALRPYLSSEEDRKKGKKFARYQLGDLLLHLEKKHGEDWGKVYDEAWERIDKKVEGLSKHIKLEEERRSEDAQSKAALTDWLRAKASFVIEGLKEADKDEFCRCELKLQKWYGDLRGKPFAIEAENSILDISGFSKQYNCAFIWQKDGVKKLNLYLIINYFKGGKLRFKKIKPEAFEANRFYTVINKKSGEIVPMEVNFNFDDPNLIILPLAFGKRQGREFIWNDLLSLETGSLKLANGRVIEKTLYNRRTRQDEPALFVALTFERREVLDSSNIKPMNLIGVDRGENIPAVIALTDPEGCPLSRFKDSLGNPTFILRIGESYKEKQRTIQAKKEVCQRRAGGYSRKYASKAKNLADDMVRNTARDLLYYAVTQDAMLIFENLSRGFGRQGKRTFMAERQYTRMEDWLTAKLAYEGLPSKTYLSKTLAQYTSKTCSNCGFTITSADYDRVLEKLKKTATGWMTTINGKELKVEGQITYYNRYKRQNVVKDLSVELDRLSEESVNNDISSWTKGRSGEALSLLKKRFSHRPVQEKFVCLNCGFETHADEQAALNIARSWLFLRSQEYKKYQTNKTTGNTDKRAFVETWQSFYRKKLKEVWKPAV

SEQ ID NO: 26694 - protein, 978 aa, synthetic construct
  REGION 1..978: note = engineered CasX variant
QEIKRINKIRRRLVKDSNTKKAGKTGPMKTLLVRVMTPDLRERLENLRKKPENIPQPISNTSRANLNKLLTDYTEMKKAILHVYWEEFQKDPVGLMSRVAQPASKKIDQNKLKPEMDEKGNLTTAGFACSQCGQPLFVYKLEQVSEKGKAYTNYFGRCNVAEHEKLILLAQLKPEKDSDEAVTYSLGKFGQRALDFYSIHVTKESTHPVKPLAQIAGNRYASGPVGKALSDACMGTIASFLSKYQDIIIEHQKVVKGNQKRLESLRELAGKENLEYPSVTLPPQPHTKEGVDAYNEVIARVRMWVNLNLWQKLKLSRDDAKPLLRLKGFPSFPLVERQANEVDWWDMVCNVKKLINEKKEDGKVFWQNLAGYKRQEALRPYLSSEEDRKKGKKFARYQLGDLLLHLEKKHGEDWGKVYDEAWERIDKKVEGLSKHIKLEEERRSEDAQSKAALTDWLRAKASFVIEGLKEADKDEFCRCELKLQKWYGDLRGKPFAIEAENSILDISGFSKQYNCAFIWQKDGVKKLNLYLIINYFKGGKLRFKKIKPEAFEANRFYTVINKKSGEIVPMEVNFNFDDPNLIILPLAFGKRQGREFIWNDLLSLETGSLKLANGRVIEKTLYNRRTRQDEPALFVALTFERREVLDSSNIKPMNLIGVDRGENIPAVIALTDPEGCPLSRFKDSLGNPTFILRIGESYKEKQKTIQAKKEVEQRRAGGYSRKYASKAKNLADDMVRNTARDLLYYAVTQDAMLIFENLSRGFGRQGKRTFMAERQYTRMEDWLTAKLAYEGLPSKTYLSKTLAQYTSKTCSNCGFTITSADYDRVLEKLKKTATGWMTTINGKELKVEGQITYYNRYKRQNVVKDLSVELDRLSEESVNNDISSWTKGRSGEALSLLKKRFSHRPVQEKFVCLNCGFETHADEQAALNIARSWLFLRSQEYKKYQTNKTTGNTDKRAFVETWQSFYRKKLKEVWKPAV

SEQ ID NO: 26695 - protein, 978 aa, synthetic construct
  REGION 1..978: note = engineered CasX variant
QEIKRINKIRRRLVKDSNTKKAGKTGPMKTLLVRVMTPDLRERLENLRKKPENIPQPISNTSRANLNKLLTDYTEMKKAILHVYWEEFQKDPVGLMSRVAQPASKKIDQNKLKPEMDEKGNLTTAGFACSQCGQPLFVYKLEQVSEKGKAYTNYFGRCNVAEHEKLILLAQLKPEKDSDEAVTYSLGKFGQRALDFYSIHVTKESTHPVKPLAQIAGNRYASGPVGKALSDACMGTIASFLSKYQDIIIEHQKVVKGNQKRLESLRELAGKENLEYPSVTLPPQPHTKEGVDAYNEVIARVRMWVNLNLWQKLKLSRDDAKPLLRLKGFPSFPLVERQANEVDWWDMVCNVKKLINEKKEDGKVFWQNLAGYKRQEALRPYLSSEEDRKKGKKFARYQLGDLLLHLEKKHGEDWGKVYDEAWERIDKKVEGLSKHIKLEEERRSEDAQSKAALTDWLRAKASFVIEGLKEADKDEFCRCELKLQKWYGDLRGKPFAIEAENSILDISGFSKQYNCAFIWQKDGVKKLNLYLIINYFKGGKLRFKKIKPEAFEANRFYTVINKKSGEIVPMEVNFNFDDPNLIILPLAFGKRQGREFIWNDLLSLETGSLKLANGRVIEKTLYNRRTRQDEPALFVALTFERREVLDSSNIKPMNLIGVDRGENIPAVIALTDPEGCPLSRFKDSLGNPTFILRIGESYKEKGRTIQAKKEVEQRRAGGYSRKYASKAKNLADDMVRNTARDLLYYAVTQDAMLIFENLSRGFGRQGKRTFMAERQYTRMEDWLTAKLAYEGLPSKTYLSKTLAQYTSKTCSNCGFTITSADYDRVLEKLKKTATGWMTTINGKELKVEGQITYYNRYKRQNVVKDLSVELDRLSEESVNNDISSWTKGRSGEALSLLKKRFSHRPVQEKFVCLNCGFETHADEQAALNIARSWLFLRSQEYKKYQTNKTTGNTDKRAFVETWQSFYRKKLKEVWKPAV

SEQ ID NO: 26696 - protein, 978 aa, synthetic construct
  REGION 1..978: note = engineered CasX variant
QEIKRINKIRRRLVKDSNTKKAGKTGPMKTLLVRVMTPDLRERLENLRKKPENIPQPISNTSRANLNKLLTDYTEMKKAILHVYWEEFQKDPVGLMSRVAQPASKKIDQNKLKPEMDEKGNLTTAGFACSQCGQPLFVYKLEQVSEKGKAYTNYFGRCNVAEHEKLILLAQLKPEKDSDEAVTYSLGKFGQRALDFYSIHVTKESTHPVKPLAQIAGNRYASGPVGKALSDACMGTIASFLSKYQDIIIEHQKVVKGNQKRLESLRELAGKENLEYPSVTLPPQPHTKEGVDAYNEVIARVRMWVNLNLWQKLKLSRDDAKPLLRLKGFPSFPLVERQANEVDWWDMVCNVKKLINEKKEDGKVFWQNLAGYKRQEALRPYLSSEEDRKKGKKFARYQLGDLLLHLEKKHGEDWGKVYDEAWERIDKKVEGLSKHIKLEEERRSEDAQSKAALTDWLRAKASFVIEGLKEADKDEFCRCELKLQKWYGDLRGKPFAIEAENSILDISGFSKQYNCAFIWQKDGVKKLNLYLIINYFKGGKLRFKKIKPEAFEANRFYTVINKKSGEIVPMEVNFNFDDPNLIILPLAFGKRQGREFIWNDLLSLETGSLKLANGRVIEKTLYNRRTRQDEPALFVALTFERREVLDSSNIKPMNLIGVDRGENIPAVIALTDPEGCPLSRFKDSLGNPTFILRIGESYKEHQRTIQAKKEVEQRRAGGYSRKYASKAKNLADDMVRNTARDLLYYAVTQDAMLIFENLSRGFGRQGKRTFMAERQYTRMEDWLTAKLAYEGLPSKTYLSKTLAQYTSKTCSNCGFTITSADYDRVLEKLKKTATGWMTTINGKELKVEGQITYYNRYKRQNVVKDLSVELDRLSEESVNNDISSWTKGRSGEALSLLKKRFSHRPVQEKFVCLNCGFETHADEQAALNIARSWLFLRSQEYKKYQTNKTTGNTDKRAFVETWQSFYRKKLKEVWKPAV

SEQ ID NO: 26697 - protein, 978 aa, synthetic construct
  REGION 1..978: note = engineered CasX variant
QEIKRINKIRRRLVKDSNTKKAGKTGPMKTLLVRVMTPDLRERLENLRKKPENIPQPISNTSRANLNKLLTDYTEMKKAILHVYWEEFQKDPVGLMSRVAQPASKKIDQNKLKPEMDEKGNLTTAGFACSQCGQPLFVYKLEQVSEKGKAYTNYFGRCNVAEHEKLILLAQLKPEKDSDEAVTYSLGKFGQRALDFYSIHVTKESTHPVKPLAQIAGNRYASGPVGKALSDACMGTIASFLSKYQDIIIEHQKVVKGNQKRLESLRELAGKENLEYPSVTLPPQPHTKEGVDAYNEVIARVRMWVNLNLWQKLKLSRDDAKPLLRLKGFPSFPLVERQANEVDWWDMVCNVKKLINEKKEDGKVFWQNLAGYKRQEALRPYLSSEEDRKKGKKFARYQLGDLLLHLEKKHGEDWGKVYDEAWERIDKKVEGLSKHIKLEEERRSEDAQSKAALTDWLRAKASFVIEGLKEADKDEFCRCELKLQKWYGDLRGKPFAIEAENSILDISGFSKQYNCAFIWQKDGVKKLNLYLIINYFKGGKLRFKKIKPEAFEANRFYTVINKKSGEIVPMEVNFNFDDPNLIILPLAFGKRQGREFIWNDLLSLETGSLKLANGRVIEKTLYNRRTRQDEPALFVALTFERREVLDSSNIKPMNLIGVDRGENIPAVIALTDPEGCPLSRFKDSLGNNTHILRLGESYKEKQRTIQAKKEVEQRRAGGYSRKYASKAKNLADDMVRNTARDLLYYAVTQDAMLIFENLSRGFGRQGKRTFMAERQYTRMEDWLTAKLAYEGLPSKTYLSKTLAQYTSKTCSNCGFTITSADYDRVLEKLKKTATGWMTTINGKELKVEGQITYYNRYKRQNVVKDLSVELDRLSEESVNNDISSWTKGRSGEALSLLKKRFSHRPVQEKFVCLNCGFETHADEQAALNIARSWLFLRSQEYKKYQTNKTTGNTDKRAFVETWQSFYRKKLKEVWKPAV

SEQ ID NO: 26698 - protein, 978 aa, synthetic construct
  REGION 1..978: note = engineered CasX variant
QEIKRINKIRRRLVKDSNTKKAGKTGPMKTLLVRVMTPDLRERLENLRKKPENIPQPISNTSRANLNKLLTDYTEMKKAILHVYWEEFQKDPVGLMSRVAQPASKKIDQNKLKPEMDEKGNLTTAGFACSQCGQPLFVYKLEQVSEKGKAYTNYFGRCNVAEHEKLILLAQLKPEKDSDEAVTYSLGKFGQRALDFYSIHVTKESTHPVKPLAQIAGNRYASGPVGKALSDACMGTIASFLSKYQDIIIEHQKVVKGNQKRLESLRELAGKENLEYPSVTLPPQPHTKEGVDAYNEVIARVRMWVNLNLWQKLKLSRDDAKPLLRLKGFPSFPLVERQANEVDWWDMVCNVKKLINEKKEDGKVFWQNLAGYKRQEALRPYLSSEEDRKKGKKFARYQLGDLLLHLEKKHGEDWGKVYDEAWERIDKKVEGLSKHIKLEEERRSEDAQSKAALTDWLRAKASFVIEGLKEADKDEFCRCELKLQKWYGDLRGKPFAIEAENSILDISGFSKQYNCAFIWQKDGVKKLNLYLIINYFKGGKLRFKKIKPEAFEANRFYTVINKKSGEIVPMEVNFNFDDPNLIILPLAFGKRQGREFIWNDLLSLETGSLKLANGRVIEKTLYNRRTRQDEPALFVALTFERREVLDSSNIKPMNLIGVDRGENIPAVIALTDPEGCPLSRFKDSLGNNTHILRIGESYKEKQRTIQAYKEVEQRRAGGYSRKYASKAKNLADDMVRNTARDLLYYAVTQDAMLIFENLSRGFGRQGKRTFMAERQYTRMEDWLTAKLAYEGLPSKTYLSKTLAQYTSKTCSNCGFTITSADYDRVLEKLKKTATGWMTTINGKELKVEGQITYYNRYKRQNVVKDLSVELDRLSEESVNNDISSWTKGRSGEALSLLKKRFSHRPVQEKFVCLNCGFETHADEQAALNIARSWLFLRSQEYKKYQTNKTTGNTDKRAFVETWQSFYRKKLKEVWKPAV

SEQ ID NO: 26699 - protein, 978 aa, synthetic construct
  REGION 1..978: note = engineered CasX variant
QEIKRINKIRRRLVKDSNTKKAGKTGPMKTLLVRVMTPDLRERLENLRKKPENIPQPISNTSRANLNKLLTDYTEMKKAILHVYWEEFQKDPVGLMSRVAQPASKKIDQNKLKPEMDEKGNLTTAGFACSQCGQPLFVYKLEQVSEKGKAYTNYFGRCNVAEHEKLILLAQLKPEKDSDEAVTYSLGKFGQRALDFYSIHVTKESTHPVKPLAQIAGNRYASGPVGKALSDACMGTIASFLSKYQDIIIEHQKVVKGNQKRLESLRELAGKENLEYPSVTLPPQPHTKEGVDAYNEVIARVRMWVNLNLWQKLKLSRDDAKPLLRLKGFPSFPLVERQANEVDWWDMVCNVKKLINEKKEDGKVFWQNLAGYKRQEALRPYLSSEEDRKKGKKFARYQLGDLLLHLEKKHGEDWGKVYDEAWERIDKKVEGLSKHIKLEEERRSEDAQSKAALTDWLRAKASFVIEGLKEADKDEFCRCELKLQKWYGDLRGKPFAIEAENSILDISGFSKQYNCAFIWQKDGVKKLNLYLIINYFKGGKLRFKKIKPEAFEANRFYTVINKKSGEIVPMEVNFNFDDPNLIILPLAFGKRQGREFIWNDLLSLETGSLKLANGRVIEKTLYNRRTRQDEPALFVALTFERREVLDSSNIKPMNLIGVDRGENIPAVIALTDPEGCPLSRFKDSLGNNTHILRIGESYKEKQRTIQAKKEVEQRRAGGYSRKYASKAKNLADDMVRNTARDLLYYAVTQDAMLIFENLSRGFGRQGKRTFMAERQYTRMEDWLTAKLAYEGLPSKTYLSKTLAQYTSKTCSNCGFTITSADYDRVLEKLKKTATGWMTTINGKELKVEGQITYYNRYKRQNVVKDLSVELDRLSEESVNNDISSWTKGRSGEALSLLKKRFSHRPVQEKFVCLNCGFETHADEQAALNIARSWLFLRSQEYKKYQTNKTTGNTDKRAFVETWQSFYRKKLKEVWKPAV

SEQ ID NO: 26700 - protein, 978 aa, synthetic construct
  REGION 1..978: note = engineered CasX variant
QEIKRINKIRRRLVKDSNTKKAGKTGPMKTLLVRVMTPDLRERLENLRKKPENIPQPISNTSRANLNKLLTDYTEMKKAILHVYWEEFQKDPVGLMSRVAQPASKKIDQNKLKPEMDEKGNLTTAGFACSQCGQPLFVYKLEQVSEKGKAYTNYFGRCNVAEHEKLILLAQLKPEKDSDEAVTYSLGKFGQRALDFYSIHVTKESTHPVKPLAQIAGNRYASGPVGKALSDACMGTIASFLSKYQDIIIEHQKVVKGNQKRLESLRELAGKENLEYPSVTLPPQPHTKEGVDAYNEVIARVRMWVNLNLWQKLKLSRDDAKPLLRLKGFPSFPLVERQANEVDWWDMVCNVKKLINEKKEDGKVFWQNLAGYKRQEALRPYLSSEEDRKKGKKFARYQLGDLLLHLEKKHGEDWGKVYDEAWERIDKKVEGLSKHIKLEEERRSEDAQSKAALTDWLRAKASFVIEGLKEADKDEFCRCELKLQKWYGDLRGKPFAIEAENSILDISGFSKQYNCAFIWQKDGVKKLNLYLIINYFKGGKLRFKKIKPEAFEANRFYTVINKKSGEIVPMEVNFNFDDPNLIILPLAFGKRQGREFIWNDLLSLETGSLKLANGRVIEKTLYNRRTRQDEPALFVALTFERREVLDSSNIKPMNLIGVDRGENIPAVIALTDPEGCPLSRFKDSLGNNTHILRIGESYKEKQRTIQAKKEVEQRPAGGYSRKYASKAKNLADDMVRNTARDLLYYAVTQDAMLIFENLSRGFGRQGKRTFMAERQYTRMEDWLTAKLAYEGLPSKTYLSKTLAQYTSKTCSNCGFTITSADYDRVLEKLKKTATGWMTTINGKELKVEGQITYYNRYKRQNVVKDLSVELDRLSEESVNNDISSWTKGRSGEALSLLKKRFSHRPVQEKFVCLNCGFETHADEQAALNIARSWLFLRSQEYKKYQTNKTTGNTDKRAFVETWQSFYRKKLKEVWKPAV

SEQ ID NO: 26701 - protein, 978 aa, synthetic construct
  REGION 1..978: note = engineered CasX variant
QEIKRINKIRRRLVKDSNTKKAGKTGPMKTLLVRVMTPDLRERLENLRKKPENIPQPISNTSRANLNKLLTDYTEMKKAILHVYWEEFQKDPVGLMSRVAQPASKKIDQNKLKPEMDEKGNLTTAGFACSQCGQPLFVYKLEQVSEKGKAYTNYFGRCNVAEHEKLILLAQLKPEKDSDEAVTYSLGKFGQRALDFYSIHVTKESTHPVKPLAQIAGNRYASGPVGKALSDACMGTIASFLSKYQDIIIEHQKVVKGNQKRLESLRELAGKENLEYPSVTLPPQPHTKEGVDAYNEVIARVRMWVNLNLWQKLKLSRDDAKPLLRLKGFPSFPLVERQANEVDWWDMVCNVKKLINEKKEDGKVFWQNLAGYKRQEALRPYLSSEEDRKKGKKFARYQLGDLLLHLEKKHGEDWGKVYDEAWERIDKKVEGLSKHIKLEEERRSEDAQSKAALTDWLRAKASFVIEGLKEADKDEFCRCELKLQKWYGDLRGKPFAIEAENSILDISGFSKQYNCAFIWQKDGVKKLNLYLIINYFKGGKLRFKKIKPEAFEANRFYTVINKKSGEIVPMEVNFNFDDPNLIILPLAFGKRQGREFIWNDLLSLETGSLKLANGRVIEKTLYNRRTRQDEPALFVALTFERREVLDSSNIKPMNLIGVDRGENIPAVIALTDPEGCPLSRFKDSLGNMTHILRIGESYKEKQRTIQAKKEVEQRRAGGYSRKYASKAKNLADDMVRNTARDLLYYAVTQDAMLIFENLSRGFGRQGKRTFMAERQYTRMEDWLTAKLAYEGLPSKTYLSKTLAQYTSKTCSNCGFTITSADYDRVLEKLKKTATGWMTTINGKELKVEGQITYYNRYKRQNVVKDLSVELDRLSEESVNNDISSWTKGRSGEALSLLKKRFSHRPVQEKFVCLNCGFETHADEQAALNIARSWLFLRSQEYKKYQTNKTTGNTDKRAFVETWQSFYRKKLKEVWKPAV

SEQ ID NO: 26702 - protein, 978 aa, synthetic construct
  REGION 1..978: note = engineered CasX variant
QEIKRINKIRRRLVKDSNTKKAGKTGPMKTLLVRVMTPDLRERLENLRKKPENIPQPISNTSRANLNKLLTDYTEMKKAILHVYWEEFQKDPVGLMSRVAQPASKKIDQNKLKPEMDEKGNLTTAGFACSQCGQPLFVYKLEQVSEKGKAYTNYFGRCNVAEHEKLILLAQLKPEKDSDEAVTYSLGKFGQRALDFYSIHVTKESTHPVKPLAQIAGNRYASGPVGKALSDACMGTIASFLSKYQDIIIEHQKVVKGNQKRLESLRELAGKENLEYPSVTLPPQPHTKEGVDAYNEVIARVRMWVNLNLWQKLKLSRDDAKPLLRLKGFPSFPLVERQANEVDWWDMVCNVKKLINEKKEDGKVFWQNLAGYKRQEALRPYLSSEEDRKKGKKFARYQLGDLLLHLEKKHGEDWGKVYDEAWERIDKKVEGLSKHIKLEEERRSEDAQSKAALTDWLRAKASFVIEGLKEADKDEFCRCELKLQKWYGDLRGKPFAIEAENSILDISGFSKQYNCAFIWQKDGVKKLNLYLIINYFKGGKLRFKKIKPEAFEANRFYTVINKKSGEIVPMEVNFNFDDPNLIILPLAFGKRQGREFIWNDLLSLETGSLKLANGRVIEKTLYNRRTRQDEPALFVALTFERREVLDSSNIKPMNLIGVDRGENIPAVIALTDPEGCPLSRFKDSLGNKTHILRLGESYKEKQRTIQAKKEVEQRRAGGYSRKYASKAKNLADDMVRNTARDLLYYAVTQDAMLIFENLSRGFGRQGKRTFMAERQYTRMEDWLTAKLAYEGLPSKTYLSKTLAQYTSKTCSNCGFTITSADYDRVLEKLKKTATGWMTTINGKELKVEGQITYYNRYKRQNVVKDLSVELDRLSEESVNNDISSWTKGRSGEALSLLKKRFSHRPVQEKFVCLNCGFETHADEQAALNIARSWLFLRSQEYKKYQTNKTTGNTDKRAFVETWQSFYRKKLKEVWKPAV

SEQ ID NO: 26703 - protein, 978 aa, synthetic construct
  REGION 1..978: note = engineered CasX variant
QEIKRINKIRRRLVKDSNTKKAGKTGPMKTLLVRVMTPDLRERLENLRKKPENIPQPISNTSRANLNKLLTDYTEMKKAILHVYWEEFQKDPVGLMSRVAQPASKKIDQNKLKPEMDEKGNLTTAGFACSQCGQPLFVYKLEQVSEKGKAYTNYFGRCNVAEHEKLILLAQLKPEKDSDEAVTYSLGKFGQRALDFYSIHVTKESTHPVKPLAQIAGNRYASGPVGKALSDACMGTIASFLSKYQDIIIEHQKVVKGNQKRLESLRELAGKENLEYPSVTLPPQPHTKEGVDAYNEVIARVRMWVNLNLWQKLKLSRDDAKPLLRLKGFPSFPLVERQANEVDWWDMVCNVKKLINEKKEDGKVFWQNLAGYKRQEALRPYLSSEEDRKKGKKFARYQLGDLLLHLEKKHGEDWGKVYDEAWERIDKKVEGLSKHIKLEEERRSEDAQSKAALTDWLRAKASFVIEGLKEADKDEFCRCELKLQKWYGDLRGKPFAIEAENSILDISGFSKQYNCAFIWQKDGVKKLNLYLIINYFKGGKLRFKKIKPEAFEANRFYTVINKKSGEIVPMEVNFNFDDPNLIILPLAFGKRQGREFIWNDLLSLETGSLKLANGRVIEKTLYNRRTRQDEPALFVALTFERREVLDSSNIKPMNLIGVDRGENIPAVIALTDPEGCPLSRFKDSLGNKTHILRIGESYKERQRTIQAKKEVEQRRAGGYSRKYASKAKNLADDMVRNTARDLLYYAVTQDAMLIFENLSRGFGRQGKRTFMAERQYTRMEDWLTAKLAYEGLPSKTYLSKTLAQYTSKTCSNCGFTITSADYDRVLEKLKKTATGWMTTINGKELKVEGQITYYNRYKRQNVVKDLSVELDRLSEESVNNDISSWTKGRSGEALSLLKKRFSHRPVQEKFVCLNCGFETHADEQAALNIARSWLFLRSQEYKKYQTNKTTGNTDKRAFVETWQSFYRKKLKEVWKPAV

SEQ ID NO: 26704 - protein, 978 aa, synthetic construct
  REGION 1..978: note = engineered CasX variant
QEIKRINKIRRRLVKDSNTKKAGKTGPMKTLLVRVMTPDLRERLENLRKKPENIPQPISNTSRANLNKLLTDYTEMKKAILHVYWEEFQKDPVGLMSRVAQPASKKIDQNKLKPEMDEKGNLTTAGFACSQCGQPLFVYKLEQVSEKGKAYTNYFGRCNVAEHEKLILLAQLKPEKDSDEAVTYSLGKFGQRALDFYSIHVTKESTHPVKPLAQIAGNRYASGPVGKALSDACMGTIASFLSKYQDIIIEHQKVVKGNQKRLESLRELAGKENLEYPSVTLPPQPHTKEGVDAYNEVIARVRMWVNLNLWQKLKLSRDDAKPLLRLKGFPSFPLVERQANEVDWWDMVCNVKKLINEKKEDGKVFWQNLAGYKRQEALRPYLSSEEDRKKGKKFARYQLGDLLLHLEKKHGEDWGKVYDEAWERIDKKVEGLSKHIKLEEERRSEDAQSKAALTDWLRAKASFVIEGLKEADKDEFCRCELKLQKWYGDLRGKPFAIEAENSILDISGFSKQYNCAFIWQKDGVKKLNLYLIINYFKGGKLRFKKIKPEAFEANRFYTVINKKSGEIVPMEVNFNFDDPNLIILPLAFGKRQGREFIWNDLLSLETGSLKLANGRVIEKTLYNRRTRQDEPALFVALTFERREVLDSSNIKPMNLIGVDRGENIPAVIALTDPEGCPLSRFKDSLGNKTHILRIGESYKERQRTIQAFKEVEQRRAGGYSRKYASKAKNLADDMVRNTARDLLYYAVTQDAMLIFENLSRGFGRQGKRTFMAERQYTRMEDWLTAKLAYEGLPSKTYLSKTLAQYTSKTCSNCGFTITSADYDRVLEKLKKTATGWMTTINGKELKVEGQITYYNRYKRQNVVKDLSVELDRLSEESVNNDISSWTKGRSGEALSLLKKRFSHRPVQEKFVCLNCGFETHADEQAALNIARSWLFLRSQEYKKYQTNKTTGNTDKRAFVETWQSFYRKKLKEVWKPAV

SEQ ID NO: 26705 - protein, 978 aa, synthetic construct
  REGION 1..978: note = engineered CasX variant
QEIKRINKIRRRLVKDSNTKKAGKTGPMKTLLVRVMTPDLRERLENLRKKPENIPQPISNTSRANLNKLLTDYTEMKKAILHVYWEEFQKDPVGLMSRVAQPASKKIDQNKLKPEMDEKGNLTTAGFACSQCGQPLFVYKLEQVSEKGKAYTNYFGRCNVAEHEKLILLAQLKPEKDSDEAVTYSLGKFGQRALDFYSIHVTKESTHPVKPLAQIAGNRYASGPVGKALSDACMGTIASFLSKYQDIIIEHQKVVKGNQKRLESLRELAGKENLEYPSVTLPPQPHTKEGVDAYNEVIARVRMWVNLNLWQKLKLSRDDAKPLLRLKGFPSFPLVERQANEVDWWDMVCNVKKLINEKKEDGKVFWQNLAGYKRQEALRPYLSSEEDRKKGKKFARYQLGDLLLHLEKKHGEDWGKVYDEAWERIDKKVEGLSKHIKLEEERRSEDAQSKAALTDWLRAKASFVIEGLKEADKDEFCRCELKLQKWYGDLRGKPFAIEAENSILDISGFSKQYNCAFIWQKDGVKKLNLYLIINYFKGGKLRFKKIKPEAFEANRFYTVINKKSGEIVPMEVNFNFDDPNLIILPLAFGKRQGREFIWNDLLSLETGSLKLANGRVIEKTLYNRRTRQDEPALFVALTFERREVLDSSNIKPMNLIGVDRGENIPAVIALTDPEGCPLSRFKDSLGNKTHILRIGESYKEKQRTIQAKKEVEQRRAGGYSRKYASKAKNLADDMVRNTARDLLYYAVTQDAMLIFENLSRGFGRQGKRTFMAERQYTRMEDWLTAKLAYEGLPSKTYLSKTLAQYTSKTCSNCGFTITSADYDRVLEKLKKTATGWMTTINGKELKVEGQITYYNRYKRQNVVKDLSVELDRLSEESVNNDISSWTKGRSGEALSLLKKRFSHRPVQEKFVCLNCGFETHADEQAALNIARSWLFLRSQEYKKYQTNKTTGNTDKRAFVETWQSFYRKKLKEVWKPAV

SEQ ID NO: 26706 - protein, 978 aa, synthetic construct
  REGION 1..978: note = engineered CasX variant
QEIKRINKIRRRLVKDSNTKKAGKTGPMKTLLVRVMTPDLRERLENLRKKPENIPQPISNTSRANLNKLLTDYTEMKKAILHVYWEEFQKDPVGLMSRVAQPASKKIDQNKLKPEMDEKGNLTTAGFACSQCGQPLFVYKLEQVSEKGKAYTNYFGRCNVAEHEKLILLAQLKPEKDSDEAVTYSLGKFGQRALDFYSIHVTKESTHPVKPLAQIAGNRYASGPVGKALSDACMGTIASFLSKYQDIIIEHQKVVKGNQKRLESLRELAGKENLEYPSVTLPPQPHTKEGVDAYNEVIARVRMWVNLNLWQKLKLSRDDAKPLLRLKGFPSFPLVERQANEVDWWDMVCNVKKLINEKKEDGKVFWQNLAGYKRQEALRPYLSSEEDRKKGKKFARYQLGDLLLHLEKKHGEDWGKVYDEAWERIDKKVEGLSKHIKLEEERRSEDAQSKAALTDWLRAKASFVIEGLKEADKDEFCRCELKLQKWYGDLRGKPFAIEAENSILDISGFSKQYNCAFIWQKDGVKKLNLYLIINYFKGGKLRFKKIKPEAFEANRFYTVINKKSGEIVPMEVNFNFDDPNLIILPLAFGKRQGREFIWNDLLSLETGSLKLANGRVIEKTLYNRRTRQDEPALFVALTFERREVLDSSNIKPMNLIGVDRGENIPAVIALTDPEGCPLSRFKDSLGNKTHILRIGESYKEKQRTIQAFKEVEQRRAGGYSRKYASKAKNLADDMVRNTARDLLYYAVTQDAMLIFENLSRGFGRQGKRTFMAERQYTRMEDWLTAKLAYEGLPSKTYLSKTLAQYTSKTCSNCGFTITSADYDRVLEKLKKTATGWMTTINGKELKVEGQITYYNRYKRQNVVKDLSVELDRLSEESVNNDISSWTKGRSGEALSLLKKRFSHRPVQEKFVCLNCGFETHADEQAALNIARSWLFLRSQEYKKYQTNKTTGNTDKRAFVETWQSFYRKKLKEVWKPAV

SEQ ID NO: 26707 - protein, 978 aa, synthetic construct
  REGION 1..978: note = engineered CasX variant
QEIKRINKIRRRLVKDSNTKKAGKTGPMKTLLVRVMTPDLRERLENLRKKPENIPQPISNTSRANLNKLLTDYTEMKKAILHVYWEEFQKDPVGLMSRVAQPASKKIDQNKLKPEMDEKGNLTTAGFACSQCGQPLFVYKLEQVSEKGKAYTNYFGRCNVAEHEKLILLAQLKPEKDSDEAVTYSLGKFGQRALDFYSIHVTKESTHPVKPLAQIAGNRYASGPVGKALSDACMGTIASFLSKYQDIIIEHQKVVKGNQKRLESLRELAGKENLEYPSVTLPPQPHTKEGVDAYNEVIARVRMWVNLNLWQKLKLSRDDAKPLLRLKGFPSFPLVERQANEVDWWDMVCNVKKLINEKKEDGKVFWQNLAGYKRQEALRPYLSSEEDRKKGKKFARYQLGDLLLHLEKKHGEDWGKVYDEAWERIDKKVEGLSKHIKLEEERRSEDAQSKAALTDWLRAKASFVIEGLKEADKDEFCRCELKLQKWYGDLRGKPFAIEAENSILDISGFSKQYNCAFIWQKDGVKKLNLYLIINYFKGGKLRFKKIKPEAFEANRFYTVINKKSGEIVPMEVNFNFDDPNLIILPLAFGKRQGREFIWNDLLSLETGSLKLANGRVIEKTLYNRRTRQDEPALFVALTFERREVLDSSNIKPMNLIGVDRGENIPAVIALTDPEGCPLSRFKDSLGNHTHILRIGESYKEKQRTIQAKKEVEQRRAGGYSRKYASKAKNLADDMVRNTARDLLYYAVTQDAMLIFENLSRGFGRQGKRTFMAERQYTRMEDWLTAKLAYEGLPSKTYLSKTLAQYTSKTCSNCGFTITSADYDRVLEKLKKTATGWMTTINGKELKVEGQITYYNRYKRQNVVKDLSVELDRLSEESVNNDISSWTKGRSGEALSLLKKRFSHRPVQEKFVCLNCGFETHADEQAALNIARSWLFLRSQEYKKYQTNKTTGNTDKRAFVETWQSFYRKKLKEVWKPAV

SEQ ID NO: 26708 - protein, 978 aa, synthetic construct
  REGION 1..978: note = engineered CasX variant
QEIKRINKIRRRLVKDSNTKKAGKTGPMKTLLVRVMTPDLRERLENLRKKPENIPQPISNTSRANLNKLLTDYTEMKKAILHVYWEEFQKDPVGLMSRVAQPASKKIDQNKLKPEMDEKGNLTTAGFACSQCGQPLFVYKLEQVSEKGKAYTNYFGRCNVAEHEKLILLAQLKPEKDSDEAVTYSLGKFGQRALDFYSIHVTKESTHPVKPLAQIAGNRYASGPVGKALSDACMGTIASFLSKYQDIIIEHQKVVKGNQKRLESLRELAGKENLEYPSVTLPPQPHTKEGVDAYNEVIARVRMWVNLNLWQKLKLSRDDAKPLLRLKGFPSFPLVERQANEVDWWDMVCNVKKLINEKKEDGKVFWQNLAGYKRQEALRPYLSSEEDRKKGKKFARYQLGDLLLHLEKKHGEDWGKVYDEAWERIDKKVEGLSKHIKLEEERRSEDAQSKAALTDWLRAKASFVIEGLKEADKDEFCRCELKLQKWYGDLRGKPFAIEAENSILDISGFSKQYNCAFIWQKDGVKKLNLYLIINYFKGGKLRFKKIKPEAFEANRFYTVINKKSGEIVPMEVNFNFDDPNLIILPLAFGKRQGREFIWNDLLSLETGSLKLANGRVIEKTLYNRRTRQDEPALFVALTFERREVLDSSNIKPMNLIGVDRGENIPAVIALTDPEGCPLSRFKDSLGNFTHILRIGESYKEMQRTIQAKKEVEQRRAGGYSRKYASKAKNLADDMVRNTARDLLYYAVTQDAMLIFENLSRGFGRQGKRTFMAERQYTRMEDWLTAKLAYEGLPSKTYLSKTLAQYTSKTCSNCGFTITSADYDRVLEKLKKTATGWMTTINGKELKVEGQITYYNRYKRQNVVKDLSVELDRLSEESVNNDISSWTKGRSGEALSLLKKRFSHRPVQEKFVCLNCGFETHADEQAALNIARSWLFLRSQEYKKYQTNKTTGNTDKRAFVETWQSFYRKKLKEVWKPAV

SEQ ID NO: 26709 - protein, 978 aa, synthetic construct
  REGION 1..978: note = engineered CasX variant
QEIKRINKIRRRLVKDSNTKKAGKTGPMKTLLVRVMTPDLRERLENLRKKPENIPQPISNTSRANLNKLLTDYTEMKKAILHVYWEEFQKDPVGLMSRVAQPASKKIDQNKLKPEMDEKGNLTTAGFACSQCGQPLFVYKLEQVSEKGKAYTNYFGRCNVAEHEKLILLAQLKPEKDSDEAVTYSLGKFGQRALDFYSIHVTKESTHPVKPLAQIAGNRYASGPVGKALSDACMGTIASFLSKYQDIIIEHQKVVKGNQKRLESLRELAGKENLEYPSVTLPPQPHTKEGVDAYNEVIARVRMWVNLNLWQKLKLSRDDAKPLLRLKGFPSFPLVERQANEVDWWDMVCNVKKLINEKKEDGKVFWQNLAGYKRQEALRPYLSSEEDRKKGKKFARYQLGDLLLHLEKKHGEDWGKVYDEAWERIDKKVEGLSKHIKLEEERRSEDAQSKAALTDWLRAKASFVIEGLKEADKDEFCRCELKLQKWYGDLRGKPFAIEAENSILDISGFSKQYNCAFIWQKDGVKKLNLYLIINYFKGGKLRFKKIKPEAFEANRFYTVINKKSGEIVPMEVNFNFDDPNLIILPLAFGKRQGREFIWNDLLSLETGSLKLANGRVIEKTLYNRRTRQDEPALFVALTFERREVLDSSNIKPMNLIGVDRGENIPAVIALTDPEGCPLSRFKDSLGNFTHILRIGESYKEKQRTIQARKEVEQRRAGGYSRKYASKAKNLADDMVRNTARDLLYYAVTQDAMLIFENLSRGFGRQGKRTFMAERQYTRMEDWLTAKLAYEGLPSKTYLSKTLAQYTSKTCSNCGFTITSADYDRVLEKLKKTATGWMTTINGKELKVEGQITYYNRYKRQNVVKDLSVELDRLSEESVNNDISSWTKGRSGEALSLLKKRFSHRPVQEKFVCLNCGFETHADEQAALNIARSWLFLRSQEYKKYQTNKTTGNTDKRAFVETWQSFYRKKLKEVWKPAV

SEQ ID NO: 26710 - protein, 978 aa, synthetic construct
  REGION 1..978: note = engineered CasX variant
QEIKRINKIRRRLVKDSNTKKAGKTGPMKTLLVRVMTPDLRERLENLRKKPENIPQPISNTSRANLNKLLTDYTEMKKAILHVYWEEFQKDPVGLMSRVAQPASKKIDQNKLKPEMDEKGNLTTAGFACSQCGQPLFVYKLEQVSEKGKAYTNYFGRCNVAEHEKLILLAQLKPEKDSDEAVTYSLGKFGQRALDFYSIHVTKESTHPVKPLAQIAGNRYASGPVGKALSDACMGTIASFLSKYQDIIIEHQKVVKGNQKRLESLRELAGKENLEYPSVTLPPQPHTKEGVDAYNEVIARVRMWVNLNLWQKLKLSRDDAKPLLRLKGFPSFPLVERQANEVDWWDMVCNVKKLINEKKEDGKVFWQNLAGYKRQEALRPYLSSEEDRKKGKKFARYQLGDLLLHLEKKHGEDWGKVYDEAWERIDKKVEGLSKHIKLEEERRSEDAQSKAALTDWLRAKASFVIEGLKEADKDEFCRCELKLQKWYGDLRGKPFAIEAENSILDISGFSKQYNCAFIWQKDGVKKLNLYLIINYFKGGKLRFKKIKPEAFEANRFYTVINKKSGEIVPMEVNFNFDDPNLIILPLAFGKRQGREFIWNDLLSLETGSLKLANGRVIEKTLYNRRTRQDEPALFVALTFERREVLDSSNIKPMNLIGVDRGENIPAVIALTDPEGCPLSRFKDSLGNFTHILRIGESYKEKQRTIQAKKEVEQRSAGGYSRKYASKAKNLADDMVRNTARDLLYYAVTQDAMLIFENLSRGFGRQGKRTFMAERQYTRMEDWLTAKLAYEGLPSKTYLSKTLAQYTSKTCSNCGFTITSADYDRVLEKLKKTATGWMTTINGKELKVEGQITYYNRYKRQNVVKDLSVELDRLSEESVNNDISSWTKGRSGEALSLLKKRFSHRPVQEKFVCLNCGFETHADEQAALNIARSWLFLRSQEYKKYQTNKTTGNTDKRAFVETWQSFYRKKLKEVWKPAV

SEQ ID NO: 26711 - protein, 978 aa, synthetic construct
  REGION 1..978: note = engineered CasX variant
QEIKRINKIRRRLVKDSNTKKAGKTGPMKTLLVRVMTPDLRERLENLRKKPENIPQPISNTSRANLNKLLTDYTEMKKAILHVYWEEFQKDPVGLMSRVAQPASKKIDQNKLKPEMDEKGNLTTAGFACSQCGQPLFVYKLEQVSEKGKAYTNYFGRCNVAEHEKLILLAQLKPEKDSDEAVTYSLGKFGQRALDFYSIHVTKESTHPVKPLAQIAGNRYASGPVGKALSDACMGTIASFLSKYQDIIIEHQKVVKGNQKRLESLRELAGKENLEYPSVTLPPQPHTKEGVDAYNEVIARVRMWVNLNLWQKLKLSRDDAKPLLRLKGFPSFPLVERQANEVDWWDMVCNVKKLINEKKEDGKVFWQNLAGYKRQEALRPYLSSEEDRKKGKKFARYQLGDLLLHLEKKHGEDWGKVYDEAWERIDKKVEGLSKHIKLEEERRSEDAQSKAALTDWLRAKASFVIEGLKEADKDEFCRCELKLQKWYGDLRGKPFAIEAENSILDISGFSKQYNCAFIWQKDGVKKLNLYLIINYFKGGKLRFKKIKPEAFEANRFYTVINKKSGEIVPMEVNFNFDDPNLIILPLAFGKRQGREFIWNDLLSLETGSLKLANGRVIEKTLYNRRTRQDEPALFVALTFERREVLDSSNIKPMNLIGVDRGENIPAVIALTDPEGCPLSRFKDSLGNFTHILRIGESYKEKQRTIQAKKEVEQRRAGGYSRKYASKAKNLADDMVRNTARDLLYYAVTQDAMLIFENLSRGFGRQGKRTFMAERQYTRMEDWLTAKLAYEGLPSKTYLSKTLAQYTSKTCSNCGFTITSADYDRVLEKLKKTATGWMTTINGKELKVEGQITYYNRYKRQNVVKDLSVELDRLSEESVNNDISSWTKGRSGEALSLLKKRFSHRPVQEKFVCLNCGFETHADEQAALNIARSWLFLRSQEYKKYQTNKTTGNTDKRAFVETWQSFYRKKLKEVWKPAV

SEQ ID NO: 26712 - protein, 978 aa, synthetic construct
  REGION 1..978: note = engineered CasX variant
QEIKRINKIRRRLVKDSNTKKAGKTGPMKTLLVRVMTPDLRERLENLRKKPENIPQPISNTSRANLNKLLTDYTEMKKAILHVYWEEFQKDPVGLMSRVAQPASKKIDQNKLKPEMDEKGNLTTAGFACSQCGQPLFVYKLEQVSEKGKAYTNYFGRCNVAEHEKLILLAQLKPEKDSDEAVTYSLGKFGQRALDFYSIHVTKESTHPVKPLAQIAGNRYASGPVGKALSDACMGTIASFLSKYQDIIIEHQKVVKGNQKRLESLRELAGKENLEYPSVTLPPQPHTKEGVDAYNEVIARVRMWVNLNLWQKLKLSRDDAKPLLRLKGFPSFPLVERQANEVDWWDMVCNVKKLINEKKEDGKVFWQNLAGYKRQEALRPYLSSEEDRKKGKKFARYQLGDLLLHLEKKHGEDWGKVYDEAWERIDKKVEGLSKHIKLEEERRSEDAQSKAALTDWLRAKASFVIEGLKEADKDEFCRCELKLQKWYGDLRGKPFAIEAENSILDISGFSKQYNCAFIWQKDGVKKLNLYLIINYFKGGKLRFKKIKPEAFEANRFYTVINKKSGEIVPMEVNFNFDDPNLIILPLAFGKRQGREFIWNDLLSLETGSLKLANGRVIEKTLYNRRTRQDEPALFVALTFERREVLDSSNIKPMNLIGVDRGENIPAVIALTDPEGCPLSRFKDSLGNFTHILRIGCSYKEKQRTIQARKEVEQRRAGGYSRKYASKAKNLADDMVRNTARDLLYYAVTQDAMLIFENLSRGFGRQGKRTFMAERQYTRMEDWLTAKLAYEGLPSKTYLSKTLAQYTSKTCSNCGFTITSADYDRVLEKLKKTATGWMTTINGKELKVEGQITYYNRYKRQNVVKDLSVELDRLSEESVNNDISSWTKGRSGEALSLLKKRFSHRPVQEKFVCLNCGFETHADEQAALNIARSWLFLRSQEYKKYQTNKTTGNTDKRAFVETWQSFYRKKLKEVWKPAV

SEQ ID NO: 26713 - protein, 978 aa, synthetic construct
  REGION 1..978: note = engineered CasX variant
QEIKRINKIRRRLVKDSNTKKAGKTGPMKTLLVRVMTPDLRERLENLRKKPENIPQPISNTSRANLNKLLTDYTEMKKAILHVYWEEFQKDPVGLMSRVAQPASKKIDQNKLKPEMDEKGNLTTAGFACSQCGQPLFVYKLEQVSEKGKAYTNYFGRCNVAEHEKLILLAQLKPEKDSDEAVTYSLGKFGQRALDFYSIHVTKESTHPVKPLAQIAGNRYASGPVGKALSDACMGTIASFLSKYQDIIIEHQKVVKGNQKRLESLRELAGKENLEYPSVTLPPQPHTKEGVDAYNEVIARVRMWVNLNLWQKLKLSRDDAKPLLRLKGFPSFPLVERQANEVDWWDMVCNVKKLINEKKEDGKVFWQNLAGYKRQEALRPYLSSEEDRKKGKKFARYQLGDLLLHLEKKHGEDWGKVYDEAWERIDKKVEGLSKHIKLEEERRSEDAQSKAALTDWLRAKASFVIEGLKEADKDEFCRCELKLQKWYGDLRGKPFAIEAENSILDISGFSKQYNCAFIWQKDGVKKLNLYLIINYFKGGKLRFKKIKPEAFEANRFYTVINKKSGEIVPMEVNFNFDDPNLIILPLAFGKRQGREFIWNDLLSLETGSLKLANGRVIEKTLYNRRTRQDEPALFVALTFERREVLDSSNIKPMNLIGVDRGENIPAVIALTDPEGCPLSRFKDSLGNFTHILRIGCSYKEKQRTIQAKKEVEQRRAGGYSRKYASKAKNLADDMVRNTARDLLYYAVTQDAMLIFENLSRGFGRQGKRTFMAERQYTRMEDWLTAKLAYEGLPSKTYLSKTLAQYTSKTCSNCGFTITSADYDRVLEKLKKTATGWMTTINGKELKVEGQITYYNRYKRQNVVKDLSVELDRLSEESVNNDISSWTKGRSGEALSLLKKRFSHRPVQEKFVCLNCGFETHADEQAALNIARSWLFLRSQEYKKYQTNKTTGNTDKRAFVETWQSFYRKKLKEVWKPAV

SEQ ID NO: 26714 - protein, 978 aa, synthetic construct
  REGION 1..978: note = engineered CasX variant
QEIKRINKIRRRLVKDSNTKKAGKTGPMKTLLVRVMTPDLRERLENLRKKPENIPQPISNTSRANLNKLLTDYTEMKKAILHVYWEEFQKDPVGLMSRVAQPASKKIDQNKLKPEMDEKGNLTTAGFACSQCGQPLFVYKLEQVSEKGKAYTNYFGRCNVAEHEKLILLAQLKPEKDSDEAVTYSLGKFGQRALDFYSIHVTKESTHPVKPLAQIAGNRYASGPVGKALSDACMGTIASFLSKYQDIIIEHQKVVKGNQKRLESLRELAGKENLEYPSVTLPPQPHTKEGVDAYNEVIARVRMWVNLNLWQKLKLSRDDAKPLLRLKGFPSFPLVERQANEVDWWDMVCNVKKLINEKKEDGKVFWQNLAGYKRQEALRPYLSSEEDRKKGKKFARYQLGDLLLHLEKKHGEDWGKVYDEAWERIDKKVEGLSKHIKLEEERRSEDAQSKAALTDWLRAKASFVIEGLKEADKDEFCRCELKLQKWYGDLRGKPFAIEAENSILDISGFSKQYNCAFIWQKDGVKKLNLYLIINYFKGGKLRFKKIKPEAFEANRFYTVINKKSGEIVPMEVNFNFDDPNLIILPLAFGKRQGREFIWNDLLSLETGSLKLANGRVIEKTLYNRRTRQDEPALFVALTFERREVLDSSNIKPMNLIGVDRGENIPAVIALTDPEGCPLSRFKDSLGNETHILRIGESYKEKQRTIQAKKEVEQRRAGGYSRKYASKAKNLADDMVRNTARDLLYYAVTQDAMLIFENLSRGFGRQGKRTFMAERQYTRMEDWLTAKLAYEGLPSKTYLSKTLAQYTSKTCSNCGFTITSADYDRVLEKLKKTATGWMTTINGKELKVEGQITYYNRYKRQNVVKDLSVELDRLSEESVNNDISSWTKGRSGEALSLLKKRFSHRPVQEKFVCLNCGFETHADEQAALNIARSWLFLRSQEYKKYQTNKTTGNTDKRAFVETWQSFYRKKLKEVWKPAV

SEQ ID NO: 26715 - protein, 978 aa, synthetic construct
  REGION 1..978: note = engineered CasX variant
QEIKRINKIRRRLVKDSNTKKAGKTGPMKTLLVRVMTPDLRERLENLRKKPENIPQPISNTSRANLNKLLTDYTEMKKAILHVYWEEFQKDPVGLMSRVAQPASKKIDQNKLKPEMDEKGNLTTAGFACSQCGQPLFVYKLEQVSEKGKAYTNYFGRCNVAEHEKLILLAQLKPEKDSDEAVTYSLGKFGQRALDFYSIHVTKESTHPVKPLAQIAGNRYASGPVGKALSDACMGTIASFLSKYQDIIIEHQKVVKGNQKRLESLRELAGKENLEYPSVTLPPQPHTKEGVDAYNEVIARVRMWVNLNLWQKLKLSRDDAKPLLRLKGFPSFPLVERQANEVDWWDMVCNVKKLINEKKEDGKVFWQNLAGYKRQEALRPYLSSEEDRKKGKKFARYQLGDLLLHLEKKHGEDWGKVYDEAWERIDKKVEGLSKHIKLEEERRSEDAQSKAALTDWLRAKASFVIEGLKEADKDEFCRCELKLQKWYGDLRGKPFAIEAENSILDISGFSKQYNCAFIWQKDGVKKLNLYLIINYFKGGKLRFKKIKPEAFEANRFYTVINKKSGEIVPMEVNFNFDDPNLIILPLAFGKRQGREFIWNDLLSLETGSLKLANGRVIEKTLYNRRTRQDEPALFVALTFERREVLDSSNIKPMNLIGVDRGENIPAVIALTDPEGCPLSRFKDSLGNETHILRIGESYKEKQRTIQAKKEVEKRRAGGYSRKYASKAKNLADDMVRNTARDLLYYAVTQDAMLIFENLSRGFGRQGKRTFMAERQYTRMEDWLTAKLAYEGLPSKTYLSKTLAQYTSKTCSNCGFTITSADYDRVLEKLKKTATGWMTTINGKELKVEGQITYYNRYKRQNVVKDLSVELDRLSEESVNNDISSWTKGRSGEALSLLKKRFSHRPVQEKFVCLNCGFETHADEQAALNIARSWLFLRSQEYKKYQTNKTTGNTDKRAFVETWQSFYRKKLKEVWKPAV

SEQ ID NO: 26716 - protein, 978 aa, synthetic construct
  REGION 1..978: note = engineered CasX variant
QEIKRINKIRRRLVKDSNTKKAGKTGPMKTLLVRVMTPDLRERLENLRKKPENIPQPISNTSRANLNKLLTDYTEMKKAILHVYWEEFQKDPVGLMSRVAQPASKKIDQNKLKPEMDEKGNLTTAGFACSQCGQPLFVYKLEQVSEKGKAYTNYFGRCNVAEHEKLILLAQLKPEKDSDEAVTYSLGKFGQRALDFYSIHVTKESTHPVKPLAQIAGNRYASGPVGKALSDACMGTIASFLSKYQDIIIEHQKVVKGNQKRLESLRELAGKENLEYPSVTLPPQPHTKEGVDAYNEVIARVRMWVNLNLWQKLKLSRDDAKPLLRLKGFPSFPLVERQANEVDWWDMVCNVKKLINEKKEDGKVFWQNLAGYKRQEALRPYLSSEEDRKKGKKFARYQLGDLLLHLEKKHGEDWGKVYDEAWERIDKKVEGLSKHIKLEEERRSEDAQSKAALTDWLRAKASFVIEGLKEADKDEFCRCELKLQKWYGDLRGKPFAIEAENSILDISGFSKQYNCAFIWQKDGVKKLNLYLIINYFKGGKLRFKKIKPEAFEANRFYTVINKKSGEIVPMEVNFNFDDPNLIILPLAFGKRQGREFIWNDLLSLETGSLKLANGRVIEKTLYNRRTRQDEPALFVALTFERREVLDSSNIKPMNLIGVDRGENIPAVIALTDPEGCPLSRFKDSLGNDTHILRIGESYKEKQRTIQAKKEVEQRRAGGYSRKYASKAKNLADDMVRNTARDLLYYAVTQDAMLIFENLSRGFGRQGKRTFMAERQYTRMEDWLTAKLAYEGLPSKTYLSKTLAQYTSKTCSNCGFTITSADYDRVLEKLKKTATGWMTTINGKELKVEGQITYYNRYKRQNVVKDLSVELDRLSEESVNNDISSWTKGRSGEALSLLKKRFSHRPVQEKFVCLNCGFETHADEQAALNIARSWLFLRSQEYKKYQTNKTTGNTDKRAFVETWQSFYRKKLKEVWKPAV

SEQ ID NO: 26717 - protein, 978 aa, synthetic construct
  REGION 1..978: note = engineered CasX variant
QEIKRINKIRRRLVKDSNTKKAGKTGPMKTLLVRVMTPDLRERLENLRKKPENIPQPISNTSRANLNKLLTDYTEMKKAILHVYWEEFQKDPVGLMSRVAQPASKKIDQNKLKPEMDEKGNLTTAGFACSQCGQPLFVYKLEQVSEKGKAYTNYFGRCNVAEHEKLILLAQLKPEKDSDEAVTYSLGKFGQRALDFYSIHVTKESTHPVKPLAQIAGNRYASGPVGKALSDACMGTIASFLSKYQDIIIEHQKVVKGNQKRLESLRELAGKENLEYPSVTLPPQPHTKEGVDAYNEVIARVRMWVNLNLWQKLKLSRDDAKPLLRLKGFPSFPLVERQANEVDWWDMVCNVKKLINEKKEDGKVFWQNLAGYKRQEALRPYLSSEEDRKKGKKFARYQLGDLLLHLEKKHGEDWGKVYDEAWERIDKKVEGLSKHIKLEEERRSEDAQSKAALTDWLRAKASFVIEGLKEADKDEFCRCELKLQKWYGDLRGKPFAIEAENSILDISGFSKQYNCAFIWQKDGVKKLNLYLIINYFKGGKLRFKKIKPEAFEANRFYTVINKKSGEIVPMEVNFNFDDPNLIILPLAFGKRQGREFIWNDLLSLETGSLKLANGRVIEKTLYNRRTRQDEPALFVALTFERREVLDSSNIKPMNLIGVDRGENIPAVIALTDPEGCPLSRFKDSLGNDTHILRIGEEYKEKQRTIQAKKEVEQRRAGGYSRKYASKAKNLADDMVRNTARDLLYYAVTQDAMLIFENLSRGFGRQGKRTFMAERQYTRMEDWLTAKLAYEGLPSKTYLSKTLAQYTSKTCSNCGFTITSADYDRVLEKLKKTATGWMTTINGKELKVEGQITYYNRYKRQNVVKDLSVELDRLSEESVNNDISSWTKGRSGEALSLLKKRFSHRPVQEKFVCLNCGFETHADEQAALNIARSWLFLRSQEYKKYQTNKTTGNTDKRAFVETWQSFYRKKLKEVWKPAV

SEQ ID NO: 26718 - protein, 978 aa, synthetic construct
  REGION 1..978: note = engineered CasX variant
QEIKRINKIRRRLVKDSNTKKAGKTGPMKTLLVRVMTPDLRERLENLRKKPENIPQPISNTSRANLNKLLTDYTEMKKAILHVYWEEFQKDPVGLMSRVAQPASKKIDQNKLKPEMDEKGNLTTAGFACSQCGQPLFVYKLEQVSEKGKAYTNYFGRCNVAEHEKLILLAQLKPEKDSDEAVTYSLGKFGQRALDFYSIHVTKESTHPVKPLAQIAGNRYASGPVGKALSDACMGTIASFLSKYQDIIIEHQKVVKGNQKRLESLRELAGKENLEYPSVTLPPQPHTKEGVDAYNEVIARVRMWVNLNLWQKLKLSRDDAKPLLRLKGFPSFPLVERQANEVDWWDMVCNVKKLINEKKEDGKVFWQNLAGYKRQEALRPYLSSEEDRKKGKKFARYQLGDLLLHLEKKHGEDWGKVYDEAWERIDKKVEGLSKHIKLEEERRSEDAQSKAALTDWLRAKASFVIEGLKEADKDEFCRCELKLQKWYGDLRGKPFAIEAENSILDISGFSKQYNCAFIWQKDGVKKLNLYLIINYFKGGKLRFKKIKPEAFEANRFYTVINKKSGEIVPMEVNFNFDDPNLIILPLAFGKRQGREFIWNDLLSLETGSLKLANGRVIEKTLYNRRTRQDEPALFVALTFERREVLDSSNIKPMNLIGVDRGENIPAVIALTDPEGCPLSRFKDSLGNCTHILRIGESYKEKQRTIQAKKEVEQRRAGGYSRKYASKAKNLADDMVRNTARDLLYYAVTQDAMLIFENLSRGFGRQGKRTFMAERQYTRMEDWLTAKLAYEGLPSKTYLSKTLAQYTSKTCSNCGFTITSADYDRVLEKLKKTATGWMTTINGKELKVEGQITYYNRYKRQNVVKDLSVELDRLSEESVNNDISSWTKGRSGEALSLLKKRFSHRPVQEKFVCLNCGFETHADEQAALNIARSWLFLRSQEYKKYQTNKTTGNTDKRAFVETWQSFYRKKLKEVWKPAV

SEQ ID NO: 26719 - protein, 978 aa, synthetic construct
  REGION 1..978: note = engineered CasX variant
QEIKRINKIRRRLVKDSNTKKAGKTGPMKTLLVRVMTPDLRERLENLRKKPENIPQPISNTSRANLNKLLTDYTEMKKAILHVYWEEFQKDPVGLMSRVAQPASKKIDQNKLKPEMDEKGNLTTAGFACSQCGQPLFVYKLEQVSEKGKAYTNYFGRCNVAEHEKLILLAQLKPEKDSDEAVTYSLGKFGQRALDFYSIHVTKESTHPVKPLAQIAGNRYASGPVGKALSDACMGTIASFLSKYQDIIIEHQKVVKGNQKRLESLRELAGKENLEYPSVTLPPQPHTKEGVDAYNEVIARVRMWVNLNLWQKLKLSRDDAKPLLRLKGFPSFPLVERQANEVDWWDMVCNVKKLINEKKEDGKVFWQNLAGYKRQEALRPYLSSEEDRKKGKKFARYQLGDLLLHLEKKHGEDWGKVYDEAWERIDKKVEGLSKHIKLEEERRSEDAQSKAALTDWLRAKASFVIEGLKEADKDEFCRCELKLQKWYGDLRGKPFAIEAENSILDISGFSKQYNCAFIWQKDGVKKLNLYLIINYFKGGKLRFKKIKPEAFEANRFYTVINKKSGEIVPMEVNFNFDDPNLIILPLAFGKRQGREFIWNDLLSLETGSLKLANGRVIEKTLYNRRTRQDEPALFVALTFERREVLDSSNIKPMNLIGVDRGENIPAVIALTDPEGCPLSRFKDSLGNCTHILRIGESYKEKQRTHQAKKEVEQRRAGGYSRKYASKAKNLADDMVRNTARDLLYYAVTQDAMLIFENLSRGFGRQGKRTFMAERQYTRMEDWLTAKLAYEGLPSKTYLSKTLAQYTSKTCSNCGFTITSADYDRVLEKLKKTATGWMTTINGKELKVEGQITYYNRYKRQNVVKDLSVELDRLSEESVNNDISSWTKGRSGEALSLLKKRFSHRPVQEKFVCLNCGFETHADEQAALNIARSWLFLRSQEYKKYQTNKTTGNTDKRAFVETWQSFYRKKLKEVWKPAV

SEQ ID NO: 26720 - protein, 978 aa, synthetic construct
  REGION 1..978: note = engineered CasX variant
QEIKRINKIRRRLVKDSNTKKAGKTGPMKTLLVRVMTPDLRERLENLRKKPENIPQPISNTSRANLNKLLTDYTEMKKAILHVYWEEFQKDPVGLMSRVAQPASKKIDQNKLKPEMDEKGNLTTAGFACSQCGQPLFVYKLEQVSEKGKAYTNYFGRCNVAEHEKLILLAQLKPEKDSDEAVTYSLGKFGQRALDFYSIHVTKESTHPVKPLAQIAGNRYASGPVGKALSDACMGTIASFLSKYQDIIIEHQKVVKGNQKRLESLRELAGKENLEYPSVTLPPQPHTKEGVDAYNEVIARVRMWVNLNLWQKLKLSRDDAKPLLRLKGFPSFPLVERQANEVDWWDMVCNVKKLINEKKEDGKVFWQNLAGYKRQEALRPYLSSEEDRKKGKKFARYQLGDLLLHLEKKHGEDWGKVYDEAWERIDKKVEGLSKHIKLEEERRSEDAQSKAALTDWLRAKASFVIEGLKEADKDEFCRCELKLQKWYGDLRGKPFAIEAENSILDISGFSKQYNCAFIWQKDGVKKLNLYLIINYFKGGKLRFKKIKPEAFEANRFYTVINKKSGEIVPMEVNFNFDDPNLIILPLAFGKRQGREFIWNDLLSLETGSLKLANGRVIEKTLYNRRTRQDEPALFVALTFERREVLDSSNIKPMNLIGVDRGENIPAVIALTDPEGCPLSRFKDSLGNATHILRIGESYKEKQRTIQAKKEVEQRRAGGYSRKYASKAKNLADDMVRNTARDLLYYAVTQDAMLIFENLSRGFGRQGKRTFMAERQYTRMEDWLTAKLAYEGLPSKTYLSKTLAQYTSKTCSNCGFTITSADYDRVLEKLKKTATGWMTTINGKELKVEGQITYYNRYKRQNVVKDLSVELDRLSEESVNNDISSWTKGRSGEALSLLKKRFSHRPVQEKFVCLNCGFETHADEQAALNIARSWLFLRSQEYKKYQTNKTTGNTDKRAFVETWQSFYRKKLKEVWKPAV

SEQ ID NO: 26721 - protein, 978 aa, synthetic construct
  REGION 1..978: note = engineered CasX variant
QEIKRINKIRRRLVKDSNTKKAGKTGPMKTLLVRVMTPDLRERLENLRKKPENIPQPISNTSRANLNKLLTDYTEMKKAILHVYWEEFQKDPVGLMSRVAQPASKKIDQNKLKPEMDEKGNLTTAGFACSQCGQPLFVYKLEQVSEKGKAYTNYFGRCNVAEHEKLILLAQLKPEKDSDEAVTYSLGKFGQRALDFYSIHVTKESTHPVKPLAQIAGNRYASGPVGKALSDACMGTIASFLSKYQDIIIEHQKVVKGNQKRLESLRELAGKENLEYPSVTLPPQPHTKEGVDAYNEVIARVRMWVNLNLWQKLKLSRDDAKPLLRLKGFPSFPLVERQANEVDWWDMVCNVKKLINEKKEDGKVFWQNLAGYKRQEALRPYLSSEEDRKKGKKFARYQLGDLLLHLEKKHGEDWGKVYDEAWERIDKKVEGLSKHIKLEEERRSEDAQSKAALTDWLRAKASFVIEGLKEADKDEFCRCELKLQKWYGDLRGKPFAIEAENSILDISGFSKQYNCAFIWQKDGVKKLNLYLIINYFKGGKLRFKKIKPEAFEANRFYTVINKKSGEIVPMEVNFNFDDPNLIILPLAFGKRQGREFIWNDLLSLETGSLKLANGRVIEKTLYNRRTRQDEPALFVALTFERREVLDSSNIKPMNLIGVDRGENIPAVIALTDPEGCPLSRFKDSLGMPTHILRIGESYKEKQRTIQAKKEVEQRRAGGYSRKYASKAKNLADDMVRNTARDLLYYAVTQDAMLIFENLSRGFGRQGKRTFMAERQYTRMEDWLTAKLAYEGLPSKTYLSKTLAQYTSKTCSNCGFTITSADYDRVLEKLKKTATGWMTTINGKELKVEGQITYYNRYKRQNVVKDLSVELDRLSEESVNNDISSWTKGRSGEALSLLKKRFSHRPVQEKFVCLNCGFETHADEQAALNIARSWLFLRSQEYKKYQTNKTTGNTDKRAFVETWQSFYRKKLKEVWKPAV

SEQ ID NO: 26722 - protein, 978 aa, synthetic construct
  REGION 1..978: note = engineered CasX variant
QEIKRINKIRRRLVKDSNTKKAGKTGPMKTLLVRVMTPDLRERLENLRKKPENIPQPISNTSRANLNKLLTDYTEMKKAILHVYWEEFQKDPVGLMSRVAQPASKKIDQNKLKPEMDEKGNLTTAGFACSQCGQPLFVYKLEQVSEKGKAYTNYFGRCNVAEHEKLILLAQLKPEKDSDEAVTYSLGKFGQRALDFYSIHVTKESTHPVKPLAQIAGNRYASGPVGKALSDACMGTIASFLSKYQDIIIEHQKVVKGNQKRLESLRELAGKENLEYPSVTLPPQPHTKEGVDAYNEVIARVRMWVNLNLWQKLKLSRDDAKPLLRLKGFPSFPLVERQANEVDWWDMVCNVKKLINEKKEDGKVFWQNLAGYKRQEALRPYLSSEEDRKKGKKFARYQLGDLLLHLEKKHGEDWGKVYDEAWERIDKKVEGLSKHIKLEEERRSEDAQSKAALTDWLRAKASFVIEGLKEADKDEFCRCELKLQKWYGDLRGKPFAIEAENSILDISGFSKQYNCAFIWQKDGVKKLNLYLIINYFKGGKLRFKKIKPEAFEANRFYTVINKKSGEIVPMEVNFNFDDPNLIILPLAFGKRQGREFIWNDLLSLETGSLKLANGRVIEKTLYNRRTRQDEPALFVALTFERREVLDSSNIKPMNLIGVDRGENIPAVIALTDPEGCPLSRFKDSLGLPTHILRIGESYKEKQRTIQAKKEVEQRRAGGYSRKYASKAKNLADDMVRNTARDLLYYAVTQDAMLIFENLSRGFGRQGKRTFMAERQYTRMEDWLTAKLAYEGLPSKTYLSKTLAQYTSKTCSNCGFTITSADYDRVLEKLKKTATGWMTTINGKELKVEGQITYYNRYKRQNVVKDLSVELDRLSEESVNNDISSWTKGRSGEALSLLKKRFSHRPVQEKFVCLNCGFETHADEQAALNIARSWLFLRSQEYKKYQTNKTTGNTDKRAFVETWQSFYRKKLKEVWKPAV

SEQ ID NO: 26723 - protein, 978 aa, synthetic construct
  REGION 1..978: note = engineered CasX variant
QEIKRINKIRRRLVKDSNTKKAGKTGPMKTLLVRVMTPDLRERLENLRKKPENIPQPISNTSRANLNKLLTDYTEMKKAILHVYWEEFQKDPVGLMSRVAQPASKKIDQNKLKPEMDEKGNLTTAGFACSQCGQPLFVYKLEQVSEKGKAYTNYFGRCNVAEHEKLILLAQLKPEKDSDEAVTYSLGKFGQRALDFYSIHVTKESTHPVKPLAQIAGNRYASGPVGKALSDACMGTIASFLSKYQDIIIEHQKVVKGNQKRLESLRELAGKENLEYPSVTLPPQPHTKEGVDAYNEVIARVRMWVNLNLWQKLKLSRDDAKPLLRLKGFPSFPLVERQANEVDWWDMVCNVKKLINEKKEDGKVFWQNLAGYKRQEALRPYLSSEEDRKKGKKFARYQLGDLLLHLEKKHGEDWGKVYDEAWERIDKKVEGLSKHIKLEEERRSEDAQSKAALTDWLRAKASFVIEGLKEADKDEFCRCELKLQKWYGDLRGKPFAIEAENSILDISGFSKQYNCAFIWQKDGVKKLNLYLIINYFKGGKLRFKKIKPEAFEANRFYTVINKKSGEIVPMEVNFNFDDPNLIILPLAFGKRQGREFIWNDLLSLETGSLKLANGRVIEKTLYNRRTRQDEPALFVALTFERREVLDSSNIKPMNLIGVDRGENIPAVIALTDPEGCPLSRFKDSLGLPTHILRIGESYKEKQRTIQAKKEVEQRRAFGYSRKYASKAKNLADDMVRNTARDLLYYAVTQDAMLIFENLSRGFGRQGKRTFMAERQYTRMEDWLTAKLAYEGLPSKTYLSKTLAQYTSKTCSNCGFTITSADYDRVLEKLKKTATGWMTTINGKELKVEGQITYYNRYKRQNVVKDLSVELDRLSEESVNNDISSWTKGRSGEALSLLKKRFSHRPVQEKFVCLNCGFETHADEQAALNIARSWLFLRSQEYKKYQTNKTTGNTDKRAFVETWQSFYRKKLKEVWKPAV

SEQ ID NO: 26724 - protein, 978 aa, synthetic construct
  REGION 1..978: note = engineered CasX variant
QEIKRINKIRRRLVKDSNTKKAGKTGPMKTLLVRVMTPDLRERLENLRKKPENIPQPISNTSRANLNKLLTDYTEMKKAILHVYWEEFQKDPVGLMSRVAQPASKKIDQNKLKPEMDEKGNLTTAGFACSQCGQPLFVYKLEQVSEKGKAYTNYFGRCNVAEHEKLILLAQLKPEKDSDEAVTYSLGKFGQRALDFYSIHVTKESTHPVKPLAQIAGNRYASGPVGKALSDACMGTIASFLSKYQDIIIEHQKVVKGNQKRLESLRELAGKENLEYPSVTLPPQPHTKEGVDAYNEVIARVRMWVNLNLWQKLKLSRDDAKPLLRLKGFPSFPLVERQANEVDWWDMVCNVKKLINEKKEDGKVFWQNLAGYKRQEALRPYLSSEEDRKKGKKFARYQLGDLLLHLEKKHGEDWGKVYDEAWERIDKKVEGLSKHIKLEEERRSEDAQSKAALTDWLRAKASFVIEGLKEADKDEFCRCELKLQKWYGDLRGKPFAIEAENSILDISGFSKQYNCAFIWQKDGVKKLNLYLIINYFKGGKLRFKKIKPEAFEANRFYTVINKKSGEIVPMEVNFNFDDPNLIILPLAFGKRQGREFIWNDLLSLETGSLKLANGRVIEKTLYNRRTRQDEPALFVALTFERREVLDSSNIKPMNLIGVDRGENIPAVIALTDPEGCPLSRFKDSLGLPTHILRIGESYKEKQREIQAKKEVEQRRAGGYSRKYASKAKNLADDMVRNTARDLLYYAVTQDAMLIFENLSRGFGRQGKRTFMAERQYTRMEDWLTAKLAYEGLPSKTYLSKTLAQYTSKTCSNCGFTITSADYDRVLEKLKKTATGWMTTINGKELKVEGQITYYNRYKRQNVVKDLSVELDRLSEESVNNDISSWTKGRSGEALSLLKKRFSHRPVQEKFVCLNCGFETHADEQAALNIARSWLFLRSQEYKKYQTNKTTGNTDKRAFVETWQSFYRKKLKEVWKPAV

SEQ ID NO: 26725 - protein, 978 aa, synthetic construct
  REGION 1..978: note = engineered CasX variant
QEIKRINKIRRRLVKDSNTKKAGKTGPMKTLLVRVMTPDLRERLENLRKKPENIPQPISNTSRANLNKLLTDYTEMKKAILHVYWEEFQKDPVGLMSRVAQPASKKIDQNKLKPEMDEKGNLTTAGFACSQCGQPLFVYKLEQVSEKGKAYTNYFGRCNVAEHEKLILLAQLKPEKDSDEAVTYSLGKFGQRALDFYSIHVTKESTHPVKPLAQIAGNRYASGPVGKALSDACMGTIASFLSKYQDIIIEHQKVVKGNQKRLESLRELAGKENLEYPSVTLPPQPHTKEGVDAYNEVIARVRMWVNLNLWQKLKLSRDDAKPLLRLKGFPSFPLVERQANEVDWWDMVCNVKKLINEKKEDGKVFWQNLAGYKRQEALRPYLSSEEDRKKGKKFARYQLGDLLLHLEKKHGEDWGKVYDEAWERIDKKVEGLSKHIKLEEERRSEDAQSKAALTDWLRAKASFVIEGLKEADKDEFCRCELKLQKWYGDLRGKPFAIEAENSILDISGFSKQYNCAFIWQKDGVKKLNLYLIINYFKGGKLRFKKIKPEAFEANRFYTVINKKSGEIVPMEVNFNFDDPNLIILPLAFGKRQGREFIWNDLLSLETGSLKLANGRVIEKTLYNRRTRQDEPALFVALTFERREVLDSSNIKPMNLIGVDRGENIPAVIALTDPEGCPLSRFKDSLGLPTHILRFGESYKEKQRTIQAKKEVEQRRAGGYSRKYASKAKNLADDMVRNTARDLLYYAVTQDAMLIFENLSRGFGRQGKRTFMAERQYTRMEDWLTAKLAYEGLPSKTYLSKTLAQYTSKTCSNCGFTITSADYDRVLEKLKKTATGWMTTINGKELKVEGQITYYNRYKRQNVVKDLSVELDRLSEESVNNDISSWTKGRSGEALSLLKKRFSHRPVQEKFVCLNCGFETHADEQAALNIARSWLFLRSQEYKKYQTNKTTGNTDKRAFVETWQSFYRKKLKEVWKPAV

SEQ ID NO: 26726 - protein, 978 aa, synthetic construct
  REGION 1..978: note = engineered CasX variant
QEIKRINKIRRRLVKDSNTKKAGKTGPMKTLLVRVMTPDLRERLENLRKKPENIPQPISNTSRANLNKLLTDYTEMKKAILHVYWEEFQKDPVGLMSRVAQPASKKIDQNKLKPEMDEKGNLTTAGFACSQCGQPLFVYKLEQVSEKGKAYTNYFGRCNVAEHEKLILLAQLKPEKDSDEAVTYSLGKFGQRALDFYSIHVTKESTHPVKPLAQIAGNRYASGPVGKALSDACMGTIASFLSKYQDIIIEHQKVVKGNQKRLESLRELAGKENLEYPSVTLPPQPHTKEGVDAYNEVIARVRMWVNLNLWQKLKLSRDDAKPLLRLKGFPSFPLVERQANEVDWWDMVCNVKKLINEKKEDGKVFWQNLAGYKRQEALRPYLSSEEDRKKGKKFARYQLGDLLLHLEKKHGEDWGKVYDEAWERIDKKVEGLSKHIKLEEERRSEDAQSKAALTDWLRAKASFVIEGLKEADKDEFCRCELKLQKWYGDLRGKPFAIEAENSILDISGFSKQYNCAFIWQKDGVKKLNLYLIINYFKGGKLRFKKIKPEAFEANRFYTVINKKSGEIVPMEVNFNFDDPNLIILPLAFGKRQGREFIWNDLLSLETGSLKLANGRVIEKTLYNRRTRQDEPALFVALTFERREVLDSSNIKPMNLIGVDRGENIPAVIALTDPEGCPLSRFKDSLGKPTHILRIGESYKEKQRTIQASKEVEQRRAGGYSRKYASKAKNLADDMVRNTARDLLYYAVTQDAMLIFENLSRGFGRQGKRTFMAERQYTRMEDWLTAKLAYEGLPSKTYLSKTLAQYTSKTCSNCGFTITSADYDRVLEKLKKTATGWMTTINGKELKVEGQITYYNRYKRQNVVKDLSVELDRLSEESVNNDISSWTKGRSGEALSLLKKRFSHRPVQEKFVCLNCGFETHADEQAALNIARSWLFLRSQEYKKYQTNKTTGNTDKRAFVETWQSFYRKKLKEVWKPAV

SEQ ID NO: 26727 - protein, 978 aa, synthetic construct
  REGION 1..978: note = engineered CasX variant
QEIKRINKIRRRLVKDSNTKKAGKTGPMKTLLVRVMTPDLRERLENLRKKPENIPQPISNTSRANLNKLLTDYTEMKKAILHVYWEEFQKDPVGLMSRVAQPASKKIDQNKLKPEMDEKGNLTTAGFACSQCGQPLFVYKLEQVSEKGKAYTNYFGRCNVAEHEKLILLAQLKPEKDSDEAVTYSLGKFGQRALDFYSIHVTKESTHPVKPLAQIAGNRYASGPVGKALSDACMGTIASFLSKYQDIIIEHQKVVKGNQKRLESLRELAGKENLEYPSVTLPPQPHTKEGVDAYNEVIARVRMWVNLNLWQKLKLSRDDAKPLLRLKGFPSFPLVERQANEVDWWDMVCNVKKLINEKKEDGKVFWQNLAGYKRQEALRPYLSSEEDRKKGKKFARYQLGDLLLHLEKKHGEDWGKVYDEAWERIDKKVEGLSKHIKLEEERRSEDAQSKAALTDWLRAKASFVIEGLKEADKDEFCRCELKLQKWYGDLRGKPFAIEAENSILDISGFSKQYNCAFIWQKDGVKKLNLYLIINYFKGGKLRFKKIKPEAFEANRFYTVINKKSGEIVPMEVNFNFDDPNLIILPLAFGKRQGREFIWNDLLSLETGSLKLANGRVIEKTLYNRRTRQDEPALFVALTFERREVLDSSNIKPMNLIGVDRGENIPAVIALTDPEGCPLSRFKDSLGKPTHILRIGESYKEKQRTIQAKKEVEQRRAGGYSRKYASKAKNLADDMVRNTARDLLYYAVTQDAMLIFENLSRGFGRQGKRTFMAERQYTRMEDWLTAKLAYEGLPSKTYLSKTLAQYTSKTCSNCGFTITSADYDRVLEKLKKTATGWMTTINGKELKVEGQITYYNRYKRQNVVKDLSVELDRLSEESVNNDISSWTKGRSGEALSLLKKRFSHRPVQEKFVCLNCGFETHADEQAALNIARSWLFLRSQEYKKYQTNKTTGNTDKRAFVETWQSFYRKKLKEVWKPAV

SEQ ID NO: 26728 - protein, 978 aa, synthetic construct
  REGION 1..978: note = engineered CasX variant
QEIKRINKIRRRLVKDSNTKKAGKTGPMKTLLVRVMTPDLRERLENLRKKPENIPQPISNTSRANLNKLLTDYTEMKKAILHVYWEEFQKDPVGLMSRVAQPASKKIDQNKLKPEMDEKGNLTTAGFACSQCGQPLFVYKLEQVSEKGKAYTNYFGRCNVAEHEKLILLAQLKPEKDSDEAVTYSLGKFGQRALDFYSIHVTKESTHPVKPLAQIAGNRYASGPVGKALSDACMGTIASFLSKYQDIIIEHQKVVKGNQKRLESLRELAGKENLEYPSVTLPPQPHTKEGVDAYNEVIARVRMWVNLNLWQKLKLSRDDAKPLLRLKGFPSFPLVERQANEVDWWDMVCNVKKLINEKKEDGKVFWQNLAGYKRQEALRPYLSSEEDRKKGKKFARYQLGDLLLHLEKKHGEDWGKVYDEAWERIDKKVEGLSKHIKLEEERRSEDAQSKAALTDWLRAKASFVIEGLKEADKDEFCRCELKLQKWYGDLRGKPFAIEAENSILDISGFSKQYNCAFIWQKDGVKKLNLYLIINYFKGGKLRFKKIKPEAFEANRFYTVINKKSGEIVPMEVNFNFDDPNLIILPLAFGKRQGREFIWNDLLSLETGSLKLANGRVIEKTLYNRRTRQDEPALFVALTFERREVLDSSNIKPMNLIGVDRGENIPAVIALTDPEGCPLSRFKDSLGHPTHILRIGESYKEKQRTIQAVKEVEQRRAGGYSRKYASKAKNLADDMVRNTARDLLYYAVTQDAMLIFENLSRGFGRQGKRTFMAERQYTRMEDWLTAKLAYEGLPSKTYLSKTLAQYTSKTCSNCGFTITSADYDRVLEKLKKTATGWMTTINGKELKVEGQITYYNRYKRQNVVKDLSVELDRLSEESVNNDISSWTKGRSGEALSLLKKRFSHRPVQEKFVCLNCGFETHADEQAALNIARSWLFLRSQEYKKYQTNKTTGNTDKRAFVETWQSFYRKKLKEVWKPAV

SEQ ID NO: 26729 - protein, 978 aa, synthetic construct
  REGION 1..978: note = engineered CasX variant
QEIKRINKIRRRLVKDSNTKKAGKTGPMKTLLVRVMTPDLRERLENLRKKPENIPQPISNTSRANLNKLLTDYTEMKKAILHVYWEEFQKDPVGLMSRVAQPASKKIDQNKLKPEMDEKGNLTTAGFACSQCGQPLFVYKLEQVSEKGKAYTNYFGRCNVAEHEKLILLAQLKPEKDSDEAVTYSLGKFGQRALDFYSIHVTKESTHPVKPLAQIAGNRYASGPVGKALSDACMGTIASFLSKYQDIIIEHQKVVKGNQKRLESLRELAGKENLEYPSVTLPPQPHTKEGVDAYNEVIARVRMWVNLNLWQKLKLSRDDAKPLLRLKGFPSFPLVERQANEVDWWDMVCNVKKLINEKKEDGKVFWQNLAGYKRQEALRPYLSSEEDRKKGKKFARYQLGDLLLHLEKKHGEDWGKVYDEAWERIDKKVEGLSKHIKLEEERRSEDAQSKAALTDWLRAKASFVIEGLKEADKDEFCRCELKLQKWYGDLRGKPFAIEAENSILDISGFSKQYNCAFIWQKDGVKKLNLYLIINYFKGGKLRFKKIKPEAFEANRFYTVINKKSGEIVPMEVNFNFDDPNLIILPLAFGKRQGREFIWNDLLSLETGSLKLANGRVIEKTLYNRRTRQDEPALFVALTFERREVLDSSNIKPMNLIGVDRGENIPAVIALTDPEGCPLSRFKDSLGHPTHILRIGESYKEKQRTIQAKKEVEQRRAGGYSRKYASKAKNLADDMVRNTARDLLYYAVTQDAMLIFENLSRGFGRQGKRTFMAERQYTRMEDWLTAKLAYEGLPSKTYLSKTLAQYTSKTCSNCGFTITSADYDRVLEKLKKTATGWMTTINGKELKVEGQITYYNRYKRQNVVKDLSVELDRLSEESVNNDISSWTKGRSGEALSLLKKRFSHRPVQEKFVCLNCGFETHADEQAALNIARSWLFLRSQEYKKYQTNKTTGNTDKRAFVETWQSFYRKKLKEVWKPAV

SEQ ID NO: 26730 - protein, 978 aa, synthetic construct
  REGION 1..978: note = engineered CasX variant
QEIKRINKIRRRLVKDSNTKKAGKTGPMKTLLVRVMTPDLRERLENLRKKPENIPQPISNTSRANLNKLLTDYTEMKKAILHVYWEEFQKDPVGLMSRVAQPASKKIDQNKLKPEMDEKGNLTTAGFACSQCGQPLFVYKLEQVSEKGKAYTNYFGRCNVAEHEKLILLAQLKPEKDSDEAVTYSLGKFGQRALDFYSIHVTKESTHPVKPLAQIAGNRYASGPVGKALSDACMGTIASFLSKYQDIIIEHQKVVKGNQKRLESLRELAGKENLEYPSVTLPPQPHTKEGVDAYNEVIARVRMWVNLNLWQKLKLSRDDAKPLLRLKGFPSFPLVERQANEVDWWDMVCNVKKLINEKKEDGKVFWQNLAGYKRQEALRPYLSSEEDRKKGKKFARYQLGDLLLHLEKKHGEDWGKVYDEAWERIDKKVEGLSKHIKLEEERRSEDAQSKAALTDWLRAKASFVIEGLKEADKDEFCRCELKLQKWYGDLRGKPFAIEAENSILDISGFSKQYNCAFIWQKDGVKKLNLYLIINYFKGGKLRFKKIKPEAFEANRFYTVINKKSGEIVPMEVNFNFDDPNLIILPLAFGKRQGREFIWNDLLSLETGSLKLANGRVIEKTLYNRRTRQDEPALFVALTFERREVLDSSNIKPMNLIGVDRGENIPAVIALTDPEGCPLSRFKDSLGGPTHILRIGESYKEKQRTIQAKKEVEQRRAGGYSRKYASKAKNLADDMVRNTARDLLYYAVTQDAMLIFENLSRGFGRQGKRTFMAERQYTRMEDWLTAKLAYEGLPSKTYLSKTLAQYTSKTCSNCGFTITSADYDRVLEKLKKTATGWMTTINGKELKVEGQITYYNRYKRQNVVKDLSVELDRLSEESVNNDISSWTKGRSGEALSLLKKRFSHRPVQEKFVCLNCGFETHADEQAALNIARSWLFLRSQEYKKYQTNKTTGNTDKRAFVETWQSFYRKKLKEVWKPAV

SEQ ID NO: 26731 - protein, 978 aa, synthetic construct
  REGION 1..978: note = engineered CasX variant
QEIKRINKIRRRLVKDSNTKKAGKTGPMKTLLVRVMTPDLRERLENLRKKPENIPQPISNTSRANLNKLLTDYTEMKKAILHVYWEEFQKDPVGLMSRVAQPASKKIDQNKLKPEMDEKGNLTTAGFACSQCGQPLFVYKLEQVSEKGKAYTNYFGRCNVAEHEKLILLAQLKPEKDSDEAVTYSLGKFGQRALDFYSIHVTKESTHPVKPLAQIAGNRYASGPVGKALSDACMGTIASFLSKYQDIIIEHQKVVKGNQKRLESLRELAGKENLEYPSVTLPPQPHTKEGVDAYNEVIARVRMWVNLNLWQKLKLSRDDAKPLLRLKGFPSFPLVERQANEVDWWDMVCNVKKLINEKKEDGKVFWQNLAGYKRQEALRPYLSSEEDRKKGKKFARYQLGDLLLHLEKKHGEDWGKVYDEAWERIDKKVEGLSKHIKLEEERRSEDAQSKAALTDWLRAKASFVIEGLKEADKDEFCRCELKLQKWYGDLRGKPFAIEAENSILDISGFSKQYNCAFIWQKDGVKKLNLYLIINYFKGGKLRFKKIKPEAFEANRFYTVINKKSGEIVPMEVNFNFDDPNLIILPLAFGKRQGREFIWNDLLSLETGSLKLANGRVIEKTLYNRRTRQDEPALFVALTFERREVLDSSNIKPMNLIGVDRGENIPAVIALTDPEGCPLSRFKDSLGEPTHILRIQESYKEKQRTIQAKKEVEQRRAGGYSRKYASKAKNLADDMVRNTARDLLYYAVTQDAMLIFENLSRGFGRQGKRTFMAERQYTRMEDWLTAKLAYEGLPSKTYLSKTLAQYTSKTCSNCGFTITSADYDRVLEKLKKTATGWMTTINGKELKVEGQITYYNRYKRQNVVKDLSVELDRLSEESVNNDISSWTKGRSGEALSLLKKRFSHRPVQEKFVCLNCGFETHADEQAALNIARSWLFLRSQEYKKYQTNKTTGNTDKRAFVETWQSFYRKKLKEVWKPAV

SEQ ID NO: 26732 - protein, 978 aa, synthetic construct
  REGION 1..978: note = engineered CasX variant
QEIKRINKIRRRLVKDSNTKKAGKTGPMKTLLVRVMTPDLRERLENLRKKPENIPQPISNTSRANLNKLLTDYTEMKKAILHVYWEEFQKDPVGLMSRVAQPASKKIDQNKLKPEMDEKGNLTTAGFACSQCGQPLFVYKLEQVSEKGKAYTNYFGRCNVAEHEKLILLAQLKPEKDSDEAVTYSLGKFGQRALDFYSIHVTKESTHPVKPLAQIAGNRYASGPVGKALSDACMGTIASFLSKYQDIIIEHQKVVKGNQKRLESLRELAGKENLEYPSVTLPPQPHTKEGVDAYNEVIARVRMWVNLNLWQKLKLSRDDAKPLLRLKGFPSFPLVERQANEVDWWDMVCNVKKLINEKKEDGKVFWQNLAGYKRQEALRPYLSSEEDRKKGKKFARYQLGDLLLHLEKKHGEDWGKVYDEAWERIDKKVEGLSKHIKLEEERRSEDAQSKAALTDWLRAKASFVIEGLKEADKDEFCRCELKLQKWYGDLRGKPFAIEAENSILDISGFSKQYNCAFIWQKDGVKKLNLYLIINYFKGGKLRFKKIKPEAFEANRFYTVINKKSGEIVPMEVNFNFDDPNLIILPLAFGKRQGREFIWNDLLSLETGSLKLANGRVIEKTLYNRRTRQDEPALFVALTFERREVLDSSNIKPMNLIGVDRGENIPAVIALTDPEGCPLSRFKDSLGEPTHILRIGESYKEKQRTIQAKKEVEQRRAGGYSRKYASKAKNLADDMVRNTARDLLYYAVTQDAMLIFENLSRGFGRQGKRTFMAERQYTRMEDWLTAKLAYEGLPSKTYLSKTLAQYTSKTCSNCGFTITSADYDRVLEKLKKTATGWMTTINGKELKVEGQITYYNRYKRQNVVKDLSVELDRLSEESVNNDISSWTKGRSGEALSLLKKRFSHRPVQEKFVCLNCGFETHADEQAALNIARSWLFLRSQEYKKYQTNKTTGNTDKRAFVETWQSFYRKKLKEVWKPAV

SEQ ID NO: 26733 - protein, 978 aa, synthetic construct
  REGION 1..978: note = engineered CasX variant
QEIKRINKIRRRLVKDSNTKKAGKTGPMKTLLVRVMTPDLRERLENLRKKPENIPQPISNTSRANLNKLLTDYTEMKKAILHVYWEEFQKDPVGLMSRVAQPASKKIDQNKLKPEMDEKGNLTTAGFACSQCGQPLFVYKLEQVSEKGKAYTNYFGRCNVAEHEKLILLAQLKPEKDSDEAVTYSLGKFGQRALDFYSIHVTKESTHPVKPLAQIAGNRYASGPVGKALSDACMGTIASFLSKYQDIIIEHQKVVKGNQKRLESLRELAGKENLEYPSVTLPPQPHTKEGVDAYNEVIARVRMWVNLNLWQKLKLSRDDAKPLLRLKGFPSFPLVERQANEVDWWDMVCNVKKLINEKKEDGKVFWQNLAGYKRQEALRPYLSSEEDRKKGKKFARYQLGDLLLHLEKKHGEDWGKVYDEAWERIDKKVEGLSKHIKLEEERRSEDAQSKAALTDWLRAKASFVIEGLKEADKDEFCRCELKLQKWYGDLRGKPFAIEAENSILDISGFSKQYNCAFIWQKDGVKKLNLYLIINYFKGGKLRFKKIKPEAFEANRFYTVINKKSGEIVPMEVNFNFDDPNLIILPLAFGKRQGREFIWNDLLSLETGSLKLANGRVIEKTLYNRRTRQDEPALFVALTFERREVLDSSNIKPMNLIGVDRGENIPAVIALTDPEGCPLSRFKDSLGEPTHILRIGESYKEKQRTFQAKKEVEQRRAGGYSRKYASKAKNLADDMVRNTARDLLYYAVTQDAMLIFENLSRGFGRQGKRTFMAERQYTRMEDWLTAKLAYEGLPSKTYLSKTLAQYTSKTCSNCGFTITSADYDRVLEKLKKTATGWMTTINGKELKVEGQITYYNRYKRQNVVKDLSVELDRLSEESVNNDISSWTKGRSGEALSLLKKRFSHRPVQEKFVCLNCGFETHADEQAALNIARSWLFLRSQEYKKYQTNKTTGNTDKRAFVETWQSFYRKKLKEVWKPAV

SEQ ID NO: 26734 - protein, 978 aa, synthetic construct
  REGION 1..978: note = engineered CasX variant
QEIKRINKIRRRLVKDSNTKKAGKTGPMKTLLVRVMTPDLRERLENLRKKPENIPQPISNTSRANLNKLLTDYTEMKKAILHVYWEEFQKDPVGLMSRVAQPASKKIDQNKLKPEMDEKGNLTTAGFACSQCGQPLFVYKLEQVSEKGKAYTNYFGRCNVAEHEKLILLAQLKPEKDSDEAVTYSLGKFGQRALDFYSIHVTKESTHPVKPLAQIAGNRYASGPVGKALSDACMGTIASFLSKYQDIIIEHQKVVKGNQKRLESLRELAGKENLEYPSVTLPPQPHTKEGVDAYNEVIARVRMWVNLNLWQKLKLSRDDAKPLLRLKGFPSFPLVERQANEVDWWDMVCNVKKLINEKKEDGKVFWQNLAGYKRQEALRPYLSSEEDRKKGKKFARYQLGDLLLHLEKKHGEDWGKVYDEAWERIDKKVEGLSKHIKLEEERRSEDAQSKAALTDWLRAKASFVIEGLKEADKDEFCRCELKLQKWYGDLRGKPFAIEAENSILDISGFSKQYNCAFIWQKDGVKKLNLYLIINYFKGGKLRFKKIKPEAFEANRFYTVINKKSGEIVPMEVNFNFDDPNLIILPLAFGKRQGREFIWNDLLSLETGSLKLANGRVIEKTLYNRRTRQDEPALFVALTFERREVLDSSNIKPMNLIGVDRGENIPAVIALTDPEGCPLSRFKDSLGCPTHILRIGESYKEKWRTIQAKKEVEQRRAGGYSRKYASKAKNLADDMVRNTARDLLYYAVTQDAMLIFENLSRGFGRQGKRTFMAERQYTRMEDWLTAKLAYEGLPSKTYLSKTLAQYTSKTCSNCGFTITSADYDRVLEKLKKTATGWMTTINGKELKVEGQITYYNRYKRQNVVKDLSVELDRLSEESVNNDISSWTKGRSGEALSLLKKRFSHRPVQEKFVCLNCGFETHADEQAALNIARSWLFLRSQEYKKYQTNKTTGNTDKRAFVETWQSFYRKKLKEVWKPAV

SEQ ID NO: 26735 - protein, 978 aa, synthetic construct
  REGION 1..978: note = engineered CasX variant
QEIKRINKIRRRLVKDSNTKKAGKTGPMKTLLVRVMTPDLRERLENLRKKPENIPQPISNTSRANLNKLLTDYTEMKKAILHVYWEEFQKDPVGLMSRVAQPASKKIDQNKLKPEMDEKGNLTTAGFACSQCGQPLFVYKLEQVSEKGKAYTNYFGRCNVAEHEKLILLAQLKPEKDSDEAVTYSLGKFGQRALDFYSIHVTKESTHPVKPLAQIAGNRYASGPVGKALSDACMGTIASFLSKYQDIIIEHQKVVKGNQKRLESLRELAGKENLEYPSVTLPPQPHTKEGVDAYNEVIARVRMWVNLNLWQKLKLSRDDAKPLLRLKGFPSFPLVERQANEVDWWDMVCNVKKLINEKKEDGKVFWQNLAGYKRQEALRPYLSSEEDRKKGKKFARYQLGDLLLHLEKKHGEDWGKVYDEAWERIDKKVEGLSKHIKLEEERRSEDAQSKAALTDWLRAKASFVIEGLKEADKDEFCRCELKLQKWYGDLRGKPFAIEAENSILDISGFSKQYNCAFIWQKDGVKKLNLYLIINYFKGGKLRFKKIKPEAFEANRFYTVINKKSGEIVPMEVNFNFDDPNLIILPLAFGKRQGREFIWNDLLSLETGSLKLANGRVIEKTLYNRRTRQDEPALFVALTFERREVLDSSNIKPMNLIGVDRGENIPAVIALTDPEGCPLSRFKDSLGCPTHILRIGESYKEKQRTIQAKKEVEQRRAGGYSRKYASKAKNLADDMVRNTARDLLYYAVTQDAMLIFENLSRGFGRQGKRTFMAERQYTRMEDWLTAKLAYEGLPSKTYLSKTLAQYTSKTCSNCGFTITSADYDRVLEKLKKTATGWMTTINGKELKVEGQITYYNRYKRQNVVKDLSVELDRLSEESVNNDISSWTKGRSGEALSLLKKRFSHRPVQEKFVCLNCGFETHADEQAALNIARSWLFLRSQEYKKYQTNKTTGNTDKRAFVETWQSFYRKKLKEVWKPAV

SEQ ID NO: 26736 - protein, 978 aa, synthetic construct
  REGION 1..978: note = engineered CasX variant
QEIKRINKIRRRLVKDSNTKKAGKTGPMKTLLVRVMTPDLRERLENLRKKPENIPQPISNTSRANLNKLLTDYTEMKKAILHVYWEEFQKDPVGLMSRVAQPASKKIDQNKLKPEMDEKGNLTTAGFACSQCGQPLFVYKLEQVSEKGKAYTNYFGRCNVAEHEKLILLAQLKPEKDSDEAVTYSLGKFGQRALDFYSIHVTKESTHPVKPLAQIAGNRYASGPVGKALSDACMGTIASFLSKYQDIIIEHQKVVKGNQKRLESLRELAGKENLEYPSVTLPPQPHTKEGVDAYNEVIARVRMWVNLNLWQKLKLSRDDAKPLLRLKGFPSFPLVERQANEVDWWDMVCNVKKLINEKKEDGKVFWQNLAGYKRQEALRPYLSSEEDRKKGKKFARYQLGDLLLHLEKKHGEDWGKVYDEAWERIDKKVEGLSKHIKLEEERRSEDAQSKAALTDWLRAKASFVIEGLKEADKDEFCRCELKLQKWYGDLRGKPFAIEAENSILDISGFSKQYNCAFIWQKDGVKKLNLYLIINYFKGGKLRFKKIKPEAFEANRFYTVINKKSGEIVPMEVNFNFDDPNLIILPLAFGKRQGREFIWNDLLSLETGSLKLANGRVIEKTLYNRRTRQDEPALFVALTFERREVLDSSNIKPMNLIGVDRGENIPAVIALTDPEGCPLSRFKDSLGAPTHILRIGESYKEKQRTIQAKKEVEQRRAGGYSRKYASKAKNLADDMVRNTARDLLYYAVTQDAMLIFENLSRGFGRQGKRTFMAERQYTRMEDWLTAKLAYEGLPSKTYLSKTLAQYTSKTCSNCGFTITSADYDRVLEKLKKTATGWMTTINGKELKVEGQITYYNRYKRQNVVKDLSVELDRLSEESVNNDISSWTKGRSGEALSLLKKRFSHRPVQEKFVCLNCGFETHADEQAALNIARSWLFLRSQEYKKYQTNKTTGNTDKRAFVETWQSFYRKKLKEVWKPAV

SEQ ID NO: 26737 - protein, 978 aa, synthetic construct
  REGION 1..978: note = engineered CasX variant
QEIKRINKIRRRLVKDSNTKKAGKTGPMKTLLVRVMTPDLRERLENLRKKPENIPQPISNTSRANLNKLLTDYTEMKKAILHVYWEEFQKDPVGLMSRVAQPASKKIDQNKLKPEMDEKGNLTTAGFACSQCGQPLFVYKLEQVSEKGKAYTNYFGRCNVAEHEKLILLAQLKPEKDSDEAVTYSLGKFGQRALDFYSIHVTKESTHPVKPLAQIAGNRYASGPVGKALSDACMGTIASFLSKYQDIIIEHQKVVKGNQKRLESLRELAGKENLEYPSVTLPPQPHTKEGVDAYNEVIARVRMWVNLNLWQKLKLSRDDAKPLLRLKGFPSFPLVERQANEVDWWDMVCNVKKLINEKKEDGKVFWQNLAGYKRQEALRPYLSSEEDRKKGKKFARYQLGDLLLHLEKKHGEDWGKVYDEAWERIDKKVEGLSKHIKLEEERRSEDAQSKAALTDWLRAKASFVIEGLKEADKDEFCRCELKLQKWYGDLRGKPFAIEAENSILDISGFSKQYNCAFIWQKDGVKKLNLYLIINYFKGGKLRFKKIKPEAFEANRFYTVINKKSGEIVPMEVNFNFDDPNLIILPLAFGKRQGREFIWNDLLSLETGSLKLANGRVIEKTLYNRRTRQDEPALFVALTFERREVLDSSNIKPMNLIGVDRGENIPAVIALTDPEGCPLSRFKDSKGNTTHILRIGESYKEKQRTIQAKKEVEQRRAGGYSRKYASKAKNLADDMVRNTARDLLYYAVTQDAMLIFENLSRGFGRQGKRTFMAERQYTRMEDWLTAKLAYEGLPSKTYLSKTLAQYTSKTCSNCGFTITSADYDRVLEKLKKTATGWMTTINGKELKVEGQITYYNRYKRQNVVKDLSVELDRLSEESVNNDISSWTKGRSGEALSLLKKRFSHRPVQEKFVCLNCGFETHADEQAALNIARSWLFLRSQEYKKYQTNKTTGNTDKRAFVETWQSFYRKKLKEVWKPAV

SEQ ID NO: 26738 - protein, 978 aa, synthetic construct
  REGION 1..978: note = engineered CasX variant
QEIKRINKIRRRLVKDSNTKKAGKTGPMKTLLVRVMTPDLRERLENLRKKPENIPQPISNTSRANLNKLLTDYTEMKKAILHVYWEEFQKDPVGLMSRVAQPASKKIDQNKLKPEMDEKGNLTTAGFACSQCGQPLFVYKLEQVSEKGKAYTNYFGRCNVAEHEKLILLAQLKPEKDSDEAVTYSLGKFGQRALDFYSIHVTKESTHPVKPLAQIAGNRYASGPVGKALSDACMGTIASFLSKYQDIIIEHQKVVKGNQKRLESLRELAGKENLEYPSVTLPPQPHTKEGVDAYNEVIARVRMWVNLNLWQKLKLSRDDAKPLLRLKGFPSFPLVERQANEVDWWDMVCNVKKLINEKKEDGKVFWQNLAGYKRQEALRPYLSSEEDRKKGKKFARYQLGDLLLHLEKKHGEDWGKVYDEAWERIDKKVEGLSKHIKLEEERRSEDAQSKAALTDWLRAKASFVIEGLKEADKDEFCRCELKLQKWYGDLRGKPFAIEAENSILDISGFSKQYNCAFIWQKDGVKKLNLYLIINYFKGGKLRFKKIKPEAFEANRFYTVINKKSGEIVPMEVNFNFDDPNLIILPLAFGKRQGREFIWNDLLSLETGSLKLANGRVIEKTLYNRRTRQDEPALFVALTFERREVLDSSNIKPMNLIGVDRGENIPAVIALTDPEGCPLSRFKDSKGNPTHILRIGESYKENQRTIQAKKEVEQRRAGGYSRKYASKAKNLADDMVRNTARDLLYYAVTQDAMLIFENLSRGFGRQGKRTFMAERQYTRMEDWLTAKLAYEGLPSKTYLSKTLAQYTSKTCSNCGFTITSADYDRVLEKLKKTATGWMTTINGKELKVEGQITYYNRYKRQNVVKDLSVELDRLSEESVNNDISSWTKGRSGEALSLLKKRFSHRPVQEKFVCLNCGFETHADEQAALNIARSWLFLRSQEYKKYQTNKTTGNTDKRAFVETWQSFYRKKLKEVWKPAV

SEQ ID NO: 26739 - protein, 978 aa, synthetic construct
  REGION 1..978: note = engineered CasX variant
QEIKRINKIRRRLVKDSNTKKAGKTGPMKTLLVRVMTPDLRERLENLRKKPENIPQPISNTSRANLNKLLTDYTEMKKAILHVYWEEFQKDPVGLMSRVAQPASKKIDQNKLKPEMDEKGNLTTAGFACSQCGQPLFVYKLEQVSEKGKAYTNYFGRCNVAEHEKLILLAQLKPEKDSDEAVTYSLGKFGQRALDFYSIHVTKESTHPVKPLAQIAGNRYASGPVGKALSDACMGTIASFLSKYQDIIIEHQKVVKGNQKRLESLRELAGKENLEYPSVTLPPQPHTKEGVDAYNEVIARVRMWVNLNLWQKLKLSRDDAKPLLRLKGFPSFPLVERQANEVDWWDMVCNVKKLINEKKEDGKVFWQNLAGYKRQEALRPYLSSEEDRKKGKKFARYQLGDLLLHLEKKHGEDWGKVYDEAWERIDKKVEGLSKHIKLEEERRSEDAQSKAALTDWLRAKASFVIEGLKEADKDEFCRCELKLQKWYGDLRGKPFAIEAENSILDISGFSKQYNCAFIWQKDGVKKLNLYLIINYFKGGKLRFKKIKPEAFEANRFYTVINKKSGEIVPMEVNFNFDDPNLIILPLAFGKRQGREFIWNDLLSLETGSLKLANGRVIEKTLYNRRTRQDEPALFVALTFERREVLDSSNIKPMNLIGVDRGENIPAVIALTDPEGCPLSRFKDSKGNPTHILRIGESYKEKQRTYQAKKEVEQRRAGGYSRKYASKAKNLADDMVRNTARDLLYYAVTQDAMLIFENLSRGFGRQGKRTFMAERQYTRMEDWLTAKLAYEGLPSKTYLSKTLAQYTSKTCSNCGFTITSADYDRVLEKLKKTATGWMTTINGKELKVEGQITYYNRYKRQNVVKDLSVELDRLSEESVNNDISSWTKGRSGEALSLLKKRFSHRPVQEKFVCLNCGFETHADEQAALNIARSWLFLRSQEYKKYQTNKTTGNTDKRAFVETWQSFYRKKLKEVWKPAV

SEQ ID NO: 26740 - protein, 978 aa, synthetic construct
  REGION 1..978: note = engineered CasX variant
QEIKRINKIRRRLVKDSNTKKAGKTGPMKTLLVRVMTPDLRERLENLRKKPENIPQPISNTSRANLNKLLTDYTEMKKAILHVYWEEFQKDPVGLMSRVAQPASKKIDQNKLKPEMDEKGNLTTAGFACSQCGQPLFVYKLEQVSEKGKAYTNYFGRCNVAEHEKLILLAQLKPEKDSDEAVTYSLGKFGQRALDFYSIHVTKESTHPVKPLAQIAGNRYASGPVGKALSDACMGTIASFLSKYQDIIIEHQKVVKGNQKRLESLRELAGKENLEYPSVTLPPQPHTKEGVDAYNEVIARVRMWVNLNLWQKLKLSRDDAKPLLRLKGFPSFPLVERQANEVDWWDMVCNVKKLINEKKEDGKVFWQNLAGYKRQEALRPYLSSEEDRKKGKKFARYQLGDLLLHLEKKHGEDWGKVYDEAWERIDKKVEGLSKHIKLEEERRSEDAQSKAALTDWLRAKASFVIEGLKEADKDEFCRCELKLQKWYGDLRGKPFAIEAENSILDISGFSKQYNCAFIWQKDGVKKLNLYLIINYFKGGKLRFKKIKPEAFEANRFYTVINKKSGEIVPMEVNFNFDDPNLIILPLAFGKRQGREFIWNDLLSLETGSLKLANGRVIEKTLYNRRTRQDEPALFVALTFERREVLDSSNIKPMNLIGVDRGENIPAVIALTDPEGCPLSRFKDSKGNPTHILRIGESYKEKQRTIQAKKNVEQRRAGGYSRKYASKAKNLADDMVRNTARDLLYYAVTQDAMLIFENLSRGFGRQGKRTFMAERQYTRMEDWLTAKLAYEGLPSKTYLSKTLAQYTSKTCSNCGFTITSADYDRVLEKLKKTATGWMTTINGKELKVEGQITYYNRYKRQNVVKDLSVELDRLSEESVNNDISSWTKGRSGEALSLLKKRFSHRPVQEKFVCLNCGFETHADEQAALNIARSWLFLRSQEYKKYQTNKTTGNTDKRAFVETWQSFYRKKLKEVWKPAV

SEQ ID NO: 26741 - protein, 978 aa, synthetic construct
  REGION 1..978: note = engineered CasX variant
QEIKRINKIRRRLVKDSNTKKAGKTGPMKTLLVRVMTPDLRERLENLRKKPENIPQPISNTSRANLNKLLTDYTEMKKAILHVYWEEFQKDPVGLMSRVAQPASKKIDQNKLKPEMDEKGNLTTAGFACSQCGQPLFVYKLEQVSEKGKAYTNYFGRCNVAEHEKLILLAQLKPEKDSDEAVTYSLGKFGQRALDFYSIHVTKESTHPVKPLAQIAGNRYASGPVGKALSDACMGTIASFLSKYQDIIIEHQKVVKGNQKRLESLRELAGKENLEYPSVTLPPQPHTKEGVDAYNEVIARVRMWVNLNLWQKLKLSRDDAKPLLRLKGFPSFPLVERQANEVDWWDMVCNVKKLINEKKEDGKVFWQNLAGYKRQEALRPYLSSEEDRKKGKKFARYQLGDLLLHLEKKHGEDWGKVYDEAWERIDKKVEGLSKHIKLEEERRSEDAQSKAALTDWLRAKASFVIEGLKEADKDEFCRCELKLQKWYGDLRGKPFAIEAENSILDISGFSKQYNCAFIWQKDGVKKLNLYLIINYFKGGKLRFKKIKPEAFEANRFYTVINKKSGEIVPMEVNFNFDDPNLIILPLAFGKRQGREFIWNDLLSLETGSLKLANGRVIEKTLYNRRTRQDEPALFVALTFERREVLDSSNIKPMNLIGVDRGENIPAVIALTDPEGCPLSRFKDSKGNPTHILRIGESYKEKQRTIQAKKEVEQRRAGGYSRKYASKAKNLADDMVRNTARDLLYYAVTQDAMLIFENLSRGFGRQGKRTFMAERQYTRMEDWLTAKLAYEGLPSKTYLSKTLAQYTSKTCSNCGFTITSADYDRVLEKLKKTATGWMTTINGKELKVEGQITYYNRYKRQNVVKDLSVELDRLSEESVNNDISSWTKGRSGEALSLLKKRFSHRPVQEKFVCLNCGFETHADEQAALNIARSWLFLRSQEYKKYQTNKTTGNTDKRAFVETWQSFYRKKLKEVWKPAV

SEQ ID NO: 26742 - protein, 978 aa, synthetic construct
  REGION 1..978: note = engineered CasX variant
QEIKRINKIRRRLVKDSNTKKAGKTGPMKTLLVRVMTPDLRERLENLRKKPENIPQPISNTSRANLNKLLTDYTEMKKAILHVYWEEFQKDPVGLMSRVAQPASKKIDQNKLKPEMDEKGNLTTAGFACSQCGQPLFVYKLEQVSEKGKAYTNYFGRCNVAEHEKLILLAQLKPEKDSDEAVTYSLGKFGQRALDFYSIHVTKESTHPVKPLAQIAGNRYASGPVGKALSDACMGTIASFLSKYQDIIIEHQKVVKGNQKRLESLRELAGKENLEYPSVTLPPQPHTKEGVDAYNEVIARVRMWVNLNLWQKLKLSRDDAKPLLRLKGFPSFPLVERQANEVDWWDMVCNVKKLINEKKEDGKVFWQNLAGYKRQEALRPYLSSEEDRKKGKKFARYQLGDLLLHLEKKHGEDWGKVYDEAWERIDKKVEGLSKHIKLEEERRSEDAQSKAALTDWLRAKASFVIEGLKEADKDEFCRCELKLQKWYGDLRGKPFAIEAENSILDISGFSKQYNCAFIWQKDGVKKLNLYLIINYFKGGKLRFKKIKPEAFEANRFYTVINKKSGEIVPMEVNFNFDDPNLIILPLAFGKRQGREFIWNDLLSLETGSLKLANGRVIEKTLYNRRTRQDEPALFVALTFERREVLDSSNIKPMNLIGVDRGENIPAVIALTDPEGCPLSRFKDSKGNPTHILRIGEGYKENQRTIQAKKEVEQRRAGGYSRKYASKAKNLADDMVRNTARDLLYYAVTQDAMLIFENLSRGFGRQGKRTFMAERQYTRMEDWLTAKLAYEGLPSKTYLSKTLAQYTSKTCSNCGFTITSADYDRVLEKLKKTATGWMTTINGKELKVEGQITYYNRYKRQNVVKDLSVELDRLSEESVNNDISSWTKGRSGEALSLLKKRFSHRPVQEKFVCLNCGFETHADEQAALNIARSWLFLRSQEYKKYQTNKTTGNTDKRAFVETWQSFYRKKLKEVWKPAV

SEQ ID NO: 26743 - protein, 978 aa, synthetic construct
  REGION 1..978: note = engineered CasX variant
QEIKRINKIRRRLVKDSNTKKAGKTGPMKTLLVRVMTPDLRERLENLRKKPENIPQPISNTSRANLNKLLTDYTEMKKAILHVYWEEFQKDPVGLMSRVAQPASKKIDQNKLKPEMDEKGNLTTAGFACSQCGQPLFVYKLEQVSEKGKAYTNYFGRCNVAEHEKLILLAQLKPEKDSDEAVTYSLGKFGQRALDFYSIHVTKESTHPVKPLAQIAGNRYASGPVGKALSDACMGTIASFLSKYQDIIIEHQKVVKGNQKRLESLRELAGKENLEYPSVTLPPQPHTKEGVDAYNEVIARVRMWVNLNLWQKLKLSRDDAKPLLRLKGFPSFPLVERQANEVDWWDMVCNVKKLINEKKEDGKVFWQNLAGYKRQEALRPYLSSEEDRKKGKKFARYQLGDLLLHLEKKHGEDWGKVYDEAWERIDKKVEGLSKHIKLEEERRSEDAQSKAALTDWLRAKASFVIEGLKEADKDEFCRCELKLQKWYGDLRGKPFAIEAENSILDISGFSKQYNCAFIWQKDGVKKLNLYLIINYFKGGKLRFKKIKPEAFEANRFYTVINKKSGEIVPMEVNFNFDDPNLIILPLAFGKRQGREFIWNDLLSLETGSLKLANGRVIEKTLYNRRTRQDEPALFVALTFERREVLDSSNIKPMNLIGVDRGENIPAVIALTDPEGCPLSRFKDSKGNPTHILRIGEGYKEKQRTIQAKKEVEQRRAGGYSRKYASKAKNLADDMVRNTARDLLYYAVTQDAMLIFENLSRGFGRQGKRTFMAERQYTRMEDWLTAKLAYEGLPSKTYLSKTLAQYTSKTCSNCGFTITSADYDRVLEKLKKTATGWMTTINGKELKVEGQITYYNRYKRQNVVKDLSVELDRLSEESVNNDISSWTKGRSGEALSLLKKRFSHRPVQEKFVCLNCGFETHADEQAALNIARSWLFLRSQEYKKYQTNKTTGNTDKRAFVETWQSFYRKKLKEVWKPAV

SEQ ID NO: 26744 - protein, 978 aa, synthetic construct
  REGION 1..978: note = engineered CasX variant
QEIKRINKIRRRLVKDSNTKKAGKTGPMKTLLVRVMTPDLRERLENLRKKPENIPQPISNTSRANLNKLLTDYTEMKKAILHVYWEEFQKDPVGLMSRVAQPASKKIDQNKLKPEMDEKGNLTTAGFACSQCGQPLFVYKLEQVSEKGKAYTNYFGRCNVAEHEKLILLAQLKPEKDSDEAVTYSLGKFGQRALDFYSIHVTKESTHPVKPLAQIAGNRYASGPVGKALSDACMGTIASFLSKYQDIIIEHQKVVKGNQKRLESLRELAGKENLEYPSVTLPPQPHTKEGVDAYNEVIARVRMWVNLNLWQKLKLSRDDAKPLLRLKGFPSFPLVERQANEVDWWDMVCNVKKLINEKKEDGKVFWQNLAGYKRQEALRPYLSSEEDRKKGKKFARYQLGDLLLHLEKKHGEDWGKVYDEAWERIDKKVEGLSKHIKLEEERRSEDAQSKAALTDWLRAKASFVIEGLKEADKDEFCRCELKLQKWYGDLRGKPFAIEAENSILDISGFSKQYNCAFIWQKDGVKKLNLYLIINYFKGGKLRFKKIKPEAFEANRFYTVINKKSGEIVPMEVNFNFDDPNLIILPLAFGKRQGREFIWNDLLSLETGSLKLANGRVIEKTLYNRRTRQDEPALFVALTFERREVLDSSNIKPMNLIGVDRGENIPAVIALTDPEGCPLSRFKDSKGNPTFILRIGESYKEKQRTIQAKKEVEQRRAGGYSRKYASKAKNLADDMVRNTARDLLYYAVTQDAMLIFENLSRGFGRQGKRTFMAERQYTRMEDWLTAKLAYEGLPSKTYLSKTLAQYTSKTCSNCGFTITSADYDRVLEKLKKTATGWMTTINGKELKVEGQITYYNRYKRQNVVKDLSVELDRLSEESVNNDISSWTKGRSGEALSLLKKRFSHRPVQEKFVCLNCGFETHADEQAALNIARSWLFLRSQEYKKYQTNKTTGNTDKRAFVETWQSFYRKKLKEVWKPAV

SEQ ID NO: 26745 - protein, 978 aa, synthetic construct
  REGION 1..978: note = engineered CasX variant
QEIKRINKIRRRLVKDSNTKKAGKTGPMKTLLVRVMTPDLRERLENLRKKPENIPQPISNTSRANLNKLLTDYTEMKKAILHVYWEEFQKDPVGLMSRVAQPASKKIDQNKLKPEMDEKGNLTTAGFACSQCGQPLFVYKLEQVSEKGKAYTNYFGRCNVAEHEKLILLAQLKPEKDSDEAVTYSLGKFGQRALDFYSIHVTKESTHPVKPLAQIAGNRYASGPVGKALSDACMGTIASFLSKYQDIIIEHQKVVKGNQKRLESLRELAGKENLEYPSVTLPPQPHTKEGVDAYNEVIARVRMWVNLNLWQKLKLSRDDAKPLLRLKGFPSFPLVERQANEVDWWDMVCNVKKLINEKKEDGKVFWQNLAGYKRQEALRPYLSSEEDRKKGKKFARYQLGDLLLHLEKKHGEDWGKVYDEAWERIDKKVEGLSKHIKLEEERRSEDAQSKAALTDWLRAKASFVIEGLKEADKDEFCRCELKLQKWYGDLRGKPFAIEAENSILDISGFSKQYNCAFIWQKDGVKKLNLYLIINYFKGGKLRFKKIKPEAFEANRFYTVINKKSGEIVPMEVNFNFDDPNLIILPLAFGKRQGREFIWNDLLSLETGSLKLANGRVIEKTLYNRRTRQDEPALFVALTFERREVLDSSNIKPMNLIGVDRGENIPAVIALTDPEGCPLSRFKDSKGHPTHILRIGESYKEKQRTIQAKKEVEQRRAGGYSRKYASKAKNLADDMVRNTARDLLYYAVTQDAMLIFENLSRGFGRQGKRTFMAERQYTRMEDWLTAKLAYEGLPSKTYLSKTLAQYTSKTCSNCGFTITSADYDRVLEKLKKTATGWMTTINGKELKVEGQITYYNRYKRQNVVKDLSVELDRLSEESVNNDISSWTKGRSGEALSLLKKRFSHRPVQEKFVCLNCGFETHADEQAALNIARSWLFLRSQEYKKYQTNKTTGNTDKRAFVETWQSFYRKKLKEVWKPAV

SEQ ID NO: 26746 - protein, 978 aa, synthetic construct
  REGION 1..978: note = engineered CasX variant
QEIKRINKIRRRLVKDSNTKKAGKTGPMKTLLVRVMTPDLRERLENLRKKPENIPQPISNTSRANLNKLLTDYTEMKKAILHVYWEEFQKDPVGLMSRVAQPASKKIDQNKLKPEMDEKGNLTTAGFACSQCGQPLFVYKLEQVSEKGKAYTNYFGRCNVAEHEKLILLAQLKPEKDSDEAVTYSLGKFGQRALDFYSIHVTKESTHPVKPLAQIAGNRYASGPVGKALSDACMGTIASFLSKYQDIIIEHQKVVKGNQKRLESLRELAGKENLEYPSVTLPPQPHTKEGVDAYNEVIARVRMWVNLNLWQKLKLSRDDAKPLLRLKGFPSFPLVERQANEVDWWDMVCNVKKLINEKKEDGKVFWQNLAGYKRQEALRPYLSSEEDRKKGKKFARYQLGDLLLHLEKKHGEDWGKVYDEAWERIDKKVEGLSKHIKLEEERRSEDAQSKAALTDWLRAKASFVIEGLKEADKDEFCRCELKLQKWYGDLRGKPFAIEAENSILDISGFSKQYNCAFIWQKDGVKKLNLYLIINYFKGGKLRFKKIKPEAFEANRFYTVINKKSGEIVPMEVNFNFDDPNLIILPLAFGKRQGREFIWNDLLSLETGSLKLANGRVIEKTLYNRRTRQDEPALFVALTFERREVLDSSNIKPMNLIGVDRGENIPAVIALTDPEGCPLSRFKDSIGNPTHILRIGESYKEKQRTIQAKKEVEQRRAGGYSRKYASKAKNLADDMVRNTARDLLYYAVTQDAMLIFENLSRGFGRQGKRTFMAERQYTRMEDWLTAKLAYEGLPSKTYLSKTLAQYTSKTCSNCGFTITSADYDRVLEKLKKTATGWMTTINGKELKVEGQITYYNRYKRQNVVKDLSVELDRLSEESVNNDISSWTKGRSGEALSLLKKRFSHRPVQEKFVCLNCGFETHADEQAALNIARSWLFLRSQEYKKYQTNKTTGNTDKRAFVETWQSFYRKKLKEVWKPAV

SEQ ID NO: 26747 - protein, 978 aa, synthetic construct
  REGION 1..978: note = engineered CasX variant
QEIKRINKIRRRLVKDSNTKKAGKTGPMKTLLVRVMTPDLRERLENLRKKPENIPQPISNTSRANLNKLLTDYTEMKKAILHVYWEEFQKDPVGLMSRVAQPASKKIDQNKLKPEMDEKGNLTTAGFACSQCGQPLFVYKLEQVSEKGKAYTNYFGRCNVAEHEKLILLAQLKPEKDSDEAVTYSLGKFGQRALDFYSIHVTKESTHPVKPLAQIAGNRYASGPVGKALSDACMGTIASFLSKYQDIIIEHQKVVKGNQKRLESLRELAGKENLEYPSVTLPPQPHTKEGVDAYNEVIARVRMWVNLNLWQKLKLSRDDAKPLLRLKGFPSFPLVERQANEVDWWDMVCNVKKLINEKKEDGKVFWQNLAGYKRQEALRPYLSSEEDRKKGKKFARYQLGDLLLHLEKKHGEDWGKVYDEAWERIDKKVEGLSKHIKLEEERRSEDAQSKAALTDWLRAKASFVIEGLKEADKDEFCRCELKLQKWYGDLRGKPFAIEAENSILDISGFSKQYNCAFIWQKDGVKKLNLYLIINYFKGGKLRFKKIKPEAFEANRFYTVINKKSGEIVPMEVNFNFDDPNLIILPLAFGKRQGREFIWNDLLSLETGSLKLANGRVIEKTLYNRRTRQDEPALFVALTFERREVLDSSNIKPMNLIGVDRGENIPAVIALTDPEGCPLSRFKDSHGNPTHILRIGESYKHKQRTIQAKKEVEQRRAGGYSRKYASKAKNLADDMVRNTARDLLYYAVTQDAMLIFENLSRGFGRQGKRTFMAERQYTRMEDWLTAKLAYEGLPSKTYLSKTLAQYTSKTCSNCGFTITSADYDRVLEKLKKTATGWMTTINGKELKVEGQITYYNRYKRQNVVKDLSVELDRLSEESVNNDISSWTKGRSGEALSLLKKRFSHRPVQEKFVCLNCGFETHADEQAALNIARSWLFLRSQEYKKYQTNKTTGNTDKRAFVETWQSFYRKKLKEVWKPAV

SEQ ID NO: 26748 - protein, 978 aa, synthetic construct
  REGION 1..978: note = engineered CasX variant
QEIKRINKIRRRLVKDSNTKKAGKTGPMKTLLVRVMTPDLRERLENLRKKPENIPQPISNTSRANLNKLLTDYTEMKKAILHVYWEEFQKDPVGLMSRVAQPASKKIDQNKLKPEMDEKGNLTTAGFACSQCGQPLFVYKLEQVSEKGKAYTNYFGRCNVAEHEKLILLAQLKPEKDSDEAVTYSLGKFGQRALDFYSIHVTKESTHPVKPLAQIAGNRYASGPVGKALSDACMGTIASFLSKYQDIIIEHQKVVKGNQKRLESLRELAGKENLEYPSVTLPPQPHTKEGVDAYNEVIARVRMWVNLNLWQKLKLSRDDAKPLLRLKGFPSFPLVERQANEVDWWDMVCNVKKLINEKKEDGKVFWQNLAGYKRQEALRPYLSSEEDRKKGKKFARYQLGDLLLHLEKKHGEDWGKVYDEAWERIDKKVEGLSKHIKLEEERRSEDAQSKAALTDWLRAKASFVIEGLKEADKDEFCRCELKLQKWYGDLRGKPFAIEAENSILDISGFSKQYNCAFIWQKDGVKKLNLYLIINYFKGGKLRFKKIKPEAFEANRFYTVINKKSGEIVPMEVNFNFDDPNLIILPLAFGKRQGREFIWNDLLSLETGSLKLANGRVIEKTLYNRRTRQDEPALFVALTFERREVLDSSNIKPMNLIGVDRGENIPAVIALTDPEGCPLSRFKDSHGNPTHILRIGESYKEKQRTIQAKKEVNQRRAGGYSRKYASKAKNLADDMVRNTARDLLYYAVTQDAMLIFENLSRGFGRQGKRTFMAERQYTRMEDWLTAKLAYEGLPSKTYLSKTLAQYTSKTCSNCGFTITSADYDRVLEKLKKTATGWMTTINGKELKVEGQITYYNRYKRQNVVKDLSVELDRLSEESVNNDISSWTKGRSGEALSLLKKRFSHRPVQEKFVCLNCGFETHADEQAALNIARSWLFLRSQEYKKYQTNKTTGNTDKRAFVETWQSFYRKKLKEVWKPAV

SEQ ID NO: 26749 - protein, 978 aa, synthetic construct
  REGION 1..978: note = engineered CasX variant
QEIKRINKIRRRLVKDSNTKKAGKTGPMKTLLVRVMTPDLRERLENLRKKPENIPQPISNTSRANLNKLLTDYTEMKKAILHVYWEEFQKDPVGLMSRVAQPASKKIDQNKLKPEMDEKGNLTTAGFACSQCGQPLFVYKLEQVSEKGKAYTNYFGRCNVAEHEKLILLAQLKPEKDSDEAVTYSLGKFGQRALDFYSIHVTKESTHPVKPLAQIAGNRYASGPVGKALSDACMGTIASFLSKYQDIIIEHQKVVKGNQKRLESLRELAGKENLEYPSVTLPPQPHTKEGVDAYNEVIARVRMWVNLNLWQKLKLSRDDAKPLLRLKGFPSFPLVERQANEVDWWDMVCNVKKLINEKKEDGKVFWQNLAGYKRQEALRPYLSSEEDRKKGKKFARYQLGDLLLHLEKKHGEDWGKVYDEAWERIDKKVEGLSKHIKLEEERRSEDAQSKAALTDWLRAKASFVIEGLKEADKDEFCRCELKLQKWYGDLRGKPFAIEAENSILDISGFSKQYNCAFIWQKDGVKKLNLYLIINYFKGGKLRFKKIKPEAFEANRFYTVINKKSGEIVPMEVNFNFDDPNLIILPLAFGKRQGREFIWNDLLSLETGSLKLANGRVIEKTLYNRRTRQDEPALFVALTFERREVLDSSNIKPMNLIGVDRGENIPAVIALTDPEGCPLSRFKDSHGNPTHILRIGESYKEKQRTIQAKKEVEQRRAGGYSRKYASKAKNLADDMVRNTARDLLYYAVTQDAMLIFENLSRGFGRQGKRTFMAERQYTRMEDWLTAKLAYEGLPSKTYLSKTLAQYTSKTCSNCGFTITSADYDRVLEKLKKTATGWMTTINGKELKVEGQITYYNRYKRQNVVKDLSVELDRLSEESVNNDISSWTKGRSGEALSLLKKRFSHRPVQEKFVCLNCGFETHADEQAALNIARSWLFLRSQEYKKYQTNKTTGNTDKRAFVETWQSFYRKKLKEVWKPAV

SEQ ID NO: 26750 - protein, 978 aa, synthetic construct
  REGION 1..978: note = engineered CasX variant
QEIKRINKIRRRLVKDSNTKKAGKTGPMKTLLVRVMTPDLRERLENLRKKPENIPQPISNTSRANLNKLLTDYTEMKKAILHVYWEEFQKDPVGLMSRVAQPASKKIDQNKLKPEMDEKGNLTTAGFACSQCGQPLFVYKLEQVSEKGKAYTNYFGRCNVAEHEKLILLAQLKPEKDSDEAVTYSLGKFGQRALDFYSIHVTKESTHPVKPLAQIAGNRYASGPVGKALSDACMGTIASFLSKYQDIIIEHQKVVKGNQKRLESLRELAGKENLEYPSVTLPPQPHTKEGVDAYNEVIARVRMWVNLNLWQKLKLSRDDAKPLLRLKGFPSFPLVERQANEVDWWDMVCNVKKLINEKKEDGKVFWQNLAGYKRQEALRPYLSSEEDRKKGKKFARYQLGDLLLHLEKKHGEDWGKVYDEAWERIDKKVEGLSKHIKLEEERRSEDAQSKAALTDWLRAKASFVIEGLKEADKDEFCRCELKLQKWYGDLRGKPFAIEAENSILDISGFSKQYNCAFIWQKDGVKKLNLYLIINYFKGGKLRFKKIKPEAFEANRFYTVINKKSGEIVPMEVNFNFDDPNLIILPLAFGKRQGREFIWNDLLSLETGSLKLANGRVIEKTLYNRRTRQDEPALFVALTFERREVLDSSNIKPMNLIGVDRGENIPAVIALTDPEGCPLSRFKDSHGNPTHILRIGESYKEKQQTIQAKKEVEQRRAGGYSRKYASKAKNLADDMVRNTARDLLYYAVTQDAMLIFENLSRGFGRQGKRTFMAERQYTRMEDWLTAKLAYEGLPSKTYLSKTLAQYTSKTCSNCGFTITSADYDRVLEKLKKTATGWMTTINGKELKVEGQITYYNRYKRQNVVKDLSVELDRLSEESVNNDISSWTKGRSGEALSLLKKRFSHRPVQEKFVCLNCGFETHADEQAALNIARSWLFLRSQEYKKYQTNKTTGNTDKRAFVETWQSFYRKKLKEVWKPAV

SEQ ID NO: 26751 - protein, 978 aa, synthetic construct
  REGION 1..978: note = engineered CasX variant
QEIKRINKIRRRLVKDSNTKKAGKTGPMKTLLVRVMTPDLRERLENLRKKPENIPQPISNTSRANLNKLLTDYTEMKKAILHVYWEEFQKDPVGLMSRVAQPASKKIDQNKLKPEMDEKGNLTTAGFACSQCGQPLFVYKLEQVSEKGKAYTNYFGRCNVAEHEKLILLAQLKPEKDSDEAVTYSLGKFGQRALDFYSIHVTKESTHPVKPLAQIAGNRYASGPVGKALSDACMGTIASFLSKYQDIIIEHQKVVKGNQKRLESLRELAGKENLEYPSVTLPPQPHTKEGVDAYNEVIARVRMWVNLNLWQKLKLSRDDAKPLLRLKGFPSFPLVERQANEVDWWDMVCNVKKLINEKKEDGKVFWQNLAGYKRQEALRPYLSSEEDRKKGKKFARYQLGDLLLHLEKKHGEDWGKVYDEAWERIDKKVEGLSKHIKLEEERRSEDAQSKAALTDWLRAKASFVIEGLKEADKDEFCRCELKLQKWYGDLRGKPFAIEAENSILDISGFSKQYNCAFIWQKDGVKKLNLYLIINYFKGGKLRFKKIKPEAFEANRFYTVINKKSGEIVPMEVNFNFDDPNLIILPLAFGKRQGREFIWNDLLSLETGSLKLANGRVIEKTLYNRRTRQDEPALFVALTFERREVLDSSNIKPMNLIGVDRGENIPAVIALTDPEGCPLSRFKDSHGNPTHILRIGESYKCKQRTIQAKKEVEQRRAGGYSRKYASKAKNLADDMVRNTARDLLYYAVTQDAMLIFENLSRGFGRQGKRTFMAERQYTRMEDWLTAKLAYEGLPSKTYLSKTLAQYTSKTCSNCGFTITSADYDRVLEKLKKTATGWMTTINGKELKVEGQITYYNRYKRQNVVKDLSVELDRLSEESVNNDISSWTKGRSGEALSLLKKRFSHRPVQEKFVCLNCGFETHADEQAALNIARSWLFLRSQEYKKYQTNKTTGNTDKRAFVETWQSFYRKKLKEVWKPAV

SEQ ID NO: 26752 - protein, 978 aa, synthetic construct
  REGION 1..978: note = engineered CasX variant
QEIKRINKIRRRLVKDSNTKKAGKTGPMKTLLVRVMTPDLRERLENLRKKPENIPQPISNTSRANLNKLLTDYTEMKKAILHVYWEEFQKDPVGLMSRVAQPASKKIDQNKLKPEMDEKGNLTTAGFACSQCGQPLFVYKLEQVSEKGKAYTNYFGRCNVAEHEKLILLAQLKPEKDSDEAVTYSLGKFGQRALDFYSIHVTKESTHPVKPLAQIAGNRYASGPVGKALSDACMGTIASFLSKYQDIIIEHQKVVKGNQKRLESLRELAGKENLEYPSVTLPPQPHTKEGVDAYNEVIARVRMWVNLNLWQKLKLSRDDAKPLLRLKGFPSFPLVERQANEVDWWDMVCNVKKLINEKKEDGKVFWQNLAGYKRQEALRPYLSSEEDRKKGKKFARYQLGDLLLHLEKKHGEDWGKVYDEAWERIDKKVEGLSKHIKLEEERRSEDAQSKAALTDWLRAKASFVIEGLKEADKDEFCRCELKLQKWYGDLRGKPFAIEAENSILDISGFSKQYNCAFIWQKDGVKKLNLYLIINYFKGGKLRFKKIKPEAFEANRFYTVINKKSGEIVPMEVNFNFDDPNLIILPLAFGKRQGREFIWNDLLSLETGSLKLANGRVIEKTLYNRRTRQDEPALFVALTFERREVLDSSNIKPMNLIGVDRGENIPAVIALTDPEGCPLSRFKDSHGNPTHILRIGENYKEKQRTIQAKKEVEQRRAGGYSRKYASKAKNLADDMVRNTARDLLYYAVTQDAMLIFENLSRGFGRQGKRTFMAERQYTRMEDWLTAKLAYEGLPSKTYLSKTLAQYTSKTCSNCGFTITSADYDRVLEKLKKTATGWMTTINGKELKVEGQITYYNRYKRQNVVKDLSVELDRLSEESVNNDISSWTKGRSGEALSLLKKRFSHRPVQEKFVCLNCGFETHADEQAALNIARSWLFLRSQEYKKYQTNKTTGNTDKRAFVETWQSFYRKKLKEVWKPAV

SEQ ID NO: 26753 - protein, 978 aa, synthetic construct
  REGION 1..978: note = engineered CasX variant
QEIKRINKIRRRLVKDSNTKKAGKTGPMKTLLVRVMTPDLRERLENLRKKPENIPQPISNTSRANLNKLLTDYTEMKKAILHVYWEEFQKDPVGLMSRVAQPASKKIDQNKLKPEMDEKGNLTTAGFACSQCGQPLFVYKLEQVSEKGKAYTNYFGRCNVAEHEKLILLAQLKPEKDSDEAVTYSLGKFGQRALDFYSIHVTKESTHPVKPLAQIAGNRYASGPVGKALSDACMGTIASFLSKYQDIIIEHQKVVKGNQKRLESLRELAGKENLEYPSVTLPPQPHTKEGVDAYNEVIARVRMWVNLNLWQKLKLSRDDAKPLLRLKGFPSFPLVERQANEVDWWDMVCNVKKLINEKKEDGKVFWQNLAGYKRQEALRPYLSSEEDRKKGKKFARYQLGDLLLHLEKKHGEDWGKVYDEAWERIDKKVEGLSKHIKLEEERRSEDAQSKAALTDWLRAKASFVIEGLKEADKDEFCRCELKLQKWYGDLRGKPFAIEAENSILDISGFSKQYNCAFIWQKDGVKKLNLYLIINYFKGGKLRFKKIKPEAFEANRFYTVINKKSGEIVPMEVNFNFDDPNLIILPLAFGKRQGREFIWNDLLSLETGSLKLANGRVIEKTLYNRRTRQDEPALFVALTFERREVLDSSNIKPMNLIGVDRGENIPAVIALTDPEGCPLSRFKDSGGNPTWILRIGESYKEKQRTIQAKKEVEQRRAGGYSRKYASKAKNLADDMVRNTARDLLYYAVTQDAMLIFENLSRGFGRQGKRTFMAERQYTRMEDWLTAKLAYEGLPSKTYLSKTLAQYTSKTCSNCGFTITSADYDRVLEKLKKTATGWMTTINGKELKVEGQITYYNRYKRQNVVKDLSVELDRLSEESVNNDISSWTKGRSGEALSLLKKRFSHRPVQEKFVCLNCGFETHADEQAALNIARSWLFLRSQEYKKYQTNKTTGNTDKRAFVETWQSFYRKKLKEVWKPAV

SEQ ID NO: 26754 - protein, 978 aa, synthetic construct
  REGION 1..978: note = engineered CasX variant
QEIKRINKIRRRLVKDSNTKKAGKTGPMKTLLVRVMTPDLRERLENLRKKPENIPQPISNTSRANLNKLLTDYTEMKKAILHVYWEEFQKDPVGLMSRVAQPASKKIDQNKLKPEMDEKGNLTTAGFACSQCGQPLFVYKLEQVSEKGKAYTNYFGRCNVAEHEKLILLAQLKPEKDSDEAVTYSLGKFGQRALDFYSIHVTKESTHPVKPLAQIAGNRYASGPVGKALSDACMGTIASFLSKYQDIIIEHQKVVKGNQKRLESLRELAGKENLEYPSVTLPPQPHTKEGVDAYNEVIARVRMWVNLNLWQKLKLSRDDAKPLLRLKGFPSFPLVERQANEVDWWDMVCNVKKLINEKKEDGKVFWQNLAGYKRQEALRPYLSSEEDRKKGKKFARYQLGDLLLHLEKKHGEDWGKVYDEAWERIDKKVEGLSKHIKLEEERRSEDAQSKAALTDWLRAKASFVIEGLKEADKDEFCRCELKLQKWYGDLRGKPFAIEAENSILDISGFSKQYNCAFIWQKDGVKKLNLYLIINYFKGGKLRFKKIKPEAFEANRFYTVINKKSGEIVPMEVNFNFDDPNLIILPLAFGKRQGREFIWNDLLSLETGSLKLANGRVIEKTLYNRRTRQDEPALFVALTFERREVLDSSNIKPMNLIGVDRGENIPAVIALTDPEGCPLSRFKDSGGNPTHILRIGESYKRKQRTIQAKKEVEQRRAGGYSRKYASKAKNLADDMVRNTARDLLYYAVTQDAMLIFENLSRGFGRQGKRTFMAERQYTRMEDWLTAKLAYEGLPSKTYLSKTLAQYTSKTCSNCGFTITSADYDRVLEKLKKTATGWMTTINGKELKVEGQITYYNRYKRQNVVKDLSVELDRLSEESVNNDISSWTKGRSGEALSLLKKRFSHRPVQEKFVCLNCGFETHADEQAALNIARSWLFLRSQEYKKYQTNKTTGNTDKRAFVETWQSFYRKKLKEVWKPAV

SEQ ID NO: 26755 - protein, 978 aa, synthetic construct
  REGION 1..978: note = engineered CasX variant
QEIKRINKIRRRLVKDSNTKKAGKTGPMKTLLVRVMTPDLRERLENLRKKPENIPQPISNTSRANLNKLLTDYTEMKKAILHVYWEEFQKDPVGLMSRVAQPASKKIDQNKLKPEMDEKGNLTTAGFACSQCGQPLFVYKLEQVSEKGKAYTNYFGRCNVAEHEKLILLAQLKPEKDSDEAVTYSLGKFGQRALDFYSIHVTKESTHPVKPLAQIAGNRYASGPVGKALSDACMGTIASFLSKYQDIIIEHQKVVKGNQKRLESLRELAGKENLEYPSVTLPPQPHTKEGVDAYNEVIARVRMWVNLNLWQKLKLSRDDAKPLLRLKGFPSFPLVERQANEVDWWDMVCNVKKLINEKKEDGKVFWQNLAGYKRQEALRPYLSSEEDRKKGKKFARYQLGDLLLHLEKKHGEDWGKVYDEAWERIDKKVEGLSKHIKLEEERRSEDAQSKAALTDWLRAKASFVIEGLKEADKDEFCRCELKLQKWYGDLRGKPFAIEAENSILDISGFSKQYNCAFIWQKDGVKKLNLYLIINYFKGGKLRFKKIKPEAFEANRFYTVINKKSGEIVPMEVNFNFDDPNLIILPLAFGKRQGREFIWNDLLSLETGSLKLANGRVIEKTLYNRRTRQDEPALFVALTFERREVLDSSNIKPMNLIGVDRGENIPAVIALTDPEGCPLSRFKDSGGNPTHILRIGESYKETQRTIQAKKEVEQRRAGGYSRKYASKAKNLADDMVRNTARDLLYYAVTQDAMLIFENLSRGFGRQGKRTFMAERQYTRMEDWLTAKLAYEGLPSKTYLSKTLAQYTSKTCSNCGFTITSADYDRVLEKLKKTATGWMTTINGKELKVEGQITYYNRYKRQNVVKDLSVELDRLSEESVNNDISSWTKGRSGEALSLLKKRFSHRPVQEKFVCLNCGFETHADEQAALNIARSWLFLRSQEYKKYQTNKTTGNTDKRAFVETWQSFYRKKLKEVWKPAV

SEQ ID NO: 26756 - protein, 978 aa, synthetic construct
  REGION 1..978: note = engineered CasX variant
QEIKRINKIRRRLVKDSNTKKAGKTGPMKTLLVRVMTPDLRERLENLRKKPENIPQPISNTSRANLNKLLTDYTEMKKAILHVYWEEFQKDPVGLMSRVAQPASKKIDQNKLKPEMDEKGNLTTAGFACSQCGQPLFVYKLEQVSEKGKAYTNYFGRCNVAEHEKLILLAQLKPEKDSDEAVTYSLGKFGQRALDFYSIHVTKESTHPVKPLAQIAGNRYASGPVGKALSDACMGTIASFLSKYQDIIIEHQKVVKGNQKRLESLRELAGKENLEYPSVTLPPQPHTKEGVDAYNEVIARVRMWVNLNLWQKLKLSRDDAKPLLRLKGFPSFPLVERQANEVDWWDMVCNVKKLINEKKEDGKVFWQNLAGYKRQEALRPYLSSEEDRKKGKKFARYQLGDLLLHLEKKHGEDWGKVYDEAWERIDKKVEGLSKHIKLEEERRSEDAQSKAALTDWLRAKASFVIEGLKEADKDEFCRCELKLQKWYGDLRGKPFAIEAENSILDISGFSKQYNCAFIWQKDGVKKLNLYLIINYFKGGKLRFKKIKPEAFEANRFYTVINKKSGEIVPMEVNFNFDDPNLIILPLAFGKRQGREFIWNDLLSLETGSLKLANGRVIEKTLYNRRTRQDEPALFVALTFERREVLDSSNIKPMNLIGVDRGENIPAVIALTDPEGCPLSRFKDSGGNPTHILRIGESYKEKQRTIQATKEVEQRRAGGYSRKYASKAKNLADDMVRNTARDLLYYAVTQDAMLIFENLSRGFGRQGKRTFMAERQYTRMEDWLTAKLAYEGLPSKTYLSKTLAQYTSKTCSNCGFTITSADYDRVLEKLKKTATGWMTTINGKELKVEGQITYYNRYKRQNVVKDLSVELDRLSEESVNNDISSWTKGRSGEALSLLKKRFSHRPVQEKFVCLNCGFETHADEQAALNIARSWLFLRSQEYKKYQTNKTTGNTDKRAFVETWQSFYRKKLKEVWKPAV

SEQ ID NO: 26757 - protein, 978 aa, synthetic construct
  REGION 1..978: note = engineered CasX variant
QEIKRINKIRRRLVKDSNTKKAGKTGPMKTLLVRVMTPDLRERLENLRKKPENIPQPISNTSRANLNKLLTDYTEMKKAILHVYWEEFQKDPVGLMSRVAQPASKKIDQNKLKPEMDEKGNLTTAGFACSQCGQPLFVYKLEQVSEKGKAYTNYFGRCNVAEHEKLILLAQLKPEKDSDEAVTYSLGKFGQRALDFYSIHVTKESTHPVKPLAQIAGNRYASGPVGKALSDACMGTIASFLSKYQDIIIEHQKVVKGNQKRLESLRELAGKENLEYPSVTLPPQPHTKEGVDAYNEVIARVRMWVNLNLWQKLKLSRDDAKPLLRLKGFPSFPLVERQANEVDWWDMVCNVKKLINEKKEDGKVFWQNLAGYKRQEALRPYLSSEEDRKKGKKFARYQLGDLLLHLEKKHGEDWGKVYDEAWERIDKKVEGLSKHIKLEEERRSEDAQSKAALTDWLRAKASFVIEGLKEADKDEFCRCELKLQKWYGDLRGKPFAIEAENSILDISGFSKQYNCAFIWQKDGVKKLNLYLIINYFKGGKLRFKKIKPEAFEANRFYTVINKKSGEIVPMEVNFNFDDPNLIILPLAFGKRQGREFIWNDLLSLETGSLKLANGRVIEKTLYNRRTRQDEPALFVALTFERREVLDSSNIKPMNLIGVDRGENIPAVIALTDPEGCPLSRFKDSGGNPTHILRIGESYKEKQRTIQAKKEVEQRRTGGYSRKYASKAKNLADDMVRNTARDLLYYAVTQDAMLIFENLSRGFGRQGKRTFMAERQYTRMEDWLTAKLAYEGLPSKTYLSKTLAQYTSKTCSNCGFTITSADYDRVLEKLKKTATGWMTTINGKELKVEGQITYYNRYKRQNVVKDLSVELDRLSEESVNNDISSWTKGRSGEALSLLKKRFSHRPVQEKFVCLNCGFETHADEQAALNIARSWLFLRSQEYKKYQTNKTTGNTDKRAFVETWQSFYRKKLKEVWKPAV

SEQ ID NO: 26758 - protein, 978 aa, synthetic construct
  REGION 1..978: note = engineered CasX variant
QEIKRINKIRRRLVKDSNTKKAGKTGPMKTLLVRVMTPDLRERLENLRKKPENIPQPISNTSRANLNKLLTDYTEMKKAILHVYWEEFQKDPVGLMSRVAQPASKKIDQNKLKPEMDEKGNLTTAGFACSQCGQPLFVYKLEQVSEKGKAYTNYFGRCNVAEHEKLILLAQLKPEKDSDEAVTYSLGKFGQRALDFYSIHVTKESTHPVKPLAQIAGNRYASGPVGKALSDACMGTIASFLSKYQDIIIEHQKVVKGNQKRLESLRELAGKENLEYPSVTLPPQPHTKEGVDAYNEVIARVRMWVNLNLWQKLKLSRDDAKPLLRLKGFPSFPLVERQANEVDWWDMVCNVKKLINEKKEDGKVFWQNLAGYKRQEALRPYLSSEEDRKKGKKFARYQLGDLLLHLEKKHGEDWGKVYDEAWERIDKKVEGLSKHIKLEEERRSEDAQSKAALTDWLRAKASFVIEGLKEADKDEFCRCELKLQKWYGDLRGKPFAIEAENSILDISGFSKQYNCAFIWQKDGVKKLNLYLIINYFKGGKLRFKKIKPEAFEANRFYTVINKKSGEIVPMEVNFNFDDPNLIILPLAFGKRQGREFIWNDLLSLETGSLKLANGRVIEKTLYNRRTRQDEPALFVALTFERREVLDSSNIKPMNLIGVDRGENIPAVIALTDPEGCPLSRFKDSGGNPTHILRIGESYKEKQRTIQAKKEVEQRRAGGYSRKYASKAKNLADDMVRNTARDLLYYAVTQDAMLIFENLSRGFGRQGKRTFMAERQYTRMEDWLTAKLAYEGLPSKTYLSKTLAQYTSKTCSNCGFTITSADYDRVLEKLKKTATGWMTTINGKELKVEGQITYYNRYKRQNVVKDLSVELDRLSEESVNNDISSWTKGRSGEALSLLKKRFSHRPVQEKFVCLNCGFETHADEQAALNIARSWLFLRSQEYKKYQTNKTTGNTDKRAFVETWQSFYRKKLKEVWKPAV

SEQ ID NO: 26759 - protein, 978 aa, synthetic construct
  REGION 1..978: note = engineered CasX variant
QEIKRINKIRRRLVKDSNTKKAGKTGPMKTLLVRVMTPDLRERLENLRKKPENIPQPISNTSRANLNKLLTDYTEMKKAILHVYWEEFQKDPVGLMSRVAQPASKKIDQNKLKPEMDEKGNLTTAGFACSQCGQPLFVYKLEQVSEKGKAYTNYFGRCNVAEHEKLILLAQLKPEKDSDEAVTYSLGKFGQRALDFYSIHVTKESTHPVKPLAQIAGNRYASGPVGKALSDACMGTIASFLSKYQDIIIEHQKVVKGNQKRLESLRELAGKENLEYPSVTLPPQPHTKEGVDAYNEVIARVRMWVNLNLWQKLKLSRDDAKPLLRLKGFPSFPLVERQANEVDWWDMVCNVKKLINEKKEDGKVFWQNLAGYKRQEALRPYLSSEEDRKKGKKFARYQLGDLLLHLEKKHGEDWGKVYDEAWERIDKKVEGLSKHIKLEEERRSEDAQSKAALTDWLRAKASFVIEGLKEADKDEFCRCELKLQKWYGDLRGKPFAIEAENSILDISGFSKQYNCAFIWQKDGVKKLNLYLIINYFKGGKLRFKKIKPEAFEANRFYTVINKKSGEIVPMEVNFNFDDPNLIILPLAFGKRQGREFIWNDLLSLETGSLKLANGRVIEKTLYNRRTRQDEPALFVALTFERREVLDSSNIKPMNLIGVDRGENIPAVIALTDPEGCPLSRFKDSGGNPTHILRIGEHYKEKQRTIQAKKEVEQRRAGGYSRKYASKAKNLADDMVRNTARDLLYYAVTQDAMLIFENLSRGFGRQGKRTFMAERQYTRMEDWLTAKLAYEGLPSKTYLSKTLAQYTSKTCSNCGFTITSADYDRVLEKLKKTATGWMTTINGKELKVEGQITYYNRYKRQNVVKDLSVELDRLSEESVNNDISSWTKGRSGEALSLLKKRFSHRPVQEKFVCLNCGFETHADEQAALNIARSWLFLRSQEYKKYQTNKTTGNTDKRAFVETWQSFYRKKLKEVWKPAV

SEQ ID NO: 26760 - protein, 978 aa, synthetic construct
  REGION 1..978: note = engineered CasX variant
QEIKRINKIRRRLVKDSNTKKAGKTGPMKTLLVRVMTPDLRERLENLRKKPENIPQPISNTSRANLNKLLTDYTEMKKAILHVYWEEFQKDPVGLMSRVAQPASKKIDQNKLKPEMDEKGNLTTAGFACSQCGQPLFVYKLEQVSEKGKAYTNYFGRCNVAEHEKLILLAQLKPEKDSDEAVTYSLGKFGQRALDFYSIHVTKESTHPVKPLAQIAGNRYASGPVGKALSDACMGTIASFLSKYQDIIIEHQKVVKGNQKRLESLRELAGKENLEYPSVTLPPQPHTKEGVDAYNEVIARVRMWVNLNLWQKLKLSRDDAKPLLRLKGFPSFPLVERQANEVDWWDMVCNVKKLINEKKEDGKVFWQNLAGYKRQEALRPYLSSEEDRKKGKKFARYQLGDLLLHLEKKHGEDWGKVYDEAWERIDKKVEGLSKHIKLEEERRSEDAQSKAALTDWLRAKASFVIEGLKEADKDEFCRCELKLQKWYGDLRGKPFAIEAENSILDISGFSKQYNCAFIWQKDGVKKLNLYLIINYFKGGKLRFKKIKPEAFEANRFYTVINKKSGEIVPMEVNFNFDDPNLIILPLAFGKRQGREFIWNDLLSLETGSLKLANGRVIEKTLYNRRTRQDEPALFVALTFERREVLDSSNIKPMNLIGVDRGENIPAVIALTDPEGCPLSRFKDSFGNPTHILRIGGSYKEKQRTIQAKKEVEQRRAGGYSRKYASKAKNLADDMVRNTARDLLYYAVTQDAMLIFENLSRGFGRQGKRTFMAERQYTRMEDWLTAKLAYEGLPSKTYLSKTLAQYTSKTCSNCGFTITSADYDRVLEKLKKTATGWMTTINGKELKVEGQITYYNRYKRQNVVKDLSVELDRLSEESVNNDISSWTKGRSGEALSLLKKRFSHRPVQEKFVCLNCGFETHADEQAALNIARSWLFLRSQEYKKYQTNKTTGNTDKRAFVETWQSFYRKKLKEVWKPAV

SEQ ID NO: 26761 - protein, 978 aa, synthetic construct
  REGION 1..978: note = engineered CasX variant
QEIKRINKIRRRLVKDSNTKKAGKTGPMKTLLVRVMTPDLRERLENLRKKPENIPQPISNTSRANLNKLLTDYTEMKKAILHVYWEEFQKDPVGLMSRVAQPASKKIDQNKLKPEMDEKGNLTTAGFACSQCGQPLFVYKLEQVSEKGKAYTNYFGRCNVAEHEKLILLAQLKPEKDSDEAVTYSLGKFGQRALDFYSIHVTKESTHPVKPLAQIAGNRYASGPVGKALSDACMGTIASFLSKYQDIIIEHQKVVKGNQKRLESLRELAGKENLEYPSVTLPPQPHTKEGVDAYNEVIARVRMWVNLNLWQKLKLSRDDAKPLLRLKGFPSFPLVERQANEVDWWDMVCNVKKLINEKKEDGKVFWQNLAGYKRQEALRPYLSSEEDRKKGKKFARYQLGDLLLHLEKKHGEDWGKVYDEAWERIDKKVEGLSKHIKLEEERRSEDAQSKAALTDWLRAKASFVIEGLKEADKDEFCRCELKLQKWYGDLRGKPFAIEAENSILDISGFSKQYNCAFIWQKDGVKKLNLYLIINYFKGGKLRFKKIKPEAFEANRFYTVINKKSGEIVPMEVNFNFDDPNLIILPLAFGKRQGREFIWNDLLSLETGSLKLANGRVIEKTLYNRRTRQDEPALFVALTFERREVLDSSNIKPMNLIGVDRGENIPAVIALTDPEGCPLSRFKDSFGNPTHILRIGESYKQKQRTIQAKKEVEQRRAGGYSRKYASKAKNLADDMVRNTARDLLYYAVTQDAMLIFENLSRGFGRQGKRTFMAERQYTRMEDWLTAKLAYEGLPSKTYLSKTLAQYTSKTCSNCGFTITSADYDRVLEKLKKTATGWMTTINGKELKVEGQITYYNRYKRQNVVKDLSVELDRLSEESVNNDISSWTKGRSGEALSLLKKRFSHRPVQEKFVCLNCGFETHADEQAALNIARSWLFLRSQEYKKYQTNKTTGNTDKRAFVETWQSFYRKKLKEVWKPAV

SEQ ID NO: 26762 - protein, 978 aa, synthetic construct
  REGION 1..978: note = engineered CasX variant
QEIKRINKIRRRLVKDSNTKKAGKTGPMKTLLVRVMTPDLRERLENLRKKPENIPQPISNTSRANLNKLLTDYTEMKKAILHVYWEEFQKDPVGLMSRVAQPASKKIDQNKLKPEMDEKGNLTTAGFACSQCGQPLFVYKLEQVSEKGKAYTNYFGRCNVAEHEKLILLAQLKPEKDSDEAVTYSLGKFGQRALDFYSIHVTKESTHPVKPLAQIAGNRYASGPVGKALSDACMGTIASFLSKYQDIIIEHQKVVKGNQKRLESLRELAGKENLEYPSVTLPPQPHTKEGVDAYNEVIARVRMWVNLNLWQKLKLSRDDAKPLLRLKGFPSFPLVERQANEVDWWDMVCNVKKLINEKKEDGKVFWQNLAGYKRQEALRPYLSSEEDRKKGKKFARYQLGDLLLHLEKKHGEDWGKVYDEAWERIDKKVEGLSKHIKLEEERRSEDAQSKAALTDWLRAKASFVIEGLKEADKDEFCRCELKLQKWYGDLRGKPFAIEAENSILDISGFSKQYNCAFIWQKDGVKKLNLYLIINYFKGGKLRFKKIKPEAFEANRFYTVINKKSGEIVPMEVNFNFDDPNLIILPLAFGKRQGREFIWNDLLSLETGSLKLANGRVIEKTLYNRRTRQDEPALFVALTFERREVLDSSNIKPMNLIGVDRGENIPAVIALTDPEGCPLSRFKDSFGNPTHILRIGESYKQKQRCIQAKKEVEQRRAGGYSRKYASKAKNLADDMVRNTARDLLYYAVTQDAMLIFENLSRGFGRQGKRTFMAERQYTRMEDWLTAKLAYEGLPSKTYLSKTLAQYTSKTCSNCGFTITSADYDRVLEKLKKTATGWMTTINGKELKVEGQITYYNRYKRQNVVKDLSVELDRLSEESVNNDISSWTKGRSGEALSLLKKRFSHRPVQEKFVCLNCGFETHADEQAALNIARSWLFLRSQEYKKYQTNKTTGNTDKRAFVETWQSFYRKKLKEVWKPAV

SEQ ID NO: 26763 - protein, 978 aa, synthetic construct
  REGION 1..978: note = engineered CasX variant
QEIKRINKIRRRLVKDSNTKKAGKTGPMKTLLVRVMTPDLRERLENLRKKPENIPQPISNTSRANLNKLLTDYTEMKKAILHVYWEEFQKDPVGLMSRVAQPASKKIDQNKLKPEMDEKGNLTTAGFACSQCGQPLFVYKLEQVSEKGKAYTNYFGRCNVAEHEKLILLAQLKPEKDSDEAVTYSLGKFGQRALDFYSIHVTKESTHPVKPLAQIAGNRYASGPVGKALSDACMGTIASFLSKYQDIIIEHQKVVKGNQKRLESLRELAGKENLEYPSVTLPPQPHTKEGVDAYNEVIARVRMWVNLNLWQKLKLSRDDAKPLLRLKGFPSFPLVERQANEVDWWDMVCNVKKLINEKKEDGKVFWQNLAGYKRQEALRPYLSSEEDRKKGKKFARYQLGDLLLHLEKKHGEDWGKVYDEAWERIDKKVEGLSKHIKLEEERRSEDAQSKAALTDWLRAKASFVIEGLKEADKDEFCRCELKLQKWYGDLRGKPFAIEAENSILDISGFSKQYNCAFIWQKDGVKKLNLYLIINYFKGGKLRFKKIKPEAFEANRFYTVINKKSGEIVPMEVNFNFDDPNLIILPLAFGKRQGREFIWNDLLSLETGSLKLANGRVIEKTLYNRRTRQDEPALFVALTFERREVLDSSNIKPMNLIGVDRGENIPAVIALTDPEGCPLSRFKDSFGNPTHILRIGESYKEKQRTIQAKKEVEQRRAGGYSRKYASKAKNLADDMVRNTARDLLYYAVTQDAMLIFENLSRGFGRQGKRTFMAERQYTRMEDWLTAKLAYEGLPSKTYLSKTLAQYTSKTCSNCGFTITSADYDRVLEKLKKTATGWMTTINGKELKVEGQITYYNRYKRQNVVKDLSVELDRLSEESVNNDISSWTKGRSGEALSLLKKRFSHRPVQEKFVCLNCGFETHADEQAALNIARSWLFLRSQEYKKYQTNKTTGNTDKRAFVETWQSFYRKKLKEVWKPAV

SEQ ID NO: 26764 - protein, 978 aa, synthetic construct
  REGION 1..978: note = engineered CasX variant
QEIKRINKIRRRLVKDSNTKKAGKTGPMKTLLVRVMTPDLRERLENLRKKPENIPQPISNTSRANLNKLLTDYTEMKKAILHVYWEEFQKDPVGLMSRVAQPASKKIDQNKLKPEMDEKGNLTTAGFACSQCGQPLFVYKLEQVSEKGKAYTNYFGRCNVAEHEKLILLAQLKPEKDSDEAVTYSLGKFGQRALDFYSIHVTKESTHPVKPLAQIAGNRYASGPVGKALSDACMGTIASFLSKYQDIIIEHQKVVKGNQKRLESLRELAGKENLEYPSVTLPPQPHTKEGVDAYNEVIARVRMWVNLNLWQKLKLSRDDAKPLLRLKGFPSFPLVERQANEVDWWDMVCNVKKLINEKKEDGKVFWQNLAGYKRQEALRPYLSSEEDRKKGKKFARYQLGDLLLHLEKKHGEDWGKVYDEAWERIDKKVEGLSKHIKLEEERRSEDAQSKAALTDWLRAKASFVIEGLKEADKDEFCRCELKLQKWYGDLRGKPFAIEAENSILDISGFSKQYNCAFIWQKDGVKKLNLYLIINYFKGGKLRFKKIKPEAFEANRFYTVINKKSGEIVPMEVNFNFDDPNLIILPLAFGKRQGREFIWNDLLSLETGSLKLANGRVIEKTLYNRRTRQDEPALFVALTFERREVLDSSNIKPMNLIGVDRGENIPAVIALTDPEGCPLSRFKDSFGNPTHILRIGESYKEKQRCIQAKKEVEQRRAGGYSRKYASKAKNLADDMVRNTARDLLYYAVTQDAMLIFENLSRGFGRQGKRTFMAERQYTRMEDWLTAKLAYEGLPSKTYLSKTLAQYTSKTCSNCGFTITSADYDRVLEKLKKTATGWMTTINGKELKVEGQITYYNRYKRQNVVKDLSVELDRLSEESVNNDISSWTKGRSGEALSLLKKRFSHRPVQEKFVCLNCGFETHADEQAALNIARSWLFLRSQEYKKYQTNKTTGNTDKRAFVETWQSFYRKKLKEVWKPAV

SEQ ID NO: 26765 - protein, 978 aa, synthetic construct
  REGION 1..978: note = engineered CasX variant
QEIKRINKIRRRLVKDSNTKKAGKTGPMKTLLVRVMTPDLRERLENLRKKPENIPQPISNTSRANLNKLLTDYTEMKKAILHVYWEEFQKDPVGLMSRVAQPASKKIDQNKLKPEMDEKGNLTTAGFACSQCGQPLFVYKLEQVSEKGKAYTNYFGRCNVAEHEKLILLAQLKPEKDSDEAVTYSLGKFGQRALDFYSIHVTKESTHPVKPLAQIAGNRYASGPVGKALSDACMGTIASFLSKYQDIIIEHQKVVKGNQKRLESLRELAGKENLEYPSVTLPPQPHTKEGVDAYNEVIARVRMWVNLNLWQKLKLSRDDAKPLLRLKGFPSFPLVERQANEVDWWDMVCNVKKLINEKKEDGKVFWQNLAGYKRQEALRPYLSSEEDRKKGKKFARYQLGDLLLHLEKKHGEDWGKVYDEAWERIDKKVEGLSKHIKLEEERRSEDAQSKAALTDWLRAKASFVIEGLKEADKDEFCRCELKLQKWYGDLRGKPFAIEAENSILDISGFSKQYNCAFIWQKDGVKKLNLYLIINYFKGGKLRFKKIKPEAFEANRFYTVINKKSGEIVPMEVNFNFDDPNLIILPLAFGKRQGREFIWNDLLSLETGSLKLANGRVIEKTLYNRRTRQDEPALFVALTFERREVLDSSNIKPMNLIGVDRGENIPAVIALTDPEGCPLSRFKDSEGNPTHILRIGTSYKEKQRTIQAKKEVEQRRAGGYSRKYASKAKNLADDMVRNTARDLLYYAVTQDAMLIFENLSRGFGRQGKRTFMAERQYTRMEDWLTAKLAYEGLPSKTYLSKTLAQYTSKTCSNCGFTITSADYDRVLEKLKKTATGWMTTINGKELKVEGQITYYNRYKRQNVVKDLSVELDRLSEESVNNDISSWTKGRSGEALSLLKKRFSHRPVQEKFVCLNCGFETHADEQAALNIARSWLFLRSQEYKKYQTNKTTGNTDKRAFVETWQSFYRKKLKEVWKPAV

SEQ ID NO: 26766 - protein, 978 aa, synthetic construct
  REGION 1..978: note = engineered CasX variant
QEIKRINKIRRRLVKDSNTKKAGKTGPMKTLLVRVMTPDLRERLENLRKKPENIPQPISNTSRANLNKLLTDYTEMKKAILHVYWEEFQKDPVGLMSRVAQPASKKIDQNKLKPEMDEKGNLTTAGFACSQCGQPLFVYKLEQVSEKGKAYTNYFGRCNVAEHEKLILLAQLKPEKDSDEAVTYSLGKFGQRALDFYSIHVTKESTHPVKPLAQIAGNRYASGPVGKALSDACMGTIASFLSKYQDIIIEHQKVVKGNQKRLESLRELAGKENLEYPSVTLPPQPHTKEGVDAYNEVIARVRMWVNLNLWQKLKLSRDDAKPLLRLKGFPSFPLVERQANEVDWWDMVCNVKKLINEKKEDGKVFWQNLAGYKRQEALRPYLSSEEDRKKGKKFARYQLGDLLLHLEKKHGEDWGKVYDEAWERIDKKVEGLSKHIKLEEERRSEDAQSKAALTDWLRAKASFVIEGLKEADKDEFCRCELKLQKWYGDLRGKPFAIEAENSILDISGFSKQYNCAFIWQKDGVKKLNLYLIINYFKGGKLRFKKIKPEAFEANRFYTVINKKSGEIVPMEVNFNFDDPNLIILPLAFGKRQGREFIWNDLLSLETGSLKLANGRVIEKTLYNRRTRQDEPALFVALTFERREVLDSSNIKPMNLIGVDRGENIPAVIALTDPEGCPLSRFKDSEGNPTHILRIGESYKEKQRTIQAKKTVEQRRAGGYSRKYASKAKNLADDMVRNTARDLLYYAVTQDAMLIFENLSRGFGRQGKRTFMAERQYTRMEDWLTAKLAYEGLPSKTYLSKTLAQYTSKTCSNCGFTITSADYDRVLEKLKKTATGWMTTINGKELKVEGQITYYNRYKRQNVVKDLSVELDRLSEESVNNDISSWTKGRSGEALSLLKKRFSHRPVQEKFVCLNCGFETHADEQAALNIARSWLFLRSQEYKKYQTNKTTGNTDKRAFVETWQSFYRKKLKEVWKPAV

SEQ ID NO: 26767 - protein, 978 aa, synthetic construct
  REGION 1..978: note = engineered CasX variant
QEIKRINKIRRRLVKDSNTKKAGKTGPMKTLLVRVMTPDLRERLENLRKKPENIPQPISNTSRANLNKLLTDYTEMKKAILHVYWEEFQKDPVGLMSRVAQPASKKIDQNKLKPEMDEKGNLTTAGFACSQCGQPLFVYKLEQVSEKGKAYTNYFGRCNVAEHEKLILLAQLKPEKDSDEAVTYSLGKFGQRALDFYSIHVTKESTHPVKPLAQIAGNRYASGPVGKALSDACMGTIASFLSKYQDIIIEHQKVVKGNQKRLESLRELAGKENLEYPSVTLPPQPHTKEGVDAYNEVIARVRMWVNLNLWQKLKLSRDDAKPLLRLKGFPSFPLVERQANEVDWWDMVCNVKKLINEKKEDGKVFWQNLAGYKRQEALRPYLSSEEDRKKGKKFARYQLGDLLLHLEKKHGEDWGKVYDEAWERIDKKVEGLSKHIKLEEERRSEDAQSKAALTDWLRAKASFVIEGLKEADKDEFCRCELKLQKWYGDLRGKPFAIEAENSILDISGFSKQYNCAFIWQKDGVKKLNLYLIINYFKGGKLRFKKIKPEAFEANRFYTVINKKSGEIVPMEVNFNFDDPNLIILPLAFGKRQGREFIWNDLLSLETGSLKLANGRVIEKTLYNRRTRQDEPALFVALTFERREVLDSSNIKPMNLIGVDRGENIPAVIALTDPEGCPLSRFKDSEGNPTHILRIGESYKEKQRTIQAKKEVEQRRHGGYSRKYASKAKNLADDMVRNTARDLLYYAVTQDAMLIFENLSRGFGRQGKRTFMAERQYTRMEDWLTAKLAYEGLPSKTYLSKTLAQYTSKTCSNCGFTITSADYDRVLEKLKKTATGWMTTINGKELKVEGQITYYNRYKRQNVVKDLSVELDRLSEESVNNDISSWTKGRSGEALSLLKKRFSHRPVQEKFVCLNCGFETHADEQAALNIARSWLFLRSQEYKKYQTNKTTGNTDKRAFVETWQSFYRKKLKEVWKPAV

SEQ ID NO: 26768 - protein, 978 aa, synthetic construct
  REGION 1..978: note = engineered CasX variant
QEIKRINKIRRRLVKDSNTKKAGKTGPMKTLLVRVMTPDLRERLENLRKKPENIPQPISNTSRANLNKLLTDYTEMKKAILHVYWEEFQKDPVGLMSRVAQPASKKIDQNKLKPEMDEKGNLTTAGFACSQCGQPLFVYKLEQVSEKGKAYTNYFGRCNVAEHEKLILLAQLKPEKDSDEAVTYSLGKFGQRALDFYSIHVTKESTHPVKPLAQIAGNRYASGPVGKALSDACMGTIASFLSKYQDIIIEHQKVVKGNQKRLESLRELAGKENLEYPSVTLPPQPHTKEGVDAYNEVIARVRMWVNLNLWQKLKLSRDDAKPLLRLKGFPSFPLVERQANEVDWWDMVCNVKKLINEKKEDGKVFWQNLAGYKRQEALRPYLSSEEDRKKGKKFARYQLGDLLLHLEKKHGEDWGKVYDEAWERIDKKVEGLSKHIKLEEERRSEDAQSKAALTDWLRAKASFVIEGLKEADKDEFCRCELKLQKWYGDLRGKPFAIEAENSILDISGFSKQYNCAFIWQKDGVKKLNLYLIINYFKGGKLRFKKIKPEAFEANRFYTVINKKSGEIVPMEVNFNFDDPNLIILPLAFGKRQGREFIWNDLLSLETGSLKLANGRVIEKTLYNRRTRQDEPALFVALTFERREVLDSSNIKPMNLIGVDRGENIPAVIALTDPEGCPLSRFKDSEGNPTHILRIGESYKEKQRTIQAKKEVEQRRAGGYSRKYASKAKNLADDMVRNTARDLLYYAVTQDAMLIFENLSRGFGRQGKRTFMAERQYTRMEDWLTAKLAYEGLPSKTYLSKTLAQYTSKTCSNCGFTITSADYDRVLEKLKKTATGWMTTINGKELKVEGQITYYNRYKRQNVVKDLSVELDRLSEESVNNDISSWTKGRSGEALSLLKKRFSHRPVQEKFVCLNCGFETHADEQAALNIARSWLFLRSQEYKKYQTNKTTGNTDKRAFVETWQSFYRKKLKEVWKPAV

SEQ ID NO: 26769 - protein, 978 aa, synthetic construct
  REGION 1..978: note = engineered CasX variant
QEIKRINKIRRRLVKDSNTKKAGKTGPMKTLLVRVMTPDLRERLENLRKKPENIPQPISNTSRANLNKLLTDYTEMKKAILHVYWEEFQKDPVGLMSRVAQPASKKIDQNKLKPEMDEKGNLTTAGFACSQCGQPLFVYKLEQVSEKGKAYTNYFGRCNVAEHEKLILLAQLKPEKDSDEAVTYSLGKFGQRALDFYSIHVTKESTHPVKPLAQIAGNRYASGPVGKALSDACMGTIASFLSKYQDIIIEHQKVVKGNQKRLESLRELAGKENLEYPSVTLPPQPHTKEGVDAYNEVIARVRMWVNLNLWQKLKLSRDDAKPLLRLKGFPSFPLVERQANEVDWWDMVCNVKKLINEKKEDGKVFWQNLAGYKRQEALRPYLSSEEDRKKGKKFARYQLGDLLLHLEKKHGEDWGKVYDEAWERIDKKVEGLSKHIKLEEERRSEDAQSKAALTDWLRAKASFVIEGLKEADKDEFCRCELKLQKWYGDLRGKPFAIEAENSILDISGFSKQYNCAFIWQKDGVKKLNLYLIINYFKGGKLRFKKIKPEAFEANRFYTVINKKSGEIVPMEVNFNFDDPNLIILPLAFGKRQGREFIWNDLLSLETGSLKLANGRVIEKTLYNRRTRQDEPALFVALTFERREVLDSSNIKPMNLIGVDRGENIPAVIALTDPEGCPLSRFKDSEGNPTHILRIGESYKEFQRTIQAKKEVEQRRAGGYSRKYASKAKNLADDMVRNTARDLLYYAVTQDAMLIFENLSRGFGRQGKRTFMAERQYTRMEDWLTAKLAYEGLPSKTYLSKTLAQYTSKTCSNCGFTITSADYDRVLEKLKKTATGWMTTINGKELKVEGQITYYNRYKRQNVVKDLSVELDRLSEESVNNDISSWTKGRSGEALSLLKKRFSHRPVQEKFVCLNCGFETHADEQAALNIARSWLFLRSQEYKKYQTNKTTGNTDKRAFVETWQSFYRKKLKEVWKPAV

SEQ ID NO: 26770 - protein, 978 aa, synthetic construct
  REGION 1..978: note = engineered CasX variant
QEIKRINKIRRRLVKDSNTKKAGKTGPMKTLLVRVMTPDLRERLENLRKKPENIPQPISNTSRANLNKLLTDYTEMKKAILHVYWEEFQKDPVGLMSRVAQPASKKIDQNKLKPEMDEKGNLTTAGFACSQCGQPLFVYKLEQVSEKGKAYTNYFGRCNVAEHEKLILLAQLKPEKDSDEAVTYSLGKFGQRALDFYSIHVTKESTHPVKPLAQIAGNRYASGPVGKALSDACMGTIASFLSKYQDIIIEHQKVVKGNQKRLESLRELAGKENLEYPSVTLPPQPHTKEGVDAYNEVIARVRMWVNLNLWQKLKLSRDDAKPLLRLKGFPSFPLVERQANEVDWWDMVCNVKKLINEKKEDGKVFWQNLAGYKRQEALRPYLSSEEDRKKGKKFARYQLGDLLLHLEKKHGEDWGKVYDEAWERIDKKVEGLSKHIKLEEERRSEDAQSKAALTDWLRAKASFVIEGLKEADKDEFCRCELKLQKWYGDLRGKPFAIEAENSILDISGFSKQYNCAFIWQKDGVKKLNLYLIINYFKGGKLRFKKIKPEAFEANRFYTVINKKSGEIVPMEVNFNFDDPNLIILPLAFGKRQGREFIWNDLLSLETGSLKLANGRVIEKTLYNRRTRQDEPALFVALTFERREVLDSSNIKPMNLIGVDRGENIPAVIALTDPEGCPLSRFKDSEGNKTHILRIGESYKEKQRTIQAKKEVEQRRAGGYSRKYASKAKNLADDMVRNTARDLLYYAVTQDAMLIFENLSRGFGRQGKRTFMAERQYTRMEDWLTAKLAYEGLPSKTYLSKTLAQYTSKTCSNCGFTITSADYDRVLEKLKKTATGWMTTINGKELKVEGQITYYNRYKRQNVVKDLSVELDRLSEESVNNDISSWTKGRSGEALSLLKKRFSHRPVQEKFVCLNCGFETHADEQAALNIARSWLFLRSQEYKKYQTNKTTGNTDKRAFVETWQSFYRKKLKEVWKPAV

SEQ ID NO: 26771 - protein, 978 aa, synthetic construct
  REGION 1..978: note = engineered CasX variant
QEIKRINKIRRRLVKDSNTKKAGKTGPMKTLLVRVMTPDLRERLENLRKKPENIPQPISNTSRANLNKLLTDYTEMKKAILHVYWEEFQKDPVGLMSRVAQPASKKIDQNKLKPEMDEKGNLTTAGFACSQCGQPLFVYKLEQVSEKGKAYTNYFGRCNVAEHEKLILLAQLKPEKDSDEAVTYSLGKFGQRALDFYSIHVTKESTHPVKPLAQIAGNRYASGPVGKALSDACMGTIASFLSKYQDIIIEHQKVVKGNQKRLESLRELAGKENLEYPSVTLPPQPHTKEGVDAYNEVIARVRMWVNLNLWQKLKLSRDDAKPLLRLKGFPSFPLVERQANEVDWWDMVCNVKKLINEKKEDGKVFWQNLAGYKRQEALRPYLSSEEDRKKGKKFARYQLGDLLLHLEKKHGEDWGKVYDEAWERIDKKVEGLSKHIKLEEERRSEDAQSKAALTDWLRAKASFVIEGLKEADKDEFCRCELKLQKWYGDLRGKPFAIEAENSILDISGFSKQYNCAFIWQKDGVKKLNLYLIINYFKGGKLRFKKIKPEAFEANRFYTVINKKSGEIVPMEVNFNFDDPNLIILPLAFGKRQGREFIWNDLLSLETGSLKLANGRVIEKTLYNRRTRQDEPALFVALTFERREVLDSSNIKPMNLIGVDRGENIPAVIALTDPEGCPLSRFKDSDGNPTWILRIGESYKEKQRTIQAKKEVEQRRAGGYSRKYASKAKNLADDMVRNTARDLLYYAVTQDAMLIFENLSRGFGRQGKRTFMAERQYTRMEDWLTAKLAYEGLPSKTYLSKTLAQYTSKTCSNCGFTITSADYDRVLEKLKKTATGWMTTINGKELKVEGQITYYNRYKRQNVVKDLSVELDRLSEESVNNDISSWTKGRSGEALSLLKKRFSHRPVQEKFVCLNCGFETHADEQAALNIARSWLFLRSQEYKKYQTNKTTGNTDKRAFVETWQSFYRKKLKEVWKPAV

SEQ ID NO: 26772 - protein, 978 aa, synthetic construct
  REGION 1..978: note = engineered CasX variant
QEIKRINKIRRRLVKDSNTKKAGKTGPMKTLLVRVMTPDLRERLENLRKKPENIPQPISNTSRANLNKLLTDYTEMKKAILHVYWEEFQKDPVGLMSRVAQPASKKIDQNKLKPEMDEKGNLTTAGFACSQCGQPLFVYKLEQVSEKGKAYTNYFGRCNVAEHEKLILLAQLKPEKDSDEAVTYSLGKFGQRALDFYSIHVTKESTHPVKPLAQIAGNRYASGPVGKALSDACMGTIASFLSKYQDIIIEHQKVVKGNQKRLESLRELAGKENLEYPSVTLPPQPHTKEGVDAYNEVIARVRMWVNLNLWQKLKLSRDDAKPLLRLKGFPSFPLVERQANEVDWWDMVCNVKKLINEKKEDGKVFWQNLAGYKRQEALRPYLSSEEDRKKGKKFARYQLGDLLLHLEKKHGEDWGKVYDEAWERIDKKVEGLSKHIKLEEERRSEDAQSKAALTDWLRAKASFVIEGLKEADKDEFCRCELKLQKWYGDLRGKPFAIEAENSILDISGFSKQYNCAFIWQKDGVKKLNLYLIINYFKGGKLRFKKIKPEAFEANRFYTVINKKSGEIVPMEVNFNFDDPNLIILPLAFGKRQGREFIWNDLLSLETGSLKLANGRVIEKTLYNRRTRQDEPALFVALTFERREVLDSSNIKPMNLIGVDRGENIPAVIALTDPEGCPLSRFKDSDGNPTHILRIGESYKQKQRTIQAKKEVEQRRAGGYSRKYASKAKNLADDMVRNTARDLLYYAVTQDAMLIFENLSRGFGRQGKRTFMAERQYTRMEDWLTAKLAYEGLPSKTYLSKTLAQYTSKTCSNCGFTITSADYDRVLEKLKKTATGWMTTINGKELKVEGQITYYNRYKRQNVVKDLSVELDRLSEESVNNDISSWTKGRSGEALSLLKKRFSHRPVQEKFVCLNCGFETHADEQAALNIARSWLFLRSQEYKKYQTNKTTGNTDKRAFVETWQSFYRKKLKEVWKPAV

SEQ ID NO: 26773 - protein, 978 aa, synthetic construct
  REGION 1..978: note = engineered CasX variant
QEIKRINKIRRRLVKDSNTKKAGKTGPMKTLLVRVMTPDLRERLENLRKKPENIPQPISNTSRANLNKLLTDYTEMKKAILHVYWEEFQKDPVGLMSRVAQPASKKIDQNKLKPEMDEKGNLTTAGFACSQCGQPLFVYKLEQVSEKGKAYTNYFGRCNVAEHEKLILLAQLKPEKDSDEAVTYSLGKFGQRALDFYSIHVTKESTHPVKPLAQIAGNRYASGPVGKALSDACMGTIASFLSKYQDIIIEHQKVVKGNQKRLESLRELAGKENLEYPSVTLPPQPHTKEGVDAYNEVIARVRMWVNLNLWQKLKLSRDDAKPLLRLKGFPSFPLVERQANEVDWWDMVCNVKKLINEKKEDGKVFWQNLAGYKRQEALRPYLSSEEDRKKGKKFARYQLGDLLLHLEKKHGEDWGKVYDEAWERIDKKVEGLSKHIKLEEERRSEDAQSKAALTDWLRAKASFVIEGLKEADKDEFCRCELKLQKWYGDLRGKPFAIEAENSILDISGFSKQYNCAFIWQKDGVKKLNLYLIINYFKGGKLRFKKIKPEAFEANRFYTVINKKSGEIVPMEVNFNFDDPNLIILPLAFGKRQGREFIWNDLLSLETGSLKLANGRVIEKTLYNRRTRQDEPALFVALTFERREVLDSSNIKPMNLIGVDRGENIPAVIALTDPEGCPLSRFKDSDGNPTHILRIGESYKEKQRTIQAKKEVEQRRAGGYSRKYASKAKNLADDMVRNTARDLLYYAVTQDAMLIFENLSRGFGRQGKRTFMAERQYTRMEDWLTAKLAYEGLPSKTYLSKTLAQYTSKTCSNCGFTITSADYDRVLEKLKKTATGWMTTINGKELKVEGQITYYNRYKRQNVVKDLSVELDRLSEESVNNDISSWTKGRSGEALSLLKKRFSHRPVQEKFVCLNCGFETHADEQAALNIARSWLFLRSQEYKKYQTNKTTGNTDKRAFVETWQSFYRKKLKEVWKPAV

SEQ ID NO: 26774 - protein, 978 aa, synthetic construct
  REGION 1..978: note = engineered CasX variant
QEIKRINKIRRRLVKDSNTKKAGKTGPMKTLLVRVMTPDLRERLENLRKKPENIPQPISNTSRANLNKLLTDYTEMKKAILHVYWEEFQKDPVGLMSRVAQPASKKIDQNKLKPEMDEKGNLTTAGFACSQCGQPLFVYKLEQVSEKGKAYTNYFGRCNVAEHEKLILLAQLKPEKDSDEAVTYSLGKFGQRALDFYSIHVTKESTHPVKPLAQIAGNRYASGPVGKALSDACMGTIASFLSKYQDIIIEHQKVVKGNQKRLESLRELAGKENLEYPSVTLPPQPHTKEGVDAYNEVIARVRMWVNLNLWQKLKLSRDDAKPLLRLKGFPSFPLVERQANEVDWWDMVCNVKKLINEKKEDGKVFWQNLAGYKRQEALRPYLSSEEDRKKGKKFARYQLGDLLLHLEKKHGEDWGKVYDEAWERIDKKVEGLSKHIKLEEERRSEDAQSKAALTDWLRAKASFVIEGLKEADKDEFCRCELKLQKWYGDLRGKPFAIEAENSILDISGFSKQYNCAFIWQKDGVKKLNLYLIINYFKGGKLRFKKIKPEAFEANRFYTVINKKSGEIVPMEVNFNFDDPNLIILPLAFGKRQGREFIWNDLLSLETGSLKLANGRVIEKTLYNRRTRQDEPALFVALTFERREVLDSSNIKPMNLIGVDRGENIPAVIALTDPEGCPLSRFKDSDGNPTHILRIGESYKEKQRTIQAKKEVCQRRAGGYSRKYASKAKNLADDMVRNTARDLLYYAVTQDAMLIFENLSRGFGRQGKRTFMAERQYTRMEDWLTAKLAYEGLPSKTYLSKTLAQYTSKTCSNCGFTITSADYDRVLEKLKKTATGWMTTINGKELKVEGQITYYNRYKRQNVVKDLSVELDRLSEESVNNDISSWTKGRSGEALSLLKKRFSHRPVQEKFVCLNCGFETHADEQAALNIARSWLFLRSQEYKKYQTNKTTGNTDKRAFVETWQSFYRKKLKEVWKPAV

SEQ ID NO: 26775 - protein, 978 aa, synthetic construct
  REGION 1..978: note = engineered CasX variant
QEIKRINKIRRRLVKDSNTKKAGKTGPMKTLLVRVMTPDLRERLENLRKKPENIPQPISNTSRANLNKLLTDYTEMKKAILHVYWEEFQKDPVGLMSRVAQPASKKIDQNKLKPEMDEKGNLTTAGFACSQCGQPLFVYKLEQVSEKGKAYTNYFGRCNVAEHEKLILLAQLKPEKDSDEAVTYSLGKFGQRALDFYSIHVTKESTHPVKPLAQIAGNRYASGPVGKALSDACMGTIASFLSKYQDIIIEHQKVVKGNQKRLESLRELAGKENLEYPSVTLPPQPHTKEGVDAYNEVIARVRMWVNLNLWQKLKLSRDDAKPLLRLKGFPSFPLVERQANEVDWWDMVCNVKKLINEKKEDGKVFWQNLAGYKRQEALRPYLSSEEDRKKGKKFARYQLGDLLLHLEKKHGEDWGKVYDEAWERIDKKVEGLSKHIKLEEERRSEDAQSKAALTDWLRAKASFVIEGLKEADKDEFCRCELKLQKWYGDLRGKPFAIEAENSILDISGFSKQYNCAFIWQKDGVKKLNLYLIINYFKGGKLRFKKIKPEAFEANRFYTVINKKSGEIVPMEVNFNFDDPNLIILPLAFGKRQGREFIWNDLLSLETGSLKLANGRVIEKTLYNRRTRQDEPALFVALTFERREVLDSSNIKPMNLIGVDRGENIPAVIALTDPEGCPLSRFKDSDGNPTHILRCGESYKEKQRTIQAKKEVEQRRAGGYSRKYASKAKNLADDMVRNTARDLLYYAVTQDAMLIFENLSRGFGRQGKRTFMAERQYTRMEDWLTAKLAYEGLPSKTYLSKTLAQYTSKTCSNCGFTITSADYDRVLEKLKKTATGWMTTINGKELKVEGQITYYNRYKRQNVVKDLSVELDRLSEESVNNDISSWTKGRSGEALSLLKKRFSHRPVQEKFVCLNCGFETHADEQAALNIARSWLFLRSQEYKKYQTNKTTGNTDKRAFVETWQSFYRKKLKEVWKPAV

SEQ ID NO: 26776 - protein, 978 aa, synthetic construct
  REGION 1..978: note = engineered CasX variant
QEIKRINKIRRRLVKDSNTKKAGKTGPMKTLLVRVMTPDLRERLENLRKKPENIPQPISNTSRANLNKLLTDYTEMKKAILHVYWEEFQKDPVGLMSRVAQPASKKIDQNKLKPEMDEKGNLTTAGFACSQCGQPLFVYKLEQVSEKGKAYTNYFGRCNVAEHEKLILLAQLKPEKDSDEAVTYSLGKFGQRALDFYSIHVTKESTHPVKPLAQIAGNRYASGPVGKALSDACMGTIASFLSKYQDIIIEHQKVVKGNQKRLESLRELAGKENLEYPSVTLPPQPHTKEGVDAYNEVIARVRMWVNLNLWQKLKLSRDDAKPLLRLKGFPSFPLVERQANEVDWWDMVCNVKKLINEKKEDGKVFWQNLAGYKRQEALRPYLSSEEDRKKGKKFARYQLGDLLLHLEKKHGEDWGKVYDEAWERIDKKVEGLSKHIKLEEERRSEDAQSKAALTDWLRAKASFVIEGLKEADKDEFCRCELKLQKWYGDLRGKPFAIEAENSILDISGFSKQYNCAFIWQKDGVKKLNLYLIINYFKGGKLRFKKIKPEAFEANRFYTVINKKSGEIVPMEVNFNFDDPNLIILPLAFGKRQGREFIWNDLLSLETGSLKLANGRVIEKTLYNRRTRQDEPALFVALTFERREVLDSSNIKPMNLIGVDRGENIPAVIALTDPEGCPLSRFKDSDGNPTFILRIGESYKEKQRTIQAKKEVEQRRAGGYSRKYASKAKNLADDMVRNTARDLLYYAVTQDAMLIFENLSRGFGRQGKRTFMAERQYTRMEDWLTAKLAYEGLPSKTYLSKTLAQYTSKTCSNCGFTITSADYDRVLEKLKKTATGWMTTINGKELKVEGQITYYNRYKRQNVVKDLSVELDRLSEESVNNDISSWTKGRSGEALSLLKKRFSHRPVQEKFVCLNCGFETHADEQAALNIARSWLFLRSQEYKKYQTNKTTGNTDKRAFVETWQSFYRKKLKEVWKPAV

SEQ ID NO: 26777 - protein, 978 aa, synthetic construct
  REGION 1..978: note = engineered CasX variant
QEIKRINKIRRRLVKDSNTKKAGKTGPMKTLLVRVMTPDLRERLENLRKKPENIPQPISNTSRANLNKLLTDYTEMKKAILHVYWEEFQKDPVGLMSRVAQPASKKIDQNKLKPEMDEKGNLTTAGFACSQCGQPLFVYKLEQVSEKGKAYTNYFGRCNVAEHEKLILLAQLKPEKDSDEAVTYSLGKFGQRALDFYSIHVTKESTHPVKPLAQIAGNRYASGPVGKALSDACMGTIASFLSKYQDIIIEHQKVVKGNQKRLESLRELAGKENLEYPSVTLPPQPHTKEGVDAYNEVIARVRMWVNLNLWQKLKLSRDDAKPLLRLKGFPSFPLVERQANEVDWWDMVCNVKKLINEKKEDGKVFWQNLAGYKRQEALRPYLSSEEDRKKGKKFARYQLGDLLLHLEKKHGEDWGKVYDEAWERIDKKVEGLSKHIKLEEERRSEDAQSKAALTDWLRAKASFVIEGLKEADKDEFCRCELKLQKWYGDLRGKPFAIEAENSILDISGFSKQYNCAFIWQKDGVKKLNLYLIINYFKGGKLRFKKIKPEAFEANRFYTVINKKSGEIVPMEVNFNFDDPNLIILPLAFGKRQGREFIWNDLLSLETGSLKLANGRVIEKTLYNRRTRQDEPALFVALTFERREVLDSSNIKPMNLIGVDRGENIPAVIALTDPEGCPLSRFKDSDGNPTFILRIGESYKEKQRTIQAKKEVCQRRAGGYSRKYASKAKNLADDMVRNTARDLLYYAVTQDAMLIFENLSRGFGRQGKRTFMAERQYTRMEDWLTAKLAYEGLPSKTYLSKTLAQYTSKTCSNCGFTITSADYDRVLEKLKKTATGWMTTINGKELKVEGQITYYNRYKRQNVVKDLSVELDRLSEESVNNDISSWTKGRSGEALSLLKKRFSHRPVQEKFVCLNCGFETHADEQAALNIARSWLFLRSQEYKKYQTNKTTGNTDKRAFVETWQSFYRKKLKEVWKPAV

SEQ ID NO: 26778 - protein, 978 aa, synthetic construct
  REGION 1..978: note = engineered CasX variant
QEIKRINKIRRRLVKDSNTKKAGKTGPMKTLLVRVMTPDLRERLENLRKKPENIPQPISNTSRANLNKLLTDYTEMKKAILHVYWEEFQKDPVGLMSRVAQPASKKIDQNKLKPEMDEKGNLTTAGFACSQCGQPLFVYKLEQVSEKGKAYTNYFGRCNVAEHEKLILLAQLKPEKDSDEAVTYSLGKFGQRALDFYSIHVTKESTHPVKPLAQIAGNRYASGPVGKALSDACMGTIASFLSKYQDIIIEHQKVVKGNQKRLESLRELAGKENLEYPSVTLPPQPHTKEGVDAYNEVIARVRMWVNLNLWQKLKLSRDDAKPLLRLKGFPSFPLVERQANEVDWWDMVCNVKKLINEKKEDGKVFWQNLAGYKRQEALRPYLSSEEDRKKGKKFARYQLGDLLLHLEKKHGEDWGKVYDEAWERIDKKVEGLSKHIKLEEERRSEDAQSKAALTDWLRAKASFVIEGLKEADKDEFCRCELKLQKWYGDLRGKPFAIEAENSILDISGFSKQYNCAFIWQKDGVKKLNLYLIINYFKGGKLRFKKIKPEAFEANRFYTVINKKSGEIVPMEVNFNFDDPNLIILPLAFGKRQGREFIWNDLLSLETGSLKLANGRVIEKTLYNRRTRQDEPALFVALTFERREVLDSSNIKPMNLIGVDRGENIPAVIALTDPEGCPLSRFKDSCGNPTHILRIGESYKEKQRTIQAKKEVEQRRAGGYSRKYASKAKNLADDMVRNTARDLLYYAVTQDAMLIFENLSRGFGRQGKRTFMAERQYTRMEDWLTAKLAYEGLPSKTYLSKTLAQYTSKTCSNCGFTITSADYDRVLEKLKKTATGWMTTINGKELKVEGQITYYNRYKRQNVVKDLSVELDRLSEESVNNDISSWTKGRSGEALSLLKKRFSHRPVQEKFVCLNCGFETHADEQAALNIARSWLFLRSQEYKKYQTNKTTGNTDKRAFVETWQSFYRKKLKEVWKPAV

SEQ ID NO: 26779 - protein, 978 aa, synthetic construct
  REGION 1..978: note = engineered CasX variant
QEIKRINKIRRRLVKDSNTKKAGKTGPMKTLLVRVMTPDLRERLENLRKKPENIPQPISNTSRANLNKLLTDYTEMKKAILHVYWEEFQKDPVGLMSRVAQPASKKIDQNKLKPEMDEKGNLTTAGFACSQCGQPLFVYKLEQVSEKGKAYTNYFGRCNVAEHEKLILLAQLKPEKDSDEAVTYSLGKFGQRALDFYSIHVTKESTHPVKPLAQIAGNRYASGPVGKALSDACMGTIASFLSKYQDIIIEHQKVVKGNQKRLESLRELAGKENLEYPSVTLPPQPHTKEGVDAYNEVIARVRMWVNLNLWQKLKLSRDDAKPLLRLKGFPSFPLVERQANEVDWWDMVCNVKKLINEKKEDGKVFWQNLAGYKRQEALRPYLSSEEDRKKGKKFARYQLGDLLLHLEKKHGEDWGKVYDEAWERIDKKVEGLSKHIKLEEERRSEDAQSKAALTDWLRAKASFVIEGLKEADKDEFCRCELKLQKWYGDLRGKPFAIEAENSILDISGFSKQYNCAFIWQKDGVKKLNLYLIINYFKGGKLRFKKIKPEAFEANRFYTVINKKSGEIVPMEVNFNFDDPNLIILPLAFGKRQGREFIWNDLLSLETGSLKLANGRVIEKTLYNRRTRQDEPALFVALTFERREVLDSSNIKPMNLIGVDRGENIPAVIALTDPEGCPLSRFKDSCGNPTHILRIGESYKCKQRTIQAKKEVEQRRAGGYSRKYASKAKNLADDMVRNTARDLLYYAVTQDAMLIFENLSRGFGRQGKRTFMAERQYTRMEDWLTAKLAYEGLPSKTYLSKTLAQYTSKTCSNCGFTITSADYDRVLEKLKKTATGWMTTINGKELKVEGQITYYNRYKRQNVVKDLSVELDRLSEESVNNDISSWTKGRSGEALSLLKKRFSHRPVQEKFVCLNCGFETHADEQAALNIARSWLFLRSQEYKKYQTNKTTGNTDKRAFVETWQSFYRKKLKEVWKPAV

SEQ ID NO: 26780 - protein, 978 aa, synthetic construct
  REGION 1..978: note = engineered CasX variant
QEIKRINKIRRRLVKDSNTKKAGKTGPMKTLLVRVMTPDLRERLENLRKKPENIPQPISNTSRANLNKLLTDYTEMKKAILHVYWEEFQKDPVGLMSRVAQPASKKIDQNKLKPEMDEKGNLTTAGFACSQCGQPLFVYKLEQVSEKGKAYTNYFGRCNVAEHEKLILLAQLKPEKDSDEAVTYSLGKFGQRALDFYSIHVTKESTHPVKPLAQIAGNRYASGPVGKALSDACMGTIASFLSKYQDIIIEHQKVVKGNQKRLESLRELAGKENLEYPSVTLPPQPHTKEGVDAYNEVIARVRMWVNLNLWQKLKLSRDDAKPLLRLKGFPSFPLVERQANEVDWWDMVCNVKKLINEKKEDGKVFWQNLAGYKRQEALRPYLSSEEDRKKGKKFARYQLGDLLLHLEKKHGEDWGKVYDEAWERIDKKVEGLSKHIKLEEERRSEDAQSKAALTDWLRAKASFVIEGLKEADKDEFCRCELKLQKWYGDLRGKPFAIEAENSILDISGFSKQYNCAFIWQKDGVKKLNLYLIINYFKGGKLRFKKIKPEAFEANRFYTVINKKSGEIVPMEVNFNFDDPNLIILPLAFGKRQGREFIWNDLLSLETGSLKLANGRVIEKTLYNRRTRQDEPALFVALTFERREVLDSSNIKPMNLIGVDRGENIPAVIALTDPEGCPLSRFKDSAGNPTHILRIGESYKEKQRTIQRKKEVEQRRAGGYSRKYASKAKNLADDMVRNTARDLLYYAVTQDAMLIFENLSRGFGRQGKRTFMAERQYTRMEDWLTAKLAYEGLPSKTYLSKTLAQYTSKTCSNCGFTITSADYDRVLEKLKKTATGWMTTINGKELKVEGQITYYNRYKRQNVVKDLSVELDRLSEESVNNDISSWTKGRSGEALSLLKKRFSHRPVQEKFVCLNCGFETHADEQAALNIARSWLFLRSQEYKKYQTNKTTGNTDKRAFVETWQSFYRKKLKEVWKPAV

SEQ ID NO: 26781 - protein, 978 aa, synthetic construct
  REGION 1..978: note = engineered CasX variant
QEIKRINKIRRRLVKDSNTKKAGKTGPMKTLLVRVMTPDLRERLENLRKKPENIPQPISNTSRANLNKLLTDYTEMKKAILHVYWEEFQKDPVGLMSRVAQPASKKIDQNKLKPEMDEKGNLTTAGFACSQCGQPLFVYKLEQVSEKGKAYTNYFGRCNVAEHEKLILLAQLKPEKDSDEAVTYSLGKFGQRALDFYSIHVTKESTHPVKPLAQIAGNRYASGPVGKALSDACMGTIASFLSKYQDIIIEHQKVVKGNQKRLESLRELAGKENLEYPSVTLPPQPHTKEGVDAYNEVIARVRMWVNLNLWQKLKLSRDDAKPLLRLKGFPSFPLVERQANEVDWWDMVCNVKKLINEKKEDGKVFWQNLAGYKRQEALRPYLSSEEDRKKGKKFARYQLGDLLLHLEKKHGEDWGKVYDEAWERIDKKVEGLSKHIKLEEERRSEDAQSKAALTDWLRAKASFVIEGLKEADKDEFCRCELKLQKWYGDLRGKPFAIEAENSILDISGFSKQYNCAFIWQKDGVKKLNLYLIINYFKGGKLRFKKIKPEAFEANRFYTVINKKSGEIVPMEVNFNFDDPNLIILPLAFGKRQGREFIWNDLLSLETGSLKLANGRVIEKTLYNRRTRQDEPALFVALTFERREVLDSSNIKPMNLIGVDRGENIPAVIALTDPEGCPLSRFKDSAGNPTHILRIGESYKEKQRTIQAKKEVEQRRLGGYSRKYASKAKNLADDMVRNTARDLLYYAVTQDAMLIFENLSRGFGRQGKRTFMAERQYTRMEDWLTAKLAYEGLPSKTYLSKTLAQYTSKTCSNCGFTITSADYDRVLEKLKKTATGWMTTINGKELKVEGQITYYNRYKRQNVVKDLSVELDRLSEESVNNDISSWTKGRSGEALSLLKKRFSHRPVQEKFVCLNCGFETHADEQAALNIARSWLFLRSQEYKKYQTNKTTGNTDKRAFVETWQSFYRKKLKEVWKPAV

SEQ ID NO: 26782 - protein, 978 aa, synthetic construct
  REGION 1..978: note = engineered CasX variant
QEIKRINKIRRRLVKDSNTKKAGKTGPMKTLLVRVMTPDLRERLENLRKKPENIPQPISNTSRANLNKLLTDYTEMKKAILHVYWEEFQKDPVGLMSRVAQPASKKIDQNKLKPEMDEKGNLTTAGFACSQCGQPLFVYKLEQVSEKGKAYTNYFGRCNVAEHEKLILLAQLKPEKDSDEAVTYSLGKFGQRALDFYSIHVTKESTHPVKPLAQIAGNRYASGPVGKALSDACMGTIASFLSKYQDIIIEHQKVVKGNQKRLESLRELAGKENLEYPSVTLPPQPHTKEGVDAYNEVIARVRMWVNLNLWQKLKLSRDDAKPLLRLKGFPSFPLVERQANEVDWWDMVCNVKKLINEKKEDGKVFWQNLAGYKRQEALRPYLSSEEDRKKGKKFARYQLGDLLLHLEKKHGEDWGKVYDEAWERIDKKVEGLSKHIKLEEERRSEDAQSKAALTDWLRAKASFVIEGLKEADKDEFCRCELKLQKWYGDLRGKPFAIEAENSILDISGFSKQYNCAFIWQKDGVKKLNLYLIINYFKGGKLRFKKIKPEAFEANRFYTVINKKSGEIVPMEVNFNFDDPNLIILPLAFGKRQGREFIWNDLLSLETGSLKLANGRVIEKTLYNRRTRQDEPALFVALTFERREVLDSSNIKPMNLIGVDRGENIPAVIALTDPEGCPLSRFKDSAGNPTHILRIGESYKEKQRTIQAKKEVEQRRAGGYSRKYASKAKNLADDMVRNTARDLLYYAVTQDAMLIFENLSRGFGRQGKRTFMAERQYTRMEDWLTAKLAYEGLPSKTYLSKTLAQYTSKTCSNCGFTITSADYDRVLEKLKKTATGWMTTINGKELKVEGQITYYNRYKRQNVVKDLSVELDRLSEESVNNDISSWTKGRSGEALSLLKKRFSHRPVQEKFVCLNCGFETHADEQAALNIARSWLFLRSQEYKKYQTNKTTGNTDKRAFVETWQSFYRKKLKEVWKPAV

SEQ ID NO: 26783 - protein, 978 aa, synthetic construct
  REGION 1..978: note = engineered CasX variant
QEIKRINKIRRRLVKDSNTKKAGKTGPMKTLLVRVMTPDLRERLENLRKKPENIPQPISNTSRANLNKLLTDYTEMKKAILHVYWEEFQKDPVGLMSRVAQPASKKIDQNKLKPEMDEKGNLTTAGFACSQCGQPLFVYKLEQVSEKGKAYTNYFGRCNVAEHEKLILLAQLKPEKDSDEAVTYSLGKFGQRALDFYSIHVTKESTHPVKPLAQIAGNRYASGPVGKALSDACMGTIASFLSKYQDIIIEHQKVVKGNQKRLESLRELAGKENLEYPSVTLPPQPHTKEGVDAYNEVIARVRMWVNLNLWQKLKLSRDDAKPLLRLKGFPSFPLVERQANEVDWWDMVCNVKKLINEKKEDGKVFWQNLAGYKRQEALRPYLSSEEDRKKGKKFARYQLGDLLLHLEKKHGEDWGKVYDEAWERIDKKVEGLSKHIKLEEERRSEDAQSKAALTDWLRAKASFVIEGLKEADKDEFCRCELKLQKWYGDLRGKPFAIEAENSILDISGFSKQYNCAFIWQKDGVKKLNLYLIINYFKGGKLRFKKIKPEAFEANRFYTVINKKSGEIVPMEVNFNFDDPNLIILPLAFGKRQGREFIWNDLLSLETGSLKLANGRVIEKTLYNRRTRQDEPALFVALTFERREVLDSSNIKPMNLIGVDRGENIPAVIALTDPEGCPLSRFKDSAGNPTHILRIGESYKEKQRTIQAKKEVEQRRAFGYSRKYASKAKNLADDMVRNTARDLLYYAVTQDAMLIFENLSRGFGRQGKRTFMAERQYTRMEDWLTAKLAYEGLPSKTYLSKTLAQYTSKTCSNCGFTITSADYDRVLEKLKKTATGWMTTINGKELKVEGQITYYNRYKRQNVVKDLSVELDRLSEESVNNDISSWTKGRSGEALSLLKKRFSHRPVQEKFVCLNCGFETHADEQAALNIARSWLFLRSQEYKKYQTNKTTGNTDKRAFVETWQSFYRKKLKEVWKPAV

SEQ ID NO: 26784 - protein, 978 aa, synthetic construct
  REGION 1..978: note = engineered CasX variant
QEIKRINKIRRRLVKDSNTKKAGKTGPMKTLLVRVMTPDLRERLENLRKKPENIPQPISNTSRANLNKLLTDYTEMKKAILHVYWEEFQKDPVGLMSRVAQPASKKIDQNKLKPEMDEKGNLTTAGFACSQCGQPLFVYKLEQVSEKGKAYTNYFGRCNVAEHEKLILLAQLKPEKDSDEAVTYSLGKFGQRALDFYSIHVTKESTHPVKPLAQIAGNRYASGPVGKALSDACMGTIASFLSKYQDIIIEHQKVVKGNQKRLESLRELAGKENLEYPSVTLPPQPHTKEGVDAYNEVIARVRMWVNLNLWQKLKLSRDDAKPLLRLKGFPSFPLVERQANEVDWWDMVCNVKKLINEKKEDGKVFWQNLAGYKRQEALRPYLSSEEDRKKGKKFARYQLGDLLLHLEKKHGEDWGKVYDEAWERIDKKVEGLSKHIKLEEERRSEDAQSKAALTDWLRAKASFVIEGLKEADKDEFCRCELKLQKWYGDLRGKPFAIEAENSILDISGFSKQYNCAFIWQKDGVKKLNLYLIINYFKGGKLRFKKIKPEAFEANRFYTVINKKSGEIVPMEVNFNFDDPNLIILPLAFGKRQGREFIWNDLLSLETGSLKLANGRVIEKTLYNRRTRQDEPALFVALTFERREVLDSSNIKPMNLIGVDRGENIPAVIALTDPEGCPLSRFKDSAGNPTHILRIGESYKEKGRTIQAKKEVEQRRAGGYSRKYASKAKNLADDMVRNTARDLLYYAVTQDAMLIFENLSRGFGRQGKRTFMAERQYTRMEDWLTAKLAYEGLPSKTYLSKTLAQYTSKTCSNCGFTITSADYDRVLEKLKKTATGWMTTINGKELKVEGQITYYNRYKRQNVVKDLSVELDRLSEESVNNDISSWTKGRSGEALSLLKKRFSHRPVQEKFVCLNCGFETHADEQAALNIARSWLFLRSQEYKKYQTNKTTGNTDKRAFVETWQSFYRKKLKEVWKPAV

SEQ ID NO: 26785 - protein, 978 aa, synthetic construct
  REGION 1..978: note = engineered CasX variant
QEIKRINKIRRRLVKDSNTKKAGKTGPMKTLLVRVMTPDLRERLENLRKKPENIPQPISNTSRANLNKLLTDYTEMKKAILHVYWEEFQKDPVGLMSRVAQPASKKIDQNKLKPEMDEKGNLTTAGFACSQCGQPLFVYKLEQVSEKGKAYTNYFGRCNVAEHEKLILLAQLKPEKDSDEAVTYSLGKFGQRALDFYSIHVTKESTHPVKPLAQIAGNRYASGPVGKALSDACMGTIASFLSKYQDIIIEHQKVVKGNQKRLESLRELAGKENLEYPSVTLPPQPHTKEGVDAYNEVIARVRMWVNLNLWQKLKLSRDDAKPLLRLKGFPSFPLVERQANEVDWWDMVCNVKKLINEKKEDGKVFWQNLAGYKRQEALRPYLSSEEDRKKGKKFARYQLGDLLLHLEKKHGEDWGKVYDEAWERIDKKVEGLSKHIKLEEERRSEDAQSKAALTDWLRAKASFVIEGLKEADKDEFCRCELKLQKWYGDLRGKPFAIEAENSILDISGFSKQYNCAFIWQKDGVKKLNLYLIINYFKGGKLRFKKIKPEAFEANRFYTVINKKSGEIVPMEVNFNFDDPNLIILPLAFGKRQGREFIWNDLLSLETGSLKLANGRVIEKTLYNRRTRQDEPALFVALTFERREVLDSSNIKPMNLIGVDRGENIPAVIALTDPEGCPLSRFKDSAGNPTHILRIGESCKEKQRTIQAKKEVEQRRAGGYSRKYASKAKNLADDMVRNTARDLLYYAVTQDAMLIFENLSRGFGRQGKRTFMAERQYTRMEDWLTAKLAYEGLPSKTYLSKTLAQYTSKTCSNCGFTITSADYDRVLEKLKKTATGWMTTINGKELKVEGQITYYNRYKRQNVVKDLSVELDRLSEESVNNDISSWTKGRSGEALSLLKKRFSHRPVQEKFVCLNCGFETHADEQAALNIARSWLFLRSQEYKKYQTNKTTGNTDKRAFVETWQSFYRKKLKEVWKPAV

SEQ ID NO: 26786 - protein, 978 aa, synthetic construct
  REGION 1..978: note = engineered CasX variant
QEIKRINKIRRRLVKDSNTKKAGKTGPMKTLLVRVMTPDLRERLENLRKKPENIPQPISNTSRANLNKLLTDYTEMKKAILHVYWEEFQKDPVGLMSRVAQPASKKIDQNKLKPEMDEKGNLTTAGFACSQCGQPLFVYKLEQVSEKGKAYTNYFGRCNVAEHEKLILLAQLKPEKDSDEAVTYSLGKFGQRALDFYSIHVTKESTHPVKPLAQIAGNRYASGPVGKALSDACMGTIASFLSKYQDIIIEHQKVVKGNQKRLESLRELAGKENLEYPSVTLPPQPHTKEGVDAYNEVIARVRMWVNLNLWQKLKLSRDDAKPLLRLKGFPSFPLVERQANEVDWWDMVCNVKKLINEKKEDGKVFWQNLAGYKRQEALRPYLSSEEDRKKGKKFARYQLGDLLLHLEKKHGEDWGKVYDEAWERIDKKVEGLSKHIKLEEERRSEDAQSKAALTDWLRAKASFVIEGLKEADKDEFCRCELKLQKWYGDLRGKPFAIEAENSILDISGFSKQYNCAFIWQKDGVKKLNLYLIINYFKGGKLRFKKIKPEAFEANRFYTVINKKSGEIVPMEVNFNFDDPNLIILPLAFGKRQGREFIWNDLLSLETGSLKLANGRVIEKTLYNRRTRQDEPALFVALTFERREVLDSSNIKPMNLIGVDRGENIPAVIALTDPEGCPLSRFKDSAGNPTHILRIGECYKEKQRTIQAKKEVEQRRLGGYSRKYASKAKNLADDMVRNTARDLLYYAVTQDAMLIFENLSRGFGRQGKRTFMAERQYTRMEDWLTAKLAYEGLPSKTYLSKTLAQYTSKTCSNCGFTITSADYDRVLEKLKKTATGWMTTINGKELKVEGQITYYNRYKRQNVVKDLSVELDRLSEESVNNDISSWTKGRSGEALSLLKKRFSHRPVQEKFVCLNCGFETHADEQAALNIARSWLFLRSQEYKKYQTNKTTGNTDKRAFVETWQSFYRKKLKEVWKPAV

SEQ ID NO: 26787 - protein, 978 aa, synthetic construct
  REGION 1..978: note = engineered CasX variant
QEIKRINKIRRRLVKDSNTKKAGKTGPMKTLLVRVMTPDLRERLENLRKKPENIPQPISNTSRANLNKLLTDYTEMKKAILHVYWEEFQKDPVGLMSRVAQPASKKIDQNKLKPEMDEKGNLTTAGFACSQCGQPLFVYKLEQVSEKGKAYTNYFGRCNVAEHEKLILLAQLKPEKDSDEAVTYSLGKFGQRALDFYSIHVTKESTHPVKPLAQIAGNRYASGPVGKALSDACMGTIASFLSKYQDIIIEHQKVVKGNQKRLESLRELAGKENLEYPSVTLPPQPHTKEGVDAYNEVIARVRMWVNLNLWQKLKLSRDDAKPLLRLKGFPSFPLVERQANEVDWWDMVCNVKKLINEKKEDGKVFWQNLAGYKRQEALRPYLSSEEDRKKGKKFARYQLGDLLLHLEKKHGEDWGKVYDEAWERIDKKVEGLSKHIKLEEERRSEDAQSKAALTDWLRAKASFVIEGLKEADKDEFCRCELKLQKWYGDLRGKPFAIEAENSILDISGFSKQYNCAFIWQKDGVKKLNLYLIINYFKGGKLRFKKIKPEAFEANRFYTVINKKSGEIVPMEVNFNFDDPNLIILPLAFGKRQGREFIWNDLLSLETGSLKLANGRVIEKTLYNRRTRQDEPALFVALTFERREVLDSSNIKPMNLIGVDRGENIPAVIALTDPEGCPLSRFKDSAGNPTHILRIGECYKEKQRTIQAKKEVEQRRAGGYSRKYASKAKNLADDMVRNTARDLLYYAVTQDAMLIFENLSRGFGRQGKRTFMAERQYTRMEDWLTAKLAYEGLPSKTYLSKTLAQYTSKTCSNCGFTITSADYDRVLEKLKKTATGWMTTINGKELKVEGQITYYNRYKRQNVVKDLSVELDRLSEESVNNDISSWTKGRSGEALSLLKKRFSHRPVQEKFVCLNCGFETHADEQAALNIARSWLFLRSQEYKKYQTNKTTGNTDKRAFVETWQSFYRKKLKEVWKPAV

SEQ ID NO: 26788 - protein, 978 aa, synthetic construct
  REGION 1..978: note = engineered CasX variant
QEIKRINKIRRRLVKDSNTKKAGKTGPMKTLLVRVMTPDLRERLENLRKKPENIPQPISNTSRANLNKLLTDYTEMKKAILHVYWEEFQKDPVGLMSRVAQPASKKIDQNKLKPEMDEKGNLTTAGFACSQCGQPLFVYKLEQVSEKGKAYTNYFGRCNVAEHEKLILLAQLKPEKDSDEAVTYSLGKFGQRALDFYSIHVTKESTHPVKPLAQIAGNRYASGPVGKALSDACMGTIASFLSKYQDIIIEHQKVVKGNQKRLESLRELAGKENLEYPSVTLPPQPHTKEGVDAYNEVIARVRMWVNLNLWQKLKLSRDDAKPLLRLKGFPSFPLVERQANEVDWWDMVCNVKKLINEKKEDGKVFWQNLAGYKRQEALRPYLSSEEDRKKGKKFARYQLGDLLLHLEKKHGEDWGKVYDEAWERIDKKVEGLSKHIKLEEERRSEDAQSKAALTDWLRAKASFVIEGLKEADKDEFCRCELKLQKWYGDLRGKPFAIEAENSILDISGFSKQYNCAFIWQKDGVKKLNLYLIINYFKGGKLRFKKIKPEAFEANRFYTVINKKSGEIVPMEVNFNFDDPNLIILPLAFGKRQGREFIWNDLLSLETGSLKLANGRVIEKTLYNRRTRQDEPALFVALTFERREVLDSSNIKPMNLIGVDRGENIPAVIALTDPEGCPLSRFKDSAGNPTHILRFGESYKEKQRTIQAKKEVEQRRAGGYSRKYASKAKNLADDMVRNTARDLLYYAVTQDAMLIFENLSRGFGRQGKRTFMAERQYTRMEDWLTAKLAYEGLPSKTYLSKTLAQYTSKTCSNCGFTITSADYDRVLEKLKKTATGWMTTINGKELKVEGQITYYNRYKRQNVVKDLSVELDRLSEESVNNDISSWTKGRSGEALSLLKKRFSHRPVQEKFVCLNCGFETHADEQAALNIARSWLFLRSQEYKKYQTNKTTGNTDKRAFVETWQSFYRKKLKEVWKPAV

SEQ ID NO: 26789 - protein, 978 aa, synthetic construct
  REGION 1..978: note = engineered CasX variant
QEIKRINKIRRRLVKDSNTKKAGKTGPMKTLLVRVMTPDLRERLENLRKKPENIPQPISNTSRANLNKLLTDYTEMKKAILHVYWEEFQKDPVGLMSRVAQPASKKIDQNKLKPEMDEKGNLTTAGFACSQCGQPLFVYKLEQVSEKGKAYTNYFGRCNVAEHEKLILLAQLKPEKDSDEAVTYSLGKFGQRALDFYSIHVTKESTHPVKPLAQIAGNRYASGPVGKALSDACMGTIASFLSKYQDIIIEHQKVVKGNQKRLESLRELAGKENLEYPSVTLPPQPHTKEGVDAYNEVIARVRMWVNLNLWQKLKLSRDDAKPLLRLKGFPSFPLVERQANEVDWWDMVCNVKKLINEKKEDGKVFWQNLAGYKRQEALRPYLSSEEDRKKGKKFARYQLGDLLLHLEKKHGEDWGKVYDEAWERIDKKVEGLSKHIKLEEERRSEDAQSKAALTDWLRAKASFVIEGLKEADKDEFCRCELKLQKWYGDLRGKPFAIEAENSILDISGFSKQYNCAFIWQKDGVKKLNLYLIINYFKGGKLRFKKIKPEAFEANRFYTVINKKSGEIVPMEVNFNFDDPNLIILPLAFGKRQGREFIWNDLLSLETGSLKLANGRVIEKTLYNRRTRQDEPALFVALTFERREVLDSSNIKPMNLIGVDRGENIPAVIALTDPEGCPLSRFKDSAGNPTHILRFGESYKEKQRTIQAKKEVEQRRAFGYSRKYASKAKNLADDMVRNTARDLLYYAVTQDAMLIFENLSRGFGRQGKRTFMAERQYTRMEDWLTAKLAYEGLPSKTYLSKTLAQYTSKTCSNCGFTITSADYDRVLEKLKKTATGWMTTINGKELKVEGQITYYNRYKRQNVVKDLSVELDRLSEESVNNDISSWTKGRSGEALSLLKKRFSHRPVQEKFVCLNCGFETHADEQAALNIARSWLFLRSQEYKKYQTNKTTGNTDKRAFVETWQSFYRKKLKEVWKPAV

SEQ ID NO: 26790 - protein, 978 aa, synthetic construct
  REGION 1..978: note = engineered CasX variant
QEIKRINKIRRRLVKDSNTKKAGKTGPMKTLLVRVMTPDLRERLENLRKKPENIPQPISNTSRANLNKLLTDYTEMKKAILHVYWEEFQKDPVGLMSRVAQPASKKIDQNKLKPEMDEKGNLTTAGFACSQCGQPLFVYKLEQVSEKGKAYTNYFGRCNVAEHEKLILLAQLKPEKDSDEAVTYSLGKFGQRALDFYSIHVTKESTHPVKPLAQIAGNRYASGPVGKALSDACMGTIASFLSKYQDIIIEHQKVVKGNQKRLESLRELAGKENLEYPSVTLPPQPHTKEGVDAYNEVIARVRMWVNLNLWQKLKLSRDDAKPLLRLKGFPSFPLVERQANEVDWWDMVCNVKKLINEKKEDGKVFWQNLAGYKRQEALRPYLSSEEDRKKGKKFARYQLGDLLLHLEKKHGEDWGKVYDEAWERIDKKVEGLSKHIKLEEERRSEDAQSKAALTDWLRAKASFVIEGLKEADKDEFCRCELKLQKWYGDLRGKPFAIEAENSILDISGFSKQYNCAFIWQKDGVKKLNLYLIINYFKGGKLRFKKIKPEAFEANRFYTVINKKSGEIVPMEVNFNFDDPNLIILPLAFGKRQGREFIWNDLLSLETGSLKLANGRVIEKTLYNRRTRQDEPALFVALTFERREVLDSSNIKPMNLIGVDRGENIPAVIALTDPEGCPLSRFKDSAGNPTFILRIGESYKEKQRTIQAKKEVEQRRAGGYSRKYASKAKNLADDMVRNTARDLLYYAVTQDAMLIFENLSRGFGRQGKRTFMAERQYTRMEDWLTAKLAYEGLPSKTYLSKTLAQYTSKTCSNCGFTITSADYDRVLEKLKKTATGWMTTINGKELKVEGQITYYNRYKRQNVVKDLSVELDRLSEESVNNDISSWTKGRSGEALSLLKKRFSHRPVQEKFVCLNCGFETHADEQAALNIARSWLFLRSQEYKKYQTNKTTGNTDKRAFVETWQSFYRKKLKEVWKPAV

SEQ ID NO: 26791 - protein, 978 aa, synthetic construct
  REGION 1..978: note = engineered CasX variant
QEIKRINKIRRRLVKDSNTKKAGKTGPMKTLLVRVMTPDLRERLENLRKKPENIPQPISNTSRANLNKLLTDYTEMKKAILHVYWEEFQKDPVGLMSRVAQPASKKIDQNKLKPEMDEKGNLTTAGFACSQCGQPLFVYKLEQVSEKGKAYTNYFGRCNVAEHEKLILLAQLKPEKDSDEAVTYSLGKFGQRALDFYSIHVTKESTHPVKPLAQIAGNRYASGPVGKALSDACMGTIASFLSKYQDIIIEHQKVVKGNQKRLESLRELAGKENLEYPSVTLPPQPHTKEGVDAYNEVIARVRMWVNLNLWQKLKLSRDDAKPLLRLKGFPSFPLVERQANEVDWWDMVCNVKKLINEKKEDGKVFWQNLAGYKRQEALRPYLSSEEDRKKGKKFARYQLGDLLLHLEKKHGEDWGKVYDEAWERIDKKVEGLSKHIKLEEERRSEDAQSKAALTDWLRAKASFVIEGLKEADKDEFCRCELKLQKWYGDLRGKPFAIEAENSILDISGFSKQYNCAFIWQKDGVKKLNLYLIINYFKGGKLRFKKIKPEAFEANRFYTVINKKSGEIVPMEVNFNFDDPNLIILPLAFGKRQGREFIWNDLLSLETGSLKLANGRVIEKTLYNRRTRQDEPALFVALTFERREVLDSSNIKPMNLIGVDRGENIPAVIALTDPEGCPLSRFKDSAGNPTFILRIGESYKEKGRTIQAKKEVEQRRAGGYSRKYASKAKNLADDMVRNTARDLLYYAVTQDAMLIFENLSRGFGRQGKRTFMAERQYTRMEDWLTAKLAYEGLPSKTYLSKTLAQYTSKTCSNCGFTITSADYDRVLEKLKKTATGWMTTINGKELKVEGQITYYNRYKRQNVVKDLSVELDRLSEESVNNDISSWTKGRSGEALSLLKKRFSHRPVQEKFVCLNCGFETHADEQAALNIARSWLFLRSQEYKKYQTNKTTGNTDKRAFVETWQSFYRKKLKEVWKPAV

SEQ ID NO: 26792 - protein, 978 aa, synthetic construct
  REGION 1..978: note = engineered CasX variant
QEIKRINKIRRRLVKDSNTKKAGKTGPMKTLLVRVMTPDLRERLENLRKKPENIPQPISNTSRANLNKLLTDYTEMKKAILHVYWEEFQKDPVGLMSRVAQPASKKIDQNKLKPEMDEKGNLTTAGFACSQCGQPLFVYKLEQVSEKGKAYTNYFGRCNVAEHEKLILLAQLKPEKDSDEAVTYSLGKFGQRALDFYSIHVTKESTHPVKPLAQIAGNRYASGPVGKALSDACMGTIASFLSKYQDIIIEHQKVVKGNQKRLESLRELAGKENLEYPSVTLPPQPHTKEGVDAYNEVIARVRMWVNLNLWQKLKLSRDDAKPLLRLKGFPSFPLVERQANEVDWWDMVCNVKKLINEKKEDGKVFWQNLAGYKRQEALRPYLSSEEDRKKGKKFARYQLGDLLLHLEKKHGEDWGKVYDEAWERIDKKVEGLSKHIKLEEERRSEDAQSKAALTDWLRAKASFVIEGLKEADKDEFCRCELKLQKWYGDLRGKPFAIEAENSILDISGFSKQYNCAFIWQKDGVKKLNLYLIINYFKGGKLRFKKIKPEAFEANRFYTVINKKSGEIVPMEVNFNFDDPNLIILPLAFGKRQGREFIWNDLLSLETGSLKLANGRVIEKTLYNRRTRQDEPALFVALTFERREVLDSSNIKPMNLIGVDRGENIPAVIALTDPEGCPLSRFKDRLGNPTHILRIGESYKEKQRTIQAKKEVEQRRAGGYSRKYASKAKNLADDMVRNTARDLLYYAVTQDAMLIFENLSRGFGRQGKRTFMAERQYTRMEDWLTAKLAYEGLPSKTYLSKTLAQYTSKTCSNCGFTITSADYDRVLEKLKKTATGWMTTINGKELKVEGQITYYNRYKRQNVVKDLSVELDRLSEESVNNDISSWTKGRSGEALSLLKKRFSHRPVQEKFVCLNCGFETHADEQAALNIARSWLFLRSQEYKKYQTNKTTGNTDKRAFVETWQSFYRKKLKEVWKPAV

SEQ ID NO: 26793 - protein, 978 aa, synthetic construct
  REGION 1..978: note = engineered CasX variant
QEIKRINKIRRRLVKDSNTKKAGKTGPMKTLLVRVMTPDLRERLENLRKKPENIPQPISNTSRANLNKLLTDYTEMKKAILHVYWEEFQKDPVGLMSRVAQPASKKIDQNKLKPEMDEKGNLTTAGFACSQCGQPLFVYKLEQVSEKGKAYTNYFGRCNVAEHEKLILLAQLKPEKDSDEAVTYSLGKFGQRALDFYSIHVTKESTHPVKPLAQIAGNRYASGPVGKALSDACMGTIASFLSKYQDIIIEHQKVVKGNQKRLESLRELAGKENLEYPSVTLPPQPHTKEGVDAYNEVIARVRMWVNLNLWQKLKLSRDDAKPLLRLKGFPSFPLVERQANEVDWWDMVCNVKKLINEKKEDGKVFWQNLAGYKRQEALRPYLSSEEDRKKGKKFARYQLGDLLLHLEKKHGEDWGKVYDEAWERIDKKVEGLSKHIKLEEERRSEDAQSKAALTDWLRAKASFVIEGLKEADKDEFCRCELKLQKWYGDLRGKPFAIEAENSILDISGFSKQYNCAFIWQKDGVKKLNLYLIINYFKGGKLRFKKIKPEAFEANRFYTVINKKSGEIVPMEVNFNFDDPNLIILPLAFGKRQGREFIWNDLLSLETGSLKLANGRVIEKTLYNRRTRQDEPALFVALTFERREVLDSSNIKPMNLIGVDRGENIPAVIALTDPEGCPLSRFKDRLGNPTHILRIGESYKEKQRTIQAKKEMEQRRAGGYSRKYASKAKNLADDMVRNTARDLLYYAVTQDAMLIFENLSRGFGRQGKRTFMAERQYTRMEDWLTAKLAYEGLPSKTYLSKTLAQYTSKTCSNCGFTITSADYDRVLEKLKKTATGWMTTINGKELKVEGQITYYNRYKRQNVVKDLSVELDRLSEESVNNDISSWTKGRSGEALSLLKKRFSHRPVQEKFVCLNCGFETHADEQAALNIARSWLFLRSQEYKKYQTNKTTGNTDKRAFVETWQSFYRKKLKEVWKPAV

SEQ ID NO: 26794 - protein, 978 aa, synthetic construct
  REGION 1..978: note = engineered CasX variant
QEIKRINKIRRRLVKDSNTKKAGKTGPMKTLLVRVMTPDLRERLENLRKKPENIPQPISNTSRANLNKLLTDYTEMKKAILHVYWEEFQKDPVGLMSRVAQPASKKIDQNKLKPEMDEKGNLTTAGFACSQCGQPLFVYKLEQVSEKGKAYTNYFGRCNVAEHEKLILLAQLKPEKDSDEAVTYSLGKFGQRALDFYSIHVTKESTHPVKPLAQIAGNRYASGPVGKALSDACMGTIASFLSKYQDIIIEHQKVVKGNQKRLESLRELAGKENLEYPSVTLPPQPHTKEGVDAYNEVIARVRMWVNLNLWQKLKLSRDDAKPLLRLKGFPSFPLVERQANEVDWWDMVCNVKKLINEKKEDGKVFWQNLAGYKRQEALRPYLSSEEDRKKGKKFARYQLGDLLLHLEKKHGEDWGKVYDEAWERIDKKVEGLSKHIKLEEERRSEDAQSKAALTDWLRAKASFVIEGLKEADKDEFCRCELKLQKWYGDLRGKPFAIEAENSILDISGFSKQYNCAFIWQKDGVKKLNLYLIINYFKGGKLRFKKIKPEAFEANRFYTVINKKSGEIVPMEVNFNFDDPNLIILPLAFGKRQGREFIWNDLLSLETGSLKLANGRVIEKTLYNRRTRQDEPALFVALTFERREVLDSSNIKPMNLIGVDRGENIPAVIALTDPEGCPLSRFKDQQGNPTHILRIGESYKEKQRTIQAKKEVEQRRAGGYSRKYASKAKNLADDMVRNTARDLLYYAVTQDAMLIFENLSRGFGRQGKRTFMAERQYTRMEDWLTAKLAYEGLPSKTYLSKTLAQYTSKTCSNCGFTITSADYDRVLEKLKKTATGWMTTINGKELKVEGQITYYNRYKRQNVVKDLSVELDRLSEESVNNDISSWTKGRSGEALSLLKKRFSHRPVQEKFVCLNCGFETHADEQAALNIARSWLFLRSQEYKKYQTNKTTGNTDKRAFVETWQSFYRKKLKEVWKPAV

SEQ ID NO: 26795 - protein, 978 aa, synthetic construct
  REGION 1..978: note = engineered CasX variant
QEIKRINKIRRRLVKDSNTKKAGKTGPMKTLLVRVMTPDLRERLENLRKKPENIPQPISNTSRANLNKLLTDYTEMKKAILHVYWEEFQKDPVGLMSRVAQPASKKIDQNKLKPEMDEKGNLTTAGFACSQCGQPLFVYKLEQVSEKGKAYTNYFGRCNVAEHEKLILLAQLKPEKDSDEAVTYSLGKFGQRALDFYSIHVTKESTHPVKPLAQIAGNRYASGPVGKALSDACMGTIASFLSKYQDIIIEHQKVVKGNQKRLESLRELAGKENLEYPSVTLPPQPHTKEGVDAYNEVIARVRMWVNLNLWQKLKLSRDDAKPLLRLKGFPSFPLVERQANEVDWWDMVCNVKKLINEKKEDGKVFWQNLAGYKRQEALRPYLSSEEDRKKGKKFARYQLGDLLLHLEKKHGEDWGKVYDEAWERIDKKVEGLSKHIKLEEERRSEDAQSKAALTDWLRAKASFVIEGLKEADKDEFCRCELKLQKWYGDLRGKPFAIEAENSILDISGFSKQYNCAFIWQKDGVKKLNLYLIINYFKGGKLRFKKIKPEAFEANRFYTVINKKSGEIVPMEVNFNFDDPNLIILPLAFGKRQGREFIWNDLLSLETGSLKLANGRVIEKTLYNRRTRQDEPALFVALTFERREVLDSSNIKPMNLIGVDRGENIPAVIALTDPEGCPLSRFKDQNGNPTHILRIGESYKEKQRTIQAKKEVEQRRAGGYSRKYASKAKNLADDMVRNTARDLLYYAVTQDAMLIFENLSRGFGRQGKRTFMAERQYTRMEDWLTAKLAYEGLPSKTYLSKTLAQYTSKTCSNCGFTITSADYDRVLEKLKKTATGWMTTINGKELKVEGQITYYNRYKRQNVVKDLSVELDRLSEESVNNDISSWTKGRSGEALSLLKKRFSHRPVQEKFVCLNCGFETHADEQAALNIARSWLFLRSQEYKKYQTNKTTGNTDKRAFVETWQSFYRKKLKEVWKPAV

SEQ ID NO: 26796 - protein, 978 aa, synthetic construct
  REGION 1..978: note = engineered CasX variant
QEIKRINKIRRRLVKDSNTKKAGKTGPMKTLLVRVMTPDLRERLENLRKKPENIPQPISNTSRANLNKLLTDYTEMKKAILHVYWEEFQKDPVGLMSRVAQPASKKIDQNKLKPEMDEKGNLTTAGFACSQCGQPLFVYKLEQVSEKGKAYTNYFGRCNVAEHEKLILLAQLKPEKDSDEAVTYSLGKFGQRALDFYSIHVTKESTHPVKPLAQIAGNRYASGPVGKALSDACMGTIASFLSKYQDIIIEHQKVVKGNQKRLESLRELAGKENLEYPSVTLPPQPHTKEGVDAYNEVIARVRMWVNLNLWQKLKLSRDDAKPLLRLKGFPSFPLVERQANEVDWWDMVCNVKKLINEKKEDGKVFWQNLAGYKRQEALRPYLSSEEDRKKGKKFARYQLGDLLLHLEKKHGEDWGKVYDEAWERIDKKVEGLSKHIKLEEERRSEDAQSKAALTDWLRAKASFVIEGLKEADKDEFCRCELKLQKWYGDLRGKPFAIEAENSILDISGFSKQYNCAFIWQKDGVKKLNLYLIINYFKGGKLRFKKIKPEAFEANRFYTVINKKSGEIVPMEVNFNFDDPNLIILPLAFGKRQGREFIWNDLLSLETGSLKLANGRVIEKTLYNRRTRQDEPALFVALTFERREVLDSSNIKPMNLIGVDRGENIPAVIALTDPEGCPLSRFKDQNGNPTHILRIGESYKEKQRTIQAKKEMEQRRAGGYSRKYASKAKNLADDMVRNTARDLLYYAVTQDAMLIFENLSRGFGRQGKRTFMAERQYTRMEDWLTAKLAYEGLPSKTYLSKTLAQYTSKTCSNCGFTITSADYDRVLEKLKKTATGWMTTINGKELKVEGQITYYNRYKRQNVVKDLSVELDRLSEESVNNDISSWTKGRSGEALSLLKKRFSHRPVQEKFVCLNCGFETHADEQAALNIARSWLFLRSQEYKKYQTNKTTGNTDKRAFVETWQSFYRKKLKEVWKPAV

SEQ ID NO: 26797 - protein, 978 aa, synthetic construct
  REGION 1..978: note = engineered CasX variant
QEIKRINKIRRRLVKDSNTKKAGKTGPMKTLLVRVMTPDLRERLENLRKKPENIPQPISNTSRANLNKLLTDYTEMKKAILHVYWEEFQKDPVGLMSRVAQPASKKIDQNKLKPEMDEKGNLTTAGFACSQCGQPLFVYKLEQVSEKGKAYTNYFGRCNVAEHEKLILLAQLKPEKDSDEAVTYSLGKFGQRALDFYSIHVTKESTHPVKPLAQIAGNRYASGPVGKALSDACMGTIASFLSKYQDIIIEHQKVVKGNQKRLESLRELAGKENLEYPSVTLPPQPHTKEGVDAYNEVIARVRMWVNLNLWQKLKLSRDDAKPLLRLKGFPSFPLVERQANEVDWWDMVCNVKKLINEKKEDGKVFWQNLAGYKRQEALRPYLSSEEDRKKGKKFARYQLGDLLLHLEKKHGEDWGKVYDEAWERIDKKVEGLSKHIKLEEERRSEDAQSKAALTDWLRAKASFVIEGLKEADKDEFCRCELKLQKWYGDLRGKPFAIEAENSILDISGFSKQYNCAFIWQKDGVKKLNLYLIINYFKGGKLRFKKIKPEAFEANRFYTVINKKSGEIVPMEVNFNFDDPNLIILPLAFGKRQGREFIWNDLLSLETGSLKLANGRVIEKTLYNRRTRQDEPALFVALTFERREVLDSSNIKPMNLIGVDRGENIPAVIALTDPEGCPLSRFKDQLGNPTHILRIGSSYKEKQRTIQQKKEVEQRRAGGYSRKYASKAKNLADDMVRNTARDLLYYAVTQDAMLIFENLSRGFGRQGKRTFMAERQYTRMEDWLTAKLAYEGLPSKTYLSKTLAQYTSKTCSNCGFTITSADYDRVLEKLKKTATGWMTTINGKELKVEGQITYYNRYKRQNVVKDLSVELDRLSEESVNNDISSWTKGRSGEALSLLKKRFSHRPVQEKFVCLNCGFETHADEQAALNIARSWLFLRSQEYKKYQTNKTTGNTDKRAFVETWQSFYRKKLKEVWKPAV

SEQ ID NO: 26798 - protein, 978 aa, synthetic construct
  REGION 1..978: note = engineered CasX variant
QEIKRINKIRRRLVKDSNTKKAGKTGPMKTLLVRVMTPDLRERLENLRKKPENIPQPISNTSRANLNKLLTDYTEMKKAILHVYWEEFQKDPVGLMSRVAQPASKKIDQNKLKPEMDEKGNLTTAGFACSQCGQPLFVYKLEQVSEKGKAYTNYFGRCNVAEHEKLILLAQLKPEKDSDEAVTYSLGKFGQRALDFYSIHVTKESTHPVKPLAQIAGNRYASGPVGKALSDACMGTIASFLSKYQDIIIEHQKVVKGNQKRLESLRELAGKENLEYPSVTLPPQPHTKEGVDAYNEVIARVRMWVNLNLWQKLKLSRDDAKPLLRLKGFPSFPLVERQANEVDWWDMVCNVKKLINEKKEDGKVFWQNLAGYKRQEALRPYLSSEEDRKKGKKFARYQLGDLLLHLEKKHGEDWGKVYDEAWERIDKKVEGLSKHIKLEEERRSEDAQSKAALTDWLRAKASFVIEGLKEADKDEFCRCELKLQKWYGDLRGKPFAIEAENSILDISGFSKQYNCAFIWQKDGVKKLNLYLIINYFKGGKLRFKKIKPEAFEANRFYTVINKKSGEIVPMEVNFNFDDPNLIILPLAFGKRQGREFIWNDLLSLETGSLKLANGRVIEKTLYNRRTRQDEPALFVALTFERREVLDSSNIKPMNLIGVDRGENIPAVIALTDPEGCPLSRFKDQLGNPTHILRIGSSYKEKQRTIQAKKEVEQRRAGGYSRKYASKAKNLADDMVRNTARDLLYYAVTQDAMLIFENLSRGFGRQGKRTFMAERQYTRMEDWLTAKLAYEGLPSKTYLSKTLAQYTSKTCSNCGFTITSADYDRVLEKLKKTATGWMTTINGKELKVEGQITYYNRYKRQNVVKDLSVELDRLSEESVNNDISSWTKGRSGEALSLLKKRFSHRPVQEKFVCLNCGFETHADEQAALNIARSWLFLRSQEYKKYQTNKTTGNTDKRAFVETWQSFYRKKLKEVWKPAV

SEQ ID NO: 26799 - protein, 978 aa, synthetic construct
  REGION 1..978: note = engineered CasX variant
QEIKRINKIRRRLVKDSNTKKAGKTGPMKTLLVRVMTPDLRERLENLRKKPENIPQPISNTSRANLNKLLTDYTEMKKAILHVYWEEFQKDPVGLMSRVAQPASKKIDQNKLKPEMDEKGNLTTAGFACSQCGQPLFVYKLEQVSEKGKAYTNYFGRCNVAEHEKLILLAQLKPEKDSDEAVTYSLGKFGQRALDFYSIHVTKESTHPVKPLAQIAGNRYASGPVGKALSDACMGTIASFLSKYQDIIIEHQKVVKGNQKRLESLRELAGKENLEYPSVTLPPQPHTKEGVDAYNEVIARVRMWVNLNLWQKLKLSRDDAKPLLRLKGFPSFPLVERQANEVDWWDMVCNVKKLINEKKEDGKVFWQNLAGYKRQEALRPYLSSEEDRKKGKKFARYQLGDLLLHLEKKHGEDWGKVYDEAWERIDKKVEGLSKHIKLEEERRSEDAQSKAALTDWLRAKASFVIEGLKEADKDEFCRCELKLQKWYGDLRGKPFAIEAENSILDISGFSKQYNCAFIWQKDGVKKLNLYLIINYFKGGKLRFKKIKPEAFEANRFYTVINKKSGEIVPMEVNFNFDDPNLIILPLAFGKRQGREFIWNDLLSLETGSLKLANGRVIEKTLYNRRTRQDEPALFVALTFERREVLDSSNIKPMNLIGVDRGENIPAVIALTDPEGCPLSRFKDQLGNPTHILRIGESYKEKQRTIQQKKEVEQRRAGGYSRKYASKAKNLADDMVRNTARDLLYYAVTQDAMLIFENLSRGFGRQGKRTFMAERQYTRMEDWLTAKLAYEGLPSKTYLSKTLAQYTSKTCSNCGFTITSADYDRVLEKLKKTATGWMTTINGKELKVEGQITYYNRYKRQNVVKDLSVELDRLSEESVNNDISSWTKGRSGEALSLLKKRFSHRPVQEKFVCLNCGFETHADEQAALNIARSWLFLRSQEYKKYQTNKTTGNTDKRAFVETWQSFYRKKLKEVWKPAV

SEQ ID NO: 26800 - protein, 978 aa, synthetic construct
  REGION 1..978: note = engineered CasX variant
QEIKRINKIRRRLVKDSNTKKAGKTGPMKTLLVRVMTPDLRERLENLRKKPENIPQPISNTSRANLNKLLTDYTEMKKAILHVYWEEFQKDPVGLMSRVAQPASKKIDQNKLKPEMDEKGNLTTAGFACSQCGQPLFVYKLEQVSEKGKAYTNYFGRCNVAEHEKLILLAQLKPEKDSDEAVTYSLGKFGQRALDFYSIHVTKESTHPVKPLAQIAGNRYASGPVGKALSDACMGTIASFLSKYQDIIIEHQKVVKGNQKRLESLRELAGKENLEYPSVTLPPQPHTKEGVDAYNEVIARVRMWVNLNLWQKLKLSRDDAKPLLRLKGFPSFPLVERQANEVDWWDMVCNVKKLINEKKEDGKVFWQNLAGYKRQEALRPYLSSEEDRKKGKKFARYQLGDLLLHLEKKHGEDWGKVYDEAWERIDKKVEGLSKHIKLEEERRSEDAQSKAALTDWLRAKASFVIEGLKEADKDEFCRCELKLQKWYGDLRGKPFAIEAENSILDISGFSKQYNCAFIWQKDGVKKLNLYLIINYFKGGKLRFKKIKPEAFEANRFYTVINKKSGEIVPMEVNFNFDDPNLIILPLAFGKRQGREFIWNDLLSLETGSLKLANGRVIEKTLYNRRTRQDEPALFVALTFERREVLDSSNIKPMNLIGVDRGENIPAVIALTDPEGCPLSRFKDQLGNPTHILRIGESYKEKQRTIQAYKEVEQRRAGGYSRKYASKAKNLADDMVRNTARDLLYYAVTQDAMLIFENLSRGFGRQGKRTFMAERQYTRMEDWLTAKLAYEGLPSKTYLSKTLAQYTSKTCSNCGFTITSADYDRVLEKLKKTATGWMTTINGKELKVEGQITYYNRYKRQNVVKDLSVELDRLSEESVNNDISSWTKGRSGEALSLLKKRFSHRPVQEKFVCLNCGFETHADEQAALNIARSWLFLRSQEYKKYQTNKTTGNTDKRAFVETWQSFYRKKLKEVWKPAV

SEQ ID NO: 26801 - protein, 978 aa, synthetic construct
  REGION 1..978: note = engineered CasX variant
QEIKRINKIRRRLVKDSNTKKAGKTGPMKTLLVRVMTPDLRERLENLRKKPENIPQPISNTSRANLNKLLTDYTEMKKAILHVYWEEFQKDPVGLMSRVAQPASKKIDQNKLKPEMDEKGNLTTAGFACSQCGQPLFVYKLEQVSEKGKAYTNYFGRCNVAEHEKLILLAQLKPEKDSDEAVTYSLGKFGQRALDFYSIHVTKESTHPVKPLAQIAGNRYASGPVGKALSDACMGTIASFLSKYQDIIIEHQKVVKGNQKRLESLRELAGKENLEYPSVTLPPQPHTKEGVDAYNEVIARVRMWVNLNLWQKLKLSRDDAKPLLRLKGFPSFPLVERQANEVDWWDMVCNVKKLINEKKEDGKVFWQNLAGYKRQEALRPYLSSEEDRKKGKKFARYQLGDLLLHLEKKHGEDWGKVYDEAWERIDKKVEGLSKHIKLEEERRSEDAQSKAALTDWLRAKASFVIEGLKEADKDEFCRCELKLQKWYGDLRGKPFAIEAENSILDISGFSKQYNCAFIWQKDGVKKLNLYLIINYFKGGKLRFKKIKPEAFEANRFYTVINKKSGEIVPMEVNFNFDDPNLIILPLAFGKRQGREFIWNDLLSLETGSLKLANGRVIEKTLYNRRTRQDEPALFVALTFERREVLDSSNIKPMNLIGVDRGENIPAVIALTDPEGCPLSRFKDQLGNPTHILRIGESYKEKQRTIQAKKEVEQRRAGGYSRKYASKAKNLADDMVRNTARDLLYYAVTQDAMLIFENLSRGFGRQGKRTFMAERQYTRMEDWLTAKLAYEGLPSKTYLSKTLAQYTSKTCSNCGFTITSADYDRVLEKLKKTATGWMTTINGKELKVEGQITYYNRYKRQNVVKDLSVELDRLSEESVNNDISSWTKGRSGEALSLLKKRFSHRPVQEKFVCLNCGFETHADEQAALNIARSWLFLRSQEYKKYQTNKTTGNTDKRAFVETWQSFYRKKLKEVWKPAV

SEQ ID NO: 26802 - protein, 978 aa, synthetic construct
  REGION 1..978: note = engineered CasX variant
QEIKRINKIRRRLVKDSNTKKAGKTGPMKTLLVRVMTPDLRERLENLRKKPENIPQPISNTSRANLNKLLTDYTEMKKAILHVYWEEFQKDPVGLMSRVAQPASKKIDQNKLKPEMDEKGNLTTAGFACSQCGQPLFVYKLEQVSEKGKAYTNYFGRCNVAEHEKLILLAQLKPEKDSDEAVTYSLGKFGQRALDFYSIHVTKESTHPVKPLAQIAGNRYASGPVGKALSDACMGTIASFLSKYQDIIIEHQKVVKGNQKRLESLRELAGKENLEYPSVTLPPQPHTKEGVDAYNEVIARVRMWVNLNLWQKLKLSRDDAKPLLRLKGFPSFPLVERQANEVDWWDMVCNVKKLINEKKEDGKVFWQNLAGYKRQEALRPYLSSEEDRKKGKKFARYQLGDLLLHLEKKHGEDWGKVYDEAWERIDKKVEGLSKHIKLEEERRSEDAQSKAALTDWLRAKASFVIEGLKEADKDEFCRCELKLQKWYGDLRGKPFAIEAENSILDISGFSKQYNCAFIWQKDGVKKLNLYLIINYFKGGKLRFKKIKPEAFEANRFYTVINKKSGEIVPMEVNFNFDDPNLIILPLAFGKRQGREFIWNDLLSLETGSLKLANGRVIEKTLYNRRTRQDEPALFVALTFERREVLDSSNIKPMNLIGVDRGENIPAVIALTDPEGCPLSRFKDQLGNPTHILRIGESYKEKQRTIQAKKEMEQRRAGGYSRKYASKAKNLADDMVRNTARDLLYYAVTQDAMLIFENLSRGFGRQGKRTFMAERQYTRMEDWLTAKLAYEGLPSKTYLSKTLAQYTSKTCSNCGFTITSADYDRVLEKLKKTATGWMTTINGKELKVEGQITYYNRYKRQNVVKDLSVELDRLSEESVNNDISSWTKGRSGEALSLLKKRFSHRPVQEKFVCLNCGFETHADEQAALNIARSWLFLRSQEYKKYQTNKTTGNTDKRAFVETWQSFYRKKLKEVWKPAV

SEQ ID NO: 26803 - protein, 978 aa, synthetic construct
  REGION 1..978: note = engineered CasX variant
QEIKRINKIRRRLVKDSNTKKAGKTGPMKTLLVRVMTPDLRERLENLRKKPENIPQPISNTSRANLNKLLTDYTEMKKAILHVYWEEFQKDPVGLMSRVAQPASKKIDQNKLKPEMDEKGNLTTAGFACSQCGQPLFVYKLEQVSEKGKAYTNYFGRCNVAEHEKLILLAQLKPEKDSDEAVTYSLGKFGQRALDFYSIHVTKESTHPVKPLAQIAGNRYASGPVGKALSDACMGTIASFLSKYQDIIIEHQKVVKGNQKRLESLRELAGKENLEYPSVTLPPQPHTKEGVDAYNEVIARVRMWVNLNLWQKLKLSRDDAKPLLRLKGFPSFPLVERQANEVDWWDMVCNVKKLINEKKEDGKVFWQNLAGYKRQEALRPYLSSEEDRKKGKKFARYQLGDLLLHLEKKHGEDWGKVYDEAWERIDKKVEGLSKHIKLEEERRSEDAQSKAALTDWLRAKASFVIEGLKEADKDEFCRCELKLQKWYGDLRGKPFAIEAENSILDISGFSKQYNCAFIWQKDGVKKLNLYLIINYFKGGKLRFKKIKPEAFEANRFYTVINKKSGEIVPMEVNFNFDDPNLIILPLAFGKRQGREFIWNDLLSLETGSLKLANGRVIEKTLYNRRTRQDEPALFVALTFERREVLDSSNIKPMNLIGVDRGENIPAVIALTDPEGCPLSRFKDQLGNPTHILRIGEHYKEKQRTIQAKKEVEQRRAGGYSRKYASKAKNLADDMVRNTARDLLYYAVTQDAMLIFENLSRGFGRQGKRTFMAERQYTRMEDWLTAKLAYEGLPSKTYLSKTLAQYTSKTCSNCGFTITSADYDRVLEKLKKTATGWMTTINGKELKVEGQITYYNRYKRQNVVKDLSVELDRLSEESVNNDISSWTKGRSGEALSLLKKRFSHRPVQEKFVCLNCGFETHADEQAALNIARSWLFLRSQEYKKYQTNKTTGNTDKRAFVETWQSFYRKKLKEVWKPAV

SEQ ID NO: 26804 - protein, 978 aa, synthetic construct
  REGION 1..978: note = engineered CasX variant
QEIKRINKIRRRLVKDSNTKKAGKTGPMKTLLVRVMTPDLRERLENLRKKPENIPQPISNTSRANLNKLLTDYTEMKKAILHVYWEEFQKDPVGLMSRVAQPASKKIDQNKLKPEMDEKGNLTTAGFACSQCGQPLFVYKLEQVSEKGKAYTNYFGRCNVAEHEKLILLAQLKPEKDSDEAVTYSLGKFGQRALDFYSIHVTKESTHPVKPLAQIAGNRYASGPVGKALSDACMGTIASFLSKYQDIIIEHQKVVKGNQKRLESLRELAGKENLEYPSVTLPPQPHTKEGVDAYNEVIARVRMWVNLNLWQKLKLSRDDAKPLLRLKGFPSFPLVERQANEVDWWDMVCNVKKLINEKKEDGKVFWQNLAGYKRQEALRPYLSSEEDRKKGKKFARYQLGDLLLHLEKKHGEDWGKVYDEAWERIDKKVEGLSKHIKLEEERRSEDAQSKAALTDWLRAKASFVIEGLKEADKDEFCRCELKLQKWYGDLRGKPFAIEAENSILDISGFSKQYNCAFIWQKDGVKKLNLYLIINYFKGGKLRFKKIKPEAFEANRFYTVINKKSGEIVPMEVNFNFDDPNLIILPLAFGKRQGREFIWNDLLSLETGSLKLANGRVIEKTLYNRRTRQDEPALFVALTFERREVLDSSNIKPMNLIGVDRGENIPAVIALTDPEGCPLSRFKDQLGNNTHILRIGESYKEKQRTIQAYKEVEQRRAGGYSRKYASKAKNLADDMVRNTARDLLYYAVTQDAMLIFENLSRGFGRQGKRTFMAERQYTRMEDWLTAKLAYEGLPSKTYLSKTLAQYTSKTCSNCGFTITSADYDRVLEKLKKTATGWMTTINGKELKVEGQITYYNRYKRQNVVKDLSVELDRLSEESVNNDISSWTKGRSGEALSLLKKRFSHRPVQEKFVCLNCGFETHADEQAALNIARSWLFLRSQEYKKYQTNKTTGNTDKRAFVETWQSFYRKKLKEVWKPAV

SEQ ID NO: 26805 - protein, 978 aa, synthetic construct
  REGION 1..978: note = engineered CasX variant
QEIKRINKIRRRLVKDSNTKKAGKTGPMKTLLVRVMTPDLRERLENLRKKPENIPQPISNTSRANLNKLLTDYTEMKKAILHVYWEEFQKDPVGLMSRVAQPASKKIDQNKLKPEMDEKGNLTTAGFACSQCGQPLFVYKLEQVSEKGKAYTNYFGRCNVAEHEKLILLAQLKPEKDSDEAVTYSLGKFGQRALDFYSIHVTKESTHPVKPLAQIAGNRYASGPVGKALSDACMGTIASFLSKYQDIIIEHQKVVKGNQKRLESLRELAGKENLEYPSVTLPPQPHTKEGVDAYNEVIARVRMWVNLNLWQKLKLSRDDAKPLLRLKGFPSFPLVERQANEVDWWDMVCNVKKLINEKKEDGKVFWQNLAGYKRQEALRPYLSSEEDRKKGKKFARYQLGDLLLHLEKKHGEDWGKVYDEAWERIDKKVEGLSKHIKLEEERRSEDAQSKAALTDWLRAKASFVIEGLKEADKDEFCRCELKLQKWYGDLRGKPFAIEAENSILDISGFSKQYNCAFIWQKDGVKKLNLYLIINYFKGGKLRFKKIKPEAFEANRFYTVINKKSGEIVPMEVNFNFDDPNLIILPLAFGKRQGREFIWNDLLSLETGSLKLANGRVIEKTLYNRRTRQDEPALFVALTFERREVLDSSNIKPMNLIGVDRGENIPAVIALTDPEGCPLSRFKDQLGNNTHILRIGESYKEKQRTIQAKKEVEQRRAGGYSRKYASKAKNLADDMVRNTARDLLYYAVTQDAMLIFENLSRGFGRQGKRTFMAERQYTRMEDWLTAKLAYEGLPSKTYLSKTLAQYTSKTCSNCGFTITSADYDRVLEKLKKTATGWMTTINGKELKVEGQITYYNRYKRQNVVKDLSVELDRLSEESVNNDISSWTKGRSGEALSLLKKRFSHRPVQEKFVCLNCGFETHADEQAALNIARSWLFLRSQEYKKYQTNKTTGNTDKRAFVETWQSFYRKKLKEVWKPAV

SEQ ID NO: 26806 - protein, 978 aa, synthetic construct
  REGION 1..978: note = engineered CasX variant
QEIKRINKIRRRLVKDSNTKKAGKTGPMKTLLVRVMTPDLRERLENLRKKPENIPQPISNTSRANLNKLLTDYTEMKKAILHVYWEEFQKDPVGLMSRVAQPASKKIDQNKLKPEMDEKGNLTTAGFACSQCGQPLFVYKLEQVSEKGKAYTNYFGRCNVAEHEKLILLAQLKPEKDSDEAVTYSLGKFGQRALDFYSIHVTKESTHPVKPLAQIAGNRYASGPVGKALSDACMGTIASFLSKYQDIIIEHQKVVKGNQKRLESLRELAGKENLEYPSVTLPPQPHTKEGVDAYNEVIARVRMWVNLNLWQKLKLSRDDAKPLLRLKGFPSFPLVERQANEVDWWDMVCNVKKLINEKKEDGKVFWQNLAGYKRQEALRPYLSSEEDRKKGKKFARYQLGDLLLHLEKKHGEDWGKVYDEAWERIDKKVEGLSKHIKLEEERRSEDAQSKAALTDWLRAKASFVIEGLKEADKDEFCRCELKLQKWYGDLRGKPFAIEAENSILDISGFSKQYNCAFIWQKDGVKKLNLYLIINYFKGGKLRFKKIKPEAFEANRFYTVINKKSGEIVPMEVNFNFDDPNLIILPLAFGKRQGREFIWNDLLSLETGSLKLANGRVIEKTLYNRRTRQDEPALFVALTFERREVLDSSNIKPMNLIGVDRGENIPAVIALTDPEGCPLSRFKDNQGNPTHILRIGESYKEKQRTIQAKKEVEQRRAGGYSRKYASKAKNLADDMVRNTARDLLYYAVTQDAMLIFENLSRGFGRQGKRTFMAERQYTRMEDWLTAKLAYEGLPSKTYLSKTLAQYTSKTCSNCGFTITSADYDRVLEKLKKTATGWMTTINGKELKVEGQITYYNRYKRQNVVKDLSVELDRLSEESVNNDISSWTKGRSGEALSLLKKRFSHRPVQEKFVCLNCGFETHADEQAALNIARSWLFLRSQEYKKYQTNKTTGNTDKRAFVETWQSFYRKKLKEVWKPAV

SEQ ID NO: 26807 - protein, 978 aa, synthetic construct
  REGION 1..978: note = engineered CasX variant
QEIKRINKIRRRLVKDSNTKKAGKTGPMKTLLVRVMTPDLRERLENLRKKPENIPQPISNTSRANLNKLLTDYTEMKKAILHVYWEEFQKDPVGLMSRVAQPASKKIDQNKLKPEMDEKGNLTTAGFACSQCGQPLFVYKLEQVSEKGKAYTNYFGRCNVAEHEKLILLAQLKPEKDSDEAVTYSLGKFGQRALDFYSIHVTKESTHPVKPLAQIAGNRYASGPVGKALSDACMGTIASFLSKYQDIIIEHQKVVKGNQKRLESLRELAGKENLEYPSVTLPPQPHTKEGVDAYNEVIARVRMWVNLNLWQKLKLSRDDAKPLLRLKGFPSFPLVERQANEVDWWDMVCNVKKLINEKKEDGKVFWQNLAGYKRQEALRPYLSSEEDRKKGKKFARYQLGDLLLHLEKKHGEDWGKVYDEAWERIDKKVEGLSKHIKLEEERRSEDAQSKAALTDWLRAKASFVIEGLKEADKDEFCRCELKLQKWYGDLRGKPFAIEAENSILDISGFSKQYNCAFIWQKDGVKKLNLYLIINYFKGGKLRFKKIKPEAFEANRFYTVINKKSGEIVPMEVNFNFDDPNLIILPLAFGKRQGREFIWNDLLSLETGSLKLANGRVIEKTLYNRRTRQDEPALFVALTFERREVLDSSNIKPMNLIGVDRGENIPAVIALTDPEGCPLSRFKDNLGNPTHILRIGESYKEKQRTIQAKKEVEQRRAGGYSRKYASKAKNLADDMVRNTARDLLYYAVTQDAMLIFENLSRGFGRQGKRTFMAERQYTRMEDWLTAKLAYEGLPSKTYLSKTLAQYTSKTCSNCGFTITSADYDRVLEKLKKTATGWMTTINGKELKVEGQITYYNRYKRQNVVKDLSVELDRLSEESVNNDISSWTKGRSGEALSLLKKRFSHRPVQEKFVCLNCGFETHADEQAALNIARSWLFLRSQEYKKYQTNKTTGNTDKRAFVETWQSFYRKKLKEVWKPAV

SEQ ID NO: 26808 - protein, 978 aa, synthetic construct
  REGION 1..978: note = engineered CasX variant
QEIKRINKIRRRLVKDSNTKKAGKTGPMKTLLVRVMTPDLRERLENLRKKPENIPQPISNTSRANLNKLLTDYTEMKKAILHVYWEEFQKDPVGLMSRVAQPASKKIDQNKLKPEMDEKGNLTTAGFACSQCGQPLFVYKLEQVSEKGKAYTNYFGRCNVAEHEKLILLAQLKPEKDSDEAVTYSLGKFGQRALDFYSIHVTKESTHPVKPLAQIAGNRYASGPVGKALSDACMGTIASFLSKYQDIIIEHQKVVKGNQKRLESLRELAGKENLEYPSVTLPPQPHTKEGVDAYNEVIARVRMWVNLNLWQKLKLSRDDAKPLLRLKGFPSFPLVERQANEVDWWDMVCNVKKLINEKKEDGKVFWQNLAGYKRQEALRPYLSSEEDRKKGKKFARYQLGDLLLHLEKKHGEDWGKVYDEAWERIDKKVEGLSKHIKLEEERRSEDAQSKAALTDWLRAKASFVIEGLKEADKDEFCRCELKLQKWYGDLRGKPFAIEAENSILDISGFSKQYNCAFIWQKDGVKKLNLYLIINYFKGGKLRFKKIKPEAFEANRFYTVINKKSGEIVPMEVNFNFDDPNLIILPLAFGKRQGREFIWNDLLSLETGSLKLANGRVIEKTLYNRRTRQDEPALFVALTFERREVLDSSNIKPMNLIGVDRGENIPAVIALTDPEGCPLSRFKDMLGNPTHILRIGESYKEKQRTIQAKKEVEQRRAGGYSRKYASKAKNLADDMVRNTARDLLYYAVTQDAMLIFENLSRGFGRQGKRTFMAERQYTRMEDWLTAKLAYEGLPSKTYLSKTLAQYTSKTCSNCGFTITSADYDRVLEKLKKTATGWMTTINGKELKVEGQITYYNRYKRQNVVKDLSVELDRLSEESVNNDISSWTKGRSGEALSLLKKRFSHRPVQEKFVCLNCGFETHADEQAALNIARSWLFLRSQEYKKYQTNKTTGNTDKRAFVETWQSFYRKKLKEVWKPAV

SEQ ID NO: 26809 - protein, 978 aa, synthetic construct
  REGION 1..978: note = engineered CasX variant
QEIKRINKIRRRLVKDSNTKKAGKTGPMKTLLVRVMTPDLRERLENLRKKPENIPQPISNTSRANLNKLLTDYTEMKKAILHVYWEEFQKDPVGLMSRVAQPASKKIDQNKLKPEMDEKGNLTTAGFACSQCGQPLFVYKLEQVSEKGKAYTNYFGRCNVAEHEKLILLAQLKPEKDSDEAVTYSLGKFGQRALDFYSIHVTKESTHPVKPLAQIAGNRYASGPVGKALSDACMGTIASFLSKYQDIIIEHQKVVKGNQKRLESLRELAGKENLEYPSVTLPPQPHTKEGVDAYNEVIARVRMWVNLNLWQKLKLSRDDAKPLLRLKGFPSFPLVERQANEVDWWDMVCNVKKLINEKKEDGKVFWQNLAGYKRQEALRPYLSSEEDRKKGKKFARYQLGDLLLHLEKKHGEDWGKVYDEAWERIDKKVEGLSKHIKLEEERRSEDAQSKAALTDWLRAKASFVIEGLKEADKDEFCRCELKLQKWYGDLRGKPFAIEAENSILDISGFSKQYNCAFIWQKDGVKKLNLYLIINYFKGGKLRFKKIKPEAFEANRFYTVINKKSGEIVPMEVNFNFDDPNLIILPLAFGKRQGREFIWNDLLSLETGSLKLANGRVIEKTLYNRRTRQDEPALFVALTFERREVLDSSNIKPMNLIGVDRGENIPAVIALTDPEGCPLSRFKDMLGNPTHILRIGESYKEKQRTIQAKKEVEQRIAGGYSRKYASKAKNLADDMVRNTARDLLYYAVTQDAMLIFENLSRGFGRQGKRTFMAERQYTRMEDWLTAKLAYEGLPSKTYLSKTLAQYTSKTCSNCGFTITSADYDRVLEKLKKTATGWMTTINGKELKVEGQITYYNRYKRQNVVKDLSVELDRLSEESVNNDISSWTKGRSGEALSLLKKRFSHRPVQEKFVCLNCGFETHADEQAALNIARSWLFLRSQEYKKYQTNKTTGNTDKRAFVETWQSFYRKKLKEVWKPAV

SEQ ID NO: 26810 - protein, 978 aa, synthetic construct
  REGION 1..978: note = engineered CasX variant
QEIKRINKIRRRLVKDSNTKKAGKTGPMKTLLVRVMTPDLRERLENLRKKPENIPQPISNTSRANLNKLLTDYTEMKKAILHVYWEEFQKDPVGLMSRVAQPASKKIDQNKLKPEMDEKGNLTTAGFACSQCGQPLFVYKLEQVSEKGKAYTNYFGRCNVAEHEKLILLAQLKPEKDSDEAVTYSLGKFGQRALDFYSIHVTKESTHPVKPLAQIAGNRYASGPVGKALSDACMGTIASFLSKYQDIIIEHQKVVKGNQKRLESLRELAGKENLEYPSVTLPPQPHTKEGVDAYNEVIARVRMWVNLNLWQKLKLSRDDAKPLLRLKGFPSFPLVERQANEVDWWDMVCNVKKLINEKKEDGKVFWQNLAGYKRQEALRPYLSSEEDRKKGKKFARYQLGDLLLHLEKKHGEDWGKVYDEAWERIDKKVEGLSKHIKLEEERRSEDAQSKAALTDWLRAKASFVIEGLKEADKDEFCRCELKLQKWYGDLRGKPFAIEAENSILDISGFSKQYNCAFIWQKDGVKKLNLYLIINYFKGGKLRFKKIKPEAFEANRFYTVINKKSGEIVPMEVNFNFDDPNLIILPLAFGKRQGREFIWNDLLSLETGSLKLANGRVIEKTLYNRRTRQDEPALFVALTFERREVLDSSNIKPMNLIGVDRGENIPAVIALTDPEGCPLSRFKDLLGNPTHILRIGESYKEKQRTIQAKKEVEQRRAGGYSRKYASKAKNLADDMVRNTARDLLYYAVTQDAMLIFENLSRGFGRQGKRTFMAERQYTRMEDWLTAKLAYEGLPSKTYLSKTLAQYTSKTCSNCGFTITSADYDRVLEKLKKTATGWMTTINGKELKVEGQITYYNRYKRQNVVKDLSVELDRLSEESVNNDISSWTKGRSGEALSLLKKRFSHRPVQEKFVCLNCGFETHADEQAALNIARSWLFLRSQEYKKYQTNKTTGNTDKRAFVETWQSFYRKKLKEVWKPAV

SEQ ID NO: 26811 - protein, 978 aa, synthetic construct
  REGION 1..978: note = engineered CasX variant
QEIKRINKIRRRLVKDSNTKKAGKTGPMKTLLVRVMTPDLRERLENLRKKPENIPQPISNTSRANLNKLLTDYTEMKKAILHVYWEEFQKDPVGLMSRVAQPASKKIDQNKLKPEMDEKGNLTTAGFACSQCGQPLFVYKLEQVSEKGKAYTNYFGRCNVAEHEKLILLAQLKPEKDSDEAVTYSLGKFGQRALDFYSIHVTKESTHPVKPLAQIAGNRYASGPVGKALSDACMGTIASFLSKYQDIIIEHQKVVKGNQKRLESLRELAGKENLEYPSVTLPPQPHTKEGVDAYNEVIARVRMWVNLNLWQKLKLSRDDAKPLLRLKGFPSFPLVERQANEVDWWDMVCNVKKLINEKKEDGKVFWQNLAGYKRQEALRPYLSSEEDRKKGKKFARYQLGDLLLHLEKKHGEDWGKVYDEAWERIDKKVEGLSKHIKLEEERRSEDAQSKAALTDWLRAKASFVIEGLKEADKDEFCRCELKLQKWYGDLRGKPFAIEAENSILDISGFSKQYNCAFIWQKDGVKKLNLYLIINYFKGGKLRFKKIKPEAFEANRFYTVINKKSGEIVPMEVNFNFDDPNLIILPLAFGKRQGREFIWNDLLSLETGSLKLANGRVIEKTLYNRRTRQDEPALFVALTFERREVLDSSNIKPMNLIGVDRGENIPAVIALTDPEGCPLSRFKDKLGNPTWILRIGESYKEKQRTIQAKKEVEQRRAGGYSRKYASKAKNLADDMVRNTARDLLYYAVTQDAMLIFENLSRGFGRQGKRTFMAERQYTRMEDWLTAKLAYEGLPSKTYLSKTLAQYTSKTCSNCGFTITSADYDRVLEKLKKTATGWMTTINGKELKVEGQITYYNRYKRQNVVKDLSVELDRLSEESVNNDISSWTKGRSGEALSLLKKRFSHRPVQEKFVCLNCGFETHADEQAALNIARSWLFLRSQEYKKYQTNKTTGNTDKRAFVETWQSFYRKKLKEVWKPAV

SEQ ID NO: 26812 - protein, 978 aa, synthetic construct
  REGION 1..978: note = engineered CasX variant
QEIKRINKIRRRLVKDSNTKKAGKTGPMKTLLVRVMTPDLRERLENLRKKPENIPQPISNTSRANLNKLLTDYTEMKKAILHVYWEEFQKDPVGLMSRVAQPASKKIDQNKLKPEMDEKGNLTTAGFACSQCGQPLFVYKLEQVSEKGKAYTNYFGRCNVAEHEKLILLAQLKPEKDSDEAVTYSLGKFGQRALDFYSIHVTKESTHPVKPLAQIAGNRYASGPVGKALSDACMGTIASFLSKYQDIIIEHQKVVKGNQKRLESLRELAGKENLEYPSVTLPPQPHTKEGVDAYNEVIARVRMWVNLNLWQKLKLSRDDAKPLLRLKGFPSFPLVERQANEVDWWDMVCNVKKLINEKKEDGKVFWQNLAGYKRQEALRPYLSSEEDRKKGKKFARYQLGDLLLHLEKKHGEDWGKVYDEAWERIDKKVEGLSKHIKLEEERRSEDAQSKAALTDWLRAKASFVIEGLKEADKDEFCRCELKLQKWYGDLRGKPFAIEAENSILDISGFSKQYNCAFIWQKDGVKKLNLYLIINYFKGGKLRFKKIKPEAFEANRFYTVINKKSGEIVPMEVNFNFDDPNLIILPLAFGKRQGREFIWNDLLSLETGSLKLANGRVIEKTLYNRRTRQDEPALFVALTFERREVLDSSNIKPMNLIGVDRGENIPAVIALTDPEGCPLSRFKDKLGNPTHILRIGESYKEKQRTIQQKKEVEQRRAGGYSRKYASKAKNLADDMVRNTARDLLYYAVTQDAMLIFENLSRGFGRQGKRTFMAERQYTRMEDWLTAKLAYEGLPSKTYLSKTLAQYTSKTCSNCGFTITSADYDRVLEKLKKTATGWMTTINGKELKVEGQITYYNRYKRQNVVKDLSVELDRLSEESVNNDISSWTKGRSGEALSLLKKRFSHRPVQEKFVCLNCGFETHADEQAALNIARSWLFLRSQEYKKYQTNKTTGNTDKRAFVETWQSFYRKKLKEVWKPAV

SEQ ID NO: 26813 - protein, 978 aa, synthetic construct
  REGION 1..978: note = engineered CasX variant
QEIKRINKIRRRLVKDSNTKKAGKTGPMKTLLVRVMTPDLRERLENLRKKPENIPQPISNTSRANLNKLLTDYTEMKKAILHVYWEEFQKDPVGLMSRVAQPASKKIDQNKLKPEMDEKGNLTTAGFACSQCGQPLFVYKLEQVSEKGKAYTNYFGRCNVAEHEKLILLAQLKPEKDSDEAVTYSLGKFGQRALDFYSIHVTKESTHPVKPLAQIAGNRYASGPVGKALSDACMGTIASFLSKYQDIIIEHQKVVKGNQKRLESLRELAGKENLEYPSVTLPPQPHTKEGVDAYNEVIARVRMWVNLNLWQKLKLSRDDAKPLLRLKGFPSFPLVERQANEVDWWDMVCNVKKLINEKKEDGKVFWQNLAGYKRQEALRPYLSSEEDRKKGKKFARYQLGDLLLHLEKKHGEDWGKVYDEAWERIDKKVEGLSKHIKLEEERRSEDAQSKAALTDWLRAKASFVIEGLKEADKDEFCRCELKLQKWYGDLRGKPFAIEAENSILDISGFSKQYNCAFIWQKDGVKKLNLYLIINYFKGGKLRFKKIKPEAFEANRFYTVINKKSGEIVPMEVNFNFDDPNLIILPLAFGKRQGREFIWNDLLSLETGSLKLANGRVIEKTLYNRRTRQDEPALFVALTFERREVLDSSNIKPMNLIGVDRGENIPAVIALTDPEGCPLSRFKDKLGNPTHILRIGESYKEKQRTIQQFKEVEQRRAGGYSRKYASKAKNLADDMVRNTARDLLYYAVTQDAMLIFENLSRGFGRQGKRTFMAERQYTRMEDWLTAKLAYEGLPSKTYLSKTLAQYTSKTCSNCGFTITSADYDRVLEKLKKTATGWMTTINGKELKVEGQITYYNRYKRQNVVKDLSVELDRLSEESVNNDISSWTKGRSGEALSLLKKRFSHRPVQEKFVCLNCGFETHADEQAALNIARSWLFLRSQEYKKYQTNKTTGNTDKRAFVETWQSFYRKKLKEVWKPAV

SEQ ID NO: 26814 - protein, 978 aa, synthetic construct
  REGION 1..978: note = engineered CasX variant
QEIKRINKIRRRLVKDSNTKKAGKTGPMKTLLVRVMTPDLRERLENLRKKPENIPQPISNTSRANLNKLLTDYTEMKKAILHVYWEEFQKDPVGLMSRVAQPASKKIDQNKLKPEMDEKGNLTTAGFACSQCGQPLFVYKLEQVSEKGKAYTNYFGRCNVAEHEKLILLAQLKPEKDSDEAVTYSLGKFGQRALDFYSIHVTKESTHPVKPLAQIAGNRYASGPVGKALSDACMGTIASFLSKYQDIIIEHQKVVKGNQKRLESLRELAGKENLEYPSVTLPPQPHTKEGVDAYNEVIARVRMWVNLNLWQKLKLSRDDAKPLLRLKGFPSFPLVERQANEVDWWDMVCNVKKLINEKKEDGKVFWQNLAGYKRQEALRPYLSSEEDRKKGKKFARYQLGDLLLHLEKKHGEDWGKVYDEAWERIDKKVEGLSKHIKLEEERRSEDAQSKAALTDWLRAKASFVIEGLKEADKDEFCRCELKLQKWYGDLRGKPFAIEAENSILDISGFSKQYNCAFIWQKDGVKKLNLYLIINYFKGGKLRFKKIKPEAFEANRFYTVINKKSGEIVPMEVNFNFDDPNLIILPLAFGKRQGREFIWNDLLSLETGSLKLANGRVIEKTLYNRRTRQDEPALFVALTFERREVLDSSNIKPMNLIGVDRGENIPAVIALTDPEGCPLSRFKDKLGNPTHILRIGESYKEKQRTIQAKKEVEQRRAGGYSRKYASKAKNLADDMVRNTARDLLYYAVTQDAMLIFENLSRGFGRQGKRTFMAERQYTRMEDWLTAKLAYEGLPSKTYLSKTLAQYTSKTCSNCGFTITSADYDRVLEKLKKTATGWMTTINGKELKVEGQITYYNRYKRQNVVKDLSVELDRLSEESVNNDISSWTKGRSGEALSLLKKRFSHRPVQEKFVCLNCGFETHADEQAALNIARSWLFLRSQEYKKYQTNKTTGNTDKRAFVETWQSFYRKKLKEVWKPAV

SEQ ID NO: 26815 - protein, 978 aa, synthetic construct
  REGION 1..978: note = engineered CasX variant
QEIKRINKIRRRLVKDSNTKKAGKTGPMKTLLVRVMTPDLRERLENLRKKPENIPQPISNTSRANLNKLLTDYTEMKKAILHVYWEEFQKDPVGLMSRVAQPASKKIDQNKLKPEMDEKGNLTTAGFACSQCGQPLFVYKLEQVSEKGKAYTNYFGRCNVAEHEKLILLAQLKPEKDSDEAVTYSLGKFGQRALDFYSIHVTKESTHPVKPLAQIAGNRYASGPVGKALSDACMGTIASFLSKYQDIIIEHQKVVKGNQKRLESLRELAGKENLEYPSVTLPPQPHTKEGVDAYNEVIARVRMWVNLNLWQKLKLSRDDAKPLLRLKGFPSFPLVERQANEVDWWDMVCNVKKLINEKKEDGKVFWQNLAGYKRQEALRPYLSSEEDRKKGKKFARYQLGDLLLHLEKKHGEDWGKVYDEAWERIDKKVEGLSKHIKLEEERRSEDAQSKAALTDWLRAKASFVIEGLKEADKDEFCRCELKLQKWYGDLRGKPFAIEAENSILDISGFSKQYNCAFIWQKDGVKKLNLYLIINYFKGGKLRFKKIKPEAFEANRFYTVINKKSGEIVPMEVNFNFDDPNLIILPLAFGKRQGREFIWNDLLSLETGSLKLANGRVIEKTLYNRRTRQDEPALFVALTFERREVLDSSNIKPMNLIGVDRGENIPAVIALTDPEGCPLSRFKDKLGNPTHILRIGESYKEKQRTIQAFKEVEQRRAGGYSRKYASKAKNLADDMVRNTARDLLYYAVTQDAMLIFENLSRGFGRQGKRTFMAERQYTRMEDWLTAKLAYEGLPSKTYLSKTLAQYTSKTCSNCGFTITSADYDRVLEKLKKTATGWMTTINGKELKVEGQITYYNRYKRQNVVKDLSVELDRLSEESVNNDISSWTKGRSGEALSLLKKRFSHRPVQEKFVCLNCGFETHADEQAALNIARSWLFLRSQEYKKYQTNKTTGNTDKRAFVETWQSFYRKKLKEVWKPAV

SEQ ID NO: 26816 - protein, 978 aa, synthetic construct
  REGION 1..978: note = engineered CasX variant
QEIKRINKIRRRLVKDSNTKKAGKTGPMKTLLVRVMTPDLRERLENLRKKPENIPQPISNTSRANLNKLLTDYTEMKKAILHVYWEEFQKDPVGLMSRVAQPASKKIDQNKLKPEMDEKGNLTTAGFACSQCGQPLFVYKLEQVSEKGKAYTNYFGRCNVAEHEKLILLAQLKPEKDSDEAVTYSLGKFGQRALDFYSIHVTKESTHPVKPLAQIAGNRYASGPVGKALSDACMGTIASFLSKYQDIIIEHQKVVKGNQKRLESLRELAGKENLEYPSVTLPPQPHTKEGVDAYNEVIARVRMWVNLNLWQKLKLSRDDAKPLLRLKGFPSFPLVERQANEVDWWDMVCNVKKLINEKKEDGKVFWQNLAGYKRQEALRPYLSSEEDRKKGKKFARYQLGDLLLHLEKKHGEDWGKVYDEAWERIDKKVEGLSKHIKLEEERRSEDAQSKAALTDWLRAKASFVIEGLKEADKDEFCRCELKLQKWYGDLRGKPFAIEAENSILDISGFSKQYNCAFIWQKDGVKKLNLYLIINYFKGGKLRFKKIKPEAFEANRFYTVINKKSGEIVPMEVNFNFDDPNLIILPLAFGKRQGREFIWNDLLSLETGSLKLANGRVIEKTLYNRRTRQDEPALFVALTFERREVLDSSNIKPMNLIGVDRGENIPAVIALTDPEGCPLSRFKDKLGNPTHILRIGEPYKEKQRTIQQKKEVEQRRAGGYSRKYASKAKNLADDMVRNTARDLLYYAVTQDAMLIFENLSRGFGRQGKRTFMAERQYTRMEDWLTAKLAYEGLPSKTYLSKTLAQYTSKTCSNCGFTITSADYDRVLEKLKKTATGWMTTINGKELKVEGQITYYNRYKRQNVVKDLSVELDRLSEESVNNDISSWTKGRSGEALSLLKKRFSHRPVQEKFVCLNCGFETHADEQAALNIARSWLFLRSQEYKKYQTNKTTGNTDKRAFVETWQSFYRKKLKEVWKPAV

SEQ ID NO: 26817 - protein, 978 aa, synthetic construct
  REGION 1..978: note = engineered CasX variant
QEIKRINKIRRRLVKDSNTKKAGKTGPMKTLLVRVMTPDLRERLENLRKKPENIPQPISNTSRANLNKLLTDYTEMKKAILHVYWEEFQKDPVGLMSRVAQPASKKIDQNKLKPEMDEKGNLTTAGFACSQCGQPLFVYKLEQVSEKGKAYTNYFGRCNVAEHEKLILLAQLKPEKDSDEAVTYSLGKFGQRALDFYSIHVTKESTHPVKPLAQIAGNRYASGPVGKALSDACMGTIASFLSKYQDIIIEHQKVVKGNQKRLESLRELAGKENLEYPSVTLPPQPHTKEGVDAYNEVIARVRMWVNLNLWQKLKLSRDDAKPLLRLKGFPSFPLVERQANEVDWWDMVCNVKKLINEKKEDGKVFWQNLAGYKRQEALRPYLSSEEDRKKGKKFARYQLGDLLLHLEKKHGEDWGKVYDEAWERIDKKVEGLSKHIKLEEERRSEDAQSKAALTDWLRAKASFVIEGLKEADKDEFCRCELKLQKWYGDLRGKPFAIEAENSILDISGFSKQYNCAFIWQKDGVKKLNLYLIINYFKGGKLRFKKIKPEAFEANRFYTVINKKSGEIVPMEVNFNFDDPNLIILPLAFGKRQGREFIWNDLLSLETGSLKLANGRVIEKTLYNRRTRQDEPALFVALTFERREVLDSSNIKPMNLIGVDRGENIPAVIALTDPEGCPLSRFKDKLGNPTHILRIGEPYKEKQRTIQAKKEVEQRRAGGYSRKYASKAKNLADDMVRNTARDLLYYAVTQDAMLIFENLSRGFGRQGKRTFMAERQYTRMEDWLTAKLAYEGLPSKTYLSKTLAQYTSKTCSNCGFTITSADYDRVLEKLKKTATGWMTTINGKELKVEGQITYYNRYKRQNVVKDLSVELDRLSEESVNNDISSWTKGRSGEALSLLKKRFSHRPVQEKFVCLNCGFETHADEQAALNIARSWLFLRSQEYKKYQTNKTTGNTDKRAFVETWQSFYRKKLKEVWKPAV

SEQ ID NO: 26818 - protein, 978 aa, synthetic construct
  REGION 1..978: note = engineered CasX variant
QEIKRINKIRRRLVKDSNTKKAGKTGPMKTLLVRVMTPDLRERLENLRKKPENIPQPISNTSRANLNKLLTDYTEMKKAILHVYWEEFQKDPVGLMSRVAQPASKKIDQNKLKPEMDEKGNLTTAGFACSQCGQPLFVYKLEQVSEKGKAYTNYFGRCNVAEHEKLILLAQLKPEKDSDEAVTYSLGKFGQRALDFYSIHVTKESTHPVKPLAQIAGNRYASGPVGKALSDACMGTIASFLSKYQDIIIEHQKVVKGNQKRLESLRELAGKENLEYPSVTLPPQPHTKEGVDAYNEVIARVRMWVNLNLWQKLKLSRDDAKPLLRLKGFPSFPLVERQANEVDWWDMVCNVKKLINEKKEDGKVFWQNLAGYKRQEALRPYLSSEEDRKKGKKFARYQLGDLLLHLEKKHGEDWGKVYDEAWERIDKKVEGLSKHIKLEEERRSEDAQSKAALTDWLRAKASFVIEGLKEADKDEFCRCELKLQKWYGDLRGKPFAIEAENSILDISGFSKQYNCAFIWQKDGVKKLNLYLIINYFKGGKLRFKKIKPEAFEANRFYTVINKKSGEIVPMEVNFNFDDPNLIILPLAFGKRQGREFIWNDLLSLETGSLKLANGRVIEKTLYNRRTRQDEPALFVALTFERREVLDSSNIKPMNLIGVDRGENIPAVIALTDPEGCPLSRFKDKDGNPTWILRIGESYKEKQRTIQAKKEVEQRRAGGYSRKYASKAKNLADDMVRNTARDLLYYAVTQDAMLIFENLSRGFGRQGKRTFMAERQYTRMEDWLTAKLAYEGLPSKTYLSKTLAQYTSKTCSNCGFTITSADYDRVLEKLKKTATGWMTTINGKELKVEGQITYYNRYKRQNVVKDLSVELDRLSEESVNNDISSWTKGRSGEALSLLKKRFSHRPVQEKFVCLNCGFETHADEQAALNIARSWLFLRSQEYKKYQTNKTTGNTDKRAFVETWQSFYRKKLKEVWKPAV

SEQ ID NO: 26819 - protein, 978 aa, synthetic construct
  REGION 1..978: note = engineered CasX variant
QEIKRINKIRRRLVKDSNTKKAGKTGPMKTLLVRVMTPDLRERLENLRKKPENIPQPISNTSRANLNKLLTDYTEMKKAILHVYWEEFQKDPVGLMSRVAQPASKKIDQNKLKPEMDEKGNLTTAGFACSQCGQPLFVYKLEQVSEKGKAYTNYFGRCNVAEHEKLILLAQLKPEKDSDEAVTYSLGKFGQRALDFYSIHVTKESTHPVKPLAQIAGNRYASGPVGKALSDACMGTIASFLSKYQDIIIEHQKVVKGNQKRLESLRELAGKENLEYPSVTLPPQPHTKEGVDAYNEVIARVRMWVNLNLWQKLKLSRDDAKPLLRLKGFPSFPLVERQANEVDWWDMVCNVKKLINEKKEDGKVFWQNLAGYKRQEALRPYLSSEEDRKKGKKFARYQLGDLLLHLEKKHGEDWGKVYDEAWERIDKKVEGLSKHIKLEEERRSEDAQSKAALTDWLRAKASFVIEGLKEADKDEFCRCELKLQKWYGDLRGKPFAIEAENSILDISGFSKQYNCAFIWQKDGVKKLNLYLIINYFKGGKLRFKKIKPEAFEANRFYTVINKKSGEIVPMEVNFNFDDPNLIILPLAFGKRQGREFIWNDLLSLETGSLKLANGRVIEKTLYNRRTRQDEPALFVALTFERREVLDSSNIKPMNLIGVDRGENIPAVIALTDPEGCPLSRFKDKDGNPTHILRIGESYKEKQRTIQAKKEVEQRRAGGYSRKYASKAKNLADDMVRNTARDLLYYAVTQDAMLIFENLSRGFGRQGKRTFMAERQYTRMEDWLTAKLAYEGLPSKTYLSKTLAQYTSKTCSNCGFTITSADYDRVLEKLKKTATGWMTTINGKELKVEGQITYYNRYKRQNVVKDLSVELDRLSEESVNNDISSWTKGRSGEALSLLKKRFSHRPVQEKFVCLNCGFETHADEQAALNIARSWLFLRSQEYKKYQTNKTTGNTDKRAFVETWQSFYRKKLKEVWKPAV

SEQ ID NO: 26820 - protein, 978 aa, synthetic construct
  REGION 1..978: note = engineered CasX variant
QEIKRINKIRRRLVKDSNTKKAGKTGPMKTLLVRVMTPDLRERLENLRKKPENIPQPISNTSRANLNKLLTDYTEMKKAILHVYWEEFQKDPVGLMSRVAQPASKKIDQNKLKPEMDEKGNLTTAGFACSQCGQPLFVYKLEQVSEKGKAYTNYFGRCNVAEHEKLILLAQLKPEKDSDEAVTYSLGKFGQRALDFYSIHVTKESTHPVKPLAQIAGNRYASGPVGKALSDACMGTIASFLSKYQDIIIEHQKVVKGNQKRLESLRELAGKENLEYPSVTLPPQPHTKEGVDAYNEVIARVRMWVNLNLWQKLKLSRDDAKPLLRLKGFPSFPLVERQANEVDWWDMVCNVKKLINEKKEDGKVFWQNLAGYKRQEALRPYLSSEEDRKKGKKFARYQLGDLLLHLEKKHGEDWGKVYDEAWERIDKKVEGLSKHIKLEEERRSEDAQSKAALTDWLRAKASFVIEGLKEADKDEFCRCELKLQKWYGDLRGKPFAIEAENSILDISGFSKQYNCAFIWQKDGVKKLNLYLIINYFKGGKLRFKKIKPEAFEANRFYTVINKKSGEIVPMEVNFNFDDPNLIILPLAFGKRQGREFIWNDLLSLETGSLKLANGRVIEKTLYNRRTRQDEPALFVALTFERREVLDSSNIKPMNLIGVDRGENIPAVIALTDPEGCPLSRFKDINGNPTHILRIGESYKETQRTIQAKKEVEQRRAGGYSRKYASKAKNLADDMVRNTARDLLYYAVTQDAMLIFENLSRGFGRQGKRTFMAERQYTRMEDWLTAKLAYEGLPSKTYLSKTLAQYTSKTCSNCGFTITSADYDRVLEKLKKTATGWMTTINGKELKVEGQITYYNRYKRQNVVKDLSVELDRLSEESVNNDISSWTKGRSGEALSLLKKRFSHRPVQEKFVCLNCGFETHADEQAALNIARSWLFLRSQEYKKYQTNKTTGNTDKRAFVETWQSFYRKKLKEVWKPAV

SEQ ID NO: 26821 - protein, 978 aa, synthetic construct
  REGION 1..978: note = engineered CasX variant
QEIKRINKIRRRLVKDSNTKKAGKTGPMKTLLVRVMTPDLRERLENLRKKPENIPQPISNTSRANLNKLLTDYTEMKKAILHVYWEEFQKDPVGLMSRVAQPASKKIDQNKLKPEMDEKGNLTTAGFACSQCGQPLFVYKLEQVSEKGKAYTNYFGRCNVAEHEKLILLAQLKPEKDSDEAVTYSLGKFGQRALDFYSIHVTKESTHPVKPLAQIAGNRYASGPVGKALSDACMGTIASFLSKYQDIIIEHQKVVKGNQKRLESLRELAGKENLEYPSVTLPPQPHTKEGVDAYNEVIARVRMWVNLNLWQKLKLSRDDAKPLLRLKGFPSFPLVERQANEVDWWDMVCNVKKLINEKKEDGKVFWQNLAGYKRQEALRPYLSSEEDRKKGKKFARYQLGDLLLHLEKKHGEDWGKVYDEAWERIDKKVEGLSKHIKLEEERRSEDAQSKAALTDWLRAKASFVIEGLKEADKDEFCRCELKLQKWYGDLRGKPFAIEAENSILDISGFSKQYNCAFIWQKDGVKKLNLYLIINYFKGGKLRFKKIKPEAFEANRFYTVINKKSGEIVPMEVNFNFDDPNLIILPLAFGKRQGREFIWNDLLSLETGSLKLANGRVIEKTLYNRRTRQDEPALFVALTFERREVLDSSNIKPMNLIGVDRGENIPAVIALTDPEGCPLSRFKDINGNPTHILRIGESYKEKQRTIQAKKEVEQRRAGGYSRKYASKAKNLADDMVRNTARDLLYYAVTQDAMLIFENLSRGFGRQGKRTFMAERQYTRMEDWLTAKLAYEGLPSKTYLSKTLAQYTSKTCSNCGFTITSADYDRVLEKLKKTATGWMTTINGKELKVEGQITYYNRYKRQNVVKDLSVELDRLSEESVNNDISSWTKGRSGEALSLLKKRFSHRPVQEKFVCLNCGFETHADEQAALNIARSWLFLRSQEYKKYQTNKTTGNTDKRAFVETWQSFYRKKLKEVWKPAV

SEQ ID NO: 26822 - protein, 978 aa, synthetic construct
  REGION 1..978: note = engineered CasX variant
QEIKRINKIRRRLVKDSNTKKAGKTGPMKTLLVRVMTPDLRERLENLRKKPENIPQPISNTSRANLNKLLTDYTEMKKAILHVYWEEFQKDPVGLMSRVAQPASKKIDQNKLKPEMDEKGNLTTAGFACSQCGQPLFVYKLEQVSEKGKAYTNYFGRCNVAEHEKLILLAQLKPEKDSDEAVTYSLGKFGQRALDFYSIHVTKESTHPVKPLAQIAGNRYASGPVGKALSDACMGTIASFLSKYQDIIIEHQKVVKGNQKRLESLRELAGKENLEYPSVTLPPQPHTKEGVDAYNEVIARVRMWVNLNLWQKLKLSRDDAKPLLRLKGFPSFPLVERQANEVDWWDMVCNVKKLINEKKEDGKVFWQNLAGYKRQEALRPYLSSEEDRKKGKKFARYQLGDLLLHLEKKHGEDWGKVYDEAWERIDKKVEGLSKHIKLEEERRSEDAQSKAALTDWLRAKASFVIEGLKEADKDEFCRCELKLQKWYGDLRGKPFAIEAENSILDISGFSKQYNCAFIWQKDGVKKLNLYLIINYFKGGKLRFKKIKPEAFEANRFYTVINKKSGEIVPMEVNFNFDDPNLIILPLAFGKRQGREFIWNDLLSLETGSLKLANGRVIEKTLYNRRTRQDEPALFVALTFERREVLDSSNIKPMNLIGVDRGENIPAVIALTDPEGCPLSRFKDILGNPTHILRIGESYKETQRTIQAKKEVEQRRAGGYSRKYASKAKNLADDMVRNTARDLLYYAVTQDAMLIFENLSRGFGRQGKRTFMAERQYTRMEDWLTAKLAYEGLPSKTYLSKTLAQYTSKTCSNCGFTITSADYDRVLEKLKKTATGWMTTINGKELKVEGQITYYNRYKRQNVVKDLSVELDRLSEESVNNDISSWTKGRSGEALSLLKKRFSHRPVQEKFVCLNCGFETHADEQAALNIARSWLFLRSQEYKKYQTNKTTGNTDKRAFVETWQSFYRKKLKEVWKPAV

SEQ ID NO: 26823 - protein, 978 aa, synthetic construct
  REGION 1..978: note = engineered CasX variant
QEIKRINKIRRRLVKDSNTKKAGKTGPMKTLLVRVMTPDLRERLENLRKKPENIPQPISNTSRANLNKLLTDYTEMKKAILHVYWEEFQKDPVGLMSRVAQPASKKIDQNKLKPEMDEKGNLTTAGFACSQCGQPLFVYKLEQVSEKGKAYTNYFGRCNVAEHEKLILLAQLKPEKDSDEAVTYSLGKFGQRALDFYSIHVTKESTHPVKPLAQIAGNRYASGPVGKALSDACMGTIASFLSKYQDIIIEHQKVVKGNQKRLESLRELAGKENLEYPSVTLPPQPHTKEGVDAYNEVIARVRMWVNLNLWQKLKLSRDDAKPLLRLKGFPSFPLVERQANEVDWWDMVCNVKKLINEKKEDGKVFWQNLAGYKRQEALRPYLSSEEDRKKGKKFARYQLGDLLLHLEKKHGEDWGKVYDEAWERIDKKVEGLSKHIKLEEERRSEDAQSKAALTDWLRAKASFVIEGLKEADKDEFCRCELKLQKWYGDLRGKPFAIEAENSILDISGFSKQYNCAFIWQKDGVKKLNLYLIINYFKGGKLRFKKIKPEAFEANRFYTVINKKSGEIVPMEVNFNFDDPNLIILPLAFGKRQGREFIWNDLLSLETGSLKLANGRVIEKTLYNRRTRQDEPALFVALTFERREVLDSSNIKPMNLIGVDRGENIPAVIALTDPEGCPLSRFKDILGNPTHILRIGESYKEKQRTIQAKKEVEQRRAGGYSRKYASKAKNLADDMVRNTARDLLYYAVTQDAMLIFENLSRGFGRQGKRTFMAERQYTRMEDWLTAKLAYEGLPSKTYLSKTLAQYTSKTCSNCGFTITSADYDRVLEKLKKTATGWMTTINGKELKVEGQITYYNRYKRQNVVKDLSVELDRLSEESVNNDISSWTKGRSGEALSLLKKRFSHRPVQEKFVCLNCGFETHADEQAALNIARSWLFLRSQEYKKYQTNKTTGNTDKRAFVETWQSFYRKKLKEVWKPAV

SEQ ID NO: 26824 - protein, 978 aa, synthetic construct
  REGION 1..978: note = engineered CasX variant
QEIKRINKIRRRLVKDSNTKKAGKTGPMKTLLVRVMTPDLRERLENLRKKPENIPQPISNTSRANLNKLLTDYTEMKKAILHVYWEEFQKDPVGLMSRVAQPASKKIDQNKLKPEMDEKGNLTTAGFACSQCGQPLFVYKLEQVSEKGKAYTNYFGRCNVAEHEKLILLAQLKPEKDSDEAVTYSLGKFGQRALDFYSIHVTKESTHPVKPLAQIAGNRYASGPVGKALSDACMGTIASFLSKYQDIIIEHQKVVKGNQKRLESLRELAGKENLEYPSVTLPPQPHTKEGVDAYNEVIARVRMWVNLNLWQKLKLSRDDAKPLLRLKGFPSFPLVERQANEVDWWDMVCNVKKLINEKKEDGKVFWQNLAGYKRQEALRPYLSSEEDRKKGKKFARYQLGDLLLHLEKKHGEDWGKVYDEAWERIDKKVEGLSKHIKLEEERRSEDAQSKAALTDWLRAKASFVIEGLKEADKDEFCRCELKLQKWYGDLRGKPFAIEAENSILDISGFSKQYNCAFIWQKDGVKKLNLYLIINYFKGGKLRFKKIKPEAFEANRFYTVINKKSGEIVPMEVNFNFDDPNLIILPLAFGKRQGREFIWNDLLSLETGSLKLANGRVIEKTLYNRRTRQDEPALFVALTFERREVLDSSNIKPMNLIGVDRGENIPAVIALTDPEGCPLSRFKDHQGNPTHILRIGESYKEKQRTIQAKKEVEQRRAGGYSRKYASKAKNLADDMVRNTARDLLYYAVTQDAMLIFENLSRGFGRQGKRTFMAERQYTRMEDWLTAKLAYEGLPSKTYLSKTLAQYTSKTCSNCGFTITSADYDRVLEKLKKTATGWMTTINGKELKVEGQITYYNRYKRQNVVKDLSVELDRLSEESVNNDISSWTKGRSGEALSLLKKRFSHRPVQEKFVCLNCGFETHADEQAALNIARSWLFLRSQEYKKYQTNKTTGNTDKRAFVETWQSFYRKKLKEVWKPAV

SEQ ID NO: 26825 - protein, 978 aa, synthetic construct
  REGION 1..978: note = engineered CasX variant
QEIKRINKIRRRLVKDSNTKKAGKTGPMKTLLVRVMTPDLRERLENLRKKPENIPQPISNTSRANLNKLLTDYTEMKKAILHVYWEEFQKDPVGLMSRVAQPASKKIDQNKLKPEMDEKGNLTTAGFACSQCGQPLFVYKLEQVSEKGKAYTNYFGRCNVAEHEKLILLAQLKPEKDSDEAVTYSLGKFGQRALDFYSIHVTKESTHPVKPLAQIAGNRYASGPVGKALSDACMGTIASFLSKYQDIIIEHQKVVKGNQKRLESLRELAGKENLEYPSVTLPPQPHTKEGVDAYNEVIARVRMWVNLNLWQKLKLSRDDAKPLLRLKGFPSFPLVERQANEVDWWDMVCNVKKLINEKKEDGKVFWQNLAGYKRQEALRPYLSSEEDRKKGKKFARYQLGDLLLHLEKKHGEDWGKVYDEAWERIDKKVEGLSKHIKLEEERRSEDAQSKAALTDWLRAKASFVIEGLKEADKDEFCRCELKLQKWYGDLRGKPFAIEAENSILDISGFSKQYNCAFIWQKDGVKKLNLYLIINYFKGGKLRFKKIKPEAFEANRFYTVINKKSGEIVPMEVNFNFDDPNLIILPLAFGKRQGREFIWNDLLSLETGSLKLANGRVIEKTLYNRRTRQDEPALFVALTFERREVLDSSNIKPMNLIGVDRGENIPAVIALTDPEGCPLSRFKDHLGNPTHILRIGESYKEQQRTIQAKKEVEQRRAGGYSRKYASKAKNLADDMVRNTARDLLYYAVTQDAMLIFENLSRGFGRQGKRTFMAERQYTRMEDWLTAKLAYEGLPSKTYLSKTLAQYTSKTCSNCGFTITSADYDRVLEKLKKTATGWMTTINGKELKVEGQITYYNRYKRQNVVKDLSVELDRLSEESVNNDISSWTKGRSGEALSLLKKRFSHRPVQEKFVCLNCGFETHADEQAALNIARSWLFLRSQEYKKYQTNKTTGNTDKRAFVETWQSFYRKKLKEVWKPAV

SEQ ID NO: 26826 - protein, 978 aa, synthetic construct
  REGION 1..978: note = engineered CasX variant
QEIKRINKIRRRLVKDSNTKKAGKTGPMKTLLVRVMTPDLRERLENLRKKPENIPQPISNTSRANLNKLLTDYTEMKKAILHVYWEEFQKDPVGLMSRVAQPASKKIDQNKLKPEMDEKGNLTTAGFACSQCGQPLFVYKLEQVSEKGKAYTNYFGRCNVAEHEKLILLAQLKPEKDSDEAVTYSLGKFGQRALDFYSIHVTKESTHPVKPLAQIAGNRYASGPVGKALSDACMGTIASFLSKYQDIIIEHQKVVKGNQKRLESLRELAGKENLEYPSVTLPPQPHTKEGVDAYNEVIARVRMWVNLNLWQKLKLSRDDAKPLLRLKGFPSFPLVERQANEVDWWDMVCNVKKLINEKKEDGKVFWQNLAGYKRQEALRPYLSSEEDRKKGKKFARYQLGDLLLHLEKKHGEDWGKVYDEAWERIDKKVEGLSKHIKLEEERRSEDAQSKAALTDWLRAKASFVIEGLKEADKDEFCRCELKLQKWYGDLRGKPFAIEAENSILDISGFSKQYNCAFIWQKDGVKKLNLYLIINYFKGGKLRFKKIKPEAFEANRFYTVINKKSGEIVPMEVNFNFDDPNLIILPLAFGKRQGREFIWNDLLSLETGSLKLANGRVIEKTLYNRRTRQDEPALFVALTFERREVLDSSNIKPMNLIGVDRGENIPAVIALTDPEGCPLSRFKDHLGNPTHILRIGESYKEQQRTIQAKKEREQRRAGGYSRKYASKAKNLADDMVRNTARDLLYYAVTQDAMLIFENLSRGFGRQGKRTFMAERQYTRMEDWLTAKLAYEGLPSKTYLSKTLAQYTSKTCSNCGFTITSADYDRVLEKLKKTATGWMTTINGKELKVEGQITYYNRYKRQNVVKDLSVELDRLSEESVNNDISSWTKGRSGEALSLLKKRFSHRPVQEKFVCLNCGFETHADEQAALNIARSWLFLRSQEYKKYQTNKTTGNTDKRAFVETWQSFYRKKLKEVWKPAV

SEQ ID NO: 26827 - protein, 978 aa, synthetic construct
  REGION 1..978: note = engineered CasX variant
QEIKRINKIRRRLVKDSNTKKAGKTGPMKTLLVRVMTPDLRERLENLRKKPENIPQPISNTSRANLNKLLTDYTEMKKAILHVYWEEFQKDPVGLMSRVAQPASKKIDQNKLKPEMDEKGNLTTAGFACSQCGQPLFVYKLEQVSEKGKAYTNYFGRCNVAEHEKLILLAQLKPEKDSDEAVTYSLGKFGQRALDFYSIHVTKESTHPVKPLAQIAGNRYASGPVGKALSDACMGTIASFLSKYQDIIIEHQKVVKGNQKRLESLRELAGKENLEYPSVTLPPQPHTKEGVDAYNEVIARVRMWVNLNLWQKLKLSRDDAKPLLRLKGFPSFPLVERQANEVDWWDMVCNVKKLINEKKEDGKVFWQNLAGYKRQEALRPYLSSEEDRKKGKKFARYQLGDLLLHLEKKHGEDWGKVYDEAWERIDKKVEGLSKHIKLEEERRSEDAQSKAALTDWLRAKASFVIEGLKEADKDEFCRCELKLQKWYGDLRGKPFAIEAENSILDISGFSKQYNCAFIWQKDGVKKLNLYLIINYFKGGKLRFKKIKPEAFEANRFYTVINKKSGEIVPMEVNFNFDDPNLIILPLAFGKRQGREFIWNDLLSLETGSLKLANGRVIEKTLYNRRTRQDEPALFVALTFERREVLDSSNIKPMNLIGVDRGENIPAVIALTDPEGCPLSRFKDHLGNPTHILRIGESYKEKQRTIQAKKEWEQRRAGGYSRKYASKAKNLADDMVRNTARDLLYYAVTQDAMLIFENLSRGFGRQGKRTFMAERQYTRMEDWLTAKLAYEGLPSKTYLSKTLAQYTSKTCSNCGFTITSADYDRVLEKLKKTATGWMTTINGKELKVEGQITYYNRYKRQNVVKDLSVELDRLSEESVNNDISSWTKGRSGEALSLLKKRFSHRPVQEKFVCLNCGFETHADEQAALNIARSWLFLRSQEYKKYQTNKTTGNTDKRAFVETWQSFYRKKLKEVWKPAV

SEQ ID NO: 26828 - protein, 978 aa, synthetic construct
  REGION 1..978: note = engineered CasX variant
QEIKRINKIRRRLVKDSNTKKAGKTGPMKTLLVRVMTPDLRERLENLRKKPENIPQPISNTSRANLNKLLTDYTEMKKAILHVYWEEFQKDPVGLMSRVAQPASKKIDQNKLKPEMDEKGNLTTAGFACSQCGQPLFVYKLEQVSEKGKAYTNYFGRCNVAEHEKLILLAQLKPEKDSDEAVTYSLGKFGQRALDFYSIHVTKESTHPVKPLAQIAGNRYASGPVGKALSDACMGTIASFLSKYQDIIIEHQKVVKGNQKRLESLRELAGKENLEYPSVTLPPQPHTKEGVDAYNEVIARVRMWVNLNLWQKLKLSRDDAKPLLRLKGFPSFPLVERQANEVDWWDMVCNVKKLINEKKEDGKVFWQNLAGYKRQEALRPYLSSEEDRKKGKKFARYQLGDLLLHLEKKHGEDWGKVYDEAWERIDKKVEGLSKHIKLEEERRSEDAQSKAALTDWLRAKASFVIEGLKEADKDEFCRCELKLQKWYGDLRGKPFAIEAENSILDISGFSKQYNCAFIWQKDGVKKLNLYLIINYFKGGKLRFKKIKPEAFEANRFYTVINKKSGEIVPMEVNFNFDDPNLIILPLAFGKRQGREFIWNDLLSLETGSLKLANGRVIEKTLYNRRTRQDEPALFVALTFERREVLDSSNIKPMNLIGVDRGENIPAVIALTDPEGCPLSRFKDHLGNPTHILRIGESYKEKQRTIQAKKEVEQRRRGGYSRKYASKAKNLADDMVRNTARDLLYYAVTQDAMLIFENLSRGFGRQGKRTFMAERQYTRMEDWLTAKLAYEGLPSKTYLSKTLAQYTSKTCSNCGFTITSADYDRVLEKLKKTATGWMTTINGKELKVEGQITYYNRYKRQNVVKDLSVELDRLSEESVNNDISSWTKGRSGEALSLLKKRFSHRPVQEKFVCLNCGFETHADEQAALNIARSWLFLRSQEYKKYQTNKTTGNTDKRAFVETWQSFYRKKLKEVWKPAV

SEQ ID NO: 26829 - protein, 978 aa, synthetic construct
  REGION 1..978: note = engineered CasX variant
QEIKRINKIRRRLVKDSNTKKAGKTGPMKTLLVRVMTPDLRERLENLRKKPENIPQPISNTSRANLNKLLTDYTEMKKAILHVYWEEFQKDPVGLMSRVAQPASKKIDQNKLKPEMDEKGNLTTAGFACSQCGQPLFVYKLEQVSEKGKAYTNYFGRCNVAEHEKLILLAQLKPEKDSDEAVTYSLGKFGQRALDFYSIHVTKESTHPVKPLAQIAGNRYASGPVGKALSDACMGTIASFLSKYQDIIIEHQKVVKGNQKRLESLRELAGKENLEYPSVTLPPQPHTKEGVDAYNEVIARVRMWVNLNLWQKLKLSRDDAKPLLRLKGFPSFPLVERQANEVDWWDMVCNVKKLINEKKEDGKVFWQNLAGYKRQEALRPYLSSEEDRKKGKKFARYQLGDLLLHLEKKHGEDWGKVYDEAWERIDKKVEGLSKHIKLEEERRSEDAQSKAALTDWLRAKASFVIEGLKEADKDEFCRCELKLQKWYGDLRGKPFAIEAENSILDISGFSKQYNCAFIWQKDGVKKLNLYLIINYFKGGKLRFKKIKPEAFEANRFYTVINKKSGEIVPMEVNFNFDDPNLIILPLAFGKRQGREFIWNDLLSLETGSLKLANGRVIEKTLYNRRTRQDEPALFVALTFERREVLDSSNIKPMNLIGVDRGENIPAVIALTDPEGCPLSRFKDHLGNPTHILRIGESYKEKQRTIQAKKEVEQRRLGGYSRKYASKAKNLADDMVRNTARDLLYYAVTQDAMLIFENLSRGFGRQGKRTFMAERQYTRMEDWLTAKLAYEGLPSKTYLSKTLAQYTSKTCSNCGFTITSADYDRVLEKLKKTATGWMTTINGKELKVEGQITYYNRYKRQNVVKDLSVELDRLSEESVNNDISSWTKGRSGEALSLLKKRFSHRPVQEKFVCLNCGFETHADEQAALNIARSWLFLRSQEYKKYQTNKTTGNTDKRAFVETWQSFYRKKLKEVWKPAV

SEQ ID NO: 26830 - protein, 978 aa, synthetic construct
  REGION 1..978: note = engineered CasX variant
QEIKRINKIRRRLVKDSNTKKAGKTGPMKTLLVRVMTPDLRERLENLRKKPENIPQPISNTSRANLNKLLTDYTEMKKAILHVYWEEFQKDPVGLMSRVAQPASKKIDQNKLKPEMDEKGNLTTAGFACSQCGQPLFVYKLEQVSEKGKAYTNYFGRCNVAEHEKLILLAQLKPEKDSDEAVTYSLGKFGQRALDFYSIHVTKESTHPVKPLAQIAGNRYASGPVGKALSDACMGTIASFLSKYQDIIIEHQKVVKGNQKRLESLRELAGKENLEYPSVTLPPQPHTKEGVDAYNEVIARVRMWVNLNLWQKLKLSRDDAKPLLRLKGFPSFPLVERQANEVDWWDMVCNVKKLINEKKEDGKVFWQNLAGYKRQEALRPYLSSEEDRKKGKKFARYQLGDLLLHLEKKHGEDWGKVYDEAWERIDKKVEGLSKHIKLEEERRSEDAQSKAALTDWLRAKASFVIEGLKEADKDEFCRCELKLQKWYGDLRGKPFAIEAENSILDISGFSKQYNCAFIWQKDGVKKLNLYLIINYFKGGKLRFKKIKPEAFEANRFYTVINKKSGEIVPMEVNFNFDDPNLIILPLAFGKRQGREFIWNDLLSLETGSLKLANGRVIEKTLYNRRTRQDEPALFVALTFERREVLDSSNIKPMNLIGVDRGENIPAVIALTDPEGCPLSRFKDHLGNPTHILRIGESYKEKQRTIQAKKEVEQRRAGGYSRKYASKAKNLADDMVRNTARDLLYYAVTQDAMLIFENLSRGFGRQGKRTFMAERQYTRMEDWLTAKLAYEGLPSKTYLSKTLAQYTSKTCSNCGFTITSADYDRVLEKLKKTATGWMTTINGKELKVEGQITYYNRYKRQNVVKDLSVELDRLSEESVNNDISSWTKGRSGEALSLLKKRFSHRPVQEKFVCLNCGFETHADEQAALNIARSWLFLRSQEYKKYQTNKTTGNTDKRAFVETWQSFYRKKLKEVWKPAV

SEQ ID NO: 26831 - protein, 978 aa, synthetic construct
  REGION 1..978: note = engineered CasX variant
QEIKRINKIRRRLVKDSNTKKAGKTGPMKTLLVRVMTPDLRERLENLRKKPENIPQPISNTSRANLNKLLTDYTEMKKAILHVYWEEFQKDPVGLMSRVAQPASKKIDQNKLKPEMDEKGNLTTAGFACSQCGQPLFVYKLEQVSEKGKAYTNYFGRCNVAEHEKLILLAQLKPEKDSDEAVTYSLGKFGQRALDFYSIHVTKESTHPVKPLAQIAGNRYASGPVGKALSDACMGTIASFLSKYQDIIIEHQKVVKGNQKRLESLRELAGKENLEYPSVTLPPQPHTKEGVDAYNEVIARVRMWVNLNLWQKLKLSRDDAKPLLRLKGFPSFPLVERQANEVDWWDMVCNVKKLINEKKEDGKVFWQNLAGYKRQEALRPYLSSEEDRKKGKKFARYQLGDLLLHLEKKHGEDWGKVYDEAWERIDKKVEGLSKHIKLEEERRSEDAQSKAALTDWLRAKASFVIEGLKEADKDEFCRCELKLQKWYGDLRGKPFAIEAENSILDISGFSKQYNCAFIWQKDGVKKLNLYLIINYFKGGKLRFKKIKPEAFEANRFYTVINKKSGEIVPMEVNFNFDDPNLIILPLAFGKRQGREFIWNDLLSLETGSLKLANGRVIEKTLYNRRTRQDEPALFVALTFERREVLDSSNIKPMNLIGVDRGENIPAVIALTDPEGCPLSRFKDHLGNPTHILRIGESYKEKQRTIQAKKEVEQRRAFGYSRKYASKAKNLADDMVRNTARDLLYYAVTQDAMLIFENLSRGFGRQGKRTFMAERQYTRMEDWLTAKLAYEGLPSKTYLSKTLAQYTSKTCSNCGFTITSADYDRVLEKLKKTATGWMTTINGKELKVEGQITYYNRYKRQNVVKDLSVELDRLSEESVNNDISSWTKGRSGEALSLLKKRFSHRPVQEKFVCLNCGFETHADEQAALNIARSWLFLRSQEYKKYQTNKTTGNTDKRAFVETWQSFYRKKLKEVWKPAV

SEQ ID NO: 26832 - protein, 978 aa, synthetic construct
  REGION 1..978: note = engineered CasX variant
QEIKRINKIRRRLVKDSNTKKAGKTGPMKTLLVRVMTPDLRERLENLRKKPENIPQPISNTSRANLNKLLTDYTEMKKAILHVYWEEFQKDPVGLMSRVAQPASKKIDQNKLKPEMDEKGNLTTAGFACSQCGQPLFVYKLEQVSEKGKAYTNYFGRCNVAEHEKLILLAQLKPEKDSDEAVTYSLGKFGQRALDFYSIHVTKESTHPVKPLAQIAGNRYASGPVGKALSDACMGTIASFLSKYQDIIIEHQKVVKGNQKRLESLRELAGKENLEYPSVTLPPQPHTKEGVDAYNEVIARVRMWVNLNLWQKLKLSRDDAKPLLRLKGFPSFPLVERQANEVDWWDMVCNVKKLINEKKEDGKVFWQNLAGYKRQEALRPYLSSEEDRKKGKKFARYQLGDLLLHLEKKHGEDWGKVYDEAWERIDKKVEGLSKHIKLEEERRSEDAQSKAALTDWLRAKASFVIEGLKEADKDEFCRCELKLQKWYGDLRGKPFAIEAENSILDISGFSKQYNCAFIWQKDGVKKLNLYLIINYFKGGKLRFKKIKPEAFEANRFYTVINKKSGEIVPMEVNFNFDDPNLIILPLAFGKRQGREFIWNDLLSLETGSLKLANGRVIEKTLYNRRTRQDEPALFVALTFERREVLDSSNIKPMNLIGVDRGENIPAVIALTDPEGCPLSRFKDHLGNPTHILRIGESYKEKQRTIQAKKETEQRRAGGYSRKYASKAKNLADDMVRNTARDLLYYAVTQDAMLIFENLSRGFGRQGKRTFMAERQYTRMEDWLTAKLAYEGLPSKTYLSKTLAQYTSKTCSNCGFTITSADYDRVLEKLKKTATGWMTTINGKELKVEGQITYYNRYKRQNVVKDLSVELDRLSEESVNNDISSWTKGRSGEALSLLKKRFSHRPVQEKFVCLNCGFETHADEQAALNIARSWLFLRSQEYKKYQTNKTTGNTDKRAFVETWQSFYRKKLKEVWKPAV

SEQ ID NO: 26833 - protein, 978 aa, synthetic construct
  REGION 1..978: note = engineered CasX variant
QEIKRINKIRRRLVKDSNTKKAGKTGPMKTLLVRVMTPDLRERLENLRKKPENIPQPISNTSRANLNKLLTDYTEMKKAILHVYWEEFQKDPVGLMSRVAQPASKKIDQNKLKPEMDEKGNLTTAGFACSQCGQPLFVYKLEQVSEKGKAYTNYFGRCNVAEHEKLILLAQLKPEKDSDEAVTYSLGKFGQRALDFYSIHVTKESTHPVKPLAQIAGNRYASGPVGKALSDACMGTIASFLSKYQDIIIEHQKVVKGNQKRLESLRELAGKENLEYPSVTLPPQPHTKEGVDAYNEVIARVRMWVNLNLWQKLKLSRDDAKPLLRLKGFPSFPLVERQANEVDWWDMVCNVKKLINEKKEDGKVFWQNLAGYKRQEALRPYLSSEEDRKKGKKFARYQLGDLLLHLEKKHGEDWGKVYDEAWERIDKKVEGLSKHIKLEEERRSEDAQSKAALTDWLRAKASFVIEGLKEADKDEFCRCELKLQKWYGDLRGKPFAIEAENSILDISGFSKQYNCAFIWQKDGVKKLNLYLIINYFKGGKLRFKKIKPEAFEANRFYTVINKKSGEIVPMEVNFNFDDPNLIILPLAFGKRQGREFIWNDLLSLETGSLKLANGRVIEKTLYNRRTRQDEPALFVALTFERREVLDSSNIKPMNLIGVDRGENIPAVIALTDPEGCPLSRFKDHLGNPTHILRIGESYKEKQRTIQAKKEREQRRAGGYSRKYASKAKNLADDMVRNTARDLLYYAVTQDAMLIFENLSRGFGRQGKRTFMAERQYTRMEDWLTAKLAYEGLPSKTYLSKTLAQYTSKTCSNCGFTITSADYDRVLEKLKKTATGWMTTINGKELKVEGQITYYNRYKRQNVVKDLSVELDRLSEESVNNDISSWTKGRSGEALSLLKKRFSHRPVQEKFVCLNCGFETHADEQAALNIARSWLFLRSQEYKKYQTNKTTGNTDKRAFVETWQSFYRKKLKEVWKPAV

SEQ ID NO: 26834 - protein, 978 aa, synthetic construct
  REGION 1..978: note = engineered CasX variant
QEIKRINKIRRRLVKDSNTKKAGKTGPMKTLLVRVMTPDLRERLENLRKKPENIPQPISNTSRANLNKLLTDYTEMKKAILHVYWEEFQKDPVGLMSRVAQPASKKIDQNKLKPEMDEKGNLTTAGFACSQCGQPLFVYKLEQVSEKGKAYTNYFGRCNVAEHEKLILLAQLKPEKDSDEAVTYSLGKFGQRALDFYSIHVTKESTHPVKPLAQIAGNRYASGPVGKALSDACMGTIASFLSKYQDIIIEHQKVVKGNQKRLESLRELAGKENLEYPSVTLPPQPHTKEGVDAYNEVIARVRMWVNLNLWQKLKLSRDDAKPLLRLKGFPSFPLVERQANEVDWWDMVCNVKKLINEKKEDGKVFWQNLAGYKRQEALRPYLSSEEDRKKGKKFARYQLGDLLLHLEKKHGEDWGKVYDEAWERIDKKVEGLSKHIKLEEERRSEDAQSKAALTDWLRAKASFVIEGLKEADKDEFCRCELKLQKWYGDLRGKPFAIEAENSILDISGFSKQYNCAFIWQKDGVKKLNLYLIINYFKGGKLRFKKIKPEAFEANRFYTVINKKSGEIVPMEVNFNFDDPNLIILPLAFGKRQGREFIWNDLLSLETGSLKLANGRVIEKTLYNRRTRQDEPALFVALTFERREVLDSSNIKPMNLIGVDRGENIPAVIALTDPEGCPLSRFKDHLGNPTHILRIGESYKEKQRTIQAKKEHEQRRAGGYSRKYASKAKNLADDMVRNTARDLLYYAVTQDAMLIFENLSRGFGRQGKRTFMAERQYTRMEDWLTAKLAYEGLPSKTYLSKTLAQYTSKTCSNCGFTITSADYDRVLEKLKKTATGWMTTINGKELKVEGQITYYNRYKRQNVVKDLSVELDRLSEESVNNDISSWTKGRSGEALSLLKKRFSHRPVQEKFVCLNCGFETHADEQAALNIARSWLFLRSQEYKKYQTNKTTGNTDKRAFVETWQSFYRKKLKEVWKPAV

SEQ ID NO: 26835 - protein, 978 aa, synthetic construct
  REGION 1..978: note = engineered CasX variant
QEIKRINKIRRRLVKDSNTKKAGKTGPMKTLLVRVMTPDLRERLENLRKKPENIPQPISNTSRANLNKLLTDYTEMKKAILHVYWEEFQKDPVGLMSRVAQPASKKIDQNKLKPEMDEKGNLTTAGFACSQCGQPLFVYKLEQVSEKGKAYTNYFGRCNVAEHEKLILLAQLKPEKDSDEAVTYSLGKFGQRALDFYSIHVTKESTHPVKPLAQIAGNRYASGPVGKALSDACMGTIASFLSKYQDIIIEHQKVVKGNQKRLESLRELAGKENLEYPSVTLPPQPHTKEGVDAYNEVIARVRMWVNLNLWQKLKLSRDDAKPLLRLKGFPSFPLVERQANEVDWWDMVCNVKKLINEKKEDGKVFWQNLAGYKRQEALRPYLSSEEDRKKGKKFARYQLGDLLLHLEKKHGEDWGKVYDEAWERIDKKVEGLSKHIKLEEERRSEDAQSKAALTDWLRAKASFVIEGLKEADKDEFCRCELKLQKWYGDLRGKPFAIEAENSILDISGFSKQYNCAFIWQKDGVKKLNLYLIINYFKGGKLRFKKIKPEAFEANRFYTVINKKSGEIVPMEVNFNFDDPNLIILPLAFGKRQGREFIWNDLLSLETGSLKLANGRVIEKTLYNRRTRQDEPALFVALTFERREVLDSSNIKPMNLIGVDRGENIPAVIALTDPEGCPLSRFKDHLGNPTHILRIGESYKEKQRTFQAKKEVEQRRAGGYSRKYASKAKNLADDMVRNTARDLLYYAVTQDAMLIFENLSRGFGRQGKRTFMAERQYTRMEDWLTAKLAYEGLPSKTYLSKTLAQYTSKTCSNCGFTITSADYDRVLEKLKKTATGWMTTINGKELKVEGQITYYNRYKRQNVVKDLSVELDRLSEESVNNDISSWTKGRSGEALSLLKKRFSHRPVQEKFVCLNCGFETHADEQAALNIARSWLFLRSQEYKKYQTNKTTGNTDKRAFVETWQSFYRKKLKEVWKPAV

SEQ ID NO: 26836 - protein, 978 aa, synthetic construct
  REGION 1..978: note = engineered CasX variant
QEIKRINKIRRRLVKDSNTKKAGKTGPMKTLLVRVMTPDLRERLENLRKKPENIPQPISNTSRANLNKLLTDYTEMKKAILHVYWEEFQKDPVGLMSRVAQPASKKIDQNKLKPEMDEKGNLTTAGFACSQCGQPLFVYKLEQVSEKGKAYTNYFGRCNVAEHEKLILLAQLKPEKDSDEAVTYSLGKFGQRALDFYSIHVTKESTHPVKPLAQIAGNRYASGPVGKALSDACMGTIASFLSKYQDIIIEHQKVVKGNQKRLESLRELAGKENLEYPSVTLPPQPHTKEGVDAYNEVIARVRMWVNLNLWQKLKLSRDDAKPLLRLKGFPSFPLVERQANEVDWWDMVCNVKKLINEKKEDGKVFWQNLAGYKRQEALRPYLSSEEDRKKGKKFARYQLGDLLLHLEKKHGEDWGKVYDEAWERIDKKVEGLSKHIKLEEERRSEDAQSKAALTDWLRAKASFVIEGLKEADKDEFCRCELKLQKWYGDLRGKPFAIEAENSILDISGFSKQYNCAFIWQKDGVKKLNLYLIINYFKGGKLRFKKIKPEAFEANRFYTVINKKSGEIVPMEVNFNFDDPNLIILPLAFGKRQGREFIWNDLLSLETGSLKLANGRVIEKTLYNRRTRQDEPALFVALTFERREVLDSSNIKPMNLIGVDRGENIPAVIALTDPEGCPLSRFKDHLGNPTHILRIGESYKEKQRTFQAKKETEQRRAGGYSRKYASKAKNLADDMVRNTARDLLYYAVTQDAMLIFENLSRGFGRQGKRTFMAERQYTRMEDWLTAKLAYEGLPSKTYLSKTLAQYTSKTCSNCGFTITSADYDRVLEKLKKTATGWMTTINGKELKVEGQITYYNRYKRQNVVKDLSVELDRLSEESVNNDISSWTKGRSGEALSLLKKRFSHRPVQEKFVCLNCGFETHADEQAALNIARSWLFLRSQEYKKYQTNKTTGNTDKRAFVETWQSFYRKKLKEVWKPAV

SEQ ID NO: 26837 - protein, 978 aa, synthetic construct
  REGION 1..978: note = engineered CasX variant
QEIKRINKIRRRLVKDSNTKKAGKTGPMKTLLVRVMTPDLRERLENLRKKPENIPQPISNTSRANLNKLLTDYTEMKKAILHVYWEEFQKDPVGLMSRVAQPASKKIDQNKLKPEMDEKGNLTTAGFACSQCGQPLFVYKLEQVSEKGKAYTNYFGRCNVAEHEKLILLAQLKPEKDSDEAVTYSLGKFGQRALDFYSIHVTKESTHPVKPLAQIAGNRYASGPVGKALSDACMGTIASFLSKYQDIIIEHQKVVKGNQKRLESLRELAGKENLEYPSVTLPPQPHTKEGVDAYNEVIARVRMWVNLNLWQKLKLSRDDAKPLLRLKGFPSFPLVERQANEVDWWDMVCNVKKLINEKKEDGKVFWQNLAGYKRQEALRPYLSSEEDRKKGKKFARYQLGDLLLHLEKKHGEDWGKVYDEAWERIDKKVEGLSKHIKLEEERRSEDAQSKAALTDWLRAKASFVIEGLKEADKDEFCRCELKLQKWYGDLRGKPFAIEAENSILDISGFSKQYNCAFIWQKDGVKKLNLYLIINYFKGGKLRFKKIKPEAFEANRFYTVINKKSGEIVPMEVNFNFDDPNLIILPLAFGKRQGREFIWNDLLSLETGSLKLANGRVIEKTLYNRRTRQDEPALFVALTFERREVLDSSNIKPMNLIGVDRGENIPAVIALTDPEGCPLSRFKDHLGNPTHILRIGECYKEKQRTIQAKKEVEQRRLGGYSRKYASKAKNLADDMVRNTARDLLYYAVTQDAMLIFENLSRGFGRQGKRTFMAERQYTRMEDWLTAKLAYEGLPSKTYLSKTLAQYTSKTCSNCGFTITSADYDRVLEKLKKTATGWMTTINGKELKVEGQITYYNRYKRQNVVKDLSVELDRLSEESVNNDISSWTKGRSGEALSLLKKRFSHRPVQEKFVCLNCGFETHADEQAALNIARSWLFLRSQEYKKYQTNKTTGNTDKRAFVETWQSFYRKKLKEVWKPAV

SEQ ID NO: 26838 - protein, 978 aa, synthetic construct
  REGION 1..978: note = engineered CasX variant
QEIKRINKIRRRLVKDSNTKKAGKTGPMKTLLVRVMTPDLRERLENLRKKPENIPQPISNTSRANLNKLLTDYTEMKKAILHVYWEEFQKDPVGLMSRVAQPASKKIDQNKLKPEMDEKGNLTTAGFACSQCGQPLFVYKLEQVSEKGKAYTNYFGRCNVAEHEKLILLAQLKPEKDSDEAVTYSLGKFGQRALDFYSIHVTKESTHPVKPLAQIAGNRYASGPVGKALSDACMGTIASFLSKYQDIIIEHQKVVKGNQKRLESLRELAGKENLEYPSVTLPPQPHTKEGVDAYNEVIARVRMWVNLNLWQKLKLSRDDAKPLLRLKGFPSFPLVERQANEVDWWDMVCNVKKLINEKKEDGKVFWQNLAGYKRQEALRPYLSSEEDRKKGKKFARYQLGDLLLHLEKKHGEDWGKVYDEAWERIDKKVEGLSKHIKLEEERRSEDAQSKAALTDWLRAKASFVIEGLKEADKDEFCRCELKLQKWYGDLRGKPFAIEAENSILDISGFSKQYNCAFIWQKDGVKKLNLYLIINYFKGGKLRFKKIKPEAFEANRFYTVINKKSGEIVPMEVNFNFDDPNLIILPLAFGKRQGREFIWNDLLSLETGSLKLANGRVIEKTLYNRRTRQDEPALFVALTFERREVLDSSNIKPMNLIGVDRGENIPAVIALTDPEGCPLSRFKDHLGNPTHILRIGECYKEKQRTIQAKKEVEQRRAGGYSRKYASKAKNLADDMVRNTARDLLYYAVTQDAMLIFENLSRGFGRQGKRTFMAERQYTRMEDWLTAKLAYEGLPSKTYLSKTLAQYTSKTCSNCGFTITSADYDRVLEKLKKTATGWMTTINGKELKVEGQITYYNRYKRQNVVKDLSVELDRLSEESVNNDISSWTKGRSGEALSLLKKRFSHRPVQEKFVCLNCGFETHADEQAALNIARSWLFLRSQEYKKYQTNKTTGNTDKRAFVETWQSFYRKKLKEVWKPAV

SEQ ID NO: 26839 - protein, 978 aa, synthetic construct
  REGION 1..978: note = engineered CasX variant
QEIKRINKIRRRLVKDSNTKKAGKTGPMKTLLVRVMTPDLRERLENLRKKPENIPQPISNTSRANLNKLLTDYTEMKKAILHVYWEEFQKDPVGLMSRVAQPASKKIDQNKLKPEMDEKGNLTTAGFACSQCGQPLFVYKLEQVSEKGKAYTNYFGRCNVAEHEKLILLAQLKPEKDSDEAVTYSLGKFGQRALDFYSIHVTKESTHPVKPLAQIAGNRYASGPVGKALSDACMGTIASFLSKYQDIIIEHQKVVKGNQKRLESLRELAGKENLEYPSVTLPPQPHTKEGVDAYNEVIARVRMWVNLNLWQKLKLSRDDAKPLLRLKGFPSFPLVERQANEVDWWDMVCNVKKLINEKKEDGKVFWQNLAGYKRQEALRPYLSSEEDRKKGKKFARYQLGDLLLHLEKKHGEDWGKVYDEAWERIDKKVEGLSKHIKLEEERRSEDAQSKAALTDWLRAKASFVIEGLKEADKDEFCRCELKLQKWYGDLRGKPFAIEAENSILDISGFSKQYNCAFIWQKDGVKKLNLYLIINYFKGGKLRFKKIKPEAFEANRFYTVINKKSGEIVPMEVNFNFDDPNLIILPLAFGKRQGREFIWNDLLSLETGSLKLANGRVIEKTLYNRRTRQDEPALFVALTFERREVLDSSNIKPMNLIGVDRGENIPAVIALTDPEGCPLSRFKDHLGNPTHILRFGESYKEKQRTIQAKKEVEQRRAGGYSRKYASKAKNLADDMVRNTARDLLYYAVTQDAMLIFENLSRGFGRQGKRTFMAERQYTRMEDWLTAKLAYEGLPSKTYLSKTLAQYTSKTCSNCGFTITSADYDRVLEKLKKTATGWMTTINGKELKVEGQITYYNRYKRQNVVKDLSVELDRLSEESVNNDISSWTKGRSGEALSLLKKRFSHRPVQEKFVCLNCGFETHADEQAALNIARSWLFLRSQEYKKYQTNKTTGNTDKRAFVETWQSFYRKKLKEVWKPAV

SEQ ID NO: 26840 - protein, 978 aa, synthetic construct
  REGION 1..978: note = engineered CasX variant
QEIKRINKIRRRLVKDSNTKKAGKTGPMKTLLVRVMTPDLRERLENLRKKPENIPQPISNTSRANLNKLLTDYTEMKKAILHVYWEEFQKDPVGLMSRVAQPASKKIDQNKLKPEMDEKGNLTTAGFACSQCGQPLFVYKLEQVSEKGKAYTNYFGRCNVAEHEKLILLAQLKPEKDSDEAVTYSLGKFGQRALDFYSIHVTKESTHPVKPLAQIAGNRYASGPVGKALSDACMGTIASFLSKYQDIIIEHQKVVKGNQKRLESLRELAGKENLEYPSVTLPPQPHTKEGVDAYNEVIARVRMWVNLNLWQKLKLSRDDAKPLLRLKGFPSFPLVERQANEVDWWDMVCNVKKLINEKKEDGKVFWQNLAGYKRQEALRPYLSSEEDRKKGKKFARYQLGDLLLHLEKKHGEDWGKVYDEAWERIDKKVEGLSKHIKLEEERRSEDAQSKAALTDWLRAKASFVIEGLKEADKDEFCRCELKLQKWYGDLRGKPFAIEAENSILDISGFSKQYNCAFIWQKDGVKKLNLYLIINYFKGGKLRFKKIKPEAFEANRFYTVINKKSGEIVPMEVNFNFDDPNLIILPLAFGKRQGREFIWNDLLSLETGSLKLANGRVIEKTLYNRRTRQDEPALFVALTFERREVLDSSNIKPMNLIGVDRGENIPAVIALTDPEGCPLSRFKDHLGNPTHILRFGESYKEKQRTIQAKKEVEQRRAFGYSRKYASKAKNLADDMVRNTARDLLYYAVTQDAMLIFENLSRGFGRQGKRTFMAERQYTRMEDWLTAKLAYEGLPSKTYLSKTLAQYTSKTCSNCGFTITSADYDRVLEKLKKTATGWMTTINGKELKVEGQITYYNRYKRQNVVKDLSVELDRLSEESVNNDISSWTKGRSGEALSLLKKRFSHRPVQEKFVCLNCGFETHADEQAALNIARSWLFLRSQEYKKYQTNKTTGNTDKRAFVETWQSFYRKKLKEVWKPAV

SEQ ID NO: 26841 - protein, 978 aa, synthetic construct
  REGION 1..978: note = engineered CasX variant
QEIKRINKIRRRLVKDSNTKKAGKTGPMKTLLVRVMTPDLRERLENLRKKPENIPQPISNTSRANLNKLLTDYTEMKKAILHVYWEEFQKDPVGLMSRVAQPASKKIDQNKLKPEMDEKGNLTTAGFACSQCGQPLFVYKLEQVSEKGKAYTNYFGRCNVAEHEKLILLAQLKPEKDSDEAVTYSLGKFGQRALDFYSIHVTKESTHPVKPLAQIAGNRYASGPVGKALSDACMGTIASFLSKYQDIIIEHQKVVKGNQKRLESLRELAGKENLEYPSVTLPPQPHTKEGVDAYNEVIARVRMWVNLNLWQKLKLSRDDAKPLLRLKGFPSFPLVERQANEVDWWDMVCNVKKLINEKKEDGKVFWQNLAGYKRQEALRPYLSSEEDRKKGKKFARYQLGDLLLHLEKKHGEDWGKVYDEAWERIDKKVEGLSKHIKLEEERRSEDAQSKAALTDWLRAKASFVIEGLKEADKDEFCRCELKLQKWYGDLRGKPFAIEAENSILDISGFSKQYNCAFIWQKDGVKKLNLYLIINYFKGGKLRFKKIKPEAFEANRFYTVINKKSGEIVPMEVNFNFDDPNLIILPLAFGKRQGREFIWNDLLSLETGSLKLANGRVIEKTLYNRRTRQDEPALFVALTFERREVLDSSNIKPMNLIGVDRGENIPAVIALTDPEGCPLSRFKDHAGNPTHILRIGESYKEKQRTIQAKKEVEQRRLGGYSRKYASKAKNLADDMVRNTARDLLYYAVTQDAMLIFENLSRGFGRQGKRTFMAERQYTRMEDWLTAKLAYEGLPSKTYLSKTLAQYTSKTCSNCGFTITSADYDRVLEKLKKTATGWMTTINGKELKVEGQITYYNRYKRQNVVKDLSVELDRLSEESVNNDISSWTKGRSGEALSLLKKRFSHRPVQEKFVCLNCGFETHADEQAALNIARSWLFLRSQEYKKYQTNKTTGNTDKRAFVETWQSFYRKKLKEVWKPAV

SEQ ID NO: 26842 - protein, 978 aa, synthetic construct
  REGION 1..978: note = engineered CasX variant
QEIKRINKIRRRLVKDSNTKKAGKTGPMKTLLVRVMTPDLRERLENLRKKPENIPQPISNTSRANLNKLLTDYTEMKKAILHVYWEEFQKDPVGLMSRVAQPASKKIDQNKLKPEMDEKGNLTTAGFACSQCGQPLFVYKLEQVSEKGKAYTNYFGRCNVAEHEKLILLAQLKPEKDSDEAVTYSLGKFGQRALDFYSIHVTKESTHPVKPLAQIAGNRYASGPVGKALSDACMGTIASFLSKYQDIIIEHQKVVKGNQKRLESLRELAGKENLEYPSVTLPPQPHTKEGVDAYNEVIARVRMWVNLNLWQKLKLSRDDAKPLLRLKGFPSFPLVERQANEVDWWDMVCNVKKLINEKKEDGKVFWQNLAGYKRQEALRPYLSSEEDRKKGKKFARYQLGDLLLHLEKKHGEDWGKVYDEAWERIDKKVEGLSKHIKLEEERRSEDAQSKAALTDWLRAKASFVIEGLKEADKDEFCRCELKLQKWYGDLRGKPFAIEAENSILDISGFSKQYNCAFIWQKDGVKKLNLYLIINYFKGGKLRFKKIKPEAFEANRFYTVINKKSGEIVPMEVNFNFDDPNLIILPLAFGKRQGREFIWNDLLSLETGSLKLANGRVIEKTLYNRRTRQDEPALFVALTFERREVLDSSNIKPMNLIGVDRGENIPAVIALTDPEGCPLSRFKDHAGNPTHILRIGESYKEKQRTIQAKKEVEQRRAGGYSRKYASKAKNLADDMVRNTARDLLYYAVTQDAMLIFENLSRGFGRQGKRTFMAERQYTRMEDWLTAKLAYEGLPSKTYLSKTLAQYTSKTCSNCGFTITSADYDRVLEKLKKTATGWMTTINGKELKVEGQITYYNRYKRQNVVKDLSVELDRLSEESVNNDISSWTKGRSGEALSLLKKRFSHRPVQEKFVCLNCGFETHADEQAALNIARSWLFLRSQEYKKYQTNKTTGNTDKRAFVETWQSFYRKKLKEVWKPAV

SEQ ID NO: 26843 - protein, 978 aa, synthetic construct
  REGION 1..978: note = engineered CasX variant
QEIKRINKIRRRLVKDSNTKKAGKTGPMKTLLVRVMTPDLRERLENLRKKPENIPQPISNTSRANLNKLLTDYTEMKKAILHVYWEEFQKDPVGLMSRVAQPASKKIDQNKLKPEMDEKGNLTTAGFACSQCGQPLFVYKLEQVSEKGKAYTNYFGRCNVAEHEKLILLAQLKPEKDSDEAVTYSLGKFGQRALDFYSIHVTKESTHPVKPLAQIAGNRYASGPVGKALSDACMGTIASFLSKYQDIIIEHQKVVKGNQKRLESLRELAGKENLEYPSVTLPPQPHTKEGVDAYNEVIARVRMWVNLNLWQKLKLSRDDAKPLLRLKGFPSFPLVERQANEVDWWDMVCNVKKLINEKKEDGKVFWQNLAGYKRQEALRPYLSSEEDRKKGKKFARYQLGDLLLHLEKKHGEDWGKVYDEAWERIDKKVEGLSKHIKLEEERRSEDAQSKAALTDWLRAKASFVIEGLKEADKDEFCRCELKLQKWYGDLRGKPFAIEAENSILDISGFSKQYNCAFIWQKDGVKKLNLYLIINYFKGGKLRFKKIKPEAFEANRFYTVINKKSGEIVPMEVNFNFDDPNLIILPLAFGKRQGREFIWNDLLSLETGSLKLANGRVIEKTLYNRRTRQDEPALFVALTFERREVLDSSNIKPMNLIGVDRGENIPAVIALTDPEGCPLSRFKDGLGNPTHILRIGESYKEKQRTISANKEVEQRRAGGYSRKYASKAKNLADDMVRNTARDLLYYAVTQDAMLIFENLSRGFGRQGKRTFMAERQYTRMEDWLTAKLAYEGLPSKTYLSKTLAQYTSKTCSNCGFTITSADYDRVLEKLKKTATGWMTTINGKELKVEGQITYYNRYKRQNVVKDLSVELDRLSEESVNNDISSWTKGRSGEALSLLKKRFSHRPVQEKFVCLNCGFETHADEQAALNIARSWLFLRSQEYKKYQTNKTTGNTDKRAFVETWQSFYRKKLKEVWKPAV

SEQ ID NO: 26844 - protein, 978 aa, synthetic construct
  REGION 1..978: note = engineered CasX variant
QEIKRINKIRRRLVKDSNTKKAGKTGPMKTLLVRVMTPDLRERLENLRKKPENIPQPISNTSRANLNKLLTDYTEMKKAILHVYWEEFQKDPVGLMSRVAQPASKKIDQNKLKPEMDEKGNLTTAGFACSQCGQPLFVYKLEQVSEKGKAYTNYFGRCNVAEHEKLILLAQLKPEKDSDEAVTYSLGKFGQRALDFYSIHVTKESTHPVKPLAQIAGNRYASGPVGKALSDACMGTIASFLSKYQDIIIEHQKVVKGNQKRLESLRELAGKENLEYPSVTLPPQPHTKEGVDAYNEVIARVRMWVNLNLWQKLKLSRDDAKPLLRLKGFPSFPLVERQANEVDWWDMVCNVKKLINEKKEDGKVFWQNLAGYKRQEALRPYLSSEEDRKKGKKFARYQLGDLLLHLEKKHGEDWGKVYDEAWERIDKKVEGLSKHIKLEEERRSEDAQSKAALTDWLRAKASFVIEGLKEADKDEFCRCELKLQKWYGDLRGKPFAIEAENSILDISGFSKQYNCAFIWQKDGVKKLNLYLIINYFKGGKLRFKKIKPEAFEANRFYTVINKKSGEIVPMEVNFNFDDPNLIILPLAFGKRQGREFIWNDLLSLETGSLKLANGRVIEKTLYNRRTRQDEPALFVALTFERREVLDSSNIKPMNLIGVDRGENIPAVIALTDPEGCPLSRFKDGLGNPTHILRIGESYKEKQRTISAKKEVEQRRAGGYSRKYASKAKNLADDMVRNTARDLLYYAVTQDAMLIFENLSRGFGRQGKRTFMAERQYTRMEDWLTAKLAYEGLPSKTYLSKTLAQYTSKTCSNCGFTITSADYDRVLEKLKKTATGWMTTINGKELKVEGQITYYNRYKRQNVVKDLSVELDRLSEESVNNDISSWTKGRSGEALSLLKKRFSHRPVQEKFVCLNCGFETHADEQAALNIARSWLFLRSQEYKKYQTNKTTGNTDKRAFVETWQSFYRKKLKEVWKPAV

SEQ ID NO: 26845 - protein, 978 aa, synthetic construct
  REGION 1..978: note = engineered CasX variant
QEIKRINKIRRRLVKDSNTKKAGKTGPMKTLLVRVMTPDLRERLENLRKKPENIPQPISNTSRANLNKLLTDYTEMKKAILHVYWEEFQKDPVGLMSRVAQPASKKIDQNKLKPEMDEKGNLTTAGFACSQCGQPLFVYKLEQVSEKGKAYTNYFGRCNVAEHEKLILLAQLKPEKDSDEAVTYSLGKFGQRALDFYSIHVTKESTHPVKPLAQIAGNRYASGPVGKALSDACMGTIASFLSKYQDIIIEHQKVVKGNQKRLESLRELAGKENLEYPSVTLPPQPHTKEGVDAYNEVIARVRMWVNLNLWQKLKLSRDDAKPLLRLKGFPSFPLVERQANEVDWWDMVCNVKKLINEKKEDGKVFWQNLAGYKRQEALRPYLSSEEDRKKGKKFARYQLGDLLLHLEKKHGEDWGKVYDEAWERIDKKVEGLSKHIKLEEERRSEDAQSKAALTDWLRAKASFVIEGLKEADKDEFCRCELKLQKWYGDLRGKPFAIEAENSILDISGFSKQYNCAFIWQKDGVKKLNLYLIINYFKGGKLRFKKIKPEAFEANRFYTVINKKSGEIVPMEVNFNFDDPNLIILPLAFGKRQGREFIWNDLLSLETGSLKLANGRVIEKTLYNRRTRQDEPALFVALTFERREVLDSSNIKPMNLIGVDRGENIPAVIALTDPEGCPLSRFKDGLGNPTHILRIGESYKEKQRTIQATKEVEQRRAGGYSRKYASKAKNLADDMVRNTARDLLYYAVTQDAMLIFENLSRGFGRQGKRTFMAERQYTRMEDWLTAKLAYEGLPSKTYLSKTLAQYTSKTCSNCGFTITSADYDRVLEKLKKTATGWMTTINGKELKVEGQITYYNRYKRQNVVKDLSVELDRLSEESVNNDISSWTKGRSGEALSLLKKRFSHRPVQEKFVCLNCGFETHADEQAALNIARSWLFLRSQEYKKYQTNKTTGNTDKRAFVETWQSFYRKKLKEVWKPAV

SEQ ID NO: 26846 - protein, 978 aa, synthetic construct
  REGION 1..978: note = engineered CasX variant
QEIKRINKIRRRLVKDSNTKKAGKTGPMKTLLVRVMTPDLRERLENLRKKPENIPQPISNTSRANLNKLLTDYTEMKKAILHVYWEEFQKDPVGLMSRVAQPASKKIDQNKLKPEMDEKGNLTTAGFACSQCGQPLFVYKLEQVSEKGKAYTNYFGRCNVAEHEKLILLAQLKPEKDSDEAVTYSLGKFGQRALDFYSIHVTKESTHPVKPLAQIAGNRYASGPVGKALSDACMGTIASFLSKYQDIIIEHQKVVKGNQKRLESLRELAGKENLEYPSVTLPPQPHTKEGVDAYNEVIARVRMWVNLNLWQKLKLSRDDAKPLLRLKGFPSFPLVERQANEVDWWDMVCNVKKLINEKKEDGKVFWQNLAGYKRQEALRPYLSSEEDRKKGKKFARYQLGDLLLHLEKKHGEDWGKVYDEAWERIDKKVEGLSKHIKLEEERRSEDAQSKAALTDWLRAKASFVIEGLKEADKDEFCRCELKLQKWYGDLRGKPFAIEAENSILDISGFSKQYNCAFIWQKDGVKKLNLYLIINYFKGGKLRFKKIKPEAFEANRFYTVINKKSGEIVPMEVNFNFDDPNLIILPLAFGKRQGREFIWNDLLSLETGSLKLANGRVIEKTLYNRRTRQDEPALFVALTFERREVLDSSNIKPMNLIGVDRGENIPAVIALTDPEGCPLSRFKDGLGNPTHILRIGESYKEKQRTIQANKEVEQRRAGGYSRKYASKAKNLADDMVRNTARDLLYYAVTQDAMLIFENLSRGFGRQGKRTFMAERQYTRMEDWLTAKLAYEGLPSKTYLSKTLAQYTSKTCSNCGFTITSADYDRVLEKLKKTATGWMTTINGKELKVEGQITYYNRYKRQNVVKDLSVELDRLSEESVNNDISSWTKGRSGEALSLLKKRFSHRPVQEKFVCLNCGFETHADEQAALNIARSWLFLRSQEYKKYQTNKTTGNTDKRAFVETWQSFYRKKLKEVWKPAV

SEQ ID NO: 26847 - protein, 978 aa, synthetic construct
  REGION 1..978: note = engineered CasX variant
QEIKRINKIRRRLVKDSNTKKAGKTGPMKTLLVRVMTPDLRERLENLRKKPENIPQPISNTSRANLNKLLTDYTEMKKAILHVYWEEFQKDPVGLMSRVAQPASKKIDQNKLKPEMDEKGNLTTAGFACSQCGQPLFVYKLEQVSEKGKAYTNYFGRCNVAEHEKLILLAQLKPEKDSDEAVTYSLGKFGQRALDFYSIHVTKESTHPVKPLAQIAGNRYASGPVGKALSDACMGTIASFLSKYQDIIIEHQKVVKGNQKRLESLRELAGKENLEYPSVTLPPQPHTKEGVDAYNEVIARVRMWVNLNLWQKLKLSRDDAKPLLRLKGFPSFPLVERQANEVDWWDMVCNVKKLINEKKEDGKVFWQNLAGYKRQEALRPYLSSEEDRKKGKKFARYQLGDLLLHLEKKHGEDWGKVYDEAWERIDKKVEGLSKHIKLEEERRSEDAQSKAALTDWLRAKASFVIEGLKEADKDEFCRCELKLQKWYGDLRGKPFAIEAENSILDISGFSKQYNCAFIWQKDGVKKLNLYLIINYFKGGKLRFKKIKPEAFEANRFYTVINKKSGEIVPMEVNFNFDDPNLIILPLAFGKRQGREFIWNDLLSLETGSLKLANGRVIEKTLYNRRTRQDEPALFVALTFERREVLDSSNIKPMNLIGVDRGENIPAVIALTDPEGCPLSRFKDGLGNPTHILRIGESYKEKQRTIQAKKEVQQRRAGGYSRKYASKAKNLADDMVRNTARDLLYYAVTQDAMLIFENLSRGFGRQGKRTFMAERQYTRMEDWLTAKLAYEGLPSKTYLSKTLAQYTSKTCSNCGFTITSADYDRVLEKLKKTATGWMTTINGKELKVEGQITYYNRYKRQNVVKDLSVELDRLSEESVNNDISSWTKGRSGEALSLLKKRFSHRPVQEKFVCLNCGFETHADEQAALNIARSWLFLRSQEYKKYQTNKTTGNTDKRAFVETWQSFYRKKLKEVWKPAV

SEQ ID NO: 26848 - protein, 978 aa, synthetic construct
  REGION 1..978: note = engineered CasX variant
QEIKRINKIRRRLVKDSNTKKAGKTGPMKTLLVRVMTPDLRERLENLRKKPENIPQPISNTSRANLNKLLTDYTEMKKAILHVYWEEFQKDPVGLMSRVAQPASKKIDQNKLKPEMDEKGNLTTAGFACSQCGQPLFVYKLEQVSEKGKAYTNYFGRCNVAEHEKLILLAQLKPEKDSDEAVTYSLGKFGQRALDFYSIHVTKESTHPVKPLAQIAGNRYASGPVGKALSDACMGTIASFLSKYQDIIIEHQKVVKGNQKRLESLRELAGKENLEYPSVTLPPQPHTKEGVDAYNEVIARVRMWVNLNLWQKLKLSRDDAKPLLRLKGFPSFPLVERQANEVDWWDMVCNVKKLINEKKEDGKVFWQNLAGYKRQEALRPYLSSEEDRKKGKKFARYQLGDLLLHLEKKHGEDWGKVYDEAWERIDKKVEGLSKHIKLEEERRSEDAQSKAALTDWLRAKASFVIEGLKEADKDEFCRCELKLQKWYGDLRGKPFAIEAENSILDISGFSKQYNCAFIWQKDGVKKLNLYLIINYFKGGKLRFKKIKPEAFEANRFYTVINKKSGEIVPMEVNFNFDDPNLIILPLAFGKRQGREFIWNDLLSLETGSLKLANGRVIEKTLYNRRTRQDEPALFVALTFERREVLDSSNIKPMNLIGVDRGENIPAVIALTDPEGCPLSRFKDGLGNPTHILRIGESYKEKQRTIQAKKEVEQRRAGGYSRKYASKAKNLADDMVRNTARDLLYYAVTQDAMLIFENLSRGFGRQGKRTFMAERQYTRMEDWLTAKLAYEGLPSKTYLSKTLAQYTSKTCSNCGFTITSADYDRVLEKLKKTATGWMTTINGKELKVEGQITYYNRYKRQNVVKDLSVELDRLSEESVNNDISSWTKGRSGEALSLLKKRFSHRPVQEKFVCLNCGFETHADEQAALNIARSWLFLRSQEYKKYQTNKTTGNTDKRAFVETWQSFYRKKLKEVWKPAV

SEQ ID NO: 26849 - protein, 978 aa, synthetic construct
  REGION 1..978: note = engineered CasX variant
QEIKRINKIRRRLVKDSNTKKAGKTGPMKTLLVRVMTPDLRERLENLRKKPENIPQPISNTSRANLNKLLTDYTEMKKAILHVYWEEFQKDPVGLMSRVAQPASKKIDQNKLKPEMDEKGNLTTAGFACSQCGQPLFVYKLEQVSEKGKAYTNYFGRCNVAEHEKLILLAQLKPEKDSDEAVTYSLGKFGQRALDFYSIHVTKESTHPVKPLAQIAGNRYASGPVGKALSDACMGTIASFLSKYQDIIIEHQKVVKGNQKRLESLRELAGKENLEYPSVTLPPQPHTKEGVDAYNEVIARVRMWVNLNLWQKLKLSRDDAKPLLRLKGFPSFPLVERQANEVDWWDMVCNVKKLINEKKEDGKVFWQNLAGYKRQEALRPYLSSEEDRKKGKKFARYQLGDLLLHLEKKHGEDWGKVYDEAWERIDKKVEGLSKHIKLEEERRSEDAQSKAALTDWLRAKASFVIEGLKEADKDEFCRCELKLQKWYGDLRGKPFAIEAENSILDISGFSKQYNCAFIWQKDGVKKLNLYLIINYFKGGKLRFKKIKPEAFEANRFYTVINKKSGEIVPMEVNFNFDDPNLIILPLAFGKRQGREFIWNDLLSLETGSLKLANGRVIEKTLYNRRTRQDEPALFVALTFERREVLDSSNIKPMNLIGVDRGENIPAVIALTDPEGCPLSRFKDGLGNPTHIIRIGESYKEKQRTIQAKKEVEQRRAGGYSRKYASKAKNLADDMVRNTARDLLYYAVTQDAMLIFENLSRGFGRQGKRTFMAERQYTRMEDWLTAKLAYEGLPSKTYLSKTLAQYTSKTCSNCGFTITSADYDRVLEKLKKTATGWMTTINGKELKVEGQITYYNRYKRQNVVKDLSVELDRLSEESVNNDISSWTKGRSGEALSLLKKRFSHRPVQEKFVCLNCGFETHADEQAALNIARSWLFLRSQEYKKYQTNKTTGNTDKRAFVETWQSFYRKKLKEVWKPAV

SEQ ID NO: 26850 - protein, 978 aa, synthetic construct
  REGION 1..978: note = engineered CasX variant
QEIKRINKIRRRLVKDSNTKKAGKTGPMKTLLVRVMTPDLRERLENLRKKPENIPQPISNTSRANLNKLLTDYTEMKKAILHVYWEEFQKDPVGLMSRVAQPASKKIDQNKLKPEMDEKGNLTTAGFACSQCGQPLFVYKLEQVSEKGKAYTNYFGRCNVAEHEKLILLAQLKPEKDSDEAVTYSLGKFGQRALDFYSIHVTKESTHPVKPLAQIAGNRYASGPVGKALSDACMGTIASFLSKYQDIIIEHQKVVKGNQKRLESLRELAGKENLEYPSVTLPPQPHTKEGVDAYNEVIARVRMWVNLNLWQKLKLSRDDAKPLLRLKGFPSFPLVERQANEVDWWDMVCNVKKLINEKKEDGKVFWQNLAGYKRQEALRPYLSSEEDRKKGKKFARYQLGDLLLHLEKKHGEDWGKVYDEAWERIDKKVEGLSKHIKLEEERRSEDAQSKAALTDWLRAKASFVIEGLKEADKDEFCRCELKLQKWYGDLRGKPFAIEAENSILDISGFSKQYNCAFIWQKDGVKKLNLYLIINYFKGGKLRFKKIKPEAFEANRFYTVINKKSGEIVPMEVNFNFDDPNLIILPLAFGKRQGREFIWNDLLSLETGSLKLANGRVIEKTLYNRRTRQDEPALFVALTFERREVLDSSNIKPMNLIGVDRGENIPAVIALTDPEGCPLSRFKDGGGNPTHILRIGESYKEKQRTIQATKEVEQRRAGGYSRKYASKAKNLADDMVRNTARDLLYYAVTQDAMLIFENLSRGFGRQGKRTFMAERQYTRMEDWLTAKLAYEGLPSKTYLSKTLAQYTSKTCSNCGFTITSADYDRVLEKLKKTATGWMTTINGKELKVEGQITYYNRYKRQNVVKDLSVELDRLSEESVNNDISSWTKGRSGEALSLLKKRFSHRPVQEKFVCLNCGFETHADEQAALNIARSWLFLRSQEYKKYQTNKTTGNTDKRAFVETWQSFYRKKLKEVWKPAV

SEQ ID NO: 26851 - protein, 978 aa, synthetic construct
  REGION 1..978: note = engineered CasX variant
QEIKRINKIRRRLVKDSNTKKAGKTGPMKTLLVRVMTPDLRERLENLRKKPENIPQPISNTSRANLNKLLTDYTEMKKAILHVYWEEFQKDPVGLMSRVAQPASKKIDQNKLKPEMDEKGNLTTAGFACSQCGQPLFVYKLEQVSEKGKAYTNYFGRCNVAEHEKLILLAQLKPEKDSDEAVTYSLGKFGQRALDFYSIHVTKESTHPVKPLAQIAGNRYASGPVGKALSDACMGTIASFLSKYQDIIIEHQKVVKGNQKRLESLRELAGKENLEYPSVTLPPQPHTKEGVDAYNEVIARVRMWVNLNLWQKLKLSRDDAKPLLRLKGFPSFPLVERQANEVDWWDMVCNVKKLINEKKEDGKVFWQNLAGYKRQEALRPYLSSEEDRKKGKKFARYQLGDLLLHLEKKHGEDWGKVYDEAWERIDKKVEGLSKHIKLEEERRSEDAQSKAALTDWLRAKASFVIEGLKEADKDEFCRCELKLQKWYGDLRGKPFAIEAENSILDISGFSKQYNCAFIWQKDGVKKLNLYLIINYFKGGKLRFKKIKPEAFEANRFYTVINKKSGEIVPMEVNFNFDDPNLIILPLAFGKRQGREFIWNDLLSLETGSLKLANGRVIEKTLYNRRTRQDEPALFVALTFERREVLDSSNIKPMNLIGVDRGENIPAVIALTDPEGCPLSRFKDGGGNPTHILRIGESYKEKQRTIQAKKEVEQRRAGGYSRKYASKAKNLADDMVRNTARDLLYYAVTQDAMLIFENLSRGFGRQGKRTFMAERQYTRMEDWLTAKLAYEGLPSKTYLSKTLAQYTSKTCSNCGFTITSADYDRVLEKLKKTATGWMTTINGKELKVEGQITYYNRYKRQNVVKDLSVELDRLSEESVNNDISSWTKGRSGEALSLLKKRFSHRPVQEKFVCLNCGFETHADEQAALNIARSWLFLRSQEYKKYQTNKTTGNTDKRAFVETWQSFYRKKLKEVWKPAV

SEQ ID NO: 26852 - protein, 978 aa, synthetic construct
  REGION 1..978: note = engineered CasX variant
QEIKRINKIRRRLVKDSNTKKAGKTGPMKTLLVRVMTPDLRERLENLRKKPENIPQPISNTSRANLNKLLTDYTEMKKAILHVYWEEFQKDPVGLMSRVAQPASKKIDQNKLKPEMDEKGNLTTAGFACSQCGQPLFVYKLEQVSEKGKAYTNYFGRCNVAEHEKLILLAQLKPEKDSDEAVTYSLGKFGQRALDFYSIHVTKESTHPVKPLAQIAGNRYASGPVGKALSDACMGTIASFLSKYQDIIIEHQKVVKGNQKRLESLRELAGKENLEYPSVTLPPQPHTKEGVDAYNEVIARVRMWVNLNLWQKLKLSRDDAKPLLRLKGFPSFPLVERQANEVDWWDMVCNVKKLINEKKEDGKVFWQNLAGYKRQEALRPYLSSEEDRKKGKKFARYQLGDLLLHLEKKHGEDWGKVYDEAWERIDKKVEGLSKHIKLEEERRSEDAQSKAALTDWLRAKASFVIEGLKEADKDEFCRCELKLQKWYGDLRGKPFAIEAENSILDISGFSKQYNCAFIWQKDGVKKLNLYLIINYFKGGKLRFKKIKPEAFEANRFYTVINKKSGEIVPMEVNFNFDDPNLIILPLAFGKRQGREFIWNDLLSLETGSLKLANGRVIEKTLYNRRTRQDEPALFVALTFERREVLDSSNIKPMNLIGVDRGENIPAVIALTDPEGCPLSRFKDFLGNPTHILRIGESYKSKQRTIQAKKEVEQRRAGGYSRKYASKAKNLADDMVRNTARDLLYYAVTQDAMLIFENLSRGFGRQGKRTFMAERQYTRMEDWLTAKLAYEGLPSKTYLSKTLAQYTSKTCSNCGFTITSADYDRVLEKLKKTATGWMTTINGKELKVEGQITYYNRYKRQNVVKDLSVELDRLSEESVNNDISSWTKGRSGEALSLLKKRFSHRPVQEKFVCLNCGFETHADEQAALNIARSWLFLRSQEYKKYQTNKTTGNTDKRAFVETWQSFYRKKLKEVWKPAV

SEQ ID NO: 26853 - protein, 978 aa, synthetic construct
  REGION 1..978: note = engineered CasX variant
QEIKRINKIRRRLVKDSNTKKAGKTGPMKTLLVRVMTPDLRERLENLRKKPENIPQPISNTSRANLNKLLTDYTEMKKAILHVYWEEFQKDPVGLMSRVAQPASKKIDQNKLKPEMDEKGNLTTAGFACSQCGQPLFVYKLEQVSEKGKAYTNYFGRCNVAEHEKLILLAQLKPEKDSDEAVTYSLGKFGQRALDFYSIHVTKESTHPVKPLAQIAGNRYASGPVGKALSDACMGTIASFLSKYQDIIIEHQKVVKGNQKRLESLRELAGKENLEYPSVTLPPQPHTKEGVDAYNEVIARVRMWVNLNLWQKLKLSRDDAKPLLRLKGFPSFPLVERQANEVDWWDMVCNVKKLINEKKEDGKVFWQNLAGYKRQEALRPYLSSEEDRKKGKKFARYQLGDLLLHLEKKHGEDWGKVYDEAWERIDKKVEGLSKHIKLEEERRSEDAQSKAALTDWLRAKASFVIEGLKEADKDEFCRCELKLQKWYGDLRGKPFAIEAENSILDISGFSKQYNCAFIWQKDGVKKLNLYLIINYFKGGKLRFKKIKPEAFEANRFYTVINKKSGEIVPMEVNFNFDDPNLIILPLAFGKRQGREFIWNDLLSLETGSLKLANGRVIEKTLYNRRTRQDEPALFVALTFERREVLDSSNIKPMNLIGVDRGENIPAVIALTDPEGCPLSRFKDFLGNPTHILRIGESYKEKQRTIQAKKEVEQRRAGGYSRKYASKAKNLADDMVRNTARDLLYYAVTQDAMLIFENLSRGFGRQGKRTFMAERQYTRMEDWLTAKLAYEGLPSKTYLSKTLAQYTSKTCSNCGFTITSADYDRVLEKLKKTATGWMTTINGKELKVEGQITYYNRYKRQNVVKDLSVELDRLSEESVNNDISSWTKGRSGEALSLLKKRFSHRPVQEKFVCLNCGFETHADEQAALNIARSWLFLRSQEYKKYQTNKTTGNTDKRAFVETWQSFYRKKLKEVWKPAV

SEQ ID NO: 26854 - protein, 978 aa, synthetic construct
  REGION 1..978: note = engineered CasX variant
QEIKRINKIRRRLVKDSNTKKAGKTGPMKTLLVRVMTPDLRERLENLRKKPENIPQPISNTSRANLNKLLTDYTEMKKAILHVYWEEFQKDPVGLMSRVAQPASKKIDQNKLKPEMDEKGNLTTAGFACSQCGQPLFVYKLEQVSEKGKAYTNYFGRCNVAEHEKLILLAQLKPEKDSDEAVTYSLGKFGQRALDFYSIHVTKESTHPVKPLAQIAGNRYASGPVGKALSDACMGTIASFLSKYQDIIIEHQKVVKGNQKRLESLRELAGKENLEYPSVTLPPQPHTKEGVDAYNEVIARVRMWVNLNLWQKLKLSRDDAKPLLRLKGFPSFPLVERQANEVDWWDMVCNVKKLINEKKEDGKVFWQNLAGYKRQEALRPYLSSEEDRKKGKKFARYQLGDLLLHLEKKHGEDWGKVYDEAWERIDKKVEGLSKHIKLEEERRSEDAQSKAALTDWLRAKASFVIEGLKEADKDEFCRCELKLQKWYGDLRGKPFAIEAENSILDISGFSKQYNCAFIWQKDGVKKLNLYLIINYFKGGKLRFKKIKPEAFEANRFYTVINKKSGEIVPMEVNFNFDDPNLIILPLAFGKRQGREFIWNDLLSLETGSLKLANGRVIEKTLYNRRTRQDEPALFVALTFERREVLDSSNIKPMNLIGVDRGENIPAVIALTDPEGCPLSRFKDELGVPTHILRIGESYKEKQRTIQAKKEVEQRRAGGYSRKYASKAKNLADDMVRNTARDLLYYAVTQDAMLIFENLSRGFGRQGKRTFMAERQYTRMEDWLTAKLAYEGLPSKTYLSKTLAQYTSKTCSNCGFTITSADYDRVLEKLKKTATGWMTTINGKELKVEGQITYYNRYKRQNVVKDLSVELDRLSEESVNNDISSWTKGRSGEALSLLKKRFSHRPVQEKFVCLNCGFETHADEQAALNIARSWLFLRSQEYKKYQTNKTTGNTDKRAFVETWQSFYRKKLKEVWKPAV

SEQ ID NO: 26855 - protein, 978 aa, synthetic construct
  REGION 1..978: note = engineered CasX variant
QEIKRINKIRRRLVKDSNTKKAGKTGPMKTLLVRVMTPDLRERLENLRKKPENIPQPISNTSRANLNKLLTDYTEMKKAILHVYWEEFQKDPVGLMSRVAQPASKKIDQNKLKPEMDEKGNLTTAGFACSQCGQPLFVYKLEQVSEKGKAYTNYFGRCNVAEHEKLILLAQLKPEKDSDEAVTYSLGKFGQRALDFYSIHVTKESTHPVKPLAQIAGNRYASGPVGKALSDACMGTIASFLSKYQDIIIEHQKVVKGNQKRLESLRELAGKENLEYPSVTLPPQPHTKEGVDAYNEVIARVRMWVNLNLWQKLKLSRDDAKPLLRLKGFPSFPLVERQANEVDWWDMVCNVKKLINEKKEDGKVFWQNLAGYKRQEALRPYLSSEEDRKKGKKFARYQLGDLLLHLEKKHGEDWGKVYDEAWERIDKKVEGLSKHIKLEEERRSEDAQSKAALTDWLRAKASFVIEGLKEADKDEFCRCELKLQKWYGDLRGKPFAIEAENSILDISGFSKQYNCAFIWQKDGVKKLNLYLIINYFKGGKLRFKKIKPEAFEANRFYTVINKKSGEIVPMEVNFNFDDPNLIILPLAFGKRQGREFIWNDLLSLETGSLKLANGRVIEKTLYNRRTRQDEPALFVALTFERREVLDSSNIKPMNLIGVDRGENIPAVIALTDPEGCPLSRFKDELGNPTHILRIGESYKEKQRTIQAKKFVEQRRAGGYSRKYASKAKNLADDMVRNTARDLLYYAVTQDAMLIFENLSRGFGRQGKRTFMAERQYTRMEDWLTAKLAYEGLPSKTYLSKTLAQYTSKTCSNCGFTITSADYDRVLEKLKKTATGWMTTINGKELKVEGQITYYNRYKRQNVVKDLSVELDRLSEESVNNDISSWTKGRSGEALSLLKKRFSHRPVQEKFVCLNCGFETHADEQAALNIARSWLFLRSQEYKKYQTNKTTGNTDKRAFVETWQSFYRKKLKEVWKPAV

SEQ ID NO: 26856 - protein, 978 aa, synthetic construct
  REGION 1..978: note = engineered CasX variant
QEIKRINKIRRRLVKDSNTKKAGKTGPMKTLLVRVMTPDLRERLENLRKKPENIPQPISNTSRANLNKLLTDYTEMKKAILHVYWEEFQKDPVGLMSRVAQPASKKIDQNKLKPEMDEKGNLTTAGFACSQCGQPLFVYKLEQVSEKGKAYTNYFGRCNVAEHEKLILLAQLKPEKDSDEAVTYSLGKFGQRALDFYSIHVTKESTHPVKPLAQIAGNRYASGPVGKALSDACMGTIASFLSKYQDIIIEHQKVVKGNQKRLESLRELAGKENLEYPSVTLPPQPHTKEGVDAYNEVIARVRMWVNLNLWQKLKLSRDDAKPLLRLKGFPSFPLVERQANEVDWWDMVCNVKKLINEKKEDGKVFWQNLAGYKRQEALRPYLSSEEDRKKGKKFARYQLGDLLLHLEKKHGEDWGKVYDEAWERIDKKVEGLSKHIKLEEERRSEDAQSKAALTDWLRAKASFVIEGLKEADKDEFCRCELKLQKWYGDLRGKPFAIEAENSILDISGFSKQYNCAFIWQKDGVKKLNLYLIINYFKGGKLRFKKIKPEAFEANRFYTVINKKSGEIVPMEVNFNFDDPNLIILPLAFGKRQGREFIWNDLLSLETGSLKLANGRVIEKTLYNRRTRQDEPALFVALTFERREVLDSSNIKPMNLIGVDRGENIPAVIALTDPEGCPLSRFKDELGNPTHILRIGESYKEKQRTIQAKKEVEQRRAGTYSRKYASKAKNLADDMVRNTARDLLYYAVTQDAMLIFENLSRGFGRQGKRTFMAERQYTRMEDWLTAKLAYEGLPSKTYLSKTLAQYTSKTCSNCGFTITSADYDRVLEKLKKTATGWMTTINGKELKVEGQITYYNRYKRQNVVKDLSVELDRLSEESVNNDISSWTKGRSGEALSLLKKRFSHRPVQEKFVCLNCGFETHADEQAALNIARSWLFLRSQEYKKYQTNKTTGNTDKRAFVETWQSFYRKKLKEVWKPAV

SEQ ID NO: 26857 - protein, 978 aa, synthetic construct
  REGION 1..978: note = engineered CasX variant
QEIKRINKIRRRLVKDSNTKKAGKTGPMKTLLVRVMTPDLRERLENLRKKPENIPQPISNTSRANLNKLLTDYTEMKKAILHVYWEEFQKDPVGLMSRVAQPASKKIDQNKLKPEMDEKGNLTTAGFACSQCGQPLFVYKLEQVSEKGKAYTNYFGRCNVAEHEKLILLAQLKPEKDSDEAVTYSLGKFGQRALDFYSIHVTKESTHPVKPLAQIAGNRYASGPVGKALSDACMGTIASFLSKYQDIIIEHQKVVKGNQKRLESLRELAGKENLEYPSVTLPPQPHTKEGVDAYNEVIARVRMWVNLNLWQKLKLSRDDAKPLLRLKGFPSFPLVERQANEVDWWDMVCNVKKLINEKKEDGKVFWQNLAGYKRQEALRPYLSSEEDRKKGKKFARYQLGDLLLHLEKKHGEDWGKVYDEAWERIDKKVEGLSKHIKLEEERRSEDAQSKAALTDWLRAKASFVIEGLKEADKDEFCRCELKLQKWYGDLRGKPFAIEAENSILDISGFSKQYNCAFIWQKDGVKKLNLYLIINYFKGGKLRFKKIKPEAFEANRFYTVINKKSGEIVPMEVNFNFDDPNLIILPLAFGKRQGREFIWNDLLSLETGSLKLANGRVIEKTLYNRRTRQDEPALFVALTFERREVLDSSNIKPMNLIGVDRGENIPAVIALTDPEGCPLSRFKDELGNPTHILRIGESYKEKQRTIQAKKEVEQRRAGGYSRKYASKAKNLADDMVRNTARDLLYYAVTQDAMLIFENLSRGFGRQGKRTFMAERQYTRMEDWLTAKLAYEGLPSKTYLSKTLAQYTSKTCSNCGFTITSADYDRVLEKLKKTATGWMTTINGKELKVEGQITYYNRYKRQNVVKDLSVELDRLSEESVNNDISSWTKGRSGEALSLLKKRFSHRPVQEKFVCLNCGFETHADEQAALNIARSWLFLRSQEYKKYQTNKTTGNTDKRAFVETWQSFYRKKLKEVWKPAV

SEQ ID NO: 26858 - protein, 978 aa, synthetic construct
  REGION 1..978: note = engineered CasX variant
QEIKRINKIRRRLVKDSNTKKAGKTGPMKTLLVRVMTPDLRERLENLRKKPENIPQPISNTSRANLNKLLTDYTEMKKAILHVYWEEFQKDPVGLMSRVAQPASKKIDQNKLKPEMDEKGNLTTAGFACSQCGQPLFVYKLEQVSEKGKAYTNYFGRCNVAEHEKLILLAQLKPEKDSDEAVTYSLGKFGQRALDFYSIHVTKESTHPVKPLAQIAGNRYASGPVGKALSDACMGTIASFLSKYQDIIIEHQKVVKGNQKRLESLRELAGKENLEYPSVTLPPQPHTKEGVDAYNEVIARVRMWVNLNLWQKLKLSRDDAKPLLRLKGFPSFPLVERQANEVDWWDMVCNVKKLINEKKEDGKVFWQNLAGYKRQEALRPYLSSEEDRKKGKKFARYQLGDLLLHLEKKHGEDWGKVYDEAWERIDKKVEGLSKHIKLEEERRSEDAQSKAALTDWLRAKASFVIEGLKEADKDEFCRCELKLQKWYGDLRGKPFAIEAENSILDISGFSKQYNCAFIWQKDGVKKLNLYLIINYFKGGKLRFKKIKPEAFEANRFYTVINKKSGEIVPMEVNFNFDDPNLIILPLAFGKRQGREFIWNDLLSLETGSLKLANGRVIEKTLYNRRTRQDEPALFVALTFERREVLDSSNIKPMNLIGVDRGENIPAVIALTDPEGCPLSRFKDELGNPTHILQIGESYKEKQRTIQAKKEVEQRRAGGYSRKYASKAKNLADDMVRNTARDLLYYAVTQDAMLIFENLSRGFGRQGKRTFMAERQYTRMEDWLTAKLAYEGLPSKTYLSKTLAQYTSKTCSNCGFTITSADYDRVLEKLKKTATGWMTTINGKELKVEGQITYYNRYKRQNVVKDLSVELDRLSEESVNNDISSWTKGRSGEALSLLKKRFSHRPVQEKFVCLNCGFETHADEQAALNIARSWLFLRSQEYKKYQTNKTTGNTDKRAFVETWQSFYRKKLKEVWKPAV

SEQ ID NO: 26859 - protein, 978 aa, synthetic construct
  REGION 1..978: note = engineered CasX variant
QEIKRINKIRRRLVKDSNTKKAGKTGPMKTLLVRVMTPDLRERLENLRKKPENIPQPISNTSRANLNKLLTDYTEMKKAILHVYWEEFQKDPVGLMSRVAQPASKKIDQNKLKPEMDEKGNLTTAGFACSQCGQPLFVYKLEQVSEKGKAYTNYFGRCNVAEHEKLILLAQLKPEKDSDEAVTYSLGKFGQRALDFYSIHVTKESTHPVKPLAQIAGNRYASGPVGKALSDACMGTIASFLSKYQDIIIEHQKVVKGNQKRLESLRELAGKENLEYPSVTLPPQPHTKEGVDAYNEVIARVRMWVNLNLWQKLKLSRDDAKPLLRLKGFPSFPLVERQANEVDWWDMVCNVKKLINEKKEDGKVFWQNLAGYKRQEALRPYLSSEEDRKKGKKFARYQLGDLLLHLEKKHGEDWGKVYDEAWERIDKKVEGLSKHIKLEEERRSEDAQSKAALTDWLRAKASFVIEGLKEADKDEFCRCELKLQKWYGDLRGKPFAIEAENSILDISGFSKQYNCAFIWQKDGVKKLNLYLIINYFKGGKLRFKKIKPEAFEANRFYTVINKKSGEIVPMEVNFNFDDPNLIILPLAFGKRQGREFIWNDLLSLETGSLKLANGRVIEKTLYNRRTRQDEPALFVALTFERREVLDSSNIKPMNLIGVDRGENIPAVIALTDPEGCPLSRFKDCLGNPTHILRIGESYKEKQRTIQAKKEVEQRRAGGYSRKYASKAKNLADDMVRNTARDLLYYAVTQDAMLIFENLSRGFGRQGKRTFMAERQYTRMEDWLTAKLAYEGLPSKTYLSKTLAQYTSKTCSNCGFTITSADYDRVLEKLKKTATGWMTTINGKELKVEGQITYYNRYKRQNVVKDLSVELDRLSEESVNNDISSWTKGRSGEALSLLKKRFSHRPVQEKFVCLNCGFETHADEQAALNIARSWLFLRSQEYKKYQTNKTTGNTDKRAFVETWQSFYRKKLKEVWKPAV

SEQ ID NO: 26860 - protein, 978 aa, synthetic construct
  REGION 1..978: note = engineered CasX variant
QEIKRINKIRRRLVKDSNTKKAGKTGPMKTLLVRVMTPDLRERLENLRKKPENIPQPISNTSRANLNKLLTDYTEMKKAILHVYWEEFQKDPVGLMSRVAQPASKKIDQNKLKPEMDEKGNLTTAGFACSQCGQPLFVYKLEQVSEKGKAYTNYFGRCNVAEHEKLILLAQLKPEKDSDEAVTYSLGKFGQRALDFYSIHVTKESTHPVKPLAQIAGNRYASGPVGKALSDACMGTIASFLSKYQDIIIEHQKVVKGNQKRLESLRELAGKENLEYPSVTLPPQPHTKEGVDAYNEVIARVRMWVNLNLWQKLKLSRDDAKPLLRLKGFPSFPLVERQANEVDWWDMVCNVKKLINEKKEDGKVFWQNLAGYKRQEALRPYLSSEEDRKKGKKFARYQLGDLLLHLEKKHGEDWGKVYDEAWERIDKKVEGLSKHIKLEEERRSEDAQSKAALTDWLRAKASFVIEGLKEADKDEFCRCELKLQKWYGDLRGKPFAIEAENSILDISGFSKQYNCAFIWQKDGVKKLNLYLIINYFKGGKLRFKKIKPEAFEANRFYTVINKKSGEIVPMEVNFNFDDPNLIILPLAFGKRQGREFIWNDLLSLETGSLKLANGRVIEKTLYNRRTRQDEPALFVALTFERREVLDSSNIKPMNLIGVDRGENIPAVIALTDPEGCPLSRFKDCLGNPTHILRIGESYKEKQRTIQAKKEVEQRRAGDYSRKYASKAKNLADDMVRNTARDLLYYAVTQDAMLIFENLSRGFGRQGKRTFMAERQYTRMEDWLTAKLAYEGLPSKTYLSKTLAQYTSKTCSNCGFTITSADYDRVLEKLKKTATGWMTTINGKELKVEGQITYYNRYKRQNVVKDLSVELDRLSEESVNNDISSWTKGRSGEALSLLKKRFSHRPVQEKFVCLNCGFETHADEQAALNIARSWLFLRSQEYKKYQTNKTTGNTDKRAFVETWQSFYRKKLKEVWKPAV

SEQ ID NO: 26861 - protein, 978 aa, synthetic construct
  REGION 1..978: note = engineered CasX variant
QEIKRINKIRRRLVKDSNTKKAGKTGPMKTLLVRVMTPDLRERLENLRKKPENIPQPISNTSRANLNKLLTDYTEMKKAILHVYWEEFQKDPVGLMSRVAQPASKKIDQNKLKPEMDEKGNLTTAGFACSQCGQPLFVYKLEQVSEKGKAYTNYFGRCNVAEHEKLILLAQLKPEKDSDEAVTYSLGKFGQRALDFYSIHVTKESTHPVKPLAQIAGNRYASGPVGKALSDACMGTIASFLSKYQDIIIEHQKVVKGNQKRLESLRELAGKENLEYPSVTLPPQPHTKEGVDAYNEVIARVRMWVNLNLWQKLKLSRDDAKPLLRLKGFPSFPLVERQANEVDWWDMVCNVKKLINEKKEDGKVFWQNLAGYKRQEALRPYLSSEEDRKKGKKFARYQLGDLLLHLEKKHGEDWGKVYDEAWERIDKKVEGLSKHIKLEEERRSEDAQSKAALTDWLRAKASFVIEGLKEADKDEFCRCELKLQKWYGDLRGKPFAIEAENSILDISGFSKQYNCAFIWQKDGVKKLNLYLIINYFKGGKLRFKKIKPEAFEANRFYTVINKKSGEIVPMEVNFNFDDPNLIILPLAFGKRQGREFIWNDLLSLETGSLKLANGRVIEKTLYNRRTRQDEPALFVALTFERREVLDSSNIKPMNLIGVDRGENIPAVIALTDPEGCPLSRFKDALGNPTHILRIGESYKEKQRTIQAKKEVEQRRAGGYSRKYASKAKNLADDMVRNTARDLLYYAVTQDAMLIFENLSRGFGRQGKRTFMAERQYTRMEDWLTAKLAYEGLPSKTYLSKTLAQYTSKTCSNCGFTITSADYDRVLEKLKKTATGWMTTINGKELKVEGQITYYNRYKRQNVVKDLSVELDRLSEESVNNDISSWTKGRSGEALSLLKKRFSHRPVQEKFVCLNCGFETHADEQAALNIARSWLFLRSQEYKKYQTNKTTGNTDKRAFVETWQSFYRKKLKEVWKPAV

SEQ ID NO: 26862 - protein, 978 aa, synthetic construct
  REGION 1..978: note = engineered CasX variant
QEIKRINKIRRRLVKDSNTKKAGKTGPMKTLLVRVMTPDLRERLENLRKKPENIPQPISNTSRANLNKLLTDYTEMKKAILHVYWEEFQKDPVGLMSRVAQPASKKIDQNKLKPEMDEKGNLTTAGFACSQCGQPLFVYKLEQVSEKGKAYTNYFGRCNVAEHEKLILLAQLKPEKDSDEAVTYSLGKFGQRALDFYSIHVTKESTHPVKPLAQIAGNRYASGPVGKALSDACMGTIASFLSKYQDIIIEHQKVVKGNQKRLESLRELAGKENLEYPSVTLPPQPHTKEGVDAYNEVIARVRMWVNLNLWQKLKLSRDDAKPLLRLKGFPSFPLVERQANEVDWWDMVCNVKKLINEKKEDGKVFWQNLAGYKRQEALRPYLSSEEDRKKGKKFARYQLGDLLLHLEKKHGEDWGKVYDEAWERIDKKVEGLSKHIKLEEERRSEDAQSKAALTDWLRAKASFVIEGLKEADKDEFCRCELKLQKWYGDLRGKPFAIEAENSILDISGFSKQYNCAFIWQKDGVKKLNLYLIINYFKGGKLRFKKIKPEAFEANRFYTVINKKSGEIVPMEVNFNFDDPNLIILPLAFGKRQGREFIWNDLLSLETGSLKLANGRVIEKTLYNRRTRQDEPALFVALTFERREVLDSSNIKPMNLIGVDRGENIPAVIALTDPEGCPLSRFKCSLGNPTHILRIGESYKEKQRTIQAKKEVEQRRAGGYSRKYASKAKNLADDMVRNTARDLLYYAVTQDAMLIFENLSRGFGRQGKRTFMAERQYTRMEDWLTAKLAYEGLPSKTYLSKTLAQYTSKTCSNCGFTITSADYDRVLEKLKKTATGWMTTINGKELKVEGQITYYNRYKRQNVVKDLSVELDRLSEESVNNDISSWTKGRSGEALSLLKKRFSHRPVQEKFVCLNCGFETHADEQAALNIARSWLFLRSQEYKKYQTNKTTGNTDKRAFVETWQSFYRKKLKEVWKPAV

SEQ ID NO: 26863 - protein, 978 aa, synthetic construct
  REGION 1..978: note = engineered CasX variant
QEIKRINKIRRRLVKDSNTKKAGKTGPMKTLLVRVMTPDLRERLENLRKKPENIPQPISNTSRANLNKLLTDYTEMKKAILHVYWEEFQKDPVGLMSRVAQPASKKIDQNKLKPEMDEKGNLTTAGFACSQCGQPLFVYKLEQVSEKGKAYTNYFGRCNVAEHEKLILLAQLKPEKDSDEAVTYSLGKFGQRALDFYSIHVTKESTHPVKPLAQIAGNRYASGPVGKALSDACMGTIASFLSKYQDIIIEHQKVVKGNQKRLESLRELAGKENLEYPSVTLPPQPHTKEGVDAYNEVIARVRMWVNLNLWQKLKLSRDDAKPLLRLKGFPSFPLVERQANEVDWWDMVCNVKKLINEKKEDGKVFWQNLAGYKRQEALRPYLSSEEDRKKGKKFARYQLGDLLLHLEKKHGEDWGKVYDEAWERIDKKVEGLSKHIKLEEERRSEDAQSKAALTDWLRAKASFVIEGLKEADKDEFCRCELKLQKWYGDLRGKPFAIEAENSILDISGFSKQYNCAFIWQKDGVKKLNLYLIINYFKGGKLRFKKIKPEAFEANRFYTVINKKSGEIVPMEVNFNFDDPNLIILPLAFGKRQGREFIWNDLLSLETGSLKLANGRVIEKTLYNRRTRQDEPALFVALTFERREVLDSSNIKPMNLIGVDRGENIPAVIALTDPEGCPLSRFHDSNGNPTHILRIGESYKVKQRTIQAKKEVEQRRAGGYSRKYASKAKNLADDMVRNTARDLLYYAVTQDAMLIFENLSRGFGRQGKRTFMAERQYTRMEDWLTAKLAYEGLPSKTYLSKTLAQYTSKTCSNCGFTITSADYDRVLEKLKKTATGWMTTINGKELKVEGQITYYNRYKRQNVVKDLSVELDRLSEESVNNDISSWTKGRSGEALSLLKKRFSHRPVQEKFVCLNCGFETHADEQAALNIARSWLFLRSQEYKKYQTNKTTGNTDKRAFVETWQSFYRKKLKEVWKPAV

SEQ ID NO: 26864 - protein, 978 aa, synthetic construct
  REGION 1..978: note = engineered CasX variant
QEIKRINKIRRRLVKDSNTKKAGKTGPMKTLLVRVMTPDLRERLENLRKKPENIPQPISNTSRANLNKLLTDYTEMKKAILHVYWEEFQKDPVGLMSRVAQPASKKIDQNKLKPEMDEKGNLTTAGFACSQCGQPLFVYKLEQVSEKGKAYTNYFGRCNVAEHEKLILLAQLKPEKDSDEAVTYSLGKFGQRALDFYSIHVTKESTHPVKPLAQIAGNRYASGPVGKALSDACMGTIASFLSKYQDIIIEHQKVVKGNQKRLESLRELAGKENLEYPSVTLPPQPHTKEGVDAYNEVIARVRMWVNLNLWQKLKLSRDDAKPLLRLKGFPSFPLVERQANEVDWWDMVCNVKKLINEKKEDGKVFWQNLAGYKRQEALRPYLSSEEDRKKGKKFARYQLGDLLLHLEKKHGEDWGKVYDEAWERIDKKVEGLSKHIKLEEERRSEDAQSKAALTDWLRAKASFVIEGLKEADKDEFCRCELKLQKWYGDLRGKPFAIEAENSILDISGFSKQYNCAFIWQKDGVKKLNLYLIINYFKGGKLRFKKIKPEAFEANRFYTVINKKSGEIVPMEVNFNFDDPNLIILPLAFGKRQGREFIWNDLLSLETGSLKLANGRVIEKTLYNRRTRQDEPALFVALTFERREVLDSSNIKPMNLIGVDRGENIPAVIALTDPEGCPLSRFHDSNGNPTHILRIGESYKEKQRTIQAKKEVEQRRAGGYSRKYASKAKNLADDMVRNTARDLLYYAVTQDAMLIFENLSRGFGRQGKRTFMAERQYTRMEDWLTAKLAYEGLPSKTYLSKTLAQYTSKTCSNCGFTITSADYDRVLEKLKKTATGWMTTINGKELKVEGQITYYNRYKRQNVVKDLSVELDRLSEESVNNDISSWTKGRSGEALSLLKKRFSHRPVQEKFVCLNCGFETHADEQAALNIARSWLFLRSQEYKKYQTNKTTGNTDKRAFVETWQSFYRKKLKEVWKPAV

SEQ ID NO: 26865 - protein, 978 aa, synthetic construct
  REGION 1..978: note = engineered CasX variant
QEIKRINKIRRRLVKDSNTKKAGKTGPMKTLLVRVMTPDLRERLENLRKKPENIPQPISNTSRANLNKLLTDYTEMKKAILHVYWEEFQKDPVGLMSRVAQPASKKIDQNKLKPEMDEKGNLTTAGFACSQCGQPLFVYKLEQVSEKGKAYTNYFGRCNVAEHEKLILLAQLKPEKDSDEAVTYSLGKFGQRALDFYSIHVTKESTHPVKPLAQIAGNRYASGPVGKALSDACMGTIASFLSKYQDIIIEHQKVVKGNQKRLESLRELAGKENLEYPSVTLPPQPHTKEGVDAYNEVIARVRMWVNLNLWQKLKLSRDDAKPLLRLKGFPSFPLVERQANEVDWWDMVCNVKKLINEKKEDGKVFWQNLAGYKRQEALRPYLSSEEDRKKGKKFARYQLGDLLLHLEKKHGEDWGKVYDEAWERIDKKVEGLSKHIKLEEERRSEDAQSKAALTDWLRAKASFVIEGLKEADKDEFCRCELKLQKWYGDLRGKPFAIEAENSILDISGFSKQYNCAFIWQKDGVKKLNLYLIINYFKGGKLRFKKIKPEAFEANRFYTVINKKSGEIVPMEVNFNFDDPNLIILPLAFGKRQGREFIWNDLLSLETGSLKLANGRVIEKTLYNRRTRQDEPALFVALTFERREVLDSSNIKPMNLIGVDRGENIPAVIALTDPEGCPLSRFHDSLGNPTHILRIGESYKVKQRTIQAKKEVEQRRAGGYSRKYASKAKNLADDMVRNTARDLLYYAVTQDAMLIFENLSRGFGRQGKRTFMAERQYTRMEDWLTAKLAYEGLPSKTYLSKTLAQYTSKTCSNCGFTITSADYDRVLEKLKKTATGWMTTINGKELKVEGQITYYNRYKRQNVVKDLSVELDRLSEESVNNDISSWTKGRSGEALSLLKKRFSHRPVQEKFVCLNCGFETHADEQAALNIARSWLFLRSQEYKKYQTNKTTGNTDKRAFVETWQSFYRKKLKEVWKPAV

SEQ ID NO: 26866 - protein, 978 aa, synthetic construct
  REGION 1..978: note = engineered CasX variant
QEIKRINKIRRRLVKDSNTKKAGKTGPMKTLLVRVMTPDLRERLENLRKKPENIPQPISNTSRANLNKLLTDYTEMKKAILHVYWEEFQKDPVGLMSRVAQPASKKIDQNKLKPEMDEKGNLTTAGFACSQCGQPLFVYKLEQVSEKGKAYTNYFGRCNVAEHEKLILLAQLKPEKDSDEAVTYSLGKFGQRALDFYSIHVTKESTHPVKPLAQIAGNRYASGPVGKALSDACMGTIASFLSKYQDIIIEHQKVVKGNQKRLESLRELAGKENLEYPSVTLPPQPHTKEGVDAYNEVIARVRMWVNLNLWQKLKLSRDDAKPLLRLKGFPSFPLVERQANEVDWWDMVCNVKKLINEKKEDGKVFWQNLAGYKRQEALRPYLSSEEDRKKGKKFARYQLGDLLLHLEKKHGEDWGKVYDEAWERIDKKVEGLSKHIKLEEERRSEDAQSKAALTDWLRAKASFVIEGLKEADKDEFCRCELKLQKWYGDLRGKPFAIEAENSILDISGFSKQYNCAFIWQKDGVKKLNLYLIINYFKGGKLRFKKIKPEAFEANRFYTVINKKSGEIVPMEVNFNFDDPNLIILPLAFGKRQGREFIWNDLLSLETGSLKLANGRVIEKTLYNRRTRQDEPALFVALTFERREVLDSSNIKPMNLIGVDRGENIPAVIALTDPEGCPLSRFHDSLGNPTHILRIGESYKEKQRTIQCKKEVEQRRAGGYSRKYASKAKNLADDMVRNTARDLLYYAVTQDAMLIFENLSRGFGRQGKRTFMAERQYTRMEDWLTAKLAYEGLPSKTYLSKTLAQYTSKTCSNCGFTITSADYDRVLEKLKKTATGWMTTINGKELKVEGQITYYNRYKRQNVVKDLSVELDRLSEESVNNDISSWTKGRSGEALSLLKKRFSHRPVQEKFVCLNCGFETHADEQAALNIARSWLFLRSQEYKKYQTNKTTGNTDKRAFVETWQSFYRKKLKEVWKPAV

SEQ ID NO: 26867 - protein, 978 aa, synthetic construct
  REGION 1..978: note = engineered CasX variant
QEIKRINKIRRRLVKDSNTKKAGKTGPMKTLLVRVMTPDLRERLENLRKKPENIPQPISNTSRANLNKLLTDYTEMKKAILHVYWEEFQKDPVGLMSRVAQPASKKIDQNKLKPEMDEKGNLTTAGFACSQCGQPLFVYKLEQVSEKGKAYTNYFGRCNVAEHEKLILLAQLKPEKDSDEAVTYSLGKFGQRALDFYSIHVTKESTHPVKPLAQIAGNRYASGPVGKALSDACMGTIASFLSKYQDIIIEHQKVVKGNQKRLESLRELAGKENLEYPSVTLPPQPHTKEGVDAYNEVIARVRMWVNLNLWQKLKLSRDDAKPLLRLKGFPSFPLVERQANEVDWWDMVCNVKKLINEKKEDGKVFWQNLAGYKRQEALRPYLSSEEDRKKGKKFARYQLGDLLLHLEKKHGEDWGKVYDEAWERIDKKVEGLSKHIKLEEERRSEDAQSKAALTDWLRAKASFVIEGLKEADKDEFCRCELKLQKWYGDLRGKPFAIEAENSILDISGFSKQYNCAFIWQKDGVKKLNLYLIINYFKGGKLRFKKIKPEAFEANRFYTVINKKSGEIVPMEVNFNFDDPNLIILPLAFGKRQGREFIWNDLLSLETGSLKLANGRVIEKTLYNRRTRQDEPALFVALTFERREVLDSSNIKPMNLIGVDRGENIPAVIALTDPEGCPLSRFHDSLGNPTHILRIGESYKEKQRTIQAKKEVEQRRAGGYSRKYASKAKNLADDMVRNTARDLLYYAVTQDAMLIFENLSRGFGRQGKRTFMAERQYTRMEDWLTAKLAYEGLPSKTYLSKTLAQYTSKTCSNCGFTITSADYDRVLEKLKKTATGWMTTINGKELKVEGQITYYNRYKRQNVVKDLSVELDRLSEESVNNDISSWTKGRSGEALSLLKKRFSHRPVQEKFVCLNCGFETHADEQAALNIARSWLFLRSQEYKKYQTNKTTGNTDKRAFVETWQSFYRKKLKEVWKPAV

SEQ ID NO: 26868 - protein, 978 aa, synthetic construct
  REGION 1..978: note = engineered CasX variant
QEIKRINKIRRRLVKDSNTKKAGKTGPMKTLLVRVMTPDLRERLENLRKKPENIPQPISNTSRANLNKLLTDYTEMKKAILHVYWEEFQKDPVGLMSRVAQPASKKIDQNKLKPEMDEKGNLTTAGFACSQCGQPLFVYKLEQVSEKGKAYTNYFGRCNVAEHEKLILLAQLKPEKDSDEAVTYSLGKFGQRALDFYSIHVTKESTHPVKPLAQIAGNRYASGPVGKALSDACMGTIASFLSKYQDIIIEHQKVVKGNQKRLESLRELAGKENLEYPSVTLPPQPHTKEGVDAYNEVIARVRMWVNLNLWQKLKLSRDDAKPLLRLKGFPSFPLVERQANEVDWWDMVCNVKKLINEKKEDGKVFWQNLAGYKRQEALRPYLSSEEDRKKGKKFARYQLGDLLLHLEKKHGEDWGKVYDEAWERIDKKVEGLSKHIKLEEERRSEDAQSKAALTDWLRAKASFVIEGLKEADKDEFCRCELKLQKWYGDLRGKPFAIEAENSILDISGFSKQYNCAFIWQKDGVKKLNLYLIINYFKGGKLRFKKIKPEAFEANRFYTVINKKSGEIVPMEVNFNFDDPNLIILPLAFGKRQGREFIWNDLLSLETGSLKLANGRVIEKTLYNRRTRQDEPALFVALTFERREVLDSSNIKPMNLIGVDRGENIPAVIALTDPEGCPLSRFHDSLGNKTHILRIGESYKEKQRTIQAKKEVEQRRAGGYSRKYASKAKNLADDMVRNTARDLLYYAVTQDAMLIFENLSRGFGRQGKRTFMAERQYTRMEDWLTAKLAYEGLPSKTYLSKTLAQYTSKTCSNCGFTITSADYDRVLEKLKKTATGWMTTINGKELKVEGQITYYNRYKRQNVVKDLSVELDRLSEESVNNDISSWTKGRSGEALSLLKKRFSHRPVQEKFVCLNCGFETHADEQAALNIARSWLFLRSQEYKKYQTNKTTGNTDKRAFVETWQSFYRKKLKEVWKPAV

SEQ ID NO: 26869 - protein, 978 aa, synthetic construct
  REGION 1..978: note = engineered CasX variant
QEIKRINKIRRRLVKDSNTKKAGKTGPMKTLLVRVMTPDLRERLENLRKKPENIPQPISNTSRANLNKLLTDYTEMKKAILHVYWEEFQKDPVGLMSRVAQPASKKIDQNKLKPEMDEKGNLTTAGFACSQCGQPLFVYKLEQVSEKGKAYTNYFGRCNVAEHEKLILLAQLKPEKDSDEAVTYSLGKFGQRALDFYSIHVTKESTHPVKPLAQIAGNRYASGPVGKALSDACMGTIASFLSKYQDIIIEHQKVVKGNQKRLESLRELAGKENLEYPSVTLPPQPHTKEGVDAYNEVIARVRMWVNLNLWQKLKLSRDDAKPLLRLKGFPSFPLVERQANEVDWWDMVCNVKKLINEKKEDGKVFWQNLAGYKRQEALRPYLSSEEDRKKGKKFARYQLGDLLLHLEKKHGEDWGKVYDEAWERIDKKVEGLSKHIKLEEERRSEDAQSKAALTDWLRAKASFVIEGLKEADKDEFCRCELKLQKWYGDLRGKPFAIEAENSILDISGFSKQYNCAFIWQKDGVKKLNLYLIINYFKGGKLRFKKIKPEAFEANRFYTVINKKSGEIVPMEVNFNFDDPNLIILPLAFGKRQGREFIWNDLLSLETGSLKLANGRVIEKTLYNRRTRQDEPALFVALTFERREVLDSSNIKPMNLIGVDRGENIPAVIALTDPEGCPLSRFHDSCGNPTHILRIGESYKEKQRTIQAKKEVEQRRAGGYSRKYASKAKNLADDMVRNTARDLLYYAVTQDAMLIFENLSRGFGRQGKRTFMAERQYTRMEDWLTAKLAYEGLPSKTYLSKTLAQYTSKTCSNCGFTITSADYDRVLEKLKKTATGWMTTINGKELKVEGQITYYNRYKRQNVVKDLSVELDRLSEESVNNDISSWTKGRSGEALSLLKKRFSHRPVQEKFVCLNCGFETHADEQAALNIARSWLFLRSQEYKKYQTNKTTGNTDKRAFVETWQSFYRKKLKEVWKPAV

SEQ ID NO: 26870 - protein, 978 aa, synthetic construct
  REGION 1..978: note = engineered CasX variant
QEIKRINKIRRRLVKDSNTKKAGKTGPMKTLLVRVMTPDLRERLENLRKKPENIPQPISNTSRANLNKLLTDYTEMKKAILHVYWEEFQKDPVGLMSRVAQPASKKIDQNKLKPEMDEKGNLTTAGFACSQCGQPLFVYKLEQVSEKGKAYTNYFGRCNVAEHEKLILLAQLKPEKDSDEAVTYSLGKFGQRALDFYSIHVTKESTHPVKPLAQIAGNRYASGPVGKALSDACMGTIASFLSKYQDIIIEHQKVVKGNQKRLESLRELAGKENLEYPSVTLPPQPHTKEGVDAYNEVIARVRMWVNLNLWQKLKLSRDDAKPLLRLKGFPSFPLVERQANEVDWWDMVCNVKKLINEKKEDGKVFWQNLAGYKRQEALRPYLSSEEDRKKGKKFARYQLGDLLLHLEKKHGEDWGKVYDEAWERIDKKVEGLSKHIKLEEERRSEDAQSKAALTDWLRAKASFVIEGLKEADKDEFCRCELKLQKWYGDLRGKPFAIEAENSILDISGFSKQYNCAFIWQKDGVKKLNLYLIINYFKGGKLRFKKIKPEAFEANRFYTVINKKSGEIVPMEVNFNFDDPNLIILPLAFGKRQGREFIWNDLLSLETGSLKLANGRVIEKTLYNRRTRQDEPALFVALTFERREVLDSSNIKPMNLIGVDRGENIPAVIALTDPEGCPLSRFFDSLGNPTHILRIGEVYKEKQRTIQAYKEVEQRRAGGYSRKYASKAKNLADDMVRNTARDLLYYAVTQDAMLIFENLSRGFGRQGKRTFMAERQYTRMEDWLTAKLAYEGLPSKTYLSKTLAQYTSKTCSNCGFTITSADYDRVLEKLKKTATGWMTTINGKELKVEGQITYYNRYKRQNVVKDLSVELDRLSEESVNNDISSWTKGRSGEALSLLKKRFSHRPVQEKFVCLNCGFETHADEQAALNIARSWLFLRSQEYKKYQTNKTTGNTDKRAFVETWQSFYRKKLKEVWKPAV

SEQ ID NO: 26871 - protein, 978 aa, synthetic construct
  REGION 1..978: note = engineered CasX variant
QEIKRINKIRRRLVKDSNTKKAGKTGPMKTLLVRVMTPDLRERLENLRKKPENIPQPISNTSRANLNKLLTDYTEMKKAILHVYWEEFQKDPVGLMSRVAQPASKKIDQNKLKPEMDEKGNLTTAGFACSQCGQPLFVYKLEQVSEKGKAYTNYFGRCNVAEHEKLILLAQLKPEKDSDEAVTYSLGKFGQRALDFYSIHVTKESTHPVKPLAQIAGNRYASGPVGKALSDACMGTIASFLSKYQDIIIEHQKVVKGNQKRLESLRELAGKENLEYPSVTLPPQPHTKEGVDAYNEVIARVRMWVNLNLWQKLKLSRDDAKPLLRLKGFPSFPLVERQANEVDWWDMVCNVKKLINEKKEDGKVFWQNLAGYKRQEALRPYLSSEEDRKKGKKFARYQLGDLLLHLEKKHGEDWGKVYDEAWERIDKKVEGLSKHIKLEEERRSEDAQSKAALTDWLRAKASFVIEGLKEADKDEFCRCELKLQKWYGDLRGKPFAIEAENSILDISGFSKQYNCAFIWQKDGVKKLNLYLIINYFKGGKLRFKKIKPEAFEANRFYTVINKKSGEIVPMEVNFNFDDPNLIILPLAFGKRQGREFIWNDLLSLETGSLKLANGRVIEKTLYNRRTRQDEPALFVALTFERREVLDSSNIKPMNLIGVDRGENIPAVIALTDPEGCPLSRFFDSLGNPTHILRIGEVYKEKQRTIQAKKEVEQRRAGGYSRKYASKAKNLADDMVRNTARDLLYYAVTQDAMLIFENLSRGFGRQGKRTFMAERQYTRMEDWLTAKLAYEGLPSKTYLSKTLAQYTSKTCSNCGFTITSADYDRVLEKLKKTATGWMTTINGKELKVEGQITYYNRYKRQNVVKDLSVELDRLSEESVNNDISSWTKGRSGEALSLLKKRFSHRPVQEKFVCLNCGFETHADEQAALNIARSWLFLRSQEYKKYQTNKTTGNTDKRAFVETWQSFYRKKLKEVWKPAV

SEQ ID NO: 26872 - protein, 978 aa, synthetic construct
  REGION 1..978: note = engineered CasX variant
QEIKRINKIRRRLVKDSNTKKAGKTGPMKTLLVRVMTPDLRERLENLRKKPENIPQPISNTSRANLNKLLTDYTEMKKAILHVYWEEFQKDPVGLMSRVAQPASKKIDQNKLKPEMDEKGNLTTAGFACSQCGQPLFVYKLEQVSEKGKAYTNYFGRCNVAEHEKLILLAQLKPEKDSDEAVTYSLGKFGQRALDFYSIHVTKESTHPVKPLAQIAGNRYASGPVGKALSDACMGTIASFLSKYQDIIIEHQKVVKGNQKRLESLRELAGKENLEYPSVTLPPQPHTKEGVDAYNEVIARVRMWVNLNLWQKLKLSRDDAKPLLRLKGFPSFPLVERQANEVDWWDMVCNVKKLINEKKEDGKVFWQNLAGYKRQEALRPYLSSEEDRKKGKKFARYQLGDLLLHLEKKHGEDWGKVYDEAWERIDKKVEGLSKHIKLEEERRSEDAQSKAALTDWLRAKASFVIEGLKEADKDEFCRCELKLQKWYGDLRGKPFAIEAENSILDISGFSKQYNCAFIWQKDGVKKLNLYLIINYFKGGKLRFKKIKPEAFEANRFYTVINKKSGEIVPMEVNFNFDDPNLIILPLAFGKRQGREFIWNDLLSLETGSLKLANGRVIEKTLYNRRTRQDEPALFVALTFERREVLDSSNIKPMNLIGVDRGENIPAVIALTDPEGCPLSRFFDSLGNPTHILRIGESYKEKQRTIQAYKEVEQRRAGGYSRKYASKAKNLADDMVRNTARDLLYYAVTQDAMLIFENLSRGFGRQGKRTFMAERQYTRMEDWLTAKLAYEGLPSKTYLSKTLAQYTSKTCSNCGFTITSADYDRVLEKLKKTATGWMTTINGKELKVEGQITYYNRYKRQNVVKDLSVELDRLSEESVNNDISSWTKGRSGEALSLLKKRFSHRPVQEKFVCLNCGFETHADEQAALNIARSWLFLRSQEYKKYQTNKTTGNTDKRAFVETWQSFYRKKLKEVWKPAV

SEQ ID NO: 26873 - protein, 978 aa, synthetic construct
  REGION 1..978: note = engineered CasX variant
QEIKRINKIRRRLVKDSNTKKAGKTGPMKTLLVRVMTPDLRERLENLRKKPENIPQPISNTSRANLNKLLTDYTEMKKAILHVYWEEFQKDPVGLMSRVAQPASKKIDQNKLKPEMDEKGNLTTAGFACSQCGQPLFVYKLEQVSEKGKAYTNYFGRCNVAEHEKLILLAQLKPEKDSDEAVTYSLGKFGQRALDFYSIHVTKESTHPVKPLAQIAGNRYASGPVGKALSDACMGTIASFLSKYQDIIIEHQKVVKGNQKRLESLRELAGKENLEYPSVTLPPQPHTKEGVDAYNEVIARVRMWVNLNLWQKLKLSRDDAKPLLRLKGFPSFPLVERQANEVDWWDMVCNVKKLINEKKEDGKVFWQNLAGYKRQEALRPYLSSEEDRKKGKKFARYQLGDLLLHLEKKHGEDWGKVYDEAWERIDKKVEGLSKHIKLEEERRSEDAQSKAALTDWLRAKASFVIEGLKEADKDEFCRCELKLQKWYGDLRGKPFAIEAENSILDISGFSKQYNCAFIWQKDGVKKLNLYLIINYFKGGKLRFKKIKPEAFEANRFYTVINKKSGEIVPMEVNFNFDDPNLIILPLAFGKRQGREFIWNDLLSLETGSLKLANGRVIEKTLYNRRTRQDEPALFVALTFERREVLDSSNIKPMNLIGVDRGENIPAVIALTDPEGCPLSRFFDSLGNPTHILRIGESYKEKQRTIQAKKEVEQRRAGGYSRKYASKAKNLADDMVRNTARDLLYYAVTQDAMLIFENLSRGFGRQGKRTFMAERQYTRMEDWLTAKLAYEGLPSKTYLSKTLAQYTSKTCSNCGFTITSADYDRVLEKLKKTATGWMTTINGKELKVEGQITYYNRYKRQNVVKDLSVELDRLSEESVNNDISSWTKGRSGEALSLLKKRFSHRPVQEKFVCLNCGFETHADEQAALNIARSWLFLRSQEYKKYQTNKTTGNTDKRAFVETWQSFYRKKLKEVWKPAV

SEQ ID NO: 26874 - protein, 978 aa, synthetic construct
  REGION 1..978: note = engineered CasX variant
QEIKRINKIRRRLVKDSNTKKAGKTGPMKTLLVRVMTPDLRERLENLRKKPENIPQPISNTSRANLNKLLTDYTEMKKAILHVYWEEFQKDPVGLMSRVAQPASKKIDQNKLKPEMDEKGNLTTAGFACSQCGQPLFVYKLEQVSEKGKAYTNYFGRCNVAEHEKLILLAQLKPEKDSDEAVTYSLGKFGQRALDFYSIHVTKESTHPVKPLAQIAGNRYASGPVGKALSDACMGTIASFLSKYQDIIIEHQKVVKGNQKRLESLRELAGKENLEYPSVTLPPQPHTKEGVDAYNEVIARVRMWVNLNLWQKLKLSRDDAKPLLRLKGFPSFPLVERQANEVDWWDMVCNVKKLINEKKEDGKVFWQNLAGYKRQEALRPYLSSEEDRKKGKKFARYQLGDLLLHLEKKHGEDWGKVYDEAWERIDKKVEGLSKHIKLEEERRSEDAQSKAALTDWLRAKASFVIEGLKEADKDEFCRCELKLQKWYGDLRGKPFAIEAENSILDISGFSKQYNCAFIWQKDGVKKLNLYLIINYFKGGKLRFKKIKPEAFEANRFYTVINKKSGEIVPMEVNFNFDDPNLIILPLAFGKRQGREFIWNDLLSLETGSLKLANGRVIEKTLYNRRTRQDEPALFVALTFERREVLDSSNIKPMNLIGVDRGENIPAVIALTDPEGCPLSRFFDSLGNPTHILRIGESYKEKQRTEQAKKEVEQRRAGGYSRKYASKAKNLADDMVRNTARDLLYYAVTQDAMLIFENLSRGFGRQGKRTFMAERQYTRMEDWLTAKLAYEGLPSKTYLSKTLAQYTSKTCSNCGFTITSADYDRVLEKLKKTATGWMTTINGKELKVEGQITYYNRYKRQNVVKDLSVELDRLSEESVNNDISSWTKGRSGEALSLLKKRFSHRPVQEKFVCLNCGFETHADEQAALNIARSWLFLRSQEYKKYQTNKTTGNTDKRAFVETWQSFYRKKLKEVWKPAV

SEQ ID NO: 26875 - protein, 978 aa, synthetic construct
  REGION 1..978: note = engineered CasX variant
QEIKRINKIRRRLVKDSNTKKAGKTGPMKTLLVRVMTPDLRERLENLRKKPENIPQPISNTSRANLNKLLTDYTEMKKAILHVYWEEFQKDPVGLMSRVAQPASKKIDQNKLKPEMDEKGNLTTAGFACSQCGQPLFVYKLEQVSEKGKAYTNYFGRCNVAEHEKLILLAQLKPEKDSDEAVTYSLGKFGQRALDFYSIHVTKESTHPVKPLAQIAGNRYASGPVGKALSDACMGTIASFLSKYQDIIIEHQKVVKGNQKRLESLRELAGKENLEYPSVTLPPQPHTKEGVDAYNEVIARVRMWVNLNLWQKLKLSRDDAKPLLRLKGFPSFPLVERQANEVDWWDMVCNVKKLINEKKEDGKVFWQNLAGYKRQEALRPYLSSEEDRKKGKKFARYQLGDLLLHLEKKHGEDWGKVYDEAWERIDKKVEGLSKHIKLEEERRSEDAQSKAALTDWLRAKASFVIEGLKEADKDEFCRCELKLQKWYGDLRGKPFAIEAENSILDISGFSKQYNCAFIWQKDGVKKLNLYLIINYFKGGKLRFKKIKPEAFEANRFYTVINKKSGEIVPMEVNFNFDDPNLIILPLAFGKRQGREFIWNDLLSLETGSLKLANGRVIEKTLYNRRTRQDEPALFVALTFERREVLDSSNIKPMNLIGVDRGENIPAVIALTDPEGCPLSRFFDSLGNPTHILRIGEIYKEKQRTIQAYKEVEQRRAGGYSRKYASKAKNLADDMVRNTARDLLYYAVTQDAMLIFENLSRGFGRQGKRTFMAERQYTRMEDWLTAKLAYEGLPSKTYLSKTLAQYTSKTCSNCGFTITSADYDRVLEKLKKTATGWMTTINGKELKVEGQITYYNRYKRQNVVKDLSVELDRLSEESVNNDISSWTKGRSGEALSLLKKRFSHRPVQEKFVCLNCGFETHADEQAALNIARSWLFLRSQEYKKYQTNKTTGNTDKRAFVETWQSFYRKKLKEVWKPAV

SEQ ID NO: 26876 - protein, 978 aa, synthetic construct
  REGION 1..978: note = engineered CasX variant
QEIKRINKIRRRLVKDSNTKKAGKTGPMKTLLVRVMTPDLRERLENLRKKPENIPQPISNTSRANLNKLLTDYTEMKKAILHVYWEEFQKDPVGLMSRVAQPASKKIDQNKLKPEMDEKGNLTTAGFACSQCGQPLFVYKLEQVSEKGKAYTNYFGRCNVAEHEKLILLAQLKPEKDSDEAVTYSLGKFGQRALDFYSIHVTKESTHPVKPLAQIAGNRYASGPVGKALSDACMGTIASFLSKYQDIIIEHQKVVKGNQKRLESLRELAGKENLEYPSVTLPPQPHTKEGVDAYNEVIARVRMWVNLNLWQKLKLSRDDAKPLLRLKGFPSFPLVERQANEVDWWDMVCNVKKLINEKKEDGKVFWQNLAGYKRQEALRPYLSSEEDRKKGKKFARYQLGDLLLHLEKKHGEDWGKVYDEAWERIDKKVEGLSKHIKLEEERRSEDAQSKAALTDWLRAKASFVIEGLKEADKDEFCRCELKLQKWYGDLRGKPFAIEAENSILDISGFSKQYNCAFIWQKDGVKKLNLYLIINYFKGGKLRFKKIKPEAFEANRFYTVINKKSGEIVPMEVNFNFDDPNLIILPLAFGKRQGREFIWNDLLSLETGSLKLANGRVIEKTLYNRRTRQDEPALFVALTFERREVLDSSNIKPMNLIGVDRGENIPAVIALTDPEGCPLSRFFDSLGNPTHILRIGEIYKEKQRTIQAKKEVEQRRAGGYSRKYASKAKNLADDMVRNTARDLLYYAVTQDAMLIFENLSRGFGRQGKRTFMAERQYTRMEDWLTAKLAYEGLPSKTYLSKTLAQYTSKTCSNCGFTITSADYDRVLEKLKKTATGWMTTINGKELKVEGQITYYNRYKRQNVVKDLSVELDRLSEESVNNDISSWTKGRSGEALSLLKKRFSHRPVQEKFVCLNCGFETHADEQAALNIARSWLFLRSQEYKKYQTNKTTGNTDKRAFVETWQSFYRKKLKEVWKPAV

SEQ ID NO: 26877 - protein, 978 aa, synthetic construct
  REGION 1..978: note = engineered CasX variant
QEIKRINKIRRRLVKDSNTKKAGKTGPMKTLLVRVMTPDLRERLENLRKKPENIPQPISNTSRANLNKLLTDYTEMKKAILHVYWEEFQKDPVGLMSRVAQPASKKIDQNKLKPEMDEKGNLTTAGFACSQCGQPLFVYKLEQVSEKGKAYTNYFGRCNVAEHEKLILLAQLKPEKDSDEAVTYSLGKFGQRALDFYSIHVTKESTHPVKPLAQIAGNRYASGPVGKALSDACMGTIASFLSKYQDIIIEHQKVVKGNQKRLESLRELAGKENLEYPSVTLPPQPHTKEGVDAYNEVIARVRMWVNLNLWQKLKLSRDDAKPLLRLKGFPSFPLVERQANEVDWWDMVCNVKKLINEKKEDGKVFWQNLAGYKRQEALRPYLSSEEDRKKGKKFARYQLGDLLLHLEKKHGEDWGKVYDEAWERIDKKVEGLSKHIKLEEERRSEDAQSKAALTDWLRAKASFVIEGLKEADKDEFCRCELKLQKWYGDLRGKPFAIEAENSILDISGFSKQYNCAFIWQKDGVKKLNLYLIINYFKGGKLRFKKIKPEAFEANRFYTVINKKSGEIVPMEVNFNFDDPNLIILPLAFGKRQGREFIWNDLLSLETGSLKLANGRVIEKTLYNRRTRQDEPALFVALTFERREVLDSSNIKPMNLIGVDRGENIPAVIALTDPEGCPLSRFEDSLGNPTHILRIGESYKEQQRTIQAKKEVEQRRAGGYSRKYASKAKNLADDMVRNTARDLLYYAVTQDAMLIFENLSRGFGRQGKRTFMAERQYTRMEDWLTAKLAYEGLPSKTYLSKTLAQYTSKTCSNCGFTITSADYDRVLEKLKKTATGWMTTINGKELKVEGQITYYNRYKRQNVVKDLSVELDRLSEESVNNDISSWTKGRSGEALSLLKKRFSHRPVQEKFVCLNCGFETHADEQAALNIARSWLFLRSQEYKKYQTNKTTGNTDKRAFVETWQSFYRKKLKEVWKPAV

SEQ ID NO: 26878 - protein, 978 aa, synthetic construct
  REGION 1..978: note = engineered CasX variant
QEIKRINKIRRRLVKDSNTKKAGKTGPMKTLLVRVMTPDLRERLENLRKKPENIPQPISNTSRANLNKLLTDYTEMKKAILHVYWEEFQKDPVGLMSRVAQPASKKIDQNKLKPEMDEKGNLTTAGFACSQCGQPLFVYKLEQVSEKGKAYTNYFGRCNVAEHEKLILLAQLKPEKDSDEAVTYSLGKFGQRALDFYSIHVTKESTHPVKPLAQIAGNRYASGPVGKALSDACMGTIASFLSKYQDIIIEHQKVVKGNQKRLESLRELAGKENLEYPSVTLPPQPHTKEGVDAYNEVIARVRMWVNLNLWQKLKLSRDDAKPLLRLKGFPSFPLVERQANEVDWWDMVCNVKKLINEKKEDGKVFWQNLAGYKRQEALRPYLSSEEDRKKGKKFARYQLGDLLLHLEKKHGEDWGKVYDEAWERIDKKVEGLSKHIKLEEERRSEDAQSKAALTDWLRAKASFVIEGLKEADKDEFCRCELKLQKWYGDLRGKPFAIEAENSILDISGFSKQYNCAFIWQKDGVKKLNLYLIINYFKGGKLRFKKIKPEAFEANRFYTVINKKSGEIVPMEVNFNFDDPNLIILPLAFGKRQGREFIWNDLLSLETGSLKLANGRVIEKTLYNRRTRQDEPALFVALTFERREVLDSSNIKPMNLIGVDRGENIPAVIALTDPEGCPLSRFEDSLGNPTHILRIGESYKEQQRIIQAKKEVEQRRAGGYSRKYASKAKNLADDMVRNTARDLLYYAVTQDAMLIFENLSRGFGRQGKRTFMAERQYTRMEDWLTAKLAYEGLPSKTYLSKTLAQYTSKTCSNCGFTITSADYDRVLEKLKKTATGWMTTINGKELKVEGQITYYNRYKRQNVVKDLSVELDRLSEESVNNDISSWTKGRSGEALSLLKKRFSHRPVQEKFVCLNCGFETHADEQAALNIARSWLFLRSQEYKKYQTNKTTGNTDKRAFVETWQSFYRKKLKEVWKPAV

SEQ ID NO: 26879 - protein, 978 aa, synthetic construct
  REGION 1..978: note = engineered CasX variant
QEIKRINKIRRRLVKDSNTKKAGKTGPMKTLLVRVMTPDLRERLENLRKKPENIPQPISNTSRANLNKLLTDYTEMKKAILHVYWEEFQKDPVGLMSRVAQPASKKIDQNKLKPEMDEKGNLTTAGFACSQCGQPLFVYKLEQVSEKGKAYTNYFGRCNVAEHEKLILLAQLKPEKDSDEAVTYSLGKFGQRALDFYSIHVTKESTHPVKPLAQIAGNRYASGPVGKALSDACMGTIASFLSKYQDIIIEHQKVVKGNQKRLESLRELAGKENLEYPSVTLPPQPHTKEGVDAYNEVIARVRMWVNLNLWQKLKLSRDDAKPLLRLKGFPSFPLVERQANEVDWWDMVCNVKKLINEKKEDGKVFWQNLAGYKRQEALRPYLSSEEDRKKGKKFARYQLGDLLLHLEKKHGEDWGKVYDEAWERIDKKVEGLSKHIKLEEERRSEDAQSKAALTDWLRAKASFVIEGLKEADKDEFCRCELKLQKWYGDLRGKPFAIEAENSILDISGFSKQYNCAFIWQKDGVKKLNLYLIINYFKGGKLRFKKIKPEAFEANRFYTVINKKSGEIVPMEVNFNFDDPNLIILPLAFGKRQGREFIWNDLLSLETGSLKLANGRVIEKTLYNRRTRQDEPALFVALTFERREVLDSSNIKPMNLIGVDRGENIPAVIALTDPEGCPLSRFEDSLGNPTHILRIGESYKEKQRTIQAKKSVEQRRAGGYSRKYASKAKNLADDMVRNTARDLLYYAVTQDAMLIFENLSRGFGRQGKRTFMAERQYTRMEDWLTAKLAYEGLPSKTYLSKTLAQYTSKTCSNCGFTITSADYDRVLEKLKKTATGWMTTINGKELKVEGQITYYNRYKRQNVVKDLSVELDRLSEESVNNDISSWTKGRSGEALSLLKKRFSHRPVQEKFVCLNCGFETHADEQAALNIARSWLFLRSQEYKKYQTNKTTGNTDKRAFVETWQSFYRKKLKEVWKPAV

SEQ ID NO: 26880 - protein, 978 aa, synthetic construct
  REGION 1..978: note = engineered CasX variant
QEIKRINKIRRRLVKDSNTKKAGKTGPMKTLLVRVMTPDLRERLENLRKKPENIPQPISNTSRANLNKLLTDYTEMKKAILHVYWEEFQKDPVGLMSRVAQPASKKIDQNKLKPEMDEKGNLTTAGFACSQCGQPLFVYKLEQVSEKGKAYTNYFGRCNVAEHEKLILLAQLKPEKDSDEAVTYSLGKFGQRALDFYSIHVTKESTHPVKPLAQIAGNRYASGPVGKALSDACMGTIASFLSKYQDIIIEHQKVVKGNQKRLESLRELAGKENLEYPSVTLPPQPHTKEGVDAYNEVIARVRMWVNLNLWQKLKLSRDDAKPLLRLKGFPSFPLVERQANEVDWWDMVCNVKKLINEKKEDGKVFWQNLAGYKRQEALRPYLSSEEDRKKGKKFARYQLGDLLLHLEKKHGEDWGKVYDEAWERIDKKVEGLSKHIKLEEERRSEDAQSKAALTDWLRAKASFVIEGLKEADKDEFCRCELKLQKWYGDLRGKPFAIEAENSILDISGFSKQYNCAFIWQKDGVKKLNLYLIINYFKGGKLRFKKIKPEAFEANRFYTVINKKSGEIVPMEVNFNFDDPNLIILPLAFGKRQGREFIWNDLLSLETGSLKLANGRVIEKTLYNRRTRQDEPALFVALTFERREVLDSSNIKPMNLIGVDRGENIPAVIALTDPEGCPLSRFEDSLGNPTHILRIGESYKEKQRTIQAKKEVEQRRAGGYSRKYASKAKNLADDMVRNTARDLLYYAVTQDAMLIFENLSRGFGRQGKRTFMAERQYTRMEDWLTAKLAYEGLPSKTYLSKTLAQYTSKTCSNCGFTITSADYDRVLEKLKKTATGWMTTINGKELKVEGQITYYNRYKRQNVVKDLSVELDRLSEESVNNDISSWTKGRSGEALSLLKKRFSHRPVQEKFVCLNCGFETHADEQAALNIARSWLFLRSQEYKKYQTNKTTGNTDKRAFVETWQSFYRKKLKEVWKPAV
